United States Patent Application Publication US 2004/0241651 A1 - sequence listing, part 8

SEQ ID NO: 206324 - DNA, 13 bp, Artificial Sequence
  Oligonucleotide for detection of SNP TSC0050524
caaaccgatacaa

SEQ ID NO: 206325 - DNA, 13 bp, Artificial Sequence
  Oligonucleotide for detection of SNP TSC0050524
ttgtattggttcg

SEQ ID NO: 206326 - DNA, 13 bp, Artificial Sequence
  Oligonucleotide for detection of SNP TSC0050524
cgaaccaatacaa

SEQ ID NO: 206327 - DNA, 13 bp, Artificial Sequence
  Oligonucleotide for detection of SNP TSC0050524
tcgtattggttcg

SEQ ID NO: 206328 - DNA, 13 bp, Artificial Sequence
  Oligonucleotide for detection of SNP TSC0050524
cgaaccaatacga

SEQ ID NO: 206329 - DNA, 13 bp, Artificial Sequence
  Oligonucleotide for detection of SNP TSC0050524
tcgtatcggtttg

SEQ ID NO: 206330 - DNA, 13 bp, Artificial Sequence
  Oligonucleotide for detection of SNP TSC0050524
caaaccgatacga

SEQ ID NO: 206331 - DNA, 13 bp, Artificial Sequence
  Oligonucleotide for detection of SNP TSC0050524
ttgtatcggttcg

SEQ ID NO: 206332 - DNA, 13 bp, Artificial Sequence
  Oligonucleotide for detection of SNP TSC0050524
cgaaccgatacaa

SEQ ID NO: 206333 - DNA, 13 bp, Artificial Sequence
  Oligonucleotide for detection of SNP TSC0050524
tcgtatcggttcg

SEQ ID NO: 206334 - DNA, 13 bp, Artificial Sequence
  Oligonucleotide for detection of SNP TSC0050524
cgaaccgatacga

SEQ ID NO: 206335 - DNA, 13 bp, Artificial Sequence
  Oligonucleotide for detection of SNP TSC0050524
tgagttggtatga

SEQ ID NO: 206336 - DNA, 13 bp, Artificial Sequence
  Oligonucleotide for detection of SNP TSC0050524
tcataccaactca

SEQ ID NO: 206337 - DNA, 13 bp, Artificial Sequence
  Oligonucleotide for detection of SNP TSC0050524
tgagttagtatga

SEQ ID NO: 206338 - DNA, 13 bp, Artificial Sequence
  Oligonucleotide for detection of SNP TSC0050524
tcatactaactca

SEQ ID NO: 206339 - DNA, 13 bp, Artificial Sequence
  Oligonucleotide for detection of SNP TSC0050524
cgagttggtatga

SEQ ID NO: 206340 - DNA, 13 bp, Artificial Sequence
  Oligonucleotide for detection of SNP TSC0050524
tcataccaactcg

SEQ ID NO: 206341 - DNA, 13 bp, Artificial Sequence
  Oligonucleotide for detection of SNP TSC0050524
cgagttagtatga

SEQ ID NO: 206342 - DNA, 13 bp, Artificial Sequence
  Oligonucleotide for detection of SNP TSC0050524
tcatactaactcg

SEQ ID NO: 206343 - DNA, 13 bp, Artificial Sequence
  Oligonucleotide for detection of SNP TSC0050524
tgagtcggtatga

SEQ ID NO: 206344 - DNA, 13 bp, Artificial Sequence
  Oligonucleotide for detection of SNP TSC0050524
tcataccgactca

SEQ ID NO: 206345 - DNA, 13 bp, Artificial Sequence
  Oligonucleotide for detection of SNP TSC0050524
tgagttagtacga

SEQ ID NO: 206346 - DNA, 13 bp, Artificial Sequence
  Oligonucleotide for detection of SNP TSC0050524
tcgtactaactca

SEQ ID NO: 206347 - DNA, 13 bp, Artificial Sequence
  Oligonucleotide for detection of SNP TSC0050524
tgagttggtacga

SEQ ID NO: 206348 - DNA, 13 bp, Artificial Sequence
  Oligonucleotide for detection of SNP TSC0050524
tcgtaccaactca

SEQ ID NO: 206349 - DNA, 13 bp, Artificial Sequence
  Oligonucleotide for detection of SNP TSC0050524
cgagttagtacga

SEQ ID NO: 206350 - DNA, 13 bp, Artificial Sequence
  Oligonucleotide for detection of SNP TSC0050524
tcgtactaactcg

SEQ ID NO: 206351 - DNA, 13 bp, Artificial Sequence
  Oligonucleotide for detection of SNP TSC0050524
cgagtcggtatga

SEQ ID NO: 206352 - DNA, 13 bp, Artificial Sequence
  Oligonucleotide for detection of SNP TSC0050524
tcataccgactcg

SEQ ID NO: 206353 - DNA, 13 bp, Artificial Sequence
  Oligonucleotide for detection of SNP TSC0050524
cgagttggtacga

SEQ ID NO: 206354 - DNA, 13 bp, Artificial Sequence
  Oligonucleotide for detection of SNP TSC0050524
tcgtaccaactcg

SEQ ID NO: 206355 - DNA, 13 bp, Artificial Sequence
  Oligonucleotide for detection of SNP TSC0050524
tgagtcggtacga

SEQ ID NO: 206356 - DNA, 13 bp, Artificial Sequence
  Oligonucleotide for detection of SNP TSC0050524
tcgtaccgactca

SEQ ID NO: 206357 - DNA, 13 bp, Artificial Sequence
  Oligonucleotide for detection of SNP TSC0050524
cgagtcggtacga

SEQ ID NO: 206358 - DNA, 13 bp, Artificial Sequence
  Oligonucleotide for detection of SNP TSC0050524
tcgtaccgactcg

SEQ ID NO: 206359 - DNA, 13 bp, Artificial Sequence
  Oligonucleotide for detection of SNP TSC0050525
tttgttgtgtggy

SEQ ID NO: 206360 - DNA, 13 bp, Artificial Sequence
  Oligonucleotide for detection of SNP TSC0050525
rccacacaacaaa

SEQ ID NO: 206361 - DNA, 13 bp, Artificial Sequence
  Oligonucleotide for detection of SNP TSC0050525
tttgttatgtggy

SEQ ID NO: 206362 - DNA, 13 bp, Artificial Sequence
  Oligonucleotide for detection of SNP TSC0050525
rccacataacaaa

SEQ ID NO: 206363 - DNA, 13 bp, Artificial Sequence
  Oligonucleotide for detection of SNP TSC0000284
gtgggtatttata

SEQ ID NO: 206364 - DNA, 13 bp, Artificial Sequence
  Oligonucleotide for detection of SNP TSC0000284
tataaatacccac

SEQ ID NO: 206365 - DNA, 13 bp, Artificial Sequence
  Oligonucleotide for detection of SNP TSC0000284
gtgggtgtttata

SEQ ID NO: 206366 - DNA, 13 bp, Artificial Sequence
  Oligonucleotide for detection of SNP TSC0000284
tataaacacccac

SEQ ID NO: 206367 - DNA, 13 bp, Artificial Sequence
  Oligonucleotide for detection of SNP TSC0000284
gtgggcgtttata

SEQ ID NO: 206368 - DNA, 13 bp, Artificial Sequence
  Oligonucleotide for detection of SNP TSC0000284
tataaacgcccac

SEQ ID NO: 206369 - DNA, 13 bp, Artificial Sequence
  Oligonucleotide for detection of SNP TSC0000284
tgtaggtgtttay

SEQ ID NO: 206370 - DNA, 13 bp, Artificial Sequence
  Oligonucleotide for detection of SNP TSC0000284
rtaaacacctaca

SEQ ID NO: 206371 - DNA, 13 bp, Artificial Sequence
  Oligonucleotide for detection of SNP TSC0000284
tgtaggcgtttay

SEQ ID NO: 206372 - DNA, 13 bp, Artificial Sequence
  Oligonucleotide for detection of SNP TSC0000284
rtaaacgcctaca

SEQ ID NO: 206373 - DNA, 13 bp, Artificial Sequence
  Oligonucleotide for detection of SNP TSC0050529
atggttaaatttt

SEQ ID NO: 206374 - DNA, 13 bp, Artificial Sequence
  Oligonucleotide for detection of SNP TSC0050529
aaaatttaaccat

SEQ ID NO: 206375 - DNA, 13 bp, Artificial Sequence
  Oligonucleotide for detection of SNP TSC0050529
atggttgaatttt

SEQ ID NO: 206376 - DNA, 13 bp, Artificial Sequence
  Oligonucleotide for detection of SNP TSC0050529
aaaattcaaccat

SEQ ID NO: 206377 - DNA, 13 bp, Artificial Sequence
  Oligonucleotide for detection of SNP TSC0050529
atggtcgaatttt

SEQ ID NO: 206378 - DNA, 13 bp, Artificial Sequence
  Oligonucleotide for detection of SNP TSC0050529
aaaattcgaccat

SEQ ID NO: 206379 - DNA, 13 bp, Artificial Sequence
  Oligonucleotide for detection of SNP TSC0050529
aaggtttggttat

SEQ ID NO: 206380 - DNA, 13 bp, Artificial Sequence
  Oligonucleotide for detection of SNP TSC0050529
ataaccaaacctt

SEQ ID NO: 206381 - DNA, 13 bp, Artificial Sequence
  Oligonucleotide for detection of SNP TSC0050529
aaggttcggttat

SEQ ID NO: 206382 - DNA, 13 bp, Artificial Sequence
  Oligonucleotide for detection of SNP TSC0050529
ataaccgaacctt

SEQ ID NO: 206383 - DNA, 13 bp, Artificial Sequence
  Oligonucleotide for detection of SNP TSC0050530
tttttagagagag

SEQ ID NO: 206384 - DNA, 13 bp, Artificial Sequence
  Oligonucleotide for detection of SNP TSC0050530
ctctctctaaaaa

SEQ ID NO: 206385 - DNA, 13 bp, Artificial Sequence
  Oligonucleotide for detection of SNP TSC0050530
tttttaaagagag

SEQ ID NO: 206386 - DNA, 13 bp, Artificial Sequence
  Oligonucleotide for detection of SNP TSC0050530
ctctctttaaaaa

SEQ ID NO: 206387 - DNA, 13 bp, Artificial Sequence
  Oligonucleotide for detection of SNP TSC0050531
tgtattatatata

SEQ ID NO: 206388 - DNA, 13 bp, Artificial Sequence
  Oligonucleotide for detection of SNP TSC0050531
tatatataataca

SEQ ID NO: 206389 - DNA, 13 bp, Artificial Sequence
  Oligonucleotide for detection of SNP TSC0050531
tgtattgtatata

SEQ ID NO: 206390 - DNA, 13 bp, Artificial Sequence
  Oligonucleotide for detection of SNP TSC0050531
tatatacaataca

SEQ ID NO: 206391 - DNA, 13 bp, Artificial Sequence
  Oligonucleotide for detection of SNP TSC0050531
cgtattatatata

SEQ ID NO: 206392 - DNA, 13 bp, Artificial Sequence
  Oligonucleotide for detection of SNP TSC0050531
tatatataatacg

SEQ ID NO: 206393 - DNA, 13 bp, Artificial Sequence
  Oligonucleotide for detection of SNP TSC0050531
cgtattgtatata

SEQ ID NO: 206394 - DNA, 13 bp, Artificial Sequence
  Oligonucleotide for detection of SNP TSC0050531
tatatacaatacg

SEQ ID NO: 206395 - DNA, 13 bp, Artificial Sequence
  Oligonucleotide for detection of SNP TSC0050531
tgtatcgtatata

SEQ ID NO: 206396 - DNA, 13 bp, Artificial Sequence
  Oligonucleotide for detection of SNP TSC0050531
tatatacgataca

SEQ ID NO: 206397 - DNA, 13 bp, Artificial Sequence
  Oligonucleotide for detection of SNP TSC0050531
cgtatcgtatata

SEQ ID NO: 206398 - DNA, 13 bp, Artificial Sequence
  Oligonucleotide for detection of SNP TSC0050531
tatatacgatacg

SEQ ID NO: 206399 - DNA, 13 bp, Artificial Sequence
  Oligonucleotide for detection of SNP TSC0050531
tatgtgtgatgtg

SEQ ID NO: 206400 - DNA, 13 bp, Artificial Sequence
  Oligonucleotide for detection of SNP TSC0050531
cacatcacacata

SEQ ID NO: 206401 - DNA, 13 bp, Artificial Sequence
  Oligonucleotide for detection of SNP TSC0050531
tatgtgtgatgcg

SEQ ID NO: 206402 - DNA, 13 bp, Artificial Sequence
  Oligonucleotide for detection of SNP TSC0050531
cgcatcacacata

SEQ ID NO: 206403 - DNA, 13 bp, Artificial Sequence
  Oligonucleotide for detection of SNP TSC0050531
tatgtgcgatgtg

SEQ ID NO: 206404 - DNA, 13 bp, Artificial Sequence
  Oligonucleotide for detection of SNP TSC0050531
cacatcgcacata

SEQ ID NO: 206405 - DNA, 13 bp, Artificial Sequence
  Oligonucleotide for detection of SNP TSC0050531
tatgtgcgatgcg

SEQ ID NO: 206406 - DNA, 13 bp, Artificial Sequence
  Oligonucleotide for detection of SNP TSC0050531
cgcatcgcacata

SEQ ID NO: 206407 - DNA, 13 bp, Artificial Sequence
  Oligonucleotide for detection of SNP TSC0050534
gatttaattgttt

SEQ ID NO: 206408 - DNA, 13 bp, Artificial Sequence
  Oligonucleotide for detection of SNP TSC0050534
aaacaattaaatc

SEQ ID NO: 206409 - DNA, 13 bp, Artificial Sequence
  Oligonucleotide for detection of SNP TSC0050534
gatttagttgttt

SEQ ID NO: 206410 - DNA, 13 bp, Artificial Sequence
  Oligonucleotide for detection of SNP TSC0050534
aaacaactaaatc

SEQ ID NO: 206411 - DNA, 13 bp, Artificial Sequence
  Oligonucleotide for detection of SNP TSC0050535
tattttataagtg

SEQ ID NO: 206412 - DNA, 13 bp, Artificial Sequence
  Oligonucleotide for detection of SNP TSC0050535
cacttataaaata

SEQ ID NO: 206413 - DNA, 13 bp, Artificial Sequence
  Oligonucleotide for detection of SNP TSC0050535
tattttgtaagtg

SEQ ID NO: 206414 - DNA, 13 bp, Artificial Sequence
  Oligonucleotide for detection of SNP TSC0050535
cacttacaaaata

SEQ ID NO: 206415 - DNA, 13 bp, Artificial Sequence
  Oligonucleotide for detection of SNP TSC0000667
gattataaatata

SEQ ID NO: 206416 - DNA, 13 bp, Artificial Sequence
  Oligonucleotide for detection of SNP TSC0000667
tatatttataatc

SEQ ID NO: 206417 - DNA, 13 bp, Artificial Sequence
  Oligonucleotide for detection of SNP TSC0000667
gattatgaatata

SEQ ID NO: 206418 - DNA, 13 bp, Artificial Sequence
  Oligonucleotide for detection of SNP TSC0000667
tatattcataatc

SEQ ID NO: 206419 - DNA, 13 bp, Artificial Sequence
  Oligonucleotide for detection of SNP TSC0000667
gattacgaatata

SEQ ID NO: 206420 - DNA, 13 bp, Artificial Sequence
  Oligonucleotide for detection of SNP TSC0000667
tatattcgtaatc

SEQ ID NO: 206421 - DNA, 13 bp, Artificial Sequence
  Oligonucleotide for detection of SNP TSC0000667
tgtatttgtgaty

SEQ ID NO: 206422 - DNA, 13 bp, Artificial Sequence
  Oligonucleotide for detection of SNP TSC0000667
ratcacaaataca

SEQ ID NO: 206423 - DNA, 13 bp, Artificial Sequence
  Oligonucleotide for detection of SNP TSC0000667
tgtattcgtgaty

SEQ ID NO: 206424 - DNA, 13 bp, Artificial Sequence
  Oligonucleotide for detection of SNP TSC0000667
ratcacgaataca

SEQ ID NO: 206425 - DNA, 13 bp, Artificial Sequence
  Oligonucleotide for detection of SNP TSC0009772
tattttagttgta

SEQ ID NO: 206426 - DNA, 13 bp, Artificial Sequence
  Oligonucleotide for detection of SNP TSC0009772
tacaactaaaata

SEQ ID NO: 206427 - DNA, 13 bp, Artificial Sequence
  Oligonucleotide for detection of SNP TSC0009772
tatttttgttgta

SEQ ID NO: 206428 - DNA, 13 bp, Artificial Sequence
  Oligonucleotide for detection of SNP TSC0009772
tacaacaaaaata

SEQ ID NO: 206429 - DNA, 13 bp, Artificial Sequence
  Oligonucleotide for detection of SNP TSC0009772
tattttcgttgta

SEQ ID NO: 206430 - DNA, 13 bp, Artificial Sequence
  Oligonucleotide for detection of SNP TSC0009772
tacaacgaaaata

SEQ ID NO: 206431 - DNA, 13 bp, Artificial Sequence
  Oligonucleotide for detection of SNP TSC0009772
tgtagttggggtg

SEQ ID NO: 206432 - DNA, 13 bp, Artificial Sequence
  Oligonucleotide for detection of SNP TSC0009772
caccccaactaca

SEQ ID NO: 206433 - DNA, 13 bp, Artificial Sequence
  Oligonucleotide for detection of SNP TSC0009772
tgtagtgggggtg

SEQ ID NO: 206434 - DNA, 13 bp, Artificial Sequence
  Oligonucleotide for detection of SNP TSC0009772
cacccccactaca

SEQ ID NO: 206435 - DNA, 13 bp, Artificial Sequence
  Oligonucleotide for detection of SNP TSC0009772
tgtagcgggggtg

SEQ ID NO: 206436 - DNA, 13 bp, Artificial Sequence
  Oligonucleotide for detection of SNP TSC0009772
cacccccgctaca

SEQ ID NO: 206437 - DNA, 13 bp, Artificial Sequence
  Oligonucleotide for detection of SNP TSC0000107
gaagaggtataga

SEQ ID NO: 206438 - DNA, 13 bp, Artificial Sequence
  Oligonucleotide for detection of SNP TSC0000107
tctatacctcttc

SEQ ID NO: 206439 - DNA, 13 bp, Artificial Sequence
  Oligonucleotide for detection of SNP TSC0000107
gaagagatataga

SEQ ID NO: 206440 - DNA, 13 bp, Artificial Sequence
  Oligonucleotide for detection of SNP TSC0000107
tctatatctcttc

SEQ ID NO: 206441 - DNA, 13 bp, Artificial Sequence
  Oligonucleotide for detection of SNP TSC0000108
ttttgtgtaatay

SEQ ID NO: 206442 - DNA, 13 bp, Artificial Sequence
  Oligonucleotide for detection of SNP TSC0000108
rtattacacaaaa

SEQ ID NO: 206443 - DNA, 13 bp, Artificial Sequence
  Oligonucleotide for detection of SNP TSC0000108
ttttgtataatay

SEQ ID NO: 206444 - DNA, 13 bp, Artificial Sequence
  Oligonucleotide for detection of SNP TSC0000108
rtattatacaaaa

SEQ ID NO: 206445 - DNA, 13 bp, Artificial Sequence
  Oligonucleotide for detection of SNP TSC0050537
tagttaaaaaaga

SEQ ID NO: 206446 - DNA, 13 bp, Artificial Sequence
  Oligonucleotide for detection of SNP TSC0050537
tcttttttaacta

SEQ ID NO: 206447 - DNA, 13 bp, Artificial Sequence
  Oligonucleotide for detection of SNP TSC0050537
tagttataaaaga

SEQ ID NO: 206448 - DNA, 13 bp, Artificial Sequence
  Oligonucleotide for detection of SNP TSC0050537
tcttttataacta

SEQ ID NO: 206449 - DNA, 13 bp, Artificial Sequence
  Oligonucleotide for detection of SNP TSC0050540
ttgtatatattag

SEQ ID NO: 206450 - DNA, 13 bp, Artificial Sequence
  Oligonucleotide for detection of SNP TSC0050540
ctaatatatacaa

SEQ ID NO: 206451 - DNA, 13 bp, Artificial Sequence
  Oligonucleotide for detection of SNP TSC0050540
ttgtatgtattag

SEQ ID NO: 206452 - DNA, 13 bp, Artificial Sequence
  Oligonucleotide for detection of SNP TSC0050540
ctaatacatacaa

SEQ ID NO: 206453 - DNA, 13 bp, Artificial Sequence
  Oligonucleotide for detection of SNP TSC0000682
ttttgtatgaaay

SEQ ID NO: 206454 - DNA, 13 bp, Artificial Sequence
  Oligonucleotide for detection of SNP TSC0000682
rtttcatacaaaa

SEQ ID NO: 206455 - DNA, 13 bp, Artificial Sequence
  Oligonucleotide for detection of SNP TSC0000682
ttttgtttgaaay

SEQ ID NO: 206456 - DNA, 13 bp, Artificial Sequence
  Oligonucleotide for detection of SNP TSC0000682
rtttcaaacaaaa

SEQ ID NO: 206457 - DNA, 13 bp, Artificial Sequence
  Oligonucleotide for detection of SNP TSC0000683
tttaattaatagt

SEQ ID NO: 206458 - DNA, 13 bp, Artificial Sequence
  Oligonucleotide for detection of SNP TSC0000683
actattaattaaa

SEQ ID NO: 206459 - DNA, 13 bp, Artificial Sequence
  Oligonucleotide for detection of SNP TSC0000683
tttaatgaatagt

SEQ ID NO: 206460 - DNA, 13 bp, Artificial Sequence
  Oligonucleotide for detection of SNP TSC0000683
actattcattaaa

SEQ ID NO: 206461 - DNA, 13 bp, Artificial Sequence
  Oligonucleotide for detection of SNP TSC0000683
attgttgattaaa

SEQ ID NO: 206462 - DNA, 13 bp, Artificial Sequence
  Oligonucleotide for detection of SNP TSC0000683
tttaatcaacaat

SEQ ID NO: 206463 - DNA, 13 bp, Artificial Sequence
  Oligonucleotide for detection of SNP TSC0000683
attgtttattaaa

SEQ ID NO: 206464 - DNA, 13 bp, Artificial Sequence
  Oligonucleotide for detection of SNP TSC0000683
tttaataaacaat

SEQ ID NO: 206465 - DNA, 13 bp, Artificial Sequence
  Oligonucleotide for detection of SNP TSC0000684
tagtttgaattaa

SEQ ID NO: 206466 - DNA, 13 bp, Artificial Sequence
  Oligonucleotide for detection of SNP TSC0000684
ttaattcaaacta

SEQ ID NO: 206467 - DNA, 13 bp, Artificial Sequence
  Oligonucleotide for detection of SNP TSC0000684
tagtttaaattaa

SEQ ID NO: 206468 - DNA, 13 bp, Artificial Sequence
  Oligonucleotide for detection of SNP TSC0000684
ttaatttaaacta

SEQ ID NO: 206469 - DNA, 13 bp, Artificial Sequence
  Oligonucleotide for detection of SNP TSC0000685
aaaatatttttty

SEQ ID NO: 206470 - DNA, 13 bp, Artificial Sequence
  Oligonucleotide for detection of SNP TSC0000685
raaaaaatatttt

SEQ ID NO: 206471 - DNA, 13 bp, Artificial Sequence
  Oligonucleotide for detection of SNP TSC0000685
aaaatagttttty

SEQ ID NO: 206472 - DNA, 13 bp, Artificial Sequence
  Oligonucleotide for detection of SNP TSC0000685
raaaaactatttt

SEQ ID NO: 206473 - DNA, 13 bp, Artificial Sequence
  Oligonucleotide for detection of SNP TSC0000685
gaaaagatgtttt

SEQ ID NO: 206474 - DNA, 13 bp, Artificial Sequence
  Oligonucleotide for detection of SNP TSC0000685
aaaacatcttttc

SEQ ID NO: 206475 - DNA, 13 bp, Artificial Sequence
  Oligonucleotide for detection of SNP TSC0000685
gaaaagttgtttt

SEQ ID NO: 206476 - DNA, 13 bp, Artificial Sequence
  Oligonucleotide for detection of SNP TSC0000685
aaaacaacttttc

SEQ ID NO: 206477 - DNA, 13 bp, Artificial Sequence
  Oligonucleotide for detection of SNP TSC0050541
gttttttttaatt

SEQ ID NO: 206478 - DNA, 13 bp, Artificial Sequence
  Oligonucleotide for detection of SNP TSC0050541
aattaaaaaaaac

SEQ ID NO: 206479 - DNA, 13 bp, Artificial Sequence
  Oligonucleotide for detection of SNP TSC0050541
gtttttgttaatt

SEQ ID NO: 206480 - DNA, 13 bp, Artificial Sequence
  Oligonucleotide for detection of SNP TSC0050541
aattaacaaaaac

SEQ ID NO: 206481 - DNA, 13 bp, Artificial Sequence
  Oligonucleotide for detection of SNP TSC0050541
gttttcgttaatt

SEQ ID NO: 206482 - DNA, 13 bp, Artificial Sequence
  Oligonucleotide for detection of SNP TSC0050541
aattaacgaaaac

SEQ ID NO: 206483 - DNA, 13 bp, Artificial Sequence
  Oligonucleotide for detection of SNP TSC0050541
agttgagggaaay

SEQ ID NO: 206484 - DNA, 13 bp, Artificial Sequence
  Oligonucleotide for detection of SNP TSC0050541
rtttccctcaact

SEQ ID NO: 206485 - DNA, 13 bp, Artificial Sequence
  Oligonucleotide for detection of SNP TSC0050541
agttgatggaaay

SEQ ID NO: 206486 - DNA, 13 bp, Artificial Sequence
  Oligonucleotide for detection of SNP TSC0050541
rtttccatcaact

SEQ ID NO: 206487 - DNA, 13 bp, Artificial Sequence
  Oligonucleotide for detection of SNP TSC0050541
agttgacggaaay

SEQ ID NO: 206488 - DNA, 13 bp, Artificial Sequence
  Oligonucleotide for detection of SNP TSC0050541
rtttccgtcaact

SEQ ID NO: 206489 - DNA, 13 bp, Artificial Sequence
  Oligonucleotide for detection of SNP TSC0050542
gaagatatatatt

SEQ ID NO: 206490 - DNA, 13 bp, Artificial Sequence
  Oligonucleotide for detection of SNP TSC0050542
aatatatatcttc

SEQ ID NO: 206491 - DNA, 13 bp, Artificial Sequence
  Oligonucleotide for detection of SNP TSC0050542
gaagatttatatt

SEQ ID NO: 206492 - DNA, 13 bp, Artificial Sequence
  Oligonucleotide for detection of SNP TSC0050542
aatataaatcttc

SEQ ID NO: 206493 - DNA, 13 bp, Artificial Sequence
  Oligonucleotide for detection of SNP TSC0050542
aatgtaggtttty

SEQ ID NO: 206494 - DNA, 13 bp, Artificial Sequence
  Oligonucleotide for detection of SNP TSC0050542
raaaacctacatt

SEQ ID NO: 206495 - DNA, 13 bp, Artificial Sequence
  Oligonucleotide for detection of SNP TSC0050543
gtgttgtttttag

SEQ ID NO: 206496 - DNA, 13 bp, Artificial Sequence
  Oligonucleotide for detection of SNP TSC0050543
ctaaaaacaacac

SEQ ID NO: 206497 - DNA, 13 bp, Artificial Sequence
  Oligonucleotide for detection of SNP TSC0050543
gtgttggttttag

SEQ ID NO: 206498 - DNA, 13 bp, Artificial Sequence
  Oligonucleotide for detection of SNP TSC0050543
ctaaaaccaacac

SEQ ID NO: 206499 - DNA, 13 bp, Artificial Sequence
  Oligonucleotide for detection of SNP TSC0050543
ttgaaaataatay

SEQ ID NO: 206500 - DNA, 13 bp, Artificial Sequence
  Oligonucleotide for detection of SNP TSC0050543
rtattattttcaa

SEQ ID NO: 206501 - DNA, 13 bp, Artificial Sequence
  Oligonucleotide for detection of SNP TSC0050543
ttgaaattaatay

SEQ ID NO: 206502 - DNA, 13 bp, Artificial Sequence
  Oligonucleotide for detection of SNP TSC0050543
rtattaatttcaa

SEQ ID NO: 206503 - DNA, 13 bp, Artificial Sequence
  Oligonucleotide for detection of SNP TSC0050545
gagatagtgtgtt

SEQ ID NO: 206504 - DNA, 13 bp, Artificial Sequence
  Oligonucleotide for detection of SNP TSC0050545
aacacactatctc

SEQ ID NO: 206505 - DNA, 13 bp, Artificial Sequence
  Oligonucleotide for detection of SNP TSC0050545
gagataatgtgtt

SEQ ID NO: 206506 - DNA, 13 bp, Artificial Sequence
  Oligonucleotide for detection of SNP TSC0050545
aacacattatctc

SEQ ID NO: 206507 - DNA, 13 bp, Artificial Sequence
  Oligonucleotide for detection of SNP TSC0050546
ggaggatagggga

SEQ ID NO: 206508 - DNA, 13 bp, Artificial Sequence
  Oligonucleotide for detection of SNP TSC0050546
tcccctatcctcc

SEQ ID NO: 206509 - DNA, 13 bp, Artificial Sequence
  Oligonucleotide for detection of SNP TSC0050546
ggaggagagggga

SEQ ID NO: 206510 - DNA, 13 bp, Artificial Sequence
  Oligonucleotide for detection of SNP TSC0050546
tcccctctcctcc

SEQ ID NO: 206511 - DNA, 13 bp, Artificial Sequence
  Oligonucleotide for detection of SNP TSC0050547
atggttaaggtta

SEQ ID NO: 206512 - DNA, 13 bp, Artificial Sequence
  Oligonucleotide for detection of SNP TSC0050547
taaccttaaccat

SEQ ID NO: 206513 - DNA, 13 bp, Artificial Sequence
  Oligonucleotide for detection of SNP TSC0050547
atggtttaggtta

SEQ ID NO: 206514 - DNA, 13 bp, Artificial Sequence
  Oligonucleotide for detection of SNP TSC0050547
taacctaaaccat

SEQ ID NO: 206515 - DNA, 13 bp, Artificial Sequence
  Oligonucleotide for detection of SNP TSC0050547
tagttttggttat

SEQ ID NO: 206516 - DNA, 13 bp, Artificial Sequence
  Oligonucleotide for detection of SNP TSC0050547
ataaccaaaacta

SEQ ID NO: 206517 - DNA, 13 bp, Artificial Sequence
  Oligonucleotide for detection of SNP TSC0050547
tagtttgggttat

SEQ ID NO: 206518 - DNA, 13 bp, Artificial Sequence
  Oligonucleotide for detection of SNP TSC0050547
ataacccaaacta

SEQ ID NO: 206519 - DNA, 13 bp, Artificial Sequence
  Oligonucleotide for detection of SNP TSC0050548
gaagagtttggga

SEQ ID NO: 206520 - DNA, 13 bp, Artificial Sequence
  Oligonucleotide for detection of SNP TSC0050548
tcccaaactcttc

SEQ ID NO: 206521 - DNA, 13 bp, Artificial Sequence
  Oligonucleotide for detection of SNP TSC0050548
gaagagattggga

SEQ ID NO: 206522 - DNA, 13 bp, Artificial Sequence
  Oligonucleotide for detection of SNP TSC0050548
tcccaatctcttc

SEQ ID NO: 206523 - DNA, 13 bp, Artificial Sequence
  Oligonucleotide for detection of SNP TSC0050549
ttggtgtgggttg

SEQ ID NO: 206524 - DNA, 13 bp, Artificial Sequence
  Oligonucleotide for detection of SNP TSC0050549
caacccacaccaa

SEQ ID NO: 206525 - DNA, 13 bp, Artificial Sequence
  Oligonucleotide for detection of SNP TSC0050549
ttggtgggggttg

SEQ ID NO: 206526 - DNA, 13 bp, Artificial Sequence
  Oligonucleotide for detection of SNP TSC0050549
caacccccaccaa

SEQ ID NO: 206527 - DNA, 13 bp, Artificial Sequence
  Oligonucleotide for detection of SNP TSC0050549
ttggtgcgggttg

SEQ ID NO: 206528 - DNA, 13 bp, Artificial Sequence
  Oligonucleotide for detection of SNP TSC0050549
caacccgcaccaa

SEQ ID NO: 206529 - DNA, 13 bp, Artificial Sequence
  Oligonucleotide for detection of SNP TSC0050549
taatttgtattaa

SEQ ID NO: 206530 - DNA, 13 bp, Artificial Sequence
  Oligonucleotide for detection of SNP TSC0050549
ttaatacaaatta

SEQ ID NO: 206531 - DNA, 13 bp, Artificial Sequence
  Oligonucleotide for detection of SNP TSC0050549
taattcgtattaa

SEQ ID NO: 206532 - DNA, 13 bp, Artificial Sequence
  Oligonucleotide for detection of SNP TSC0050549
ttaatacgaatta

SEQ ID NO: 206533 - DNA, 13 bp, Artificial Sequence
  Oligonucleotide for detection of SNP TSC0050553
ggaaagattttgt

SEQ ID NO: 206534 - DNA, 13 bp, Artificial Sequence
  Oligonucleotide for detection of SNP TSC0050553
acaaaatctttcc

SEQ ID NO: 206535 - DNA, 13 bp, Artificial Sequence
  Oligonucleotide for detection of SNP TSC0050553
ggaaaggttttgt

SEQ ID NO: 206536 - DNA, 13 bp, Artificial Sequence
  Oligonucleotide for detection of SNP TSC0050553
acaaaacctttcc

SEQ ID NO: 206537 - DNA, 13 bp, Artificial Sequence
  Oligonucleotide for detection of SNP TSC0050554
ttgttgattttaa

SEQ ID NO: 206538 - DNA, 13 bp, Artificial Sequence
  Oligonucleotide for detection of SNP TSC0050554
ttaaaatcaacaa

SEQ ID NO: 206539 - DNA, 13 bp, Artificial Sequence
  Oligonucleotide for detection of SNP TSC0050555
ttaaatgttattt

SEQ ID NO: 206540 - DNA, 13 bp, Artificial Sequence
  Oligonucleotide for detection of SNP TSC0050555
aaataacatttaa

SEQ ID NO: 206541 - DNA, 13 bp, Artificial Sequence
  Oligonucleotide for detection of SNP TSC0050555
aaatagaatttaa

SEQ ID NO: 206542 - DNA, 13 bp, Artificial Sequence
  Oligonucleotide for detection of SNP TSC0050555
ttaaattctattt

SEQ ID NO: 206543 - DNA, 13 bp, Artificial Sequence
  Oligonucleotide for detection of SNP TSC0050556
aaaggtatgttty

SEQ ID NO: 206544 - DNA, 13 bp, Artificial Sequence
  Oligonucleotide for detection of SNP TSC0050556
raaacataccttt

SEQ ID NO: 206545 - DNA, 13 bp, Artificial Sequence
  Oligonucleotide for detection of SNP TSC0050556
aaaggtgtgttty

SEQ ID NO: 206546 - DNA, 13 bp, Artificial Sequence
  Oligonucleotide for detection of SNP TSC0050556
raaacacaccttt

SEQ ID NO: 206547 - DNA, 13 bp, Artificial Sequence
  Oligonucleotide for detection of SNP TSC0050556
aaaggcgtgttty

SEQ ID NO: 206548 - DNA, 13 bp, Artificial Sequence
  Oligonucleotide for detection of SNP TSC0050556
raaacacgccttt

SEQ ID NO: 206549 - DNA, 13 bp, Artificial Sequence
  Oligonucleotide for detection of SNP TSC0050556
gggatatgttttt

SEQ ID NO: 206550 - DNA, 13 bp, Artificial Sequence
  Oligonucleotide for detection of SNP TSC0050556
aaaaacatatccc

SEQ ID NO: 206551 - DNA, 13 bp, Artificial Sequence
  Oligonucleotide for detection of SNP TSC0050556
gggatacgttttt

SEQ ID NO: 206552 - DNA, 13 bp, Artificial Sequence
  Oligonucleotide for detection of SNP TSC0050556
aaaaacgtatccc

SEQ ID NO: 206553 - DNA, 13 bp, Artificial Sequence
  Oligonucleotide for detection of SNP TSC0050557
ttttatataggtt

SEQ ID NO: 206554 - DNA, 13 bp, Artificial Sequence
  Oligonucleotide for detection of SNP TSC0050557
aacctatataaaa

SEQ ID NO: 206555 - DNA, 13 bp, Artificial Sequence
  Oligonucleotide for detection of SNP TSC0050557
ttttatgtaggtt

SEQ ID NO: 206556 - DNA, 13 bp, Artificial Sequence
  Oligonucleotide for detection of SNP TSC0050557
aacctacataaaa

SEQ ID NO: 206557 - DNA, 13 bp, Artificial Sequence
  Oligonucleotide for detection of SNP TSC0050558
gggttttaattag

SEQ ID NO: 206558 - DNA, 13 bp, Artificial Sequence
  Oligonucleotide for detection of SNP TSC0050558
ctaattaaaaccc

SEQ ID NO: 206559 - DNA, 13 bp, Artificial Sequence
  Oligonucleotide for detection of SNP TSC0050558
gggtttgaattag

SEQ ID NO: 206560 - DNA, 13 bp, Artificial Sequence
  Oligonucleotide for detection of SNP TSC0050558
ctaattcaaaccc

SEQ ID NO: 206561 - DNA, 13 bp, Artificial Sequence
  Oligonucleotide for detection of SNP TSC0050558
ttgattgaaatty

SEQ ID NO: 206562 - DNA, 13 bp, Artificial Sequence
  Oligonucleotide for detection of SNP TSC0050558
raatttcaatcaa

SEQ ID NO: 206563 - DNA, 13 bp, Artificial Sequence
  Oligonucleotide for detection of SNP TSC0050558
ttgatttaaatty

SEQ ID NO: 206564 - DNA, 13 bp, Artificial Sequence
  Oligonucleotide for detection of SNP TSC0050558
raatttaaatcaa

SEQ ID NO: 206565 - DNA, 13 bp, Artificial Sequence
  Oligonucleotide for detection of SNP TSC0050559
aaatgatagaata

SEQ ID NO: 206566 - DNA, 13 bp, Artificial Sequence
  Oligonucleotide for detection of SNP TSC0050559
tattctatcattt

SEQ ID NO: 206567 - DNA, 13 bp, Artificial Sequence
  Oligonucleotide for detection of SNP TSC0050559
aaatgagagaata

SEQ ID NO: 206568 - DNA, 13 bp, Artificial Sequence
  Oligonucleotide for detection of SNP TSC0050559
tattctctcattt

SEQ ID NO: 206569 - DNA, 13 bp, Artificial Sequence
  Oligonucleotide for detection of SNP TSC0050559
tgtttttttattt

SEQ ID NO: 206570 - DNA, 13 bp, Artificial Sequence
  Oligonucleotide for detection of SNP TSC0050559
aaataaaaaaaca

SEQ ID NO: 206571 - DNA, 13 bp, Artificial Sequence
  Oligonucleotide for detection of SNP TSC0050560
agagagatggaty

SEQ ID NO: 206572 - DNA, 13 bp, Artificial Sequence
  Oligonucleotide for detection of SNP TSC0050560
ratccatctctct

SEQ ID NO: 206573 - DNA, 13 bp, Artificial Sequence
  Oligonucleotide for detection of SNP TSC0050560
agagagttggaty

SEQ ID NO: 206574 - DNA, 13 bp, Artificial Sequence
  Oligonucleotide for detection of SNP TSC0050560
ratccaactctct

SEQ ID NO: 206575 - DNA, 13 bp, Artificial Sequence
  Oligonucleotide for detection of SNP TSC0050560
ggtttattttttt

SEQ ID NO: 206576 - DNA, 13 bp, Artificial Sequence
  Oligonucleotide for detection of SNP TSC0050560
aaaaaaataaacc

SEQ ID NO: 206577 - DNA, 13 bp, Artificial Sequence
  Oligonucleotide for detection of SNP TSC0050561
tatattgtagggt

SEQ ID NO: 206578 - DNA, 13 bp, Artificial Sequence
  Oligonucleotide for detection of SNP TSC0050561
accctacaatata

SEQ ID NO: 206579 - DNA, 13 bp, Artificial Sequence
  Oligonucleotide for detection of SNP TSC0050561
tatattatagggt

SEQ ID NO: 206580 - DNA, 13 bp, Artificial Sequence
  Oligonucleotide for detection of SNP TSC0050561
accctataatata

SEQ ID NO: 206581 - DNA, 13 bp, Artificial Sequence
  Oligonucleotide for detection of SNP TSC0050562
aagttaagtgaat

SEQ ID NO: 206582 - DNA, 13 bp, Artificial Sequence
  Oligonucleotide for detection of SNP TSC0050562
attcacttaactt

SEQ ID NO: 206583 - DNA, 13 bp, Artificial Sequence
  Oligonucleotide for detection of SNP TSC0050562
aagttaggtgaat

SEQ ID NO: 206584 - DNA, 13 bp, Artificial Sequence
  Oligonucleotide for detection of SNP TSC0050562
attcacctaactt

SEQ ID NO: 206585 - DNA, 13 bp, Artificial Sequence
  Oligonucleotide for detection of SNP TSC0050565
ttaattttggtaa

SEQ ID NO: 206586 - DNA, 13 bp, Artificial Sequence
  Oligonucleotide for detection of SNP TSC0050565
ttaccaaaattaa

SEQ ID NO: 206587 - DNA, 13 bp, Artificial Sequence
  Oligonucleotide for detection of SNP TSC0050565
ttattataattga

SEQ ID NO: 206588 - DNA, 13 bp, Artificial Sequence
  Oligonucleotide for detection of SNP TSC0050565
tcaattataataa

SEQ ID NO: 206589 - DNA, 13 bp, Artificial Sequence
  Oligonucleotide for detection of SNP TSC0050565
ttattagaattga

SEQ ID NO: 206590 - DNA, 13 bp, Artificial Sequence
  Oligonucleotide for detection of SNP TSC0050565
tcaattctaataa

SEQ ID NO: 206591 - DNA, 13 bp, Artificial Sequence
  Oligonucleotide for detection of SNP TSC0050566
tgttttttaaagy

SEQ ID NO: 206592 - DNA, 13 bp, Artificial Sequence
  Oligonucleotide for detection of SNP TSC0050566
rctttaaaaaaca

SEQ ID NO: 206593 - DNA, 13 bp, Artificial Sequence
  Oligonucleotide for detection of SNP TSC0050566
tgttttgtaaagy

SEQ ID NO: 206594 - DNA, 13 bp, Artificial Sequence
  Oligonucleotide for detection of SNP TSC0050566
rctttacaaaaca

SEQ ID NO: 206595 - DNA, 13 bp, Artificial Sequence
  Oligonucleotide for detection of SNP TSC0050566
tgtttcgtaaagy

SEQ ID NO: 206596 - DNA, 13 bp, Artificial Sequence
  Oligonucleotide for detection of SNP TSC0050566
rctttacgaaaca

SEQ ID NO: 206597 - DNA, 13 bp, Artificial Sequence
  Oligonucleotide for detection of SNP TSC0050566
gttttaagaaata

SEQ ID NO: 206598 - DNA, 13 bp, Artificial Sequence
  Oligonucleotide for detection of SNP TSC0050566
tatttcttaaaac

SEQ ID NO: 206599 - DNA, 13 bp, Artificial Sequence
  Oligonucleotide for detection of SNP TSC0050566
gttttatgaaata

SEQ ID NO: 206600 - DNA, 13 bp, Artificial Sequence
  Oligonucleotide for detection of SNP TSC0050566
tatttcataaaac

SEQ ID NO: 206601 - DNA, 13 bp, Artificial Sequence
  Oligonucleotide for detection of SNP TSC0050566
gttttacgaaata

SEQ ID NO: 206602 - DNA, 13 bp, Artificial Sequence
  Oligonucleotide for detection of SNP TSC0050566
tatttcgtaaaac

SEQ ID NO: 206603 - DNA, 13 bp, Artificial Sequence
  Oligonucleotide for detection of SNP TSC0050567
atgaaattatgaa

SEQ ID NO: 206604 - DNA, 13 bp, Artificial Sequence
  Oligonucleotide for detection of SNP TSC0050567
ttcataatttcat

SEQ ID NO: 206605 - DNA, 13 bp, Artificial Sequence
  Oligonucleotide for detection of SNP TSC0050567
atgaaagtatgaa

SEQ ID NO: 206606 - DNA, 13 bp, Artificial Sequence
  Oligonucleotide for detection of SNP TSC0050567
ttcatactttcat

SEQ ID NO: 206607 - DNA, 13 bp, Artificial Sequence
  Oligonucleotide for detection of SNP TSC0050567
tttatggttttat

SEQ ID NO: 206608 - DNA, 13 bp, Artificial Sequence
  Oligonucleotide for detection of SNP TSC0050567
ataaaaccataaa

SEQ ID NO: 206609 - DNA, 13 bp, Artificial Sequence
  Oligonucleotide for detection of SNP TSC0050567
tttatgtttttat

SEQ ID NO: 206610 - DNA, 13 bp, Artificial Sequence
  Oligonucleotide for detection of SNP TSC0050567
ataaaaacataaa

SEQ ID NO: 206611 - DNA, 13 bp, Artificial Sequence
  Oligonucleotide for detection of SNP TSC0050568
ttgaggttttttt

SEQ ID NO: 206612 - DNA, 13 bp, Artificial Sequence
  Oligonucleotide for detection of SNP TSC0050568
aaaaaaacctcaa

SEQ ID NO: 206613 - DNA, 13 bp, Artificial Sequence
  Oligonucleotide for detection of SNP TSC0050568
ttgagggtttttt

SEQ ID NO: 206614 - DNA, 13 bp, Artificial Sequence
  Oligonucleotide for detection of SNP TSC0050568
aaaaaaccctcaa

SEQ ID NO: 206615 - DNA, 13 bp, Artificial Sequence
  Oligonucleotide for detection of SNP TSC0050568
agggaggttttag

SEQ ID NO: 206616 - DNA, 13 bp, Artificial Sequence
  Oligonucleotide for detection of SNP TSC0050568
ctaaaacctccct

SEQ ID NO: 206617 - DNA, 13 bp, Artificial Sequence
  Oligonucleotide for detection of SNP TSC0050568
agggagtttttag

SEQ ID NO: 206618 - DNA, 13 bp, Artificial Sequence
  Oligonucleotide for detection of SNP TSC0050568
ctaaaaactccct

SEQ ID NO: 206619 - DNA, 13 bp, Artificial Sequence
  Oligonucleotide for detection of SNP TSC0050569
ggaattttaagty

SEQ ID NO: 206620 - DNA, 13 bp, Artificial Sequence
  Oligonucleotide for detection of SNP TSC0050569
racttaaaattcc

SEQ ID NO: 206621 - DNA, 13 bp, Artificial Sequence
  Oligonucleotide for detection of SNP TSC0050569
ggaattgtaagty

SEQ ID NO: 206622 - DNA, 13 bp, Artificial Sequence
  Oligonucleotide for detection of SNP TSC0050569
racttacaattcc

SEQ ID NO: 206623 - DNA, 13 bp, Artificial Sequence
  Oligonucleotide for detection of SNP TSC0050569
gatttatagttty

SEQ ID NO: 206624 - DNA, 13 bp, Artificial Sequence
  Oligonucleotide for detection of SNP TSC0050569
raaactataaatc

SEQ ID NO: 206625 - DNA, 13 bp, Artificial Sequence
  Oligonucleotide for detection of SNP TSC0050570
taagtgtgataat

SEQ ID NO: 206626 - DNA, 13 bp, Artificial Sequence
  Oligonucleotide for detection of SNP TSC0050570
attatcacactta

SEQ ID NO: 206627 - DNA, 13 bp, Artificial Sequence
  Oligonucleotide for detection of SNP TSC0050570
taagtgcgataat

SEQ ID NO: 206628 - DNA, 13 bp, Artificial Sequence
  Oligonucleotide for detection of SNP TSC0050570
attatcgcactta

SEQ ID NO: 206629 - DNA, 13 bp, Artificial Sequence
  Oligonucleotide for detection of SNP TSC0050571
ttaaaatagagtt

SEQ ID NO: 206630 - DNA, 13 bp, Artificial Sequence
  Oligonucleotide for detection of SNP TSC0050571
aactctattttaa

SEQ ID NO: 206631 - DNA, 13 bp, Artificial Sequence
  Oligonucleotide for detection of SNP TSC0050572
attttatgttgat

SEQ ID NO: 206632 - DNA, 13 bp, Artificial Sequence
  Oligonucleotide for detection of SNP TSC0050572
atcaacataaaat

SEQ ID NO: 206633 - DNA, 13 bp, Artificial Sequence
  Oligonucleotide for detection of SNP TSC0050572
attttaggttgat

SEQ ID NO: 206634 - DNA, 13 bp, Artificial Sequence
  Oligonucleotide for detection of SNP TSC0050572
atcaacctaaaat

SEQ ID NO: 206635 - DNA, 13 bp, Artificial Sequence
  Oligonucleotide for detection of SNP TSC0050572
attttacgttgat

SEQ ID NO: 206636 - DNA, 13 bp, Artificial Sequence
  Oligonucleotide for detection of SNP TSC0050572
atcaacgtaaaat

SEQ ID NO: 206637 - DNA, 13 bp, Artificial Sequence
  Oligonucleotide for detection of SNP TSC0050572
attaatgtagaat

SEQ ID NO: 206638 - DNA, 13 bp, Artificial Sequence
  Oligonucleotide for detection of SNP TSC0050572
attctacattaat

SEQ ID NO: 206639 - DNA, 13 bp, Artificial Sequence
  Oligonucleotide for detection of SNP TSC0050572
attaatttagaat

SEQ ID NO: 206640 - DNA, 13 bp, Artificial Sequence
  Oligonucleotide for detection of SNP TSC0050572
attctaaattaat

SEQ ID NO: 206641 - DNA, 13 bp, Artificial Sequence
  Oligonucleotide for detection of SNP TSC0050572
attaacgtagaat

SEQ ID NO: 206642 - DNA, 13 bp, Artificial Sequence
  Oligonucleotide for detection of SNP TSC0050572
attctacgttaat

SEQ ID NO: 206643 - DNA, 13 bp, Artificial Sequence
  Oligonucleotide for detection of SNP TSC0050573
aatgattatatta

SEQ ID NO: 206644 - DNA, 13 bp, Artificial Sequence
  Oligonucleotide for detection of SNP TSC0050573
taatataatcatt

SEQ ID NO: 206645 - DNA, 13 bp, Artificial Sequence
  Oligonucleotide for detection of SNP TSC0050573
aatgatgatatta

SEQ ID NO: 206646 - DNA, 13 bp, Artificial Sequence
  Oligonucleotide for detection of SNP TSC0050573
taatatcatcatt

SEQ ID NO: 206647 - DNA, 13 bp, Artificial Sequence
  Oligonucleotide for detection of SNP TSC0050573
aatgacgatatta

SEQ ID NO: 206648 - DNA, 13 bp, Artificial Sequence
  Oligonucleotide for detection of SNP TSC0050573
taatatcgtcatt

SEQ ID NO: 206649 - DNA, 13 bp, Artificial Sequence
  Oligonucleotide for detection of SNP TSC0050573
tagtatggttatt

SEQ ID NO: 206650 - DNA, 13 bp, Artificial Sequence
  Oligonucleotide for detection of SNP TSC0050573
aataaccatacta

SEQ ID NO: 206651 - DNA, 13 bp, Artificial Sequence
  Oligonucleotide for detection of SNP TSC0050573
tagtattgttatt

SEQ ID NO: 206652 - DNA, 13 bp, Artificial Sequence
  Oligonucleotide for detection of SNP TSC0050573
aataacaatacta

SEQ ID NO: 206653 - DNA, 13 bp, Artificial Sequence
  Oligonucleotide for detection of SNP TSC0050573
tagtatcgttatt

SEQ ID NO: 206654 - DNA, 13 bp, Artificial Sequence
  Oligonucleotide for detection of SNP TSC0050573
aataacgatacta

SEQ ID NO: 206655 - DNA, 13 bp, Artificial Sequence
  Oligonucleotide for detection of SNP TSC0050574
aaagttagaagta

SEQ ID NO: 206656 - DNA, 13 bp, Artificial Sequence
  Oligonucleotide for detection of SNP TSC0050574
tacttctaacttt

SEQ ID NO: 206657 - DNA, 13 bp, Artificial Sequence
  Oligonucleotide for detection of SNP TSC0050574
aaagtcggaagta

SEQ ID NO: 206658 - DNA, 13 bp, Artificial Sequence
  Oligonucleotide for detection of SNP TSC0050574
tacttccgacttt

SEQ ID NO: 206659 - DNA, 13 bp, Artificial Sequence
  Oligonucleotide for detection of SNP TSC0050574
tgtttttggtttt

SEQ ID NO: 206660 - DNA, 13 bp, Artificial Sequence
  Oligonucleotide for detection of SNP TSC0050574
aaaaccaaaaaca

SEQ ID NO: 206661 - DNA, 13 bp, Artificial Sequence
  Oligonucleotide for detection of SNP TSC0050574
tgttttcggtttt

SEQ ID NO: 206662 - DNA, 13 bp, Artificial Sequence
  Oligonucleotide for detection of SNP TSC0050574
aaaaccgaaaaca

SEQ ID NO: 206663 - DNA, 13 bp, Artificial Sequence
  Oligonucleotide for detection of SNP TSC0050575
tgtttaggattta

SEQ ID NO: 206664 - DNA, 13 bp, Artificial Sequence
  Oligonucleotide for detection of SNP TSC0050575
taaatcctaaaca

SEQ ID NO: 206665 - DNA, 13 bp, Artificial Sequence
  Oligonucleotide for detection of SNP TSC0050575
tgtttaagattta

SEQ ID NO: 206666 - DNA, 13 bp, Artificial Sequence
  Oligonucleotide for detection of SNP TSC0050575
taaatcttaaaca

SEQ ID NO: 206667 - DNA, 13 bp, Artificial Sequence
  Oligonucleotide for detection of SNP TSC0005806
tttagtgaagatt

SEQ ID NO: 206668 - DNA, 13 bp, Artificial Sequence
  Oligonucleotide for detection of SNP TSC0005806
aatcttcactaaa

SEQ ID NO: 206669 - DNA, 13 bp, Artificial Sequence
  Oligonucleotide for detection of SNP TSC0005806
tttagtaaagatt

SEQ ID NO: 206670 - DNA, 13 bp, Artificial Sequence
  Oligonucleotide for detection of SNP TSC0005806
aatctttactaaa

SEQ ID NO: 206671 - DNA, 13 bp, Artificial Sequence
  Oligonucleotide for detection of SNP TSC0005807
ggtgatgtagtaa

SEQ ID NO: 206672 - DNA, 13 bp, Artificial Sequence
  Oligonucleotide for detection of SNP TSC0005807
ttactacatcacc

SEQ ID NO: 206673 - DNA, 13 bp, Artificial Sequence
  Oligonucleotide for detection of SNP TSC0005807
ggtgatatagtaa

SEQ ID NO: 206674 - DNA, 13 bp, Artificial Sequence
  Oligonucleotide for detection of SNP TSC0005807
ttactatatcacc

SEQ ID NO: 206675 - DNA, 13 bp, Artificial Sequence
  Oligonucleotide for detection of SNP TSC0005807
ggtgacgtagtaa

SEQ ID NO: 206676 - DNA, 13 bp, Artificial Sequence
  Oligonucleotide for detection of SNP TSC0005807
ttactacgtcacc

SEQ ID NO: 206677 - DNA, 13 bp, Artificial Sequence
  Oligonucleotide for detection of SNP TSC0005808
aatatgattgtta

SEQ ID NO: 206678 - DNA, 13 bp, Artificial Sequence
  Oligonucleotide for detection of SNP TSC0005808
taacaatcatatt

SEQ ID NO: 206679 - DNA, 13 bp, Artificial Sequence
  Oligonucleotide for detection of SNP TSC0005808
aatatggttgtta

SEQ ID NO: 206680 - DNA, 13 bp, Artificial Sequence
  Oligonucleotide for detection of SNP TSC0005808
taacaaccatatt

SEQ ID NO: 206681 - DNA, 13 bp, Artificial Sequence
  Oligonucleotide for detection of SNP TSC0005808
aatacgattgtta

SEQ ID NO: 206682 - DNA, 13 bp, Artificial Sequence
  Oligonucleotide for detection of SNP TSC0005808
taacaatcgtatt

SEQ ID NO: 206683 - DNA, 13 bp, Artificial Sequence
  Oligonucleotide for detection of SNP TSC0005808
aatacggttgtta

SEQ ID NO: 206684 - DNA, 13 bp, Artificial Sequence
  Oligonucleotide for detection of SNP TSC0005808
taacaaccgtatt

SEQ ID NO: 206685 - DNA, 13 bp, Artificial Sequence
  Oligonucleotide for detection of SNP TSC0050576
ttgtggagaaaga

SEQ ID NO: 206686 - DNA, 13 bp, Artificial Sequence
  Oligonucleotide for detection of SNP TSC0050576
tctttctccacaa

SEQ ID NO: 206687 - DNA, 13 bp, Artificial Sequence
  Oligonucleotide for detection of SNP TSC0050576
ttgtggggaaaga

SEQ ID NO: 206688 - DNA, 13 bp, Artificial Sequence
  Oligonucleotide for detection of SNP TSC0050576
tctttccccacaa

SEQ ID NO: 206689 - DNA, 13 bp, Artificial Sequence
  Oligonucleotide for detection of SNP TSC0050576
ttgcggagaaaga

SEQ ID NO: 206690 - DNA, 13 bp, Artificial Sequence
  Oligonucleotide for detection of SNP TSC0050576
tctttctccgcaa

SEQ ID NO: 206691 - DNA, 13 bp, Artificial Sequence
  Oligonucleotide for detection of SNP TSC0050576
ttgcggggaaaga

SEQ ID NO: 206692 - DNA, 13 bp, Artificial Sequence
  Oligonucleotide for detection of SNP TSC0050576
tctttccccgcaa

SEQ ID NO: 206693 - DNA, 13 bp, Artificial Sequence
  Oligonucleotide for detection of SNP TSC0050577
ttatttagggtta

SEQ ID NO: 206694 - DNA, 13 bp, Artificial Sequence
  Oligonucleotide for detection of SNP TSC0050577
taaccctaaataa

SEQ ID NO: 206695 - DNA, 13 bp, Artificial Sequence
  Oligonucleotide for detection of SNP TSC0050577
ttatttggggtta

SEQ ID NO: 206696 - DNA, 13 bp, Artificial Sequence
  Oligonucleotide for detection of SNP TSC0050577
taaccccaaataa

SEQ ID NO: 206697 - DNA, 13 bp, Artificial Sequence
  Oligonucleotide for detection of SNP TSC0050578
aagaattagatga

SEQ ID NO: 206698 - DNA, 13 bp, Artificial Sequence
  Oligonucleotide for detection of SNP TSC0050578
tcatctaattctt

SEQ ID NO: 206699 - DNA, 13 bp, Artificial Sequence
  Oligonucleotide for detection of SNP TSC0050578
aagaatgagatga

SEQ ID NO: 206700 - DNA, 13 bp, Artificial Sequence
  Oligonucleotide for detection of SNP TSC0050578
tcatctcattctt

SEQ ID NO: 206701 - DNA, 13 bp, Artificial Sequence
  Oligonucleotide for detection of SNP TSC0050579
attagttggttgt

SEQ ID NO: 206702 - DNA, 13 bp, Artificial Sequence
  Oligonucleotide for detection of SNP TSC0050579
acaaccaactaat

SEQ ID NO: 206703 - DNA, 13 bp, Artificial Sequence
  Oligonucleotide for detection of SNP TSC0050579
attagtgggttgt

SEQ ID NO: 206704 - DNA, 13 bp, Artificial Sequence
  Oligonucleotide for detection of SNP TSC0050579
acaacccactaat

SEQ ID NO: 206705 - DNA, 13 bp, Artificial Sequence
  Oligonucleotide for detection of SNP TSC0050579
atagttaattggt

SEQ ID NO: 206706 - DNA, 13 bp, Artificial Sequence
  Oligonucleotide for detection of SNP TSC0050579
accaattaactat

SEQ ID NO: 206707 - DNA, 13 bp, Artificial Sequence
  Oligonucleotide for detection of SNP TSC0050579
atagtttattggt

SEQ ID NO: 206708 - DNA, 13 bp, Artificial Sequence
  Oligonucleotide for detection of SNP TSC0050579
accaataaactat

SEQ ID NO: 206709 - DNA, 13 bp, Artificial Sequence
  Oligonucleotide for detection of SNP TSC0000455
tgtgatggaatga

SEQ ID NO: 206710 - DNA, 13 bp, Artificial Sequence
  Oligonucleotide for detection of SNP TSC0000455
tcattccatcaca

SEQ ID NO: 206711 - DNA, 13 bp, Artificial Sequence
  Oligonucleotide for detection of SNP TSC0000455
tgtgatagaatga

SEQ ID NO: 206712 - DNA, 13 bp, Artificial Sequence
  Oligonucleotide for detection of SNP TSC0000455
tcattctatcaca

SEQ ID NO: 206713 - DNA, 13 bp, Artificial Sequence
  Oligonucleotide for detection of SNP TSC0050580
attatttagatta

SEQ ID NO: 206714 - DNA, 13 bp, Artificial Sequence
  Oligonucleotide for detection of SNP TSC0050580
taatctaaataat

SEQ ID NO: 206715 - DNA, 13 bp, Artificial Sequence
  Oligonucleotide for detection of SNP TSC0050580
tagtttgaatgat

SEQ ID NO: 206716 - DNA, 13 bp, Artificial Sequence
  Oligonucleotide for detection of SNP TSC0050580
atcattcaaacta

SEQ ID NO: 206717 - DNA, 13 bp, Artificial Sequence
  Oligonucleotide for detection of SNP TSC0050580
tagttttaatgat

SEQ ID NO: 206718 - DNA, 13 bp, Artificial Sequence
  Oligonucleotide for detection of SNP TSC0050580
atcattaaaacta

SEQ ID NO: 206719 - DNA, 13 bp, Artificial Sequence
  Oligonucleotide for detection of SNP TSC0050581
gtttatgtattgt

SEQ ID NO: 206720 - DNA, 13 bp, Artificial Sequence
  Oligonucleotide for detection of SNP TSC0050581
acaatacataaac

SEQ ID NO: 206721 - DNA, 13 bp, Artificial Sequence
  Oligonucleotide for detection of SNP TSC0050581
gtttatatattgt

SEQ ID NO: 206722 - DNA, 13 bp, Artificial Sequence
  Oligonucleotide for detection of SNP TSC0050581
acaatatataaac

SEQ ID NO: 206723 - DNA, 13 bp, Artificial Sequence
  Oligonucleotide for detection of SNP TSC0007585
tttgtatgggaga

SEQ ID NO: 206724 - DNA, 13 bp, Artificial Sequence
  Oligonucleotide for detection of SNP TSC0007585
tctcccatacaaa

SEQ ID NO: 206725 - DNA, 13 bp, Artificial Sequence
  Oligonucleotide for detection of SNP TSC0007585
tttgtacgggaga

SEQ ID NO: 206726 - DNA, 13 bp, Artificial Sequence
  Oligonucleotide for detection of SNP TSC0007585
tctcccgtacaaa

SEQ ID NO: 206727 - DNA, 13 bp, Artificial Sequence
  Oligonucleotide for detection of SNP TSC0050582
atattttaagtay

SEQ ID NO: 206728 - DNA, 13 bp, Artificial Sequence
  Oligonucleotide for detection of SNP TSC0050582
rtacttaaaatat

SEQ ID NO: 206729 - DNA, 13 bp, Artificial Sequence
  Oligonucleotide for detection of SNP TSC0050582
atatttgaagtay

SEQ ID NO: 206730 - DNA, 13 bp, Artificial Sequence
  Oligonucleotide for detection of SNP TSC0050582
rtacttcaaatat

SEQ ID NO: 206731 - DNA, 13 bp, Artificial Sequence
  Oligonucleotide for detection of SNP TSC0050582
atattcgaagtay

SEQ ID NO: 206732 - DNA, 13 bp, Artificial Sequence
  Oligonucleotide for detection of SNP TSC0050582
rtacttcgaatat

SEQ ID NO: 206733 - DNA, 13 bp, Artificial Sequence
  Oligonucleotide for detection of SNP TSC0050582
gtatttggaatgt

SEQ ID NO: 206734 - DNA, 13 bp, Artificial Sequence
  Oligonucleotide for detection of SNP TSC0050582
acattccaaatac

SEQ ID NO: 206735 - DNA, 13 bp, Artificial Sequence
  Oligonucleotide for detection of SNP TSC0050582
gtattttgaatgt

SEQ ID NO: 206736 - DNA, 13 bp, Artificial Sequence
  Oligonucleotide for detection of SNP TSC0050582
acattcaaaatac

SEQ ID NO: 206737 - DNA, 13 bp, Artificial Sequence
  Oligonucleotide for detection of SNP TSC0050582
gtatttcgaatgt

SEQ ID NO: 206738 - DNA, 13 bp, Artificial Sequence
  Oligonucleotide for detection of SNP TSC0050582
acattcgaaatac

SEQ ID NO: 206739 - DNA, 13 bp, Artificial Sequence
  Oligonucleotide for detection of SNP TSC0050583
tgtttttgggtgg

SEQ ID NO: 206740 - DNA, 13 bp, Artificial Sequence
  Oligonucleotide for detection of SNP TSC0050583
ccacccaaaaaca

SEQ ID NO: 206741 - DNA, 13 bp, Artificial Sequence
  Oligonucleotide for detection of SNP TSC0050583
tgttttggggtgg

SEQ ID NO: 206742 - DNA, 13 bp, Artificial Sequence
  Oligonucleotide for detection of SNP TSC0050583
ccaccccaaaaca

SEQ ID NO: 206743 - DNA, 13 bp, Artificial Sequence
  Oligonucleotide for detection of SNP TSC0050583
tgttttcgggtgg

SEQ ID NO: 206744 - DNA, 13 bp, Artificial Sequence
  Oligonucleotide for detection of SNP TSC0050583
ccacccgaaaaca

SEQ ID NO: 206745 - DNA, 13 bp, Artificial Sequence
  Oligonucleotide for detection of SNP TSC0050583
ttatttgagggta

SEQ ID NO: 206746 - DNA, 13 bp, Artificial Sequence
  Oligonucleotide for detection of SNP TSC0050583
taccctcaaataa

SEQ ID NO: 206747 - DNA, 13 bp, Artificial Sequence
  Oligonucleotide for detection of SNP TSC0050583
ttattttagggta

SEQ ID NO: 206748 - DNA, 13 bp, Artificial Sequence
  Oligonucleotide for detection of SNP TSC0050583
taccctaaaataa

SEQ ID NO: 206749 - DNA, 13 bp, Artificial Sequence
  Oligonucleotide for detection of SNP TSC0050583
ttattcgagggta

SEQ ID NO: 206750 - DNA, 13 bp, Artificial Sequence
  Oligonucleotide for detection of SNP TSC0050583
taccctcgaataa

SEQ ID NO: 206751 - DNA, 13 bp, Artificial Sequence
  Oligonucleotide for detection of SNP TSC0050584
gtagtttggaaat

SEQ ID NO: 206752 - DNA, 13 bp, Artificial Sequence
  Oligonucleotide for detection of SNP TSC0050584
atttccaaactac

SEQ ID NO: 206753 - DNA, 13 bp, Artificial Sequence
  Oligonucleotide for detection of SNP TSC0050584
gtagttcggaaat

SEQ ID NO: 206754 - DNA, 13 bp, Artificial Sequence
  Oligonucleotide for detection of SNP TSC0050584
atttccgaactac

SEQ ID NO: 206755 - DNA, 13 bp, Artificial Sequence
  Oligonucleotide for detection of SNP TSC0050584
atttttgaattgy

SEQ ID NO: 206756 - DNA, 13 bp, Artificial Sequence
  Oligonucleotide for detection of SNP TSC0050584
rcaattcaaaaat

SEQ ID NO: 206757 - DNA, 13 bp, Artificial Sequence
  Oligonucleotide for detection of SNP TSC0050584
atttttaaattgy

SEQ ID NO: 206758 - DNA, 13 bp, Artificial Sequence
  Oligonucleotide for detection of SNP TSC0050584
rcaatttaaaaat

SEQ ID NO: 206759 - DNA, 13 bp, Artificial Sequence
  Oligonucleotide for detection of SNP TSC0050584
attttcgaattgy

SEQ ID NO: 206760 - DNA, 13 bp, Artificial Sequence
  Oligonucleotide for detection of SNP TSC0050584
rcaattcgaaaat

SEQ ID NO: 206761 - DNA, 13 bp, Artificial Sequence
  Oligonucleotide for detection of SNP TSC0050587
gtttatgggtggg

SEQ ID NO: 206762 - DNA, 13 bp, Artificial Sequence
  Oligonucleotide for detection of SNP TSC0050587
cccacccataaac

SEQ ID NO: 206763 - DNA, 13 bp, Artificial Sequence
  Oligonucleotide for detection of SNP TSC0050587
gtttataggtggg

SEQ ID NO: 206764 - DNA, 13 bp, Artificial Sequence
  Oligonucleotide for detection of SNP TSC0050587
cccacctataaac

SEQ ID NO: 206765 - DNA, 13 bp, Artificial Sequence
  Oligonucleotide for detection of SNP TSC0050588
tttttttgtaaty

SEQ ID NO: 206766 - DNA, 13 bp, Artificial Sequence
  Oligonucleotide for detection of SNP TSC0050588
rattacaaaaaaa

SEQ ID NO: 206767 - DNA, 13 bp, Artificial Sequence
  Oligonucleotide for detection of SNP TSC0050588
ttttttcgtaaty

SEQ ID NO: 206768 - DNA, 13 bp, Artificial Sequence
  Oligonucleotide for detection of SNP TSC0050588
rattacgaaaaaa

SEQ ID NO: 206769 - DNA, 13 bp, Artificial Sequence
  Oligonucleotide for detection of SNP TSC0050588
gattatggaggaa

SEQ ID NO: 206770 - DNA, 13 bp, Artificial Sequence
  Oligonucleotide for detection of SNP TSC0050588
ttcctccataatc

SEQ ID NO: 206771 - DNA, 13 bp, Artificial Sequence
  Oligonucleotide for detection of SNP TSC0050588
gattatagaggaa

SEQ ID NO: 206772 - DNA, 13 bp, Artificial Sequence
  Oligonucleotide for detection of SNP TSC0050588
ttcctctataatc

SEQ ID NO: 206773 - DNA, 13 bp, Artificial Sequence
  Oligonucleotide for detection of SNP TSC0050588
gattacggaggaa

SEQ ID NO: 206774 - DNA, 13 bp, Artificial Sequence
  Oligonucleotide for detection of SNP TSC0050588
ttcctccgtaatc

SEQ ID NO: 206775 - DNA, 13 bp, Artificial Sequence
  Oligonucleotide for detection of SNP TSC0050589
agatggtgtgtag

SEQ ID NO: 206776 - DNA, 13 bp, Artificial Sequence
  Oligonucleotide for detection of SNP TSC0050589
ctacacaccatct

SEQ ID NO: 206777 - DNA, 13 bp, Artificial Sequence
  Oligonucleotide for detection of SNP TSC0050589
agatggcgtgtag

SEQ ID NO: 206778 - DNA, 13 bp, Artificial Sequence
  Oligonucleotide for detection of SNP TSC0050589
ctacacgccatct

SEQ ID NO: 206779 - DNA, 13 bp, Artificial Sequence
  Oligonucleotide for detection of SNP TSC0050593
tttgaaatatata

SEQ ID NO: 206780 - DNA, 13 bp, Artificial Sequence
  Oligonucleotide for detection of SNP TSC0050593
tatatatttcaaa

SEQ ID NO: 206781 - DNA, 13 bp, Artificial Sequence
  Oligonucleotide for detection of SNP TSC0050593
tttgaattatata

SEQ ID NO: 206782 - DNA, 13 bp, Artificial Sequence
  Oligonucleotide for detection of SNP TSC0050593
tatataattcaaa

SEQ ID NO: 206783 - DNA, 13 bp, Artificial Sequence
  Oligonucleotide for detection of SNP TSC0050593
tatatattttaaa

SEQ ID NO: 206784 - DNA, 13 bp, Artificial Sequence
  Oligonucleotide for detection of SNP TSC0050593
tttaaaatatata

SEQ ID NO: 206785 - DNA, 13 bp, Artificial Sequence
  Oligonucleotide for detection of SNP TSC0050594
attaatatattty

SEQ ID NO: 206786 - DNA, 13 bp, Artificial Sequence
  Oligonucleotide for detection of SNP TSC0050594
raaatatattaat

SEQ ID NO: 206787 - DNA, 13 bp, Artificial Sequence
  Oligonucleotide for detection of SNP TSC0050594
attaatgtattty

SEQ ID NO: 206788 - DNA, 13 bp, Artificial Sequence
  Oligonucleotide for detection of SNP TSC0050594
raaatacattaat

SEQ ID NO: 206789 - DNA, 13 bp, Artificial Sequence
  Oligonucleotide for detection of SNP TSC0050594
attaacgtattty

SEQ ID NO: 206790 - DNA, 13 bp, Artificial Sequence
  Oligonucleotide for detection of SNP TSC0050594
raaatacgttaat

SEQ ID NO: 206791 - DNA, 13 bp, Artificial Sequence
  Oligonucleotide for detection of SNP TSC0050594
ggaatatgttgat

SEQ ID NO: 206792 - DNA, 13 bp, Artificial Sequence
  Oligonucleotide for detection of SNP TSC0050594
atcaacatattcc

SEQ ID NO: 206793 - DNA, 13 bp, Artificial Sequence
  Oligonucleotide for detection of SNP TSC0050594
ggaatacgttgat

SEQ ID NO: 206794 - DNA, 13 bp, Artificial Sequence
  Oligonucleotide for detection of SNP TSC0050594
atcaacgtattcc

SEQ ID NO: 206795 - DNA, 13 bp, Artificial Sequence
  Oligonucleotide for detection of SNP TSC0050595
aagttggataata

SEQ ID NO: 206796 - DNA, 13 bp, Artificial Sequence
  Oligonucleotide for detection of SNP TSC0050595
tattatccaactt

SEQ ID NO: 206797 - DNA, 13 bp, Artificial Sequence
  Oligonucleotide for detection of SNP TSC0050595
aagttgaataata

SEQ ID NO: 206798 - DNA, 13 bp, Artificial Sequence
  Oligonucleotide for detection of SNP TSC0050595
tattattcaactt

SEQ ID NO: 206799 - DNA, 13 bp, Artificial Sequence
  Oligonucleotide for detection of SNP TSC0050597
aaggaatgaaatt

SEQ ID NO: 206800 - DNA, 13 bp, Artificial Sequence
  Oligonucleotide for detection of SNP TSC0050597
aatttcattcctt

SEQ ID NO: 206801 - DNA, 13 bp, Artificial Sequence
  Oligonucleotide for detection of SNP TSC0050597
aaggaaggaaatt

SEQ ID NO: 206802 - DNA, 13 bp, Artificial Sequence
  Oligonucleotide for detection of SNP TSC0050597
aatttccttcctt

SEQ ID NO: 206803 - DNA, 13 bp, Artificial Sequence
  Oligonucleotide for detection of SNP TSC0050598
tttattatttgta

SEQ ID NO: 206804 - DNA, 13 bp, Artificial Sequence
  Oligonucleotide for detection of SNP TSC0050598
tacaaataataaa

SEQ ID NO: 206805 - DNA, 13 bp, Artificial Sequence
  Oligonucleotide for detection of SNP TSC0050599
agagagagtaaay

SEQ ID NO: 206806 - DNA, 13 bp, Artificial Sequence
  Oligonucleotide for detection of SNP TSC0050599
rtttactctctct

SEQ ID NO: 206807 - DNA, 13 bp, Artificial Sequence
  Oligonucleotide for detection of SNP TSC0050599
agagagggtaaay

SEQ ID NO: 206808 - DNA, 13 bp, Artificial Sequence
  Oligonucleotide for detection of SNP TSC0050599
rtttaccctctct

SEQ ID NO: 206809 - DNA, 13 bp, Artificial Sequence
  Oligonucleotide for detection of SNP TSC0050600
agaaaaagataat

SEQ ID NO: 206810 - DNA, 13 bp, Artificial Sequence
  Oligonucleotide for detection of SNP TSC0050600
attatctttttct

SEQ ID NO: 206811 - DNA, 13 bp, Artificial Sequence
  Oligonucleotide for detection of SNP TSC0050600
agaaaaggataat

SEQ ID NO: 206812 - DNA, 13 bp, Artificial Sequence
  Oligonucleotide for detection of SNP TSC0050600
attatccttttct

SEQ ID NO: 206813 - DNA, 13 bp, Artificial Sequence
  Oligonucleotide for detection of SNP TSC0050604
tatgttatatttt

SEQ ID NO: 206814 - DNA, 13 bp, Artificial Sequence
  Oligonucleotide for detection of SNP TSC0050604
aaaatataacata

SEQ ID NO: 206815 - DNA, 13 bp, Artificial Sequence
  Oligonucleotide for detection of SNP TSC0050604
aaagtataatata

SEQ ID NO: 206816 - DNA, 13 bp, Artificial Sequence
  Oligonucleotide for detection of SNP TSC0050604
tatattatacttt

SEQ ID NO: 206817 - DNA, 13 bp, Artificial Sequence
  Oligonucleotide for detection of SNP TSC0050604
aaagtagaatata

SEQ ID NO: 206818 - DNA, 13 bp, Artificial Sequence
  Oligonucleotide for detection of SNP TSC0050604
tatattctacttt

SEQ ID NO: 206819 - DNA, 13 bp, Artificial Sequence
  Oligonucleotide for detection of SNP TSC0050605
gtttaaaatttgt

SEQ ID NO: 206820 - DNA, 13 bp, Artificial Sequence
  Oligonucleotide for detection of SNP TSC0050605
acaaattttaaac

SEQ ID NO: 206821 - DNA, 13 bp, Artificial Sequence
  Oligonucleotide for detection of SNP TSC0050605
gtttaatatttgt

SEQ ID NO: 206822 - DNA, 13 bp, Artificial Sequence
  Oligonucleotide for detection of SNP TSC0050605
acaaatattaaac

SEQ ID NO: 206823 - DNA, 13 bp, Artificial Sequence
  Oligonucleotide for detection of SNP TSC0050605
ataaatgttaggy

SEQ ID NO: 206824 - DNA, 13 bp, Artificial Sequence
  Oligonucleotide for detection of SNP TSC0050605
rcctaacatttat

SEQ ID NO: 206825 - DNA, 13 bp, Artificial Sequence
  Oligonucleotide for detection of SNP TSC0050606
aatatagttgaga

SEQ ID NO: 206826 - DNA, 13 bp, Artificial Sequence
  Oligonucleotide for detection of SNP TSC0050606
tctcaactatatt

SEQ ID NO: 206827 - DNA, 13 bp, Artificial Sequence
  Oligonucleotide for detection of SNP TSC0050606
aatataattgaga

SEQ ID NO: 206828 - DNA, 13 bp, Artificial Sequence
  Oligonucleotide for detection of SNP TSC0050606
tctcaattatatt

SEQ ID NO: 206829 - DNA, 13 bp, Artificial Sequence
  Oligonucleotide for detection of SNP TSC0050608
tatttaaataatg

SEQ ID NO: 206830 - DNA, 13 bp, Artificial Sequence
  Oligonucleotide for detection of SNP TSC0050608
cattatttaaata

SEQ ID NO: 206831 - DNA, 13 bp, Artificial Sequence
  Oligonucleotide for detection of SNP TSC0050608
tatttagataatg

SEQ ID NO: 206832 - DNA, 13 bp, Artificial Sequence
  Oligonucleotide for detection of SNP TSC0050608
cattatctaaata

SEQ ID NO: 206833 - DNA, 13 bp, Artificial Sequence
  Oligonucleotide for detection of SNP TSC0050609
gattgtatttagy

SEQ ID NO: 206834 - DNA, 13 bp, Artificial Sequence
  Oligonucleotide for detection of SNP TSC0050609
rctaaatacaatc

SEQ ID NO: 206835 - DNA, 13 bp, Artificial Sequence
  Oligonucleotide for detection of SNP TSC0050609
gattgtttttagy

SEQ ID NO: 206836 - DNA, 13 bp, Artificial Sequence
  Oligonucleotide for detection of SNP TSC0050609
rctaaaaacaatc

SEQ ID NO: 206837 - DNA, 13 bp, Artificial Sequence
  Oligonucleotide for detection of SNP TSC0050609
gttggatatagty

SEQ ID NO: 206838 - DNA, 13 bp, Artificial Sequence
  Oligonucleotide for detection of SNP TSC0050609
ractatatccaac

SEQ ID NO: 206839 - DNA, 13 bp, Artificial Sequence
  Oligonucleotide for detection of SNP TSC0050609
gttggagatagty

SEQ ID NO: 206840 - DNA, 13 bp, Artificial Sequence
  Oligonucleotide for detection of SNP TSC0050609
ractatctccaac

SEQ ID NO: 206841 - DNA, 13 bp, Artificial Sequence
  Oligonucleotide for detection of SNP TSC0050610
tattgaaaaaata

SEQ ID NO: 206842 - DNA, 13 bp, Artificial Sequence
  Oligonucleotide for detection of SNP TSC0050610
tattttttcaata

SEQ ID NO: 206843 - DNA, 13 bp, Artificial Sequence
  Oligonucleotide for detection of SNP TSC0050610
tattgagaaaata

SEQ ID NO: 206844 - DNA, 13 bp, Artificial Sequence
  Oligonucleotide for detection of SNP TSC0050610
tattttctcaata

SEQ ID NO: 206845 - DNA, 13 bp, Artificial Sequence
  Oligonucleotide for detection of SNP TSC0050611
tttttggatatta

SEQ ID NO: 206846 - DNA, 13 bp, Artificial Sequence
  Oligonucleotide for detection of SNP TSC0050611
taatatccaaaaa

SEQ ID NO: 206847 - DNA, 13 bp, Artificial Sequence
  Oligonucleotide for detection of SNP TSC0050611
tttttgaatatta

SEQ ID NO: 206848 - DNA, 13 bp, Artificial Sequence
  Oligonucleotide for detection of SNP TSC0050611
taatattcaaaaa

SEQ ID NO: 206849 - DNA, 13 bp, Artificial Sequence
  Oligonucleotide for detection of SNP TSC0004801
gaatagagtgtaa

SEQ ID NO: 206850 - DNA, 13 bp, Artificial Sequence
  Oligonucleotide for detection of SNP TSC0004801
ttacactctattc

SEQ ID NO: 206851 - DNA, 13 bp, Artificial Sequence
  Oligonucleotide for detection of SNP TSC0004801
gaatagggtgtaa

SEQ ID NO: 206852 - DNA, 13 bp, Artificial Sequence
  Oligonucleotide for detection of SNP TSC0004801
ttacaccctattc

SEQ ID NO: 206853 - DNA, 13 bp, Artificial Sequence
  Oligonucleotide for detection of SNP TSC0050613
atatggtttatta

SEQ ID NO: 206854 - DNA, 13 bp, Artificial Sequence
  Oligonucleotide for detection of SNP TSC0050613
taataaaccatat

SEQ ID NO: 206855 - DNA, 13 bp, Artificial Sequence
  Oligonucleotide for detection of SNP TSC0050613
atatgggttatta

SEQ ID NO: 206856 - DNA, 13 bp, Artificial Sequence
  Oligonucleotide for detection of SNP TSC0050613
taataacccatat

SEQ ID NO: 206857 - DNA, 13 bp, Artificial Sequence
  Oligonucleotide for detection of SNP TSC0050613
tagtaggttatgt

SEQ ID NO: 206858 - DNA, 13 bp, Artificial Sequence
  Oligonucleotide for detection of SNP TSC0050613
acataacctacta

SEQ ID NO: 206859 - DNA, 13 bp, Artificial Sequence
  Oligonucleotide for detection of SNP TSC0050613
tagtagtttatgt

SEQ ID NO: 206860 - DNA, 13 bp, Artificial Sequence
  Oligonucleotide for detection of SNP TSC0050613
acataaactacta

SEQ ID NO: 206861 - DNA, 13 bp, Artificial Sequence
  Oligonucleotide for detection of SNP TSC0050614
gtaaagatagaay

SEQ ID NO: 206862 - DNA, 13 bp, Artificial Sequence
  Oligonucleotide for detection of SNP TSC0050614
rttctatctttac

SEQ ID NO: 206863 - DNA, 13 bp, Artificial Sequence
  Oligonucleotide for detection of SNP TSC0050614
gtaaaggtagaay

SEQ ID NO: 206864 - DNA, 13 bp, Artificial Sequence
  Oligonucleotide for detection of SNP TSC0050614
rttctacctttac

SEQ ID NO: 206865 - DNA, 13 bp, Artificial Sequence
  Oligonucleotide for detection of SNP TSC0050615
tgtaggtttattt

SEQ ID NO: 206866 - DNA, 13 bp, Artificial Sequence
  Oligonucleotide for detection of SNP TSC0050615
aaataaacctaca

SEQ ID NO: 206867 - DNA, 13 bp, Artificial Sequence
  Oligonucleotide for detection of SNP TSC0050615
tgtagggttattt

SEQ ID NO: 206868 - DNA, 13 bp, Artificial Sequence
  Oligonucleotide for detection of SNP TSC0050615
aaataaccctaca

SEQ ID NO: 206869 - DNA, 13 bp, Artificial Sequence
  Oligonucleotide for detection of SNP TSC0050615
aaatgggtttgta

SEQ ID NO: 206870 - DNA, 13 bp, Artificial Sequence
  Oligonucleotide for detection of SNP TSC0050615
tacaaacccattt

SEQ ID NO: 206871 - DNA, 13 bp, Artificial Sequence
  Oligonucleotide for detection of SNP TSC0050615
aaatggttttgta

SEQ ID NO: 206872 - DNA, 13 bp, Artificial Sequence
  Oligonucleotide for detection of SNP TSC0050615
tacaaaaccattt

SEQ ID NO: 206873 - DNA, 13 bp, Artificial Sequence
  Oligonucleotide for detection of SNP TSC0050616
ttgttatgtgatg

SEQ ID NO: 206874 - DNA, 13 bp, Artificial Sequence
  Oligonucleotide for detection of SNP TSC0050616
catcacataacaa

SEQ ID NO: 206875 - DNA, 13 bp, Artificial Sequence
  Oligonucleotide for detection of SNP TSC0050616
ttgttacgtgatg

SEQ ID NO: 206876 - DNA, 13 bp, Artificial Sequence
  Oligonucleotide for detection of SNP TSC0050616
catcacgtaacaa

SEQ ID NO: 206877 - DNA, 13 bp, Artificial Sequence
  Oligonucleotide for detection of SNP TSC0050616
tattacgtaatag

SEQ ID NO: 206878 - DNA, 13 bp, Artificial Sequence
  Oligonucleotide for detection of SNP TSC0050616
ctattacgtaata

SEQ ID NO: 206879 - DNA, 13 bp, Artificial Sequence
  Oligonucleotide for detection of SNP TSC0050620
atattatagttaa

SEQ ID NO: 206880 - DNA, 13 bp, Artificial Sequence
  Oligonucleotide for detection of SNP TSC0050620
ttaactataatat

SEQ ID NO: 206881 - DNA, 13 bp, Artificial Sequence
  Oligonucleotide for detection of SNP TSC0050620
atattagagttaa

SEQ ID NO: 206882 - DNA, 13 bp, Artificial Sequence
  Oligonucleotide for detection of SNP TSC0050620
ttaactctaatat

SEQ ID NO: 206883 - DNA, 13 bp, Artificial Sequence
  Oligonucleotide for detection of SNP TSC0050620
ttagttatgatat

SEQ ID NO: 206884 - DNA, 13 bp, Artificial Sequence
  Oligonucleotide for detection of SNP TSC0050620
atatcataactaa

SEQ ID NO: 206885 - DNA, 13 bp, Artificial Sequence
  Oligonucleotide for detection of SNP TSC0050620
ttagttttgatat

SEQ ID NO: 206886 - DNA, 13 bp, Artificial Sequence
  Oligonucleotide for detection of SNP TSC0050620
atatcaaaactaa

SEQ ID NO: 206887 - DNA, 13 bp, Artificial Sequence
  Oligonucleotide for detection of SNP TSC0050621
tgtgtaaaattay

SEQ ID NO: 206888 - DNA, 13 bp, Artificial Sequence
  Oligonucleotide for detection of SNP TSC0050621
rtaattttacaca

SEQ ID NO: 206889 - DNA, 13 bp, Artificial Sequence
  Oligonucleotide for detection of SNP TSC0050621
tgtgtataattay

SEQ ID NO: 206890 - DNA, 13 bp, Artificial Sequence
  Oligonucleotide for detection of SNP TSC0050621
rtaattatacaca

SEQ ID NO: 206891 - DNA, 13 bp, Artificial Sequence
  Oligonucleotide for detection of SNP TSC0050621
tgcgtaaaattay

SEQ ID NO: 206892 - DNA, 13 bp, Artificial Sequence
  Oligonucleotide for detection of SNP TSC0050621
rtaattttacgca

SEQ ID NO: 206893 - DNA, 13 bp, Artificial Sequence
  Oligonucleotide for detection of SNP TSC0050621
tgcgtataattay

SEQ ID NO: 206894 - DNA, 13 bp, Artificial Sequence
  Oligonucleotide for detection of SNP TSC0050621
rtaattatacgca

SEQ ID NO: 206895 - DNA, 13 bp, Artificial Sequence
  Oligonucleotide for detection of SNP TSC0050621
gtaattttgtgta

SEQ ID NO: 206896 - DNA, 13 bp, Artificial Sequence
  Oligonucleotide for detection of SNP TSC0050621
tacacaaaattac

SEQ ID NO: 206897 - DNA, 13 bp, Artificial Sequence
  Oligonucleotide for detection of SNP TSC0050621
gtaattatgtgta

SEQ ID NO: 206898 - DNA, 13 bp, Artificial Sequence
  Oligonucleotide for detection of SNP TSC0050621
tacacataattac

SEQ ID NO: 206899 - DNA, 13 bp, Artificial Sequence
  Oligonucleotide for detection of SNP TSC0050621
gtaattttgcgta

SEQ ID NO: 206900 - DNA, 13 bp, Artificial Sequence
  Oligonucleotide for detection of SNP TSC0050621
tacgcaaaattac

SEQ ID NO: 206901 - DNA, 13 bp, Artificial Sequence
  Oligonucleotide for detection of SNP TSC0050621
gtaattatgcgta

SEQ ID NO: 206902 - DNA, 13 bp, Artificial Sequence
  Oligonucleotide for detection of SNP TSC0050621
tacgcataattac

SEQ ID NO: 206903 - DNA, 13 bp, Artificial Sequence
  Oligonucleotide for detection of SNP TSC0050623
atttaaagtttta

SEQ ID NO: 206904 - DNA, 13 bp, Artificial Sequence
  Oligonucleotide for detection of SNP TSC0050623
taaaactttaaat

SEQ ID NO: 206905 - DNA, 13 bp, Artificial Sequence
  Oligonucleotide for detection of SNP TSC0050623
atttaaggtttta

SEQ ID NO: 206906 - DNA, 13 bp, Artificial Sequence
  Oligonucleotide for detection of SNP TSC0050623
taaaaccttaaat

SEQ ID NO: 206907 - DNA, 13 bp, Artificial Sequence
  Oligonucleotide for detection of SNP TSC0050624
tgttaattgtatt

SEQ ID NO: 206908 - DNA, 13 bp, Artificial Sequence
  Oligonucleotide for detection of SNP TSC0050624
aatacaattaaca

SEQ ID NO: 206909 - DNA, 13 bp, Artificial Sequence
  Oligonucleotide for detection of SNP TSC0050624
tgttaagtgtatt

SEQ ID NO: 206910 - DNA, 13 bp, Artificial Sequence
  Oligonucleotide for detection of SNP TSC0050624
aatacacttaaca

SEQ ID NO: 206911 - DNA, 13 bp, Artificial Sequence
  Oligonucleotide for detection of SNP TSC0050624
aatataattagta

SEQ ID NO: 206912 - DNA, 13 bp, Artificial Sequence
  Oligonucleotide for detection of SNP TSC0050624
tactaattatatt

SEQ ID NO: 206913 - DNA, 13 bp, Artificial Sequence
  Oligonucleotide for detection of SNP TSC0050624
aatatatttagta

SEQ ID NO: 206914 - DNA, 13 bp, Artificial Sequence
  Oligonucleotide for detection of SNP TSC0050624
tactaaatatatt

SEQ ID NO: 206915 - DNA, 13 bp, Artificial Sequence
  Oligonucleotide for detection of SNP TSC0050626
aaaaagtaagttt

SEQ ID NO: 206916 - DNA, 13 bp, Artificial Sequence
  Oligonucleotide for detection of SNP TSC0050626
aaacttacttttt

SEQ ID NO: 206917 - DNA, 13 bp, Artificial Sequence
  Oligonucleotide for detection of SNP TSC0050626
aaaaaggaagttt

SEQ ID NO: 206918 - DNA, 13 bp, Artificial Sequence
  Oligonucleotide for detection of SNP TSC0050626
aaacttccttttt

SEQ ID NO: 206919 - DNA, 13 bp, Artificial Sequence
  Oligonucleotide for detection of SNP TSC0050626
aagtttttttttt

SEQ ID NO: 206920 - DNA, 13 bp, Artificial Sequence
  Oligonucleotide for detection of SNP TSC0050626
aaaaaaaaaactt

SEQ ID NO: 206921 - DNA, 13 bp, Artificial Sequence
  Oligonucleotide for detection of SNP TSC0005194
tataaggtggttt

SEQ ID NO: 206922 - DNA, 13 bp, Artificial Sequence
  Oligonucleotide for detection of SNP TSC0005194
aaaccaccttata

SEQ ID NO: 206923 - DNA, 13 bp, Artificial Sequence
  Oligonucleotide for detection of SNP TSC0005194
tataagatggttt

SEQ ID NO: 206924 - DNA, 13 bp, Artificial Sequence
  Oligonucleotide for detection of SNP TSC0005194
aaaccatcttata

SEQ ID NO: 206925 - DNA, 13 bp, Artificial Sequence
  Oligonucleotide for detection of SNP TSC0050632
tttattggtgaga

SEQ ID NO: 206926 - DNA, 13 bp, Artificial Sequence
  Oligonucleotide for detection of SNP TSC0050632
tctcaccaataaa

SEQ ID NO: 206927 - DNA, 13 bp, Artificial Sequence
  Oligonucleotide for detection of SNP TSC0050632
ttttataaatggg

SEQ ID NO: 206928 - DNA, 13 bp, Artificial Sequence
  Oligonucleotide for detection of SNP TSC0050632
cccatttataaaa

SEQ ID NO: 206929 - DNA, 13 bp, Artificial Sequence
  Oligonucleotide for detection of SNP TSC0050632
ttttattaatggg

SEQ ID NO: 206930 - DNA, 13 bp, Artificial Sequence
  Oligonucleotide for detection of SNP TSC0050632
cccattaataaaa

SEQ ID NO: 206931 - DNA, 13 bp, Artificial Sequence
  Oligonucleotide for detection of SNP TSC0050633
aatttatggtatt

SEQ ID NO: 206932 - DNA, 13 bp, Artificial Sequence
  Oligonucleotide for detection of SNP TSC0050633
aataccataaatt

SEQ ID NO: 206933 - DNA, 13 bp, Artificial Sequence
  Oligonucleotide for detection of SNP TSC0050633
aatttagggtatt

SEQ ID NO: 206934 - DNA, 13 bp, Artificial Sequence
  Oligonucleotide for detection of SNP TSC0050633
aataccctaaatt

SEQ ID NO: 206935 - DNA, 13 bp, Artificial Sequence
  Oligonucleotide for detection of SNP TSC0050633
aatattatgagtt

SEQ ID NO: 206936 - DNA, 13 bp, Artificial Sequence
  Oligonucleotide for detection of SNP TSC0050633
aactcataatatt

SEQ ID NO: 206937 - DNA, 13 bp, Artificial Sequence
  Oligonucleotide for detection of SNP TSC0050633
aatattttgagtt

SEQ ID NO: 206938 - DNA, 13 bp, Artificial Sequence
  Oligonucleotide for detection of SNP TSC0050633
aactcaaaatatt

SEQ ID NO: 206939 - DNA, 13 bp, Artificial Sequence
  Oligonucleotide for detection of SNP TSC0050634
taataagtttaaa

SEQ ID NO: 206940 - DNA, 13 bp, Artificial Sequence
  Oligonucleotide for detection of SNP TSC0050634
tttaaacttatta

SEQ ID NO: 206941 - DNA, 13 bp, Artificial Sequence
  Oligonucleotide for detection of SNP TSC0050639
ataggggtagaaa

SEQ ID NO: 206942 - DNA, 13 bp, Artificial Sequence
  Oligonucleotide for detection of SNP TSC0050639
tttctacccctat

SEQ ID NO: 206943 - DNA, 13 bp, Artificial Sequence
  Oligonucleotide for detection of SNP TSC0050639
atagggatagaaa

SEQ ID NO: 206944 - DNA, 13 bp, Artificial Sequence
  Oligonucleotide for detection of SNP TSC0050639
tttctatccctat

SEQ ID NO: 206945 - DNA, 13 bp, Artificial Sequence
  Oligonucleotide for detection of SNP TSC0050640
attgttaattttt

SEQ ID NO: 206946 - DNA, 13 bp, Artificial Sequence
  Oligonucleotide for detection of SNP TSC0050640
aaaaattaacaat

SEQ ID NO: 206947 - DNA, 13 bp, Artificial Sequence
  Oligonucleotide for detection of SNP TSC0050640
attgttgattttt

SEQ ID NO: 206948 - DNA, 13 bp, Artificial Sequence
  Oligonucleotide for detection of SNP TSC0050640
aaaaatcaacaat

SEQ ID NO: 206949 - DNA, 13 bp, Artificial Sequence
  Oligonucleotide for detection of SNP TSC0050640
attgtcgattttt

SEQ ID NO: 206950 - DNA, 13 bp, Artificial Sequence
  Oligonucleotide for detection of SNP TSC0050640
aaaaatcgacaat

SEQ ID NO: 206951 - DNA, 13 bp, Artificial Sequence
  Oligonucleotide for detection of SNP TSC0050640
aaaaattgataat

SEQ ID NO: 206952 - DNA, 13 bp, Artificial Sequence
  Oligonucleotide for detection of SNP TSC0050640
attatcaattttt

SEQ ID NO: 206953 - DNA, 13 bp, Artificial Sequence
  Oligonucleotide for detection of SNP TSC0050640
aaaaatcgataat

SEQ ID NO: 206954 - DNA, 13 bp, Artificial Sequence
  Oligonucleotide for detection of SNP TSC0050640
attatcgattttt

SEQ ID NO: 206955 - DNA, 13 bp, Artificial Sequence
  Oligonucleotide for detection of SNP TSC0050641
aaatgaaaagtag

SEQ ID NO: 206956 - DNA, 13 bp, Artificial Sequence
  Oligonucleotide for detection of SNP TSC0050641
ctacttttcattt

SEQ ID NO: 206957 - DNA, 13 bp, Artificial Sequence
  Oligonucleotide for detection of SNP TSC0050641
aaatgagaagtag

SEQ ID NO: 206958 - DNA, 13 bp, Artificial Sequence
  Oligonucleotide for detection of SNP TSC0050641
ctacttctcattt

SEQ ID NO: 206959 - DNA, 13 bp, Artificial Sequence
  Oligonucleotide for detection of SNP TSC0050642
atatttataaagt

SEQ ID NO: 206960 - DNA, 13 bp, Artificial Sequence
  Oligonucleotide for detection of SNP TSC0050642
actttataaatat

SEQ ID NO: 206961 - DNA, 13 bp, Artificial Sequence
  Oligonucleotide for detection of SNP TSC0050645
ttatagtatagat

SEQ ID NO: 206962 - DNA, 13 bp, Artificial Sequence
  Oligonucleotide for detection of SNP TSC0050645
atctatactataa

SEQ ID NO: 206963 - DNA, 13 bp, Artificial Sequence
  Oligonucleotide for detection of SNP TSC0050645
ttataggatagat

SEQ ID NO: 206964 - DNA, 13 bp, Artificial Sequence
  Oligonucleotide for detection of SNP TSC0050645
atctatcctataa

SEQ ID NO: 206965 - DNA, 13 bp, Artificial Sequence
  Oligonucleotide for detection of SNP TSC0050645
atttatgttatgg

SEQ ID NO: 206966 - DNA, 13 bp, Artificial Sequence
  Oligonucleotide for detection of SNP TSC0050645
ccataacataaat

SEQ ID NO: 206967 - DNA, 13 bp, Artificial Sequence
  Oligonucleotide for detection of SNP TSC0050645
atttattttatgg

SEQ ID NO: 206968 - DNA, 13 bp, Artificial Sequence
  Oligonucleotide for detection of SNP TSC0050645
ccataaaataaat

SEQ ID NO: 206969 - DNA, 13 bp, Artificial Sequence
  Oligonucleotide for detection of SNP TSC0007007
gggggtagatttt

SEQ ID NO: 206970 - DNA, 13 bp, Artificial Sequence
  Oligonucleotide for detection of SNP TSC0007007
aaaatctaccccc

SEQ ID NO: 206971 - DNA, 13 bp, Artificial Sequence
  Oligonucleotide for detection of SNP TSC0007007
gggggtggatttt

SEQ ID NO: 206972 - DNA, 13 bp, Artificial Sequence
  Oligonucleotide for detection of SNP TSC0007007
aaaatccaccccc

SEQ ID NO: 206973 - DNA, 13 bp, Artificial Sequence
  Oligonucleotide for detection of SNP TSC0007007
gggggcggatttt

SEQ ID NO: 206974 - DNA, 13 bp, Artificial Sequence
  Oligonucleotide for detection of SNP TSC0007007
aaaatccgccccc

SEQ ID NO: 206975 - DNA, 13 bp, Artificial Sequence
  Oligonucleotide for detection of SNP TSC0007007
aaaatttgtttty

SEQ ID NO: 206976 - DNA, 13 bp, Artificial Sequence
  Oligonucleotide for detection of SNP TSC0007007
raaaacaaatttt

SEQ ID NO: 206977 - DNA, 13 bp, Artificial Sequence
  Oligonucleotide for detection of SNP TSC0007007
aaaattcgtttty

SEQ ID NO: 206978 - DNA, 13 bp, Artificial Sequence
  Oligonucleotide for detection of SNP TSC0007007
raaaacgaatttt

SEQ ID NO: 206979 - DNA, 13 bp, Artificial Sequence
  Oligonucleotide for detection of SNP TSC0050646
tggtatggtgtaa

SEQ ID NO: 206980 - DNA, 13 bp, Artificial Sequence
  Oligonucleotide for detection of SNP TSC0050646
ttacaccatacca

SEQ ID NO: 206981 - DNA, 13 bp, Artificial Sequence
  Oligonucleotide for detection of SNP TSC0050646
tggtatagtgtaa

SEQ ID NO: 206982 - DNA, 13 bp, Artificial Sequence
  Oligonucleotide for detection of SNP TSC0050646
ttacactatacca

SEQ ID NO: 206983 - DNA, 13 bp, Artificial Sequence
  Oligonucleotide for detection of SNP TSC0050647
tatatttagatgt

SEQ ID NO: 206984 - DNA, 13 bp, Artificial Sequence
  Oligonucleotide for detection of SNP TSC0050647
acatctaaatata

SEQ ID NO: 206985 - DNA, 13 bp, Artificial Sequence
  Oligonucleotide for detection of SNP TSC0050647
tatattgagatgt

SEQ ID NO: 206986 - DNA, 13 bp, Artificial Sequence
  Oligonucleotide for detection of SNP TSC0050647
acatctcaatata

SEQ ID NO: 206987 - DNA, 13 bp, Artificial Sequence
  Oligonucleotide for detection of SNP TSC0050648
tagtattgatttt

SEQ ID NO: 206988 - DNA, 13 bp, Artificial Sequence
  Oligonucleotide for detection of SNP TSC0050648
aaaatcaatacta

SEQ ID NO: 206989 - DNA, 13 bp, Artificial Sequence
  Oligonucleotide for detection of SNP TSC0050648
tagtatcgatttt

SEQ ID NO: 206990 - DNA, 13 bp, Artificial Sequence
  Oligonucleotide for detection of SNP TSC0050648
aaaatcgatacta

SEQ ID NO: 206991 - DNA, 13 bp, Artificial Sequence
  Oligonucleotide for detection of SNP TSC0050648
aaagttggtgttg

SEQ ID NO: 206992 - DNA, 13 bp, Artificial Sequence
  Oligonucleotide for detection of SNP TSC0050648
caacaccaacttt

SEQ ID NO: 206993 - DNA, 13 bp, Artificial Sequence
  Oligonucleotide for detection of SNP TSC0050648
aaagttagtgttg

SEQ ID NO: 206994 - DNA, 13 bp, Artificial Sequence
  Oligonucleotide for detection of SNP TSC0050648
caacactaacttt

SEQ ID NO: 206995 - DNA, 13 bp, Artificial Sequence
  Oligonucleotide for detection of SNP TSC0050648
aaagtcggtgttg

SEQ ID NO: 206996 - DNA, 13 bp, Artificial Sequence
  Oligonucleotide for detection of SNP TSC0050648
caacaccgacttt

SEQ ID NO: 206997 - DNA, 13 bp, Artificial Sequence
  Oligonucleotide for detection of SNP TSC0050649
agagtttgaataa

SEQ ID NO: 206998 - DNA, 13 bp, Artificial Sequence
  Oligonucleotide for detection of SNP TSC0050649
ttattcaaactct

SEQ ID NO: 206999 - DNA, 13 bp, Artificial Sequence
  Oligonucleotide for detection of SNP TSC0050649
ttgtttaagtttt

SEQ ID NO: 207000 - DNA, 13 bp, Artificial Sequence
  Oligonucleotide for detection of SNP TSC0050649
aaaacttaaacaa

SEQ ID NO: 207001 - DNA, 13 bp, Artificial Sequence
  Oligonucleotide for detection of SNP TSC0050651
ggtaggtggtgaa

SEQ ID NO: 207002 - DNA, 13 bp, Artificial Sequence
  Oligonucleotide for detection of SNP TSC0050651
ttcaccacctacc

SEQ ID NO: 207003 - DNA, 13 bp, Artificial Sequence
  Oligonucleotide for detection of SNP TSC0050651
ggtaggcggtgaa

SEQ ID NO: 207004 - DNA, 13 bp, Artificial Sequence
  Oligonucleotide for detection of SNP TSC0050651
ttcaccgcctacc

SEQ ID NO: 207005 - DNA, 13 bp, Artificial Sequence
  Oligonucleotide for detection of SNP TSC0050651
ggtaggtggcgaa

SEQ ID NO: 207006 - DNA, 13 bp, Artificial Sequence
  Oligonucleotide for detection of SNP TSC0050651
ttcgccacctacc

SEQ ID NO: 207007 - DNA, 13 bp, Artificial Sequence
  Oligonucleotide for detection of SNP TSC0050651
ggtaggcggcgaa

SEQ ID NO: 207008 - DNA, 13 bp, Artificial Sequence
  Oligonucleotide for detection of SNP TSC0050651
ttcgccgcctacc

SEQ ID NO: 207009 - DNA, 13 bp, Artificial Sequence
  Oligonucleotide for detection of SNP TSC0050652
tggtaagtagtta

SEQ ID NO: 207010 - DNA, 13 bp, Artificial Sequence
  Oligonucleotide for detection of SNP TSC0050652
taactacttacca

SEQ ID NO: 207011 - DNA, 13 bp, Artificial Sequence
  Oligonucleotide for detection of SNP TSC0050652
tggtaaatagtta

SEQ ID NO: 207012 - DNA, 13 bp, Artificial Sequence
  Oligonucleotide for detection of SNP TSC0050652
taactatttacca

SEQ ID NO: 207013 - DNA, 13 bp, Artificial Sequence
  Oligonucleotide for detection of SNP TSC0050653
gagaatatagagy

SEQ ID NO: 207014 - DNA, 13 bp, Artificial Sequence
  Oligonucleotide for detection of SNP TSC0050653
rctctatattctc

SEQ ID NO: 207015 - DNA, 13 bp, Artificial Sequence
  Oligonucleotide for detection of SNP TSC0050653
gagaatttagagy

SEQ ID NO: 207016 - DNA, 13 bp, Artificial Sequence
  Oligonucleotide for detection of SNP TSC0050653
rctctaaattctc

SEQ ID NO: 207017 - DNA, 13 bp, Artificial Sequence
  Oligonucleotide for detection of SNP TSC0050654
aatagtttattay

SEQ ID NO: 207018 - DNA, 13 bp, Artificial Sequence
  Oligonucleotide for detection of SNP TSC0050654
rtaataaactatt

SEQ ID NO: 207019 - DNA, 13 bp, Artificial Sequence
  Oligonucleotide for detection of SNP TSC0050654
aatagtgtattay

SEQ ID NO: 207020 - DNA, 13 bp, Artificial Sequence
  Oligonucleotide for detection of SNP TSC0050654
rtaatacactatt

SEQ ID NO: 207021 - DNA, 13 bp, Artificial Sequence
  Oligonucleotide for detection of SNP TSC0050654
aatagcgtattay

SEQ ID NO: 207022 - DNA, 13 bp, Artificial Sequence
  Oligonucleotide for detection of SNP TSC0050654
rtaatacgctatt

SEQ ID NO: 207023 - DNA, 13 bp, Artificial Sequence
  Oligonucleotide for detection of SNP TSC0050654
gtgataggttatt

SEQ ID NO: 207024 - DNA, 13 bp, Artificial Sequence
  Oligonucleotide for detection of SNP TSC0050654
aataacctatcac

SEQ ID NO: 207025 - DNA, 13 bp, Artificial Sequence
  Oligonucleotide for detection of SNP TSC0050654
gtgatatgttatt

SEQ ID NO: 207026 - DNA, 13 bp, Artificial Sequence
  Oligonucleotide for detection of SNP TSC0050654
aataacatatcac

SEQ ID NO: 207027 - DNA, 13 bp, Artificial Sequence
  Oligonucleotide for detection of SNP TSC0050654
gtgatacgttatt

SEQ ID NO: 207028 - DNA, 13 bp, Artificial Sequence
  Oligonucleotide for detection of SNP TSC0050654
aataacgtatcac

SEQ ID NO: 207029 - DNA, 13 bp, Artificial Sequence
  Oligonucleotide for detection of SNP TSC0050655
ttattaaagaaat

SEQ ID NO: 207030 - DNA, 13 bp, Artificial Sequence
  Oligonucleotide for detection of SNP TSC0050655
atttctttaataa

SEQ ID NO: 207031 - DNA, 13 bp, Artificial Sequence
  Oligonucleotide for detection of SNP TSC0050655
ttattatagaaat

SEQ ID NO: 207032 - DNA, 13 bp, Artificial Sequence
  Oligonucleotide for detection of SNP TSC0050655
atttctataataa

SEQ ID NO: 207033 - DNA, 13 bp, Artificial Sequence
  Oligonucleotide for detection of SNP TSC0050655
atttttttaatag

SEQ ID NO: 207034 - DNA, 13 bp, Artificial Sequence
  Oligonucleotide for detection of SNP TSC0050655
ctattaaaaaaat

SEQ ID NO: 207035 - DNA, 13 bp, Artificial Sequence
  Oligonucleotide for detection of SNP TSC0050655
atttttgtaatag

SEQ ID NO: 207036 - DNA, 13 bp, Artificial Sequence
  Oligonucleotide for detection of SNP TSC0050655
ctattacaaaaat

SEQ ID NO: 207037 - DNA, 13 bp, Artificial Sequence
  Oligonucleotide for detection of SNP TSC0050656
ttgtatattgtgg

SEQ ID NO: 207038 - DNA, 13 bp, Artificial Sequence
  Oligonucleotide for detection of SNP TSC0050656
ccacaatatacaa

SEQ ID NO: 207039 - DNA, 13 bp, Artificial Sequence
  Oligonucleotide for detection of SNP TSC0050656
ttgtatgttgtgg

SEQ ID NO: 207040 - DNA, 13 bp, Artificial Sequence
  Oligonucleotide for detection of SNP TSC0050656
ccacaacatacaa

SEQ ID NO: 207041 - DNA, 13 bp, Artificial Sequence
  Oligonucleotide for detection of SNP TSC0004692
atttagagttggy

SEQ ID NO: 207042 - DNA, 13 bp, Artificial Sequence
  Oligonucleotide for detection of SNP TSC0004692
rccaactctaaat

SEQ ID NO: 207043 - DNA, 13 bp, Artificial Sequence
  Oligonucleotide for detection of SNP TSC0004692
atttagtgttggy

SEQ ID NO: 207044 - DNA, 13 bp, Artificial Sequence
  Oligonucleotide for detection of SNP TSC0004692
rccaacactaaat

SEQ ID NO: 207045 - DNA, 13 bp, Artificial Sequence
  Oligonucleotide for detection of SNP TSC0004692
gttaattttaaat

SEQ ID NO: 207046 - DNA, 13 bp, Artificial Sequence
  Oligonucleotide for detection of SNP TSC0004692
atttaaaattaac

SEQ ID NO: 207047 - DNA, 13 bp, Artificial Sequence
  Oligonucleotide for detection of SNP TSC0004692
gttaatattaaat

SEQ ID NO: 207048 - DNA, 13 bp, Artificial Sequence
  Oligonucleotide for detection of SNP TSC0004692
atttaatattaac

SEQ ID NO: 207049 - DNA, 13 bp, Artificial Sequence
  Oligonucleotide for detection of SNP TSC0000304
tattatagattag

SEQ ID NO: 207050 - DNA, 13 bp, Artificial Sequence
  Oligonucleotide for detection of SNP TSC0000304
ctaatctataata

SEQ ID NO: 207051 - DNA, 13 bp, Artificial Sequence
  Oligonucleotide for detection of SNP TSC0000304
tattatggattag

SEQ ID NO: 207052 - DNA, 13 bp, Artificial Sequence
  Oligonucleotide for detection of SNP TSC0000304
ctaatccataata

SEQ ID NO: 207053 - DNA, 13 bp, Artificial Sequence
  Oligonucleotide for detection of SNP TSC0000304
tattacggattag

SEQ ID NO: 207054 - DNA, 13 bp, Artificial Sequence
  Oligonucleotide for detection of SNP TSC0000304
ctaatccgtaata

SEQ ID NO: 207055 - DNA, 13 bp, Artificial Sequence
  Oligonucleotide for detection of SNP TSC0000304
ttgatttgtagta

SEQ ID NO: 207056 - DNA, 13 bp, Artificial Sequence
  Oligonucleotide for detection of SNP TSC0000304
tactacaaatcaa

SEQ ID NO: 207057 - DNA, 13 bp, Artificial Sequence
  Oligonucleotide for detection of SNP TSC0000304
ttgattcgtagta

SEQ ID NO: 207058 - DNA, 13 bp, Artificial Sequence
  Oligonucleotide for detection of SNP TSC0000304
tactacgaatcaa

SEQ ID NO: 207059 - DNA, 13 bp, Artificial Sequence
  Oligonucleotide for detection of SNP TSC0050661
ttagattttattt

SEQ ID NO: 207060 - DNA, 13 bp, Artificial Sequence
  Oligonucleotide for detection of SNP TSC0050661
aaataaaatctaa

SEQ ID NO: 207061 - DNA, 13 bp, Artificial Sequence
  Oligonucleotide for detection of SNP TSC0050661
ttagatgttattt

SEQ ID NO: 207062 - DNA, 13 bp, Artificial Sequence
  Oligonucleotide for detection of SNP TSC0050661
aaataacatctaa

SEQ ID NO: 207063 - DNA, 13 bp, Artificial Sequence
  Oligonucleotide for detection of SNP TSC0050661
ttagacgttattt

SEQ ID NO: 207064 - DNA, 13 bp, Artificial Sequence
  Oligonucleotide for detection of SNP TSC0050661
aaataacgtctaa

SEQ ID NO: 207065 - DNA, 13 bp, Artificial Sequence
  Oligonucleotide for detection of SNP TSC0050661
aaataaggtttga

SEQ ID NO: 207066 - DNA, 13 bp, Artificial Sequence
  Oligonucleotide for detection of SNP TSC0050661
tcaaaccttattt

SEQ ID NO: 207067 - DNA, 13 bp, Artificial Sequence
  Oligonucleotide for detection of SNP TSC0050661
aaataacgtttga

SEQ ID NO: 207068 - DNA, 13 bp, Artificial Sequence
  Oligonucleotide for detection of SNP TSC0050661
tcaaacgttattt

SEQ ID NO: 207069 - DNA, 13 bp, Artificial Sequence
  Oligonucleotide for detection of SNP TSC0050668
atttttaatagta

SEQ ID NO: 207070 - DNA, 13 bp, Artificial Sequence
  Oligonucleotide for detection of SNP TSC0050668
tactattaaaaat

SEQ ID NO: 207071 - DNA, 13 bp, Artificial Sequence
  Oligonucleotide for detection of SNP TSC0050668
atttttgatagta

SEQ ID NO: 207072 - DNA, 13 bp, Artificial Sequence
  Oligonucleotide for detection of SNP TSC0050668
tactatcaaaaat

SEQ ID NO: 207073 - DNA, 13 bp, Artificial Sequence
  Oligonucleotide for detection of SNP TSC0050669
ataaaaggagggt

SEQ ID NO: 207074 - DNA, 13 bp, Artificial Sequence
  Oligonucleotide for detection of SNP TSC0050669
accctccttttat

SEQ ID NO: 207075 - DNA, 13 bp, Artificial Sequence
  Oligonucleotide for detection of SNP TSC0050669
ataaaaagagggt

SEQ ID NO: 207076 - DNA, 13 bp, Artificial Sequence
  Oligonucleotide for detection of SNP TSC0050669
accctctttttat

SEQ ID NO: 207077 - DNA, 13 bp, Artificial Sequence
  Oligonucleotide for detection of SNP TSC0050670
tagaggtgtattt

SEQ ID NO: 207078 - DNA, 13 bp, Artificial Sequence
  Oligonucleotide for detection of SNP TSC0050670
aaatacacctcta

SEQ ID NO: 207079 - DNA, 13 bp, Artificial Sequence
  Oligonucleotide for detection of SNP TSC0050670
tagaggcgtattt

SEQ ID NO: 207080 - DNA, 13 bp, Artificial Sequence
  Oligonucleotide for detection of SNP TSC0050670
aaatacgcctcta

SEQ ID NO: 207081 - DNA, 13 bp, Artificial Sequence
  Oligonucleotide for detection of SNP TSC0050673
ttatgtattgata

SEQ ID NO: 207082 - DNA, 13 bp, Artificial Sequence
  Oligonucleotide for detection of SNP TSC0050673
tatcaatacataa

SEQ ID NO: 207083 - DNA, 13 bp, Artificial Sequence
  Oligonucleotide for detection of SNP TSC0050673
ttatgttttgata

SEQ ID NO: 207084 - DNA, 13 bp, Artificial Sequence
  Oligonucleotide for detection of SNP TSC0050673
tatcaaaacataa

SEQ ID NO: 207085 - DNA, 13 bp, Artificial Sequence
  Oligonucleotide for detection of SNP TSC0050673
tgttagtgtatgg

SEQ ID NO: 207086 - DNA, 13 bp, Artificial Sequence
  Oligonucleotide for detection of SNP TSC0050673
ccatacactaaca

SEQ ID NO: 207087 - DNA, 13 bp, Artificial Sequence
  Oligonucleotide for detection of SNP TSC0050673
tgttagagtatgg

SEQ ID NO: 207088 - DNA, 13 bp, Artificial Sequence
  Oligonucleotide for detection of SNP TSC0050673
ccatactctaaca

SEQ ID NO: 207089 - DNA, 13 bp, Artificial Sequence
  Oligonucleotide for detection of SNP TSC0050674
gattatgttttgy

SEQ ID NO: 207090 - DNA, 13 bp, Artificial Sequence
  Oligonucleotide for detection of SNP TSC0050674
rcaaaacataatc

SEQ ID NO: 207091 - DNA, 13 bp, Artificial Sequence
  Oligonucleotide for detection of SNP TSC0050674
gattatattttgy

SEQ ID NO: 207092 - DNA, 13 bp, Artificial Sequence
  Oligonucleotide for detection of SNP TSC0050674
rcaaaatataatc

SEQ ID NO: 207093 - DNA, 13 bp, Artificial Sequence
  Oligonucleotide for detection of SNP TSC0050678
gaaatttgttaag

SEQ ID NO: 207094 - DNA, 13 bp, Artificial Sequence
  Oligonucleotide for detection of SNP TSC0050678
cttaacaaatttc

SEQ ID NO: 207095 - DNA, 13 bp, Artificial Sequence
  Oligonucleotide for detection of SNP TSC0050678
gaaattcgttaag

SEQ ID NO: 207096 - DNA, 13 bp, Artificial Sequence
  Oligonucleotide for detection of SNP TSC0050678
cttaacgaatttc

SEQ ID NO: 207097 - DNA, 13 bp, Artificial Sequence
  Oligonucleotide for detection of SNP TSC0050678
tttagtgaattty

SEQ ID NO: 207098 - DNA, 13 bp, Artificial Sequence
  Oligonucleotide for detection of SNP TSC0050678
raaattcactaaa

SEQ ID NO: 207099 - DNA, 13 bp, Artificial Sequence
  Oligonucleotide for detection of SNP TSC0050678
tttagtaaattty

SEQ ID NO: 207100 - DNA, 13 bp, Artificial Sequence
  Oligonucleotide for detection of SNP TSC0050678
raaatttactaaa

SEQ ID NO: 207101 - DNA, 13 bp, Artificial Sequence
  Oligonucleotide for detection of SNP TSC0050678
tttagcgaattty

SEQ ID NO: 207102 - DNA, 13 bp, Artificial Sequence
  Oligonucleotide for detection of SNP TSC0050678
raaattcgctaaa

SEQ ID NO: 207103 - DNA, 13 bp, Artificial Sequence
  Oligonucleotide for detection of SNP TSC0050679
taaatatttattt

SEQ ID NO: 207104 - DNA, 13 bp, Artificial Sequence
  Oligonucleotide for detection of SNP TSC0050679
aaataaatattta

SEQ ID NO: 207105 - DNA, 13 bp, Artificial Sequence
  Oligonucleotide for detection of SNP TSC0050679
agatggttatttg

SEQ ID NO: 207106 - DNA, 13 bp, Artificial Sequence
  Oligonucleotide for detection of SNP TSC0050679
caaataaccatct

SEQ ID NO: 207107 - DNA, 13 bp, Artificial Sequence
  Oligonucleotide for detection of SNP TSC0050679
agatggatatttg

SEQ ID NO: 207108 - DNA, 13 bp, Artificial Sequence
  Oligonucleotide for detection of SNP TSC0050679
caaatatccatct

SEQ ID NO: 207109 - DNA, 13 bp, Artificial Sequence
  Oligonucleotide for detection of SNP TSC0050680
agatatatattta

SEQ ID NO: 207110 - DNA, 13 bp, Artificial Sequence
  Oligonucleotide for detection of SNP TSC0050680
taaatatatatct

SEQ ID NO: 207111 - DNA, 13 bp, Artificial Sequence
  Oligonucleotide for detection of SNP TSC0050680
agatatttattta

SEQ ID NO: 207112 - DNA, 13 bp, Artificial Sequence
  Oligonucleotide for detection of SNP TSC0050680
taaataaatatct

SEQ ID NO: 207113 - DNA, 13 bp, Artificial Sequence
  Oligonucleotide for detection of SNP TSC0000846
ttttatgtataag

SEQ ID NO: 207114 - DNA, 13 bp, Artificial Sequence
  Oligonucleotide for detection of SNP TSC0000846
cttatacataaaa

SEQ ID NO: 207115 - DNA, 13 bp, Artificial Sequence
  Oligonucleotide for detection of SNP TSC0006728
tgttgggtttttg

SEQ ID NO: 207116 - DNA, 13 bp, Artificial Sequence
  Oligonucleotide for detection of SNP TSC0006728
caaaaacccaaca

SEQ ID NO: 207117 - DNA, 13 bp, Artificial Sequence
  Oligonucleotide for detection of SNP TSC0006728
tgttggatttttg

SEQ ID NO: 207118 - DNA, 13 bp, Artificial Sequence
  Oligonucleotide for detection of SNP TSC0006728
caaaaatccaaca

SEQ ID NO: 207119 - DNA, 13 bp, Artificial Sequence
  Oligonucleotide for detection of SNP TSC0005419
ggtatttggatta

SEQ ID NO: 207120 - DNA, 13 bp, Artificial Sequence
  Oligonucleotide for detection of SNP TSC0005419
taatccaaatacc

SEQ ID NO: 207121 - DNA, 13 bp, Artificial Sequence
  Oligonucleotide for detection of SNP TSC0005419
ggtattcggatta

SEQ ID NO: 207122 - DNA, 13 bp, Artificial Sequence
  Oligonucleotide for detection of SNP TSC0005419
taatccgaatacc

SEQ ID NO: 207123 - DNA, 13 bp, Artificial Sequence
  Oligonucleotide for detection of SNP TSC0005419
tgatttgaatgty

SEQ ID NO: 207124 - DNA, 13 bp, Artificial Sequence
  Oligonucleotide for detection of SNP TSC0005419
racattcaaatca

SEQ ID NO: 207125 - DNA, 13 bp, Artificial Sequence
  Oligonucleotide for detection of SNP TSC0005419
tgattcgaatgty

SEQ ID NO: 207126 - DNA, 13 bp, Artificial Sequence
  Oligonucleotide for detection of SNP TSC0005419
racattcgaatca

SEQ ID NO: 207127 - DNA, 13 bp, Artificial Sequence
  Oligonucleotide for detection of SNP TSC0007335
ttagaggtgaaag

SEQ ID NO: 207128 - DNA, 13 bp, Artificial Sequence
  Oligonucleotide for detection of SNP TSC0007335
ctttcacctctaa

SEQ ID NO: 207129 - DNA, 13 bp, Artificial Sequence
  Oligonucleotide for detection of SNP TSC0007335
ttagagatgaaag

SEQ ID NO: 207130 - DNA, 13 bp, Artificial Sequence
  Oligonucleotide for detection of SNP TSC0007335
ctttcatctctaa

SEQ ID NO: 207131 - DNA, 13 bp, Artificial Sequence
  Oligonucleotide for detection of SNP TSC0007336
gtttatatggtty

SEQ ID NO: 207132 - DNA, 13 bp, Artificial Sequence
  Oligonucleotide for detection of SNP TSC0007336
raaccatataaac

SEQ ID NO: 207133 - DNA, 13 bp, Artificial Sequence
  Oligonucleotide for detection of SNP TSC0007336
gtttatgtggtty

SEQ ID NO: 207134 - DNA, 13 bp, Artificial Sequence
  Oligonucleotide for detection of SNP TSC0007336
raaccacataaac

SEQ ID NO: 207135 - DNA, 13 bp, Artificial Sequence
  Oligonucleotide for detection of SNP TSC0007336
gtttacgtggtty

SEQ ID NO: 207136 - DNA, 13 bp, Artificial Sequence
  Oligonucleotide for detection of SNP TSC0007336
raaccacgtaaac

SEQ ID NO: 207137 - DNA, 13 bp, Artificial Sequence
  Oligonucleotide for detection of SNP TSC0007336
ggattatgtgaay

SEQ ID NO: 207138 - DNA, 13 bp, Artificial Sequence
  Oligonucleotide for detection of SNP TSC0007336
rttcacataatcc

SEQ ID NO: 207139 - DNA, 13 bp, Artificial Sequence
  Oligonucleotide for detection of SNP TSC0007336
ggattacgtgaay

SEQ ID NO: 207140 - DNA, 13 bp, Artificial Sequence
  Oligonucleotide for detection of SNP TSC0007336
rttcacgtaatcc

SEQ ID NO: 207141 - DNA, 13 bp, Artificial Sequence
  Oligonucleotide for detection of SNP TSC0005525
agggttaaatttt

SEQ ID NO: 207142 - DNA, 13 bp, Artificial Sequence
  Oligonucleotide for detection of SNP TSC0005525
aaaatttaaccct

SEQ ID NO: 207143 - DNA, 13 bp, Artificial Sequence
  Oligonucleotide for detection of SNP TSC0005525
agggtttaatttt

SEQ ID NO: 207144 - DNA, 13 bp, Artificial Sequence
  Oligonucleotide for detection of SNP TSC0005525
aaaattaaaccct

SEQ ID NO: 207145 - DNA, 13 bp, Artificial Sequence
  Oligonucleotide for detection of SNP TSC0005525
aaaattgaatttt

SEQ ID NO: 207146 - DNA, 13 bp, Artificial Sequence
  Oligonucleotide for detection of SNP TSC0005525
aaaattcaatttt

SEQ ID NO: 207147 - DNA, 13 bp, Artificial Sequence
  Oligonucleotide for detection of SNP TSC0050691
gtggtatgattat

SEQ ID NO: 207148 - DNA, 13 bp, Artificial Sequence
  Oligonucleotide for detection of SNP TSC0050691
ataatcataccac

SEQ ID NO: 207149 - DNA, 13 bp, Artificial Sequence
  Oligonucleotide for detection of SNP TSC0050691
gtggtacgattat

SEQ ID NO: 207150 - DNA, 13 bp, Artificial Sequence
  Oligonucleotide for detection of SNP TSC0050691
ataatcgtaccac

SEQ ID NO: 207151 - DNA, 13 bp, Artificial Sequence
  Oligonucleotide for detection of SNP TSC0050693
aaagatatattat

SEQ ID NO: 207152 - DNA, 13 bp, Artificial Sequence
  Oligonucleotide for detection of SNP TSC0050693
ataatatatcttt

SEQ ID NO: 207153 - DNA, 13 bp, Artificial Sequence
  Oligonucleotide for detection of SNP TSC0050693
aaagatgtattat

SEQ ID NO: 207154 - DNA, 13 bp, Artificial Sequence
  Oligonucleotide for detection of SNP TSC0050693
ataatacatcttt

SEQ ID NO: 207155 - DNA, 13 bp, Artificial Sequence
  Oligonucleotide for detection of SNP TSC0050693
aaagacgtattat

SEQ ID NO: 207156 - DNA, 13 bp, Artificial Sequence
  Oligonucleotide for detection of SNP TSC0050693
ataatacgtcttt

SEQ ID NO: 207157 - DNA, 13 bp, Artificial Sequence
  Oligonucleotide for detection of SNP TSC0050693
ataatatgttttt

SEQ ID NO: 207158 - DNA, 13 bp, Artificial Sequence
  Oligonucleotide for detection of SNP TSC0050693
aaaaacatattat

SEQ ID NO: 207159 - DNA, 13 bp, Artificial Sequence
  Oligonucleotide for detection of SNP TSC0050693
ataatacgttttt

SEQ ID NO: 207160 - DNA, 13 bp, Artificial Sequence
  Oligonucleotide for detection of SNP TSC0050693
aaaaacgtattat

SEQ ID NO: 207161 - DNA, 13 bp, Artificial Sequence
  Oligonucleotide for detection of SNP TSC0050694
tttttattttagy

SEQ ID NO: 207162 - DNA, 13 bp, Artificial Sequence
  Oligonucleotide for detection of SNP TSC0050694
rctaaaataaaaa

SEQ ID NO: 207163 - DNA, 13 bp, Artificial Sequence
  Oligonucleotide for detection of SNP TSC0050694
tttttagtttagy

SEQ ID NO: 207164 - DNA, 13 bp, Artificial Sequence
  Oligonucleotide for detection of SNP TSC0050694
rctaaactaaaaa

SEQ ID NO: 207165 - DNA, 13 bp, Artificial Sequence
  Oligonucleotide for detection of SNP TSC0050694
gttagagtagagg

SEQ ID NO: 207166 - DNA, 13 bp, Artificial Sequence
  Oligonucleotide for detection of SNP TSC0050694
cctctactctaac

SEQ ID NO: 207167 - DNA, 13 bp, Artificial Sequence
  Oligonucleotide for detection of SNP TSC0050694
gttagattagagg

SEQ ID NO: 207168 - DNA, 13 bp, Artificial Sequence
  Oligonucleotide for detection of SNP TSC0050694
cctctaatctaac

SEQ ID NO: 207169 - DNA, 13 bp, Artificial Sequence
  Oligonucleotide for detection of SNP TSC0007211
gtgaaagagggty

SEQ ID NO: 207170 - DNA, 13 bp, Artificial Sequence
  Oligonucleotide for detection of SNP TSC0007211
raccctctttcac

SEQ ID NO: 207171 - DNA, 13 bp, Artificial Sequence
  Oligonucleotide for detection of SNP TSC0007211
gtgaaaaagggty

SEQ ID NO: 207172 - DNA, 13 bp, Artificial Sequence
  Oligonucleotide for detection of SNP TSC0007211
raccctttttcac

SEQ ID NO: 207173 - DNA, 13 bp, Artificial Sequence
  Oligonucleotide for detection of SNP TSC0007259
agaggggttgtga

SEQ ID NO: 207174 - DNA, 13 bp, Artificial Sequence
  Oligonucleotide for detection of SNP TSC0007259
tcacaacccctct

SEQ ID NO: 207175 - DNA, 13 bp, Artificial Sequence
  Oligonucleotide for detection of SNP TSC0007259
agagggattgtga

SEQ ID NO: 207176 - DNA, 13 bp, Artificial Sequence
  Oligonucleotide for detection of SNP TSC0007259
tcacaatccctct

SEQ ID NO: 207177 - DNA, 13 bp, Artificial Sequence
  Oligonucleotide for detection of SNP TSC0050697
aagaaatattatt

SEQ ID NO: 207178 - DNA, 13 bp, Artificial Sequence
  Oligonucleotide for detection of SNP TSC0050697
aataatatttctt

SEQ ID NO: 207179 - DNA, 13 bp, Artificial Sequence
  Oligonucleotide for detection of SNP TSC0050697
aagaaagattatt

SEQ ID NO: 207180 - DNA, 13 bp, Artificial Sequence
  Oligonucleotide for detection of SNP TSC0050697
aataatctttctt

SEQ ID NO: 207181 - DNA, 13 bp, Artificial Sequence
  Oligonucleotide for detection of SNP TSC0050697
aatgatgtttttt

SEQ ID NO: 207182 - DNA, 13 bp, Artificial Sequence
  Oligonucleotide for detection of SNP TSC0050697
aaaaaacatcatt

SEQ ID NO: 207183 - DNA, 13 bp, Artificial Sequence
  Oligonucleotide for detection of SNP TSC0050697
aatgatttttttt

SEQ ID NO: 207184 - DNA, 13 bp, Artificial Sequence
  Oligonucleotide for detection of SNP TSC0050697
aaaaaaaatcatt

SEQ ID NO: 207185 - DNA, 13 bp, Artificial Sequence
  Oligonucleotide for detection of SNP TSC0050698
ttgataattatty

SEQ ID NO: 207186 - DNA, 13 bp, Artificial Sequence
  Oligonucleotide for detection of SNP TSC0050698
raataattatcaa

SEQ ID NO: 207187 - DNA, 13 bp, Artificial Sequence
  Oligonucleotide for detection of SNP TSC0050698
ttgatagttatty

SEQ ID NO: 207188 - DNA, 13 bp, Artificial Sequence
  Oligonucleotide for detection of SNP TSC0050698
raataactatcaa

SEQ ID NO: 207189 - DNA, 13 bp, Artificial Sequence
  Oligonucleotide for detection of SNP TSC0050699
gttttttagtgtg

SEQ ID NO: 207190 - DNA, 13 bp, Artificial Sequence
  Oligonucleotide for detection of SNP TSC0050699
cacactaaaaaac

SEQ ID NO: 207191 - DNA, 13 bp, Artificial Sequence
  Oligonucleotide for detection of SNP TSC0050699
gtttttgagtgtg

SEQ ID NO: 207192 - DNA, 13 bp, Artificial Sequence
  Oligonucleotide for detection of SNP TSC0050699
cacactcaaaaac

SEQ ID NO: 207193 - DNA, 13 bp, Artificial Sequence
  Oligonucleotide for detection of SNP TSC0050699
tatattgaagaay

SEQ ID NO: 207194 - DNA, 13 bp, Artificial Sequence
  Oligonucleotide for detection of SNP TSC0050699
rttcttcaatata

SEQ ID NO: 207195 - DNA, 13 bp, Artificial Sequence
  Oligonucleotide for detection of SNP TSC0050699
tatatttaagaay

SEQ ID NO: 207196 - DNA, 13 bp, Artificial Sequence
  Oligonucleotide for detection of SNP TSC0050699
rttcttaaatata

SEQ ID NO: 207197 - DNA, 13 bp, Artificial Sequence
  Oligonucleotide for detection of SNP TSC0007354
gtataaatatttg

SEQ ID NO: 207198 - DNA, 13 bp, Artificial Sequence
  Oligonucleotide for detection of SNP TSC0007354
caaatatttatac

SEQ ID NO: 207199 - DNA, 13 bp, Artificial Sequence
  Oligonucleotide for detection of SNP TSC0007354
gtataagtatttg

SEQ ID NO: 207200 - DNA, 13 bp, Artificial Sequence
  Oligonucleotide for detection of SNP TSC0007354
caaatacttatac

SEQ ID NO: 207201 - DNA, 13 bp, Artificial Sequence
  Oligonucleotide for detection of SNP TSC0007355
atataattatttg

SEQ ID NO: 207202 - DNA, 13 bp, Artificial Sequence
  Oligonucleotide for detection of SNP TSC0007355
caaataattatat

SEQ ID NO: 207203 - DNA, 13 bp, Artificial Sequence
  Oligonucleotide for detection of SNP TSC0007355
atataagtatttg

SEQ ID NO: 207204 - DNA, 13 bp, Artificial Sequence
  Oligonucleotide for detection of SNP TSC0007355
caaatacttatat

SEQ ID NO: 207205 - DNA, 13 bp, Artificial Sequence
  Oligonucleotide for detection of SNP TSC0007355
taagtagttgtat

SEQ ID NO: 207206 - DNA, 13 bp, Artificial Sequence
  Oligonucleotide for detection of SNP TSC0007355
atacaactactta

SEQ ID NO: 207207 - DNA, 13 bp, Artificial Sequence
  Oligonucleotide for detection of SNP TSC0007355
taagtatttgtat

SEQ ID NO: 207208 - DNA, 13 bp, Artificial Sequence
  Oligonucleotide for detection of SNP TSC0007355
atacaaatactta

SEQ ID NO: 207209 - DNA, 13 bp, Artificial Sequence
  Oligonucleotide for detection of SNP TSC0007356
tatatgtgagatt

SEQ ID NO: 207210 - DNA, 13 bp, Artificial Sequence
  Oligonucleotide for detection of SNP TSC0007356
aatctcacatata

SEQ ID NO: 207211 - DNA, 13 bp, Artificial Sequence
  Oligonucleotide for detection of SNP TSC0007356
tatatgcgagatt

SEQ ID NO: 207212 - DNA, 13 bp, Artificial Sequence
  Oligonucleotide for detection of SNP TSC0007356
aatctcgcatata

SEQ ID NO: 207213 - DNA, 13 bp, Artificial Sequence
  Oligonucleotide for detection of SNP TSC0007356
agtttcgtatgtg

SEQ ID NO: 207214 - DNA, 13 bp, Artificial Sequence
  Oligonucleotide for detection of SNP TSC0007356
cacatacgaaact

SEQ ID NO: 207215 - DNA, 13 bp, Artificial Sequence
  Oligonucleotide for detection of SNP TSC0010024
gttgtagagtgag

SEQ ID NO: 207216 - DNA, 13 bp, Artificial Sequence
  Oligonucleotide for detection of SNP TSC0010024
ctcactctacaac

SEQ ID NO: 207217 - DNA, 13 bp, Artificial Sequence
  Oligonucleotide for detection of SNP TSC0010024
gttgtaaagtgag

SEQ ID NO: 207218 - DNA, 13 bp, Artificial Sequence
  Oligonucleotide for detection of SNP TSC0010024
ctcactttacaac

SEQ ID NO: 207219 - DNA, 13 bp, Artificial Sequence
  Oligonucleotide for detection of SNP TSC0006162
ttttataaattgy

SEQ ID NO: 207220 - DNA, 13 bp, Artificial Sequence
  Oligonucleotide for detection of SNP TSC0006162
rcaatttataaaa

SEQ ID NO: 207221 - DNA, 13 bp, Artificial Sequence
  Oligonucleotide for detection of SNP TSC0006162
ttttatgaattgy

SEQ ID NO: 207222 - DNA, 13 bp, Artificial Sequence
  Oligonucleotide for detection of SNP TSC0006162
rcaattcataaaa

SEQ ID NO: 207223 - DNA, 13 bp, Artificial Sequence
  Oligonucleotide for detection of SNP TSC0050704
tgaattattattt

SEQ ID NO: 207224 - DNA, 13 bp, Artificial Sequence
  Oligonucleotide for detection of SNP TSC0050704
aaataataattca

SEQ ID NO: 207225 - DNA, 13 bp, Artificial Sequence
  Oligonucleotide for detection of SNP TSC0050704
tgaatttttattt

SEQ ID NO: 207226 - DNA, 13 bp, Artificial Sequence
  Oligonucleotide for detection of SNP TSC0050704
aaataaaaattca

SEQ ID NO: 207227 - DNA, 13 bp, Artificial Sequence
  Oligonucleotide for detection of SNP TSC0050704
aagtagtaattta

SEQ ID NO: 207228 - DNA, 13 bp, Artificial Sequence
  Oligonucleotide for detection of SNP TSC0050704
taaattactactt

SEQ ID NO: 207229 - DNA, 13 bp, Artificial Sequence
  Oligonucleotide for detection of SNP TSC0050704
aagtaggaattta

SEQ ID NO: 207230 - DNA, 13 bp, Artificial Sequence
  Oligonucleotide for detection of SNP TSC0050704
taaattcctactt

SEQ ID NO: 207231 - DNA, 13 bp, Artificial Sequence
  Oligonucleotide for detection of SNP TSC0050705
ggtttttatttgt

SEQ ID NO: 207232 - DNA, 13 bp, Artificial Sequence
  Oligonucleotide for detection of SNP TSC0050705
acaaataaaaacc

SEQ ID NO: 207233 - DNA, 13 bp, Artificial Sequence
  Oligonucleotide for detection of SNP TSC0050705
ggttttgatttgt

SEQ ID NO: 207234 - DNA, 13 bp, Artificial Sequence
  Oligonucleotide for detection of SNP TSC0050705
acaaatcaaaacc

SEQ ID NO: 207235 - DNA, 13 bp, Artificial Sequence
  Oligonucleotide for detection of SNP TSC0050705
atagatgaaaaty

SEQ ID NO: 207236 - DNA, 13 bp, Artificial Sequence
  Oligonucleotide for detection of SNP TSC0050705
rattttcatctat

SEQ ID NO: 207237 - DNA, 13 bp, Artificial Sequence
  Oligonucleotide for detection of SNP TSC0050705
atagattaaaaty

SEQ ID NO: 207238 - DNA, 13 bp, Artificial Sequence
  Oligonucleotide for detection of SNP TSC0050705
rattttaatctat

SEQ ID NO: 207239 - DNA, 13 bp, Artificial Sequence
  Oligonucleotide for detection of SNP TSC0007000
gattttttttgta

SEQ ID NO: 207240 - DNA, 13 bp, Artificial Sequence
  Oligonucleotide for detection of SNP TSC0007000
tacaaaaaaaatc

SEQ ID NO: 207241 - DNA, 13 bp, Artificial Sequence
  Oligonucleotide for detection of SNP TSC0007000
tgtaggtggagty

SEQ ID NO: 207242 - DNA, 13 bp, Artificial Sequence
  Oligonucleotide for detection of SNP TSC0007000
ractccacctaca

SEQ ID NO: 207243 - DNA, 13 bp, Artificial Sequence
  Oligonucleotide for detection of SNP TSC0007000
tgtagggggagty

SEQ ID NO: 207244 - DNA, 13 bp, Artificial Sequence
  Oligonucleotide for detection of SNP TSC0007000
ractccccctaca

SEQ ID NO: 207245 - DNA, 13 bp, Artificial Sequence
  Oligonucleotide for detection of SNP TSC0007001
gagaagagtaatt

SEQ ID NO: 207246 - DNA, 13 bp, Artificial Sequence
  Oligonucleotide for detection of SNP TSC0007001
aattactcttctc

SEQ ID NO: 207247 - DNA, 13 bp, Artificial Sequence
  Oligonucleotide for detection of SNP TSC0007001
gagaagtgtaatt

SEQ ID NO: 207248 - DNA, 13 bp, Artificial Sequence
  Oligonucleotide for detection of SNP TSC0007001
aattacacttctc

SEQ ID NO: 207249 - DNA, 13 bp, Artificial Sequence
  Oligonucleotide for detection of SNP TSC0007001
agttatattttty

SEQ ID NO: 207250 - DNA, 13 bp, Artificial Sequence
  Oligonucleotide for detection of SNP TSC0007001
raaaaatataact

SEQ ID NO: 207251 - DNA, 13 bp, Artificial Sequence
  Oligonucleotide for detection of SNP TSC0000130
tattttgaaaaaa

SEQ ID NO: 207252 - DNA, 13 bp, Artificial Sequence
  Oligonucleotide for detection of SNP TSC0000130
ttttttcaaaata

SEQ ID NO: 207253 - DNA, 13 bp, Artificial Sequence
  Oligonucleotide for detection of SNP TSC0000130
ttttttgaaagtg

SEQ ID NO: 207254 - DNA, 13 bp, Artificial Sequence
  Oligonucleotide for detection of SNP TSC0000130
cactttcaaaaaa

SEQ ID NO: 207255 - DNA, 13 bp, Artificial Sequence
  Oligonucleotide for detection of SNP TSC0000130
tttttttaaagtg

SEQ ID NO: 207256 - DNA, 13 bp, Artificial Sequence
  Oligonucleotide for detection of SNP TSC0000130
cactttaaaaaaa

SEQ ID NO: 207257 - DNA, 13 bp, Artificial Sequence
  Oligonucleotide for detection of SNP TSC0000131
tatgtagttttgt

SEQ ID NO: 207258 - DNA, 13 bp, Artificial Sequence
  Oligonucleotide for detection of SNP TSC0000131
acaaaactacata

SEQ ID NO: 207259 - DNA, 13 bp, Artificial Sequence
  Oligonucleotide for detection of SNP TSC0000131
tatgtaattttgt

SEQ ID NO: 207260 - DNA, 13 bp, Artificial Sequence
  Oligonucleotide for detection of SNP TSC0000131
acaaaattacata

SEQ ID NO: 207261 - DNA, 13 bp, Artificial Sequence
  Oligonucleotide for detection of SNP TSC0050707
aatgttgtggaga

SEQ ID NO: 207262 - DNA, 13 bp, Artificial Sequence
  Oligonucleotide for detection of SNP TSC0050707
tctccacaacatt

SEQ ID NO: 207263 - DNA, 13 bp, Artificial Sequence
  Oligonucleotide for detection of SNP TSC0050707
aatgttatggaga

SEQ ID NO: 207264 - DNA, 13 bp, Artificial Sequence
  Oligonucleotide for detection of SNP TSC0050707
tctccataacatt

SEQ ID NO: 207265 - DNA, 13 bp, Artificial Sequence
  Oligonucleotide for detection of SNP TSC0050708
gtggttttgaaty

SEQ ID NO: 207266 - DNA, 13 bp, Artificial Sequence
  Oligonucleotide for detection of SNP TSC0050708
rattcaaaaccac

SEQ ID NO: 207267 - DNA, 13 bp, Artificial Sequence
  Oligonucleotide for detection of SNP TSC0050708
gtggttgtgaaty

SEQ ID NO: 207268 - DNA, 13 bp, Artificial Sequence
  Oligonucleotide for detection of SNP TSC0050708
rattcacaaccac

SEQ ID NO: 207269 - DNA, 13 bp, Artificial Sequence
  Oligonucleotide for detection of SNP TSC0050708
gtggtcgtgaaty

SEQ ID NO: 207270 - DNA, 13 bp, Artificial Sequence
  Oligonucleotide for detection of SNP TSC0050708
rattcacgaccac

SEQ ID NO: 207271 - DNA, 13 bp, Artificial Sequence
  Oligonucleotide for detection of SNP TSC0050708
gatttaagattay

SEQ ID NO: 207272 - DNA, 13 bp, Artificial Sequence
  Oligonucleotide for detection of SNP TSC0050708
rtaatcttaaatc

SEQ ID NO: 207273 - DNA, 13 bp, Artificial Sequence
  Oligonucleotide for detection of SNP TSC0050708
gatttatgattay

SEQ ID NO: 207274 - DNA, 13 bp, Artificial Sequence
  Oligonucleotide for detection of SNP TSC0050708
rtaatcataaatc

SEQ ID NO: 207275 - DNA, 13 bp, Artificial Sequence
  Oligonucleotide for detection of SNP TSC0050708
gatttacgattay

SEQ ID NO: 207276 - DNA, 13 bp, Artificial Sequence
  Oligonucleotide for detection of SNP TSC0050708
rtaatcgtaaatc

SEQ ID NO: 207277 - DNA, 13 bp, Artificial Sequence
  Oligonucleotide for detection of SNP TSC0005948
ggaggtaggttta

SEQ ID NO: 207278 - DNA, 13 bp, Artificial Sequence
  Oligonucleotide for detection of SNP TSC0005948
taaacctacctcc

SEQ ID NO: 207279 - DNA, 13 bp, Artificial Sequence
  Oligonucleotide for detection of SNP TSC0005948
ggaggttggttta

SEQ ID NO: 207280 - DNA, 13 bp, Artificial Sequence
  Oligonucleotide for detection of SNP TSC0005948
taaaccaacctcc

SEQ ID NO: 207281 - DNA, 13 bp, Artificial Sequence
  Oligonucleotide for detection of SNP TSC0005948
tggatttgtttty

SEQ ID NO: 207282 - DNA, 13 bp, Artificial Sequence
  Oligonucleotide for detection of SNP TSC0005948
raaaacaaatcca

SEQ ID NO: 207283 - DNA, 13 bp, Artificial Sequence
  Oligonucleotide for detection of SNP TSC0005948
tggattagtttty

SEQ ID NO: 207284 - DNA, 13 bp, Artificial Sequence
  Oligonucleotide for detection of SNP TSC0005948
raaaactaatcca

SEQ ID NO: 207285 - DNA, 13 bp, Artificial Sequence
  Oligonucleotide for detection of SNP TSC0050710
tttgtgattttay

SEQ ID NO: 207286 - DNA, 13 bp, Artificial Sequence
  Oligonucleotide for detection of SNP TSC0050710
rtaaaatcacaaa

SEQ ID NO: 207287 - DNA, 13 bp, Artificial Sequence
  Oligonucleotide for detection of SNP TSC0050710
gtggggttataga

SEQ ID NO: 207288 - DNA, 13 bp, Artificial Sequence
  Oligonucleotide for detection of SNP TSC0050710
tctataaccccac

SEQ ID NO: 207289 - DNA, 13 bp, Artificial Sequence
  Oligonucleotide for detection of SNP TSC0050710
gtggggatataga

SEQ ID NO: 207290 - DNA, 13 bp, Artificial Sequence
  Oligonucleotide for detection of SNP TSC0050710
tctatatccccac

SEQ ID NO: 207291 - DNA, 13 bp, Artificial Sequence
  Oligonucleotide for detection of SNP TSC0050711
aaataagttatty

SEQ ID NO: 207292 - DNA, 13 bp, Artificial Sequence
  Oligonucleotide for detection of SNP TSC0050711
raataacttattt

SEQ ID NO: 207293 - DNA, 13 bp, Artificial Sequence
  Oligonucleotide for detection of SNP TSC0050711
aaataaattatty

SEQ ID NO: 207294 - DNA, 13 bp, Artificial Sequence
  Oligonucleotide for detection of SNP TSC0050711
raataatttattt

SEQ ID NO: 207295 - DNA, 13 bp, Artificial Sequence
  Oligonucleotide for detection of SNP TSC0010273
aaatttagggttt

SEQ ID NO: 207296 - DNA, 13 bp, Artificial Sequence
  Oligonucleotide for detection of SNP TSC0010273
aaaccctaaattt

SEQ ID NO: 207297 - DNA, 13 bp, Artificial Sequence
  Oligonucleotide for detection of SNP TSC0010273
aaatttggggttt

SEQ ID NO: 207298 - DNA, 13 bp, Artificial Sequence
  Oligonucleotide for detection of SNP TSC0010273
aaaccccaaattt

SEQ ID NO: 207299 - DNA, 13 bp, Artificial Sequence
  Oligonucleotide for detection of SNP TSC0010273
aaattcggggttt

SEQ ID NO: 207300 - DNA, 13 bp, Artificial Sequence
  Oligonucleotide for detection of SNP TSC0010273
aaaccccgaattt

SEQ ID NO: 207301 - DNA, 13 bp, Artificial Sequence
  Oligonucleotide for detection of SNP TSC0010273
agattttgggttt

SEQ ID NO: 207302 - DNA, 13 bp, Artificial Sequence
  Oligonucleotide for detection of SNP TSC0010273
aaacccaaaatct

SEQ ID NO: 207303 - DNA, 13 bp, Artificial Sequence
  Oligonucleotide for detection of SNP TSC0010273
agatttcgggttt

SEQ ID NO: 207304 - DNA, 13 bp, Artificial Sequence
  Oligonucleotide for detection of SNP TSC0010273
aaacccgaaatct

SEQ ID NO: 207305 - DNA, 13 bp, Artificial Sequence
  Oligonucleotide for detection of SNP TSC0000658
gagtgtggaattg

SEQ ID NO: 207306 - DNA, 13 bp, Artificial Sequence
  Oligonucleotide for detection of SNP TSC0000658
caattccacactc

SEQ ID NO: 207307 - DNA, 13 bp, Artificial Sequence
  Oligonucleotide for detection of SNP TSC0000658
gagtgtagaattg

SEQ ID NO: 207308 - DNA, 13 bp, Artificial Sequence
  Oligonucleotide for detection of SNP TSC0000658
caattctacactc

SEQ ID NO: 207309 - DNA, 13 bp, Artificial Sequence
  Oligonucleotide for detection of SNP TSC0050717
taatagtaatata

SEQ ID NO: 207310 - DNA, 13 bp, Artificial Sequence
  Oligonucleotide for detection of SNP TSC0050717
tatattactatta

SEQ ID NO: 207311 - DNA, 13 bp, Artificial Sequence
  Oligonucleotide for detection of SNP TSC0050717
taataggaatata

SEQ ID NO: 207312 - DNA, 13 bp, Artificial Sequence
  Oligonucleotide for detection of SNP TSC0050717
tatattcctatta

SEQ ID NO: 207313 - DNA, 13 bp, Artificial Sequence
  Oligonucleotide for detection of SNP TSC0050717
tatattgttgtta

SEQ ID NO: 207314 - DNA, 13 bp, Artificial Sequence
  Oligonucleotide for detection of SNP TSC0050717
taacaacaatata

SEQ ID NO: 207315 - DNA, 13 bp, Artificial Sequence
  Oligonucleotide for detection of SNP TSC0050717
tatatttttgtta

SEQ ID NO: 207316 - DNA, 13 bp, Artificial Sequence
  Oligonucleotide for detection of SNP TSC0050717
taacaaaaatata

SEQ ID NO: 207317 - DNA, 13 bp, Artificial Sequence
  Oligonucleotide for detection of SNP TSC0050718
tgtataggaattg

SEQ ID NO: 207318 - DNA, 13 bp, Artificial Sequence
  Oligonucleotide for detection of SNP TSC0050718
caattcctataca

SEQ ID NO: 207319 - DNA, 13 bp, Artificial Sequence
  Oligonucleotide for detection of SNP TSC0050718
tgtataagaattg

SEQ ID NO: 207320 - DNA, 13 bp, Artificial Sequence
  Oligonucleotide for detection of SNP TSC0050718
caattcttataca

SEQ ID NO: 207321 - DNA, 13 bp, Artificial Sequence
  Oligonucleotide for detection of SNP TSC0005904
gttgggtgtatgt

SEQ ID NO: 207322 - DNA, 13 bp, Artificial Sequence
  Oligonucleotide for detection of SNP TSC0005904
acatacacccaac

SEQ ID NO: 207323 - DNA, 13 bp, Artificial Sequence
  Oligonucleotide for detection of SNP TSC0005904
gtcgggtgtatgt

SEQ ID NO: 207324 - DNA, 13 bp, Artificial Sequence
  Oligonucleotide for detection of SNP TSC0005904
acatacacccgac

SEQ ID NO: 207325 - DNA, 13 bp, Artificial Sequence
  Oligonucleotide for detection of SNP TSC0005904
gttgggcgtatgt

SEQ ID NO: 207326 - DNA, 13 bp, Artificial Sequence
  Oligonucleotide for detection of SNP TSC0005904
acatacgcccaac

SEQ ID NO: 207327 - DNA, 13 bp, Artificial Sequence
  Oligonucleotide for detection of SNP TSC0005904
gtcgggcgtatgt

SEQ ID NO: 207328 - DNA, 13 bp, Artificial Sequence
  Oligonucleotide for detection of SNP TSC0005904
acatacgcccgac

SEQ ID NO: 207329 - DNA, 13 bp, Artificial Sequence
  Oligonucleotide for detection of SNP TSC0005904
atatatgtttgay

SEQ ID NO: 207330 - DNA, 13 bp, Artificial Sequence
  Oligonucleotide for detection of SNP TSC0005904
rtcaaacatatat

SEQ ID NO: 207331 - DNA, 13 bp, Artificial Sequence
  Oligonucleotide for detection of SNP TSC0005904
atatatatttgay

SEQ ID NO: 207332 - DNA, 13 bp, Artificial Sequence
  Oligonucleotide for detection of SNP TSC0005904
rtcaaatatatat

SEQ ID NO: 207333 - DNA, 13 bp, Artificial Sequence
  Oligonucleotide for detection of SNP TSC0005904
atatacgtttgay

SEQ ID NO: 207334 - DNA, 13 bp, Artificial Sequence
  Oligonucleotide for detection of SNP TSC0005904
rtcaaacgtatat

SEQ ID NO: 207335 - DNA, 13 bp, Artificial Sequence
  Oligonucleotide for detection of SNP TSC0005904
atatatattcgay

SEQ ID NO: 207336 - DNA, 13 bp, Artificial Sequence
  Oligonucleotide for detection of SNP TSC0005904
rtcgaatatatat

SEQ ID NO: 207337 - DNA, 13 bp, Artificial Sequence
  Oligonucleotide for detection of SNP TSC0005904
atatatgttcgay

SEQ ID NO: 207338 - DNA, 13 bp, Artificial Sequence
  Oligonucleotide for detection of SNP TSC0005904
rtcgaacatatat

SEQ ID NO: 207339 - DNA, 13 bp, Artificial Sequence
  Oligonucleotide for detection of SNP TSC0005904
atatacgttcgay

SEQ ID NO: 207340 - DNA, 13 bp, Artificial Sequence
  Oligonucleotide for detection of SNP TSC0005904
rtcgaacgtatat

SEQ ID NO: 207341 - DNA, 13 bp, Artificial Sequence
  Oligonucleotide for detection of SNP TSC0050720
atattagtagtty

SEQ ID NO: 207342 - DNA, 13 bp, Artificial Sequence
  Oligonucleotide for detection of SNP TSC0050720
raactactaatat

SEQ ID NO: 207343 - DNA, 13 bp, Artificial Sequence
  Oligonucleotide for detection of SNP TSC0050720
atattaatagtty

SEQ ID NO: 207344 - DNA, 13 bp, Artificial Sequence
  Oligonucleotide for detection of SNP TSC0050720
raactattaatat

SEQ ID NO: 207345 - DNA, 13 bp, Artificial Sequence
  Oligonucleotide for detection of SNP TSC0006563
tagaattgagaga

SEQ ID NO: 207346 - DNA, 13 bp, Artificial Sequence
  Oligonucleotide for detection of SNP TSC0006563
tctctcaattcta

SEQ ID NO: 207347 - DNA, 13 bp, Artificial Sequence
  Oligonucleotide for detection of SNP TSC0006563
tagaatggagaga

SEQ ID NO: 207348 - DNA, 13 bp, Artificial Sequence
  Oligonucleotide for detection of SNP TSC0006563
tctctccattcta

SEQ ID NO: 207349 - DNA, 13 bp, Artificial Sequence
  Oligonucleotide for detection of SNP TSC0006563
tagaacggagaga

SEQ ID NO: 207350 - DNA, 13 bp, Artificial Sequence
  Oligonucleotide for detection of SNP TSC0006563
tctctccgttcta

SEQ ID NO: 207351 - DNA, 13 bp, Artificial Sequence
  Oligonucleotide for detection of SNP TSC0007065
aattagagttatt

SEQ ID NO: 207352 - DNA, 13 bp, Artificial Sequence
  Oligonucleotide for detection of SNP TSC0007065
aataactctaatt

SEQ ID NO: 207353 - DNA, 13 bp, Artificial Sequence
  Oligonucleotide for detection of SNP TSC0007065
aattagggttatt

SEQ ID NO: 207354 - DNA, 13 bp, Artificial Sequence
  Oligonucleotide for detection of SNP TSC0007065
aataaccctaatt

SEQ ID NO: 207355 - DNA, 13 bp, Artificial Sequence
  Oligonucleotide for detection of SNP TSC0007066
tgggtatggaggg

SEQ ID NO: 207356 - DNA, 13 bp, Artificial Sequence
  Oligonucleotide for detection of SNP TSC0007066
ccctccataccca

SEQ ID NO: 207357 - DNA, 13 bp, Artificial Sequence
  Oligonucleotide for detection of SNP TSC0007066
tgggtagggaggg

SEQ ID NO: 207358 - DNA, 13 bp, Artificial Sequence
  Oligonucleotide for detection of SNP TSC0007066
ccctccctaccca

SEQ ID NO: 207359 - DNA, 13 bp, Artificial Sequence
  Oligonucleotide for detection of SNP TSC0001422
attattattagtt

SEQ ID NO: 207360 - DNA, 13 bp, Artificial Sequence
  Oligonucleotide for detection of SNP TSC0001422
aactaataataat

SEQ ID NO: 207361 - DNA, 13 bp, Artificial Sequence
  Oligonucleotide for detection of SNP TSC0001422
attattgttagtt

SEQ ID NO: 207362 - DNA, 13 bp, Artificial Sequence
  Oligonucleotide for detection of SNP TSC0001422
aactaacaataat

SEQ ID NO: 207363 - DNA, 13 bp, Artificial Sequence
  Oligonucleotide for detection of SNP TSC0001422
attatcgttagtt

SEQ ID NO: 207364 - DNA, 13 bp, Artificial Sequence
  Oligonucleotide for detection of SNP TSC0001422
aactaacgataat

SEQ ID NO: 207365 - DNA, 13 bp, Artificial Sequence
  Oligonucleotide for detection of SNP TSC0001422
aattaatgataat

SEQ ID NO: 207366 - DNA, 13 bp, Artificial Sequence
  Oligonucleotide for detection of SNP TSC0001422
attatcattaatt

SEQ ID NO: 207367 - DNA, 13 bp, Artificial Sequence
  Oligonucleotide for detection of SNP TSC0001422
aattaacgataat

SEQ ID NO: 207368 - DNA, 13 bp, Artificial Sequence
  Oligonucleotide for detection of SNP TSC0001422
attatcgttaatt

SEQ ID NO: 207369 - DNA, 13 bp, Artificial Sequence
  Oligonucleotide for detection of SNP TSC0001423
taagaagttataa

SEQ ID NO: 207370 - DNA, 13 bp, Artificial Sequence
  Oligonucleotide for detection of SNP TSC0001423
ttataacttctta

SEQ ID NO: 207371 - DNA, 13 bp, Artificial Sequence
  Oligonucleotide for detection of SNP TSC0001423
taagaaattataa

SEQ ID NO: 207372 - DNA, 13 bp, Artificial Sequence
  Oligonucleotide for detection of SNP TSC0001423
ttataatttctta

SEQ ID NO: 207373 - DNA, 13 bp, Artificial Sequence
  Oligonucleotide for detection of SNP TSC0050723
ttttgatggaaaa

SEQ ID NO: 207374 - DNA, 13 bp, Artificial Sequence
  Oligonucleotide for detection of SNP TSC0050723
ttttccatcaaaa

SEQ ID NO: 207375 - DNA, 13 bp, Artificial Sequence
  Oligonucleotide for detection of SNP TSC0050723
ttttgacggaaaa

SEQ ID NO: 207376 - DNA, 13 bp, Artificial Sequence
  Oligonucleotide for detection of SNP TSC0050723
ttttccgtcaaaa

SEQ ID NO: 207377 - DNA, 13 bp, Artificial Sequence
  Oligonucleotide for detection of SNP TSC0050723
ttttttgttagag

SEQ ID NO: 207378 - DNA, 13 bp, Artificial Sequence
  Oligonucleotide for detection of SNP TSC0050723
ctctaacaaaaaa

SEQ ID NO: 207379 - DNA, 13 bp, Artificial Sequence
  Oligonucleotide for detection of SNP TSC0050723
ttttttattagag

SEQ ID NO: 207380 - DNA, 13 bp, Artificial Sequence
  Oligonucleotide for detection of SNP TSC0050723
ctctaataaaaaa

SEQ ID NO: 207381 - DNA, 13 bp, Artificial Sequence
  Oligonucleotide for detection of SNP TSC0050723
tttttcgttagag

SEQ ID NO: 207382 - DNA, 13 bp, Artificial Sequence
  Oligonucleotide for detection of SNP TSC0050723
ctctaacgaaaaa

SEQ ID NO: 207383 - DNA, 13 bp, Artificial Sequence
  Oligonucleotide for detection of SNP TSC0050727
ttaaagatagttt

SEQ ID NO: 207384 - DNA, 13 bp, Artificial Sequence
  Oligonucleotide for detection of SNP TSC0050727
aaactatctttaa

SEQ ID NO: 207385 - DNA, 13 bp, Artificial Sequence
  Oligonucleotide for detection of SNP TSC0050727
ttaaaggtagttt

SEQ ID NO: 207386 - DNA, 13 bp, Artificial Sequence
  Oligonucleotide for detection of SNP TSC0050727
aaactacctttaa

SEQ ID NO: 207387 - DNA, 13 bp, Artificial Sequence
  Oligonucleotide for detection of SNP TSC0050728
aatgatattatty

SEQ ID NO: 207388 - DNA, 13 bp, Artificial Sequence
  Oligonucleotide for detection of SNP TSC0050728
raataatatcatt

SEQ ID NO: 207389 - DNA, 13 bp, Artificial Sequence
  Oligonucleotide for detection of SNP TSC0050728
aatgatgttatty

SEQ ID NO: 207390 - DNA, 13 bp, Artificial Sequence
  Oligonucleotide for detection of SNP TSC0050728
raataacatcatt

SEQ ID NO: 207391 - DNA, 13 bp, Artificial Sequence
  Oligonucleotide for detection of SNP TSC0050729
ttgtaatggagay

SEQ ID NO: 207392 - DNA, 13 bp, Artificial Sequence
  Oligonucleotide for detection of SNP TSC0050729
rtctccattacaa

SEQ ID NO: 207393 - DNA, 13 bp, Artificial Sequence
  Oligonucleotide for detection of SNP TSC0050729
ttgtaacggagay

SEQ ID NO: 207394 - DNA, 13 bp, Artificial Sequence
  Oligonucleotide for detection of SNP TSC0050729
rtctccgttacaa

SEQ ID NO: 207395 - DNA, 13 bp, Artificial Sequence
  Oligonucleotide for detection of SNP TSC0009608
atagatatttgaa

SEQ ID NO: 207396 - DNA, 13 bp, Artificial Sequence
  Oligonucleotide for detection of SNP TSC0009608
ttcaaatatctat

SEQ ID NO: 207397 - DNA, 13 bp, Artificial Sequence
  Oligonucleotide for detection of SNP TSC0009608
atagatgtttgaa

SEQ ID NO: 207398 - DNA, 13 bp, Artificial Sequence
  Oligonucleotide for detection of SNP TSC0009608
ttcaaacatctat

SEQ ID NO: 207399 - DNA, 13 bp, Artificial Sequence
  Oligonucleotide for detection of SNP TSC0009609
gtattggtatttg

SEQ ID NO: 207400 - DNA, 13 bp, Artificial Sequence
  Oligonucleotide for detection of SNP TSC0009609
caaataccaatac

SEQ ID NO: 207401 - DNA, 13 bp, Artificial Sequence
  Oligonucleotide for detection of SNP TSC0009609
gtattgatatttg

SEQ ID NO: 207402 - DNA, 13 bp, Artificial Sequence
  Oligonucleotide for detection of SNP TSC0009609
caaatatcaatac

SEQ ID NO: 207403 - DNA, 13 bp, Artificial Sequence
  Oligonucleotide for detection of SNP TSC0050730
gttaatattttta

SEQ ID NO: 207404 - DNA, 13 bp, Artificial Sequence
  Oligonucleotide for detection of SNP TSC0050730
taaaaatattaac

SEQ ID NO: 207405 - DNA, 13 bp, Artificial Sequence
  Oligonucleotide for detection of SNP TSC0050730
gttaatgttttta

SEQ ID NO: 207406 - DNA, 13 bp, Artificial Sequence
  Oligonucleotide for detection of SNP TSC0050730
taaaaacattaac

SEQ ID NO: 207407 - DNA, 13 bp, Artificial Sequence
  Oligonucleotide for detection of SNP TSC0050730
gttaacgttttta

SEQ ID NO: 207408 - DNA, 13 bp, Artificial Sequence
  Oligonucleotide for detection of SNP TSC0050730
taaaaacgttaac

SEQ ID NO: 207409 - DNA, 13 bp, Artificial Sequence
  Oligonucleotide for detection of SNP TSC0050730
tgaagatgttgay

SEQ ID NO: 207410 - DNA, 13 bp, Artificial Sequence
  Oligonucleotide for detection of SNP TSC0050730
rtcaacatcttca

SEQ ID NO: 207411 - DNA, 13 bp, Artificial Sequence
  Oligonucleotide for detection of SNP TSC0050730
tgaagacgttgay

SEQ ID NO: 207412 - DNA, 13 bp, Artificial Sequence
  Oligonucleotide for detection of SNP TSC0050730
rtcaacgtcttca

SEQ ID NO: 207413 - DNA, 13 bp, Artificial Sequence
  Oligonucleotide for detection of SNP TSC0000514
tgtaaatgtggtt

SEQ ID NO: 207414 - DNA, 13 bp, Artificial Sequence
  Oligonucleotide for detection of SNP TSC0000514
aaccacatttaca

SEQ ID NO: 207415 - DNA, 13 bp, Artificial Sequence
  Oligonucleotide for detection of SNP TSC0000514
tgtaaaggtggtt

SEQ ID NO: 207416 - DNA, 13 bp, Artificial Sequence
  Oligonucleotide for detection of SNP TSC0000514
aaccacctttaca

SEQ ID NO: 207417 - DNA, 13 bp, Artificial Sequence
  Oligonucleotide for detection of SNP TSC0000514
tgtaaacgtggtt

SEQ ID NO: 207418 - DNA, 13 bp, Artificial Sequence
  Oligonucleotide for detection of SNP TSC0000514
aaccacgtttaca

SEQ ID NO: 207419 - DNA, 13 bp, Artificial Sequence
  Oligonucleotide for detection of SNP TSC0000514
aattatgtttgta

SEQ ID NO: 207420 - DNA, 13 bp, Artificial Sequence
  Oligonucleotide for detection of SNP TSC0000514
tacaaacataatt

SEQ ID NO: 207421 - DNA, 13 bp, Artificial Sequence
  Oligonucleotide for detection of SNP TSC0000514
aattatttttgta

SEQ ID NO: 207422 - DNA, 13 bp, Artificial Sequence
  Oligonucleotide for detection of SNP TSC0000514
tacaaaaataatt

SEQ ID NO: 207423 - DNA, 13 bp, Artificial Sequence
  Oligonucleotide for detection of SNP TSC0000514
aattacgtttgta

SEQ ID NO: 207424 - DNA, 13 bp, Artificial Sequence
  Oligonucleotide for detection of SNP TSC0000514
tacaaacgtaatt

SEQ ID NO: 207425 - DNA, 13 bp, Artificial Sequence
  Oligonucleotide for detection of SNP TSC0004531
tggggaagtaaaa

SEQ ID NO: 207426 - DNA, 13 bp, Artificial Sequence
  Oligonucleotide for detection of SNP TSC0004531
ttttacttcccca

SEQ ID NO: 207427 - DNA, 13 bp, Artificial Sequence
  Oligonucleotide for detection of SNP TSC0004531
tggggaggtaaaa

SEQ ID NO: 207428 - DNA, 13 bp, Artificial Sequence
  Oligonucleotide for detection of SNP TSC0004531
ttttacctcccca

SEQ ID NO: 207429 - DNA, 13 bp, Artificial Sequence
  Oligonucleotide for detection of SNP TSC0050732
aatatagagtagg

SEQ ID NO: 207430 - DNA, 13 bp, Artificial Sequence
  Oligonucleotide for detection of SNP TSC0050732
cctactctatatt

SEQ ID NO: 207431 - DNA, 13 bp, Artificial Sequence
  Oligonucleotide for detection of SNP TSC0050732
aatataaagtagg

SEQ ID NO: 207432 - DNA, 13 bp, Artificial Sequence
  Oligonucleotide for detection of SNP TSC0050732
cctactttatatt

SEQ ID NO: 207433 - DNA, 13 bp, Artificial Sequence
  Oligonucleotide for detection of SNP TSC0005077
aataattgaaata

SEQ ID NO: 207434 - DNA, 13 bp, Artificial Sequence
  Oligonucleotide for detection of SNP TSC0005077
tatttcaattatt

SEQ ID NO: 207435 - DNA, 13 bp, Artificial Sequence
  Oligonucleotide for detection of SNP TSC0005077
aataatcgaaata

SEQ ID NO: 207436 - DNA, 13 bp, Artificial Sequence
  Oligonucleotide for detection of SNP TSC0005077
tatttcgattatt

SEQ ID NO: 207437 - DNA, 13 bp, Artificial Sequence
  Oligonucleotide for detection of SNP TSC0005077
tattttggttatt

SEQ ID NO: 207438 - DNA, 13 bp, Artificial Sequence
  Oligonucleotide for detection of SNP TSC0005077
aataaccaaaata

SEQ ID NO: 207439 - DNA, 13 bp, Artificial Sequence
  Oligonucleotide for detection of SNP TSC0005077
tattttagttatt

SEQ ID NO: 207440 - DNA, 13 bp, Artificial Sequence
  Oligonucleotide for detection of SNP TSC0005077
aataactaaaata

SEQ ID NO: 207441 - DNA, 13 bp, Artificial Sequence
  Oligonucleotide for detection of SNP TSC0005077
tatttcggttatt

SEQ ID NO: 207442 - DNA, 13 bp, Artificial Sequence
  Oligonucleotide for detection of SNP TSC0005077
aataaccgaaata

SEQ ID NO: 207443 - DNA, 13 bp, Artificial Sequence
  Oligonucleotide for detection of SNP TSC0050733
ggaatttgggaat

SEQ ID NO: 207444 - DNA, 13 bp, Artificial Sequence
  Oligonucleotide for detection of SNP TSC0050733
attcccaaattcc

SEQ ID NO: 207445 - DNA, 13 bp, Artificial Sequence
  Oligonucleotide for detection of SNP TSC0050733
ggaattcgggaat

SEQ ID NO: 207446 - DNA, 13 bp, Artificial Sequence
  Oligonucleotide for detection of SNP TSC0050733
attcccgaattcc

SEQ ID NO: 207447 - DNA, 13 bp, Artificial Sequence
  Oligonucleotide for detection of SNP TSC0050737
tcgttgtttttag

SEQ ID NO: 207448 - DNA, 13 bp, Artificial Sequence
  Oligonucleotide for detection of SNP TSC0050737
ctaaaaacaacga

SEQ ID NO: 207449 - DNA, 13 bp, Artificial Sequence
  Oligonucleotide for detection of SNP TSC0050737
tcgttggttttag

SEQ ID NO: 207450 - DNA, 13 bp, Artificial Sequence
  Oligonucleotide for detection of SNP TSC0050737
ctaaaaccaacga

SEQ ID NO: 207451 - DNA, 13 bp, Artificial Sequence
  Oligonucleotide for detection of SNP TSC0050737
ttgaaggtagtga

SEQ ID NO: 207452 - DNA, 13 bp, Artificial Sequence
  Oligonucleotide for detection of SNP TSC0050737
tcactaccttcaa

SEQ ID NO: 207453 - DNA, 13 bp, Artificial Sequence
  Oligonucleotide for detection of SNP TSC0050737
ttgaagttagtga

SEQ ID NO: 207454 - DNA, 13 bp, Artificial Sequence
  Oligonucleotide for detection of SNP TSC0050737
tcactaacttcaa

SEQ ID NO: 207455 - DNA, 13 bp, Artificial Sequence
  Oligonucleotide for detection of SNP TSC0050737
ttgaaggtagcga

SEQ ID NO: 207456 - DNA, 13 bp, Artificial Sequence
  Oligonucleotide for detection of SNP TSC0050737
tcgctaccttcaa

SEQ ID NO: 207457 - DNA, 13 bp, Artificial Sequence
  Oligonucleotide for detection of SNP TSC0050737
ttgaagttagcga

SEQ ID NO: 207458 - DNA, 13 bp, Artificial Sequence
  Oligonucleotide for detection of SNP TSC0050737
tcgctaacttcaa

SEQ ID NO: 207459 - DNA, 13 bp, Artificial Sequence
  Oligonucleotide for detection of SNP TSC0050738
ttgtttaattata

SEQ ID NO: 207460 - DNA, 13 bp, Artificial Sequence
  Oligonucleotide for detection of SNP TSC0050738
tataattaaacaa

SEQ ID NO: 207461 - DNA, 13 bp, Artificial Sequence
  Oligonucleotide for detection of SNP TSC0050738
ttgttttattata

SEQ ID NO: 207462 - DNA, 13 bp, Artificial Sequence
  Oligonucleotide for detection of SNP TSC0050738
tataataaaacaa

SEQ ID NO: 207463 - DNA, 13 bp, Artificial Sequence
  Oligonucleotide for detection of SNP TSC0050738
tatggttaggtaa

SEQ ID NO: 207464 - DNA, 13 bp, Artificial Sequence
  Oligonucleotide for detection of SNP TSC0050738
ttacctaaccata

SEQ ID NO: 207465 - DNA, 13 bp, Artificial Sequence
  Oligonucleotide for detection of SNP TSC0050738
tatggtaaggtaa

SEQ ID NO: 207466 - DNA, 13 bp, Artificial Sequence
  Oligonucleotide for detection of SNP TSC0050738
ttaccttaccata

SEQ ID NO: 207467 - DNA, 13 bp, Artificial Sequence
  Oligonucleotide for detection of SNP TSC0050741
gatttgagtgtgt

SEQ ID NO: 207468 - DNA, 13 bp, Artificial Sequence
  Oligonucleotide for detection of SNP TSC0050741
acacactcaaatc

SEQ ID NO: 207469 - DNA, 13 bp, Artificial Sequence
  Oligonucleotide for detection of SNP TSC0050741
gatttgtgtgtgt

SEQ ID NO: 207470 - DNA, 13 bp, Artificial Sequence
  Oligonucleotide for detection of SNP TSC0050741
acacacacaaatc

SEQ ID NO: 207471 - DNA, 13 bp, Artificial Sequence
  Oligonucleotide for detection of SNP TSC0050741
atatatttaaaty

SEQ ID NO: 207472 - DNA, 13 bp, Artificial Sequence
  Oligonucleotide for detection of SNP TSC0050741
ratttaaatatat

SEQ ID NO: 207473 - DNA, 13 bp, Artificial Sequence
  Oligonucleotide for detection of SNP TSC0050741
atatatataaaty

SEQ ID NO: 207474 - DNA, 13 bp, Artificial Sequence
  Oligonucleotide for detection of SNP TSC0050741
ratttatatatat

SEQ ID NO: 207475 - DNA, 13 bp, Artificial Sequence
  Oligonucleotide for detection of SNP TSC0050743
tgtgggatagtta

SEQ ID NO: 207476 - DNA, 13 bp, Artificial Sequence
  Oligonucleotide for detection of SNP TSC0050743
taactatcccaca

SEQ ID NO: 207477 - DNA, 13 bp, Artificial Sequence
  Oligonucleotide for detection of SNP TSC0050743
tgtggggtagtta

SEQ ID NO: 207478 - DNA, 13 bp, Artificial Sequence
  Oligonucleotide for detection of SNP TSC0050743
taactaccccaca

SEQ ID NO: 207479 - DNA, 13 bp, Artificial Sequence
  Oligonucleotide for detection of SNP TSC0050744
tttattatgtgty

SEQ ID NO: 207480 - DNA, 13 bp, Artificial Sequence
  Oligonucleotide for detection of SNP TSC0050744
racacataataaa

SEQ ID NO: 207481 - DNA, 13 bp, Artificial Sequence
  Oligonucleotide for detection of SNP TSC0050744
tttattgtgtgty

SEQ ID NO: 207482 - DNA, 13 bp, Artificial Sequence
  Oligonucleotide for detection of SNP TSC0050744
racacacaataaa

SEQ ID NO: 207483 - DNA, 13 bp, Artificial Sequence
  Oligonucleotide for detection of SNP TSC0005638
ttttatattttga

SEQ ID NO: 207484 - DNA, 13 bp, Artificial Sequence
  Oligonucleotide for detection of SNP TSC0005638
tcaaaatataaaa

SEQ ID NO: 207485 - DNA, 13 bp, Artificial Sequence
  Oligonucleotide for detection of SNP TSC0005638
ttttattttttga

SEQ ID NO: 207486 - DNA, 13 bp, Artificial Sequence
  Oligonucleotide for detection of SNP TSC0005638
tcaaaaaataaaa

SEQ ID NO: 207487 - DNA, 13 bp, Artificial Sequence
  Oligonucleotide for detection of SNP TSC0005638
ttaggatgtgggg

SEQ ID NO: 207488 - DNA, 13 bp, Artificial Sequence
  Oligonucleotide for detection of SNP TSC0005638
ccccacatcctaa

SEQ ID NO: 207489 - DNA, 13 bp, Artificial Sequence
  Oligonucleotide for detection of SNP TSC0005638
ttaggaggtgggg

SEQ ID NO: 207490 - DNA, 13 bp, Artificial Sequence
  Oligonucleotide for detection of SNP TSC0005638
ccccacctcctaa

SEQ ID NO: 207491 - DNA, 13 bp, Artificial Sequence
  Oligonucleotide for detection of SNP TSC0005639
tttagggtgttgg

SEQ ID NO: 207492 - DNA, 13 bp, Artificial Sequence
  Oligonucleotide for detection of SNP TSC0005639
ccaacaccctaaa

SEQ ID NO: 207493 - DNA, 13 bp, Artificial Sequence
  Oligonucleotide for detection of SNP TSC0005639
tttaggatgttgg

SEQ ID NO: 207494 - DNA, 13 bp, Artificial Sequence
  Oligonucleotide for detection of SNP TSC0005639
ccaacatcctaaa

SEQ ID NO: 207495 - DNA, 13 bp, Artificial Sequence
  Oligonucleotide for detection of SNP TSC0050745
atatttagtatga

SEQ ID NO: 207496 - DNA, 13 bp, Artificial Sequence
  Oligonucleotide for detection of SNP TSC0050745
tcatactaaatat

SEQ ID NO: 207497 - DNA, 13 bp, Artificial Sequence
  Oligonucleotide for detection of SNP TSC0050745
atatttggtatga

SEQ ID NO: 207498 - DNA, 13 bp, Artificial Sequence
  Oligonucleotide for detection of SNP TSC0050745
tcataccaaatat

SEQ ID NO: 207499 - DNA, 13 bp, Artificial Sequence
  Oligonucleotide for detection of SNP TSC0050745
atattcggtatga

SEQ ID NO: 207500 - DNA, 13 bp, Artificial Sequence
  Oligonucleotide for detection of SNP TSC0050745
tcataccgaatat

SEQ ID NO: 207501 - DNA, 13 bp, Artificial Sequence
  Oligonucleotide for detection of SNP TSC0050745
ttatgttgggtgt

SEQ ID NO: 207502 - DNA, 13 bp, Artificial Sequence
  Oligonucleotide for detection of SNP TSC0050745
acacccaacataa

SEQ ID NO: 207503 - DNA, 13 bp, Artificial Sequence
  Oligonucleotide for detection of SNP TSC0050745
ttatgtcgggtgt

SEQ ID NO: 207504 - DNA, 13 bp, Artificial Sequence
  Oligonucleotide for detection of SNP TSC0050745
acacccgacataa

SEQ ID NO: 207505 - DNA, 13 bp, Artificial Sequence
  Oligonucleotide for detection of SNP TSC0050748
atagtaataaaaa

SEQ ID NO: 207506 - DNA, 13 bp, Artificial Sequence
  Oligonucleotide for detection of SNP TSC0050748
tttttattactat

SEQ ID NO: 207507 - DNA, 13 bp, Artificial Sequence
  Oligonucleotide for detection of SNP TSC0050748
atagtagtaaaaa

SEQ ID NO: 207508 - DNA, 13 bp, Artificial Sequence
  Oligonucleotide for detection of SNP TSC0050748
tttttactactat

SEQ ID NO: 207509 - DNA, 13 bp, Artificial Sequence
  Oligonucleotide for detection of SNP TSC0050749
gtaaaaaaagggy

SEQ ID NO: 207510 - DNA, 13 bp, Artificial Sequence
  Oligonucleotide for detection of SNP TSC0050749
rccctttttttac

SEQ ID NO: 207511 - DNA, 13 bp, Artificial Sequence
  Oligonucleotide for detection of SNP TSC0050749
gtaaaataagggy

SEQ ID NO: 207512 - DNA, 13 bp, Artificial Sequence
  Oligonucleotide for detection of SNP TSC0050749
rcccttattttac

SEQ ID NO: 207513 - DNA, 13 bp, Artificial Sequence
  Oligonucleotide for detection of SNP TSC0050750
atgggttgttggg

SEQ ID NO: 207514 - DNA, 13 bp, Artificial Sequence
  Oligonucleotide for detection of SNP TSC0050750
cccaacaacccat

SEQ ID NO: 207515 - DNA, 13 bp, Artificial Sequence
  Oligonucleotide for detection of SNP TSC0050750
atgggtcgttggg

SEQ ID NO: 207516 - DNA, 13 bp, Artificial Sequence
  Oligonucleotide for detection of SNP TSC0050750
cccaacgacccat

SEQ ID NO: 207517 - DNA, 13 bp, Artificial Sequence
  Oligonucleotide for detection of SNP TSC0050750
tttagcgatttat

SEQ ID NO: 207518 - DNA, 13 bp, Artificial Sequence
  Oligonucleotide for detection of SNP TSC0050750
ataaatcgctaaa

SEQ ID NO: 207519 - DNA, 13 bp, Artificial Sequence
  Oligonucleotide for detection of SNP TSC0050751
attttagtaagta

SEQ ID NO: 207520 - DNA, 13 bp, Artificial Sequence
  Oligonucleotide for detection of SNP TSC0050751
tacttactaaaat

SEQ ID NO: 207521 - DNA, 13 bp, Artificial Sequence
  Oligonucleotide for detection of SNP TSC0050751
attttaataagta

SEQ ID NO: 207522 - DNA, 13 bp, Artificial Sequence
  Oligonucleotide for detection of SNP TSC0050751
tacttattaaaat

SEQ ID NO: 207523 - DNA, 13 bp, Artificial Sequence
  Oligonucleotide for detection of SNP TSC0050752
agattgaagaaat

SEQ ID NO: 207524 - DNA, 13 bp, Artificial Sequence
  Oligonucleotide for detection of SNP TSC0050752
atttcttcaatct

SEQ ID NO: 207525 - DNA, 13 bp, Artificial Sequence
  Oligonucleotide for detection of SNP TSC0050752
agattgtagaaat

SEQ ID NO: 207526 - DNA, 13 bp, Artificial Sequence
  Oligonucleotide for detection of SNP TSC0050752
atttctacaatct

SEQ ID NO: 207527 - DNA, 13 bp, Artificial Sequence
  Oligonucleotide for detection of SNP TSC0050753
atttatttttggy

SEQ ID NO: 207528 - DNA, 13 bp, Artificial Sequence
  Oligonucleotide for detection of SNP TSC0050753
rccaaaaataaat

SEQ ID NO: 207529 - DNA, 13 bp, Artificial Sequence
  Oligonucleotide for detection of SNP TSC0050753
gttagaaataaat

SEQ ID NO: 207530 - DNA, 13 bp, Artificial Sequence
  Oligonucleotide for detection of SNP TSC0050753
atttatttctaac

SEQ ID NO: 207531 - DNA, 13 bp, Artificial Sequence
  Oligonucleotide for detection of SNP TSC0050753
gttagatataaat

SEQ ID NO: 207532 - DNA, 13 bp, Artificial Sequence
  Oligonucleotide for detection of SNP TSC0050753
atttatatctaac

SEQ ID NO: 207533 - DNA, 13 bp, Artificial Sequence
  Oligonucleotide for detection of SNP TSC0004679
tttgtttgatgta

SEQ ID NO: 207534 - DNA, 13 bp, Artificial Sequence
  Oligonucleotide for detection of SNP TSC0004679
tacatcaaacaaa

SEQ ID NO: 207535 - DNA, 13 bp, Artificial Sequence
  Oligonucleotide for detection of SNP TSC0004679
tttgttcgatgta

SEQ ID NO: 207536 - DNA, 13 bp, Artificial Sequence
  Oligonucleotide for detection of SNP TSC0004679
tacatcgaacaaa

SEQ ID NO: 207537 - DNA, 13 bp, Artificial Sequence
  Oligonucleotide for detection of SNP TSC0004679
tttgtttgacgta

SEQ ID NO: 207538 - DNA, 13 bp, Artificial Sequence
  Oligonucleotide for detection of SNP TSC0004679
tacgtcaaacaaa

SEQ ID NO: 207539 - DNA, 13 bp, Artificial Sequence
  Oligonucleotide for detection of SNP TSC0004679
tttgttcgacgta

SEQ ID NO: 207540 - DNA, 13 bp, Artificial Sequence
  Oligonucleotide for detection of SNP TSC0004679
tacgtcgaacaaa

SEQ ID NO: 207541 - DNA, 13 bp, Artificial Sequence
  Oligonucleotide for detection of SNP TSC0004679
tgtgttgaataga

SEQ ID NO: 207542 - DNA, 13 bp, Artificial Sequence
  Oligonucleotide for detection of SNP TSC0004679
tctattcaacaca

SEQ ID NO: 207543 - DNA, 13 bp, Artificial Sequence
  Oligonucleotide for detection of SNP TSC0004679
tgtgttaaataga

SEQ ID NO: 207544 - DNA, 13 bp, Artificial Sequence
  Oligonucleotide for detection of SNP TSC0004679
tctatttaacaca

SEQ ID NO: 207545 - DNA, 13 bp, Artificial Sequence
  Oligonucleotide for detection of SNP TSC0004679
tgcgttgaataga

SEQ ID NO: 207546 - DNA, 13 bp, Artificial Sequence
  Oligonucleotide for detection of SNP TSC0004679
tctattcaacgca

SEQ ID NO: 207547 - DNA, 13 bp, Artificial Sequence
  Oligonucleotide for detection of SNP TSC0004679
tgcgttaaataga

SEQ ID NO: 207548 - DNA, 13 bp, Artificial Sequence
  Oligonucleotide for detection of SNP TSC0004679
tctatttaacgca

SEQ ID NO: 207549 - DNA, 13 bp, Artificial Sequence
  Oligonucleotide for detection of SNP TSC0004679
tgtgtcgaataga

SEQ ID NO: 207550 - DNA, 13 bp, Artificial Sequence
  Oligonucleotide for detection of SNP TSC0004679
tctattcgacaca

SEQ ID NO: 207551 - DNA, 13 bp, Artificial Sequence
  Oligonucleotide for detection of SNP TSC0004679
tgcgtcgaataga

SEQ ID NO: 207552 - DNA, 13 bp, Artificial Sequence
  Oligonucleotide for detection of SNP TSC0004679
tctattcgacgca

SEQ ID NO: 207553 - DNA, 13 bp, Artificial Sequence
  Oligonucleotide for detection of SNP TSC0050754
taatgtataagga

SEQ ID NO: 207554 - DNA, 13 bp, Artificial Sequence
  Oligonucleotide for detection of SNP TSC0050754
tccttatacatta

SEQ ID NO: 207555 - DNA, 13 bp, Artificial Sequence
  Oligonucleotide for detection of SNP TSC0050754
taatgtgtaagga

SEQ ID NO: 207556 - DNA, 13 bp, Artificial Sequence
  Oligonucleotide for detection of SNP TSC0050754
tccttacacatta

SEQ ID NO: 207557 - DNA, 13 bp, Artificial Sequence
  Oligonucleotide for detection of SNP TSC0050754
taatgcgtaagga

SEQ ID NO: 207558 - DNA, 13 bp, Artificial Sequence
  Oligonucleotide for detection of SNP TSC0050754
tccttacgcatta

SEQ ID NO: 207559 - DNA, 13 bp, Artificial Sequence
  Oligonucleotide for detection of SNP TSC0050756
gtgtggtggtggg

SEQ ID NO: 207560 - DNA, 13 bp, Artificial Sequence
  Oligonucleotide for detection of SNP TSC0050756
cccaccaccacac

SEQ ID NO: 207561 - DNA, 13 bp, Artificial Sequence
  Oligonucleotide for detection of SNP TSC0050756
gtgtgggggtggg

SEQ ID NO: 207562 - DNA, 13 bp, Artificial Sequence
  Oligonucleotide for detection of SNP TSC0050756
cccacccccacac

SEQ ID NO: 207563 - DNA, 13 bp, Artificial Sequence
  Oligonucleotide for detection of SNP TSC0050756
tttattattatay

SEQ ID NO: 207564 - DNA, 13 bp, Artificial Sequence
  Oligonucleotide for detection of SNP TSC0050756
rtataataataaa

SEQ ID NO: 207565 - DNA, 13 bp, Artificial Sequence
  Oligonucleotide for detection of SNP TSC0050756
tttatttttatay

SEQ ID NO: 207566 - DNA, 13 bp, Artificial Sequence
  Oligonucleotide for detection of SNP TSC0050756
rtataaaaataaa

SEQ ID NO: 207567 - DNA, 13 bp, Artificial Sequence
  Oligonucleotide for detection of SNP TSC0050757
tggaaagaataty

SEQ ID NO: 207568 - DNA, 13 bp, Artificial Sequence
  Oligonucleotide for detection of SNP TSC0050757
ratattctttcca

SEQ ID NO: 207569 - DNA, 13 bp, Artificial Sequence
  Oligonucleotide for detection of SNP TSC0050757
tggaaaaaataty

SEQ ID NO: 207570 - DNA, 13 bp, Artificial Sequence
  Oligonucleotide for detection of SNP TSC0050757
ratattttttcca

SEQ ID NO: 207571 - DNA, 13 bp, Artificial Sequence
  Oligonucleotide for detection of SNP TSC0005411
gaggggggggggg

SEQ ID NO: 207572 - DNA, 13 bp, Artificial Sequence
  Oligonucleotide for detection of SNP TSC0005411
ccccccccccctc

SEQ ID NO: 207573 - DNA, 13 bp, Artificial Sequence
  Oligonucleotide for detection of SNP TSC0005411
gaggggagggggg

SEQ ID NO: 207574 - DNA, 13 bp, Artificial Sequence
  Oligonucleotide for detection of SNP TSC0005411
cccccctcccctc

SEQ ID NO: 207575 - DNA, 13 bp, Artificial Sequence
  Oligonucleotide for detection of SNP TSC0005412
tatatagtagtag

SEQ ID NO: 207576 - DNA, 13 bp, Artificial Sequence
  Oligonucleotide for detection of SNP TSC0005412
ctactactatata

SEQ ID NO: 207577 - DNA, 13 bp, Artificial Sequence
  Oligonucleotide for detection of SNP TSC0005412
tatataatagtag

SEQ ID NO: 207578 - DNA, 13 bp, Artificial Sequence
  Oligonucleotide for detection of SNP TSC0005412
ctactattatata

SEQ ID NO: 207579 - DNA, 13 bp, Artificial Sequence
  Oligonucleotide for detection of SNP TSC0050759
aaagttatatttg

SEQ ID NO: 207580 - DNA, 13 bp, Artificial Sequence
  Oligonucleotide for detection of SNP TSC0050759
caaatataacttt

SEQ ID NO: 207581 - DNA, 13 bp, Artificial Sequence
  Oligonucleotide for detection of SNP TSC0050759
aaagttgtatttg

SEQ ID NO: 207582 - DNA, 13 bp, Artificial Sequence
  Oligonucleotide for detection of SNP TSC0050759
caaatacaacttt

SEQ ID NO: 207583 - DNA, 13 bp, Artificial Sequence
  Oligonucleotide for detection of SNP TSC0050759
aaagtcgtatttg

SEQ ID NO: 207584 - DNA, 13 bp, Artificial Sequence
  Oligonucleotide for detection of SNP TSC0050759
caaatacgacttt

SEQ ID NO: 207585 - DNA, 13 bp, Artificial Sequence
  Oligonucleotide for detection of SNP TSC0050759
tagatatgatttt

SEQ ID NO: 207586 - DNA, 13 bp, Artificial Sequence
  Oligonucleotide for detection of SNP TSC0050759
aaaatcatatcta

SEQ ID NO: 207587 - DNA, 13 bp, Artificial Sequence
  Oligonucleotide for detection of SNP TSC0050759
tagatacgatttt

SEQ ID NO: 207588 - DNA, 13 bp, Artificial Sequence
  Oligonucleotide for detection of SNP TSC0050759
aaaatcgtatcta

SEQ ID NO: 207589 - DNA, 13 bp, Artificial Sequence
  Oligonucleotide for detection of SNP TSC0008132
gttatataaataa

SEQ ID NO: 207590 - DNA, 13 bp, Artificial Sequence
  Oligonucleotide for detection of SNP TSC0008132
ttatttatataac

SEQ ID NO: 207591 - DNA, 13 bp, Artificial Sequence
  Oligonucleotide for detection of SNP TSC0008132
gttatagaaataa

SEQ ID NO: 207592 - DNA, 13 bp, Artificial Sequence
  Oligonucleotide for detection of SNP TSC0008132
ttatttctataac

SEQ ID NO: 207593 - DNA, 13 bp, Artificial Sequence
  Oligonucleotide for detection of SNP TSC0008132
ttatttgtatggy

SEQ ID NO: 207594 - DNA, 13 bp, Artificial Sequence
  Oligonucleotide for detection of SNP TSC0008132
rccatacaaataa

SEQ ID NO: 207595 - DNA, 13 bp, Artificial Sequence
  Oligonucleotide for detection of SNP TSC0008132
ttatttttatggy

SEQ ID NO: 207596 - DNA, 13 bp, Artificial Sequence
  Oligonucleotide for detection of SNP TSC0008132
rccataaaaataa

SEQ ID NO: 207597 - DNA, 13 bp, Artificial Sequence
  Oligonucleotide for detection of SNP TSC0050766
gtatgtgtgtata

SEQ ID NO: 207598 - DNA, 13 bp, Artificial Sequence
  Oligonucleotide for detection of SNP TSC0050766
tatacacacatac

SEQ ID NO: 207599 - DNA, 13 bp, Artificial Sequence
  Oligonucleotide for detection of SNP TSC0050766
gtatgtatgtata

SEQ ID NO: 207600 - DNA, 13 bp, Artificial Sequence
  Oligonucleotide for detection of SNP TSC0050766
tatacatacatac

SEQ ID NO: 207601 - DNA, 13 bp, Artificial Sequence
  Oligonucleotide for detection of SNP TSC0050766
gtacgtgtgtata

SEQ ID NO: 207602 - DNA, 13 bp, Artificial Sequence
  Oligonucleotide for detection of SNP TSC0050766
tatacacacgtac

SEQ ID NO: 207603 - DNA, 13 bp, Artificial Sequence
  Oligonucleotide for detection of SNP TSC0050766
gtacgtatgtata

SEQ ID NO: 207604 - DNA, 13 bp, Artificial Sequence
  Oligonucleotide for detection of SNP TSC0050766
tatacatacgtac

SEQ ID NO: 207605 - DNA, 13 bp, Artificial Sequence
  Oligonucleotide for detection of SNP TSC0050766
gtatgcgtgtata

SEQ ID NO: 207606 - DNA, 13 bp, Artificial Sequence
  Oligonucleotide for detection of SNP TSC0050766
tatacacgcatac

SEQ ID NO: 207607 - DNA, 13 bp, Artificial Sequence
  Oligonucleotide for detection of SNP TSC0050766
gtatgtacgtata

SEQ ID NO: 207608 - DNA, 13 bp, Artificial Sequence
  Oligonucleotide for detection of SNP TSC0050766
tatacgtacatac

SEQ ID NO: 207609 - DNA, 13 bp, Artificial Sequence
  Oligonucleotide for detection of SNP TSC0050766
gtatgtgcgtata

SEQ ID NO: 207610 - DNA, 13 bp, Artificial Sequence
  Oligonucleotide for detection of SNP TSC0050766
tatacgcacatac

SEQ ID NO: 207611 - DNA, 13 bp, Artificial Sequence
  Oligonucleotide for detection of SNP TSC0050766
gtacgtacgtata

SEQ ID NO: 207612 - DNA, 13 bp, Artificial Sequence
  Oligonucleotide for detection of SNP TSC0050766
tatacgtacgtac

SEQ ID NO: 207613 - DNA, 13 bp, Artificial Sequence
  Oligonucleotide for detection of SNP TSC0050766
gtacgcgtgtata

SEQ ID NO: 207614 - DNA, 13 bp, Artificial Sequence
  Oligonucleotide for detection of SNP TSC0050766
tatacacgcgtac

SEQ ID NO: 207615 - DNA, 13 bp, Artificial Sequence
  Oligonucleotide for detection of SNP TSC0050766
gtacgtgcgtata

SEQ ID NO: 207616 - DNA, 13 bp, Artificial Sequence
  Oligonucleotide for detection of SNP TSC0050766
tatacgcacgtac

SEQ ID NO: 207617 - DNA, 13 bp, Artificial Sequence
  Oligonucleotide for detection of SNP TSC0050766
gtatgcgcgtata

SEQ ID NO: 207618 - DNA, 13 bp, Artificial Sequence
  Oligonucleotide for detection of SNP TSC0050766
tatacgcgcatac

SEQ ID NO: 207619 - DNA, 13 bp, Artificial Sequence
  Oligonucleotide for detection of SNP TSC0050766
gtacgcgcgtata

SEQ ID NO: 207620 - DNA, 13 bp, Artificial Sequence
  Oligonucleotide for detection of SNP TSC0050766
tatacgcgcgtac

SEQ ID NO: 207621 - DNA, 13 bp, Artificial Sequence
  Oligonucleotide for detection of SNP TSC0050767
ttaggtttggtty

SEQ ID NO: 207622 - DNA, 13 bp, Artificial Sequence
  Oligonucleotide for detection of SNP TSC0050767
raaccaaacctaa

SEQ ID NO: 207623 - DNA, 13 bp, Artificial Sequence
  Oligonucleotide for detection of SNP TSC0050767
ggattaagtttgg

SEQ ID NO: 207624 - DNA, 13 bp, Artificial Sequence
  Oligonucleotide for detection of SNP TSC0050767
ccaaacttaatcc

SEQ ID NO: 207625 - DNA, 13 bp, Artificial Sequence
  Oligonucleotide for detection of SNP TSC0050767
ggattatgtttgg

SEQ ID NO: 207626 - DNA, 13 bp, Artificial Sequence
  Oligonucleotide for detection of SNP TSC0050767
ccaaacataatcc

SEQ ID NO: 207627 - DNA, 13 bp, Artificial Sequence
  Oligonucleotide for detection of SNP TSC0050767
ggattacgtttgg

SEQ ID NO: 207628 - DNA, 13 bp, Artificial Sequence
  Oligonucleotide for detection of SNP TSC0050767
ccaaacgtaatcc

SEQ ID NO: 207629 - DNA, 13 bp, Artificial Sequence
  Oligonucleotide for detection of SNP TSC0050768
gtaataaaaatat

SEQ ID NO: 207630 - DNA, 13 bp, Artificial Sequence
  Oligonucleotide for detection of SNP TSC0050768
atatttttattac

SEQ ID NO: 207631 - DNA, 13 bp, Artificial Sequence
  Oligonucleotide for detection of SNP TSC0050769
ttttttagttaga

SEQ ID NO: 207632 - DNA, 13 bp, Artificial Sequence
  Oligonucleotide for detection of SNP TSC0050769
tctaactaaaaaa

SEQ ID NO: 207633 - DNA, 13 bp, Artificial Sequence
  Oligonucleotide for detection of SNP TSC0050773
atatgggttaagt

SEQ ID NO: 207634 - DNA, 13 bp, Artificial Sequence
  Oligonucleotide for detection of SNP TSC0050773
acttaacccatat

SEQ ID NO: 207635 - DNA, 13 bp, Artificial Sequence
  Oligonucleotide for detection of SNP TSC0050773
atatggattaagt

SEQ ID NO: 207636 - DNA, 13 bp, Artificial Sequence
  Oligonucleotide for detection of SNP TSC0050773
acttaatccatat

SEQ ID NO: 207637 - DNA, 13 bp, Artificial Sequence
  Oligonucleotide for detection of SNP TSC0050774
aaattaattgaty

SEQ ID NO: 207638 - DNA, 13 bp, Artificial Sequence
  Oligonucleotide for detection of SNP TSC0050774
ratcaattaattt

SEQ ID NO: 207639 - DNA, 13 bp, Artificial Sequence
  Oligonucleotide for detection of SNP TSC0050774
aaattagttgaty

SEQ ID NO: 207640 - DNA, 13 bp, Artificial Sequence
  Oligonucleotide for detection of SNP TSC0050774
ratcaactaattt

SEQ ID NO: 207641 - DNA, 13 bp, Artificial Sequence
  Oligonucleotide for detection of SNP TSC0050778
tgaattatttata

SEQ ID NO: 207642 - DNA, 13 bp, Artificial Sequence
  Oligonucleotide for detection of SNP TSC0050778
tataaataattca

SEQ ID NO: 207643 - DNA, 13 bp, Artificial Sequence
  Oligonucleotide for detection of SNP TSC0050778
tgaattgtttata

SEQ ID NO: 207644 - DNA, 13 bp, Artificial Sequence
  Oligonucleotide for detection of SNP TSC0050778
tataaacaattca

SEQ ID NO: 207645 - DNA, 13 bp, Artificial Sequence
  Oligonucleotide for detection of SNP TSC0050780
taaattatattat

SEQ ID NO: 207646 - DNA, 13 bp, Artificial Sequence
  Oligonucleotide for detection of SNP TSC0050780
ataatataattta

SEQ ID NO: 207647 - DNA, 13 bp, Artificial Sequence
  Oligonucleotide for detection of SNP TSC0050780
taaattgtattat

SEQ ID NO: 207648 - DNA, 13 bp, Artificial Sequence
  Oligonucleotide for detection of SNP TSC0050780
ataatacaattta

SEQ ID NO: 207649 - DNA, 13 bp, Artificial Sequence
  Oligonucleotide for detection of SNP TSC0050781
atgaattgattty

SEQ ID NO: 207650 - DNA, 13 bp, Artificial Sequence
  Oligonucleotide for detection of SNP TSC0050781
raaatcaattcat

SEQ ID NO: 207651 - DNA, 13 bp, Artificial Sequence
  Oligonucleotide for detection of SNP TSC0050781
acgaattgattty

SEQ ID NO: 207652 - DNA, 13 bp, Artificial Sequence
  Oligonucleotide for detection of SNP TSC0050781
raaatcaattcgt

SEQ ID NO: 207653 - DNA, 13 bp, Artificial Sequence
  Oligonucleotide for detection of SNP TSC0050781
atgaatcgattty

SEQ ID NO: 207654 - DNA, 13 bp, Artificial Sequence
  Oligonucleotide for detection of SNP TSC0050781
raaatcgattcat

SEQ ID NO: 207655 - DNA, 13 bp, Artificial Sequence
  Oligonucleotide for detection of SNP TSC0050781
acgaatcgattty

SEQ ID NO: 207656 - DNA, 13 bp, Artificial Sequence
  Oligonucleotide for detection of SNP TSC0050781
raaatcgattcgt

SEQ ID NO: 207657 - DNA, 13 bp, Artificial Sequence
  Oligonucleotide for detection of SNP TSC0050781
gggattggtttgt

SEQ ID NO: 207658 - DNA, 13 bp, Artificial Sequence
  Oligonucleotide for detection of SNP TSC0050781
acaaaccaatccc

SEQ ID NO: 207659 - DNA, 13 bp, Artificial Sequence
  Oligonucleotide for detection of SNP TSC0050781
gggattagtttgt

SEQ ID NO: 207660 - DNA, 13 bp, Artificial Sequence
  Oligonucleotide for detection of SNP TSC0050781
acaaactaatccc

SEQ ID NO: 207661 - DNA, 13 bp, Artificial Sequence
  Oligonucleotide for detection of SNP TSC0050781
gggatcggtttgt

SEQ ID NO: 207662 - DNA, 13 bp, Artificial Sequence
  Oligonucleotide for detection of SNP TSC0050781
acaaaccgatccc

SEQ ID NO: 207663 - DNA, 13 bp, Artificial Sequence
  Oligonucleotide for detection of SNP TSC0050781
gggattagttcgt

SEQ ID NO: 207664 - DNA, 13 bp, Artificial Sequence
  Oligonucleotide for detection of SNP TSC0050781
acgaactaatccc

SEQ ID NO: 207665 - DNA, 13 bp, Artificial Sequence
  Oligonucleotide for detection of SNP TSC0050781
gggattggttcgt

SEQ ID NO: 207666 - DNA, 13 bp, Artificial Sequence
  Oligonucleotide for detection of SNP TSC0050781
acgaaccaatccc

SEQ ID NO: 207667 - DNA, 13 bp, Artificial Sequence
  Oligonucleotide for detection of SNP TSC0050781
gggatcggttcgt

SEQ ID NO: 207668 - DNA, 13 bp, Artificial Sequence
  Oligonucleotide for detection of SNP TSC0050781
acgaaccgatccc

SEQ ID NO: 207669 - DNA, 13 bp, Artificial Sequence
  Oligonucleotide for detection of SNP TSC0050784
tgtttttgaatga

SEQ ID NO: 207670 - DNA, 13 bp, Artificial Sequence
  Oligonucleotide for detection of SNP TSC0050784
tcattcaaaaaca

SEQ ID NO: 207671 - DNA, 13 bp, Artificial Sequence
  Oligonucleotide for detection of SNP TSC0050784
tgttttggaatga

SEQ ID NO: 207672 - DNA, 13 bp, Artificial Sequence
  Oligonucleotide for detection of SNP TSC0050784
tcattccaaaaca

SEQ ID NO: 207673 - DNA, 13 bp, Artificial Sequence
  Oligonucleotide for detection of SNP TSC0050784
tgtttcggaatga

SEQ ID NO: 207674 - DNA, 13 bp, Artificial Sequence
  Oligonucleotide for detection of SNP TSC0050784
tcattccgaaaca

SEQ ID NO: 207675 - DNA, 13 bp, Artificial Sequence
  Oligonucleotide for detection of SNP TSC0050784
ttatttagaagta

SEQ ID NO: 207676 - DNA, 13 bp, Artificial Sequence
  Oligonucleotide for detection of SNP TSC0050784
tacttctaaataa

SEQ ID NO: 207677 - DNA, 13 bp, Artificial Sequence
  Oligonucleotide for detection of SNP TSC0050784
ttattttgaagta

SEQ ID NO: 207678 - DNA, 13 bp, Artificial Sequence
  Oligonucleotide for detection of SNP TSC0050784
tacttcaaaataa

SEQ ID NO: 207679 - DNA, 13 bp, Artificial Sequence
  Oligonucleotide for detection of SNP TSC0050784
ttatttcgaagta

SEQ ID NO: 207680 - DNA, 13 bp, Artificial Sequence
  Oligonucleotide for detection of SNP TSC0050784
tacttcgaaataa

SEQ ID NO: 207681 - DNA, 13 bp, Artificial Sequence
  Oligonucleotide for detection of SNP TSC0050786
tatttaagtaaty

SEQ ID NO: 207682 - DNA, 13 bp, Artificial Sequence
  Oligonucleotide for detection of SNP TSC0050786
rattacttaaata

SEQ ID NO: 207683 - DNA, 13 bp, Artificial Sequence
  Oligonucleotide for detection of SNP TSC0050786
tatttaggtaaty

SEQ ID NO: 207684 - DNA, 13 bp, Artificial Sequence
  Oligonucleotide for detection of SNP TSC0050786
rattacctaaata

SEQ ID NO: 207685 - DNA, 13 bp, Artificial Sequence
  Oligonucleotide for detection of SNP TSC0050787
agtgaggttttgt

SEQ ID NO: 207686 - DNA, 13 bp, Artificial Sequence
  Oligonucleotide for detection of SNP TSC0050787
acaaaacctcact

SEQ ID NO: 207687 - DNA, 13 bp, Artificial Sequence
  Oligonucleotide for detection of SNP TSC0050787
agtgagattttgt

SEQ ID NO: 207688 - DNA, 13 bp, Artificial Sequence
  Oligonucleotide for detection of SNP TSC0050787
acaaaatctcact

SEQ ID NO: 207689 - DNA, 13 bp, Artificial Sequence
  Oligonucleotide for detection of SNP TSC0050787
agcgaggttttgt

SEQ ID NO: 207690 - DNA, 13 bp, Artificial Sequence
  Oligonucleotide for detection of SNP TSC0050787
acaaaacctcgct

SEQ ID NO: 207691 - DNA, 13 bp, Artificial Sequence
  Oligonucleotide for detection of SNP TSC0050787
agcgagattttgt

SEQ ID NO: 207692 - DNA, 13 bp, Artificial Sequence
  Oligonucleotide for detection of SNP TSC0050787
acaaaatctcgct

SEQ ID NO: 207693 - DNA, 13 bp, Artificial Sequence
  Oligonucleotide for detection of SNP TSC0050787
agtgaggtttcgt

SEQ ID NO: 207694 - DNA, 13 bp, Artificial Sequence
  Oligonucleotide for detection of SNP TSC0050787
acgaaacctcact

SEQ ID NO: 207695 - DNA, 13 bp, Artificial Sequence
  Oligonucleotide for detection of SNP TSC0050787
agtgagatttcgt

SEQ ID NO: 207696 - DNA, 13 bp, Artificial Sequence
  Oligonucleotide for detection of SNP TSC0050787
acgaaatctcact

SEQ ID NO: 207697 - DNA, 13 bp, Artificial Sequence
  Oligonucleotide for detection of SNP TSC0050787
agcgaggtttcgt

SEQ ID NO: 207698 - DNA, 13 bp, Artificial Sequence
  Oligonucleotide for detection of SNP TSC0050787
acgaaacctcgct

SEQ ID NO: 207699 - DNA, 13 bp, Artificial Sequence
  Oligonucleotide for detection of SNP TSC0050787
agcgagatttcgt

SEQ ID NO: 207700 - DNA, 13 bp, Artificial Sequence
  Oligonucleotide for detection of SNP TSC0050787
acgaaatctcgct

SEQ ID NO: 207701 - DNA, 13 bp, Artificial Sequence
  Oligonucleotide for detection of SNP TSC0050788
ttgtaaaaatgtt

SEQ ID NO: 207702 - DNA, 13 bp, Artificial Sequence
  Oligonucleotide for detection of SNP TSC0050788
aacatttttacaa

SEQ ID NO: 207703 - DNA, 13 bp, Artificial Sequence
  Oligonucleotide for detection of SNP TSC0050788
ttgtaagaatgtt

SEQ ID NO: 207704 - DNA, 13 bp, Artificial Sequence
  Oligonucleotide for detection of SNP TSC0050788
aacattcttacaa

SEQ ID NO: 207705 - DNA, 13 bp, Artificial Sequence
  Oligonucleotide for detection of SNP TSC0050790
ttattatgtgttt

SEQ ID NO: 207706 - DNA, 13 bp, Artificial Sequence
  Oligonucleotide for detection of SNP TSC0050790
aaacacataataa

SEQ ID NO: 207707 - DNA, 13 bp, Artificial Sequence
  Oligonucleotide for detection of SNP TSC0050790
ttattacgtgttt

SEQ ID NO: 207708 - DNA, 13 bp, Artificial Sequence
  Oligonucleotide for detection of SNP TSC0050790
aaacacgtaataa

SEQ ID NO: 207709 - DNA, 13 bp, Artificial Sequence
  Oligonucleotide for detection of SNP TSC0050791
agtttattttgtt

SEQ ID NO: 207710 - DNA, 13 bp, Artificial Sequence
  Oligonucleotide for detection of SNP TSC0050791
aacaaaataaact

SEQ ID NO: 207711 - DNA, 13 bp, Artificial Sequence
  Oligonucleotide for detection of SNP TSC0050791
aataagttagatt

SEQ ID NO: 207712 - DNA, 13 bp, Artificial Sequence
  Oligonucleotide for detection of SNP TSC0050791
aatctaacttatt

SEQ ID NO: 207713 - DNA, 13 bp, Artificial Sequence
  Oligonucleotide for detection of SNP TSC0050791
aataaggtagatt

SEQ ID NO: 207714 - DNA, 13 bp, Artificial Sequence
  Oligonucleotide for detection of SNP TSC0050791
aatctaccttatt

SEQ ID NO: 207715 - DNA, 13 bp, Artificial Sequence
  Oligonucleotide for detection of SNP TSC0050792
agattatatatta

SEQ ID NO: 207716 - DNA, 13 bp, Artificial Sequence
  Oligonucleotide for detection of SNP TSC0050792
taatatataatct

SEQ ID NO: 207717 - DNA, 13 bp, Artificial Sequence
  Oligonucleotide for detection of SNP TSC0050792
agattagatatta

SEQ ID NO: 207718 - DNA, 13 bp, Artificial Sequence
  Oligonucleotide for detection of SNP TSC0050792
taatatctaatct

SEQ ID NO: 207719 - DNA, 13 bp, Artificial Sequence
  Oligonucleotide for detection of SNP TSC0050792
taatatgtagttt

SEQ ID NO: 207720 - DNA, 13 bp, Artificial Sequence
  Oligonucleotide for detection of SNP TSC0050792
aaactacatatta

SEQ ID NO: 207721 - DNA, 13 bp, Artificial Sequence
  Oligonucleotide for detection of SNP TSC0050792
taatatttagttt

SEQ ID NO: 207722 - DNA, 13 bp, Artificial Sequence
  Oligonucleotide for detection of SNP TSC0050792
aaactaaatatta

SEQ ID NO: 207723 - DNA, 13 bp, Artificial Sequence
  Oligonucleotide for detection of SNP TSC0050793
gtaattgtgtgaa

SEQ ID NO: 207724 - DNA, 13 bp, Artificial Sequence
  Oligonucleotide for detection of SNP TSC0050793
ttcacacaattac

SEQ ID NO: 207725 - DNA, 13 bp, Artificial Sequence
  Oligonucleotide for detection of SNP TSC0050793
gtaattatgtgaa

SEQ ID NO: 207726 - DNA, 13 bp, Artificial Sequence
  Oligonucleotide for detection of SNP TSC0050793
ttcacataattac

SEQ ID NO: 207727 - DNA, 13 bp, Artificial Sequence
  Oligonucleotide for detection of SNP TSC0050793
gtaatcgtgtgaa

SEQ ID NO: 207728 - DNA, 13 bp, Artificial Sequence
  Oligonucleotide for detection of SNP TSC0050793
ttcacacgattac

SEQ ID NO: 207729 - DNA, 13 bp, Artificial Sequence
  Oligonucleotide for detection of SNP TSC0050796
tttataggggtay

SEQ ID NO: 207730 - DNA, 13 bp, Artificial Sequence
  Oligonucleotide for detection of SNP TSC0050796
rtacccctataaa

SEQ ID NO: 207731 - DNA, 13 bp, Artificial Sequence
  Oligonucleotide for detection of SNP TSC0050796
tttataagggtay

SEQ ID NO: 207732 - DNA, 13 bp, Artificial Sequence
  Oligonucleotide for detection of SNP TSC0050796
rtacccttataaa

SEQ ID NO: 207733 - DNA, 13 bp, Artificial Sequence
  Oligonucleotide for detection of SNP TSC0050797
ttataagattttt

SEQ ID NO: 207734 - DNA, 13 bp, Artificial Sequence
  Oligonucleotide for detection of SNP TSC0050797
aaaaatcttataa

SEQ ID NO: 207735 - DNA, 13 bp, Artificial Sequence
  Oligonucleotide for detection of SNP TSC0050798
agaaaaaatggaa

SEQ ID NO: 207736 - DNA, 13 bp, Artificial Sequence
  Oligonucleotide for detection of SNP TSC0050798
ttccattttttct

SEQ ID NO: 207737 - DNA, 13 bp, Artificial Sequence
  Oligonucleotide for detection of SNP TSC0050798
agaaaatatggaa

SEQ ID NO: 207738 - DNA, 13 bp, Artificial Sequence
  Oligonucleotide for detection of SNP TSC0050798
ttccatattttct

SEQ ID NO: 207739 - DNA, 13 bp, Artificial Sequence
  Oligonucleotide for detection of SNP TSC0050799
tatatagattttt

SEQ ID NO: 207740 - DNA, 13 bp, Artificial Sequence
  Oligonucleotide for detection of SNP TSC0050799
aaaaatctatata

SEQ ID NO: 207741 - DNA, 13 bp, Artificial Sequence
  Oligonucleotide for detection of SNP TSC0050803
aaagtaggtagay

SEQ ID NO: 207742 - DNA, 13 bp, Artificial Sequence
  Oligonucleotide for detection of SNP TSC0050803
rtctacctacttt

SEQ ID NO: 207743 - DNA, 13 bp, Artificial Sequence
  Oligonucleotide for detection of SNP TSC0050803
aaagtaagtagay

SEQ ID NO: 207744 - DNA, 13 bp, Artificial Sequence
  Oligonucleotide for detection of SNP TSC0050803
rtctacttacttt

SEQ ID NO: 207745 - DNA, 13 bp, Artificial Sequence
  Oligonucleotide for detection of SNP TSC0050805
gtatggaaagtta

SEQ ID NO: 207746 - DNA, 13 bp, Artificial Sequence
  Oligonucleotide for detection of SNP TSC0050805
taactttccatac

SEQ ID NO: 207747 - DNA, 13 bp, Artificial Sequence
  Oligonucleotide for detection of SNP TSC0050805
gtatggtaagtta

SEQ ID NO: 207748 - DNA, 13 bp, Artificial Sequence
  Oligonucleotide for detection of SNP TSC0050805
taacttaccatac

SEQ ID NO: 207749 - DNA, 13 bp, Artificial Sequence
  Oligonucleotide for detection of SNP TSC0050805
gtatgggaagtta

SEQ ID NO: 207750 - DNA, 13 bp, Artificial Sequence
  Oligonucleotide for detection of SNP TSC0050805
taacttcccatac

SEQ ID NO: 207751 - DNA, 13 bp, Artificial Sequence
  Oligonucleotide for detection of SNP TSC0050805
gtacggaaagtta

SEQ ID NO: 207752 - DNA, 13 bp, Artificial Sequence
  Oligonucleotide for detection of SNP TSC0050805
taactttccgtac

SEQ ID NO: 207753 - DNA, 13 bp, Artificial Sequence
  Oligonucleotide for detection of SNP TSC0050805
gtacggtaagtta

SEQ ID NO: 207754 - DNA, 13 bp, Artificial Sequence
  Oligonucleotide for detection of SNP TSC0050805
taacttaccgtac

SEQ ID NO: 207755 - DNA, 13 bp, Artificial Sequence
  Oligonucleotide for detection of SNP TSC0050805
gtacgggaagtta

SEQ ID NO: 207756 - DNA, 13 bp, Artificial Sequence
  Oligonucleotide for detection of SNP TSC0050805
taacttcccgtac

SEQ ID NO: 207757 - DNA, 13 bp, Artificial Sequence
  Oligonucleotide for detection of SNP TSC0050805
tggttttttgtgy

SEQ ID NO: 207758 - DNA, 13 bp, Artificial Sequence
  Oligonucleotide for detection of SNP TSC0050805
rcacaaaaaacca

SEQ ID NO: 207759 - DNA, 13 bp, Artificial Sequence
  Oligonucleotide for detection of SNP TSC0050805
tggtttgttgtgy

SEQ ID NO: 207760 - DNA, 13 bp, Artificial Sequence
  Oligonucleotide for detection of SNP TSC0050805
rcacaacaaacca

SEQ ID NO: 207761 - DNA, 13 bp, Artificial Sequence
  Oligonucleotide for detection of SNP TSC0050805
tggtttattgtgy

SEQ ID NO: 207762 - DNA, 13 bp, Artificial Sequence
  Oligonucleotide for detection of SNP TSC0050805
rcacaataaacca

SEQ ID NO: 207763 - DNA, 13 bp, Artificial Sequence
  Oligonucleotide for detection of SNP TSC0050805
tggtttttcgtgy

SEQ ID NO: 207764 - DNA, 13 bp, Artificial Sequence
  Oligonucleotide for detection of SNP TSC0050805
rcacgaaaaacca

SEQ ID NO: 207765 - DNA, 13 bp, Artificial Sequence
  Oligonucleotide for detection of SNP TSC0050805
tggtttgtcgtgy

SEQ ID NO: 207766 - DNA, 13 bp, Artificial Sequence
  Oligonucleotide for detection of SNP TSC0050805
rcacgacaaacca

SEQ ID NO: 207767 - DNA, 13 bp, Artificial Sequence
  Oligonucleotide for detection of SNP TSC0050805
tggtttatcgtgy

SEQ ID NO: 207768 - DNA, 13 bp, Artificial Sequence
  Oligonucleotide for detection of SNP TSC0050805
rcacgataaacca

SEQ ID NO: 207769 - DNA, 13 bp, Artificial Sequence
  Oligonucleotide for detection of SNP TSC0050809
tgataaggataat

SEQ ID NO: 207770 - DNA, 13 bp, Artificial Sequence
  Oligonucleotide for detection of SNP TSC0050809
attatccttatca

SEQ ID NO: 207771 - DNA, 13 bp, Artificial Sequence
  Oligonucleotide for detection of SNP TSC0050809
tgataaagataat

SEQ ID NO: 207772 - DNA, 13 bp, Artificial Sequence
  Oligonucleotide for detection of SNP TSC0050809
attatctttatca

SEQ ID NO: 207773 - DNA, 13 bp, Artificial Sequence
  Oligonucleotide for detection of SNP TSC0050811
ggagaaaagatgt

SEQ ID NO: 207774 - DNA, 13 bp, Artificial Sequence
  Oligonucleotide for detection of SNP TSC0050811
acatcttttctcc

SEQ ID NO: 207775 - DNA, 13 bp, Artificial Sequence
  Oligonucleotide for detection of SNP TSC0050811
ggagaagagatgt

SEQ ID NO: 207776 - DNA, 13 bp, Artificial Sequence
  Oligonucleotide for detection of SNP TSC0050811
acatctcttctcc

SEQ ID NO: 207777 - DNA, 13 bp, Artificial Sequence
  Oligonucleotide for detection of SNP TSC0050815
ttaatttgaaaaa

SEQ ID NO: 207778 - DNA, 13 bp, Artificial Sequence
  Oligonucleotide for detection of SNP TSC0050815
tttttcaaattaa

SEQ ID NO: 207779 - DNA, 13 bp, Artificial Sequence
  Oligonucleotide for detection of SNP TSC0050815
ttaattggaaaaa

SEQ ID NO: 207780 - DNA, 13 bp, Artificial Sequence
  Oligonucleotide for detection of SNP TSC0050815
tttttccaattaa

SEQ ID NO: 207781 - DNA, 13 bp, Artificial Sequence
  Oligonucleotide for detection of SNP TSC0050815
ttttttaagttag

SEQ ID NO: 207782 - DNA, 13 bp, Artificial Sequence
  Oligonucleotide for detection of SNP TSC0050815
ctaacttaaaaaa

SEQ ID NO: 207783 - DNA, 13 bp, Artificial Sequence
  Oligonucleotide for detection of SNP TSC0050816
ttttatatgtggt

SEQ ID NO: 207784 - DNA, 13 bp, Artificial Sequence
  Oligonucleotide for detection of SNP TSC0050816
accacatataaaa

SEQ ID NO: 207785 - DNA, 13 bp, Artificial Sequence
  Oligonucleotide for detection of SNP TSC0050816
ttttatgtgtggt

SEQ ID NO: 207786 - DNA, 13 bp, Artificial Sequence
  Oligonucleotide for detection of SNP TSC0050816
accacacataaaa

SEQ ID NO: 207787 - DNA, 13 bp, Artificial Sequence
  Oligonucleotide for detection of SNP TSC0050816
ttttacgtgtggt

SEQ ID NO: 207788 - DNA, 13 bp, Artificial Sequence
  Oligonucleotide for detection of SNP TSC0050816
accacacgtaaaa

SEQ ID NO: 207789 - DNA, 13 bp, Artificial Sequence
  Oligonucleotide for detection of SNP TSC0050816
attatatgtagaa

SEQ ID NO: 207790 - DNA, 13 bp, Artificial Sequence
  Oligonucleotide for detection of SNP TSC0050816
ttctacatataat

SEQ ID NO: 207791 - DNA, 13 bp, Artificial Sequence
  Oligonucleotide for detection of SNP TSC0050816
attatacgtagaa

SEQ ID NO: 207792 - DNA, 13 bp, Artificial Sequence
  Oligonucleotide for detection of SNP TSC0050816
ttctacgtataat

SEQ ID NO: 207793 - DNA, 13 bp, Artificial Sequence
  Oligonucleotide for detection of SNP TSC0000449
tgagatggaatat

SEQ ID NO: 207794 - DNA, 13 bp, Artificial Sequence
  Oligonucleotide for detection of SNP TSC0000449
atattccatctca

SEQ ID NO: 207795 - DNA, 13 bp, Artificial Sequence
  Oligonucleotide for detection of SNP TSC0000449
tgagatagaatat

SEQ ID NO: 207796 - DNA, 13 bp, Artificial Sequence
  Oligonucleotide for detection of SNP TSC0000449
atattctatctca

SEQ ID NO: 207797 - DNA, 13 bp, Artificial Sequence
  Oligonucleotide for detection of SNP TSC0000449
tgagacggaatat

SEQ ID NO: 207798 - DNA, 13 bp, Artificial Sequence
  Oligonucleotide for detection of SNP TSC0000449
atattccgtctca

SEQ ID NO: 207799 - DNA, 13 bp, Artificial Sequence
  Oligonucleotide for detection of SNP TSC0050817
ggatataggagty

SEQ ID NO: 207800 - DNA, 13 bp, Artificial Sequence
  Oligonucleotide for detection of SNP TSC0050817
ractcctatatcc

SEQ ID NO: 207801 - DNA, 13 bp, Artificial Sequence
  Oligonucleotide for detection of SNP TSC0050817
ggatatgggagty

SEQ ID NO: 207802 - DNA, 13 bp, Artificial Sequence
  Oligonucleotide for detection of SNP TSC0050817
ractcccatatcc

SEQ ID NO: 207803 - DNA, 13 bp, Artificial Sequence
  Oligonucleotide for detection of SNP TSC0050817
ggatacgggagty

SEQ ID NO: 207804 - DNA, 13 bp, Artificial Sequence
  Oligonucleotide for detection of SNP TSC0050817
ractcccgtatcc

SEQ ID NO: 207805 - DNA, 13 bp, Artificial Sequence
  Oligonucleotide for detection of SNP TSC0050818
tgtttagagaatg

SEQ ID NO: 207806 - DNA, 13 bp, Artificial Sequence
  Oligonucleotide for detection of SNP TSC0050818
cattctctaaaca

SEQ ID NO: 207807 - DNA, 13 bp, Artificial Sequence
  Oligonucleotide for detection of SNP TSC0050818
tgtttaaagaatg

SEQ ID NO: 207808 - DNA, 13 bp, Artificial Sequence
  Oligonucleotide for detection of SNP TSC0050818
cattctttaaaca

SEQ ID NO: 207809 - DNA, 13 bp, Artificial Sequence
  Oligonucleotide for detection of SNP TSC0050819
gatataatttaat

SEQ ID NO: 207810 - DNA, 13 bp, Artificial Sequence
  Oligonucleotide for detection of SNP TSC0050819
attaaattatatc

SEQ ID NO: 207811 - DNA, 13 bp, Artificial Sequence
  Oligonucleotide for detection of SNP TSC0050819
gatatagtttaat

SEQ ID NO: 207812 - DNA, 13 bp, Artificial Sequence
  Oligonucleotide for detection of SNP TSC0050819
attaaactatatc

SEQ ID NO: 207813 - DNA, 13 bp, Artificial Sequence
  Oligonucleotide for detection of SNP TSC0050824
tttaataagtatt

SEQ ID NO: 207814 - DNA, 13 bp, Artificial Sequence
  Oligonucleotide for detection of SNP TSC0050824
aatacttattaaa

SEQ ID NO: 207815 - DNA, 13 bp, Artificial Sequence
  Oligonucleotide for detection of SNP TSC0050824
tttaattagtatt

SEQ ID NO: 207816 - DNA, 13 bp, Artificial Sequence
  Oligonucleotide for detection of SNP TSC0050824
aatactaattaaa

SEQ ID NO: 207817 - DNA, 13 bp, Artificial Sequence
  Oligonucleotide for detection of SNP TSC0050824
tttaatgagtatt

SEQ ID NO: 207818 - DNA, 13 bp, Artificial Sequence
  Oligonucleotide for detection of SNP TSC0050824
aatactcattaaa

SEQ ID NO: 207819 - DNA, 13 bp, Artificial Sequence
  Oligonucleotide for detection of SNP TSC0050824
tttaacgagtatt

SEQ ID NO: 207820 - DNA, 13 bp, Artificial Sequence
  Oligonucleotide for detection of SNP TSC0050824
aatactcgttaaa

SEQ ID NO: 207821 - DNA, 13 bp, Artificial Sequence
  Oligonucleotide for detection of SNP TSC0050824
aatgtttgttaaa

SEQ ID NO: 207822 - DNA, 13 bp, Artificial Sequence
  Oligonucleotide for detection of SNP TSC0050824
tttaacaaacatt

SEQ ID NO: 207823 - DNA, 13 bp, Artificial Sequence
  Oligonucleotide for detection of SNP TSC0050824
aatgttggttaaa

SEQ ID NO: 207824 - DNA, 13 bp, Artificial Sequence
  Oligonucleotide for detection of SNP TSC0050824
tttaaccaacatt

SEQ ID NO: 207825 - DNA, 13 bp, Artificial Sequence
  Oligonucleotide for detection of SNP TSC0050824
aatgttcgttaaa

SEQ ID NO: 207826 - DNA, 13 bp, Artificial Sequence
  Oligonucleotide for detection of SNP TSC0050824
tttaacgaacatt

SEQ ID NO: 207827 - DNA, 13 bp, Artificial Sequence
  Oligonucleotide for detection of SNP TSC0050825
gtaagttgatata

SEQ ID NO: 207828 - DNA, 13 bp, Artificial Sequence
  Oligonucleotide for detection of SNP TSC0050825
tatatcaacttac

SEQ ID NO: 207829 - DNA, 13 bp, Artificial Sequence
  Oligonucleotide for detection of SNP TSC0050825
gtaagtggatata

SEQ ID NO: 207830 - DNA, 13 bp, Artificial Sequence
  Oligonucleotide for detection of SNP TSC0050825
tatatccacttac

SEQ ID NO: 207831 - DNA, 13 bp, Artificial Sequence
  Oligonucleotide for detection of SNP TSC0050825
gtaagtcgatata

SEQ ID NO: 207832 - DNA, 13 bp, Artificial Sequence
  Oligonucleotide for detection of SNP TSC0050825
tatatcgacttac

SEQ ID NO: 207833 - DNA, 13 bp, Artificial Sequence
  Oligonucleotide for detection of SNP TSC0050825
tatattgatttgy

SEQ ID NO: 207834 - DNA, 13 bp, Artificial Sequence
  Oligonucleotide for detection of SNP TSC0050825
rcaaatcaatata

SEQ ID NO: 207835 - DNA, 13 bp, Artificial Sequence
  Oligonucleotide for detection of SNP TSC0050825
tatatttatttgy

SEQ ID NO: 207836 - DNA, 13 bp, Artificial Sequence
  Oligonucleotide for detection of SNP TSC0050825
rcaaataaatata

SEQ ID NO: 207837 - DNA, 13 bp, Artificial Sequence
  Oligonucleotide for detection of SNP TSC0050825
tatatcgatttgy

SEQ ID NO: 207838 - DNA, 13 bp, Artificial Sequence
  Oligonucleotide for detection of SNP TSC0050825
rcaaatcgatata

SEQ ID NO: 207839 - DNA, 13 bp, Artificial Sequence
  Oligonucleotide for detection of SNP TSC0050827
aatgaggtgtttt

SEQ ID NO: 207840 - DNA, 13 bp, Artificial Sequence
  Oligonucleotide for detection of SNP TSC0050827
aaaacacctcatt

SEQ ID NO: 207841 - DNA, 13 bp, Artificial Sequence
  Oligonucleotide for detection of SNP TSC0050827
aatgagatgtttt

SEQ ID NO: 207842 - DNA, 13 bp, Artificial Sequence
  Oligonucleotide for detection of SNP TSC0050827
aaaacatctcatt

SEQ ID NO: 207843 - DNA, 13 bp, Artificial Sequence
  Oligonucleotide for detection of SNP TSC0050828
tgttgaggatgay

SEQ ID NO: 207844 - DNA, 13 bp, Artificial Sequence
  Oligonucleotide for detection of SNP TSC0050828
rtcatcctcaaca

SEQ ID NO: 207845 - DNA, 13 bp, Artificial Sequence
  Oligonucleotide for detection of SNP TSC0050828
tgttgaagatgay

SEQ ID NO: 207846 - DNA, 13 bp, Artificial Sequence
  Oligonucleotide for detection of SNP TSC0050828
rtcatcttcaaca

SEQ ID NO: 207847 - DNA, 13 bp, Artificial Sequence
  Oligonucleotide for detection of SNP TSC0050828
tgttgaggacgay

SEQ ID NO: 207848 - DNA, 13 bp, Artificial Sequence
  Oligonucleotide for detection of SNP TSC0050828
rtcgtcctcaaca

SEQ ID NO: 207849 - DNA, 13 bp, Artificial Sequence
  Oligonucleotide for detection of SNP TSC0050828
tgttgaagacgay

SEQ ID NO: 207850 - DNA, 13 bp, Artificial Sequence
  Oligonucleotide for detection of SNP TSC0050828
rtcgtcttcaaca

SEQ ID NO: 207851 - DNA, 13 bp, Artificial Sequence
  Oligonucleotide for detection of SNP TSC0050829
aggaattgttaag

SEQ ID NO: 207852 - DNA, 13 bp, Artificial Sequence
  Oligonucleotide for detection of SNP TSC0050829
cttaacaattcct

SEQ ID NO: 207853 - DNA, 13 bp, Artificial Sequence
  Oligonucleotide for detection of SNP TSC0050829
aggaatggttaag

SEQ ID NO: 207854 - DNA, 13 bp, Artificial Sequence
  Oligonucleotide for detection of SNP TSC0050829
cttaaccattcct

SEQ ID NO: 207855 - DNA, 13 bp, Artificial Sequence
  Oligonucleotide for detection of SNP TSC0050829
aggaatcgttaag

SEQ ID NO: 207856 - DNA, 13 bp, Artificial Sequence
  Oligonucleotide for detection of SNP TSC0050829
cttaacgattcct

SEQ ID NO: 207857 - DNA, 13 bp, Artificial Sequence
  Oligonucleotide for detection of SNP TSC0050829
tttagtgattttt

SEQ ID NO: 207858 - DNA, 13 bp, Artificial Sequence
  Oligonucleotide for detection of SNP TSC0050829
aaaaatcactaaa

SEQ ID NO: 207859 - DNA, 13 bp, Artificial Sequence
  Oligonucleotide for detection of SNP TSC0050829
tttagcgattttt

SEQ ID NO: 207860 - DNA, 13 bp, Artificial Sequence
  Oligonucleotide for detection of SNP TSC0050829
aaaaatcgctaaa

SEQ ID NO: 207861 - DNA, 13 bp, Artificial Sequence
  Oligonucleotide for detection of SNP TSC0050831
ttgtttgtgggaa

SEQ ID NO: 207862 - DNA, 13 bp, Artificial Sequence
  Oligonucleotide for detection of SNP TSC0050831
ttcccacaaacaa

SEQ ID NO: 207863 - DNA, 13 bp, Artificial Sequence
  Oligonucleotide for detection of SNP TSC0050831
ttgtttatgggaa

SEQ ID NO: 207864 - DNA, 13 bp, Artificial Sequence
  Oligonucleotide for detection of SNP TSC0050831
ttcccataaacaa

SEQ ID NO: 207865 - DNA, 13 bp, Artificial Sequence
  Oligonucleotide for detection of SNP TSC0050831
ttgttcgtgggaa

SEQ ID NO: 207866 - DNA, 13 bp, Artificial Sequence
  Oligonucleotide for detection of SNP TSC0050831
ttcccacgaacaa

SEQ ID NO: 207867 - DNA, 13 bp, Artificial Sequence
  Oligonucleotide for detection of SNP TSC0050833
tgttttataaggg

SEQ ID NO: 207868 - DNA, 13 bp, Artificial Sequence
  Oligonucleotide for detection of SNP TSC0050833
cccttataaaaca

SEQ ID NO: 207869 - DNA, 13 bp, Artificial Sequence
  Oligonucleotide for detection of SNP TSC0050833
tgttttttaaggg

SEQ ID NO: 207870 - DNA, 13 bp, Artificial Sequence
  Oligonucleotide for detection of SNP TSC0050833
cccttaaaaaaca

SEQ ID NO: 207871 - DNA, 13 bp, Artificial Sequence
  Oligonucleotide for detection of SNP TSC0050835
aaatatagatgag

SEQ ID NO: 207872 - DNA, 13 bp, Artificial Sequence
  Oligonucleotide for detection of SNP TSC0050835
ctcatctatattt

SEQ ID NO: 207873 - DNA, 13 bp, Artificial Sequence
  Oligonucleotide for detection of SNP TSC0050835
aaatatggatgag

SEQ ID NO: 207874 - DNA, 13 bp, Artificial Sequence
  Oligonucleotide for detection of SNP TSC0050835
ctcatccatattt

SEQ ID NO: 207875 - DNA, 13 bp, Artificial Sequence
  Oligonucleotide for detection of SNP TSC0050835
aaatacggatgag

SEQ ID NO: 207876 - DNA, 13 bp, Artificial Sequence
  Oligonucleotide for detection of SNP TSC0050835
ctcatccgtattt

SEQ ID NO: 207877 - DNA, 13 bp, Artificial Sequence
  Oligonucleotide for detection of SNP TSC0050835
tttatttgtattt

SEQ ID NO: 207878 - DNA, 13 bp, Artificial Sequence
  Oligonucleotide for detection of SNP TSC0050835
aaatacaaataaa

SEQ ID NO: 207879 - DNA, 13 bp, Artificial Sequence
  Oligonucleotide for detection of SNP TSC0050835
tttattcgtattt

SEQ ID NO: 207880 - DNA, 13 bp, Artificial Sequence
  Oligonucleotide for detection of SNP TSC0050835
aaatacgaataaa

SEQ ID NO: 207881 - DNA, 13 bp, Artificial Sequence
  Oligonucleotide for detection of SNP TSC0050836
taaagtgtttgtt

SEQ ID NO: 207882 - DNA, 13 bp, Artificial Sequence
  Oligonucleotide for detection of SNP TSC0050836
aacaaacacttta

SEQ ID NO: 207883 - DNA, 13 bp, Artificial Sequence
  Oligonucleotide for detection of SNP TSC0050836
taaagtatttgtt

SEQ ID NO: 207884 - DNA, 13 bp, Artificial Sequence
  Oligonucleotide for detection of SNP TSC0050836
aacaaatacttta

SEQ ID NO: 207885 - DNA, 13 bp, Artificial Sequence
  Oligonucleotide for detection of SNP TSC0050837
ataaaagttataa

SEQ ID NO: 207886 - DNA, 13 bp, Artificial Sequence
  Oligonucleotide for detection of SNP TSC0050837
ttataacttttat

SEQ ID NO: 207887 - DNA, 13 bp, Artificial Sequence
  Oligonucleotide for detection of SNP TSC0050838
ttatgaataaata

SEQ ID NO: 207888 - DNA, 13 bp, Artificial Sequence
  Oligonucleotide for detection of SNP TSC0050838
tatttattcataa

SEQ ID NO: 207889 - DNA, 13 bp, Artificial Sequence
  Oligonucleotide for detection of SNP TSC0050838
ttatgattaaata

SEQ ID NO: 207890 - DNA, 13 bp, Artificial Sequence
  Oligonucleotide for detection of SNP TSC0050838
tatttaatcataa

SEQ ID NO: 207891 - DNA, 13 bp, Artificial Sequence
  Oligonucleotide for detection of SNP TSC0050838
tgtttatttatag

SEQ ID NO: 207892 - DNA, 13 bp, Artificial Sequence
  Oligonucleotide for detection of SNP TSC0050838
ctataaataaaca

SEQ ID NO: 207893 - DNA, 13 bp, Artificial Sequence
  Oligonucleotide for detection of SNP TSC0050839
ttataaaaattgt

SEQ ID NO: 207894 - DNA, 13 bp, Artificial Sequence
  Oligonucleotide for detection of SNP TSC0050839
acaatttttataa

SEQ ID NO: 207895 - DNA, 13 bp, Artificial Sequence
  Oligonucleotide for detection of SNP TSC0050839
ttataagaattgt

SEQ ID NO: 207896 - DNA, 13 bp, Artificial Sequence
  Oligonucleotide for detection of SNP TSC0050839
acaattcttataa

SEQ ID NO: 207897 - DNA, 13 bp, Artificial Sequence
  Oligonucleotide for detection of SNP TSC0050840
aaaagaggtttaa

SEQ ID NO: 207898 - DNA, 13 bp, Artificial Sequence
  Oligonucleotide for detection of SNP TSC0050840
ttaaacctctttt

SEQ ID NO: 207899 - DNA, 13 bp, Artificial Sequence
  Oligonucleotide for detection of SNP TSC0050840
aaaagaagtttaa

SEQ ID NO: 207900 - DNA, 13 bp, Artificial Sequence
  Oligonucleotide for detection of SNP TSC0050840
ttaaacttctttt

SEQ ID NO: 207901 - DNA, 13 bp, Artificial Sequence
  Oligonucleotide for detection of SNP TSC0050841
tatttaggagaaa

SEQ ID NO: 207902 - DNA, 13 bp, Artificial Sequence
  Oligonucleotide for detection of SNP TSC0050841
tttctcctaaata

SEQ ID NO: 207903 - DNA, 13 bp, Artificial Sequence
  Oligonucleotide for detection of SNP TSC0050841
tatttaagagaaa

SEQ ID NO: 207904 - DNA, 13 bp, Artificial Sequence
  Oligonucleotide for detection of SNP TSC0050841
tttctcttaaata

SEQ ID NO: 207905 - DNA, 13 bp, Artificial Sequence
  Oligonucleotide for detection of SNP TSC0050842
ttttgtaatgtgy

SEQ ID NO: 207906 - DNA, 13 bp, Artificial Sequence
  Oligonucleotide for detection of SNP TSC0050842
rcacattacaaaa

SEQ ID NO: 207907 - DNA, 13 bp, Artificial Sequence
  Oligonucleotide for detection of SNP TSC0050842
ttttgtgatgtgy

SEQ ID NO: 207908 - DNA, 13 bp, Artificial Sequence
  Oligonucleotide for detection of SNP TSC0050842
rcacatcacaaaa

SEQ ID NO: 207909 - DNA, 13 bp, Artificial Sequence
  Oligonucleotide for detection of SNP TSC0007746
taatagtttttat

SEQ ID NO: 207910 - DNA, 13 bp, Artificial Sequence
  Oligonucleotide for detection of SNP TSC0007746
ataaaaactatta

SEQ ID NO: 207911 - DNA, 13 bp, Artificial Sequence
  Oligonucleotide for detection of SNP TSC0007746
taataggttttat

SEQ ID NO: 207912 - DNA, 13 bp, Artificial Sequence
  Oligonucleotide for detection of SNP TSC0007746
ataaaacctatta

SEQ ID NO: 207913 - DNA, 13 bp, Artificial Sequence
  Oligonucleotide for detection of SNP TSC0007746
atgagaattattg

SEQ ID NO: 207914 - DNA, 13 bp, Artificial Sequence
  Oligonucleotide for detection of SNP TSC0007746
caataattctcat

SEQ ID NO: 207915 - DNA, 13 bp, Artificial Sequence
  Oligonucleotide for detection of SNP TSC0007746
atgagatttattg

SEQ ID NO: 207916 - DNA, 13 bp, Artificial Sequence
  Oligonucleotide for detection of SNP TSC0007746
caataaatctcat

SEQ ID NO: 207917 - DNA, 13 bp, Artificial Sequence
  Oligonucleotide for detection of SNP TSC0007747
ttttttagttagg

SEQ ID NO: 207918 - DNA, 13 bp, Artificial Sequence
  Oligonucleotide for detection of SNP TSC0007747
cctaactaaaaaa

SEQ ID NO: 207919 - DNA, 13 bp, Artificial Sequence
  Oligonucleotide for detection of SNP TSC0007747
ttttttggttagg

SEQ ID NO: 207920 - DNA, 13 bp, Artificial Sequence
  Oligonucleotide for detection of SNP TSC0007747
cctaaccaaaaaa

SEQ ID NO: 207921 - DNA, 13 bp, Artificial Sequence
  Oligonucleotide for detection of SNP TSC0007747
tttttcggttagg

SEQ ID NO: 207922 - DNA, 13 bp, Artificial Sequence
  Oligonucleotide for detection of SNP TSC0007747
cctaaccgaaaaa

SEQ ID NO: 207923 - DNA, 13 bp, Artificial Sequence
  Oligonucleotide for detection of SNP TSC0007747
tttaattgggagg

SEQ ID NO: 207924 - DNA, 13 bp, Artificial Sequence
  Oligonucleotide for detection of SNP TSC0007747
cctcccaattaaa

SEQ ID NO: 207925 - DNA, 13 bp, Artificial Sequence
  Oligonucleotide for detection of SNP TSC0007747
tttaatcgggagg

SEQ ID NO: 207926 - DNA, 13 bp, Artificial Sequence
  Oligonucleotide for detection of SNP TSC0007747
cctcccgattaaa

SEQ ID NO: 207927 - DNA, 13 bp, Artificial Sequence
  Oligonucleotide for detection of SNP TSC0050844
aatgtttgagtgt

SEQ ID NO: 207928 - DNA, 13 bp, Artificial Sequence
  Oligonucleotide for detection of SNP TSC0050844
acactcaaacatt

SEQ ID NO: 207929 - DNA, 13 bp, Artificial Sequence
  Oligonucleotide for detection of SNP TSC0050844
aatgttcgagtgt

SEQ ID NO: 207930 - DNA, 13 bp, Artificial Sequence
  Oligonucleotide for detection of SNP TSC0050844
acactcgaacatt

SEQ ID NO: 207931 - DNA, 13 bp, Artificial Sequence
  Oligonucleotide for detection of SNP TSC0050844
atatttgaatatt

SEQ ID NO: 207932 - DNA, 13 bp, Artificial Sequence
  Oligonucleotide for detection of SNP TSC0050844
aatattcaaatat

SEQ ID NO: 207933 - DNA, 13 bp, Artificial Sequence
  Oligonucleotide for detection of SNP TSC0050844
atatttaaatatt

SEQ ID NO: 207934 - DNA, 13 bp, Artificial Sequence
  Oligonucleotide for detection of SNP TSC0050844
aatatttaaatat

SEQ ID NO: 207935 - DNA, 13 bp, Artificial Sequence
  Oligonucleotide for detection of SNP TSC0050844
atattcgaatatt

SEQ ID NO: 207936 - DNA, 13 bp, Artificial Sequence
  Oligonucleotide for detection of SNP TSC0050844
aatattcgaatat

SEQ ID NO: 207937 - DNA, 13 bp, Artificial Sequence
  Oligonucleotide for detection of SNP TSC0050845
tttggtattgaty

SEQ ID NO: 207938 - DNA, 13 bp, Artificial Sequence
  Oligonucleotide for detection of SNP TSC0050845
ratcaataccaaa

SEQ ID NO: 207939 - DNA, 13 bp, Artificial Sequence
  Oligonucleotide for detection of SNP TSC0050845
tttggttttgaty

SEQ ID NO: 207940 - DNA, 13 bp, Artificial Sequence
  Oligonucleotide for detection of SNP TSC0050845
ratcaaaaccaaa

SEQ ID NO: 207941 - DNA, 13 bp, Artificial Sequence
  Oligonucleotide for detection of SNP TSC0050845
ggttaatattaaa

SEQ ID NO: 207942 - DNA, 13 bp, Artificial Sequence
  Oligonucleotide for detection of SNP TSC0050845
tttaatattaacc

SEQ ID NO: 207943 - DNA, 13 bp, Artificial Sequence
  Oligonucleotide for detection of SNP TSC0050845
ggttaagattaaa

SEQ ID NO: 207944 - DNA, 13 bp, Artificial Sequence
  Oligonucleotide for detection of SNP TSC0050845
tttaatcttaacc

SEQ ID NO: 207945 - DNA, 13 bp, Artificial Sequence
  Oligonucleotide for detection of SNP TSC0050846
ttttggaaaattg

SEQ ID NO: 207946 - DNA, 13 bp, Artificial Sequence
  Oligonucleotide for detection of SNP TSC0050846
caattttccaaaa

SEQ ID NO: 207947 - DNA, 13 bp, Artificial Sequence
  Oligonucleotide for detection of SNP TSC0050846
ttttgggaaattg

SEQ ID NO: 207948 - DNA, 13 bp, Artificial Sequence
  Oligonucleotide for detection of SNP TSC0050846
caatttcccaaaa

SEQ ID NO: 207949 - DNA, 13 bp, Artificial Sequence
  Oligonucleotide for detection of SNP TSC0050846
tttcggaaaattg

SEQ ID NO: 207950 - DNA, 13 bp, Artificial Sequence
  Oligonucleotide for detection of SNP TSC0050846
caattttccgaaa

SEQ ID NO: 207951 - DNA, 13 bp, Artificial Sequence
  Oligonucleotide for detection of SNP TSC0050846
tttcgggaaattg

SEQ ID NO: 207952 - DNA, 13 bp, Artificial Sequence
  Oligonucleotide for detection of SNP TSC0050846
caatttcccgaaa

SEQ ID NO: 207953 - DNA, 13 bp, Artificial Sequence
  Oligonucleotide for detection of SNP TSC0050850
ttaaaagtttttt

SEQ ID NO: 207954 - DNA, 13 bp, Artificial Sequence
  Oligonucleotide for detection of SNP TSC0050850
aaaaaacttttaa

SEQ ID NO: 207955 - DNA, 13 bp, Artificial Sequence
  Oligonucleotide for detection of SNP TSC0050850
agaagagttttga

SEQ ID NO: 207956 - DNA, 13 bp, Artificial Sequence
  Oligonucleotide for detection of SNP TSC0050850
tcaaaactcttct

SEQ ID NO: 207957 - DNA, 13 bp, Artificial Sequence
  Oligonucleotide for detection of SNP TSC0050850
agaagatttttga

SEQ ID NO: 207958 - DNA, 13 bp, Artificial Sequence
  Oligonucleotide for detection of SNP TSC0050850
tcaaaaatcttct

SEQ ID NO: 207959 - DNA, 13 bp, Artificial Sequence
  Oligonucleotide for detection of SNP TSC0050851
taagagtgttgay

SEQ ID NO: 207960 - DNA, 13 bp, Artificial Sequence
  Oligonucleotide for detection of SNP TSC0050851
rtcaacactctta

SEQ ID NO: 207961 - DNA, 13 bp, Artificial Sequence
  Oligonucleotide for detection of SNP TSC0050851
taagagggttgay

SEQ ID NO: 207962 - DNA, 13 bp, Artificial Sequence
  Oligonucleotide for detection of SNP TSC0050851
rtcaaccctctta

SEQ ID NO: 207963 - DNA, 13 bp, Artificial Sequence
  Oligonucleotide for detection of SNP TSC0050851
gttagtatttttg

SEQ ID NO: 207964 - DNA, 13 bp, Artificial Sequence
  Oligonucleotide for detection of SNP TSC0050851
caaaaatactaac

SEQ ID NO: 207965 - DNA, 13 bp, Artificial Sequence
  Oligonucleotide for detection of SNP TSC0050851
gttagtttttttg

SEQ ID NO: 207966 - DNA, 13 bp, Artificial Sequence
  Oligonucleotide for detection of SNP TSC0050851
caaaaaaactaac

SEQ ID NO: 207967 - DNA, 13 bp, Artificial Sequence
  Oligonucleotide for detection of SNP TSC0050852
aggttagtttttt

SEQ ID NO: 207968 - DNA, 13 bp, Artificial Sequence
  Oligonucleotide for detection of SNP TSC0050852
aaaaaactaacct

SEQ ID NO: 207969 - DNA, 13 bp, Artificial Sequence
  Oligonucleotide for detection of SNP TSC0050852
aggttaatttttt

SEQ ID NO: 207970 - DNA, 13 bp, Artificial Sequence
  Oligonucleotide for detection of SNP TSC0050852
aaaaaattaacct

SEQ ID NO: 207971 - DNA, 13 bp, Artificial Sequence
  Oligonucleotide for detection of SNP TSC0050853
atttgataataat

SEQ ID NO: 207972 - DNA, 13 bp, Artificial Sequence
  Oligonucleotide for detection of SNP TSC0050853
attattatcaaat

SEQ ID NO: 207973 - DNA, 13 bp, Artificial Sequence
  Oligonucleotide for detection of SNP TSC0050853
atttgagaataat

SEQ ID NO: 207974 - DNA, 13 bp, Artificial Sequence
  Oligonucleotide for detection of SNP TSC0050853
attattctcaaat

SEQ ID NO: 207975 - DNA, 13 bp, Artificial Sequence
  Oligonucleotide for detection of SNP TSC0050853
attgttattaaat

SEQ ID NO: 207976 - DNA, 13 bp, Artificial Sequence
  Oligonucleotide for detection of SNP TSC0050853
atttaataacaat

SEQ ID NO: 207977 - DNA, 13 bp, Artificial Sequence
  Oligonucleotide for detection of SNP TSC0050853
attgtttttaaat

SEQ ID NO: 207978 - DNA, 13 bp, Artificial Sequence
  Oligonucleotide for detection of SNP TSC0050853
atttaaaaacaat

SEQ ID NO: 207979 - DNA, 13 bp, Artificial Sequence
  Oligonucleotide for detection of SNP TSC0005268
tttattatttgtg

SEQ ID NO: 207980 - DNA, 13 bp, Artificial Sequence
  Oligonucleotide for detection of SNP TSC0005268
cacaaataataaa

SEQ ID NO: 207981 - DNA, 13 bp, Artificial Sequence
  Oligonucleotide for detection of SNP TSC0005268
tttattgtttgtg

SEQ ID NO: 207982 - DNA, 13 bp, Artificial Sequence
  Oligonucleotide for detection of SNP TSC0005268
cacaaacaataaa

SEQ ID NO: 207983 - DNA, 13 bp, Artificial Sequence
  Oligonucleotide for detection of SNP TSC0005268
tttatcgtttgtg

SEQ ID NO: 207984 - DNA, 13 bp, Artificial Sequence
  Oligonucleotide for detection of SNP TSC0005268
cacaaacgataaa

SEQ ID NO: 207985 - DNA, 13 bp, Artificial Sequence
  Oligonucleotide for detection of SNP TSC0005268
tataagtgataag

SEQ ID NO: 207986 - DNA, 13 bp, Artificial Sequence
  Oligonucleotide for detection of SNP TSC0005268
cttatcacttata

SEQ ID NO: 207987 - DNA, 13 bp, Artificial Sequence
  Oligonucleotide for detection of SNP TSC0005268
tataagcgataag

SEQ ID NO: 207988 - DNA, 13 bp, Artificial Sequence
  Oligonucleotide for detection of SNP TSC0005268
cttatcgcttata

SEQ ID NO: 207989 - DNA, 13 bp, Artificial Sequence
  Oligonucleotide for detection of SNP TSC0005269
tagaaatgttggg

SEQ ID NO: 207990 - DNA, 13 bp, Artificial Sequence
  Oligonucleotide for detection of SNP TSC0005269
cccaacatttcta

SEQ ID NO: 207991 - DNA, 13 bp, Artificial Sequence
  Oligonucleotide for detection of SNP TSC0005269
tagaaaggttggg

SEQ ID NO: 207992 - DNA, 13 bp, Artificial Sequence
  Oligonucleotide for detection of SNP TSC0005269
cccaacctttcta

SEQ ID NO: 207993 - DNA, 13 bp, Artificial Sequence
  Oligonucleotide for detection of SNP TSC0050855
gttgtgtgattga

SEQ ID NO: 207994 - DNA, 13 bp, Artificial Sequence
  Oligonucleotide for detection of SNP TSC0050855
tcaatcacacaac

SEQ ID NO: 207995 - DNA, 13 bp, Artificial Sequence
  Oligonucleotide for detection of SNP TSC0050855
gttgtgcgattga

SEQ ID NO: 207996 - DNA, 13 bp, Artificial Sequence
  Oligonucleotide for detection of SNP TSC0050855
tcaatcgcacaac

SEQ ID NO: 207997 - DNA, 13 bp, Artificial Sequence
  Oligonucleotide for detection of SNP TSC0050855
ttaattgtataay

SEQ ID NO: 207998 - DNA, 13 bp, Artificial Sequence
  Oligonucleotide for detection of SNP TSC0050855
rttatacaattaa

SEQ ID NO: 207999 - DNA, 13 bp, Artificial Sequence
  Oligonucleotide for detection of SNP TSC0050855
ttaattatataay

SEQ ID NO: 208000 - DNA, 13 bp, Artificial Sequence
  Oligonucleotide for detection of SNP TSC0050855
rttatataattaa

SEQ ID NO: 208001 - DNA, 13 bp, Artificial Sequence
  Oligonucleotide for detection of SNP TSC0050855
ttaatcgtataay

SEQ ID NO: 208002 - DNA, 13 bp, Artificial Sequence
  Oligonucleotide for detection of SNP TSC0050855
rttatacgattaa

SEQ ID NO: 208003 - DNA, 13 bp, Artificial Sequence
  Oligonucleotide for detection of SNP TSC0050857
tggtaaagatgag

SEQ ID NO: 208004 - DNA, 13 bp, Artificial Sequence
  Oligonucleotide for detection of SNP TSC0050857
ctcatctttacca

SEQ ID NO: 208005 - DNA, 13 bp, Artificial Sequence
  Oligonucleotide for detection of SNP TSC0050857
tggtaaggatgag

SEQ ID NO: 208006 - DNA, 13 bp, Artificial Sequence
  Oligonucleotide for detection of SNP TSC0050857
ctcatccttacca

SEQ ID NO: 208007 - DNA, 13 bp, Artificial Sequence
  Oligonucleotide for detection of SNP TSC0050859
tttatttgtggta

SEQ ID NO: 208008 - DNA, 13 bp, Artificial Sequence
  Oligonucleotide for detection of SNP TSC0050859
taccacaaataaa

SEQ ID NO: 208009 - DNA, 13 bp, Artificial Sequence
  Oligonucleotide for detection of SNP TSC0050859
tttattcgtggta

SEQ ID NO: 208010 - DNA, 13 bp, Artificial Sequence
  Oligonucleotide for detection of SNP TSC0050859
taccacgaataaa

SEQ ID NO: 208011 - DNA, 13 bp, Artificial Sequence
  Oligonucleotide for detection of SNP TSC0050859
tgttatgggtaag

SEQ ID NO: 208012 - DNA, 13 bp, Artificial Sequence
  Oligonucleotide for detection of SNP TSC0050859
cttacccataaca

SEQ ID NO: 208013 - DNA, 13 bp, Artificial Sequence
  Oligonucleotide for detection of SNP TSC0050859
tgttataggtaag

SEQ ID NO: 208014 - DNA, 13 bp, Artificial Sequence
  Oligonucleotide for detection of SNP TSC0050859
cttacctataaca

SEQ ID NO: 208015 - DNA, 13 bp, Artificial Sequence
  Oligonucleotide for detection of SNP TSC0050859
tgttacgggtaag

SEQ ID NO: 208016 - DNA, 13 bp, Artificial Sequence
  Oligonucleotide for detection of SNP TSC0050859
cttacccgtaaca

SEQ ID NO: 208017 - DNA, 13 bp, Artificial Sequence
  Oligonucleotide for detection of SNP TSC0050862
gtaataaaattta

SEQ ID NO: 208018 - DNA, 13 bp, Artificial Sequence
  Oligonucleotide for detection of SNP TSC0050862
taaattttattac

SEQ ID NO: 208019 - DNA, 13 bp, Artificial Sequence
  Oligonucleotide for detection of SNP TSC0050862
gtaatagaattta

SEQ ID NO: 208020 - DNA, 13 bp, Artificial Sequence
  Oligonucleotide for detection of SNP TSC0050862
taaattctattac

SEQ ID NO: 208021 - DNA, 13 bp, Artificial Sequence
  Oligonucleotide for detection of SNP TSC0050863
gagtagtatatta

SEQ ID NO: 208022 - DNA, 13 bp, Artificial Sequence
  Oligonucleotide for detection of SNP TSC0050863
taatatactactc

SEQ ID NO: 208023 - DNA, 13 bp, Artificial Sequence
  Oligonucleotide for detection of SNP TSC0050863
gagtaggatatta

SEQ ID NO: 208024 - DNA, 13 bp, Artificial Sequence
  Oligonucleotide for detection of SNP TSC0050863
taatatcctactc

SEQ ID NO: 208025 - DNA, 13 bp, Artificial Sequence
  Oligonucleotide for detection of SNP TSC0050863
taatatgttatty

SEQ ID NO: 208026 - DNA, 13 bp, Artificial Sequence
  Oligonucleotide for detection of SNP TSC0050863
raataacatatta

SEQ ID NO: 208027 - DNA, 13 bp, Artificial Sequence
  Oligonucleotide for detection of SNP TSC0050863
taatattttatty

SEQ ID NO: 208028 - DNA, 13 bp, Artificial Sequence
  Oligonucleotide for detection of SNP TSC0050863
raataaaatatta

SEQ ID NO: 208029 - DNA, 13 bp, Artificial Sequence
  Oligonucleotide for detection of SNP TSC0050867
agtaggagttaaa

SEQ ID NO: 208030 - DNA, 13 bp, Artificial Sequence
  Oligonucleotide for detection of SNP TSC0050867
tttaactcctact

SEQ ID NO: 208031 - DNA, 13 bp, Artificial Sequence
  Oligonucleotide for detection of SNP TSC0050867
agtaggggttaaa

SEQ ID NO: 208032 - DNA, 13 bp, Artificial Sequence
  Oligonucleotide for detection of SNP TSC0050867
tttaacccctact

SEQ ID NO: 208033 - DNA, 13 bp, Artificial Sequence
  Oligonucleotide for detection of SNP TSC0004855
taatttgttttaa

SEQ ID NO: 208034 - DNA, 13 bp, Artificial Sequence
  Oligonucleotide for detection of SNP TSC0004855
ttaaaacaaatta

SEQ ID NO: 208035 - DNA, 13 bp, Artificial Sequence
  Oligonucleotide for detection of SNP TSC0004855
taattcgttttaa

SEQ ID NO: 208036 - DNA, 13 bp, Artificial Sequence
  Oligonucleotide for detection of SNP TSC0004855
ttaaaacgaatta

SEQ ID NO: 208037 - DNA, 13 bp, Artificial Sequence
  Oligonucleotide for detection of SNP TSC0004855
ttaaaatgagttg

SEQ ID NO: 208038 - DNA, 13 bp, Artificial Sequence
  Oligonucleotide for detection of SNP TSC0004855
caactcattttaa

SEQ ID NO: 208039 - DNA, 13 bp, Artificial Sequence
  Oligonucleotide for detection of SNP TSC0004855
ttaaaacgagttg

SEQ ID NO: 208040 - DNA, 13 bp, Artificial Sequence
  Oligonucleotide for detection of SNP TSC0004855
caactcgttttaa

SEQ ID NO: 208041 - DNA, 13 bp, Artificial Sequence
  Oligonucleotide for detection of SNP TSC0004806
tgttgttgaaggy

SEQ ID NO: 208042 - DNA, 13 bp, Artificial Sequence
  Oligonucleotide for detection of SNP TSC0004806
rccttcaacaaca

SEQ ID NO: 208043 - DNA, 13 bp, Artificial Sequence
  Oligonucleotide for detection of SNP TSC0004806
tgttgtcgaaggy

SEQ ID NO: 208044 - DNA, 13 bp, Artificial Sequence
  Oligonucleotide for detection of SNP TSC0004806
rccttcgacaaca

SEQ ID NO: 208045 - DNA, 13 bp, Artificial Sequence
  Oligonucleotide for detection of SNP TSC0004806
gtttttgataata

SEQ ID NO: 208046 - DNA, 13 bp, Artificial Sequence
  Oligonucleotide for detection of SNP TSC0004806
tattatcaaaaac

SEQ ID NO: 208047 - DNA, 13 bp, Artificial Sequence
  Oligonucleotide for detection of SNP TSC0004806
gtttttaataata

SEQ ID NO: 208048 - DNA, 13 bp, Artificial Sequence
  Oligonucleotide for detection of SNP TSC0004806
tattattaaaaac

SEQ ID NO: 208049 - DNA, 13 bp, Artificial Sequence
  Oligonucleotide for detection of SNP TSC0004806
gttttcgataata

SEQ ID NO: 208050 - DNA, 13 bp, Artificial Sequence
  Oligonucleotide for detection of SNP TSC0004806
tattatcgaaaac

SEQ ID NO: 208051 - DNA, 13 bp, Artificial Sequence
  Oligonucleotide for detection of SNP TSC0050871
gggagaataagay

SEQ ID NO: 208052 - DNA, 13 bp, Artificial Sequence
  Oligonucleotide for detection of SNP TSC0050871
rtcttattctccc

SEQ ID NO: 208053 - DNA, 13 bp, Artificial Sequence
  Oligonucleotide for detection of SNP TSC0050871
gggagattaagay

SEQ ID NO: 208054 - DNA, 13 bp, Artificial Sequence
  Oligonucleotide for detection of SNP TSC0050871
rtcttaatctccc

SEQ ID NO: 208055 - DNA, 13 bp, Artificial Sequence
  Oligonucleotide for detection of SNP TSC0005816
tttttaagggagy

SEQ ID NO: 208056 - DNA, 13 bp, Artificial Sequence
  Oligonucleotide for detection of SNP TSC0005816
rctcccttaaaaa

SEQ ID NO: 208057 - DNA, 13 bp, Artificial Sequence
  Oligonucleotide for detection of SNP TSC0005816
tttttaggggagy

SEQ ID NO: 208058 - DNA, 13 bp, Artificial Sequence
  Oligonucleotide for detection of SNP TSC0005816
rctcccctaaaaa

SEQ ID NO: 208059 - DNA, 13 bp, Artificial Sequence
  Oligonucleotide for detection of SNP TSC0005113
agataatatatgt

SEQ ID NO: 208060 - DNA, 13 bp, Artificial Sequence
  Oligonucleotide for detection of SNP TSC0005113
acatatattatct

SEQ ID NO: 208061 - DNA, 13 bp, Artificial Sequence
  Oligonucleotide for detection of SNP TSC0005113
agataagatatgt

SEQ ID NO: 208062 - DNA, 13 bp, Artificial Sequence
  Oligonucleotide for detection of SNP TSC0005113
acatatcttatct

SEQ ID NO: 208063 - DNA, 13 bp, Artificial Sequence
  Oligonucleotide for detection of SNP TSC0005113
atatgttttgttt

SEQ ID NO: 208064 - DNA, 13 bp, Artificial Sequence
  Oligonucleotide for detection of SNP TSC0005113
aaacaaaacatat

SEQ ID NO: 208065 - DNA, 13 bp, Artificial Sequence
  Oligonucleotide for detection of SNP TSC0050872
ttaaaaaaaagaa

SEQ ID NO: 208066 - DNA, 13 bp, Artificial Sequence
  Oligonucleotide for detection of SNP TSC0050872
ttcttttttttaa

SEQ ID NO: 208067 - DNA, 13 bp, Artificial Sequence
  Oligonucleotide for detection of SNP TSC0050872
ttaaaagaaagaa

SEQ ID NO: 208068 - DNA, 13 bp, Artificial Sequence
  Oligonucleotide for detection of SNP TSC0050872
ttctttcttttaa

SEQ ID NO: 208069 - DNA, 13 bp, Artificial Sequence
  Oligonucleotide for detection of SNP TSC0050873
agaatttggtaty

SEQ ID NO: 208070 - DNA, 13 bp, Artificial Sequence
  Oligonucleotide for detection of SNP TSC0050873
rataccaaattct

SEQ ID NO: 208071 - DNA, 13 bp, Artificial Sequence
  Oligonucleotide for detection of SNP TSC0050873
agaattcggtaty

SEQ ID NO: 208072 - DNA, 13 bp, Artificial Sequence
  Oligonucleotide for detection of SNP TSC0050873
rataccgaattct

SEQ ID NO: 208073 - DNA, 13 bp, Artificial Sequence
  Oligonucleotide for detection of SNP TSC0050873
gatgttgagtttt

SEQ ID NO: 208074 - DNA, 13 bp, Artificial Sequence
  Oligonucleotide for detection of SNP TSC0050873
aaaactcaacatc

SEQ ID NO: 208075 - DNA, 13 bp, Artificial Sequence
  Oligonucleotide for detection of SNP TSC0050873
gatgttaagtttt

SEQ ID NO: 208076 - DNA, 13 bp, Artificial Sequence
  Oligonucleotide for detection of SNP TSC0050873
aaaacttaacatc

SEQ ID NO: 208077 - DNA, 13 bp, Artificial Sequence
  Oligonucleotide for detection of SNP TSC0050873
gatgtcgagtttt

SEQ ID NO: 208078 - DNA, 13 bp, Artificial Sequence
  Oligonucleotide for detection of SNP TSC0050873
aaaactcgacatc

SEQ ID NO: 208079 - DNA, 13 bp, Artificial Sequence
  Oligonucleotide for detection of SNP TSC0050874
tttaaaaagtaat

SEQ ID NO: 208080 - DNA, 13 bp, Artificial Sequence
  Oligonucleotide for detection of SNP TSC0050874
attactttttaaa

SEQ ID NO: 208081 - DNA, 13 bp, Artificial Sequence
  Oligonucleotide for detection of SNP TSC0050874
tttaaagagtaat

SEQ ID NO: 208082 - DNA, 13 bp, Artificial Sequence
  Oligonucleotide for detection of SNP TSC0050874
attactctttaaa

SEQ ID NO: 208083 - DNA, 13 bp, Artificial Sequence
  Oligonucleotide for detection of SNP TSC0050875
attgaaaaaaaaa

SEQ ID NO: 208084 - DNA, 13 bp, Artificial Sequence
  Oligonucleotide for detection of SNP TSC0050875
tttttttttcaat

SEQ ID NO: 208085 - DNA, 13 bp, Artificial Sequence
  Oligonucleotide for detection of SNP TSC0050875
attgaagaaaaaa

SEQ ID NO: 208086 - DNA, 13 bp, Artificial Sequence
  Oligonucleotide for detection of SNP TSC0050875
ttttttcttcaat

SEQ ID NO: 208087 - DNA, 13 bp, Artificial Sequence
  Oligonucleotide for detection of SNP TSC0050876
ggttttattaatt

SEQ ID NO: 208088 - DNA, 13 bp, Artificial Sequence
  Oligonucleotide for detection of SNP TSC0050876
aattaataaaacc

SEQ ID NO: 208089 - DNA, 13 bp, Artificial Sequence
  Oligonucleotide for detection of SNP TSC0050877
tgtttgtaaatat

SEQ ID NO: 208090 - DNA, 13 bp, Artificial Sequence
  Oligonucleotide for detection of SNP TSC0050877
atatttacaaaca

SEQ ID NO: 208091 - DNA, 13 bp, Artificial Sequence
  Oligonucleotide for detection of SNP TSC0050877
tgtttggaaatat

SEQ ID NO: 208092 - DNA, 13 bp, Artificial Sequence
  Oligonucleotide for detection of SNP TSC0050877
atatttccaaaca

SEQ ID NO: 208093 - DNA, 13 bp, Artificial Sequence
  Oligonucleotide for detection of SNP TSC0050877
atatttgtagata

SEQ ID NO: 208094 - DNA, 13 bp, Artificial Sequence
  Oligonucleotide for detection of SNP TSC0050877
tatctacaaatat

SEQ ID NO: 208095 - DNA, 13 bp, Artificial Sequence
  Oligonucleotide for detection of SNP TSC0050877
atatttttagata

SEQ ID NO: 208096 - DNA, 13 bp, Artificial Sequence
  Oligonucleotide for detection of SNP TSC0050877
tatctaaaaatat

SEQ ID NO: 208097 - DNA, 13 bp, Artificial Sequence
  Oligonucleotide for detection of SNP TSC0050880
ttataaagttttt

SEQ ID NO: 208098 - DNA, 13 bp, Artificial Sequence
  Oligonucleotide for detection of SNP TSC0050880
aaaaactttataa

SEQ ID NO: 208099 - DNA, 13 bp, Artificial Sequence
  Oligonucleotide for detection of SNP TSC0050880
ttataaggttttt

SEQ ID NO: 208100 - DNA, 13 bp, Artificial Sequence
  Oligonucleotide for detection of SNP TSC0050880
aaaaaccttataa

SEQ ID NO: 208101 - DNA, 13 bp, Artificial Sequence
  Oligonucleotide for detection of SNP TSC0000424
aaatggtgaggaa

SEQ ID NO: 208102 - DNA, 13 bp, Artificial Sequence
  Oligonucleotide for detection of SNP TSC0000424
ttcctcaccattt

SEQ ID NO: 208103 - DNA, 13 bp, Artificial Sequence
  Oligonucleotide for detection of SNP TSC0000424
aaatggcgaggaa

SEQ ID NO: 208104 - DNA, 13 bp, Artificial Sequence
  Oligonucleotide for detection of SNP TSC0000424
ttcctcgccattt

SEQ ID NO: 208105 - DNA, 13 bp, Artificial Sequence
  Oligonucleotide for detection of SNP TSC0000425
taagatataagtg

SEQ ID NO: 208106 - DNA, 13 bp, Artificial Sequence
  Oligonucleotide for detection of SNP TSC0000425
cacttatatctta

SEQ ID NO: 208107 - DNA, 13 bp, Artificial Sequence
  Oligonucleotide for detection of SNP TSC0000425
taagatgtaagtg

SEQ ID NO: 208108 - DNA, 13 bp, Artificial Sequence
  Oligonucleotide for detection of SNP TSC0000425
cacttacatctta

SEQ ID NO: 208109 - DNA, 13 bp, Artificial Sequence
  Oligonucleotide for detection of SNP TSC0000426
aaaatatgtaatg

SEQ ID NO: 208110 - DNA, 13 bp, Artificial Sequence
  Oligonucleotide for detection of SNP TSC0000426
cattacatatttt

SEQ ID NO: 208111 - DNA, 13 bp, Artificial Sequence
  Oligonucleotide for detection of SNP TSC0000426
aaaatacgtaatg

SEQ ID NO: 208112 - DNA, 13 bp, Artificial Sequence
  Oligonucleotide for detection of SNP TSC0000426
cattacgtatttt

SEQ ID NO: 208113 - DNA, 13 bp, Artificial Sequence
  Oligonucleotide for detection of SNP TSC0000426
tattgtgtatttt

SEQ ID NO: 208114 - DNA, 13 bp, Artificial Sequence
  Oligonucleotide for detection of SNP TSC0000426
aaaatacacaata

SEQ ID NO: 208115 - DNA, 13 bp, Artificial Sequence
  Oligonucleotide for detection of SNP TSC0000426
tattgtatatttt

SEQ ID NO: 208116 - DNA, 13 bp, Artificial Sequence
  Oligonucleotide for detection of SNP TSC0000426
aaaatatacaata

SEQ ID NO: 208117 - DNA, 13 bp, Artificial Sequence
  Oligonucleotide for detection of SNP TSC0000426
tattgcgtatttt

SEQ ID NO: 208118 - DNA, 13 bp, Artificial Sequence
  Oligonucleotide for detection of SNP TSC0000426
aaaatacgcaata

SEQ ID NO: 208119 - DNA, 13 bp, Artificial Sequence
  Oligonucleotide for detection of SNP TSC0050882
ataaaaagtagaa

SEQ ID NO: 208120 - DNA, 13 bp, Artificial Sequence
  Oligonucleotide for detection of SNP TSC0050882
ttctactttttat

SEQ ID NO: 208121 - DNA, 13 bp, Artificial Sequence
  Oligonucleotide for detection of SNP TSC0050882
ataaaaggtagaa

SEQ ID NO: 208122 - DNA, 13 bp, Artificial Sequence
  Oligonucleotide for detection of SNP TSC0050882
ttctaccttttat

SEQ ID NO: 208123 - DNA, 13 bp, Artificial Sequence
  Oligonucleotide for detection of SNP TSC0050883
tttttaagataga

SEQ ID NO: 208124 - DNA, 13 bp, Artificial Sequence
  Oligonucleotide for detection of SNP TSC0050883
tctatcttaaaaa

SEQ ID NO: 208125 - DNA, 13 bp, Artificial Sequence
  Oligonucleotide for detection of SNP TSC0050884
ttattgaagttty

SEQ ID NO: 208126 - DNA, 13 bp, Artificial Sequence
  Oligonucleotide for detection of SNP TSC0050884
raaacttcaataa

SEQ ID NO: 208127 - DNA, 13 bp, Artificial Sequence
  Oligonucleotide for detection of SNP TSC0050884
ttattgtagttty

SEQ ID NO: 208128 - DNA, 13 bp, Artificial Sequence
  Oligonucleotide for detection of SNP TSC0050884
raaactacaataa

SEQ ID NO: 208129 - DNA, 13 bp, Artificial Sequence
  Oligonucleotide for detection of SNP TSC0050885
ttattgcgatgtt

SEQ ID NO: 208130 - DNA, 13 bp, Artificial Sequence
  Oligonucleotide for detection of SNP TSC0050885
aacatcgcaataa

SEQ ID NO: 208131 - DNA, 13 bp, Artificial Sequence
  Oligonucleotide for detection of SNP TSC0050885
ttattgtgacgtt

SEQ ID NO: 208132 - DNA, 13 bp, Artificial Sequence
  Oligonucleotide for detection of SNP TSC0050885
aacgtcacaataa

SEQ ID NO: 208133 - DNA, 13 bp, Artificial Sequence
  Oligonucleotide for detection of SNP TSC0050885
ttattgcgacgtt

SEQ ID NO: 208134 - DNA, 13 bp, Artificial Sequence
  Oligonucleotide for detection of SNP TSC0050885
aacgtcgcaataa

SEQ ID NO: 208135 - DNA, 13 bp, Artificial Sequence
  Oligonucleotide for detection of SNP TSC0050885
agtgttgtagtga

SEQ ID NO: 208136 - DNA, 13 bp, Artificial Sequence
  Oligonucleotide for detection of SNP TSC0050885
tcactacaacact

SEQ ID NO: 208137 - DNA, 13 bp, Artificial Sequence
  Oligonucleotide for detection of SNP TSC0050885
agtgttatagtga

SEQ ID NO: 208138 - DNA, 13 bp, Artificial Sequence
  Oligonucleotide for detection of SNP TSC0050885
tcactataacact

SEQ ID NO: 208139 - DNA, 13 bp, Artificial Sequence
  Oligonucleotide for detection of SNP TSC0050885
agcgttgtagtga

SEQ ID NO: 208140 - DNA, 13 bp, Artificial Sequence
  Oligonucleotide for detection of SNP TSC0050885
tcactacaacgct

SEQ ID NO: 208141 - DNA, 13 bp, Artificial Sequence
  Oligonucleotide for detection of SNP TSC0050885
agcgttatagtga

SEQ ID NO: 208142 - DNA, 13 bp, Artificial Sequence
  Oligonucleotide for detection of SNP TSC0050885
tcactataacgct

SEQ ID NO: 208143 - DNA, 13 bp, Artificial Sequence
  Oligonucleotide for detection of SNP TSC0050885
agtgtcgtagtga

SEQ ID NO: 208144 - DNA, 13 bp, Artificial Sequence
  Oligonucleotide for detection of SNP TSC0050885
tcactacgacact

SEQ ID NO: 208145 - DNA, 13 bp, Artificial Sequence
  Oligonucleotide for detection of SNP TSC0050885
agcgtcgtagtga

SEQ ID NO: 208146 - DNA, 13 bp, Artificial Sequence
  Oligonucleotide for detection of SNP TSC0050885
tcactacgacgct

SEQ ID NO: 208147 - DNA, 13 bp, Artificial Sequence
  Oligonucleotide for detection of SNP TSC0050892
ttttaaagtgtty

SEQ ID NO: 208148 - DNA, 13 bp, Artificial Sequence
  Oligonucleotide for detection of SNP TSC0050892
raacactttaaaa

SEQ ID NO: 208149 - DNA, 13 bp, Artificial Sequence
  Oligonucleotide for detection of SNP TSC0050892
ttttaatgtgtty

SEQ ID NO: 208150 - DNA, 13 bp, Artificial Sequence
  Oligonucleotide for detection of SNP TSC0050892
raacacattaaaa

SEQ ID NO: 208151 - DNA, 13 bp, Artificial Sequence
  Oligonucleotide for detection of SNP TSC0050892
ttttaacgtgtty

SEQ ID NO: 208152 - DNA, 13 bp, Artificial Sequence
  Oligonucleotide for detection of SNP TSC0050892
raacacgttaaaa

SEQ ID NO: 208153 - DNA, 13 bp, Artificial Sequence
  Oligonucleotide for detection of SNP TSC0050892
gggtattttggga

SEQ ID NO: 208154 - DNA, 13 bp, Artificial Sequence
  Oligonucleotide for detection of SNP TSC0050892
tcccaaaataccc

SEQ ID NO: 208155 - DNA, 13 bp, Artificial Sequence
  Oligonucleotide for detection of SNP TSC0050892
gggtatgttggga

SEQ ID NO: 208156 - DNA, 13 bp, Artificial Sequence
  Oligonucleotide for detection of SNP TSC0050892
tcccaacataccc

SEQ ID NO: 208157 - DNA, 13 bp, Artificial Sequence
  Oligonucleotide for detection of SNP TSC0050892
gggtacgttggga

SEQ ID NO: 208158 - DNA, 13 bp, Artificial Sequence
  Oligonucleotide for detection of SNP TSC0050892
tcccaacgtaccc

SEQ ID NO: 208159 - DNA, 13 bp, Artificial Sequence
  Oligonucleotide for detection of SNP TSC0050893
atagatgtagaat

SEQ ID NO: 208160 - DNA, 13 bp, Artificial Sequence
  Oligonucleotide for detection of SNP TSC0050893
attctacatctat

SEQ ID NO: 208161 - DNA, 13 bp, Artificial Sequence
  Oligonucleotide for detection of SNP TSC0050893
atagatatagaat

SEQ ID NO: 208162 - DNA, 13 bp, Artificial Sequence
  Oligonucleotide for detection of SNP TSC0050893
attctatatctat

SEQ ID NO: 208163 - DNA, 13 bp, Artificial Sequence
  Oligonucleotide for detection of SNP TSC0050894
attatattagagy

SEQ ID NO: 208164 - DNA, 13 bp, Artificial Sequence
  Oligonucleotide for detection of SNP TSC0050894
rctctaatataat

SEQ ID NO: 208165 - DNA, 13 bp, Artificial Sequence
  Oligonucleotide for detection of SNP TSC0050894
attatagtagagy

SEQ ID NO: 208166 - DNA, 13 bp, Artificial Sequence
  Oligonucleotide for detection of SNP TSC0050894
rctctactataat

SEQ ID NO: 208167 - DNA, 13 bp, Artificial Sequence
  Oligonucleotide for detection of SNP TSC0050894
gttttggtatgat

SEQ ID NO: 208168 - DNA, 13 bp, Artificial Sequence
  Oligonucleotide for detection of SNP TSC0050894
atcataccaaaac

SEQ ID NO: 208169 - DNA, 13 bp, Artificial Sequence
  Oligonucleotide for detection of SNP TSC0050894
gttttgttatgat

SEQ ID NO: 208170 - DNA, 13 bp, Artificial Sequence
  Oligonucleotide for detection of SNP TSC0050894
atcataacaaaac

SEQ ID NO: 208171 - DNA, 13 bp, Artificial Sequence
  Oligonucleotide for detection of SNP TSC0050895
atttgtttatata

SEQ ID NO: 208172 - DNA, 13 bp, Artificial Sequence
  Oligonucleotide for detection of SNP TSC0050895
tatataaacaaat

SEQ ID NO: 208173 - DNA, 13 bp, Artificial Sequence
  Oligonucleotide for detection of SNP TSC0050895
tgtgtagataagt

SEQ ID NO: 208174 - DNA, 13 bp, Artificial Sequence
  Oligonucleotide for detection of SNP TSC0050895
acttatctacaca

SEQ ID NO: 208175 - DNA, 13 bp, Artificial Sequence
  Oligonucleotide for detection of SNP TSC0050895
tgtgtatataagt

SEQ ID NO: 208176 - DNA, 13 bp, Artificial Sequence
  Oligonucleotide for detection of SNP TSC0050895
acttatatacaca

SEQ ID NO: 208177 - DNA, 13 bp, Artificial Sequence
  Oligonucleotide for detection of SNP TSC0050897
gaatgtttgtaga

SEQ ID NO: 208178 - DNA, 13 bp, Artificial Sequence
  Oligonucleotide for detection of SNP TSC0050897
tctacaaacattc

SEQ ID NO: 208179 - DNA, 13 bp, Artificial Sequence
  Oligonucleotide for detection of SNP TSC0050897
gaatgtgtgtaga

SEQ ID NO: 208180 - DNA, 13 bp, Artificial Sequence
  Oligonucleotide for detection of SNP TSC0050897
tctacacacattc

SEQ ID NO: 208181 - DNA, 13 bp, Artificial Sequence
  Oligonucleotide for detection of SNP TSC0050897
gaacgtttgtaga

SEQ ID NO: 208182 - DNA, 13 bp, Artificial Sequence
  Oligonucleotide for detection of SNP TSC0050897
tctacaaacgttc

SEQ ID NO: 208183 - DNA, 13 bp, Artificial Sequence
  Oligonucleotide for detection of SNP TSC0050897
gaacgtgtgtaga

SEQ ID NO: 208184 - DNA, 13 bp, Artificial Sequence
  Oligonucleotide for detection of SNP TSC0050897
tctacacacgttc

SEQ ID NO: 208185 - DNA, 13 bp, Artificial Sequence
  Oligonucleotide for detection of SNP TSC0050897
tttgtagatgtty

SEQ ID NO: 208186 - DNA, 13 bp, Artificial Sequence
  Oligonucleotide for detection of SNP TSC0050897
raacatctacaaa

SEQ ID NO: 208187 - DNA, 13 bp, Artificial Sequence
  Oligonucleotide for detection of SNP TSC0050897
tttgtatatgtty

SEQ ID NO: 208188 - DNA, 13 bp, Artificial Sequence
  Oligonucleotide for detection of SNP TSC0050897
raacatatacaaa

SEQ ID NO: 208189 - DNA, 13 bp, Artificial Sequence
  Oligonucleotide for detection of SNP TSC0050897
tttgtagacgtty

SEQ ID NO: 208190 - DNA, 13 bp, Artificial Sequence
  Oligonucleotide for detection of SNP TSC0050897
raacgtctacaaa

SEQ ID NO: 208191 - DNA, 13 bp, Artificial Sequence
  Oligonucleotide for detection of SNP TSC0050897
tttgtatacgtty

SEQ ID NO: 208192 - DNA, 13 bp, Artificial Sequence
  Oligonucleotide for detection of SNP TSC0050897
raacgtatacaaa

SEQ ID NO: 208193 - DNA, 13 bp, Artificial Sequence
  Oligonucleotide for detection of SNP TSC0050898
ttttttattgtay

SEQ ID NO: 208194 - DNA, 13 bp, Artificial Sequence
  Oligonucleotide for detection of SNP TSC0050898
rtacaataaaaaa

SEQ ID NO: 208195 - DNA, 13 bp, Artificial Sequence
  Oligonucleotide for detection of SNP TSC0050898
tttttttttgtay

SEQ ID NO: 208196 - DNA, 13 bp, Artificial Sequence
  Oligonucleotide for detection of SNP TSC0050898
rtacaaaaaaaaa

SEQ ID NO: 208197 - DNA, 13 bp, Artificial Sequence
  Oligonucleotide for detection of SNP TSC0050898
ttttttatcgtay

SEQ ID NO: 208198 - DNA, 13 bp, Artificial Sequence
  Oligonucleotide for detection of SNP TSC0050898
rtacgataaaaaa

SEQ ID NO: 208199 - DNA, 13 bp, Artificial Sequence
  Oligonucleotide for detection of SNP TSC0050898
ttttttttcgtay

SEQ ID NO: 208200 - DNA, 13 bp, Artificial Sequence
  Oligonucleotide for detection of SNP TSC0050898
rtacgaaaaaaaa

SEQ ID NO: 208201 - DNA, 13 bp, Artificial Sequence
  Oligonucleotide for detection of SNP TSC0050898
gtgtggtgggggg

SEQ ID NO: 208202 - DNA, 13 bp, Artificial Sequence
  Oligonucleotide for detection of SNP TSC0050898
ccccccaccacac

SEQ ID NO: 208203 - DNA, 13 bp, Artificial Sequence
  Oligonucleotide for detection of SNP TSC0050898
gtgtggggggggg

SEQ ID NO: 208204 - DNA, 13 bp, Artificial Sequence
  Oligonucleotide for detection of SNP TSC0050898
cccccccccacac

SEQ ID NO: 208205 - DNA, 13 bp, Artificial Sequence
  Oligonucleotide for detection of SNP TSC0050898
gtgcggtgggggg

SEQ ID NO: 208206 - DNA, 13 bp, Artificial Sequence
  Oligonucleotide for detection of SNP TSC0050898
ccccccaccgcac

SEQ ID NO: 208207 - DNA, 13 bp, Artificial Sequence
  Oligonucleotide for detection of SNP TSC0050898
gtgcggggggggg

SEQ ID NO: 208208 - DNA, 13 bp, Artificial Sequence
  Oligonucleotide for detection of SNP TSC0050898
cccccccccgcac

SEQ ID NO: 208209 - DNA, 13 bp, Artificial Sequence
  Oligonucleotide for detection of SNP TSC0050902
ataaaaagttaaa

SEQ ID NO: 208210 - DNA, 13 bp, Artificial Sequence
  Oligonucleotide for detection of SNP TSC0050902
tttaactttttat

SEQ ID NO: 208211 - DNA, 13 bp, Artificial Sequence
  Oligonucleotide for detection of SNP TSC0050903
tataggtatgagy

SEQ ID NO: 208212 - DNA, 13 bp, Artificial Sequence
  Oligonucleotide for detection of SNP TSC0050903
rctcatacctata

SEQ ID NO: 208213 - DNA, 13 bp, Artificial Sequence
  Oligonucleotide for detection of SNP TSC0050903
tatagggatgagy

SEQ ID NO: 208214 - DNA, 13 bp, Artificial Sequence
  Oligonucleotide for detection of SNP TSC0050903
rctcatccctata

SEQ ID NO: 208215 - DNA, 13 bp, Artificial Sequence
  Oligonucleotide for detection of SNP TSC0050903
tataggaatgagy

SEQ ID NO: 208216 - DNA, 13 bp, Artificial Sequence
  Oligonucleotide for detection of SNP TSC0050903
rctcattcctata

SEQ ID NO: 208217 - DNA, 13 bp, Artificial Sequence
  Oligonucleotide for detection of SNP TSC0050904
ggtttatatttgt

SEQ ID NO: 208218 - DNA, 13 bp, Artificial Sequence
  Oligonucleotide for detection of SNP TSC0050904
acaaatataaacc

SEQ ID NO: 208219 - DNA, 13 bp, Artificial Sequence
  Oligonucleotide for detection of SNP TSC0050904
ggtttagatttgt

SEQ ID NO: 208220 - DNA, 13 bp, Artificial Sequence
  Oligonucleotide for detection of SNP TSC0050904
acaaatctaaacc

SEQ ID NO: 208221 - DNA, 13 bp, Artificial Sequence
  Oligonucleotide for detection of SNP TSC0050904
ataggtttgagty

SEQ ID NO: 208222 - DNA, 13 bp, Artificial Sequence
  Oligonucleotide for detection of SNP TSC0050904
ractcaaacctat

SEQ ID NO: 208223 - DNA, 13 bp, Artificial Sequence
  Oligonucleotide for detection of SNP TSC0050905
ttaataattggaa

SEQ ID NO: 208224 - DNA, 13 bp, Artificial Sequence
  Oligonucleotide for detection of SNP TSC0050905
ttccaattattaa

SEQ ID NO: 208225 - DNA, 13 bp, Artificial Sequence
  Oligonucleotide for detection of SNP TSC0050905
ttaatatttggaa

SEQ ID NO: 208226 - DNA, 13 bp, Artificial Sequence
  Oligonucleotide for detection of SNP TSC0050905
ttccaaatattaa

SEQ ID NO: 208227 - DNA, 13 bp, Artificial Sequence
  Oligonucleotide for detection of SNP TSC0050905
ttaatagttggaa

SEQ ID NO: 208228 - DNA, 13 bp, Artificial Sequence
  Oligonucleotide for detection of SNP TSC0050905
ttccaactattaa

SEQ ID NO: 208229 - DNA, 13 bp, Artificial Sequence
  Oligonucleotide for detection of SNP TSC0050905
ttttaattattaa

SEQ ID NO: 208230 - DNA, 13 bp, Artificial Sequence
  Oligonucleotide for detection of SNP TSC0050905
ttaataattaaaa

SEQ ID NO: 208231 - DNA, 13 bp, Artificial Sequence
  Oligonucleotide for detection of SNP TSC0050905
ttttaagtattaa

SEQ ID NO: 208232 - DNA, 13 bp, Artificial Sequence
  Oligonucleotide for detection of SNP TSC0050905
ttaatacttaaaa

SEQ ID NO: 208233 - DNA, 13 bp, Artificial Sequence
  Oligonucleotide for detection of SNP TSC0050905
ttttaaatattaa

SEQ ID NO: 208234 - DNA, 13 bp, Artificial Sequence
  Oligonucleotide for detection of SNP TSC0050905
ttaatatttaaaa

SEQ ID NO: 208235 - DNA, 13 bp, Artificial Sequence
  Oligonucleotide for detection of SNP TSC0050906
tgttttttagttt

SEQ ID NO: 208236 - DNA, 13 bp, Artificial Sequence
  Oligonucleotide for detection of SNP TSC0050906
aaactaaaaaaca

SEQ ID NO: 208237 - DNA, 13 bp, Artificial Sequence
  Oligonucleotide for detection of SNP TSC0050906
aaattgtaaagta

SEQ ID NO: 208238 - DNA, 13 bp, Artificial Sequence
  Oligonucleotide for detection of SNP TSC0050906
tactttacaattt

SEQ ID NO: 208239 - DNA, 13 bp, Artificial Sequence
  Oligonucleotide for detection of SNP TSC0050906
aaattggaaagta

SEQ ID NO: 208240 - DNA, 13 bp, Artificial Sequence
  Oligonucleotide for detection of SNP TSC0050906
tactttccaattt

SEQ ID NO: 208241 - DNA, 13 bp, Artificial Sequence
  Oligonucleotide for detection of SNP TSC0050906
aaattgaaaagta

SEQ ID NO: 208242 - DNA, 13 bp, Artificial Sequence
  Oligonucleotide for detection of SNP TSC0050906
tacttttcaattt

SEQ ID NO: 208243 - DNA, 13 bp, Artificial Sequence
  Oligonucleotide for detection of SNP TSC0050907
tttattttgtgty

SEQ ID NO: 208244 - DNA, 13 bp, Artificial Sequence
  Oligonucleotide for detection of SNP TSC0050907
racacaaaataaa

SEQ ID NO: 208245 - DNA, 13 bp, Artificial Sequence
  Oligonucleotide for detection of SNP TSC0050907
ggtatataataaa

SEQ ID NO: 208246 - DNA, 13 bp, Artificial Sequence
  Oligonucleotide for detection of SNP TSC0050907
tttattatatacc

SEQ ID NO: 208247 - DNA, 13 bp, Artificial Sequence
  Oligonucleotide for detection of SNP TSC0050907
ggtataaaataaa

SEQ ID NO: 208248 - DNA, 13 bp, Artificial Sequence
  Oligonucleotide for detection of SNP TSC0050907
tttattttatacc

SEQ ID NO: 208249 - DNA, 13 bp, Artificial Sequence
  Oligonucleotide for detection of SNP TSC0007564
ttaatgtaatttt

SEQ ID NO: 208250 - DNA, 13 bp, Artificial Sequence
  Oligonucleotide for detection of SNP TSC0007564
aaaattacattaa

SEQ ID NO: 208251 - DNA, 13 bp, Artificial Sequence
  Oligonucleotide for detection of SNP TSC0007564
ttaatggaatttt

SEQ ID NO: 208252 - DNA, 13 bp, Artificial Sequence
  Oligonucleotide for detection of SNP TSC0007564
aaaattccattaa

SEQ ID NO: 208253 - DNA, 13 bp, Artificial Sequence
  Oligonucleotide for detection of SNP TSC0050908
atgtaaattttgy

SEQ ID NO: 208254 - DNA, 13 bp, Artificial Sequence
  Oligonucleotide for detection of SNP TSC0050908
rcaaaatttacat

SEQ ID NO: 208255 - DNA, 13 bp, Artificial Sequence
  Oligonucleotide for detection of SNP TSC0050908
atgtaagttttgy

SEQ ID NO: 208256 - DNA, 13 bp, Artificial Sequence
  Oligonucleotide for detection of SNP TSC0050908
rcaaaacttacat

SEQ ID NO: 208257 - DNA, 13 bp, Artificial Sequence
  Oligonucleotide for detection of SNP TSC0050908
acgtaaattttgy

SEQ ID NO: 208258 - DNA, 13 bp, Artificial Sequence
  Oligonucleotide for detection of SNP TSC0050908
rcaaaatttacgt

SEQ ID NO: 208259 - DNA, 13 bp, Artificial Sequence
  Oligonucleotide for detection of SNP TSC0050908
acgtaagttttgy

SEQ ID NO: 208260 - DNA, 13 bp, Artificial Sequence
  Oligonucleotide for detection of SNP TSC0050908
rcaaaacttacgt

SEQ ID NO: 208261 - DNA, 13 bp, Artificial Sequence
  Oligonucleotide for detection of SNP TSC0050910
aaaaggaaaaggg

SEQ ID NO: 208262 - DNA, 13 bp, Artificial Sequence
  Oligonucleotide for detection of SNP TSC0050910
cccttttcctttt

SEQ ID NO: 208263 - DNA, 13 bp, Artificial Sequence
  Oligonucleotide for detection of SNP TSC0050910
aaaaggtaaaggg

SEQ ID NO: 208264 - DNA, 13 bp, Artificial Sequence
  Oligonucleotide for detection of SNP TSC0050910
ccctttacctttt

SEQ ID NO: 208265 - DNA, 13 bp, Artificial Sequence
  Oligonucleotide for detection of SNP TSC0050911
atttttaggataa

SEQ ID NO: 208266 - DNA, 13 bp, Artificial Sequence
  Oligonucleotide for detection of SNP TSC0050911
ttatcctaaaaat

SEQ ID NO: 208267 - DNA, 13 bp, Artificial Sequence
  Oligonucleotide for detection of SNP TSC0050911
atttttgggataa

SEQ ID NO: 208268 - DNA, 13 bp, Artificial Sequence
  Oligonucleotide for detection of SNP TSC0050911
ttatcccaaaaat

SEQ ID NO: 208269 - DNA, 13 bp, Artificial Sequence
  Oligonucleotide for detection of SNP TSC0050911
attttcgggataa

SEQ ID NO: 208270 - DNA, 13 bp, Artificial Sequence
  Oligonucleotide for detection of SNP TSC0050911
ttatcccgaaaat

SEQ ID NO: 208271 - DNA, 13 bp, Artificial Sequence
  Oligonucleotide for detection of SNP TSC0050911
ttgttttgaagat

SEQ ID NO: 208272 - DNA, 13 bp, Artificial Sequence
  Oligonucleotide for detection of SNP TSC0050911
atcttcaaaacaa

SEQ ID NO: 208273 - DNA, 13 bp, Artificial Sequence
  Oligonucleotide for detection of SNP TSC0050911
ttgtttcgaagat

SEQ ID NO: 208274 - DNA, 13 bp, Artificial Sequence
  Oligonucleotide for detection of SNP TSC0050911
atcttcgaaacaa

SEQ ID NO: 208275 - DNA, 13 bp, Artificial Sequence
  Oligonucleotide for detection of SNP TSC0008845
ataaaggaggaga

SEQ ID NO: 208276 - DNA, 13 bp, Artificial Sequence
  Oligonucleotide for detection of SNP TSC0008845
tctcctcctttat

SEQ ID NO: 208277 - DNA, 13 bp, Artificial Sequence
  Oligonucleotide for detection of SNP TSC0008845
ataaagaaggaga

SEQ ID NO: 208278 - DNA, 13 bp, Artificial Sequence
  Oligonucleotide for detection of SNP TSC0008845
tctccttctttat

SEQ ID NO: 208279 - DNA, 13 bp, Artificial Sequence
  Oligonucleotide for detection of SNP TSC0050914
taaattagtgtgg

SEQ ID NO: 208280 - DNA, 13 bp, Artificial Sequence
  Oligonucleotide for detection of SNP TSC0050914
ccacactaattta

SEQ ID NO: 208281 - DNA, 13 bp, Artificial Sequence
  Oligonucleotide for detection of SNP TSC0050914
taaattggtgtgg

SEQ ID NO: 208282 - DNA, 13 bp, Artificial Sequence
  Oligonucleotide for detection of SNP TSC0050914
ccacaccaattta

SEQ ID NO: 208283 - DNA, 13 bp, Artificial Sequence
  Oligonucleotide for detection of SNP TSC0050915
agaagaggatatg

SEQ ID NO: 208284 - DNA, 13 bp, Artificial Sequence
  Oligonucleotide for detection of SNP TSC0050915
catatcctcttct

SEQ ID NO: 208285 - DNA, 13 bp, Artificial Sequence
  Oligonucleotide for detection of SNP TSC0050915
agaagaagatatg

SEQ ID NO: 208286 - DNA, 13 bp, Artificial Sequence
  Oligonucleotide for detection of SNP TSC0050915
catatcttcttct

SEQ ID NO: 208287 - DNA, 13 bp, Artificial Sequence
  Oligonucleotide for detection of SNP TSC0004674
tttgataagtaga

SEQ ID NO: 208288 - DNA, 13 bp, Artificial Sequence
  Oligonucleotide for detection of SNP TSC0004674
tctacttatcaaa

SEQ ID NO: 208289 - DNA, 13 bp, Artificial Sequence
  Oligonucleotide for detection of SNP TSC0004674
tttgatgagtaga

SEQ ID NO: 208290 - DNA, 13 bp, Artificial Sequence
  Oligonucleotide for detection of SNP TSC0004674
tctactcatcaaa

SEQ ID NO: 208291 - DNA, 13 bp, Artificial Sequence
  Oligonucleotide for detection of SNP TSC0005274
aagattatggaag

SEQ ID NO: 208292 - DNA, 13 bp, Artificial Sequence
  Oligonucleotide for detection of SNP TSC0005274
cttccataatctt

SEQ ID NO: 208293 - DNA, 13 bp, Artificial Sequence
  Oligonucleotide for detection of SNP TSC0005274
aagattttggaag

SEQ ID NO: 208294 - DNA, 13 bp, Artificial Sequence
  Oligonucleotide for detection of SNP TSC0005274
cttccaaaatctt

SEQ ID NO: 208295 - DNA, 13 bp, Artificial Sequence
  Oligonucleotide for detection of SNP TSC0005275
tgtgtagttttag

SEQ ID NO: 208296 - DNA, 13 bp, Artificial Sequence
  Oligonucleotide for detection of SNP TSC0005275
ctaaaactacaca

SEQ ID NO: 208297 - DNA, 13 bp, Artificial Sequence
  Oligonucleotide for detection of SNP TSC0005275
tgtgtaattttag

SEQ ID NO: 208298 - DNA, 13 bp, Artificial Sequence
  Oligonucleotide for detection of SNP TSC0005275
ctaaaattacaca

SEQ ID NO: 208299 - DNA, 13 bp, Artificial Sequence
  Oligonucleotide for detection of SNP TSC0050918
tatttgataagtt

SEQ ID NO: 208300 - DNA, 13 bp, Artificial Sequence
  Oligonucleotide for detection of SNP TSC0050918
aacttatcaaata

SEQ ID NO: 208301 - DNA, 13 bp, Artificial Sequence
  Oligonucleotide for detection of SNP TSC0050918
tatttggtaagtt

SEQ ID NO: 208302 - DNA, 13 bp, Artificial Sequence
  Oligonucleotide for detection of SNP TSC0050918
aacttaccaaata

SEQ ID NO: 208303 - DNA, 13 bp, Artificial Sequence
  Oligonucleotide for detection of SNP TSC0050919
ttgttgggaatta

SEQ ID NO: 208304 - DNA, 13 bp, Artificial Sequence
  Oligonucleotide for detection of SNP TSC0050919
taattcccaacaa

SEQ ID NO: 208305 - DNA, 13 bp, Artificial Sequence
  Oligonucleotide for detection of SNP TSC0050919
ttgttgagaatta

SEQ ID NO: 208306 - DNA, 13 bp, Artificial Sequence
  Oligonucleotide for detection of SNP TSC0050919
taattctcaacaa

SEQ ID NO: 208307 - DNA, 13 bp, Artificial Sequence
  Oligonucleotide for detection of SNP TSC0050920
atttttgttagtt

SEQ ID NO: 208308 - DNA, 13 bp, Artificial Sequence
  Oligonucleotide for detection of SNP TSC0050920
aactaacaaaaat

SEQ ID NO: 208309 - DNA, 13 bp, Artificial Sequence
  Oligonucleotide for detection of SNP TSC0006150
ggtgaggtaggtg

SEQ ID NO: 208310 - DNA, 13 bp, Artificial Sequence
  Oligonucleotide for detection of SNP TSC0006150
cacctacctcacc

SEQ ID NO: 208311 - DNA, 13 bp, Artificial Sequence
  Oligonucleotide for detection of SNP TSC0006150
ggtgagataggtg

SEQ ID NO: 208312 - DNA, 13 bp, Artificial Sequence
  Oligonucleotide for detection of SNP TSC0006150
cacctatctcacc

SEQ ID NO: 208313 - DNA, 13 bp, Artificial Sequence
  Oligonucleotide for detection of SNP TSC0004999
tatattattgagy

SEQ ID NO: 208314 - DNA, 13 bp, Artificial Sequence
  Oligonucleotide for detection of SNP TSC0004999
rctcaataatata

SEQ ID NO: 208315 - DNA, 13 bp, Artificial Sequence
  Oligonucleotide for detection of SNP TSC0004999
tatattgttgagy

SEQ ID NO: 208316 - DNA, 13 bp, Artificial Sequence
  Oligonucleotide for detection of SNP TSC0004999
rctcaacaatata

SEQ ID NO: 208317 - DNA, 13 bp, Artificial Sequence
  Oligonucleotide for detection of SNP TSC0004999
tatatcgttgagy

SEQ ID NO: 208318 - DNA, 13 bp, Artificial Sequence
  Oligonucleotide for detection of SNP TSC0004999
rctcaacgatata

SEQ ID NO: 208319 - DNA, 13 bp, Artificial Sequence
  Oligonucleotide for detection of SNP TSC0004999
gtttaatgatgtg

SEQ ID NO: 208320 - DNA, 13 bp, Artificial Sequence
  Oligonucleotide for detection of SNP TSC0004999
cacatcattaaac

SEQ ID NO: 208321 - DNA, 13 bp, Artificial Sequence
  Oligonucleotide for detection of SNP TSC0004999
gtttaacgatgtg

SEQ ID NO: 208322 - DNA, 13 bp, Artificial Sequence
  Oligonucleotide for detection of SNP TSC0004999
cacatcgttaaac

SEQ ID NO: 208323 - DNA, 13 bp, Artificial Sequence
  Oligonucleotide for detection of SNP TSC0050921
ggaggttggatty

SEQ ID NO: 208324 - DNA, 13 bp, Artificial Sequence
  Oligonucleotide for detection of SNP TSC0050921
raatccaacctcc

SEQ ID NO: 208325 - DNA, 13 bp, Artificial Sequence
  Oligonucleotide for detection of SNP TSC0050921
ggaggtgggatty

SEQ ID NO: 208326 - DNA, 13 bp, Artificial Sequence
  Oligonucleotide for detection of SNP TSC0050921
raatcccacctcc

SEQ ID NO: 208327 - DNA, 13 bp, Artificial Sequence
  Oligonucleotide for detection of SNP TSC0050921
ggaggtcggatty

SEQ ID NO: 208328 - DNA, 13 bp, Artificial Sequence
  Oligonucleotide for detection of SNP TSC0050921
raatccgacctcc

SEQ ID NO: 208329 - DNA, 13 bp, Artificial Sequence
  Oligonucleotide for detection of SNP TSC0050921
ggaggcgggatty

SEQ ID NO: 208330 - DNA, 13 bp, Artificial Sequence
  Oligonucleotide for detection of SNP TSC0050921
raatcccgcctcc

SEQ ID NO: 208331 - DNA, 13 bp, Artificial Sequence
  Oligonucleotide for detection of SNP TSC0050921
gagtttggtttty

SEQ ID NO: 208332 - DNA, 13 bp, Artificial Sequence
  Oligonucleotide for detection of SNP TSC0050921
raaaaccaaactc

SEQ ID NO: 208333 - DNA, 13 bp, Artificial Sequence
  Oligonucleotide for detection of SNP TSC0050921
gagttcggtttty

SEQ ID NO: 208334 - DNA, 13 bp, Artificial Sequence
  Oligonucleotide for detection of SNP TSC0050921
raaaaccgaactc

SEQ ID NO: 208335 - DNA, 13 bp, Artificial Sequence
  Oligonucleotide for detection of SNP TSC0050922
tggattatattgt

SEQ ID NO: 208336 - DNA, 13 bp, Artificial Sequence
  Oligonucleotide for detection of SNP TSC0050922
acaatataatcca

SEQ ID NO: 208337 - DNA, 13 bp, Artificial Sequence
  Oligonucleotide for detection of SNP TSC0050922
tggattgtattgt

SEQ ID NO: 208338 - DNA, 13 bp, Artificial Sequence
  Oligonucleotide for detection of SNP TSC0050922
acaatacaatcca

SEQ ID NO: 208339 - DNA, 13 bp, Artificial Sequence
  Oligonucleotide for detection of SNP TSC0050922
cggattatattgt

SEQ ID NO: 208340 - DNA, 13 bp, Artificial Sequence
  Oligonucleotide for detection of SNP TSC0050922
acaatataatccg

SEQ ID NO: 208341 - DNA, 13 bp, Artificial Sequence
  Oligonucleotide for detection of SNP TSC0050922
cggattgtattgt

SEQ ID NO: 208342 - DNA, 13 bp, Artificial Sequence
  Oligonucleotide for detection of SNP TSC0050922
acaatacaatccg

SEQ ID NO: 208343 - DNA, 13 bp, Artificial Sequence
  Oligonucleotide for detection of SNP TSC0050923
ggttaaatttaay

SEQ ID NO: 208344 - DNA, 13 bp, Artificial Sequence
  Oligonucleotide for detection of SNP TSC0050923
rttaaatttaacc

SEQ ID NO: 208345 - DNA, 13 bp, Artificial Sequence
  Oligonucleotide for detection of SNP TSC0050923
ggttaagtttaay

SEQ ID NO: 208346 - DNA, 13 bp, Artificial Sequence
  Oligonucleotide for detection of SNP TSC0050923
rttaaacttaacc

SEQ ID NO: 208347 - DNA, 13 bp, Artificial Sequence
  Oligonucleotide for detection of SNP TSC0006885
aagttgaaatagg

SEQ ID NO: 208348 - DNA, 13 bp, Artificial Sequence
  Oligonucleotide for detection of SNP TSC0006885
cctatttcaactt

SEQ ID NO: 208349 - DNA, 13 bp, Artificial Sequence
  Oligonucleotide for detection of SNP TSC0006885
aagttggaatagg

SEQ ID NO: 208350 - DNA, 13 bp, Artificial Sequence
  Oligonucleotide for detection of SNP TSC0006885
cctattccaactt

SEQ ID NO: 208351 - DNA, 13 bp, Artificial Sequence
  Oligonucleotide for detection of SNP TSC0050924
tattatatgtagt

SEQ ID NO: 208352 - DNA, 13 bp, Artificial Sequence
  Oligonucleotide for detection of SNP TSC0050924
actacatataata

SEQ ID NO: 208353 - DNA, 13 bp, Artificial Sequence
  Oligonucleotide for detection of SNP TSC0050924
tattatttgtagt

SEQ ID NO: 208354 - DNA, 13 bp, Artificial Sequence
  Oligonucleotide for detection of SNP TSC0050924
actacaaataata

SEQ ID NO: 208355 - DNA, 13 bp, Artificial Sequence
  Oligonucleotide for detection of SNP TSC0050924
attgtatgtaata

SEQ ID NO: 208356 - DNA, 13 bp, Artificial Sequence
  Oligonucleotide for detection of SNP TSC0050924
tattacatacaat

SEQ ID NO: 208357 - DNA, 13 bp, Artificial Sequence
  Oligonucleotide for detection of SNP TSC0050924
attgtaagtaata

SEQ ID NO: 208358 - DNA, 13 bp, Artificial Sequence
  Oligonucleotide for detection of SNP TSC0050924
tattacttacaat

SEQ ID NO: 208359 - DNA, 13 bp, Artificial Sequence
  Oligonucleotide for detection of SNP TSC0050926
agtttatgatgty

SEQ ID NO: 208360 - DNA, 13 bp, Artificial Sequence
  Oligonucleotide for detection of SNP TSC0050926
racatcataaact

SEQ ID NO: 208361 - DNA, 13 bp, Artificial Sequence
  Oligonucleotide for detection of SNP TSC0050926
agtttaggatgty

SEQ ID NO: 208362 - DNA, 13 bp, Artificial Sequence
  Oligonucleotide for detection of SNP TSC0050926
racatcctaaact

SEQ ID NO: 208363 - DNA, 13 bp, Artificial Sequence
  Oligonucleotide for detection of SNP TSC0050926
gatattatgggtt

SEQ ID NO: 208364 - DNA, 13 bp, Artificial Sequence
  Oligonucleotide for detection of SNP TSC0050926
aacccataatatc

SEQ ID NO: 208365 - DNA, 13 bp, Artificial Sequence
  Oligonucleotide for detection of SNP TSC0050926
gatattttgggtt

SEQ ID NO: 208366 - DNA, 13 bp, Artificial Sequence
  Oligonucleotide for detection of SNP TSC0050926
aacccaaaatatc

SEQ ID NO: 208367 - DNA, 13 bp, Artificial Sequence
  Oligonucleotide for detection of SNP TSC0050927
tgtgattgagttg

SEQ ID NO: 208368 - DNA, 13 bp, Artificial Sequence
  Oligonucleotide for detection of SNP TSC0050927
caactcaatcaca

SEQ ID NO: 208369 - DNA, 13 bp, Artificial Sequence
  Oligonucleotide for detection of SNP TSC0050927
tgtgatggagttg

SEQ ID NO: 208370 - DNA, 13 bp, Artificial Sequence
  Oligonucleotide for detection of SNP TSC0050927
caactccatcaca

SEQ ID NO: 208371 - DNA, 13 bp, Artificial Sequence
  Oligonucleotide for detection of SNP TSC0050927
cgtgattgagttg

SEQ ID NO: 208372 - DNA, 13 bp, Artificial Sequence
  Oligonucleotide for detection of SNP TSC0050927
caactcaatcacg

SEQ ID NO: 208373 - DNA, 13 bp, Artificial Sequence
  Oligonucleotide for detection of SNP TSC0050927
cgtgatggagttg

SEQ ID NO: 208374 - DNA, 13 bp, Artificial Sequence
  Oligonucleotide for detection of SNP TSC0050927
caactccatcacg

SEQ ID NO: 208375 - DNA, 13 bp, Artificial Sequence
  Oligonucleotide for detection of SNP TSC0050927
tgtgattgagtcg

SEQ ID NO: 208376 - DNA, 13 bp, Artificial Sequence
  Oligonucleotide for detection of SNP TSC0050927
cgactcaatcaca

SEQ ID NO: 208377 - DNA, 13 bp, Artificial Sequence
  Oligonucleotide for detection of SNP TSC0050927
tgtgatggagtcg

SEQ ID NO: 208378 - DNA, 13 bp, Artificial Sequence
  Oligonucleotide for detection of SNP TSC0050927
cgactccatcaca

SEQ ID NO: 208379 - DNA, 13 bp, Artificial Sequence
  Oligonucleotide for detection of SNP TSC0050927
cgtgattgagtcg

SEQ ID NO: 208380 - DNA, 13 bp, Artificial Sequence
  Oligonucleotide for detection of SNP TSC0050927
cgactcaatcacg

SEQ ID NO: 208381 - DNA, 13 bp, Artificial Sequence
  Oligonucleotide for detection of SNP TSC0050927
cgtgatggagtcg

SEQ ID NO: 208382 - DNA, 13 bp, Artificial Sequence
  Oligonucleotide for detection of SNP TSC0050927
cgactccatcacg

SEQ ID NO: 208383 - DNA, 13 bp, Artificial Sequence
  Oligonucleotide for detection of SNP TSC0050927
tggttttattatg

SEQ ID NO: 208384 - DNA, 13 bp, Artificial Sequence
  Oligonucleotide for detection of SNP TSC0050927
cataataaaacca

SEQ ID NO: 208385 - DNA, 13 bp, Artificial Sequence
  Oligonucleotide for detection of SNP TSC0050927
cggtttaattatg

SEQ ID NO: 208386 - DNA, 13 bp, Artificial Sequence
  Oligonucleotide for detection of SNP TSC0050927
cataattaaaccg

SEQ ID NO: 208387 - DNA, 13 bp, Artificial Sequence
  Oligonucleotide for detection of SNP TSC0050927
cggttttattatg

SEQ ID NO: 208388 - DNA, 13 bp, Artificial Sequence
  Oligonucleotide for detection of SNP TSC0050927
cataataaaaccg

SEQ ID NO: 208389 - DNA, 13 bp, Artificial Sequence
  Oligonucleotide for detection of SNP TSC0050927
tggtttaattacg

SEQ ID NO: 208390 - DNA, 13 bp, Artificial Sequence
  Oligonucleotide for detection of SNP TSC0050927
cgtaattaaacca

SEQ ID NO: 208391 - DNA, 13 bp, Artificial Sequence
  Oligonucleotide for detection of SNP TSC0050927
tggttttattacg

SEQ ID NO: 208392 - DNA, 13 bp, Artificial Sequence
  Oligonucleotide for detection of SNP TSC0050927
cgtaataaaacca

SEQ ID NO: 208393 - DNA, 13 bp, Artificial Sequence
  Oligonucleotide for detection of SNP TSC0050927
cggtttaattacg

SEQ ID NO: 208394 - DNA, 13 bp, Artificial Sequence
  Oligonucleotide for detection of SNP TSC0050927
cgtaattaaaccg

SEQ ID NO: 208395 - DNA, 13 bp, Artificial Sequence
  Oligonucleotide for detection of SNP TSC0050927
cggttttattacg

SEQ ID NO: 208396 - DNA, 13 bp, Artificial Sequence
  Oligonucleotide for detection of SNP TSC0050927
cgtaataaaaccg

SEQ ID NO: 208397 - DNA, 13 bp, Artificial Sequence
  Oligonucleotide for detection of SNP TSC0050928
ttaataggtgttt

SEQ ID NO: 208398 - DNA, 13 bp, Artificial Sequence
  Oligonucleotide for detection of SNP TSC0050928
aaacacctattaa

SEQ ID NO: 208399 - DNA, 13 bp, Artificial Sequence
  Oligonucleotide for detection of SNP TSC0050928
ttaataagtgttt

SEQ ID NO: 208400 - DNA, 13 bp, Artificial Sequence
  Oligonucleotide for detection of SNP TSC0050928
aaacacttattaa

SEQ ID NO: 208401 - DNA, 13 bp, Artificial Sequence
  Oligonucleotide for detection of SNP TSC0050929
attttgttgaagt

SEQ ID NO: 208402 - DNA, 13 bp, Artificial Sequence
  Oligonucleotide for detection of SNP TSC0050929
acttcaacaaaat

SEQ ID NO: 208403 - DNA, 13 bp, Artificial Sequence
  Oligonucleotide for detection of SNP TSC0050929
attttggtgaagt

SEQ ID NO: 208404 - DNA, 13 bp, Artificial Sequence
  Oligonucleotide for detection of SNP TSC0050929
acttcaccaaaat

SEQ ID NO: 208405 - DNA, 13 bp, Artificial Sequence
  Oligonucleotide for detection of SNP TSC0050929
attttaataaagt

SEQ ID NO: 208406 - DNA, 13 bp, Artificial Sequence
  Oligonucleotide for detection of SNP TSC0050929
actttattaaaat

SEQ ID NO: 208407 - DNA, 13 bp, Artificial Sequence
  Oligonucleotide for detection of SNP TSC0050929
attttattaaagt

SEQ ID NO: 208408 - DNA, 13 bp, Artificial Sequence
  Oligonucleotide for detection of SNP TSC0050929
actttaataaaat

SEQ ID NO: 208409 - DNA, 13 bp, Artificial Sequence
  Oligonucleotide for detection of SNP TSC0050930
ttatttattttgt

SEQ ID NO: 208410 - DNA, 13 bp, Artificial Sequence
  Oligonucleotide for detection of SNP TSC0050930
acaaaataaataa

SEQ ID NO: 208411 - DNA, 13 bp, Artificial Sequence
  Oligonucleotide for detection of SNP TSC0050930
ttattcgttttgt

SEQ ID NO: 208412 - DNA, 13 bp, Artificial Sequence
  Oligonucleotide for detection of SNP TSC0050930
acaaaacgaataa

SEQ ID NO: 208413 - DNA, 13 bp, Artificial Sequence
  Oligonucleotide for detection of SNP TSC0050930
ataaggtggatga

SEQ ID NO: 208414 - DNA, 13 bp, Artificial Sequence
  Oligonucleotide for detection of SNP TSC0050930
tcatccaccttat

SEQ ID NO: 208415 - DNA, 13 bp, Artificial Sequence
  Oligonucleotide for detection of SNP TSC0050930
ataaggcggatga

SEQ ID NO: 208416 - DNA, 13 bp, Artificial Sequence
  Oligonucleotide for detection of SNP TSC0050930
tcatccgccttat

SEQ ID NO: 208417 - DNA, 13 bp, Artificial Sequence
  Oligonucleotide for detection of SNP TSC0050931
ttttttatggaaa

SEQ ID NO: 208418 - DNA, 13 bp, Artificial Sequence
  Oligonucleotide for detection of SNP TSC0050931
tttccataaaaaa

SEQ ID NO: 208419 - DNA, 13 bp, Artificial Sequence
  Oligonucleotide for detection of SNP TSC0050931
ttttttttggaaa

SEQ ID NO: 208420 - DNA, 13 bp, Artificial Sequence
  Oligonucleotide for detection of SNP TSC0050931
tttccaaaaaaaa

SEQ ID NO: 208421 - DNA, 13 bp, Artificial Sequence
  Oligonucleotide for detection of SNP TSC0050931
tttttatggaaag

SEQ ID NO: 208422 - DNA, 13 bp, Artificial Sequence
  Oligonucleotide for detection of SNP TSC0050931
ctttccataaaaa

SEQ ID NO: 208423 - DNA, 13 bp, Artificial Sequence
  Oligonucleotide for detection of SNP TSC0050931
tttttagggaaag

SEQ ID NO: 208424 - DNA, 13 bp, Artificial Sequence
  Oligonucleotide for detection of SNP TSC0050931
ctttccctaaaaa

SEQ ID NO: 208425 - DNA, 13 bp, Artificial Sequence
  Oligonucleotide for detection of SNP TSC0005793
aattttaggaagt

SEQ ID NO: 208426 - DNA, 13 bp, Artificial Sequence
  Oligonucleotide for detection of SNP TSC0005793
acttcctaaaatt

SEQ ID NO: 208427 - DNA, 13 bp, Artificial Sequence
  Oligonucleotide for detection of SNP TSC0005793
aattttgggaagt

SEQ ID NO: 208428 - DNA, 13 bp, Artificial Sequence
  Oligonucleotide for detection of SNP TSC0005793
acttcccaaaatt

SEQ ID NO: 208429 - DNA, 13 bp, Artificial Sequence
  Oligonucleotide for detection of SNP TSC0005793
aatttcgggaagt

SEQ ID NO: 208430 - DNA, 13 bp, Artificial Sequence
  Oligonucleotide for detection of SNP TSC0005793
acttcccgaaatt

SEQ ID NO: 208431 - DNA, 13 bp, Artificial Sequence
  Oligonucleotide for detection of SNP TSC0005793
attttttggggtt

SEQ ID NO: 208432 - DNA, 13 bp, Artificial Sequence
  Oligonucleotide for detection of SNP TSC0005793
aaccccaaaaaat

SEQ ID NO: 208433 - DNA, 13 bp, Artificial Sequence
  Oligonucleotide for detection of SNP TSC0005793
atttttcggggtt

SEQ ID NO: 208434 - DNA, 13 bp, Artificial Sequence
  Oligonucleotide for detection of SNP TSC0005793
aaccccgaaaaat

SEQ ID NO: 208435 - DNA, 13 bp, Artificial Sequence
  Oligonucleotide for detection of SNP TSC0009180
aataatatgtttt

SEQ ID NO: 208436 - DNA, 13 bp, Artificial Sequence
  Oligonucleotide for detection of SNP TSC0009180
aaaacatattatt

SEQ ID NO: 208437 - DNA, 13 bp, Artificial Sequence
  Oligonucleotide for detection of SNP TSC0009180
aataatttgtttt

SEQ ID NO: 208438 - DNA, 13 bp, Artificial Sequence
  Oligonucleotide for detection of SNP TSC0009180
aaaacaaattatt

SEQ ID NO: 208439 - DNA, 13 bp, Artificial Sequence
  Oligonucleotide for detection of SNP TSC0009180
agaatatgttatt

SEQ ID NO: 208440 - DNA, 13 bp, Artificial Sequence
  Oligonucleotide for detection of SNP TSC0009180
aataacatattct

SEQ ID NO: 208441 - DNA, 13 bp, Artificial Sequence
  Oligonucleotide for detection of SNP TSC0009180
agaataggttatt

SEQ ID NO: 208442 - DNA, 13 bp, Artificial Sequence
  Oligonucleotide for detection of SNP TSC0009180
aataacctattct

SEQ ID NO: 208443 - DNA, 13 bp, Artificial Sequence
  Oligonucleotide for detection of SNP TSC0050935
tggttagagtgty

SEQ ID NO: 208444 - DNA, 13 bp, Artificial Sequence
  Oligonucleotide for detection of SNP TSC0050935
racactctaacca

SEQ ID NO: 208445 - DNA, 13 bp, Artificial Sequence
  Oligonucleotide for detection of SNP TSC0050935
tggttaaagtgty

SEQ ID NO: 208446 - DNA, 13 bp, Artificial Sequence
  Oligonucleotide for detection of SNP TSC0050935
racactttaacca

SEQ ID NO: 208447 - DNA, 13 bp, Artificial Sequence
  Oligonucleotide for detection of SNP TSC0050938
tttttatgtagga

SEQ ID NO: 208448 - DNA, 13 bp, Artificial Sequence
  Oligonucleotide for detection of SNP TSC0050938
tcctacataaaaa

SEQ ID NO: 208449 - DNA, 13 bp, Artificial Sequence
  Oligonucleotide for detection of SNP TSC0050938
ttttatataaggg

SEQ ID NO: 208450 - DNA, 13 bp, Artificial Sequence
  Oligonucleotide for detection of SNP TSC0050938
cccttatataaaa

SEQ ID NO: 208451 - DNA, 13 bp, Artificial Sequence
  Oligonucleotide for detection of SNP TSC0050938
ttttatttaaggg

SEQ ID NO: 208452 - DNA, 13 bp, Artificial Sequence
  Oligonucleotide for detection of SNP TSC0050938
cccttaaataaaa

SEQ ID NO: 208453 - DNA, 13 bp, Artificial Sequence
  Oligonucleotide for detection of SNP TSC0050939
gatataggaaaaa

SEQ ID NO: 208454 - DNA, 13 bp, Artificial Sequence
  Oligonucleotide for detection of SNP TSC0050939
tttttcctatatc

SEQ ID NO: 208455 - DNA, 13 bp, Artificial Sequence
  Oligonucleotide for detection of SNP TSC0050939
gatatatgaaaaa

SEQ ID NO: 208456 - DNA, 13 bp, Artificial Sequence
  Oligonucleotide for detection of SNP TSC0050939
tttttcatatatc

SEQ ID NO: 208457 - DNA, 13 bp, Artificial Sequence
  Oligonucleotide for detection of SNP TSC0050939
gatatacgaaaaa

SEQ ID NO: 208458 - DNA, 13 bp, Artificial Sequence
  Oligonucleotide for detection of SNP TSC0050939
tttttcgtatatc

SEQ ID NO: 208459 - DNA, 13 bp, Artificial Sequence
  Oligonucleotide for detection of SNP TSC0050940
atgtgtaagtttt

SEQ ID NO: 208460 - DNA, 13 bp, Artificial Sequence
  Oligonucleotide for detection of SNP TSC0050940
aaaacttacacat

SEQ ID NO: 208461 - DNA, 13 bp, Artificial Sequence
  Oligonucleotide for detection of SNP TSC0050940
atgtgttagtttt

SEQ ID NO: 208462 - DNA, 13 bp, Artificial Sequence
  Oligonucleotide for detection of SNP TSC0050940
aaaactaacacat

SEQ ID NO: 208463 - DNA, 13 bp, Artificial Sequence
  Oligonucleotide for detection of SNP TSC0050940
aaggtttatatat

SEQ ID NO: 208464 - DNA, 13 bp, Artificial Sequence
  Oligonucleotide for detection of SNP TSC0050940
atatataaacctt

SEQ ID NO: 208465 - DNA, 13 bp, Artificial Sequence
  Oligonucleotide for detection of SNP TSC0050940
aaggttaatatat

SEQ ID NO: 208466 - DNA, 13 bp, Artificial Sequence
  Oligonucleotide for detection of SNP TSC0050940
atatattaacctt

SEQ ID NO: 208467 - DNA, 13 bp, Artificial Sequence
  Oligonucleotide for detection of SNP TSC0050942
ggtggaggttgta

SEQ ID NO: 208468 - DNA, 13 bp, Artificial Sequence
  Oligonucleotide for detection of SNP TSC0050942
tacaacctccacc

SEQ ID NO: 208469 - DNA, 13 bp, Artificial Sequence
  Oligonucleotide for detection of SNP TSC0050942
ggtggaagttgta

SEQ ID NO: 208470 - DNA, 13 bp, Artificial Sequence
  Oligonucleotide for detection of SNP TSC0050942
tacaacttccacc

SEQ ID NO: 208471 - DNA, 13 bp, Artificial Sequence
  Oligonucleotide for detection of SNP TSC0050942
ggcggaggttgta

SEQ ID NO: 208472 - DNA, 13 bp, Artificial Sequence
  Oligonucleotide for detection of SNP TSC0050942
tacaacctccgcc

SEQ ID NO: 208473 - DNA, 13 bp, Artificial Sequence
  Oligonucleotide for detection of SNP TSC0050942
ggcggaagttgta

SEQ ID NO: 208474 - DNA, 13 bp, Artificial Sequence
  Oligonucleotide for detection of SNP TSC0050942
tacaacttccgcc

SEQ ID NO: 208475 - DNA, 13 bp, Artificial Sequence
  Oligonucleotide for detection of SNP TSC0050943
taggagtgggagg

SEQ ID NO: 208476 - DNA, 13 bp, Artificial Sequence
  Oligonucleotide for detection of SNP TSC0050943
cctcccactccta

SEQ ID NO: 208477 - DNA, 13 bp, Artificial Sequence
  Oligonucleotide for detection of SNP TSC0050943
taggagcgggagg

SEQ ID NO: 208478 - DNA, 13 bp, Artificial Sequence
  Oligonucleotide for detection of SNP TSC0050943
cctcccgctccta

SEQ ID NO: 208479 - DNA, 13 bp, Artificial Sequence
  Oligonucleotide for detection of SNP TSC0050944
aagtaggaggtta

SEQ ID NO: 208480 - DNA, 13 bp, Artificial Sequence
  Oligonucleotide for detection of SNP TSC0050944
taacctcctactt

SEQ ID NO: 208481 - DNA, 13 bp, Artificial Sequence
  Oligonucleotide for detection of SNP TSC0050944
aagtagaaggtta

SEQ ID NO: 208482 - DNA, 13 bp, Artificial Sequence
  Oligonucleotide for detection of SNP TSC0050944
taaccttctactt

SEQ ID NO: 208483 - DNA, 13 bp, Artificial Sequence
  Oligonucleotide for detection of SNP TSC0008485
gaatgaggtttta

SEQ ID NO: 208484 - DNA, 13 bp, Artificial Sequence
  Oligonucleotide for detection of SNP TSC0008485
taaaacctcattc

SEQ ID NO: 208485 - DNA, 13 bp, Artificial Sequence
  Oligonucleotide for detection of SNP TSC0008485
gaatgaagtttta

SEQ ID NO: 208486 - DNA, 13 bp, Artificial Sequence
  Oligonucleotide for detection of SNP TSC0008485
taaaacttcattc

SEQ ID NO: 208487 - DNA, 13 bp, Artificial Sequence
  Oligonucleotide for detection of SNP TSC0004846
gtgttattagagy

SEQ ID NO: 208488 - DNA, 13 bp, Artificial Sequence
  Oligonucleotide for detection of SNP TSC0004846
rctctaataacac

SEQ ID NO: 208489 - DNA, 13 bp, Artificial Sequence
  Oligonucleotide for detection of SNP TSC0004846
gtgttagtagagy

SEQ ID NO: 208490 - DNA, 13 bp, Artificial Sequence
  Oligonucleotide for detection of SNP TSC0004846
rctctactaacac

SEQ ID NO: 208491 - DNA, 13 bp, Artificial Sequence
  Oligonucleotide for detection of SNP TSC0004846
gttttaatgatay

SEQ ID NO: 208492 - DNA, 13 bp, Artificial Sequence
  Oligonucleotide for detection of SNP TSC0004846
rtatcattaaaac

SEQ ID NO: 208493 - DNA, 13 bp, Artificial Sequence
  Oligonucleotide for detection of SNP TSC0004846
gttttattgatay

SEQ ID NO: 208494 - DNA, 13 bp, Artificial Sequence
  Oligonucleotide for detection of SNP TSC0004846
rtatcaataaaac

SEQ ID NO: 208495 - DNA, 13 bp, Artificial Sequence
  Oligonucleotide for detection of SNP TSC0050945
tttgtagtaggtg

SEQ ID NO: 208496 - DNA, 13 bp, Artificial Sequence
  Oligonucleotide for detection of SNP TSC0050945
cacctactacaaa

SEQ ID NO: 208497 - DNA, 13 bp, Artificial Sequence
  Oligonucleotide for detection of SNP TSC0050945
tttgtaataggtg

SEQ ID NO: 208498 - DNA, 13 bp, Artificial Sequence
  Oligonucleotide for detection of SNP TSC0050945
cacctattacaaa

SEQ ID NO: 208499 - DNA, 13 bp, Artificial Sequence
  Oligonucleotide for detection of SNP TSC0007822
ggaattagattay

SEQ ID NO: 208500 - DNA, 13 bp, Artificial Sequence
  Oligonucleotide for detection of SNP TSC0007822
rtaatctaattcc

SEQ ID NO: 208501 - DNA, 13 bp, Artificial Sequence
  Oligonucleotide for detection of SNP TSC0007822
ggaattggattay

SEQ ID NO: 208502 - DNA, 13 bp, Artificial Sequence
  Oligonucleotide for detection of SNP TSC0007822
rtaatccaattcc

SEQ ID NO: 208503 - DNA, 13 bp, Artificial Sequence
  Oligonucleotide for detection of SNP TSC0050949
tatgtcgtttttt

SEQ ID NO: 208504 - DNA, 13 bp, Artificial Sequence
  Oligonucleotide for detection of SNP TSC0050949
aaaaaacgacata

SEQ ID NO: 208505 - DNA, 13 bp, Artificial Sequence
  Oligonucleotide for detection of SNP TSC0050949
aagaaatgatatg

SEQ ID NO: 208506 - DNA, 13 bp, Artificial Sequence
  Oligonucleotide for detection of SNP TSC0050949
catatcatttctt

SEQ ID NO: 208507 - DNA, 13 bp, Artificial Sequence
  Oligonucleotide for detection of SNP TSC0050949
aagaaacgatatg

SEQ ID NO: 208508 - DNA, 13 bp, Artificial Sequence
  Oligonucleotide for detection of SNP TSC0050949
catatcgtttctt

SEQ ID NO: 208509 - DNA, 13 bp, Artificial Sequence
  Oligonucleotide for detection of SNP TSC0050950
gtttaggtaaata

SEQ ID NO: 208510 - DNA, 13 bp, Artificial Sequence
  Oligonucleotide for detection of SNP TSC0050950
tatttacctaaac

SEQ ID NO: 208511 - DNA, 13 bp, Artificial Sequence
  Oligonucleotide for detection of SNP TSC0050950
gtttagataaata

SEQ ID NO: 208512 - DNA, 13 bp, Artificial Sequence
  Oligonucleotide for detection of SNP TSC0050950
tatttatctaaac

SEQ ID NO: 208513 - DNA, 13 bp, Artificial Sequence
  Oligonucleotide for detection of SNP TSC0006232
gttggggtaaata

SEQ ID NO: 208514 - DNA, 13 bp, Artificial Sequence
  Oligonucleotide for detection of SNP TSC0006232
tatttaccccaac

SEQ ID NO: 208515 - DNA, 13 bp, Artificial Sequence
  Oligonucleotide for detection of SNP TSC0006232
gttgggataaata

SEQ ID NO: 208516 - DNA, 13 bp, Artificial Sequence
  Oligonucleotide for detection of SNP TSC0006232
tatttatcccaac

SEQ ID NO: 208517 - DNA, 13 bp, Artificial Sequence
  Oligonucleotide for detection of SNP TSC0006232
gtcggggtaaata

SEQ ID NO: 208518 - DNA, 13 bp, Artificial Sequence
  Oligonucleotide for detection of SNP TSC0006232
tatttaccccgac

SEQ ID NO: 208519 - DNA, 13 bp, Artificial Sequence
  Oligonucleotide for detection of SNP TSC0006232
gtcgggataaata

SEQ ID NO: 208520 - DNA, 13 bp, Artificial Sequence
  Oligonucleotide for detection of SNP TSC0006232
tatttatcccgac

SEQ ID NO: 208521 - DNA, 13 bp, Artificial Sequence
  Oligonucleotide for detection of SNP TSC0006508
ttgatatgagatt

SEQ ID NO: 208522 - DNA, 13 bp, Artificial Sequence
  Oligonucleotide for detection of SNP TSC0006508
aatctcatatcaa

SEQ ID NO: 208523 - DNA, 13 bp, Artificial Sequence
  Oligonucleotide for detection of SNP TSC0006508
ttgataagagatt

SEQ ID NO: 208524 - DNA, 13 bp, Artificial Sequence
  Oligonucleotide for detection of SNP TSC0006508
aatctcttatcaa

SEQ ID NO: 208525 - DNA, 13 bp, Artificial Sequence
  Oligonucleotide for detection of SNP TSC0050952
ttttttggggtga

SEQ ID NO: 208526 - DNA, 13 bp, Artificial Sequence
  Oligonucleotide for detection of SNP TSC0050952
tcaccccaaaaaa

SEQ ID NO: 208527 - DNA, 13 bp, Artificial Sequence
  Oligonucleotide for detection of SNP TSC0050952
ttatttgagggga

SEQ ID NO: 208528 - DNA, 13 bp, Artificial Sequence
  Oligonucleotide for detection of SNP TSC0050952
tcccctcaaataa

SEQ ID NO: 208529 - DNA, 13 bp, Artificial Sequence
  Oligonucleotide for detection of SNP TSC0050952
ttattttagggga

SEQ ID NO: 208530 - DNA, 13 bp, Artificial Sequence
  Oligonucleotide for detection of SNP TSC0050952
tcccctaaaataa

SEQ ID NO: 208531 - DNA, 13 bp, Artificial Sequence
  Oligonucleotide for detection of SNP TSC0050952
ttattcgagggga

SEQ ID NO: 208532 - DNA, 13 bp, Artificial Sequence
  Oligonucleotide for detection of SNP TSC0050952
tcccctcgaataa

SEQ ID NO: 208533 - DNA, 13 bp, Artificial Sequence
  Oligonucleotide for detection of SNP TSC0050953
ttttggattttga

SEQ ID NO: 208534 - DNA, 13 bp, Artificial Sequence
  Oligonucleotide for detection of SNP TSC0050953
tcaaaatccaaaa

SEQ ID NO: 208535 - DNA, 13 bp, Artificial Sequence
  Oligonucleotide for detection of SNP TSC0050953
ttttggtttttga

SEQ ID NO: 208536 - DNA, 13 bp, Artificial Sequence
  Oligonucleotide for detection of SNP TSC0050953
tcaaaaaccaaaa

SEQ ID NO: 208537 - DNA, 13 bp, Artificial Sequence
  Oligonucleotide for detection of SNP TSC0006810
tataaagtgatag

SEQ ID NO: 208538 - DNA, 13 bp, Artificial Sequence
  Oligonucleotide for detection of SNP TSC0006810
ctatcactttata

SEQ ID NO: 208539 - DNA, 13 bp, Artificial Sequence
  Oligonucleotide for detection of SNP TSC0006810
tataaaatgatag

SEQ ID NO: 208540 - DNA, 13 bp, Artificial Sequence
  Oligonucleotide for detection of SNP TSC0006810
ctatcattttata

SEQ ID NO: 208541 - DNA, 13 bp, Artificial Sequence
  Oligonucleotide for detection of SNP TSC0005978
aatgttatagagt

SEQ ID NO: 208542 - DNA, 13 bp, Artificial Sequence
  Oligonucleotide for detection of SNP TSC0005978
actctataacatt

SEQ ID NO: 208543 - DNA, 13 bp, Artificial Sequence
  Oligonucleotide for detection of SNP TSC0005978
aatgttgtagagt

SEQ ID NO: 208544 - DNA, 13 bp, Artificial Sequence
  Oligonucleotide for detection of SNP TSC0005978
actctacaacatt

SEQ ID NO: 208545 - DNA, 13 bp, Artificial Sequence
  Oligonucleotide for detection of SNP TSC0050957
ttgtttttgaaga

SEQ ID NO: 208546 - DNA, 13 bp, Artificial Sequence
  Oligonucleotide for detection of SNP TSC0050957
tcttcaaaaacaa

SEQ ID NO: 208547 - DNA, 13 bp, Artificial Sequence
  Oligonucleotide for detection of SNP TSC0050957
ttgtttgtgaaga

SEQ ID NO: 208548 - DNA, 13 bp, Artificial Sequence
  Oligonucleotide for detection of SNP TSC0050957
tcttcacaaacaa

SEQ ID NO: 208549 - DNA, 13 bp, Artificial Sequence
  Oligonucleotide for detection of SNP TSC0050957
tttttaaagataa

SEQ ID NO: 208550 - DNA, 13 bp, Artificial Sequence
  Oligonucleotide for detection of SNP TSC0050957
ttatctttaaaaa

SEQ ID NO: 208551 - DNA, 13 bp, Artificial Sequence
  Oligonucleotide for detection of SNP TSC0050957
tttttatagataa

SEQ ID NO: 208552 - DNA, 13 bp, Artificial Sequence
  Oligonucleotide for detection of SNP TSC0050957
ttatctataaaaa

SEQ ID NO: 208553 - DNA, 13 bp, Artificial Sequence
  Oligonucleotide for detection of SNP TSC0006636
taatttaagatga

SEQ ID NO: 208554 - DNA, 13 bp, Artificial Sequence
  Oligonucleotide for detection of SNP TSC0006636
tcatcttaaatta

SEQ ID NO: 208555 - DNA, 13 bp, Artificial Sequence
  Oligonucleotide for detection of SNP TSC0006636
taatttgagatga

SEQ ID NO: 208556 - DNA, 13 bp, Artificial Sequence
  Oligonucleotide for detection of SNP TSC0006636
tcatctcaaatta

SEQ ID NO: 208557 - DNA, 13 bp, Artificial Sequence
  Oligonucleotide for detection of SNP TSC0050958
gtaaggatttgty

SEQ ID NO: 208558 - DNA, 13 bp, Artificial Sequence
  Oligonucleotide for detection of SNP TSC0050958
racaaatccttac

SEQ ID NO: 208559 - DNA, 13 bp, Artificial Sequence
  Oligonucleotide for detection of SNP TSC0050958
gtaagggtttgty

SEQ ID NO: 208560 - DNA, 13 bp, Artificial Sequence
  Oligonucleotide for detection of SNP TSC0050958
racaaacccttac

SEQ ID NO: 208561 - DNA, 13 bp, Artificial Sequence
  Oligonucleotide for detection of SNP TSC0050962
atggagattatty

SEQ ID NO: 208562 - DNA, 13 bp, Artificial Sequence
  Oligonucleotide for detection of SNP TSC0050962
raataatctccat

SEQ ID NO: 208563 - DNA, 13 bp, Artificial Sequence
  Oligonucleotide for detection of SNP TSC0050962
atggagtttatty

SEQ ID NO: 208564 - DNA, 13 bp, Artificial Sequence
  Oligonucleotide for detection of SNP TSC0050962
raataaactccat

SEQ ID NO: 208565 - DNA, 13 bp, Artificial Sequence
  Oligonucleotide for detection of SNP TSC0050962
gggtggtttttat

SEQ ID NO: 208566 - DNA, 13 bp, Artificial Sequence
  Oligonucleotide for detection of SNP TSC0050962
ataaaaaccaccc

SEQ ID NO: 208567 - DNA, 13 bp, Artificial Sequence
  Oligonucleotide for detection of SNP TSC0050962
gggtggattttat

SEQ ID NO: 208568 - DNA, 13 bp, Artificial Sequence
  Oligonucleotide for detection of SNP TSC0050962
ataaaatccaccc

SEQ ID NO: 208569 - DNA, 13 bp, Artificial Sequence
  Oligonucleotide for detection of SNP TSC0050963
aattcgtttttgg

SEQ ID NO: 208570 - DNA, 13 bp, Artificial Sequence
  Oligonucleotide for detection of SNP TSC0050963
ccaaaaacgaatt

SEQ ID NO: 208571 - DNA, 13 bp, Artificial Sequence
  Oligonucleotide for detection of SNP TSC0050963
aattcggttttgg

SEQ ID NO: 208572 - DNA, 13 bp, Artificial Sequence
  Oligonucleotide for detection of SNP TSC0050963
ccaaaaccgaatt

SEQ ID NO: 208573 - DNA, 13 bp, Artificial Sequence
  Oligonucleotide for detection of SNP TSC0050963
aatttgttttcgg

SEQ ID NO: 208574 - DNA, 13 bp, Artificial Sequence
  Oligonucleotide for detection of SNP TSC0050963
ccgaaaacaaatt

SEQ ID NO: 208575 - DNA, 13 bp, Artificial Sequence
  Oligonucleotide for detection of SNP TSC0050963
aatttggtttcgg

SEQ ID NO: 208576 - DNA, 13 bp, Artificial Sequence
  Oligonucleotide for detection of SNP TSC0050963
ccgaaaccaaatt

SEQ ID NO: 208577 - DNA, 13 bp, Artificial Sequence
  Oligonucleotide for detection of SNP TSC0050963
aattcgttttcgg

SEQ ID NO: 208578 - DNA, 13 bp, Artificial Sequence
  Oligonucleotide for detection of SNP TSC0050963
ccgaaaacgaatt

SEQ ID NO: 208579 - DNA, 13 bp, Artificial Sequence
  Oligonucleotide for detection of SNP TSC0050963
aattcggtttcgg

SEQ ID NO: 208580 - DNA, 13 bp, Artificial Sequence
  Oligonucleotide for detection of SNP TSC0050963
ccgaaaccgaatt

SEQ ID NO: 208581 - DNA, 13 bp, Artificial Sequence
  Oligonucleotide for detection of SNP TSC0050963
ttggaagtgaatt

SEQ ID NO: 208582 - DNA, 13 bp, Artificial Sequence
  Oligonucleotide for detection of SNP TSC0050963
aattcacttccaa

SEQ ID NO: 208583 - DNA, 13 bp, Artificial Sequence
  Oligonucleotide for detection of SNP TSC0050963
ttggaattgaatt

SEQ ID NO: 208584 - DNA, 13 bp, Artificial Sequence
  Oligonucleotide for detection of SNP TSC0050963
aattcaattccaa

SEQ ID NO: 208585 - DNA, 13 bp, Artificial Sequence
  Oligonucleotide for detection of SNP TSC0050963
tcggaagtgaatt

SEQ ID NO: 208586 - DNA, 13 bp, Artificial Sequence
  Oligonucleotide for detection of SNP TSC0050963
aattcacttccga

SEQ ID NO: 208587 - DNA, 13 bp, Artificial Sequence
  Oligonucleotide for detection of SNP TSC0050963
tcggaattgaatt

SEQ ID NO: 208588 - DNA, 13 bp, Artificial Sequence
  Oligonucleotide for detection of SNP TSC0050963
aattcaattccga

SEQ ID NO: 208589 - DNA, 13 bp, Artificial Sequence
  Oligonucleotide for detection of SNP TSC0050963
ttggaagcgaatt

SEQ ID NO: 208590 - DNA, 13 bp, Artificial Sequence
  Oligonucleotide for detection of SNP TSC0050963
aattcgcttccaa

SEQ ID NO: 208591 - DNA, 13 bp, Artificial Sequence
  Oligonucleotide for detection of SNP TSC0050963
ttggaatcgaatt

SEQ ID NO: 208592 - DNA, 13 bp, Artificial Sequence
  Oligonucleotide for detection of SNP TSC0050963
aattcgattccaa

SEQ ID NO: 208593 - DNA, 13 bp, Artificial Sequence
  Oligonucleotide for detection of SNP TSC0050963
tcggaagcgaatt

SEQ ID NO: 208594 - DNA, 13 bp, Artificial Sequence
  Oligonucleotide for detection of SNP TSC0050963
aattcgcttccga

SEQ ID NO: 208595 - DNA, 13 bp, Artificial Sequence
  Oligonucleotide for detection of SNP TSC0050963
tcggaatcgaatt

SEQ ID NO: 208596 - DNA, 13 bp, Artificial Sequence
  Oligonucleotide for detection of SNP TSC0050963
aattcgattccga

SEQ ID NO: 208597 - DNA, 13 bp, Artificial Sequence
  Oligonucleotide for detection of SNP TSC0050964
tttatagtttaga

SEQ ID NO: 208598 - DNA, 13 bp, Artificial Sequence
  Oligonucleotide for detection of SNP TSC0050964
tctaaactataaa

SEQ ID NO: 208599 - DNA, 13 bp, Artificial Sequence
  Oligonucleotide for detection of SNP TSC0050965
tttattatttaay

SEQ ID NO: 208600 - DNA, 13 bp, Artificial Sequence
  Oligonucleotide for detection of SNP TSC0050965
rttaaataataaa

SEQ ID NO: 208601 - DNA, 13 bp, Artificial Sequence
  Oligonucleotide for detection of SNP TSC0050965
tttattgtttaay

SEQ ID NO: 208602 - DNA, 13 bp, Artificial Sequence
  Oligonucleotide for detection of SNP TSC0050965
rttaaacaataaa

SEQ ID NO: 208603 - DNA, 13 bp, Artificial Sequence
  Oligonucleotide for detection of SNP TSC0050966
taaaaagaaagaa

SEQ ID NO: 208604 - DNA, 13 bp, Artificial Sequence
  Oligonucleotide for detection of SNP TSC0050966
ttctttcttttta

SEQ ID NO: 208605 - DNA, 13 bp, Artificial Sequence
  Oligonucleotide for detection of SNP TSC0050967
tttttcgtatatt

SEQ ID NO: 208606 - DNA, 13 bp, Artificial Sequence
  Oligonucleotide for detection of SNP TSC0050967
aatatacgaaaaa

SEQ ID NO: 208607 - DNA, 13 bp, Artificial Sequence
  Oligonucleotide for detection of SNP TSC0050967
aatgtgagaaaag

SEQ ID NO: 208608 - DNA, 13 bp, Artificial Sequence
  Oligonucleotide for detection of SNP TSC0050967
cttttctcacatt

SEQ ID NO: 208609 - DNA, 13 bp, Artificial Sequence
  Oligonucleotide for detection of SNP TSC0050967
aatgtgtgaaaag

SEQ ID NO: 208610 - DNA, 13 bp, Artificial Sequence
  Oligonucleotide for detection of SNP TSC0050967
cttttcacacatt

SEQ ID NO: 208611 - DNA, 13 bp, Artificial Sequence
  Oligonucleotide for detection of SNP TSC0050967
aatgtgcgaaaag

SEQ ID NO: 208612 - DNA, 13 bp, Artificial Sequence
  Oligonucleotide for detection of SNP TSC0050967
cttttcgcacatt

SEQ ID NO: 208613 - DNA, 13 bp, Artificial Sequence
  Oligonucleotide for detection of SNP TSC0050968
agaattgggtagg

SEQ ID NO: 208614 - DNA, 13 bp, Artificial Sequence
  Oligonucleotide for detection of SNP TSC0050968
cctacccaattct

SEQ ID NO: 208615 - DNA, 13 bp, Artificial Sequence
  Oligonucleotide for detection of SNP TSC0050968
agaattaggtagg

SEQ ID NO: 208616 - DNA, 13 bp, Artificial Sequence
  Oligonucleotide for detection of SNP TSC0050968
cctacctaattct

SEQ ID NO: 208617 - DNA, 13 bp, Artificial Sequence
  Oligonucleotide for detection of SNP TSC0050968
agaatcgggtagg

SEQ ID NO: 208618 - DNA, 13 bp, Artificial Sequence
  Oligonucleotide for detection of SNP TSC0050968
cctacccgattct

SEQ ID NO: 208619 - DNA, 13 bp, Artificial Sequence
  Oligonucleotide for detection of SNP TSC0050969
aaaataggtcgtg

SEQ ID NO: 208620 - DNA, 13 bp, Artificial Sequence
  Oligonucleotide for detection of SNP TSC0050969
cacgacctatttt

SEQ ID NO: 208621 - DNA, 13 bp, Artificial Sequence
  Oligonucleotide for detection of SNP TSC0050969
aaaataagtcgtg

SEQ ID NO: 208622 - DNA, 13 bp, Artificial Sequence
  Oligonucleotide for detection of SNP TSC0050969
cacgacttatttt

SEQ ID NO: 208623 - DNA, 13 bp, Artificial Sequence
  Oligonucleotide for detection of SNP TSC0009157
aaggtggttgttt

SEQ ID NO: 208624 - DNA, 13 bp, Artificial Sequence
  Oligonucleotide for detection of SNP TSC0009157
aaacaaccacctt

SEQ ID NO: 208625 - DNA, 13 bp, Artificial Sequence
  Oligonucleotide for detection of SNP TSC0008048
atagtttttttay

SEQ ID NO: 208626 - DNA, 13 bp, Artificial Sequence
  Oligonucleotide for detection of SNP TSC0008048
rtaaaaaaactat

SEQ ID NO: 208627 - DNA, 13 bp, Artificial Sequence
  Oligonucleotide for detection of SNP TSC0008048
atagttgttttay

SEQ ID NO: 208628 - DNA, 13 bp, Artificial Sequence
  Oligonucleotide for detection of SNP TSC0008048
rtaaaacaactat

SEQ ID NO: 208629 - DNA, 13 bp, Artificial Sequence
  Oligonucleotide for detection of SNP TSC0008048
gtaagggaattgt

SEQ ID NO: 208630 - DNA, 13 bp, Artificial Sequence
  Oligonucleotide for detection of SNP TSC0008048
acaattcccttac

SEQ ID NO: 208631 - DNA, 13 bp, Artificial Sequence
  Oligonucleotide for detection of SNP TSC0008048
gtaaggtaattgt

SEQ ID NO: 208632 - DNA, 13 bp, Artificial Sequence
  Oligonucleotide for detection of SNP TSC0008048
acaattaccttac

SEQ ID NO: 208633 - DNA, 13 bp, Artificial Sequence
  Oligonucleotide for detection of SNP TSC0050970
ttgaaagtataat

SEQ ID NO: 208634 - DNA, 13 bp, Artificial Sequence
  Oligonucleotide for detection of SNP TSC0050970
attatactttcaa

SEQ ID NO: 208635 - DNA, 13 bp, Artificial Sequence
  Oligonucleotide for detection of SNP TSC0050970
ttgaaaatataat

SEQ ID NO: 208636 - DNA, 13 bp, Artificial Sequence
  Oligonucleotide for detection of SNP TSC0050970
attatattttcaa

SEQ ID NO: 208637 - DNA, 13 bp, Artificial Sequence
  Oligonucleotide for detection of SNP TSC0050971
taaaaaagatttt

SEQ ID NO: 208638 - DNA, 13 bp, Artificial Sequence
  Oligonucleotide for detection of SNP TSC0050971
aaaatctttttta

SEQ ID NO: 208639 - DNA, 13 bp, Artificial Sequence
  Oligonucleotide for detection of SNP TSC0050971
taaaaaggatttt

SEQ ID NO: 208640 - DNA, 13 bp, Artificial Sequence
  Oligonucleotide for detection of SNP TSC0050971
aaaatccttttta

SEQ ID NO: 208641 - DNA, 13 bp, Artificial Sequence
  Oligonucleotide for detection of SNP TSC0050972
tttataatatgtg

SEQ ID NO: 208642 - DNA, 13 bp, Artificial Sequence
  Oligonucleotide for detection of SNP TSC0050972
cacatattataaa

SEQ ID NO: 208643 - DNA, 13 bp, Artificial Sequence
  Oligonucleotide for detection of SNP TSC0050972
tttatagtatgtg

SEQ ID NO: 208644 - DNA, 13 bp, Artificial Sequence
  Oligonucleotide for detection of SNP TSC0050972
cacatactataaa

SEQ ID NO: 208645 - DNA, 13 bp, Artificial Sequence
  Oligonucleotide for detection of SNP TSC0050973
aagaaaaattgag

SEQ ID NO: 208646 - DNA, 13 bp, Artificial Sequence
  Oligonucleotide for detection of SNP TSC0050973
ctcaatttttctt

SEQ ID NO: 208647 - DNA, 13 bp, Artificial Sequence
  Oligonucleotide for detection of SNP TSC0050973
aagaaagattgag

SEQ ID NO: 208648 - DNA, 13 bp, Artificial Sequence
  Oligonucleotide for detection of SNP TSC0050973
ctcaatctttctt

SEQ ID NO: 208649 - DNA, 13 bp, Artificial Sequence
  Oligonucleotide for detection of SNP TSC0005053
attaattgttaat

SEQ ID NO: 208650 - DNA, 13 bp, Artificial Sequence
  Oligonucleotide for detection of SNP TSC0005053
attaacaattaat

SEQ ID NO: 208651 - DNA, 13 bp, Artificial Sequence
  Oligonucleotide for detection of SNP TSC0005053
attaatggttaat

SEQ ID NO: 208652 - DNA, 13 bp, Artificial Sequence
  Oligonucleotide for detection of SNP TSC0005053
attaaccattaat

SEQ ID NO: 208653 - DNA, 13 bp, Artificial Sequence
  Oligonucleotide for detection of SNP TSC0005053
attaatcgttaat

SEQ ID NO: 208654 - DNA, 13 bp, Artificial Sequence
  Oligonucleotide for detection of SNP TSC0005053
attaacgattaat

SEQ ID NO: 208655 - DNA, 13 bp, Artificial Sequence
  Oligonucleotide for detection of SNP TSC0005053
attaatgattgat

SEQ ID NO: 208656 - DNA, 13 bp, Artificial Sequence
  Oligonucleotide for detection of SNP TSC0005053
atcaatcattaat

SEQ ID NO: 208657 - DNA, 13 bp, Artificial Sequence
  Oligonucleotide for detection of SNP TSC0005053
attaattattgat

SEQ ID NO: 208658 - DNA, 13 bp, Artificial Sequence
  Oligonucleotide for detection of SNP TSC0005053
atcaataattaat

SEQ ID NO: 208659 - DNA, 13 bp, Artificial Sequence
  Oligonucleotide for detection of SNP TSC0005053
attaacgattgat

SEQ ID NO: 208660 - DNA, 13 bp, Artificial Sequence
  Oligonucleotide for detection of SNP TSC0005053
atcaatcgttaat

SEQ ID NO: 208661 - DNA, 13 bp, Artificial Sequence
  Oligonucleotide for detection of SNP TSC0005054
ttaagaaaggaaa

SEQ ID NO: 208662 - DNA, 13 bp, Artificial Sequence
  Oligonucleotide for detection of SNP TSC0005054
tttcctttcttaa

SEQ ID NO: 208663 - DNA, 13 bp, Artificial Sequence
  Oligonucleotide for detection of SNP TSC0005054
ttaagataggaaa

SEQ ID NO: 208664 - DNA, 13 bp, Artificial Sequence
  Oligonucleotide for detection of SNP TSC0005054
tttcctatcttaa

SEQ ID NO: 208665 - DNA, 13 bp, Artificial Sequence
  Oligonucleotide for detection of SNP TSC0005055
tgagtaatattgg

SEQ ID NO: 208666 - DNA, 13 bp, Artificial Sequence
  Oligonucleotide for detection of SNP TSC0005055
ccaatattactca

SEQ ID NO: 208667 - DNA, 13 bp, Artificial Sequence
  Oligonucleotide for detection of SNP TSC0005055
tgagtattattgg

SEQ ID NO: 208668 - DNA, 13 bp, Artificial Sequence
  Oligonucleotide for detection of SNP TSC0005055
ccaataatactca

SEQ ID NO: 208669 - DNA, 13 bp, Artificial Sequence
  Oligonucleotide for detection of SNP TSC0005055
ttaatgttgttta

SEQ ID NO: 208670 - DNA, 13 bp, Artificial Sequence
  Oligonucleotide for detection of SNP TSC0005055
taaacaacattaa

SEQ ID NO: 208671 - DNA, 13 bp, Artificial Sequence
  Oligonucleotide for detection of SNP TSC0005055
ttaatggtgttta

SEQ ID NO: 208672 - DNA, 13 bp, Artificial Sequence
  Oligonucleotide for detection of SNP TSC0005055
taaacaccattaa

SEQ ID NO: 208673 - DNA, 13 bp, Artificial Sequence
  Oligonucleotide for detection of SNP TSC0050974
ggggagtggttty

SEQ ID NO: 208674 - DNA, 13 bp, Artificial Sequence
  Oligonucleotide for detection of SNP TSC0050974
raaaccactcccc

SEQ ID NO: 208675 - DNA, 13 bp, Artificial Sequence
  Oligonucleotide for detection of SNP TSC0050974
ggggaggggttty

SEQ ID NO: 208676 - DNA, 13 bp, Artificial Sequence
  Oligonucleotide for detection of SNP TSC0050974
raaacccctcccc

SEQ ID NO: 208677 - DNA, 13 bp, Artificial Sequence
  Oligonucleotide for detection of SNP TSC0050974
gaagttattttty

SEQ ID NO: 208678 - DNA, 13 bp, Artificial Sequence
  Oligonucleotide for detection of SNP TSC0050974
raaaaataacttc

SEQ ID NO: 208679 - DNA, 13 bp, Artificial Sequence
  Oligonucleotide for detection of SNP TSC0050974
gaagtttttttty

SEQ ID NO: 208680 - DNA, 13 bp, Artificial Sequence
  Oligonucleotide for detection of SNP TSC0050974
raaaaaaaacttc

SEQ ID NO: 208681 - DNA, 13 bp, Artificial Sequence
  Oligonucleotide for detection of SNP TSC0010901
tgtgtaaggggtg

SEQ ID NO: 208682 - DNA, 13 bp, Artificial Sequence
  Oligonucleotide for detection of SNP TSC0010901
caccccttacaca

SEQ ID NO: 208683 - DNA, 13 bp, Artificial Sequence
  Oligonucleotide for detection of SNP TSC0010901
tgtgtatggggtg

SEQ ID NO: 208684 - DNA, 13 bp, Artificial Sequence
  Oligonucleotide for detection of SNP TSC0010901
caccccatacaca

SEQ ID NO: 208685 - DNA, 13 bp, Artificial Sequence
  Oligonucleotide for detection of SNP TSC0050977
tttgatgttgatt

SEQ ID NO: 208686 - DNA, 13 bp, Artificial Sequence
  Oligonucleotide for detection of SNP TSC0050977
aatcaacatcaaa

SEQ ID NO: 208687 - DNA, 13 bp, Artificial Sequence
  Oligonucleotide for detection of SNP TSC0050977
tttgatattgatt

SEQ ID NO: 208688 - DNA, 13 bp, Artificial Sequence
  Oligonucleotide for detection of SNP TSC0050977
aatcaatatcaaa

SEQ ID NO: 208689 - DNA, 13 bp, Artificial Sequence
  Oligonucleotide for detection of SNP TSC0050978
ttgtttgaataag

SEQ ID NO: 208690 - DNA, 13 bp, Artificial Sequence
  Oligonucleotide for detection of SNP TSC0050978
cttattcaaacaa

SEQ ID NO: 208691 - DNA, 13 bp, Artificial Sequence
  Oligonucleotide for detection of SNP TSC0050979
agtgtatgattta

SEQ ID NO: 208692 - DNA, 13 bp, Artificial Sequence
  Oligonucleotide for detection of SNP TSC0050979
taaatcatacact

SEQ ID NO: 208693 - DNA, 13 bp, Artificial Sequence
  Oligonucleotide for detection of SNP TSC0050979
agtgtacgattta

SEQ ID NO: 208694 - DNA, 13 bp, Artificial Sequence
  Oligonucleotide for detection of SNP TSC0050979
taaatcgtacact

SEQ ID NO: 208695 - DNA, 13 bp, Artificial Sequence
  Oligonucleotide for detection of SNP TSC0050979
tgggttgtgtatt

SEQ ID NO: 208696 - DNA, 13 bp, Artificial Sequence
  Oligonucleotide for detection of SNP TSC0050979
aatacacaaccca

SEQ ID NO: 208697 - DNA, 13 bp, Artificial Sequence
  Oligonucleotide for detection of SNP TSC0050979
tgggttatgtatt

SEQ ID NO: 208698 - DNA, 13 bp, Artificial Sequence
  Oligonucleotide for detection of SNP TSC0050979
aatacataaccca

SEQ ID NO: 208699 - DNA, 13 bp, Artificial Sequence
  Oligonucleotide for detection of SNP TSC0050979
tgggtcgtgtatt

SEQ ID NO: 208700 - DNA, 13 bp, Artificial Sequence
  Oligonucleotide for detection of SNP TSC0050979
aatacacgaccca

SEQ ID NO: 208701 - DNA, 13 bp, Artificial Sequence
  Oligonucleotide for detection of SNP TSC0000597
ttatgttgtatga

SEQ ID NO: 208702 - DNA, 13 bp, Artificial Sequence
  Oligonucleotide for detection of SNP TSC0000597
tcatacaacataa

SEQ ID NO: 208703 - DNA, 13 bp, Artificial Sequence
  Oligonucleotide for detection of SNP TSC0000597
ttatgtcgtatga

SEQ ID NO: 208704 - DNA, 13 bp, Artificial Sequence
  Oligonucleotide for detection of SNP TSC0000597
tcatacgacataa

SEQ ID NO: 208705 - DNA, 13 bp, Artificial Sequence
  Oligonucleotide for detection of SNP TSC0000597
ttatatgatataa

SEQ ID NO: 208706 - DNA, 13 bp, Artificial Sequence
  Oligonucleotide for detection of SNP TSC0000597
ttatatcatataa

SEQ ID NO: 208707 - DNA, 13 bp, Artificial Sequence
  Oligonucleotide for detection of SNP TSC0000597
ttatataatataa

SEQ ID NO: 208708 - DNA, 13 bp, Artificial Sequence
  Oligonucleotide for detection of SNP TSC0000597
ttatattatataa

SEQ ID NO: 208709 - DNA, 13 bp, Artificial Sequence
  Oligonucleotide for detection of SNP TSC0000597
ttatacgatataa

SEQ ID NO: 208710 - DNA, 13 bp, Artificial Sequence
  Oligonucleotide for detection of SNP TSC0000597
ttatatcgtataa

SEQ ID NO: 208711 - DNA, 13 bp, Artificial Sequence
  Oligonucleotide for detection of SNP TSC0000598
tatgtaatttttt

SEQ ID NO: 208712 - DNA, 13 bp, Artificial Sequence
  Oligonucleotide for detection of SNP TSC0000598
aaaaaattacata

SEQ ID NO: 208713 - DNA, 13 bp, Artificial Sequence
  Oligonucleotide for detection of SNP TSC0000598
tatgtagtttttt

SEQ ID NO: 208714 - DNA, 13 bp, Artificial Sequence
  Oligonucleotide for detection of SNP TSC0000598
aaaaaactacata

SEQ ID NO: 208715 - DNA, 13 bp, Artificial Sequence
  Oligonucleotide for detection of SNP TSC0050980
attggtatagaga

SEQ ID NO: 208716 - DNA, 13 bp, Artificial Sequence
  Oligonucleotide for detection of SNP TSC0050980
tctctataccaat

SEQ ID NO: 208717 - DNA, 13 bp, Artificial Sequence
  Oligonucleotide for detection of SNP TSC0050980
attggtgtagaga

SEQ ID NO: 208718 - DNA, 13 bp, Artificial Sequence
  Oligonucleotide for detection of SNP TSC0050980
tctctacaccaat

SEQ ID NO: 208719 - DNA, 13 bp, Artificial Sequence
  Oligonucleotide for detection of SNP TSC0050981
taataaaatatga

SEQ ID NO: 208720 - DNA, 13 bp, Artificial Sequence
  Oligonucleotide for detection of SNP TSC0050981
tcatattttatta

SEQ ID NO: 208721 - DNA, 13 bp, Artificial Sequence
  Oligonucleotide for detection of SNP TSC0050981
taataagatatga

SEQ ID NO: 208722 - DNA, 13 bp, Artificial Sequence
  Oligonucleotide for detection of SNP TSC0050981
tcatatcttatta

SEQ ID NO: 208723 - DNA, 13 bp, Artificial Sequence
  Oligonucleotide for detection of SNP TSC0050982
attatgagtataa

SEQ ID NO: 208724 - DNA, 13 bp, Artificial Sequence
  Oligonucleotide for detection of SNP TSC0050982
ttatactcataat

SEQ ID NO: 208725 - DNA, 13 bp, Artificial Sequence
  Oligonucleotide for detection of SNP TSC0050982
attatgggtataa

SEQ ID NO: 208726 - DNA, 13 bp, Artificial Sequence
  Oligonucleotide for detection of SNP TSC0050982
ttatacccataat

SEQ ID NO: 208727 - DNA, 13 bp, Artificial Sequence
  Oligonucleotide for detection of SNP TSC0006003
tatggtatttata

SEQ ID NO: 208728 - DNA, 13 bp, Artificial Sequence
  Oligonucleotide for detection of SNP TSC0006003
tataaataccata

SEQ ID NO: 208729 - DNA, 13 bp, Artificial Sequence
  Oligonucleotide for detection of SNP TSC0006003
tatggtttttata

SEQ ID NO: 208730 - DNA, 13 bp, Artificial Sequence
  Oligonucleotide for detection of SNP TSC0006003
tataaaaaccata

SEQ ID NO: 208731 - DNA, 13 bp, Artificial Sequence
  Oligonucleotide for detection of SNP TSC0006003
tacggtatttata

SEQ ID NO: 208732 - DNA, 13 bp, Artificial Sequence
  Oligonucleotide for detection of SNP TSC0006003
tataaataccgta

SEQ ID NO: 208733 - DNA, 13 bp, Artificial Sequence
  Oligonucleotide for detection of SNP TSC0006003
tacggtttttata

SEQ ID NO: 208734 - DNA, 13 bp, Artificial Sequence
  Oligonucleotide for detection of SNP TSC0006003
tataaaaaccgta

SEQ ID NO: 208735 - DNA, 13 bp, Artificial Sequence
  Oligonucleotide for detection of SNP TSC0006003
tataaatgttgta

SEQ ID NO: 208736 - DNA, 13 bp, Artificial Sequence
  Oligonucleotide for detection of SNP TSC0006003
tacaacatttata

SEQ ID NO: 208737 - DNA, 13 bp, Artificial Sequence
  Oligonucleotide for detection of SNP TSC0006003
tataaaggttgta

SEQ ID NO: 208738 - DNA, 13 bp, Artificial Sequence
  Oligonucleotide for detection of SNP TSC0006003
tacaacctttata

SEQ ID NO: 208739 - DNA, 13 bp, Artificial Sequence
  Oligonucleotide for detection of SNP TSC0006003
tataaatgtcgta

SEQ ID NO: 208740 - DNA, 13 bp, Artificial Sequence
  Oligonucleotide for detection of SNP TSC0006003
tacgacatttata

SEQ ID NO: 208741 - DNA, 13 bp, Artificial Sequence
  Oligonucleotide for detection of SNP TSC0006003
tataaaggtcgta

SEQ ID NO: 208742 - DNA, 13 bp, Artificial Sequence
  Oligonucleotide for detection of SNP TSC0006003
tacgacctttata

SEQ ID NO: 208743 - DNA, 13 bp, Artificial Sequence
  Oligonucleotide for detection of SNP TSC0050985
atgtggaatattt

SEQ ID NO: 208744 - DNA, 13 bp, Artificial Sequence
  Oligonucleotide for detection of SNP TSC0050985
aaatattccacat

SEQ ID NO: 208745 - DNA, 13 bp, Artificial Sequence
  Oligonucleotide for detection of SNP TSC0050985
atgtgggatattt

SEQ ID NO: 208746 - DNA, 13 bp, Artificial Sequence
  Oligonucleotide for detection of SNP TSC0050985
aaatatcccacat

SEQ ID NO: 208747 - DNA, 13 bp, Artificial Sequence
  Oligonucleotide for detection of SNP TSC0050986
atagaaaaagatt

SEQ ID NO: 208748 - DNA, 13 bp, Artificial Sequence
  Oligonucleotide for detection of SNP TSC0050986
aatctttttctat

SEQ ID NO: 208749 - DNA, 13 bp, Artificial Sequence
  Oligonucleotide for detection of SNP TSC0050986
atagaataagatt

SEQ ID NO: 208750 - DNA, 13 bp, Artificial Sequence
  Oligonucleotide for detection of SNP TSC0050986
aatcttattctat

SEQ ID NO: 208751 - DNA, 13 bp, Artificial Sequence
  Oligonucleotide for detection of SNP TSC0050987
atttttgagttty

SEQ ID NO: 208752 - DNA, 13 bp, Artificial Sequence
  Oligonucleotide for detection of SNP TSC0050987
raaactcaaaaat

SEQ ID NO: 208753 - DNA, 13 bp, Artificial Sequence
  Oligonucleotide for detection of SNP TSC0050987
attttcgagttty

SEQ ID NO: 208754 - DNA, 13 bp, Artificial Sequence
  Oligonucleotide for detection of SNP TSC0050987
raaactcgaaaat

SEQ ID NO: 208755 - DNA, 13 bp, Artificial Sequence
  Oligonucleotide for detection of SNP TSC0050987
gaggtttgagaat

SEQ ID NO: 208756 - DNA, 13 bp, Artificial Sequence
  Oligonucleotide for detection of SNP TSC0050987
attctcaaacctc

SEQ ID NO: 208757 - DNA, 13 bp, Artificial Sequence
  Oligonucleotide for detection of SNP TSC0050987
gaggttcgagaat

SEQ ID NO: 208758 - DNA, 13 bp, Artificial Sequence
  Oligonucleotide for detection of SNP TSC0050987
attctcgaacctc

SEQ ID NO: 208759 - DNA, 13 bp, Artificial Sequence
  Oligonucleotide for detection of SNP TSC0050988
atttttttgttga

SEQ ID NO: 208760 - DNA, 13 bp, Artificial Sequence
  Oligonucleotide for detection of SNP TSC0050988
tcaacaaaaaaat

SEQ ID NO: 208761 - DNA, 13 bp, Artificial Sequence
  Oligonucleotide for detection of SNP TSC0050988
atttttgtgttga

SEQ ID NO: 208762 - DNA, 13 bp, Artificial Sequence
  Oligonucleotide for detection of SNP TSC0050988
tcaacacaaaaat

SEQ ID NO: 208763 - DNA, 13 bp, Artificial Sequence
  Oligonucleotide for detection of SNP TSC0050988
ttaatagagaaat

SEQ ID NO: 208764 - DNA, 13 bp, Artificial Sequence
  Oligonucleotide for detection of SNP TSC0050988
atttctctattaa

SEQ ID NO: 208765 - DNA, 13 bp, Artificial Sequence
  Oligonucleotide for detection of SNP TSC0050988
ttaatatagaaat

SEQ ID NO: 208766 - DNA, 13 bp, Artificial Sequence
  Oligonucleotide for detection of SNP TSC0050988
atttctatattaa

SEQ ID NO: 208767 - DNA, 13 bp, Artificial Sequence
  Oligonucleotide for detection of SNP TSC0050989
ttaagttgggggg

SEQ ID NO: 208768 - DNA, 13 bp, Artificial Sequence
  Oligonucleotide for detection of SNP TSC0050989
ccccccaacttaa

SEQ ID NO: 208769 - DNA, 13 bp, Artificial Sequence
  Oligonucleotide for detection of SNP TSC0050989
ttttttaatttga

SEQ ID NO: 208770 - DNA, 13 bp, Artificial Sequence
  Oligonucleotide for detection of SNP TSC0050989
tcaaattaaaaaa

SEQ ID NO: 208771 - DNA, 13 bp, Artificial Sequence
  Oligonucleotide for detection of SNP TSC0050989
tttttttatttga

SEQ ID NO: 208772 - DNA, 13 bp, Artificial Sequence
  Oligonucleotide for detection of SNP TSC0050989
tcaaataaaaaaa

SEQ ID NO: 208773 - DNA, 13 bp, Artificial Sequence
  Oligonucleotide for detection of SNP TSC0050990
ttggggagtagtt

SEQ ID NO: 208774 - DNA, 13 bp, Artificial Sequence
  Oligonucleotide for detection of SNP TSC0050990
aactactccccaa

SEQ ID NO: 208775 - DNA, 13 bp, Artificial Sequence
  Oligonucleotide for detection of SNP TSC0050990
ttggggggtagtt

SEQ ID NO: 208776 - DNA, 13 bp, Artificial Sequence
  Oligonucleotide for detection of SNP TSC0050990
aactaccccccaa

SEQ ID NO: 208777 - DNA, 13 bp, Artificial Sequence
  Oligonucleotide for detection of SNP TSC0050991
gaagatttggagg

SEQ ID NO: 208778 - DNA, 13 bp, Artificial Sequence
  Oligonucleotide for detection of SNP TSC0050991
cctccaaatcttc

SEQ ID NO: 208779 - DNA, 13 bp, Artificial Sequence
  Oligonucleotide for detection of SNP TSC0050991
gaagatgtggagg

SEQ ID NO: 208780 - DNA, 13 bp, Artificial Sequence
  Oligonucleotide for detection of SNP TSC0050991
cctccacatcttc

SEQ ID NO: 208781 - DNA, 13 bp, Artificial Sequence
  Oligonucleotide for detection of SNP TSC0050992
ttatagagggaay

SEQ ID NO: 208782 - DNA, 13 bp, Artificial Sequence
  Oligonucleotide for detection of SNP TSC0050992
rttccctctataa

SEQ ID NO: 208783 - DNA, 13 bp, Artificial Sequence
  Oligonucleotide for detection of SNP TSC0050992
ttatagtgggaay

SEQ ID NO: 208784 - DNA, 13 bp, Artificial Sequence
  Oligonucleotide for detection of SNP TSC0050992
rttcccactataa

SEQ ID NO: 208785 - DNA, 13 bp, Artificial Sequence
  Oligonucleotide for detection of SNP TSC0050992
gttttttttgtgg

SEQ ID NO: 208786 - DNA, 13 bp, Artificial Sequence
  Oligonucleotide for detection of SNP TSC0050992
ccacaaaaaaaac

SEQ ID NO: 208787 - DNA, 13 bp, Artificial Sequence
  Oligonucleotide for detection of SNP TSC0050993
ttgatataaatgy

SEQ ID NO: 208788 - DNA, 13 bp, Artificial Sequence
  Oligonucleotide for detection of SNP TSC0050993
rcatttatatcaa

SEQ ID NO: 208789 - DNA, 13 bp, Artificial Sequence
  Oligonucleotide for detection of SNP TSC0050993
ttgatagaaatgy

SEQ ID NO: 208790 - DNA, 13 bp, Artificial Sequence
  Oligonucleotide for detection of SNP TSC0050993
rcatttctatcaa

SEQ ID NO: 208791 - DNA, 13 bp, Artificial Sequence
  Oligonucleotide for detection of SNP TSC0050993
gtatttgtattag

SEQ ID NO: 208792 - DNA, 13 bp, Artificial Sequence
  Oligonucleotide for detection of SNP TSC0050993
ctaatacaaatac

SEQ ID NO: 208793 - DNA, 13 bp, Artificial Sequence
  Oligonucleotide for detection of SNP TSC0050993
gtatttttattag

SEQ ID NO: 208794 - DNA, 13 bp, Artificial Sequence
  Oligonucleotide for detection of SNP TSC0050993
ctaataaaaatac

SEQ ID NO: 208795 - DNA, 13 bp, Artificial Sequence
  Oligonucleotide for detection of SNP TSC0050994
atgattaatatag

SEQ ID NO: 208796 - DNA, 13 bp, Artificial Sequence
  Oligonucleotide for detection of SNP TSC0050994
ctatattaatcat

SEQ ID NO: 208797 - DNA, 13 bp, Artificial Sequence
  Oligonucleotide for detection of SNP TSC0050994
atgattgatatag

SEQ ID NO: 208798 - DNA, 13 bp, Artificial Sequence
  Oligonucleotide for detection of SNP TSC0050994
ctatatcaatcat

SEQ ID NO: 208799 - DNA, 13 bp, Artificial Sequence
  Oligonucleotide for detection of SNP TSC0008529
aggagtaataaga

SEQ ID NO: 208800 - DNA, 13 bp, Artificial Sequence
  Oligonucleotide for detection of SNP TSC0008529
tcttattactcct

SEQ ID NO: 208801 - DNA, 13 bp, Artificial Sequence
  Oligonucleotide for detection of SNP TSC0008529
aggagtgataaga

SEQ ID NO: 208802 - DNA, 13 bp, Artificial Sequence
  Oligonucleotide for detection of SNP TSC0008529
tcttatcactcct

SEQ ID NO: 208803 - DNA, 13 bp, Artificial Sequence
  Oligonucleotide for detection of SNP TSC0050995
aggaattttagta

SEQ ID NO: 208804 - DNA, 13 bp, Artificial Sequence
  Oligonucleotide for detection of SNP TSC0050995
tactaaaattcct

SEQ ID NO: 208805 - DNA, 13 bp, Artificial Sequence
  Oligonucleotide for detection of SNP TSC0050995
aggaatgttagta

SEQ ID NO: 208806 - DNA, 13 bp, Artificial Sequence
  Oligonucleotide for detection of SNP TSC0050995
tactaacattcct

SEQ ID NO: 208807 - DNA, 13 bp, Artificial Sequence
  Oligonucleotide for detection of SNP TSC0050995
tgttgagattttt

SEQ ID NO: 208808 - DNA, 13 bp, Artificial Sequence
  Oligonucleotide for detection of SNP TSC0050995
aaaaatctcaaca

SEQ ID NO: 208809 - DNA, 13 bp, Artificial Sequence
  Oligonucleotide for detection of SNP TSC0050995
tgttgatattttt

SEQ ID NO: 208810 - DNA, 13 bp, Artificial Sequence
  Oligonucleotide for detection of SNP TSC0050995
aaaaatatcaaca

SEQ ID NO: 208811 - DNA, 13 bp, Artificial Sequence
  Oligonucleotide for detection of SNP TSC0050996
aatgatataaaty

SEQ ID NO: 208812 - DNA, 13 bp, Artificial Sequence
  Oligonucleotide for detection of SNP TSC0050996
ratttatatcatt

SEQ ID NO: 208813 - DNA, 13 bp, Artificial Sequence
  Oligonucleotide for detection of SNP TSC0050996
aatgatgtaaaty

SEQ ID NO: 208814 - DNA, 13 bp, Artificial Sequence
  Oligonucleotide for detection of SNP TSC0050996
ratttacatcatt

SEQ ID NO: 208815 - DNA, 13 bp, Artificial Sequence
  Oligonucleotide for detection of SNP TSC0050996
aatgacgtaaaty

SEQ ID NO: 208816 - DNA, 13 bp, Artificial Sequence
  Oligonucleotide for detection of SNP TSC0050996
ratttacgtcatt

SEQ ID NO: 208817 - DNA, 13 bp, Artificial Sequence
  Oligonucleotide for detection of SNP TSC0050996
gatttatgttatt

SEQ ID NO: 208818 - DNA, 13 bp, Artificial Sequence
  Oligonucleotide for detection of SNP TSC0050996
aataacataaatc

SEQ ID NO: 208819 - DNA, 13 bp, Artificial Sequence
  Oligonucleotide for detection of SNP TSC0050996
gatttacgttatt

SEQ ID NO: 208820 - DNA, 13 bp, Artificial Sequence
  Oligonucleotide for detection of SNP TSC0050996
aataacgtaaatc

SEQ ID NO: 208821 - DNA, 13 bp, Artificial Sequence
  Oligonucleotide for detection of SNP TSC0050997
tagaatgtatttt

SEQ ID NO: 208822 - DNA, 13 bp, Artificial Sequence
  Oligonucleotide for detection of SNP TSC0050997
aaaatacattcta

SEQ ID NO: 208823 - DNA, 13 bp, Artificial Sequence
  Oligonucleotide for detection of SNP TSC0050997
tagaatatatttt

SEQ ID NO: 208824 - DNA, 13 bp, Artificial Sequence
  Oligonucleotide for detection of SNP TSC0050997
aaaatatattcta

SEQ ID NO: 208825 - DNA, 13 bp, Artificial Sequence
  Oligonucleotide for detection of SNP TSC0050998
tagttatggtgga

SEQ ID NO: 208826 - DNA, 13 bp, Artificial Sequence
  Oligonucleotide for detection of SNP TSC0050998
tccaccataacta

SEQ ID NO: 208827 - DNA, 13 bp, Artificial Sequence
  Oligonucleotide for detection of SNP TSC0050998
tagttacggtgga

SEQ ID NO: 208828 - DNA, 13 bp, Artificial Sequence
  Oligonucleotide for detection of SNP TSC0050998
tccaccgtaacta

SEQ ID NO: 208829 - DNA, 13 bp, Artificial Sequence
  Oligonucleotide for detection of SNP TSC0050999
tttagcgtttatg

SEQ ID NO: 208830 - DNA, 13 bp, Artificial Sequence
  Oligonucleotide for detection of SNP TSC0050999
cataaacgctaaa

SEQ ID NO: 208831 - DNA, 13 bp, Artificial Sequence
  Oligonucleotide for detection of SNP TSC0050999
tatgggtgttggg

SEQ ID NO: 208832 - DNA, 13 bp, Artificial Sequence
  Oligonucleotide for detection of SNP TSC0050999
cccaacacccata

SEQ ID NO: 208833 - DNA, 13 bp, Artificial Sequence
  Oligonucleotide for detection of SNP TSC0050999
tatgggcgttggg

SEQ ID NO: 208834 - DNA, 13 bp, Artificial Sequence
  Oligonucleotide for detection of SNP TSC0050999
cccaacgcccata

SEQ ID NO: 208835 - DNA, 13 bp, Artificial Sequence
  Oligonucleotide for detection of SNP TSC0051000
tttgagatgtgtg

SEQ ID NO: 208836 - DNA, 13 bp, Artificial Sequence
  Oligonucleotide for detection of SNP TSC0051000
cacacatctcaaa

SEQ ID NO: 208837 - DNA, 13 bp, Artificial Sequence
  Oligonucleotide for detection of SNP TSC0051000
tttgagttgtgtg

SEQ ID NO: 208838 - DNA, 13 bp, Artificial Sequence
  Oligonucleotide for detection of SNP TSC0051000
cacacaactcaaa

SEQ ID NO: 208839 - DNA, 13 bp, Artificial Sequence
  Oligonucleotide for detection of SNP TSC0051000
tatatagtttaag

SEQ ID NO: 208840 - DNA, 13 bp, Artificial Sequence
  Oligonucleotide for detection of SNP TSC0051000
cttaaactatata

SEQ ID NO: 208841 - DNA, 13 bp, Artificial Sequence
  Oligonucleotide for detection of SNP TSC0051002
ggtttaggaggga

SEQ ID NO: 208842 - DNA, 13 bp, Artificial Sequence
  Oligonucleotide for detection of SNP TSC0051002
tccctcctaaacc

SEQ ID NO: 208843 - DNA, 13 bp, Artificial Sequence
  Oligonucleotide for detection of SNP TSC0051002
ggtttaagaggga

SEQ ID NO: 208844 - DNA, 13 bp, Artificial Sequence
  Oligonucleotide for detection of SNP TSC0051002
tccctcttaaacc

SEQ ID NO: 208845 - DNA, 13 bp, Artificial Sequence
  Oligonucleotide for detection of SNP TSC0051003
tatataataatgy

SEQ ID NO: 208846 - DNA, 13 bp, Artificial Sequence
  Oligonucleotide for detection of SNP TSC0051003
rcattattatata

SEQ ID NO: 208847 - DNA, 13 bp, Artificial Sequence
  Oligonucleotide for detection of SNP TSC0051003
tatatagtaatgy

SEQ ID NO: 208848 - DNA, 13 bp, Artificial Sequence
  Oligonucleotide for detection of SNP TSC0051003
rcattactatata

SEQ ID NO: 208849 - DNA, 13 bp, Artificial Sequence
  Oligonucleotide for detection of SNP TSC0051003
tatataataacgy

SEQ ID NO: 208850 - DNA, 13 bp, Artificial Sequence
  Oligonucleotide for detection of SNP TSC0051003
rcgttattatata

SEQ ID NO: 208851 - DNA, 13 bp, Artificial Sequence
  Oligonucleotide for detection of SNP TSC0051003
tatatagtaacgy

SEQ ID NO: 208852 - DNA, 13 bp, Artificial Sequence
  Oligonucleotide for detection of SNP TSC0051003
rcgttactatata

SEQ ID NO: 208853 - DNA, 13 bp, Artificial Sequence
  Oligonucleotide for detection of SNP TSC0051004
tgagtaggggaaa

SEQ ID NO: 208854 - DNA, 13 bp, Artificial Sequence
  Oligonucleotide for detection of SNP TSC0051004
tttcccctactca

SEQ ID NO: 208855 - DNA, 13 bp, Artificial Sequence
  Oligonucleotide for detection of SNP TSC0051004
tgagtatgggaaa

SEQ ID NO: 208856 - DNA, 13 bp, Artificial Sequence
  Oligonucleotide for detection of SNP TSC0051004
tttcccatactca

SEQ ID NO: 208857 - DNA, 13 bp, Artificial Sequence
  Oligonucleotide for detection of SNP TSC0051004
tgagtacgggaaa

SEQ ID NO: 208858 - DNA, 13 bp, Artificial Sequence
  Oligonucleotide for detection of SNP TSC0051004
tttcccgtactca

SEQ ID NO: 208859 - DNA, 13 bp, Artificial Sequence
  Oligonucleotide for detection of SNP TSC0051005
aatgtgttttata

SEQ ID NO: 208860 - DNA, 13 bp, Artificial Sequence
  Oligonucleotide for detection of SNP TSC0051005
tataaaacacatt

SEQ ID NO: 208861 - DNA, 13 bp, Artificial Sequence
  Oligonucleotide for detection of SNP TSC0051005
aatgtggtttata

SEQ ID NO: 208862 - DNA, 13 bp, Artificial Sequence
  Oligonucleotide for detection of SNP TSC0051005
tataaaccacatt

SEQ ID NO: 208863 - DNA, 13 bp, Artificial Sequence
  Oligonucleotide for detection of SNP TSC0051005
tgtgggatatatt

SEQ ID NO: 208864 - DNA, 13 bp, Artificial Sequence
  Oligonucleotide for detection of SNP TSC0051005
aatatatcccaca

SEQ ID NO: 208865 - DNA, 13 bp, Artificial Sequence
  Oligonucleotide for detection of SNP TSC0051005
tgtgggttatatt

SEQ ID NO: 208866 - DNA, 13 bp, Artificial Sequence
  Oligonucleotide for detection of SNP TSC0051005
aatataacccaca

SEQ ID NO: 208867 - DNA, 13 bp, Artificial Sequence
  Oligonucleotide for detection of SNP TSC0051006
tttgtatgtttga

SEQ ID NO: 208868 - DNA, 13 bp, Artificial Sequence
  Oligonucleotide for detection of SNP TSC0051006
tcaaacatacaaa

SEQ ID NO: 208869 - DNA, 13 bp, Artificial Sequence
  Oligonucleotide for detection of SNP TSC0051006
tttgtacgtttga

SEQ ID NO: 208870 - DNA, 13 bp, Artificial Sequence
  Oligonucleotide for detection of SNP TSC0051006
tcaaacgtacaaa

SEQ ID NO: 208871 - DNA, 13 bp, Artificial Sequence
  Oligonucleotide for detection of SNP TSC0051006
ttaagtgtataga

SEQ ID NO: 208872 - DNA, 13 bp, Artificial Sequence
  Oligonucleotide for detection of SNP TSC0051006
tctatacacttaa

SEQ ID NO: 208873 - DNA, 13 bp, Artificial Sequence
  Oligonucleotide for detection of SNP TSC0051006
ttaagtatataga

SEQ ID NO: 208874 - DNA, 13 bp, Artificial Sequence
  Oligonucleotide for detection of SNP TSC0051006
tctatatacttaa

SEQ ID NO: 208875 - DNA, 13 bp, Artificial Sequence
  Oligonucleotide for detection of SNP TSC0051006
ttaagcgtataga

SEQ ID NO: 208876 - DNA, 13 bp, Artificial Sequence
  Oligonucleotide for detection of SNP TSC0051006
tctatacgcttaa

SEQ ID NO: 208877 - DNA, 13 bp, Artificial Sequence
  Oligonucleotide for detection of SNP TSC0051007
atttttaaagtta

SEQ ID NO: 208878 - DNA, 13 bp, Artificial Sequence
  Oligonucleotide for detection of SNP TSC0051007
taactttaaaaat

SEQ ID NO: 208879 - DNA, 13 bp, Artificial Sequence
  Oligonucleotide for detection of SNP TSC0051007
attttttaagtta

SEQ ID NO: 208880 - DNA, 13 bp, Artificial Sequence
  Oligonucleotide for detection of SNP TSC0051007
taacttaaaaaat

SEQ ID NO: 208881 - DNA, 13 bp, Artificial Sequence
  Oligonucleotide for detection of SNP TSC0051007
atttttgaagtta

SEQ ID NO: 208882 - DNA, 13 bp, Artificial Sequence
  Oligonucleotide for detection of SNP TSC0051007
taacttcaaaaat

SEQ ID NO: 208883 - DNA, 13 bp, Artificial Sequence
  Oligonucleotide for detection of SNP TSC0051007
attttcgaagtta

SEQ ID NO: 208884 - DNA, 13 bp, Artificial Sequence
  Oligonucleotide for detection of SNP TSC0051007
taacttcgaaaat

SEQ ID NO: 208885 - DNA, 13 bp, Artificial Sequence
  Oligonucleotide for detection of SNP TSC0051007
tgattttggaaat

SEQ ID NO: 208886 - DNA, 13 bp, Artificial Sequence
  Oligonucleotide for detection of SNP TSC0051007
atttccaaaatca

SEQ ID NO: 208887 - DNA, 13 bp, Artificial Sequence
  Oligonucleotide for detection of SNP TSC0051007
tgatttaggaaat

SEQ ID NO: 208888 - DNA, 13 bp, Artificial Sequence
  Oligonucleotide for detection of SNP TSC0051007
atttcctaaatca

SEQ ID NO: 208889 - DNA, 13 bp, Artificial Sequence
  Oligonucleotide for detection of SNP TSC0051007
tgatttcggaaat

SEQ ID NO: 208890 - DNA, 13 bp, Artificial Sequence
  Oligonucleotide for detection of SNP TSC0051007
atttccgaaatca

SEQ ID NO: 208891 - DNA, 13 bp, Artificial Sequence
  Oligonucleotide for detection of SNP TSC0006015
ggatattggaaga

SEQ ID NO: 208892 - DNA, 13 bp, Artificial Sequence
  Oligonucleotide for detection of SNP TSC0006015
tcttccaatatcc

SEQ ID NO: 208893 - DNA, 13 bp, Artificial Sequence
  Oligonucleotide for detection of SNP TSC0006015
ggatatcggaaga

SEQ ID NO: 208894 - DNA, 13 bp, Artificial Sequence
  Oligonucleotide for detection of SNP TSC0006015
tcttccgatatcc

SEQ ID NO: 208895 - DNA, 13 bp, Artificial Sequence
  Oligonucleotide for detection of SNP TSC0006015
ttttttggtgtty

SEQ ID NO: 208896 - DNA, 13 bp, Artificial Sequence
  Oligonucleotide for detection of SNP TSC0006015
raacaccaaaaaa

SEQ ID NO: 208897 - DNA, 13 bp, Artificial Sequence
  Oligonucleotide for detection of SNP TSC0006015
tttttcggtgtty

SEQ ID NO: 208898 - DNA, 13 bp, Artificial Sequence
  Oligonucleotide for detection of SNP TSC0006015
raacaccgaaaaa

SEQ ID NO: 208899 - DNA, 13 bp, Artificial Sequence
  Oligonucleotide for detection of SNP TSC0008319
attgtagtagtga

SEQ ID NO: 208900 - DNA, 13 bp, Artificial Sequence
  Oligonucleotide for detection of SNP TSC0008319
tcactactacaat

SEQ ID NO: 208901 - DNA, 13 bp, Artificial Sequence
  Oligonucleotide for detection of SNP TSC0008319
attgtaatagtga

SEQ ID NO: 208902 - DNA, 13 bp, Artificial Sequence
  Oligonucleotide for detection of SNP TSC0008319
tcactattacaat

SEQ ID NO: 208903 - DNA, 13 bp, Artificial Sequence
  Oligonucleotide for detection of SNP TSC0007531
gagtatatagtta

SEQ ID NO: 208904 - DNA, 13 bp, Artificial Sequence
  Oligonucleotide for detection of SNP TSC0007531
taactatatactc

SEQ ID NO: 208905 - DNA, 13 bp, Artificial Sequence
  Oligonucleotide for detection of SNP TSC0007531
gagtatgtagtta

SEQ ID NO: 208906 - DNA, 13 bp, Artificial Sequence
  Oligonucleotide for detection of SNP TSC0007531
taactacatactc

SEQ ID NO: 208907 - DNA, 13 bp, Artificial Sequence
  Oligonucleotide for detection of SNP TSC0007531
gagtacgtagtta

SEQ ID NO: 208908 - DNA, 13 bp, Artificial Sequence
  Oligonucleotide for detection of SNP TSC0007531
taactacgtactc

SEQ ID NO: 208909 - DNA, 13 bp, Artificial Sequence
  Oligonucleotide for detection of SNP TSC0007531
tagttatgtgtty

SEQ ID NO: 208910 - DNA, 13 bp, Artificial Sequence
  Oligonucleotide for detection of SNP TSC0007531
raacacataacta

SEQ ID NO: 208911 - DNA, 13 bp, Artificial Sequence
  Oligonucleotide for detection of SNP TSC0007531
tagttacgtgtty

SEQ ID NO: 208912 - DNA, 13 bp, Artificial Sequence
  Oligonucleotide for detection of SNP TSC0007531
raacacgtaacta

SEQ ID NO: 208913 - DNA, 13 bp, Artificial Sequence
  Oligonucleotide for detection of SNP TSC0051008
atatttattatty

SEQ ID NO: 208914 - DNA, 13 bp, Artificial Sequence
  Oligonucleotide for detection of SNP TSC0051008
raataataaatat

SEQ ID NO: 208915 - DNA, 13 bp, Artificial Sequence
  Oligonucleotide for detection of SNP TSC0051008
atattttttatty

SEQ ID NO: 208916 - DNA, 13 bp, Artificial Sequence
  Oligonucleotide for detection of SNP TSC0051008
raataaaaaatat

SEQ ID NO: 208917 - DNA, 13 bp, Artificial Sequence
  Oligonucleotide for detection of SNP TSC0051008
gaataataaatgt

SEQ ID NO: 208918 - DNA, 13 bp, Artificial Sequence
  Oligonucleotide for detection of SNP TSC0051008
acatttattattc

SEQ ID NO: 208919 - DNA, 13 bp, Artificial Sequence
  Oligonucleotide for detection of SNP TSC0051008
gaataagaaatgt

SEQ ID NO: 208920 - DNA, 13 bp, Artificial Sequence
  Oligonucleotide for detection of SNP TSC0051008
acatttcttattc

SEQ ID NO: 208921 - DNA, 13 bp, Artificial Sequence
  Oligonucleotide for detection of SNP TSC0051009
ttaggtagtaatt

SEQ ID NO: 208922 - DNA, 13 bp, Artificial Sequence
  Oligonucleotide for detection of SNP TSC0051009
aattactacctaa

SEQ ID NO: 208923 - DNA, 13 bp, Artificial Sequence
  Oligonucleotide for detection of SNP TSC0051009
ttaggtggtaatt

SEQ ID NO: 208924 - DNA, 13 bp, Artificial Sequence
  Oligonucleotide for detection of SNP TSC0051009
aattaccacctaa

SEQ ID NO: 208925 - DNA, 13 bp, Artificial Sequence
  Oligonucleotide for detection of SNP TSC0051010
gggtttgttattt

SEQ ID NO: 208926 - DNA, 13 bp, Artificial Sequence
  Oligonucleotide for detection of SNP TSC0051010
aaataacaaaccc

SEQ ID NO: 208927 - DNA, 13 bp, Artificial Sequence
  Oligonucleotide for detection of SNP TSC0051010
gggtttattattt

SEQ ID NO: 208928 - DNA, 13 bp, Artificial Sequence
  Oligonucleotide for detection of SNP TSC0051010
aaataataaaccc

SEQ ID NO: 208929 - DNA, 13 bp, Artificial Sequence
  Oligonucleotide for detection of SNP TSC0051014
aaataaaagtttt

SEQ ID NO: 208930 - DNA, 13 bp, Artificial Sequence
  Oligonucleotide for detection of SNP TSC0051014
aaaacttttattt

SEQ ID NO: 208931 - DNA, 13 bp, Artificial Sequence
  Oligonucleotide for detection of SNP TSC0051014
aaataagagtttt

SEQ ID NO: 208932 - DNA, 13 bp, Artificial Sequence
  Oligonucleotide for detection of SNP TSC0051014
aaaactcttattt

SEQ ID NO: 208933 - DNA, 13 bp, Artificial Sequence
  Oligonucleotide for detection of SNP TSC0051017
ttggaggggagtt

SEQ ID NO: 208934 - DNA, 13 bp, Artificial Sequence
  Oligonucleotide for detection of SNP TSC0051017
aactcccctccaa

SEQ ID NO: 208935 - DNA, 13 bp, Artificial Sequence
  Oligonucleotide for detection of SNP TSC0051017
ttggagaggagtt

SEQ ID NO: 208936 - DNA, 13 bp, Artificial Sequence
  Oligonucleotide for detection of SNP TSC0051017
aactcctctccaa

SEQ ID NO: 208937 - DNA, 13 bp, Artificial Sequence
  Oligonucleotide for detection of SNP TSC0051023
ttggataataaty

SEQ ID NO: 208938 - DNA, 13 bp, Artificial Sequence
  Oligonucleotide for detection of SNP TSC0051023
rattattatccaa

SEQ ID NO: 208939 - DNA, 13 bp, Artificial Sequence
  Oligonucleotide for detection of SNP TSC0051023
ttggattataaty

SEQ ID NO: 208940 - DNA, 13 bp, Artificial Sequence
  Oligonucleotide for detection of SNP TSC0051023
rattataatccaa

SEQ ID NO: 208941 - DNA, 13 bp, Artificial Sequence
  Oligonucleotide for detection of SNP TSC0051023
ggttgttgtttaa

SEQ ID NO: 208942 - DNA, 13 bp, Artificial Sequence
  Oligonucleotide for detection of SNP TSC0051023
ttaaacaacaacc

SEQ ID NO: 208943 - DNA, 13 bp, Artificial Sequence
  Oligonucleotide for detection of SNP TSC0051023
ggttgtagtttaa

SEQ ID NO: 208944 - DNA, 13 bp, Artificial Sequence
  Oligonucleotide for detection of SNP TSC0051023
ttaaactacaacc

SEQ ID NO: 208945 - DNA, 13 bp, Artificial Sequence
  Oligonucleotide for detection of SNP TSC0051025
ataaatgagatat

SEQ ID NO: 208946 - DNA, 13 bp, Artificial Sequence
  Oligonucleotide for detection of SNP TSC0051025
atatctcatttat

SEQ ID NO: 208947 - DNA, 13 bp, Artificial Sequence
  Oligonucleotide for detection of SNP TSC0051025
ataaattagatat

SEQ ID NO: 208948 - DNA, 13 bp, Artificial Sequence
  Oligonucleotide for detection of SNP TSC0051025
atatctaatttat

SEQ ID NO: 208949 - DNA, 13 bp, Artificial Sequence
  Oligonucleotide for detection of SNP TSC0051026
gtatgtgtaaaty

SEQ ID NO: 208950 - DNA, 13 bp, Artificial Sequence
  Oligonucleotide for detection of SNP TSC0051026
ratttacacatac

SEQ ID NO: 208951 - DNA, 13 bp, Artificial Sequence
  Oligonucleotide for detection of SNP TSC0051026
gtatgtataaaty

SEQ ID NO: 208952 - DNA, 13 bp, Artificial Sequence
  Oligonucleotide for detection of SNP TSC0051026
ratttatacatac

SEQ ID NO: 208953 - DNA, 13 bp, Artificial Sequence
  Oligonucleotide for detection of SNP TSC0051027
gttatatggttty

SEQ ID NO: 208954 - DNA, 13 bp, Artificial Sequence
  Oligonucleotide for detection of SNP TSC0051027
raaaccatataac

SEQ ID NO: 208955 - DNA, 13 bp, Artificial Sequence
  Oligonucleotide for detection of SNP TSC0051027
gttatagggttty

SEQ ID NO: 208956 - DNA, 13 bp, Artificial Sequence
  Oligonucleotide for detection of SNP TSC0051027
raaaccctataac

SEQ ID NO: 208957 - DNA, 13 bp, Artificial Sequence
  Oligonucleotide for detection of SNP TSC0051027
gaagttttgtggy

SEQ ID NO: 208958 - DNA, 13 bp, Artificial Sequence
  Oligonucleotide for detection of SNP TSC0051027
rccacaaaacttc

SEQ ID NO: 208959 - DNA, 13 bp, Artificial Sequence
  Oligonucleotide for detection of SNP TSC0051028
ttttattatgatg

SEQ ID NO: 208960 - DNA, 13 bp, Artificial Sequence
  Oligonucleotide for detection of SNP TSC0051028
catcataataaaa

SEQ ID NO: 208961 - DNA, 13 bp, Artificial Sequence
  Oligonucleotide for detection of SNP TSC0051028
ttttatgatgatg

SEQ ID NO: 208962 - DNA, 13 bp, Artificial Sequence
  Oligonucleotide for detection of SNP TSC0051028
catcatcataaaa

SEQ ID NO: 208963 - DNA, 13 bp, Artificial Sequence
  Oligonucleotide for detection of SNP TSC0051028
tattatgatgaaa

SEQ ID NO: 208964 - DNA, 13 bp, Artificial Sequence
  Oligonucleotide for detection of SNP TSC0051028
tttcatcataata

SEQ ID NO: 208965 - DNA, 13 bp, Artificial Sequence
  Oligonucleotide for detection of SNP TSC0051028
tattattatgaaa

SEQ ID NO: 208966 - DNA, 13 bp, Artificial Sequence
  Oligonucleotide for detection of SNP TSC0051028
tttcataataata

SEQ ID NO: 208967 - DNA, 13 bp, Artificial Sequence
  Oligonucleotide for detection of SNP TSC0051032
ggaagtattttag

SEQ ID NO: 208968 - DNA, 13 bp, Artificial Sequence
  Oligonucleotide for detection of SNP TSC0051032
ctaaaatacttcc

SEQ ID NO: 208969 - DNA, 13 bp, Artificial Sequence
  Oligonucleotide for detection of SNP TSC0051032
ggaagtgttttag

SEQ ID NO: 208970 - DNA, 13 bp, Artificial Sequence
  Oligonucleotide for detection of SNP TSC0051032
ctaaaacacttcc

SEQ ID NO: 208971 - DNA, 13 bp, Artificial Sequence
  Oligonucleotide for detection of SNP TSC0051034
gatattgaaataa

SEQ ID NO: 208972 - DNA, 13 bp, Artificial Sequence
  Oligonucleotide for detection of SNP TSC0051034
ttatttcaatatc

SEQ ID NO: 208973 - DNA, 13 bp, Artificial Sequence
  Oligonucleotide for detection of SNP TSC0051034
gatattaaaataa

SEQ ID NO: 208974 - DNA, 13 bp, Artificial Sequence
  Oligonucleotide for detection of SNP TSC0051034
ttattttaatatc

SEQ ID NO: 208975 - DNA, 13 bp, Artificial Sequence
  Oligonucleotide for detection of SNP TSC0051035
gtttagtttggty

SEQ ID NO: 208976 - DNA, 13 bp, Artificial Sequence
  Oligonucleotide for detection of SNP TSC0051035
raccaaactaaac

SEQ ID NO: 208977 - DNA, 13 bp, Artificial Sequence
  Oligonucleotide for detection of SNP TSC0051035
ggttaggttgggy

SEQ ID NO: 208978 - DNA, 13 bp, Artificial Sequence
  Oligonucleotide for detection of SNP TSC0051035
rcccaacctaacc

SEQ ID NO: 208979 - DNA, 13 bp, Artificial Sequence
  Oligonucleotide for detection of SNP TSC0051036
tataaagaaaaag

SEQ ID NO: 208980 - DNA, 13 bp, Artificial Sequence
  Oligonucleotide for detection of SNP TSC0051036
ctttttctttata

SEQ ID NO: 208981 - DNA, 13 bp, Artificial Sequence
  Oligonucleotide for detection of SNP TSC0051036
tataaaaaaaaag

SEQ ID NO: 208982 - DNA, 13 bp, Artificial Sequence
  Oligonucleotide for detection of SNP TSC0051036
ctttttttttata

SEQ ID NO: 208983 - DNA, 13 bp, Artificial Sequence
  Oligonucleotide for detection of SNP TSC0051037
tttattatggtta

SEQ ID NO: 208984 - DNA, 13 bp, Artificial Sequence
  Oligonucleotide for detection of SNP TSC0051037
taaccataataaa

SEQ ID NO: 208985 - DNA, 13 bp, Artificial Sequence
  Oligonucleotide for detection of SNP TSC0051037
tttatcgtggtta

SEQ ID NO: 208986 - DNA, 13 bp, Artificial Sequence
  Oligonucleotide for detection of SNP TSC0051037
taaccacgataaa

SEQ ID NO: 208987 - DNA, 13 bp, Artificial Sequence
  Oligonucleotide for detection of SNP TSC0051038
ttattaatgttat

SEQ ID NO: 208988 - DNA, 13 bp, Artificial Sequence
  Oligonucleotide for detection of SNP TSC0051038
ataacattaataa

SEQ ID NO: 208989 - DNA, 13 bp, Artificial Sequence
  Oligonucleotide for detection of SNP TSC0051038
ttattagtgttat

SEQ ID NO: 208990 - DNA, 13 bp, Artificial Sequence
  Oligonucleotide for detection of SNP TSC0051038
ataacactaataa

SEQ ID NO: 208991 - DNA, 13 bp, Artificial Sequence
  Oligonucleotide for detection of SNP TSC0051039
ggattttagtaty

SEQ ID NO: 208992 - DNA, 13 bp, Artificial Sequence
  Oligonucleotide for detection of SNP TSC0051039
ratactaaaatcc

SEQ ID NO: 208993 - DNA, 13 bp, Artificial Sequence
  Oligonucleotide for detection of SNP TSC0051039
ggatttgagtaty

SEQ ID NO: 208994 - DNA, 13 bp, Artificial Sequence
  Oligonucleotide for detection of SNP TSC0051039
ratactcaaatcc

SEQ ID NO: 208995 - DNA, 13 bp, Artificial Sequence
  Oligonucleotide for detection of SNP TSC0051039
ggtattaaagtty

SEQ ID NO: 208996 - DNA, 13 bp, Artificial Sequence
  Oligonucleotide for detection of SNP TSC0051039
raactttaatacc

SEQ ID NO: 208997 - DNA, 13 bp, Artificial Sequence
  Oligonucleotide for detection of SNP TSC0051039
ggtatttaagtty

SEQ ID NO: 208998 - DNA, 13 bp, Artificial Sequence
  Oligonucleotide for detection of SNP TSC0051039
raacttaaatacc

SEQ ID NO: 208999 - DNA, 13 bp, Artificial Sequence
  Oligonucleotide for detection of SNP TSC0051040
attgatgaaggaa

SEQ ID NO: 209000 - DNA, 13 bp, Artificial Sequence
  Oligonucleotide for detection of SNP TSC0051040
ttccttcatcaat

SEQ ID NO: 209001 - DNA, 13 bp, Artificial Sequence
  Oligonucleotide for detection of SNP TSC0051040
attgataaaggaa

SEQ ID NO: 209002 - DNA, 13 bp, Artificial Sequence
  Oligonucleotide for detection of SNP TSC0051040
ttcctttatcaat

SEQ ID NO: 209003 - DNA, 13 bp, Artificial Sequence
  Oligonucleotide for detection of SNP TSC0051043
tatttaatgtaag

SEQ ID NO: 209004 - DNA, 13 bp, Artificial Sequence
  Oligonucleotide for detection of SNP TSC0051043
cttacattaaata

SEQ ID NO: 209005 - DNA, 13 bp, Artificial Sequence
  Oligonucleotide for detection of SNP TSC0051043
tatttagtgtaag

SEQ ID NO: 209006 - DNA, 13 bp, Artificial Sequence
  Oligonucleotide for detection of SNP TSC0051043
cttacactaaata

SEQ ID NO: 209007 - DNA, 13 bp, Artificial Sequence
  Oligonucleotide for detection of SNP TSC0051044
agaatgatgttay

SEQ ID NO: 209008 - DNA, 13 bp, Artificial Sequence
  Oligonucleotide for detection of SNP TSC0051044
rtaacatcattct

SEQ ID NO: 209009 - DNA, 13 bp, Artificial Sequence
  Oligonucleotide for detection of SNP TSC0051044
agaatgttgttay

SEQ ID NO: 209010 - DNA, 13 bp, Artificial Sequence
  Oligonucleotide for detection of SNP TSC0051044
rtaacaacattct

SEQ ID NO: 209011 - DNA, 13 bp, Artificial Sequence
  Oligonucleotide for detection of SNP TSC0051044
gtgatattatttt

SEQ ID NO: 209012 - DNA, 13 bp, Artificial Sequence
  Oligonucleotide for detection of SNP TSC0051044
aaaataatatcac

SEQ ID NO: 209013 - DNA, 13 bp, Artificial Sequence
  Oligonucleotide for detection of SNP TSC0051044
gtgatagtatttt

SEQ ID NO: 209014 - DNA, 13 bp, Artificial Sequence
  Oligonucleotide for detection of SNP TSC0051044
aaaatactatcac

SEQ ID NO: 209015 - DNA, 13 bp, Artificial Sequence
  Oligonucleotide for detection of SNP TSC0051045
gttatgaaagtaa

SEQ ID NO: 209016 - DNA, 13 bp, Artificial Sequence
  Oligonucleotide for detection of SNP TSC0051045
ttactttcataac

SEQ ID NO: 209017 - DNA, 13 bp, Artificial Sequence
  Oligonucleotide for detection of SNP TSC0051045
gttatggaagtaa

SEQ ID NO: 209018 - DNA, 13 bp, Artificial Sequence
  Oligonucleotide for detection of SNP TSC0051045
ttacttccataac

SEQ ID NO: 209019 - DNA, 13 bp, Artificial Sequence
  Oligonucleotide for detection of SNP TSC0051046
tttgtaatgagaa

SEQ ID NO: 209020 - DNA, 13 bp, Artificial Sequence
  Oligonucleotide for detection of SNP TSC0051046
ttctcattacaaa

SEQ ID NO: 209021 - DNA, 13 bp, Artificial Sequence
  Oligonucleotide for detection of SNP TSC0051046
tttgtagtgagaa

SEQ ID NO: 209022 - DNA, 13 bp, Artificial Sequence
  Oligonucleotide for detection of SNP TSC0051046
ttctcactacaaa

SEQ ID NO: 209023 - DNA, 13 bp, Artificial Sequence
  Oligonucleotide for detection of SNP TSC0051048
gtgttttgattay

SEQ ID NO: 209024 - DNA, 13 bp, Artificial Sequence
  Oligonucleotide for detection of SNP TSC0051048
rtaatcaaaacac

SEQ ID NO: 209025 - DNA, 13 bp, Artificial Sequence
  Oligonucleotide for detection of SNP TSC0051048
gtgtttcgattay

SEQ ID NO: 209026 - DNA, 13 bp, Artificial Sequence
  Oligonucleotide for detection of SNP TSC0051048
rtaatcgaaacac

SEQ ID NO: 209027 - DNA, 13 bp, Artificial Sequence
  Oligonucleotide for detection of SNP TSC0051048
gtaattggaatay

SEQ ID NO: 209028 - DNA, 13 bp, Artificial Sequence
  Oligonucleotide for detection of SNP TSC0051048
rtattccaattac

SEQ ID NO: 209029 - DNA, 13 bp, Artificial Sequence
  Oligonucleotide for detection of SNP TSC0051048
gtaattagaatay

SEQ ID NO: 209030 - DNA, 13 bp, Artificial Sequence
  Oligonucleotide for detection of SNP TSC0051048
rtattctaattac

SEQ ID NO: 209031 - DNA, 13 bp, Artificial Sequence
  Oligonucleotide for detection of SNP TSC0051048
gtaatcggaatay

SEQ ID NO: 209032 - DNA, 13 bp, Artificial Sequence
  Oligonucleotide for detection of SNP TSC0051048
rtattccgattac

SEQ ID NO: 209033 - DNA, 13 bp, Artificial Sequence
  Oligonucleotide for detection of SNP TSC0051049
ataataatgttat

SEQ ID NO: 209034 - DNA, 13 bp, Artificial Sequence
  Oligonucleotide for detection of SNP TSC0051049
ataacattattat

SEQ ID NO: 209035 - DNA, 13 bp, Artificial Sequence
  Oligonucleotide for detection of SNP TSC0051049
ataatattgttat

SEQ ID NO: 209036 - DNA, 13 bp, Artificial Sequence
  Oligonucleotide for detection of SNP TSC0051049
ataacaatattat

SEQ ID NO: 209037 - DNA, 13 bp, Artificial Sequence
  Oligonucleotide for detection of SNP TSC0051049
atggtattgttgt

SEQ ID NO: 209038 - DNA, 13 bp, Artificial Sequence
  Oligonucleotide for detection of SNP TSC0051049
acaacaataccat

SEQ ID NO: 209039 - DNA, 13 bp, Artificial Sequence
  Oligonucleotide for detection of SNP TSC0051049
atggtaatgttgt

SEQ ID NO: 209040 - DNA, 13 bp, Artificial Sequence
  Oligonucleotide for detection of SNP TSC0051049
acaacattaccat

SEQ ID NO: 209041 - DNA, 13 bp, Artificial Sequence
  Oligonucleotide for detection of SNP TSC0051050
agtagatatatgg

SEQ ID NO: 209042 - DNA, 13 bp, Artificial Sequence
  Oligonucleotide for detection of SNP TSC0051050
ccatatatctact

SEQ ID NO: 209043 - DNA, 13 bp, Artificial Sequence
  Oligonucleotide for detection of SNP TSC0051050
agtagagatatgg

SEQ ID NO: 209044 - DNA, 13 bp, Artificial Sequence
  Oligonucleotide for detection of SNP TSC0051050
ccatatctctact

SEQ ID NO: 209045 - DNA, 13 bp, Artificial Sequence
  Oligonucleotide for detection of SNP TSC0051054
gtttttattaatt

SEQ ID NO: 209046 - DNA, 13 bp, Artificial Sequence
  Oligonucleotide for detection of SNP TSC0051054
aattaataaaaac

SEQ ID NO: 209047 - DNA, 13 bp, Artificial Sequence
  Oligonucleotide for detection of SNP TSC0051054
agttagtggaaay

SEQ ID NO: 209048 - DNA, 13 bp, Artificial Sequence
  Oligonucleotide for detection of SNP TSC0051054
rtttccactaact

SEQ ID NO: 209049 - DNA, 13 bp, Artificial Sequence
  Oligonucleotide for detection of SNP TSC0051054
agttagcggaaay

SEQ ID NO: 209050 - DNA, 13 bp, Artificial Sequence
  Oligonucleotide for detection of SNP TSC0051054
rtttccgctaact

SEQ ID NO: 209051 - DNA, 13 bp, Artificial Sequence
  Oligonucleotide for detection of SNP TSC0051056
gaattaattttay

SEQ ID NO: 209052 - DNA, 13 bp, Artificial Sequence
  Oligonucleotide for detection of SNP TSC0051056
rtaaaattaattc

SEQ ID NO: 209053 - DNA, 13 bp, Artificial Sequence
  Oligonucleotide for detection of SNP TSC0051056
gaattatttttay

SEQ ID NO: 209054 - DNA, 13 bp, Artificial Sequence
  Oligonucleotide for detection of SNP TSC0051056
rtaaaaataattc

SEQ ID NO: 209055 - DNA, 13 bp, Artificial Sequence
  Oligonucleotide for detection of SNP TSC0051056
gtaaaattaatty

SEQ ID NO: 209056 - DNA, 13 bp, Artificial Sequence
  Oligonucleotide for detection of SNP TSC0051056
raattaattttac

SEQ ID NO: 209057 - DNA, 13 bp, Artificial Sequence
  Oligonucleotide for detection of SNP TSC0051056
gtaaaagtaatty

SEQ ID NO: 209058 - DNA, 13 bp, Artificial Sequence
  Oligonucleotide for detection of SNP TSC0051056
raattacttttac

SEQ ID NO: 209059 - DNA, 13 bp, Artificial Sequence
  Oligonucleotide for detection of SNP TSC0051066
tagtgtagatttg

SEQ ID NO: 209060 - DNA, 13 bp, Artificial Sequence
  Oligonucleotide for detection of SNP TSC0051066
caaatctacacta

SEQ ID NO: 209061 - DNA, 13 bp, Artificial Sequence
  Oligonucleotide for detection of SNP TSC0051066
tagtgtggatttg

SEQ ID NO: 209062 - DNA, 13 bp, Artificial Sequence
  Oligonucleotide for detection of SNP TSC0051066
caaatccacacta

SEQ ID NO: 209063 - DNA, 13 bp, Artificial Sequence
  Oligonucleotide for detection of SNP TSC0051066
tagtgcggatttg

SEQ ID NO: 209064 - DNA, 13 bp, Artificial Sequence
  Oligonucleotide for detection of SNP TSC0051066
caaatccgcacta

SEQ ID NO: 209065 - DNA, 13 bp, Artificial Sequence
  Oligonucleotide for detection of SNP TSC0051066
tagatttgtatta

SEQ ID NO: 209066 - DNA, 13 bp, Artificial Sequence
  Oligonucleotide for detection of SNP TSC0051066
taatacaaatcta

SEQ ID NO: 209067 - DNA, 13 bp, Artificial Sequence
  Oligonucleotide for detection of SNP TSC0051066
tagattcgtatta

SEQ ID NO: 209068 - DNA, 13 bp, Artificial Sequence
  Oligonucleotide for detection of SNP TSC0051066
taatacgaatcta

SEQ ID NO: 209069 - DNA, 13 bp, Artificial Sequence
  Oligonucleotide for detection of SNP TSC0051067
aatgtatgtgtty

SEQ ID NO: 209070 - DNA, 13 bp, Artificial Sequence
  Oligonucleotide for detection of SNP TSC0051067
raacacatacatt

SEQ ID NO: 209071 - DNA, 13 bp, Artificial Sequence
  Oligonucleotide for detection of SNP TSC0051067
aatgtaggtgtty

SEQ ID NO: 209072 - DNA, 13 bp, Artificial Sequence
  Oligonucleotide for detection of SNP TSC0051067
raacacctacatt

SEQ ID NO: 209073 - DNA, 13 bp, Artificial Sequence
  Oligonucleotide for detection of SNP TSC0051067
aatgtacgtgtty

SEQ ID NO: 209074 - DNA, 13 bp, Artificial Sequence
  Oligonucleotide for detection of SNP TSC0051067
raacacgtacatt

SEQ ID NO: 209075 - DNA, 13 bp, Artificial Sequence
  Oligonucleotide for detection of SNP TSC0051067
gggtatgtgtatt

SEQ ID NO: 209076 - DNA, 13 bp, Artificial Sequence
  Oligonucleotide for detection of SNP TSC0051067
aatacacataccc

SEQ ID NO: 209077 - DNA, 13 bp, Artificial Sequence
  Oligonucleotide for detection of SNP TSC0051067
gggtatttgtatt

SEQ ID NO: 209078 - DNA, 13 bp, Artificial Sequence
  Oligonucleotide for detection of SNP TSC0051067
aatacaaataccc

SEQ ID NO: 209079 - DNA, 13 bp, Artificial Sequence
  Oligonucleotide for detection of SNP TSC0051067
gggtacgtgtatt

SEQ ID NO: 209080 - DNA, 13 bp, Artificial Sequence
  Oligonucleotide for detection of SNP TSC0051067
aatacacgtaccc

SEQ ID NO: 209081 - DNA, 13 bp, Artificial Sequence
  Oligonucleotide for detection of SNP TSC0051068
gttgaaatgtatg

SEQ ID NO: 209082 - DNA, 13 bp, Artificial Sequence
  Oligonucleotide for detection of SNP TSC0051068
catacatttcaac

SEQ ID NO: 209083 - DNA, 13 bp, Artificial Sequence
  Oligonucleotide for detection of SNP TSC0051068
gttgaattgtatg

SEQ ID NO: 209084 - DNA, 13 bp, Artificial Sequence
  Oligonucleotide for detection of SNP TSC0051068
catacaattcaac

SEQ ID NO: 209085 - DNA, 13 bp, Artificial Sequence
  Oligonucleotide for detection of SNP TSC0051068
tatgtattttaay

SEQ ID NO: 209086 - DNA, 13 bp, Artificial Sequence
  Oligonucleotide for detection of SNP TSC0051068
rttaaaatacata

SEQ ID NO: 209087 - DNA, 13 bp, Artificial Sequence
  Oligonucleotide for detection of SNP TSC0051068
tatgtaatttaay

SEQ ID NO: 209088 - DNA, 13 bp, Artificial Sequence
  Oligonucleotide for detection of SNP TSC0051068
rttaaattacata

SEQ ID NO: 209089 - DNA, 13 bp, Artificial Sequence
  Oligonucleotide for detection of SNP TSC0051070
gtttgataataaa

SEQ ID NO: 209090 - DNA, 13 bp, Artificial Sequence
  Oligonucleotide for detection of SNP TSC0051070
tttattatcaaac

SEQ ID NO: 209091 - DNA, 13 bp, Artificial Sequence
  Oligonucleotide for detection of SNP TSC0051070
gtttgagaataaa

SEQ ID NO: 209092 - DNA, 13 bp, Artificial Sequence
  Oligonucleotide for detection of SNP TSC0051070
tttattctcaaac

SEQ ID NO: 209093 - DNA, 13 bp, Artificial Sequence
  Oligonucleotide for detection of SNP TSC0051070
tttgttattaggy

SEQ ID NO: 209094 - DNA, 13 bp, Artificial Sequence
  Oligonucleotide for detection of SNP TSC0051070
rcctaataacaaa

SEQ ID NO: 209095 - DNA, 13 bp, Artificial Sequence
  Oligonucleotide for detection of SNP TSC0051070
tttgtttttaggy

SEQ ID NO: 209096 - DNA, 13 bp, Artificial Sequence
  Oligonucleotide for detection of SNP TSC0051070
rcctaaaaacaaa

SEQ ID NO: 209097 - DNA, 13 bp, Artificial Sequence
  Oligonucleotide for detection of SNP TSC0051072
atttagaaggata

SEQ ID NO: 209098 - DNA, 13 bp, Artificial Sequence
  Oligonucleotide for detection of SNP TSC0051072
tatccttctaaat

SEQ ID NO: 209099 - DNA, 13 bp, Artificial Sequence
  Oligonucleotide for detection of SNP TSC0051072
atttagtaggata

SEQ ID NO: 209100 - DNA, 13 bp, Artificial Sequence
  Oligonucleotide for detection of SNP TSC0051072
tatcctactaaat

SEQ ID NO: 209101 - DNA, 13 bp, Artificial Sequence
  Oligonucleotide for detection of SNP TSC0051072
tgtttttttgggt

SEQ ID NO: 209102 - DNA, 13 bp, Artificial Sequence
  Oligonucleotide for detection of SNP TSC0051072
acccaaaaaaaca

SEQ ID NO: 209103 - DNA, 13 bp, Artificial Sequence
  Oligonucleotide for detection of SNP TSC0051072
tgttttgttgggt

SEQ ID NO: 209104 - DNA, 13 bp, Artificial Sequence
  Oligonucleotide for detection of SNP TSC0051072
acccaacaaaaca

SEQ ID NO: 209105 - DNA, 13 bp, Artificial Sequence
  Oligonucleotide for detection of SNP TSC0051073
taaggttatttag

SEQ ID NO: 209106 - DNA, 13 bp, Artificial Sequence
  Oligonucleotide for detection of SNP TSC0051073
ctaaataacctta

SEQ ID NO: 209107 - DNA, 13 bp, Artificial Sequence
  Oligonucleotide for detection of SNP TSC0051073
taaggtgatttag

SEQ ID NO: 209108 - DNA, 13 bp, Artificial Sequence
  Oligonucleotide for detection of SNP TSC0051073
ctaaatcacctta

SEQ ID NO: 209109 - DNA, 13 bp, Artificial Sequence
  Oligonucleotide for detection of SNP TSC0051073
ttgagtgattttg

SEQ ID NO: 209110 - DNA, 13 bp, Artificial Sequence
  Oligonucleotide for detection of SNP TSC0051073
caaaatcactcaa

SEQ ID NO: 209111 - DNA, 13 bp, Artificial Sequence
  Oligonucleotide for detection of SNP TSC0051073
ttgagttattttg

SEQ ID NO: 209112 - DNA, 13 bp, Artificial Sequence
  Oligonucleotide for detection of SNP TSC0051073
caaaataactcaa

SEQ ID NO: 209113 - DNA, 13 bp, Artificial Sequence
  Oligonucleotide for detection of SNP TSC0051074
gattgagttagaa

SEQ ID NO: 209114 - DNA, 13 bp, Artificial Sequence
  Oligonucleotide for detection of SNP TSC0051074
ttctaactcaatc

SEQ ID NO: 209115 - DNA, 13 bp, Artificial Sequence
  Oligonucleotide for detection of SNP TSC0051074
gattgaattagaa

SEQ ID NO: 209116 - DNA, 13 bp, Artificial Sequence
  Oligonucleotide for detection of SNP TSC0051074
ttctaattcaatc

SEQ ID NO: 209117 - DNA, 13 bp, Artificial Sequence
  Oligonucleotide for detection of SNP TSC0051075
ttatttattagga

SEQ ID NO: 209118 - DNA, 13 bp, Artificial Sequence
  Oligonucleotide for detection of SNP TSC0051075
tcctaataaataa

SEQ ID NO: 209119 - DNA, 13 bp, Artificial Sequence
  Oligonucleotide for detection of SNP TSC0051075
ttatttgttagga

SEQ ID NO: 209120 - DNA, 13 bp, Artificial Sequence
  Oligonucleotide for detection of SNP TSC0051075
tcctaacaaataa

SEQ ID NO: 209121 - DNA, 13 bp, Artificial Sequence
  Oligonucleotide for detection of SNP TSC0051076
ggaggtaatgtta

SEQ ID NO: 209122 - DNA, 13 bp, Artificial Sequence
  Oligonucleotide for detection of SNP TSC0051076
taacattacctcc

SEQ ID NO: 209123 - DNA, 13 bp, Artificial Sequence
  Oligonucleotide for detection of SNP TSC0051076
tgatattgtttty

SEQ ID NO: 209124 - DNA, 13 bp, Artificial Sequence
  Oligonucleotide for detection of SNP TSC0051076
raaaacaatatca

SEQ ID NO: 209125 - DNA, 13 bp, Artificial Sequence
  Oligonucleotide for detection of SNP TSC0051076
tgatatcgtttty

SEQ ID NO: 209126 - DNA, 13 bp, Artificial Sequence
  Oligonucleotide for detection of SNP TSC0051076
raaaacgatatca

SEQ ID NO: 209127 - DNA, 13 bp, Artificial Sequence
  Oligonucleotide for detection of SNP TSC0051078
tgtttggtttata

SEQ ID NO: 209128 - DNA, 13 bp, Artificial Sequence
  Oligonucleotide for detection of SNP TSC0051078
tataaaccaaaca

SEQ ID NO: 209129 - DNA, 13 bp, Artificial Sequence
  Oligonucleotide for detection of SNP TSC0051078
tgtttgatttata

SEQ ID NO: 209130 - DNA, 13 bp, Artificial Sequence
  Oligonucleotide for detection of SNP TSC0051078
tataaatcaaaca

SEQ ID NO: 209131 - DNA, 13 bp, Artificial Sequence
  Oligonucleotide for detection of SNP TSC0051080
gttttatgtggaa

SEQ ID NO: 209132 - DNA, 13 bp, Artificial Sequence
  Oligonucleotide for detection of SNP TSC0051080
ttccacataaaac

SEQ ID NO: 209133 - DNA, 13 bp, Artificial Sequence
  Oligonucleotide for detection of SNP TSC0051080
gttttaggtggaa

SEQ ID NO: 209134 - DNA, 13 bp, Artificial Sequence
  Oligonucleotide for detection of SNP TSC0051080
ttccacctaaaac

SEQ ID NO: 209135 - DNA, 13 bp, Artificial Sequence
  Oligonucleotide for detection of SNP TSC0051080
ttttatatgaagy

SEQ ID NO: 209136 - DNA, 13 bp, Artificial Sequence
  Oligonucleotide for detection of SNP TSC0051080
rcttcatataaaa

SEQ ID NO: 209137 - DNA, 13 bp, Artificial Sequence
  Oligonucleotide for detection of SNP TSC0051080
ttttatttgaagy

SEQ ID NO: 209138 - DNA, 13 bp, Artificial Sequence
  Oligonucleotide for detection of SNP TSC0051080
rcttcaaataaaa

SEQ ID NO: 209139 - DNA, 13 bp, Artificial Sequence
  Oligonucleotide for detection of SNP TSC0051081
gggtttaaagatt

SEQ ID NO: 209140 - DNA, 13 bp, Artificial Sequence
  Oligonucleotide for detection of SNP TSC0051081
aatctttaaaccc

SEQ ID NO: 209141 - DNA, 13 bp, Artificial Sequence
  Oligonucleotide for detection of SNP TSC0051081
gggttttaagatt

SEQ ID NO: 209142 - DNA, 13 bp, Artificial Sequence
  Oligonucleotide for detection of SNP TSC0051081
aatcttaaaaccc

SEQ ID NO: 209143 - DNA, 13 bp, Artificial Sequence
  Oligonucleotide for detection of SNP TSC0051081
agttttaagatty

SEQ ID NO: 209144 - DNA, 13 bp, Artificial Sequence
  Oligonucleotide for detection of SNP TSC0051081
raatcttaaaact

SEQ ID NO: 209145 - DNA, 13 bp, Artificial Sequence
  Oligonucleotide for detection of SNP TSC0051084
ttacgaagtttaa

SEQ ID NO: 209146 - DNA, 13 bp, Artificial Sequence
  Oligonucleotide for detection of SNP TSC0051084
ttaaacttcgtaa

SEQ ID NO: 209147 - DNA, 13 bp, Artificial Sequence
  Oligonucleotide for detection of SNP TSC0051084
ttacgatgtttaa

SEQ ID NO: 209148 - DNA, 13 bp, Artificial Sequence
  Oligonucleotide for detection of SNP TSC0051084
ttaaacatcgtaa

SEQ ID NO: 209149 - DNA, 13 bp, Artificial Sequence
  Oligonucleotide for detection of SNP TSC0051084
ttggattttgtaa

SEQ ID NO: 209150 - DNA, 13 bp, Artificial Sequence
  Oligonucleotide for detection of SNP TSC0051084
ttacaaaatccaa

SEQ ID NO: 209151 - DNA, 13 bp, Artificial Sequence
  Oligonucleotide for detection of SNP TSC0051084
ttggatattgtaa

SEQ ID NO: 209152 - DNA, 13 bp, Artificial Sequence
  Oligonucleotide for detection of SNP TSC0051084
ttacaatatccaa

SEQ ID NO: 209153 - DNA, 13 bp, Artificial Sequence
  Oligonucleotide for detection of SNP TSC0051084
ttggatttcgtaa

SEQ ID NO: 209154 - DNA, 13 bp, Artificial Sequence
  Oligonucleotide for detection of SNP TSC0051084
ttacgaaatccaa

SEQ ID NO: 209155 - DNA, 13 bp, Artificial Sequence
  Oligonucleotide for detection of SNP TSC0051084
ttggatatcgtaa

SEQ ID NO: 209156 - DNA, 13 bp, Artificial Sequence
  Oligonucleotide for detection of SNP TSC0051084
ttacgatatccaa

SEQ ID NO: 209157 - DNA, 13 bp, Artificial Sequence
  Oligonucleotide for detection of SNP TSC0051085
tataggattaaat

SEQ ID NO: 209158 - DNA, 13 bp, Artificial Sequence
  Oligonucleotide for detection of SNP TSC0051085
atttaatcctata

SEQ ID NO: 209159 - DNA, 13 bp, Artificial Sequence
  Oligonucleotide for detection of SNP TSC0051085
tataggtttaaat

SEQ ID NO: 209160 - DNA, 13 bp, Artificial Sequence
  Oligonucleotide for detection of SNP TSC0051085
atttaaacctata

SEQ ID NO: 209161 - DNA, 13 bp, Artificial Sequence
  Oligonucleotide for detection of SNP TSC0051085
atttagttttata

SEQ ID NO: 209162 - DNA, 13 bp, Artificial Sequence
  Oligonucleotide for detection of SNP TSC0051085
tataaaactaaat

SEQ ID NO: 209163 - DNA, 13 bp, Artificial Sequence
  Oligonucleotide for detection of SNP TSC0051085
atttagatttata

SEQ ID NO: 209164 - DNA, 13 bp, Artificial Sequence
  Oligonucleotide for detection of SNP TSC0051085
tataaatctaaat

SEQ ID NO: 209165 - DNA, 13 bp, Artificial Sequence
  Oligonucleotide for detection of SNP TSC0051086
ggaaggagatttt

SEQ ID NO: 209166 - DNA, 13 bp, Artificial Sequence
  Oligonucleotide for detection of SNP TSC0051086
aaaatctccttcc

SEQ ID NO: 209167 - DNA, 13 bp, Artificial Sequence
  Oligonucleotide for detection of SNP TSC0051086
ggaaggggatttt

SEQ ID NO: 209168 - DNA, 13 bp, Artificial Sequence
  Oligonucleotide for detection of SNP TSC0051086
aaaatccccttcc

SEQ ID NO: 209169 - DNA, 13 bp, Artificial Sequence
  Oligonucleotide for detection of SNP TSC0051088
atttgggagttag

SEQ ID NO: 209170 - DNA, 13 bp, Artificial Sequence
  Oligonucleotide for detection of SNP TSC0051088
ctaactcccaaat

SEQ ID NO: 209171 - DNA, 13 bp, Artificial Sequence
  Oligonucleotide for detection of SNP TSC0051088
atttggaagttag

SEQ ID NO: 209172 - DNA, 13 bp, Artificial Sequence
  Oligonucleotide for detection of SNP TSC0051088
ctaacttccaaat

SEQ ID NO: 209173 - DNA, 13 bp, Artificial Sequence
  Oligonucleotide for detection of SNP TSC0006526
ggaaaagagagay

SEQ ID NO: 209174 - DNA, 13 bp, Artificial Sequence
  Oligonucleotide for detection of SNP TSC0006526
rtctctcttttcc

SEQ ID NO: 209175 - DNA, 13 bp, Artificial Sequence
  Oligonucleotide for detection of SNP TSC0006526
ggaaaaaagagay

SEQ ID NO: 209176 - DNA, 13 bp, Artificial Sequence
  Oligonucleotide for detection of SNP TSC0006526
rtctcttttttcc

SEQ ID NO: 209177 - DNA, 13 bp, Artificial Sequence
  Oligonucleotide for detection of SNP TSC0005284
tttttatggtaga

SEQ ID NO: 209178 - DNA, 13 bp, Artificial Sequence
  Oligonucleotide for detection of SNP TSC0005284
tctaccataaaaa

SEQ ID NO: 209179 - DNA, 13 bp, Artificial Sequence
  Oligonucleotide for detection of SNP TSC0005284
tttttagggtaga

SEQ ID NO: 209180 - DNA, 13 bp, Artificial Sequence
  Oligonucleotide for detection of SNP TSC0005284
tctaccctaaaaa

SEQ ID NO: 209181 - DNA, 13 bp, Artificial Sequence
  Oligonucleotide for detection of SNP TSC0005284
tttgttatagaag

SEQ ID NO: 209182 - DNA, 13 bp, Artificial Sequence
  Oligonucleotide for detection of SNP TSC0005284
cttctataacaaa

SEQ ID NO: 209183 - DNA, 13 bp, Artificial Sequence
  Oligonucleotide for detection of SNP TSC0005284
tttgttttagaag

SEQ ID NO: 209184 - DNA, 13 bp, Artificial Sequence
  Oligonucleotide for detection of SNP TSC0005284
cttctaaaacaaa

SEQ ID NO: 209185 - DNA, 13 bp, Artificial Sequence
  Oligonucleotide for detection of SNP TSC0005285
aatgataatttty

SEQ ID NO: 209186 - DNA, 13 bp, Artificial Sequence
  Oligonucleotide for detection of SNP TSC0005285
raaaattatcatt

SEQ ID NO: 209187 - DNA, 13 bp, Artificial Sequence
  Oligonucleotide for detection of SNP TSC0005285
aatgatgatttty

SEQ ID NO: 209188 - DNA, 13 bp, Artificial Sequence
  Oligonucleotide for detection of SNP TSC0005285
raaaatcatcatt

SEQ ID NO: 209189 - DNA, 13 bp, Artificial Sequence
  Oligonucleotide for detection of SNP TSC0005285
aatgacgatttty

SEQ ID NO: 209190 - DNA, 13 bp, Artificial Sequence
  Oligonucleotide for detection of SNP TSC0005285
raaaatcgtcatt

SEQ ID NO: 209191 - DNA, 13 bp, Artificial Sequence
  Oligonucleotide for detection of SNP TSC0005285
gaagattgttatt

SEQ ID NO: 209192 - DNA, 13 bp, Artificial Sequence
  Oligonucleotide for detection of SNP TSC0005285
aataacaatcttc

SEQ ID NO: 209193 - DNA, 13 bp, Artificial Sequence
  Oligonucleotide for detection of SNP TSC0005285
gaagatcgttatt

SEQ ID NO: 209194 - DNA, 13 bp, Artificial Sequence
  Oligonucleotide for detection of SNP TSC0005285
aataacgatcttc

SEQ ID NO: 209195 - DNA, 13 bp, Artificial Sequence
  Oligonucleotide for detection of SNP TSC0051094
tagaggttaaggg

SEQ ID NO: 209196 - DNA, 13 bp, Artificial Sequence
  Oligonucleotide for detection of SNP TSC0051094
cccttaacctcta

SEQ ID NO: 209197 - DNA, 13 bp, Artificial Sequence
  Oligonucleotide for detection of SNP TSC0051094
tagagggtaaggg

SEQ ID NO: 209198 - DNA, 13 bp, Artificial Sequence
  Oligonucleotide for detection of SNP TSC0051094
cccttaccctcta

SEQ ID NO: 209199 - DNA, 13 bp, Artificial Sequence
  Oligonucleotide for detection of SNP TSC0051095
tagtgaagtaaty

SEQ ID NO: 209200 - DNA, 13 bp, Artificial Sequence
  Oligonucleotide for detection of SNP TSC0051095
rattacttcacta

SEQ ID NO: 209201 - DNA, 13 bp, Artificial Sequence
  Oligonucleotide for detection of SNP TSC0051095
tagtgatgtaaty

SEQ ID NO: 209202 - DNA, 13 bp, Artificial Sequence
  Oligonucleotide for detection of SNP TSC0051095
rattacatcacta

SEQ ID NO: 209203 - DNA, 13 bp, Artificial Sequence
  Oligonucleotide for detection of SNP TSC0051096
tgtttatttgaaa

SEQ ID NO: 209204 - DNA, 13 bp, Artificial Sequence
  Oligonucleotide for detection of SNP TSC0051096
tttcaaataaaca

SEQ ID NO: 209205 - DNA, 13 bp, Artificial Sequence
  Oligonucleotide for detection of SNP TSC0051096
tgtttagttgaaa

SEQ ID NO: 209206 - DNA, 13 bp, Artificial Sequence
  Oligonucleotide for detection of SNP TSC0051096
tttcaactaaaca

SEQ ID NO: 209207 - DNA, 13 bp, Artificial Sequence
  Oligonucleotide for detection of SNP TSC0051096
cgtttatttgaaa

SEQ ID NO: 209208 - DNA, 13 bp, Artificial Sequence
  Oligonucleotide for detection of SNP TSC0051096
tttcaaataaacg

SEQ ID NO: 209209 - DNA, 13 bp, Artificial Sequence
  Oligonucleotide for detection of SNP TSC0051096
cgtttagttgaaa

SEQ ID NO: 209210 - DNA, 13 bp, Artificial Sequence
  Oligonucleotide for detection of SNP TSC0051096
tttcaactaaacg

SEQ ID NO: 209211 - DNA, 13 bp, Artificial Sequence
  Oligonucleotide for detection of SNP TSC0051096
tgtttattcgaaa

SEQ ID NO: 209212 - DNA, 13 bp, Artificial Sequence
  Oligonucleotide for detection of SNP TSC0051096
tttcgaataaaca

SEQ ID NO: 209213 - DNA, 13 bp, Artificial Sequence
  Oligonucleotide for detection of SNP TSC0051096
tgtttagtcgaaa

SEQ ID NO: 209214 - DNA, 13 bp, Artificial Sequence
  Oligonucleotide for detection of SNP TSC0051096
tttcgactaaaca

SEQ ID NO: 209215 - DNA, 13 bp, Artificial Sequence
  Oligonucleotide for detection of SNP TSC0051096
cgtttattcgaaa

SEQ ID NO: 209216 - DNA, 13 bp, Artificial Sequence
  Oligonucleotide for detection of SNP TSC0051096
tttcgaataaacg

SEQ ID NO: 209217 - DNA, 13 bp, Artificial Sequence
  Oligonucleotide for detection of SNP TSC0051096
cgtttagtcgaaa

SEQ ID NO: 209218 - DNA, 13 bp, Artificial Sequence
  Oligonucleotide for detection of SNP TSC0051096
tttcgactaaacg

SEQ ID NO: 209219 - DNA, 13 bp, Artificial Sequence
  Oligonucleotide for detection of SNP TSC0051096
ttttggatgggtg

SEQ ID NO: 209220 - DNA, 13 bp, Artificial Sequence
  Oligonucleotide for detection of SNP TSC0051096
cacccatccaaaa

SEQ ID NO: 209221 - DNA, 13 bp, Artificial Sequence
  Oligonucleotide for detection of SNP TSC0051096
ttttggttgggtg

SEQ ID NO: 209222 - DNA, 13 bp, Artificial Sequence
  Oligonucleotide for detection of SNP TSC0051096
cacccaaccaaaa

SEQ ID NO: 209223 - DNA, 13 bp, Artificial Sequence
  Oligonucleotide for detection of SNP TSC0051096
tttcggatgggtg

SEQ ID NO: 209224 - DNA, 13 bp, Artificial Sequence
  Oligonucleotide for detection of SNP TSC0051096
cacccatccgaaa

SEQ ID NO: 209225 - DNA, 13 bp, Artificial Sequence
  Oligonucleotide for detection of SNP TSC0051096
tttcggttgggtg

SEQ ID NO: 209226 - DNA, 13 bp, Artificial Sequence
  Oligonucleotide for detection of SNP TSC0051096
cacccaaccgaaa

SEQ ID NO: 209227 - DNA, 13 bp, Artificial Sequence
  Oligonucleotide for detection of SNP TSC0051096
ttttggatgggcg

SEQ ID NO: 209228 - DNA, 13 bp, Artificial Sequence
  Oligonucleotide for detection of SNP TSC0051096
cgcccatccaaaa

SEQ ID NO: 209229 - DNA, 13 bp, Artificial Sequence
  Oligonucleotide for detection of SNP TSC0051096
ttttggttgggcg

SEQ ID NO: 209230 - DNA, 13 bp, Artificial Sequence
  Oligonucleotide for detection of SNP TSC0051096
cgcccaaccaaaa

SEQ ID NO: 209231 - DNA, 13 bp, Artificial Sequence
  Oligonucleotide for detection of SNP TSC0051096
tttcggatgggcg

SEQ ID NO: 209232 - DNA, 13 bp, Artificial Sequence
  Oligonucleotide for detection of SNP TSC0051096
cgcccatccgaaa

SEQ ID NO: 209233 - DNA, 13 bp, Artificial Sequence
  Oligonucleotide for detection of SNP TSC0051096
tttcggttgggcg

SEQ ID NO: 209234 - DNA, 13 bp, Artificial Sequence
  Oligonucleotide for detection of SNP TSC0051096
cgcccaaccgaaa

SEQ ID NO: 209235 - DNA, 13 bp, Artificial Sequence
  Oligonucleotide for detection of SNP TSC0051099
ttagggattttaa

SEQ ID NO: 209236 - DNA, 13 bp, Artificial Sequence
  Oligonucleotide for detection of SNP TSC0051099
ttaaaatccctaa

SEQ ID NO: 209237 - DNA, 13 bp, Artificial Sequence
  Oligonucleotide for detection of SNP TSC0051099
ttagggtttttaa

SEQ ID NO: 209238 - DNA, 13 bp, Artificial Sequence
  Oligonucleotide for detection of SNP TSC0051099
ttaaaaaccctaa

SEQ ID NO: 209239 - DNA, 13 bp, Artificial Sequence
  Oligonucleotide for detection of SNP TSC0051099
ttaagatttttga

SEQ ID NO: 209240 - DNA, 13 bp, Artificial Sequence
  Oligonucleotide for detection of SNP TSC0051099
tcaaaaatcttaa

SEQ ID NO: 209241 - DNA, 13 bp, Artificial Sequence
  Oligonucleotide for detection of SNP TSC0051099
ttaagagttttga

SEQ ID NO: 209242 - DNA, 13 bp, Artificial Sequence
  Oligonucleotide for detection of SNP TSC0051099
tcaaaactcttaa

SEQ ID NO: 209243 - DNA, 13 bp, Artificial Sequence
  Oligonucleotide for detection of SNP TSC0051100
ttaaaggagagga

SEQ ID NO: 209244 - DNA, 13 bp, Artificial Sequence
  Oligonucleotide for detection of SNP TSC0051100
tcctctcctttaa

SEQ ID NO: 209245 - DNA, 13 bp, Artificial Sequence
  Oligonucleotide for detection of SNP TSC0051100
ttaaagaagagga

SEQ ID NO: 209246 - DNA, 13 bp, Artificial Sequence
  Oligonucleotide for detection of SNP TSC0051100
tcctcttctttaa

SEQ ID NO: 209247 - DNA, 13 bp, Artificial Sequence
  Oligonucleotide for detection of SNP TSC0051101
ttagaaagtattt

SEQ ID NO: 209248 - DNA, 13 bp, Artificial Sequence
  Oligonucleotide for detection of SNP TSC0051101
aaatactttctaa

SEQ ID NO: 209249 - DNA, 13 bp, Artificial Sequence
  Oligonucleotide for detection of SNP TSC0051101
ttagaatgtattt

SEQ ID NO: 209250 - DNA, 13 bp, Artificial Sequence
  Oligonucleotide for detection of SNP TSC0051101
aaatacattctaa

SEQ ID NO: 209251 - DNA, 13 bp, Artificial Sequence
  Oligonucleotide for detection of SNP TSC0051101
aaatgttttttaa

SEQ ID NO: 209252 - DNA, 13 bp, Artificial Sequence
  Oligonucleotide for detection of SNP TSC0051101
ttaaaaaacattt

SEQ ID NO: 209253 - DNA, 13 bp, Artificial Sequence
  Oligonucleotide for detection of SNP TSC0051101
aaatgtattttaa

SEQ ID NO: 209254 - DNA, 13 bp, Artificial Sequence
  Oligonucleotide for detection of SNP TSC0051101
ttaaaatacattt

SEQ ID NO: 209255 - DNA, 13 bp, Artificial Sequence
  Oligonucleotide for detection of SNP TSC0051102
aatgtaggtgttt

SEQ ID NO: 209256 - DNA, 13 bp, Artificial Sequence
  Oligonucleotide for detection of SNP TSC0051102
aaacacctacatt

SEQ ID NO: 209257 - DNA, 13 bp, Artificial Sequence
  Oligonucleotide for detection of SNP TSC0051102
agatatgtgtatt

SEQ ID NO: 209258 - DNA, 13 bp, Artificial Sequence
  Oligonucleotide for detection of SNP TSC0051102
aatacacatatct

SEQ ID NO: 209259 - DNA, 13 bp, Artificial Sequence
  Oligonucleotide for detection of SNP TSC0051102
agatatttgtatt

SEQ ID NO: 209260 - DNA, 13 bp, Artificial Sequence
  Oligonucleotide for detection of SNP TSC0051102
aatacaaatatct

SEQ ID NO: 209261 - DNA, 13 bp, Artificial Sequence
  Oligonucleotide for detection of SNP TSC0051102
agatacgtgtatt

SEQ ID NO: 209262 - DNA, 13 bp, Artificial Sequence
  Oligonucleotide for detection of SNP TSC0051102
aatacacgtatct

SEQ ID NO: 209263 - DNA, 13 bp, Artificial Sequence
  Oligonucleotide for detection of SNP TSC0008690
ttagattgtttgy

SEQ ID NO: 209264 - DNA, 13 bp, Artificial Sequence
  Oligonucleotide for detection of SNP TSC0008690
rcaaacaatctaa

SEQ ID NO: 209265 - DNA, 13 bp, Artificial Sequence
  Oligonucleotide for detection of SNP TSC0008690
ttagatcgtttgy

SEQ ID NO: 209266 - DNA, 13 bp, Artificial Sequence
  Oligonucleotide for detection of SNP TSC0008690
rcaaacgatctaa

SEQ ID NO: 209267 - DNA, 13 bp, Artificial Sequence
  Oligonucleotide for detection of SNP TSC0008690
gtaagtggtttgg

SEQ ID NO: 209268 - DNA, 13 bp, Artificial Sequence
  Oligonucleotide for detection of SNP TSC0008690
ccaaaccacttac

SEQ ID NO: 209269 - DNA, 13 bp, Artificial Sequence
  Oligonucleotide for detection of SNP TSC0008690
gtaagtagtttgg

SEQ ID NO: 209270 - DNA, 13 bp, Artificial Sequence
  Oligonucleotide for detection of SNP TSC0008690
ccaaactacttac

SEQ ID NO: 209271 - DNA, 13 bp, Artificial Sequence
  Oligonucleotide for detection of SNP TSC0008690
gtaagcggtttgg

SEQ ID NO: 209272 - DNA, 13 bp, Artificial Sequence
  Oligonucleotide for detection of SNP TSC0008690
ccaaaccgcttac

SEQ ID NO: 209273 - DNA, 13 bp, Artificial Sequence
  Oligonucleotide for detection of SNP TSC0005342
gagtaatggaatg

SEQ ID NO: 209274 - DNA, 13 bp, Artificial Sequence
  Oligonucleotide for detection of SNP TSC0005342
cattccattactc

SEQ ID NO: 209275 - DNA, 13 bp, Artificial Sequence
  Oligonucleotide for detection of SNP TSC0005342
gagtaacggaatg

SEQ ID NO: 209276 - DNA, 13 bp, Artificial Sequence
  Oligonucleotide for detection of SNP TSC0005342
cattccgttactc

SEQ ID NO: 209277 - DNA, 13 bp, Artificial Sequence
  Oligonucleotide for detection of SNP TSC0051107
tttattatgagty

SEQ ID NO: 209278 - DNA, 13 bp, Artificial Sequence
  Oligonucleotide for detection of SNP TSC0051107
ractcataataaa

SEQ ID NO: 209279 - DNA, 13 bp, Artificial Sequence
  Oligonucleotide for detection of SNP TSC0051107
tttattgtgagty

SEQ ID NO: 209280 - DNA, 13 bp, Artificial Sequence
  Oligonucleotide for detection of SNP TSC0051107
ractcacaataaa

SEQ ID NO: 209281 - DNA, 13 bp, Artificial Sequence
  Oligonucleotide for detection of SNP TSC0051112
gttggaataataa

SEQ ID NO: 209282 - DNA, 13 bp, Artificial Sequence
  Oligonucleotide for detection of SNP TSC0051112
ttattattccaac

SEQ ID NO: 209283 - DNA, 13 bp, Artificial Sequence
  Oligonucleotide for detection of SNP TSC0051112
gttggagtaataa

SEQ ID NO: 209284 - DNA, 13 bp, Artificial Sequence
  Oligonucleotide for detection of SNP TSC0051112
ttattactccaac

SEQ ID NO: 209285 - DNA, 13 bp, Artificial Sequence
  Oligonucleotide for detection of SNP TSC0051113
taattagaaaatg

SEQ ID NO: 209286 - DNA, 13 bp, Artificial Sequence
  Oligonucleotide for detection of SNP TSC0051113
cattttctaatta

SEQ ID NO: 209287 - DNA, 13 bp, Artificial Sequence
  Oligonucleotide for detection of SNP TSC0051113
taattaaaaaatg

SEQ ID NO: 209288 - DNA, 13 bp, Artificial Sequence
  Oligonucleotide for detection of SNP TSC0051113
cattttttaatta

SEQ ID NO: 209289 - DNA, 13 bp, Artificial Sequence
  Oligonucleotide for detection of SNP TSC0051114
gtttgtgtttatg

SEQ ID NO: 209290 - DNA, 13 bp, Artificial Sequence
  Oligonucleotide for detection of SNP TSC0051114
cataaacacaaac

SEQ ID NO: 209291 - DNA, 13 bp, Artificial Sequence
  Oligonucleotide for detection of SNP TSC0051114
gttcgtttttatg

SEQ ID NO: 209292 - DNA, 13 bp, Artificial Sequence
  Oligonucleotide for detection of SNP TSC0051114
cataaaaacgaac

SEQ ID NO: 209293 - DNA, 13 bp, Artificial Sequence
  Oligonucleotide for detection of SNP TSC0051114
gttcgtgtttatg

SEQ ID NO: 209294 - DNA, 13 bp, Artificial Sequence
  Oligonucleotide for detection of SNP TSC0051114
cataaacacgaac

SEQ ID NO: 209295 - DNA, 13 bp, Artificial Sequence
  Oligonucleotide for detection of SNP TSC0051114
tatggaaatgaay

SEQ ID NO: 209296 - DNA, 13 bp, Artificial Sequence
  Oligonucleotide for detection of SNP TSC0051114
rttcatttccata

SEQ ID NO: 209297 - DNA, 13 bp, Artificial Sequence
  Oligonucleotide for detection of SNP TSC0051114
tatggatatgaay

SEQ ID NO: 209298 - DNA, 13 bp, Artificial Sequence
  Oligonucleotide for detection of SNP TSC0051114
rttcatatccata

SEQ ID NO: 209299 - DNA, 13 bp, Artificial Sequence
  Oligonucleotide for detection of SNP TSC0051114
tatggaaacgaay

SEQ ID NO: 209300 - DNA, 13 bp, Artificial Sequence
  Oligonucleotide for detection of SNP TSC0051114
rttcgtttccata

SEQ ID NO: 209301 - DNA, 13 bp, Artificial Sequence
  Oligonucleotide for detection of SNP TSC0051114
tatggatacgaay

SEQ ID NO: 209302 - DNA, 13 bp, Artificial Sequence
  Oligonucleotide for detection of SNP TSC0051114
rttcgtatccata

SEQ ID NO: 209303 - DNA, 13 bp, Artificial Sequence
  Oligonucleotide for detection of SNP TSC0051115
atagttaggatay

SEQ ID NO: 209304 - DNA, 13 bp, Artificial Sequence
  Oligonucleotide for detection of SNP TSC0051115
rtatcctaactat

SEQ ID NO: 209305 - DNA, 13 bp, Artificial Sequence
  Oligonucleotide for detection of SNP TSC0051115
atagttgggatay

SEQ ID NO: 209306 - DNA, 13 bp, Artificial Sequence
  Oligonucleotide for detection of SNP TSC0051115
rtatcccaactat

SEQ ID NO: 209307 - DNA, 13 bp, Artificial Sequence
  Oligonucleotide for detection of SNP TSC0051115
atagtcgggatay

SEQ ID NO: 209308 - DNA, 13 bp, Artificial Sequence
  Oligonucleotide for detection of SNP TSC0051115
rtatcccgactat

SEQ ID NO: 209309 - DNA, 13 bp, Artificial Sequence
  Oligonucleotide for detection of SNP TSC0051115
gtattttggttgt

SEQ ID NO: 209310 - DNA, 13 bp, Artificial Sequence
  Oligonucleotide for detection of SNP TSC0051115
acaaccaaaatac

SEQ ID NO: 209311 - DNA, 13 bp, Artificial Sequence
  Oligonucleotide for detection of SNP TSC0051115
gtatttcggttgt

SEQ ID NO: 209312 - DNA, 13 bp, Artificial Sequence
  Oligonucleotide for detection of SNP TSC0051115
acaaccgaaatac

SEQ ID NO: 209313 - DNA, 13 bp, Artificial Sequence
  Oligonucleotide for detection of SNP TSC0051122
tgaattttgtttg

SEQ ID NO: 209314 - DNA, 13 bp, Artificial Sequence
  Oligonucleotide for detection of SNP TSC0051122
caaacaaaattca

SEQ ID NO: 209315 - DNA, 13 bp, Artificial Sequence
  Oligonucleotide for detection of SNP TSC0051122
tgaattgtgtttg

SEQ ID NO: 209316 - DNA, 13 bp, Artificial Sequence
  Oligonucleotide for detection of SNP TSC0051122
caaacacaattca

SEQ ID NO: 209317 - DNA, 13 bp, Artificial Sequence
  Oligonucleotide for detection of SNP TSC0051122
tagatagagttta

SEQ ID NO: 209318 - DNA, 13 bp, Artificial Sequence
  Oligonucleotide for detection of SNP TSC0051122
taaactctatcta

SEQ ID NO: 209319 - DNA, 13 bp, Artificial Sequence
  Oligonucleotide for detection of SNP TSC0051122
tagatatagttta

SEQ ID NO: 209320 - DNA, 13 bp, Artificial Sequence
  Oligonucleotide for detection of SNP TSC0051122
taaactatatcta

SEQ ID NO: 209321 - DNA, 13 bp, Artificial Sequence
  Oligonucleotide for detection of SNP TSC0051123
tatatggttcgtt

SEQ ID NO: 209322 - DNA, 13 bp, Artificial Sequence
  Oligonucleotide for detection of SNP TSC0051123
aacgaaccatata

SEQ ID NO: 209323 - DNA, 13 bp, Artificial Sequence
  Oligonucleotide for detection of SNP TSC0051123
tatatgattcgtt

SEQ ID NO: 209324 - DNA, 13 bp, Artificial Sequence
  Oligonucleotide for detection of SNP TSC0051123
aacgaatcatata

SEQ ID NO: 209325 - DNA, 13 bp, Artificial Sequence
  Oligonucleotide for detection of SNP TSC0005237
tggagtaaaagat

SEQ ID NO: 209326 - DNA, 13 bp, Artificial Sequence
  Oligonucleotide for detection of SNP TSC0005237
atcttttactcca

SEQ ID NO: 209327 - DNA, 13 bp, Artificial Sequence
  Oligonucleotide for detection of SNP TSC0005237
tggagttaaagat

SEQ ID NO: 209328 - DNA, 13 bp, Artificial Sequence
  Oligonucleotide for detection of SNP TSC0005237
atctttaactcca

SEQ ID NO: 209329 - DNA, 13 bp, Artificial Sequence
  Oligonucleotide for detection of SNP TSC0051124
gatgtaagaatta

SEQ ID NO: 209330 - DNA, 13 bp, Artificial Sequence
  Oligonucleotide for detection of SNP TSC0051124
taattcttacatc

SEQ ID NO: 209331 - DNA, 13 bp, Artificial Sequence
  Oligonucleotide for detection of SNP TSC0051124
gatgtaggaatta

SEQ ID NO: 209332 - DNA, 13 bp, Artificial Sequence
  Oligonucleotide for detection of SNP TSC0051124
taattcctacatc

SEQ ID NO: 209333 - DNA, 13 bp, Artificial Sequence
  Oligonucleotide for detection of SNP TSC0051125
taaataatgagat

SEQ ID NO: 209334 - DNA, 13 bp, Artificial Sequence
  Oligonucleotide for detection of SNP TSC0051125
atctcattattta

SEQ ID NO: 209335 - DNA, 13 bp, Artificial Sequence
  Oligonucleotide for detection of SNP TSC0051125
taaatattgagat

SEQ ID NO: 209336 - DNA, 13 bp, Artificial Sequence
  Oligonucleotide for detection of SNP TSC0051125
atctcaatattta

SEQ ID NO: 209337 - DNA, 13 bp, Artificial Sequence
  Oligonucleotide for detection of SNP TSC0051125
attttattgtttg

SEQ ID NO: 209338 - DNA, 13 bp, Artificial Sequence
  Oligonucleotide for detection of SNP TSC0051125
caaacaataaaat

SEQ ID NO: 209339 - DNA, 13 bp, Artificial Sequence
  Oligonucleotide for detection of SNP TSC0051127
taagcggttttty

SEQ ID NO: 209340 - DNA, 13 bp, Artificial Sequence
  Oligonucleotide for detection of SNP TSC0051127
raaaaaccgctta

SEQ ID NO: 209341 - DNA, 13 bp, Artificial Sequence
  Oligonucleotide for detection of SNP TSC0051127
taagcgattttty

SEQ ID NO: 209342 - DNA, 13 bp, Artificial Sequence
  Oligonucleotide for detection of SNP TSC0051127
raaaaatcgctta

SEQ ID NO: 209343 - DNA, 13 bp, Artificial Sequence
  Oligonucleotide for detection of SNP TSC0051128
tagttttgtattt

SEQ ID NO: 209344 - DNA, 13 bp, Artificial Sequence
  Oligonucleotide for detection of SNP TSC0051128
aaatacaaaacta

SEQ ID NO: 209345 - DNA, 13 bp, Artificial Sequence
  Oligonucleotide for detection of SNP TSC0051128
tagtttggtattt

SEQ ID NO: 209346 - DNA, 13 bp, Artificial Sequence
  Oligonucleotide for detection of SNP TSC0051128
aaataccaaacta

SEQ ID NO: 209347 - DNA, 13 bp, Artificial Sequence
  Oligonucleotide for detection of SNP TSC0051128
tagttcggtattt

SEQ ID NO: 209348 - DNA, 13 bp, Artificial Sequence
  Oligonucleotide for detection of SNP TSC0051128
aaataccgaacta

SEQ ID NO: 209349 - DNA, 13 bp, Artificial Sequence
  Oligonucleotide for detection of SNP TSC0051128
aggtgtagggtta

SEQ ID NO: 209350 - DNA, 13 bp, Artificial Sequence
  Oligonucleotide for detection of SNP TSC0051128
taaccctacacct

SEQ ID NO: 209351 - DNA, 13 bp, Artificial Sequence
  Oligonucleotide for detection of SNP TSC0051128
aggtgttgggtta

SEQ ID NO: 209352 - DNA, 13 bp, Artificial Sequence
  Oligonucleotide for detection of SNP TSC0051128
taacccaacacct

SEQ ID NO: 209353 - DNA, 13 bp, Artificial Sequence
  Oligonucleotide for detection of SNP TSC0051128
aggtgtcgggtta

SEQ ID NO: 209354 - DNA, 13 bp, Artificial Sequence
  Oligonucleotide for detection of SNP TSC0051128
taacccgacacct

SEQ ID NO: 209355 - DNA, 13 bp, Artificial Sequence
  Oligonucleotide for detection of SNP TSC0007911
ttatggagaaagg

SEQ ID NO: 209356 - DNA, 13 bp, Artificial Sequence
  Oligonucleotide for detection of SNP TSC0007911
cctttctccataa

SEQ ID NO: 209357 - DNA, 13 bp, Artificial Sequence
  Oligonucleotide for detection of SNP TSC0007911
ttatggggaaagg

SEQ ID NO: 209358 - DNA, 13 bp, Artificial Sequence
  Oligonucleotide for detection of SNP TSC0007911
cctttccccataa

SEQ ID NO: 209359 - DNA, 13 bp, Artificial Sequence
  Oligonucleotide for detection of SNP TSC0051129
gatatttttttty

SEQ ID NO: 209360 - DNA, 13 bp, Artificial Sequence
  Oligonucleotide for detection of SNP TSC0051129
raaaaaaaatatc

SEQ ID NO: 209361 - DNA, 13 bp, Artificial Sequence
  Oligonucleotide for detection of SNP TSC0051129
ggaagagaataty

SEQ ID NO: 209362 - DNA, 13 bp, Artificial Sequence
  Oligonucleotide for detection of SNP TSC0051129
ratattctcttcc

SEQ ID NO: 209363 - DNA, 13 bp, Artificial Sequence
  Oligonucleotide for detection of SNP TSC0051129
ggaagataataty

SEQ ID NO: 209364 - DNA, 13 bp, Artificial Sequence
  Oligonucleotide for detection of SNP TSC0051129
ratattatcttcc

SEQ ID NO: 209365 - DNA, 13 bp, Artificial Sequence
  Oligonucleotide for detection of SNP TSC0051131
aaggaatgggtga

SEQ ID NO: 209366 - DNA, 13 bp, Artificial Sequence
  Oligonucleotide for detection of SNP TSC0051131
tcacccattcctt

SEQ ID NO: 209367 - DNA, 13 bp, Artificial Sequence
  Oligonucleotide for detection of SNP TSC0051131
aaggaaggggtga

SEQ ID NO: 209368 - DNA, 13 bp, Artificial Sequence
  Oligonucleotide for detection of SNP TSC0051131
tcaccccttcctt

SEQ ID NO: 209369 - DNA, 13 bp, Artificial Sequence
  Oligonucleotide for detection of SNP TSC0051140
gggtttggggttg

SEQ ID NO: 209370 - DNA, 13 bp, Artificial Sequence
  Oligonucleotide for detection of SNP TSC0051140
caaccccaaaccc

SEQ ID NO: 209371 - DNA, 13 bp, Artificial Sequence
  Oligonucleotide for detection of SNP TSC0051140
tagttttaggtty

SEQ ID NO: 209372 - DNA, 13 bp, Artificial Sequence
  Oligonucleotide for detection of SNP TSC0051140
raacctaaaacta

SEQ ID NO: 209373 - DNA, 13 bp, Artificial Sequence
  Oligonucleotide for detection of SNP TSC0051141
gagtttgtgtagg

SEQ ID NO: 209374 - DNA, 13 bp, Artificial Sequence
  Oligonucleotide for detection of SNP TSC0051141
cctacacaaactc

SEQ ID NO: 209375 - DNA, 13 bp, Artificial Sequence
  Oligonucleotide for detection of SNP TSC0051141
gagtttatgtagg

SEQ ID NO: 209376 - DNA, 13 bp, Artificial Sequence
  Oligonucleotide for detection of SNP TSC0051141
cctacataaactc

SEQ ID NO: 209377 - DNA, 13 bp, Artificial Sequence
  Oligonucleotide for detection of SNP TSC0051144
agagatgggggtt

SEQ ID NO: 209378 - DNA, 13 bp, Artificial Sequence
  Oligonucleotide for detection of SNP TSC0051144
aacccccatctct

SEQ ID NO: 209379 - DNA, 13 bp, Artificial Sequence
  Oligonucleotide for detection of SNP TSC0051144
agagataggggtt

SEQ ID NO: 209380 - DNA, 13 bp, Artificial Sequence
  Oligonucleotide for detection of SNP TSC0051144
aacccctatctct

SEQ ID NO: 209381 - DNA, 13 bp, Artificial Sequence
  Oligonucleotide for detection of SNP TSC0051144
agagacgggggtt

SEQ ID NO: 209382 - DNA, 13 bp, Artificial Sequence
  Oligonucleotide for detection of SNP TSC0051144
aacccccgtctct

SEQ ID NO: 209383 - DNA, 13 bp, Artificial Sequence
  Oligonucleotide for detection of SNP TSC0051145
aaaagtatatata

SEQ ID NO: 209384 - DNA, 13 bp, Artificial Sequence
  Oligonucleotide for detection of SNP TSC0051145
tatatatactttt

SEQ ID NO: 209385 - DNA, 13 bp, Artificial Sequence
  Oligonucleotide for detection of SNP TSC0051145
aaaagtgtatata

SEQ ID NO: 209386 - DNA, 13 bp, Artificial Sequence
  Oligonucleotide for detection of SNP TSC0051145
tatatacactttt

SEQ ID NO: 209387 - DNA, 13 bp, Artificial Sequence
  Oligonucleotide for detection of SNP TSC0051145
aaaagcgtatata

SEQ ID NO: 209388 - DNA, 13 bp, Artificial Sequence
  Oligonucleotide for detection of SNP TSC0051145
tatatacgctttt

SEQ ID NO: 209389 - DNA, 13 bp, Artificial Sequence
  Oligonucleotide for detection of SNP TSC0051145
tgtgtgtgttttt

SEQ ID NO: 209390 - DNA, 13 bp, Artificial Sequence
  Oligonucleotide for detection of SNP TSC0051145
aaaaacacacaca

SEQ ID NO: 209391 - DNA, 13 bp, Artificial Sequence
  Oligonucleotide for detection of SNP TSC0051145
tgtgtgcgttttt

SEQ ID NO: 209392 - DNA, 13 bp, Artificial Sequence
  Oligonucleotide for detection of SNP TSC0051145
aaaaacgcacaca

SEQ ID NO: 209393 - DNA, 13 bp, Artificial Sequence
  Oligonucleotide for detection of SNP TSC0051146
atatttgtaagtg

SEQ ID NO: 209394 - DNA, 13 bp, Artificial Sequence
  Oligonucleotide for detection of SNP TSC0051146
cacttacaaatat

SEQ ID NO: 209395 - DNA, 13 bp, Artificial Sequence
  Oligonucleotide for detection of SNP TSC0051146
atatttataagtg

SEQ ID NO: 209396 - DNA, 13 bp, Artificial Sequence
  Oligonucleotide for detection of SNP TSC0051146
cacttataaatat

SEQ ID NO: 209397 - DNA, 13 bp, Artificial Sequence
  Oligonucleotide for detection of SNP TSC0051149
tattttaatggta

SEQ ID NO: 209398 - DNA, 13 bp, Artificial Sequence
  Oligonucleotide for detection of SNP TSC0051149
taccattaaaata

SEQ ID NO: 209399 - DNA, 13 bp, Artificial Sequence
  Oligonucleotide for detection of SNP TSC0051149
tattttgatggta

SEQ ID NO: 209400 - DNA, 13 bp, Artificial Sequence
  Oligonucleotide for detection of SNP TSC0051149
taccatcaaaata

SEQ ID NO: 209401 - DNA, 13 bp, Artificial Sequence
  Oligonucleotide for detection of SNP TSC0051149
tatttcgatggta

SEQ ID NO: 209402 - DNA, 13 bp, Artificial Sequence
  Oligonucleotide for detection of SNP TSC0051149
taccatcgaaata

SEQ ID NO: 209403 - DNA, 13 bp, Artificial Sequence
  Oligonucleotide for detection of SNP TSC0051149
tgttattggggtg

SEQ ID NO: 209404 - DNA, 13 bp, Artificial Sequence
  Oligonucleotide for detection of SNP TSC0051149
caccccaataaca

SEQ ID NO: 209405 - DNA, 13 bp, Artificial Sequence
  Oligonucleotide for detection of SNP TSC0051149
tgttatcggggtg

SEQ ID NO: 209406 - DNA, 13 bp, Artificial Sequence
  Oligonucleotide for detection of SNP TSC0051149
caccccgataaca

SEQ ID NO: 209407 - DNA, 13 bp, Artificial Sequence
  Oligonucleotide for detection of SNP TSC0051150
aagattttattat

SEQ ID NO: 209408 - DNA, 13 bp, Artificial Sequence
  Oligonucleotide for detection of SNP TSC0051150
ataataaaatctt

SEQ ID NO: 209409 - DNA, 13 bp, Artificial Sequence
  Oligonucleotide for detection of SNP TSC0051150
aagattgtattat

SEQ ID NO: 209410 - DNA, 13 bp, Artificial Sequence
  Oligonucleotide for detection of SNP TSC0051150
ataatacaatctt

SEQ ID NO: 209411 - DNA, 13 bp, Artificial Sequence
  Oligonucleotide for detection of SNP TSC0051150
atggtaaagtttt

SEQ ID NO: 209412 - DNA, 13 bp, Artificial Sequence
  Oligonucleotide for detection of SNP TSC0051150
aaaactttaccat

SEQ ID NO: 209413 - DNA, 13 bp, Artificial Sequence
  Oligonucleotide for detection of SNP TSC0051150
atggtatagtttt

SEQ ID NO: 209414 - DNA, 13 bp, Artificial Sequence
  Oligonucleotide for detection of SNP TSC0051150
aaaactataccat

SEQ ID NO: 209415 - DNA, 13 bp, Artificial Sequence
  Oligonucleotide for detection of SNP TSC0007847
tatgagataagtg

SEQ ID NO: 209416 - DNA, 13 bp, Artificial Sequence
  Oligonucleotide for detection of SNP TSC0007847
cacttatctcata

SEQ ID NO: 209417 - DNA, 13 bp, Artificial Sequence
  Oligonucleotide for detection of SNP TSC0007847
tatgaggtaagtg

SEQ ID NO: 209418 - DNA, 13 bp, Artificial Sequence
  Oligonucleotide for detection of SNP TSC0007847
cacttacctcata

SEQ ID NO: 209419 - DNA, 13 bp, Artificial Sequence
  Oligonucleotide for detection of SNP TSC0051152
attatgtgatatg

SEQ ID NO: 209420 - DNA, 13 bp, Artificial Sequence
  Oligonucleotide for detection of SNP TSC0051152
catatcacataat

SEQ ID NO: 209421 - DNA, 13 bp, Artificial Sequence
  Oligonucleotide for detection of SNP TSC0051152
attatgggatatg

SEQ ID NO: 209422 - DNA, 13 bp, Artificial Sequence
  Oligonucleotide for detection of SNP TSC0051152
catatcccataat

SEQ ID NO: 209423 - DNA, 13 bp, Artificial Sequence
  Oligonucleotide for detection of SNP TSC0051152
tatattttataat

SEQ ID NO: 209424 - DNA, 13 bp, Artificial Sequence
  Oligonucleotide for detection of SNP TSC0051152
attataaaatata

SEQ ID NO: 209425 - DNA, 13 bp, Artificial Sequence
  Oligonucleotide for detection of SNP TSC0051153
aggttaataatta

SEQ ID NO: 209426 - DNA, 13 bp, Artificial Sequence
  Oligonucleotide for detection of SNP TSC0051153
taattattaacct

SEQ ID NO: 209427 - DNA, 13 bp, Artificial Sequence
  Oligonucleotide for detection of SNP TSC0051153
aggttagtaatta

SEQ ID NO: 209428 - DNA, 13 bp, Artificial Sequence
  Oligonucleotide for detection of SNP TSC0051153
taattactaacct

SEQ ID NO: 209429 - DNA, 13 bp, Artificial Sequence
  Oligonucleotide for detection of SNP TSC0051154
gttttggggttty

SEQ ID NO: 209430 - DNA, 13 bp, Artificial Sequence
  Oligonucleotide for detection of SNP TSC0051154
raaaccccaaaac

SEQ ID NO: 209431 - DNA, 13 bp, Artificial Sequence
  Oligonucleotide for detection of SNP TSC0051154
gttttgaggttty

SEQ ID NO: 209432 - DNA, 13 bp, Artificial Sequence
  Oligonucleotide for detection of SNP TSC0051154
raaacctcaaaac

SEQ ID NO: 209433 - DNA, 13 bp, Artificial Sequence
  Oligonucleotide for detection of SNP TSC0051160
ttttaataaaata

SEQ ID NO: 209434 - DNA, 13 bp, Artificial Sequence
  Oligonucleotide for detection of SNP TSC0051160
tattttattaaaa

SEQ ID NO: 209435 - DNA, 13 bp, Artificial Sequence
  Oligonucleotide for detection of SNP TSC0051160
tgttttattgggg

SEQ ID NO: 209436 - DNA, 13 bp, Artificial Sequence
  Oligonucleotide for detection of SNP TSC0051160
ccccaataaaaca

SEQ ID NO: 209437 - DNA, 13 bp, Artificial Sequence
  Oligonucleotide for detection of SNP TSC0051160
tgtttttttgggg

SEQ ID NO: 209438 - DNA, 13 bp, Artificial Sequence
  Oligonucleotide for detection of SNP TSC0051160
ccccaaaaaaaca

SEQ ID NO: 209439 - DNA, 13 bp, Artificial Sequence
  Oligonucleotide for detection of SNP TSC0051162
attatggtaagag

SEQ ID NO: 209440 - DNA, 13 bp, Artificial Sequence
  Oligonucleotide for detection of SNP TSC0051162
ctcttaccataat

SEQ ID NO: 209441 - DNA, 13 bp, Artificial Sequence
  Oligonucleotide for detection of SNP TSC0051162
attatgataagag

SEQ ID NO: 209442 - DNA, 13 bp, Artificial Sequence
  Oligonucleotide for detection of SNP TSC0051162
ctcttatcataat

SEQ ID NO: 209443 - DNA, 13 bp, Artificial Sequence
  Oligonucleotide for detection of SNP TSC0051163
ggaatataaataa

SEQ ID NO: 209444 - DNA, 13 bp, Artificial Sequence
  Oligonucleotide for detection of SNP TSC0051163
ttatttatattcc

SEQ ID NO: 209445 - DNA, 13 bp, Artificial Sequence
  Oligonucleotide for detection of SNP TSC0051163
ggaatagaaataa

SEQ ID NO: 209446 - DNA, 13 bp, Artificial Sequence
  Oligonucleotide for detection of SNP TSC0051163
ttatttctattcc

SEQ ID NO: 209447 - DNA, 13 bp, Artificial Sequence
  Oligonucleotide for detection of SNP TSC0051164
ataaataatatta

SEQ ID NO: 209448 - DNA, 13 bp, Artificial Sequence
  Oligonucleotide for detection of SNP TSC0051164
taatattatttat

SEQ ID NO: 209449 - DNA, 13 bp, Artificial Sequence
  Oligonucleotide for detection of SNP TSC0051164
ataaattatatta

SEQ ID NO: 209450 - DNA, 13 bp, Artificial Sequence
  Oligonucleotide for detection of SNP TSC0051164
taatataatttat

SEQ ID NO: 209451 - DNA, 13 bp, Artificial Sequence
  Oligonucleotide for detection of SNP TSC0051166
atttatagtgagt

SEQ ID NO: 209452 - DNA, 13 bp, Artificial Sequence
  Oligonucleotide for detection of SNP TSC0051166
actcactataaat

SEQ ID NO: 209453 - DNA, 13 bp, Artificial Sequence
  Oligonucleotide for detection of SNP TSC0051166
atttatggtgagt

SEQ ID NO: 209454 - DNA, 13 bp, Artificial Sequence
  Oligonucleotide for detection of SNP TSC0051166
actcaccataaat

SEQ ID NO: 209455 - DNA, 13 bp, Artificial Sequence
  Oligonucleotide for detection of SNP TSC0051166
atttatagcgagt

SEQ ID NO: 209456 - DNA, 13 bp, Artificial Sequence
  Oligonucleotide for detection of SNP TSC0051166
actcgctataaat

SEQ ID NO: 209457 - DNA, 13 bp, Artificial Sequence
  Oligonucleotide for detection of SNP TSC0051166
atttacggtgagt

SEQ ID NO: 209458 - DNA, 13 bp, Artificial Sequence
  Oligonucleotide for detection of SNP TSC0051166
actcaccgtaaat

SEQ ID NO: 209459 - DNA, 13 bp, Artificial Sequence
  Oligonucleotide for detection of SNP TSC0051166
atttatggcgagt

SEQ ID NO: 209460 - DNA, 13 bp, Artificial Sequence
  Oligonucleotide for detection of SNP TSC0051166
actcgccataaat

SEQ ID NO: 209461 - DNA, 13 bp, Artificial Sequence
  Oligonucleotide for detection of SNP TSC0051166
atttacggcgagt

SEQ ID NO: 209462 - DNA, 13 bp, Artificial Sequence
  Oligonucleotide for detection of SNP TSC0051166
actcgccgtaaat

SEQ ID NO: 209463 - DNA, 13 bp, Artificial Sequence
  Oligonucleotide for detection of SNP TSC0051166
atttgttgtgggt

SEQ ID NO: 209464 - DNA, 13 bp, Artificial Sequence
  Oligonucleotide for detection of SNP TSC0051166
acccacaacaaat

SEQ ID NO: 209465 - DNA, 13 bp, Artificial Sequence
  Oligonucleotide for detection of SNP TSC0051166
attcgttgtgggt

SEQ ID NO: 209466 - DNA, 13 bp, Artificial Sequence
  Oligonucleotide for detection of SNP TSC0051166
acccacaacgaat

SEQ ID NO: 209467 - DNA, 13 bp, Artificial Sequence
  Oligonucleotide for detection of SNP TSC0051166
atttgtcgtgggt

SEQ ID NO: 209468 - DNA, 13 bp, Artificial Sequence
  Oligonucleotide for detection of SNP TSC0051166
acccacgacaaat

SEQ ID NO: 209469 - DNA, 13 bp, Artificial Sequence
  Oligonucleotide for detection of SNP TSC0051166
attcgtcgtgggt

SEQ ID NO: 209470 - DNA, 13 bp, Artificial Sequence
  Oligonucleotide for detection of SNP TSC0051166
acccacgacgaat

SEQ ID NO: 209471 - DNA, 13 bp, Artificial Sequence
  Oligonucleotide for detection of SNP TSC0051167
tgataaggttttg

SEQ ID NO: 209472 - DNA, 13 bp, Artificial Sequence
  Oligonucleotide for detection of SNP TSC0051167
caaaaccttatca

SEQ ID NO: 209473 - DNA, 13 bp, Artificial Sequence
  Oligonucleotide for detection of SNP TSC0051167
tgataaagttttg

SEQ ID NO: 209474 - DNA, 13 bp, Artificial Sequence
  Oligonucleotide for detection of SNP TSC0051167
caaaactttatca

SEQ ID NO: 209475 - DNA, 13 bp, Artificial Sequence
  Oligonucleotide for detection of SNP TSC0051168
taagattgaaaga

SEQ ID NO: 209476 - DNA, 13 bp, Artificial Sequence
  Oligonucleotide for detection of SNP TSC0051168
tctttcaatctta

SEQ ID NO: 209477 - DNA, 13 bp, Artificial Sequence
  Oligonucleotide for detection of SNP TSC0051168
taagatagaaaga

SEQ ID NO: 209478 - DNA, 13 bp, Artificial Sequence
  Oligonucleotide for detection of SNP TSC0051168
tctttctatctta

SEQ ID NO: 209479 - DNA, 13 bp, Artificial Sequence
  Oligonucleotide for detection of SNP TSC0007206
atttttaaggtat

SEQ ID NO: 209480 - DNA, 13 bp, Artificial Sequence
  Oligonucleotide for detection of SNP TSC0007206
ataccttaaaaat

SEQ ID NO: 209481 - DNA, 13 bp, Artificial Sequence
  Oligonucleotide for detection of SNP TSC0007206
attttttaggtat

SEQ ID NO: 209482 - DNA, 13 bp, Artificial Sequence
  Oligonucleotide for detection of SNP TSC0007206
atacctaaaaaat

SEQ ID NO: 209483 - DNA, 13 bp, Artificial Sequence
  Oligonucleotide for detection of SNP TSC0007206
atttttgaggtat

SEQ ID NO: 209484 - DNA, 13 bp, Artificial Sequence
  Oligonucleotide for detection of SNP TSC0007206
atacctcaaaaat

SEQ ID NO: 209485 - DNA, 13 bp, Artificial Sequence
  Oligonucleotide for detection of SNP TSC0007206
attttcgaggtat

SEQ ID NO: 209486 - DNA, 13 bp, Artificial Sequence
  Oligonucleotide for detection of SNP TSC0007206
atacctcgaaaat

SEQ ID NO: 209487 - DNA, 13 bp, Artificial Sequence
  Oligonucleotide for detection of SNP TSC0007206
atattttgagggt

SEQ ID NO: 209488 - DNA, 13 bp, Artificial Sequence
  Oligonucleotide for detection of SNP TSC0007206
accctcaaaatat

SEQ ID NO: 209489 - DNA, 13 bp, Artificial Sequence
  Oligonucleotide for detection of SNP TSC0007206
atatttggagggt

SEQ ID NO: 209490 - DNA, 13 bp, Artificial Sequence
  Oligonucleotide for detection of SNP TSC0007206
accctccaaatat

SEQ ID NO: 209491 - DNA, 13 bp, Artificial Sequence
  Oligonucleotide for detection of SNP TSC0007206
atatttagagggt

SEQ ID NO: 209492 - DNA, 13 bp, Artificial Sequence
  Oligonucleotide for detection of SNP TSC0007206
accctctaaatat

SEQ ID NO: 209493 - DNA, 13 bp, Artificial Sequence
  Oligonucleotide for detection of SNP TSC0007206
atatttcgagggt

SEQ ID NO: 209494 - DNA, 13 bp, Artificial Sequence
  Oligonucleotide for detection of SNP TSC0007206
accctcgaaatat

SEQ ID NO: 209495 - DNA, 13 bp, Artificial Sequence
  Oligonucleotide for detection of SNP TSC0051169
ttgttcgttttag

SEQ ID NO: 209496 - DNA, 13 bp, Artificial Sequence
  Oligonucleotide for detection of SNP TSC0051169
ctaaaacgaacaa

SEQ ID NO: 209497 - DNA, 13 bp, Artificial Sequence
  Oligonucleotide for detection of SNP TSC0051169
ttgaggtgggtaa

SEQ ID NO: 209498 - DNA, 13 bp, Artificial Sequence
  Oligonucleotide for detection of SNP TSC0051169
ttacccacctcaa

SEQ ID NO: 209499 - DNA, 13 bp, Artificial Sequence
  Oligonucleotide for detection of SNP TSC0051169
ttgaggcgggtaa

SEQ ID NO: 209500 - DNA, 13 bp, Artificial Sequence
  Oligonucleotide for detection of SNP TSC0051169
ttacccgcctcaa

SEQ ID NO: 209501 - DNA, 13 bp, Artificial Sequence
  Oligonucleotide for detection of SNP TSC0051172
gggtaagtatatg

SEQ ID NO: 209502 - DNA, 13 bp, Artificial Sequence
  Oligonucleotide for detection of SNP TSC0051172
catatacttaccc

SEQ ID NO: 209503 - DNA, 13 bp, Artificial Sequence
  Oligonucleotide for detection of SNP TSC0051172
gggtaaatatatg

SEQ ID NO: 209504 - DNA, 13 bp, Artificial Sequence
  Oligonucleotide for detection of SNP TSC0051172
catatatttaccc

SEQ ID NO: 209505 - DNA, 13 bp, Artificial Sequence
  Oligonucleotide for detection of SNP TSC0004873
gtagttaagatta

SEQ ID NO: 209506 - DNA, 13 bp, Artificial Sequence
  Oligonucleotide for detection of SNP TSC0004873
taatcttaactac

SEQ ID NO: 209507 - DNA, 13 bp, Artificial Sequence
  Oligonucleotide for detection of SNP TSC0004873
gtagttgagatta

SEQ ID NO: 209508 - DNA, 13 bp, Artificial Sequence
  Oligonucleotide for detection of SNP TSC0004873
taatctcaactac

SEQ ID NO: 209509 - DNA, 13 bp, Artificial Sequence
  Oligonucleotide for detection of SNP TSC0051173
agaaatggagggt

SEQ ID NO: 209510 - DNA, 13 bp, Artificial Sequence
  Oligonucleotide for detection of SNP TSC0051173
accctccatttct

SEQ ID NO: 209511 - DNA, 13 bp, Artificial Sequence
  Oligonucleotide for detection of SNP TSC0051173
agaaatagagggt

SEQ ID NO: 209512 - DNA, 13 bp, Artificial Sequence
  Oligonucleotide for detection of SNP TSC0051173
accctctatttct

SEQ ID NO: 209513 - DNA, 13 bp, Artificial Sequence
  Oligonucleotide for detection of SNP TSC0051173
agaaacggagggt

SEQ ID NO: 209514 - DNA, 13 bp, Artificial Sequence
  Oligonucleotide for detection of SNP TSC0051173
accctccgtttct

SEQ ID NO: 209515 - DNA, 13 bp, Artificial Sequence
  Oligonucleotide for detection of SNP TSC0051174
aaggttaataaga

SEQ ID NO: 209516 - DNA, 13 bp, Artificial Sequence
  Oligonucleotide for detection of SNP TSC0051174
tcttattaacctt

SEQ ID NO: 209517 - DNA, 13 bp, Artificial Sequence
  Oligonucleotide for detection of SNP TSC0051174
aaggttgataaga

SEQ ID NO: 209518 - DNA, 13 bp, Artificial Sequence
  Oligonucleotide for detection of SNP TSC0051174
tcttatcaacctt

SEQ ID NO: 209519 - DNA, 13 bp, Artificial Sequence
  Oligonucleotide for detection of SNP TSC0051175
agaatttgtttga

SEQ ID NO: 209520 - DNA, 13 bp, Artificial Sequence
  Oligonucleotide for detection of SNP TSC0051175
tcaaacaaattct

SEQ ID NO: 209521 - DNA, 13 bp, Artificial Sequence
  Oligonucleotide for detection of SNP TSC0051175
agaattcgtttga

SEQ ID NO: 209522 - DNA, 13 bp, Artificial Sequence
  Oligonucleotide for detection of SNP TSC0051175
tcaaacgaattct

SEQ ID NO: 209523 - DNA, 13 bp, Artificial Sequence
  Oligonucleotide for detection of SNP TSC0051175
ttaaatgaatttt

SEQ ID NO: 209524 - DNA, 13 bp, Artificial Sequence
  Oligonucleotide for detection of SNP TSC0051175
aaaattcatttaa

SEQ ID NO: 209525 - DNA, 13 bp, Artificial Sequence
  Oligonucleotide for detection of SNP TSC0051175
ttaaataaatttt

SEQ ID NO: 209526 - DNA, 13 bp, Artificial Sequence
  Oligonucleotide for detection of SNP TSC0051175
aaaatttatttaa

SEQ ID NO: 209527 - DNA, 13 bp, Artificial Sequence
  Oligonucleotide for detection of SNP TSC0051175
ttaaacgaatttt

SEQ ID NO: 209528 - DNA, 13 bp, Artificial Sequence
  Oligonucleotide for detection of SNP TSC0051175
aaaattcgtttaa

SEQ ID NO: 209529 - DNA, 13 bp, Artificial Sequence
  Oligonucleotide for detection of SNP TSC0051176
aaaatataatttt

SEQ ID NO: 209530 - DNA, 13 bp, Artificial Sequence
  Oligonucleotide for detection of SNP TSC0051176
aaaattatatttt

SEQ ID NO: 209531 - DNA, 13 bp, Artificial Sequence
  Oligonucleotide for detection of SNP TSC0051176
aaaatagaatttt

SEQ ID NO: 209532 - DNA, 13 bp, Artificial Sequence
  Oligonucleotide for detection of SNP TSC0051176
aaaattctatttt

SEQ ID NO: 209533 - DNA, 13 bp, Artificial Sequence
  Oligonucleotide for detection of SNP TSC0008764
ggatttttggaaa

SEQ ID NO: 209534 - DNA, 13 bp, Artificial Sequence
  Oligonucleotide for detection of SNP TSC0008764
tttccaaaaatcc

SEQ ID NO: 209535 - DNA, 13 bp, Artificial Sequence
  Oligonucleotide for detection of SNP TSC0008764
ggatttgtggaaa

SEQ ID NO: 209536 - DNA, 13 bp, Artificial Sequence
  Oligonucleotide for detection of SNP TSC0008764
tttccacaaatcc

SEQ ID NO: 209537 - DNA, 13 bp, Artificial Sequence
  Oligonucleotide for detection of SNP TSC0008764
ggattcgtggaaa

SEQ ID NO: 209538 - DNA, 13 bp, Artificial Sequence
  Oligonucleotide for detection of SNP TSC0008764
tttccacgaatcc

SEQ ID NO: 209539 - DNA, 13 bp, Artificial Sequence
  Oligonucleotide for detection of SNP TSC0008764
tttttaggggtty

SEQ ID NO: 209540 - DNA, 13 bp, Artificial Sequence
  Oligonucleotide for detection of SNP TSC0008764
raacccctaaaaa

SEQ ID NO: 209541 - DNA, 13 bp, Artificial Sequence
  Oligonucleotide for detection of SNP TSC0008764
tttttatgggtty

SEQ ID NO: 209542 - DNA, 13 bp, Artificial Sequence
  Oligonucleotide for detection of SNP TSC0008764
raacccataaaaa

SEQ ID NO: 209543 - DNA, 13 bp, Artificial Sequence
  Oligonucleotide for detection of SNP TSC0008764
tttttacgggtty

SEQ ID NO: 209544 - DNA, 13 bp, Artificial Sequence
  Oligonucleotide for detection of SNP TSC0008764
raacccgtaaaaa

SEQ ID NO: 209545 - DNA, 13 bp, Artificial Sequence
  Oligonucleotide for detection of SNP TSC0051179
taggtatgcgtta

SEQ ID NO: 209546 - DNA, 13 bp, Artificial Sequence
  Oligonucleotide for detection of SNP TSC0051179
taacgcataccta

SEQ ID NO: 209547 - DNA, 13 bp, Artificial Sequence
  Oligonucleotide for detection of SNP TSC0051179
taggtacgcgtta

SEQ ID NO: 209548 - DNA, 13 bp, Artificial Sequence
  Oligonucleotide for detection of SNP TSC0051179
taacgcgtaccta

SEQ ID NO: 209549 - DNA, 13 bp, Artificial Sequence
  Oligonucleotide for detection of SNP TSC0051179
tggtgtgtgtttg

SEQ ID NO: 209550 - DNA, 13 bp, Artificial Sequence
  Oligonucleotide for detection of SNP TSC0051179
caaacacacacca

SEQ ID NO: 209551 - DNA, 13 bp, Artificial Sequence
  Oligonucleotide for detection of SNP TSC0051179
tggtgtatgtttg

SEQ ID NO: 209552 - DNA, 13 bp, Artificial Sequence
  Oligonucleotide for detection of SNP TSC0051179
caaacatacacca

SEQ ID NO: 209553 - DNA, 13 bp, Artificial Sequence
  Oligonucleotide for detection of SNP TSC0051179
tggcgtgtgtttg

SEQ ID NO: 209554 - DNA, 13 bp, Artificial Sequence
  Oligonucleotide for detection of SNP TSC0051179
caaacacacgcca

SEQ ID NO: 209555 - DNA, 13 bp, Artificial Sequence
  Oligonucleotide for detection of SNP TSC0051179
tggcgtatgtttg

SEQ ID NO: 209556 - DNA, 13 bp, Artificial Sequence
  Oligonucleotide for detection of SNP TSC0051179
caaacatacgcca

SEQ ID NO: 209557 - DNA, 13 bp, Artificial Sequence
  Oligonucleotide for detection of SNP TSC0051179
tggtgcgtgtttg

SEQ ID NO: 209558 - DNA, 13 bp, Artificial Sequence
  Oligonucleotide for detection of SNP TSC0051179
caaacacgcacca

SEQ ID NO: 209559 - DNA, 13 bp, Artificial Sequence
  Oligonucleotide for detection of SNP TSC0051179
tggcgcgtgtttg

SEQ ID NO: 209560 - DNA, 13 bp, Artificial Sequence
  Oligonucleotide for detection of SNP TSC0051179
caaacacgcgcca

SEQ ID NO: 209561 - DNA, 13 bp, Artificial Sequence
  Oligonucleotide for detection of SNP TSC0051180
taatagtggtagy

SEQ ID NO: 209562 - DNA, 13 bp, Artificial Sequence
  Oligonucleotide for detection of SNP TSC0051180
rctaccactatta

SEQ ID NO: 209563 - DNA, 13 bp, Artificial Sequence
  Oligonucleotide for detection of SNP TSC0051180
taataggggtagy

SEQ ID NO: 209564 - DNA, 13 bp, Artificial Sequence
  Oligonucleotide for detection of SNP TSC0051180
rctacccctatta

SEQ ID NO: 209565 - DNA, 13 bp, Artificial Sequence
  Oligonucleotide for detection of SNP TSC0051180
taatagcggtagy

SEQ ID NO: 209566 - DNA, 13 bp, Artificial Sequence
  Oligonucleotide for detection of SNP TSC0051180
rctaccgctatta

SEQ ID NO: 209567 - DNA, 13 bp, Artificial Sequence
  Oligonucleotide for detection of SNP TSC0051180
gttgttgttgttg

SEQ ID NO: 209568 - DNA, 13 bp, Artificial Sequence
  Oligonucleotide for detection of SNP TSC0051180
caacaacaacaac

SEQ ID NO: 209569 - DNA, 13 bp, Artificial Sequence
  Oligonucleotide for detection of SNP TSC0051180
gttgtttttgttg

SEQ ID NO: 209570 - DNA, 13 bp, Artificial Sequence
  Oligonucleotide for detection of SNP TSC0051180
caacaaaaacaac

SEQ ID NO: 209571 - DNA, 13 bp, Artificial Sequence
  Oligonucleotide for detection of SNP TSC0051180
gttgtcgttgttg

SEQ ID NO: 209572 - DNA, 13 bp, Artificial Sequence
  Oligonucleotide for detection of SNP TSC0051180
caacaacgacaac

SEQ ID NO: 209573 - DNA, 13 bp, Artificial Sequence
  Oligonucleotide for detection of SNP TSC0005944
taattagaggatt

SEQ ID NO: 209574 - DNA, 13 bp, Artificial Sequence
  Oligonucleotide for detection of SNP TSC0005944
aatcctctaatta

SEQ ID NO: 209575 - DNA, 13 bp, Artificial Sequence
  Oligonucleotide for detection of SNP TSC0005944
taattaaaggatt

SEQ ID NO: 209576 - DNA, 13 bp, Artificial Sequence
  Oligonucleotide for detection of SNP TSC0005944
aatcctttaatta

SEQ ID NO: 209577 - DNA, 13 bp, Artificial Sequence
  Oligonucleotide for detection of SNP TSC0051181
ggataatgtaaga

SEQ ID NO: 209578 - DNA, 13 bp, Artificial Sequence
  Oligonucleotide for detection of SNP TSC0051181
tcttacattatcc

SEQ ID NO: 209579 - DNA, 13 bp, Artificial Sequence
  Oligonucleotide for detection of SNP TSC0051181
ggataacgtaaga

SEQ ID NO: 209580 - DNA, 13 bp, Artificial Sequence
  Oligonucleotide for detection of SNP TSC0051181
tcttacgttatcc

SEQ ID NO: 209581 - DNA, 13 bp, Artificial Sequence
  Oligonucleotide for detection of SNP TSC0051182
ttgttgtgattay

SEQ ID NO: 209582 - DNA, 13 bp, Artificial Sequence
  Oligonucleotide for detection of SNP TSC0051182
rtaatcacaacaa

SEQ ID NO: 209583 - DNA, 13 bp, Artificial Sequence
  Oligonucleotide for detection of SNP TSC0051182
ttgttgcgattay

SEQ ID NO: 209584 - DNA, 13 bp, Artificial Sequence
  Oligonucleotide for detection of SNP TSC0051182
rtaatcgcaacaa

SEQ ID NO: 209585 - DNA, 13 bp, Artificial Sequence
  Oligonucleotide for detection of SNP TSC0051182
gtaattgtagtaa

SEQ ID NO: 209586 - DNA, 13 bp, Artificial Sequence
  Oligonucleotide for detection of SNP TSC0051182
ttactacaattac

SEQ ID NO: 209587 - DNA, 13 bp, Artificial Sequence
  Oligonucleotide for detection of SNP TSC0051182
gtaattatagtaa

SEQ ID NO: 209588 - DNA, 13 bp, Artificial Sequence
  Oligonucleotide for detection of SNP TSC0051182
ttactataattac

SEQ ID NO: 209589 - DNA, 13 bp, Artificial Sequence
  Oligonucleotide for detection of SNP TSC0051182
gtaatcgtagtaa

SEQ ID NO: 209590 - DNA, 13 bp, Artificial Sequence
  Oligonucleotide for detection of SNP TSC0051182
ttactacgattac

SEQ ID NO: 209591 - DNA, 13 bp, Artificial Sequence
  Oligonucleotide for detection of SNP TSC0051183
taagtgtgttgtt

SEQ ID NO: 209592 - DNA, 13 bp, Artificial Sequence
  Oligonucleotide for detection of SNP TSC0051183
aacaacacactta

SEQ ID NO: 209593 - DNA, 13 bp, Artificial Sequence
  Oligonucleotide for detection of SNP TSC0051183
taagtgcgttgtt

SEQ ID NO: 209594 - DNA, 13 bp, Artificial Sequence
  Oligonucleotide for detection of SNP TSC0051183
aacaacgcactta

SEQ ID NO: 209595 - DNA, 13 bp, Artificial Sequence
  Oligonucleotide for detection of SNP TSC0051183
aatagtgtatttg

SEQ ID NO: 209596 - DNA, 13 bp, Artificial Sequence
  Oligonucleotide for detection of SNP TSC0051183
caaatacactatt

SEQ ID NO: 209597 - DNA, 13 bp, Artificial Sequence
  Oligonucleotide for detection of SNP TSC0051183
aatagtatatttg

SEQ ID NO: 209598 - DNA, 13 bp, Artificial Sequence
  Oligonucleotide for detection of SNP TSC0051183
caaatatactatt

SEQ ID NO: 209599 - DNA, 13 bp, Artificial Sequence
  Oligonucleotide for detection of SNP TSC0051183
aatagcgtatttg

SEQ ID NO: 209600 - DNA, 13 bp, Artificial Sequence
  Oligonucleotide for detection of SNP TSC0051183
caaatacgctatt

SEQ ID NO: 209601 - DNA, 13 bp, Artificial Sequence
  Oligonucleotide for detection of SNP TSC0051184
aaaggaaggtagy

SEQ ID NO: 209602 - DNA, 13 bp, Artificial Sequence
  Oligonucleotide for detection of SNP TSC0051184
rctaccttccttt

SEQ ID NO: 209603 - DNA, 13 bp, Artificial Sequence
  Oligonucleotide for detection of SNP TSC0051184
aaaggagggtagy

SEQ ID NO: 209604 - DNA, 13 bp, Artificial Sequence
  Oligonucleotide for detection of SNP TSC0051184
rctaccctccttt

SEQ ID NO: 209605 - DNA, 13 bp, Artificial Sequence
  Oligonucleotide for detection of SNP TSC0051186
ggttatatttata

SEQ ID NO: 209606 - DNA, 13 bp, Artificial Sequence
  Oligonucleotide for detection of SNP TSC0051186
tataaatataacc

SEQ ID NO: 209607 - DNA, 13 bp, Artificial Sequence
  Oligonucleotide for detection of SNP TSC0051186
ggttatgtttata

SEQ ID NO: 209608 - DNA, 13 bp, Artificial Sequence
  Oligonucleotide for detection of SNP TSC0051186
tataaacataacc

SEQ ID NO: 209609 - DNA, 13 bp, Artificial Sequence
  Oligonucleotide for detection of SNP TSC0051187
atgaatataagty

SEQ ID NO: 209610 - DNA, 13 bp, Artificial Sequence
  Oligonucleotide for detection of SNP TSC0051187
racttatattcat

SEQ ID NO: 209611 - DNA, 13 bp, Artificial Sequence
  Oligonucleotide for detection of SNP TSC0051187
atgaatgtaagty

SEQ ID NO: 209612 - DNA, 13 bp, Artificial Sequence
  Oligonucleotide for detection of SNP TSC0051187
racttacattcat

SEQ ID NO: 209613 - DNA, 13 bp, Artificial Sequence
  Oligonucleotide for detection of SNP TSC0007550
ttaagtgaaataa

SEQ ID NO: 209614 - DNA, 13 bp, Artificial Sequence
  Oligonucleotide for detection of SNP TSC0007550
ttatttcacttaa

SEQ ID NO: 209615 - DNA, 13 bp, Artificial Sequence
  Oligonucleotide for detection of SNP TSC0007550
ttaagtaaaataa

SEQ ID NO: 209616 - DNA, 13 bp, Artificial Sequence
  Oligonucleotide for detection of SNP TSC0007550
ttattttacttaa

SEQ ID NO: 209617 - DNA, 13 bp, Artificial Sequence
  Oligonucleotide for detection of SNP TSC0051188
tatttgggttttg

SEQ ID NO: 209618 - DNA, 13 bp, Artificial Sequence
  Oligonucleotide for detection of SNP TSC0051188
caaaacccaaata

SEQ ID NO: 209619 - DNA, 13 bp, Artificial Sequence
  Oligonucleotide for detection of SNP TSC0051188
tatttgagttttg

SEQ ID NO: 209620 - DNA, 13 bp, Artificial Sequence
  Oligonucleotide for detection of SNP TSC0051188
caaaactcaaata

SEQ ID NO: 209621 - DNA, 13 bp, Artificial Sequence
  Oligonucleotide for detection of SNP TSC0009811
gattgttgttatt

SEQ ID NO: 209622 - DNA, 13 bp, Artificial Sequence
  Oligonucleotide for detection of SNP TSC0009811
aataacaacaatc

SEQ ID NO: 209623 - DNA, 13 bp, Artificial Sequence
  Oligonucleotide for detection of SNP TSC0009811
gattgtcgttatt

SEQ ID NO: 209624 - DNA, 13 bp, Artificial Sequence
  Oligonucleotide for detection of SNP TSC0009811
aataacgacaatc

SEQ ID NO: 209625 - DNA, 13 bp, Artificial Sequence
  Oligonucleotide for detection of SNP TSC0009811
agtggtggtaaty

SEQ ID NO: 209626 - DNA, 13 bp, Artificial Sequence
  Oligonucleotide for detection of SNP TSC0009811
rattaccaccact

SEQ ID NO: 209627 - DNA, 13 bp, Artificial Sequence
  Oligonucleotide for detection of SNP TSC0009811
agtggtagtaaty

SEQ ID NO: 209628 - DNA, 13 bp, Artificial Sequence
  Oligonucleotide for detection of SNP TSC0009811
rattactaccact

SEQ ID NO: 209629 - DNA, 13 bp, Artificial Sequence
  Oligonucleotide for detection of SNP TSC0009811
agtggcggtaaty

SEQ ID NO: 209630 - DNA, 13 bp, Artificial Sequence
  Oligonucleotide for detection of SNP TSC0009811
rattaccgccact

SEQ ID NO: 209631 - DNA, 13 bp, Artificial Sequence
  Oligonucleotide for detection of SNP TSC0051189
gtaggtttttaag

SEQ ID NO: 209632 - DNA, 13 bp, Artificial Sequence
  Oligonucleotide for detection of SNP TSC0051189
cttaaaaacctac

SEQ ID NO: 209633 - DNA, 13 bp, Artificial Sequence
  Oligonucleotide for detection of SNP TSC0051189
gtaggtgtttaag

SEQ ID NO: 209634 - DNA, 13 bp, Artificial Sequence
  Oligonucleotide for detection of SNP TSC0051189
cttaaacacctac

SEQ ID NO: 209635 - DNA, 13 bp, Artificial Sequence
  Oligonucleotide for detection of SNP TSC0051189
gtaggcgtttaag

SEQ ID NO: 209636 - DNA, 13 bp, Artificial Sequence
  Oligonucleotide for detection of SNP TSC0051189
cttaaacgcctac

SEQ ID NO: 209637 - DNA, 13 bp, Artificial Sequence
  Oligonucleotide for detection of SNP TSC0051189
tttgggggtttgy

SEQ ID NO: 209638 - DNA, 13 bp, Artificial Sequence
  Oligonucleotide for detection of SNP TSC0051189
rcaaacccccaaa

SEQ ID NO: 209639 - DNA, 13 bp, Artificial Sequence
  Oligonucleotide for detection of SNP TSC0051189
tttgggtgtttgy

SEQ ID NO: 209640 - DNA, 13 bp, Artificial Sequence
  Oligonucleotide for detection of SNP TSC0051189
rcaaacacccaaa

SEQ ID NO: 209641 - DNA, 13 bp, Artificial Sequence
  Oligonucleotide for detection of SNP TSC0051189
tttgggcgtttgy

SEQ ID NO: 209642 - DNA, 13 bp, Artificial Sequence
  Oligonucleotide for detection of SNP TSC0051189
rcaaacgcccaaa

SEQ ID NO: 209643 - DNA, 13 bp, Artificial Sequence
  Oligonucleotide for detection of SNP TSC0007328
agagatgtattga

SEQ ID NO: 209644 - DNA, 13 bp, Artificial Sequence
  Oligonucleotide for detection of SNP TSC0007328
tcaatacatctct

SEQ ID NO: 209645 - DNA, 13 bp, Artificial Sequence
  Oligonucleotide for detection of SNP TSC0007328
agagatatattga

SEQ ID NO: 209646 - DNA, 13 bp, Artificial Sequence
  Oligonucleotide for detection of SNP TSC0007328
tcaatatatctct

SEQ ID NO: 209647 - DNA, 13 bp, Artificial Sequence
  Oligonucleotide for detection of SNP TSC0051190
aaattaatggaga

SEQ ID NO: 209648 - DNA, 13 bp, Artificial Sequence
  Oligonucleotide for detection of SNP TSC0051190
tctccattaattt

SEQ ID NO: 209649 - DNA, 13 bp, Artificial Sequence
  Oligonucleotide for detection of SNP TSC0051190
aaattagtggaga

SEQ ID NO: 209650 - DNA, 13 bp, Artificial Sequence
  Oligonucleotide for detection of SNP TSC0051190
tctccactaattt

SEQ ID NO: 209651 - DNA, 13 bp, Artificial Sequence
  Oligonucleotide for detection of SNP TSC0051192
taaattgattaaa

SEQ ID NO: 209652 - DNA, 13 bp, Artificial Sequence
  Oligonucleotide for detection of SNP TSC0051192
tttaatcaattta

SEQ ID NO: 209653 - DNA, 13 bp, Artificial Sequence
  Oligonucleotide for detection of SNP TSC0051192
taaattaattaaa

SEQ ID NO: 209654 - DNA, 13 bp, Artificial Sequence
  Oligonucleotide for detection of SNP TSC0051192
tttaattaattta

SEQ ID NO: 209655 - DNA, 13 bp, Artificial Sequence
  Oligonucleotide for detection of SNP TSC0051193
aaaatagtaaaat

SEQ ID NO: 209656 - DNA, 13 bp, Artificial Sequence
  Oligonucleotide for detection of SNP TSC0051193
attttactatttt

SEQ ID NO: 209657 - DNA, 13 bp, Artificial Sequence
  Oligonucleotide for detection of SNP TSC0051194
atattgagtatgg

SEQ ID NO: 209658 - DNA, 13 bp, Artificial Sequence
  Oligonucleotide for detection of SNP TSC0051194
ccatactcaatat

SEQ ID NO: 209659 - DNA, 13 bp, Artificial Sequence
  Oligonucleotide for detection of SNP TSC0051194
atattgtgtatgg

SEQ ID NO: 209660 - DNA, 13 bp, Artificial Sequence
  Oligonucleotide for detection of SNP TSC0051194
ccatacacaatat

SEQ ID NO: 209661 - DNA, 13 bp, Artificial Sequence
  Oligonucleotide for detection of SNP TSC0051194
ttatgtttagtat

SEQ ID NO: 209662 - DNA, 13 bp, Artificial Sequence
  Oligonucleotide for detection of SNP TSC0051194
atactaaacataa

SEQ ID NO: 209663 - DNA, 13 bp, Artificial Sequence
  Oligonucleotide for detection of SNP TSC0051194
ttatgtatagtat

SEQ ID NO: 209664 - DNA, 13 bp, Artificial Sequence
  Oligonucleotide for detection of SNP TSC0051194
atactatacataa

SEQ ID NO: 209665 - DNA, 13 bp, Artificial Sequence
  Oligonucleotide for detection of SNP TSC0008119
tatttttttagag

SEQ ID NO: 209666 - DNA, 13 bp, Artificial Sequence
  Oligonucleotide for detection of SNP TSC0008119
ctctaaaaaaata

SEQ ID NO: 209667 - DNA, 13 bp, Artificial Sequence
  Oligonucleotide for detection of SNP TSC0008119
ttttgaaagggta

SEQ ID NO: 209668 - DNA, 13 bp, Artificial Sequence
  Oligonucleotide for detection of SNP TSC0008119
taccctttcaaaa

SEQ ID NO: 209669 - DNA, 13 bp, Artificial Sequence
  Oligonucleotide for detection of SNP TSC0008119
ttttgatagggta

SEQ ID NO: 209670 - DNA, 13 bp, Artificial Sequence
  Oligonucleotide for detection of SNP TSC0008119
taccctatcaaaa

SEQ ID NO: 209671 - DNA, 13 bp, Artificial Sequence
  Oligonucleotide for detection of SNP TSC0051195
ttatttgggagaa

SEQ ID NO: 209672 - DNA, 13 bp, Artificial Sequence
  Oligonucleotide for detection of SNP TSC0051195
ttctcccaaataa

SEQ ID NO: 209673 - DNA, 13 bp, Artificial Sequence
  Oligonucleotide for detection of SNP TSC0051197
gttataataagga

SEQ ID NO: 209674 - DNA, 13 bp, Artificial Sequence
  Oligonucleotide for detection of SNP TSC0051197
tccttattataac

SEQ ID NO: 209675 - DNA, 13 bp, Artificial Sequence
  Oligonucleotide for detection of SNP TSC0051197
gttatagtaagga

SEQ ID NO: 209676 - DNA, 13 bp, Artificial Sequence
  Oligonucleotide for detection of SNP TSC0051197
tccttactataac

SEQ ID NO: 209677 - DNA, 13 bp, Artificial Sequence
  Oligonucleotide for detection of SNP TSC0051199
agagttgttttty

SEQ ID NO: 209678 - DNA, 13 bp, Artificial Sequence
  Oligonucleotide for detection of SNP TSC0051199
raaaaacaactct

SEQ ID NO: 209679 - DNA, 13 bp, Artificial Sequence
  Oligonucleotide for detection of SNP TSC0051199
agagttattttty

SEQ ID NO: 209680 - DNA, 13 bp, Artificial Sequence
  Oligonucleotide for detection of SNP TSC0051199
raaaaataactct

SEQ ID NO: 209681 - DNA, 13 bp, Artificial Sequence
  Oligonucleotide for detection of SNP TSC0051203
gtggatagaaaat

SEQ ID NO: 209682 - DNA, 13 bp, Artificial Sequence
  Oligonucleotide for detection of SNP TSC0051203
attttctatccac

SEQ ID NO: 209683 - DNA, 13 bp, Artificial Sequence
  Oligonucleotide for detection of SNP TSC0051203
gtggatggaaaat

SEQ ID NO: 209684 - DNA, 13 bp, Artificial Sequence
  Oligonucleotide for detection of SNP TSC0051203
attttccatccac

SEQ ID NO: 209685 - DNA, 13 bp, Artificial Sequence
  Oligonucleotide for detection of SNP TSC0051203
gtggacggaaaat

SEQ ID NO: 209686 - DNA, 13 bp, Artificial Sequence
  Oligonucleotide for detection of SNP TSC0051203
attttccgtccac

SEQ ID NO: 209687 - DNA, 13 bp, Artificial Sequence
  Oligonucleotide for detection of SNP TSC0051203
attttttgtttay

SEQ ID NO: 209688 - DNA, 13 bp, Artificial Sequence
  Oligonucleotide for detection of SNP TSC0051203
rtaaacaaaaaat

SEQ ID NO: 209689 - DNA, 13 bp, Artificial Sequence
  Oligonucleotide for detection of SNP TSC0051203
atttttcgtttay

SEQ ID NO: 209690 - DNA, 13 bp, Artificial Sequence
  Oligonucleotide for detection of SNP TSC0051203
rtaaacgaaaaat

SEQ ID NO: 209691 - DNA, 13 bp, Artificial Sequence
  Oligonucleotide for detection of SNP TSC0006593
gtgagatttgtaa

SEQ ID NO: 209692 - DNA, 13 bp, Artificial Sequence
  Oligonucleotide for detection of SNP TSC0006593
ttacaaatctcac

SEQ ID NO: 209693 - DNA, 13 bp, Artificial Sequence
  Oligonucleotide for detection of SNP TSC0006593
gtgagagttgtaa

SEQ ID NO: 209694 - DNA, 13 bp, Artificial Sequence
  Oligonucleotide for detection of SNP TSC0006593
ttacaactctcac

SEQ ID NO: 209695 - DNA, 13 bp, Artificial Sequence
  Oligonucleotide for detection of SNP TSC0006593
ttgtaaattttay

SEQ ID NO: 209696 - DNA, 13 bp, Artificial Sequence
  Oligonucleotide for detection of SNP TSC0006593
rtaaaatttacaa

SEQ ID NO: 209697 - DNA, 13 bp, Artificial Sequence
  Oligonucleotide for detection of SNP TSC0006593
ttgtaatttttay

SEQ ID NO: 209698 - DNA, 13 bp, Artificial Sequence
  Oligonucleotide for detection of SNP TSC0006593
rtaaaaattacaa

SEQ ID NO: 209699 - DNA, 13 bp, Artificial Sequence
  Oligonucleotide for detection of SNP TSC0006594
gatgatatgagtg

SEQ ID NO: 209700 - DNA, 13 bp, Artificial Sequence
  Oligonucleotide for detection of SNP TSC0006594
cactcatatcatc

SEQ ID NO: 209701 - DNA, 13 bp, Artificial Sequence
  Oligonucleotide for detection of SNP TSC0006594
gatgatgtgagtg

SEQ ID NO: 209702 - DNA, 13 bp, Artificial Sequence
  Oligonucleotide for detection of SNP TSC0006594
cactcacatcatc

SEQ ID NO: 209703 - DNA, 13 bp, Artificial Sequence
  Oligonucleotide for detection of SNP TSC0006594
gatgacgtgagtg

SEQ ID NO: 209704 - DNA, 13 bp, Artificial Sequence
  Oligonucleotide for detection of SNP TSC0006594
cactcacgtcatc

SEQ ID NO: 209705 - DNA, 13 bp, Artificial Sequence
  Oligonucleotide for detection of SNP TSC0006594
tatttatgttaty

SEQ ID NO: 209706 - DNA, 13 bp, Artificial Sequence
  Oligonucleotide for detection of SNP TSC0006594
rataacataaata

SEQ ID NO: 209707 - DNA, 13 bp, Artificial Sequence
  Oligonucleotide for detection of SNP TSC0006594
tatttacgttaty

SEQ ID NO: 209708 - DNA, 13 bp, Artificial Sequence
  Oligonucleotide for detection of SNP TSC0006594
rataacgtaaata

SEQ ID NO: 209709 - DNA, 13 bp, Artificial Sequence
  Oligonucleotide for detection of SNP TSC0051207
aagtagaaattaa

SEQ ID NO: 209710 - DNA, 13 bp, Artificial Sequence
  Oligonucleotide for detection of SNP TSC0051207
ttaatttctactt

SEQ ID NO: 209711 - DNA, 13 bp, Artificial Sequence
  Oligonucleotide for detection of SNP TSC0051207
aagtagtaattaa

SEQ ID NO: 209712 - DNA, 13 bp, Artificial Sequence
  Oligonucleotide for detection of SNP TSC0051207
ttaattactactt

SEQ ID NO: 209713 - DNA, 13 bp, Artificial Sequence
  Oligonucleotide for detection of SNP TSC0051207
ttagtttttattt

SEQ ID NO: 209714 - DNA, 13 bp, Artificial Sequence
  Oligonucleotide for detection of SNP TSC0051207
aaataaaaactaa

SEQ ID NO: 209715 - DNA, 13 bp, Artificial Sequence
  Oligonucleotide for detection of SNP TSC0051207
ttagttgttattt

SEQ ID NO: 209716 - DNA, 13 bp, Artificial Sequence
  Oligonucleotide for detection of SNP TSC0051207
aaataacaactaa

SEQ ID NO: 209717 - DNA, 13 bp, Artificial Sequence
  Oligonucleotide for detection of SNP TSC0051208
gtttgaatattta

SEQ ID NO: 209718 - DNA, 13 bp, Artificial Sequence
  Oligonucleotide for detection of SNP TSC0051208
taaatattcaaac

SEQ ID NO: 209719 - DNA, 13 bp, Artificial Sequence
  Oligonucleotide for detection of SNP TSC0051208
gtttgattattta

SEQ ID NO: 209720 - DNA, 13 bp, Artificial Sequence
  Oligonucleotide for detection of SNP TSC0051208
taaataatcaaac

SEQ ID NO: 209721 - DNA, 13 bp, Artificial Sequence
  Oligonucleotide for detection of SNP TSC0051208
taaatatttagay

SEQ ID NO: 209722 - DNA, 13 bp, Artificial Sequence
  Oligonucleotide for detection of SNP TSC0051208
rtctaaatattta

SEQ ID NO: 209723 - DNA, 13 bp, Artificial Sequence
  Oligonucleotide for detection of SNP TSC0051208
taaataattagay

SEQ ID NO: 209724 - DNA, 13 bp, Artificial Sequence
  Oligonucleotide for detection of SNP TSC0051208
rtctaattattta

SEQ ID NO: 209725 - DNA, 13 bp, Artificial Sequence
  Oligonucleotide for detection of SNP TSC0051209
gtaaatagttatt

SEQ ID NO: 209726 - DNA, 13 bp, Artificial Sequence
  Oligonucleotide for detection of SNP TSC0051209
aataactatttac

SEQ ID NO: 209727 - DNA, 13 bp, Artificial Sequence
  Oligonucleotide for detection of SNP TSC0051209
gtaaatggttatt

SEQ ID NO: 209728 - DNA, 13 bp, Artificial Sequence
  Oligonucleotide for detection of SNP TSC0051209
aataaccatttac

SEQ ID NO: 209729 - DNA, 13 bp, Artificial Sequence
  Oligonucleotide for detection of SNP TSC0051210
agggtaattaatt

SEQ ID NO: 209730 - DNA, 13 bp, Artificial Sequence
  Oligonucleotide for detection of SNP TSC0051210
aattaattaccct

SEQ ID NO: 209731 - DNA, 13 bp, Artificial Sequence
  Oligonucleotide for detection of SNP TSC0051210
agggtatttaatt

SEQ ID NO: 209732 - DNA, 13 bp, Artificial Sequence
  Oligonucleotide for detection of SNP TSC0051210
aattaaataccct

SEQ ID NO: 209733 - DNA, 13 bp, Artificial Sequence
  Oligonucleotide for detection of SNP TSC0051210
aattaattgtttt

SEQ ID NO: 209734 - DNA, 13 bp, Artificial Sequence
  Oligonucleotide for detection of SNP TSC0051210
aaaacaattaatt

SEQ ID NO: 209735 - DNA, 13 bp, Artificial Sequence
  Oligonucleotide for detection of SNP TSC0051210
aattaaatgtttt

SEQ ID NO: 209736 - DNA, 13 bp, Artificial Sequence
  Oligonucleotide for detection of SNP TSC0051210
aaaacatttaatt

SEQ ID NO: 209737 - DNA, 13 bp, Artificial Sequence
  Oligonucleotide for detection of SNP TSC0051211
tatattatatttg

SEQ ID NO: 209738 - DNA, 13 bp, Artificial Sequence
  Oligonucleotide for detection of SNP TSC0051211
caaatataatata

SEQ ID NO: 209739 - DNA, 13 bp, Artificial Sequence
  Oligonucleotide for detection of SNP TSC0051211
tatattgtatttg

SEQ ID NO: 209740 - DNA, 13 bp, Artificial Sequence
  Oligonucleotide for detection of SNP TSC0051211
caaatacaatata

SEQ ID NO: 209741 - DNA, 13 bp, Artificial Sequence
  Oligonucleotide for detection of SNP TSC0051213
ttttgaataaata

SEQ ID NO: 209742 - DNA, 13 bp, Artificial Sequence
  Oligonucleotide for detection of SNP TSC0051213
tatttattcaaaa

SEQ ID NO: 209743 - DNA, 13 bp, Artificial Sequence
  Oligonucleotide for detection of SNP TSC0051213
ttttgagtaaata

SEQ ID NO: 209744 - DNA, 13 bp, Artificial Sequence
  Oligonucleotide for detection of SNP TSC0051213
tatttactcaaaa

SEQ ID NO: 209745 - DNA, 13 bp, Artificial Sequence
  Oligonucleotide for detection of SNP TSC0051214
atgataaagattt

SEQ ID NO: 209746 - DNA, 13 bp, Artificial Sequence
  Oligonucleotide for detection of SNP TSC0051214
aaatctttatcat

SEQ ID NO: 209747 - DNA, 13 bp, Artificial Sequence
  Oligonucleotide for detection of SNP TSC0051214
atgatagagattt

SEQ ID NO: 209748 - DNA, 13 bp, Artificial Sequence
  Oligonucleotide for detection of SNP TSC0051214
aaatctctatcat

SEQ ID NO: 209749 - DNA, 13 bp, Artificial Sequence
  Oligonucleotide for detection of SNP TSC0051214
acgataaagattt

SEQ ID NO: 209750 - DNA, 13 bp, Artificial Sequence
  Oligonucleotide for detection of SNP TSC0051214
aaatctttatcgt

SEQ ID NO: 209751 - DNA, 13 bp, Artificial Sequence
  Oligonucleotide for detection of SNP TSC0051214
acgatagagattt

SEQ ID NO: 209752 - DNA, 13 bp, Artificial Sequence
  Oligonucleotide for detection of SNP TSC0051214
aaatctctatcgt

SEQ ID NO: 209753 - DNA, 13 bp, Artificial Sequence
  Oligonucleotide for detection of SNP TSC0051215
ttagaatgtaagy

SEQ ID NO: 209754 - DNA, 13 bp, Artificial Sequence
  Oligonucleotide for detection of SNP TSC0051215
rcttacattctaa

SEQ ID NO: 209755 - DNA, 13 bp, Artificial Sequence
  Oligonucleotide for detection of SNP TSC0051215
ttagaacgtaagy

SEQ ID NO: 209756 - DNA, 13 bp, Artificial Sequence
  Oligonucleotide for detection of SNP TSC0051215
rcttacgttctaa

SEQ ID NO: 209757 - DNA, 13 bp, Artificial Sequence
  Oligonucleotide for detection of SNP TSC0051215
gtttgtgttttag

SEQ ID NO: 209758 - DNA, 13 bp, Artificial Sequence
  Oligonucleotide for detection of SNP TSC0051215
ctaaaacacaaac

SEQ ID NO: 209759 - DNA, 13 bp, Artificial Sequence
  Oligonucleotide for detection of SNP TSC0051215
gtttgtattttag

SEQ ID NO: 209760 - DNA, 13 bp, Artificial Sequence
  Oligonucleotide for detection of SNP TSC0051215
ctaaaatacaaac

SEQ ID NO: 209761 - DNA, 13 bp, Artificial Sequence
  Oligonucleotide for detection of SNP TSC0051215
gtttgcgttttag

SEQ ID NO: 209762 - DNA, 13 bp, Artificial Sequence
  Oligonucleotide for detection of SNP TSC0051215
ctaaaacgcaaac

SEQ ID NO: 209763 - DNA, 13 bp, Artificial Sequence
  Oligonucleotide for detection of SNP TSC0051216
attgttggaggtt

SEQ ID NO: 209764 - DNA, 13 bp, Artificial Sequence
  Oligonucleotide for detection of SNP TSC0051216
aacctccaacaat

SEQ ID NO: 209765 - DNA, 13 bp, Artificial Sequence
  Oligonucleotide for detection of SNP TSC0051216
attgttagaggtt

SEQ ID NO: 209766 - DNA, 13 bp, Artificial Sequence
  Oligonucleotide for detection of SNP TSC0051216
aacctctaacaat

SEQ ID NO: 209767 - DNA, 13 bp, Artificial Sequence
  Oligonucleotide for detection of SNP TSC0051217
gatttttgtatgt

SEQ ID NO: 209768 - DNA, 13 bp, Artificial Sequence
  Oligonucleotide for detection of SNP TSC0051217
acatacaaaaatc

SEQ ID NO: 209769 - DNA, 13 bp, Artificial Sequence
  Oligonucleotide for detection of SNP TSC0051217
gattttcgtatgt

SEQ ID NO: 209770 - DNA, 13 bp, Artificial Sequence
  Oligonucleotide for detection of SNP TSC0051217
acatacgaaaatc

SEQ ID NO: 209771 - DNA, 13 bp, Artificial Sequence
  Oligonucleotide for detection of SNP TSC0051217
atatgtgaagaty

SEQ ID NO: 209772 - DNA, 13 bp, Artificial Sequence
  Oligonucleotide for detection of SNP TSC0051217
ratcttcacatat

SEQ ID NO: 209773 - DNA, 13 bp, Artificial Sequence
  Oligonucleotide for detection of SNP TSC0051217
atatgtaaagaty

SEQ ID NO: 209774 - DNA, 13 bp, Artificial Sequence
  Oligonucleotide for detection of SNP TSC0051217
ratctttacatat

SEQ ID NO: 209775 - DNA, 13 bp, Artificial Sequence
  Oligonucleotide for detection of SNP TSC0051217
atatgcgaagaty

SEQ ID NO: 209776 - DNA, 13 bp, Artificial Sequence
  Oligonucleotide for detection of SNP TSC0051217
ratcttcgcatat

SEQ ID NO: 209777 - DNA, 13 bp, Artificial Sequence
  Oligonucleotide for detection of SNP TSC0051218
atttttagttgtt

SEQ ID NO: 209778 - DNA, 13 bp, Artificial Sequence
  Oligonucleotide for detection of SNP TSC0051218
aacaactaaaaat

SEQ ID NO: 209779 - DNA, 13 bp, Artificial Sequence
  Oligonucleotide for detection of SNP TSC0051218
atttttggttgtt

SEQ ID NO: 209780 - DNA, 13 bp, Artificial Sequence
  Oligonucleotide for detection of SNP TSC0051218
aacaaccaaaaat

SEQ ID NO: 209781 - DNA, 13 bp, Artificial Sequence
  Oligonucleotide for detection of SNP TSC0051219
aagagtatggtgg

SEQ ID NO: 209782 - DNA, 13 bp, Artificial Sequence
  Oligonucleotide for detection of SNP TSC0051219
ccaccatactctt

SEQ ID NO: 209783 - DNA, 13 bp, Artificial Sequence
  Oligonucleotide for detection of SNP TSC0051219
aagagtttggtgg

SEQ ID NO: 209784 - DNA, 13 bp, Artificial Sequence
  Oligonucleotide for detection of SNP TSC0051219
ccaccaaactctt

SEQ ID NO: 209785 - DNA, 13 bp, Artificial Sequence
  Oligonucleotide for detection of SNP TSC0051220
tttatttgtatty

SEQ ID NO: 209786 - DNA, 13 bp, Artificial Sequence
  Oligonucleotide for detection of SNP TSC0051220
raatacaaataaa

SEQ ID NO: 209787 - DNA, 13 bp, Artificial Sequence
  Oligonucleotide for detection of SNP TSC0051220
tttattggtatty

SEQ ID NO: 209788 - DNA, 13 bp, Artificial Sequence
  Oligonucleotide for detection of SNP TSC0051220
raataccaataaa

SEQ ID NO: 209789 - DNA, 13 bp, Artificial Sequence
  Oligonucleotide for detection of SNP TSC0051220
tttatcggtatty

SEQ ID NO: 209790 - DNA, 13 bp, Artificial Sequence
  Oligonucleotide for detection of SNP TSC0051220
raataccgataaa

SEQ ID NO: 209791 - DNA, 13 bp, Artificial Sequence
  Oligonucleotide for detection of SNP TSC0051220
gagtgtaggtaag

SEQ ID NO: 209792 - DNA, 13 bp, Artificial Sequence
  Oligonucleotide for detection of SNP TSC0051220
cttacctacactc

SEQ ID NO: 209793 - DNA, 13 bp, Artificial Sequence
  Oligonucleotide for detection of SNP TSC0051220
gagtgttggtaag

SEQ ID NO: 209794 - DNA, 13 bp, Artificial Sequence
  Oligonucleotide for detection of SNP TSC0051220
cttaccaacactc

SEQ ID NO: 209795 - DNA, 13 bp, Artificial Sequence
  Oligonucleotide for detection of SNP TSC0051220
gagtgtcggtaag

SEQ ID NO: 209796 - DNA, 13 bp, Artificial Sequence
  Oligonucleotide for detection of SNP TSC0051220
cttaccgacactc

SEQ ID NO: 209797 - DNA, 13 bp, Artificial Sequence
  Oligonucleotide for detection of SNP TSC0051221
gtatttaggttta

SEQ ID NO: 209798 - DNA, 13 bp, Artificial Sequence
  Oligonucleotide for detection of SNP TSC0051221
taaacctaaatac

SEQ ID NO: 209799 - DNA, 13 bp, Artificial Sequence
  Oligonucleotide for detection of SNP TSC0051221
gtatttgggttta

SEQ ID NO: 209800 - DNA, 13 bp, Artificial Sequence
  Oligonucleotide for detection of SNP TSC0051221
taaacccaaatac

SEQ ID NO: 209801 - DNA, 13 bp, Artificial Sequence
  Oligonucleotide for detection of SNP TSC0051221
gtattcgggttta

SEQ ID NO: 209802 - DNA, 13 bp, Artificial Sequence
  Oligonucleotide for detection of SNP TSC0051221
taaacccgaatac

SEQ ID NO: 209803 - DNA, 13 bp, Artificial Sequence
  Oligonucleotide for detection of SNP TSC0051221
tgaatttgagtay

SEQ ID NO: 209804 - DNA, 13 bp, Artificial Sequence
  Oligonucleotide for detection of SNP TSC0051221
rtactcaaattca

SEQ ID NO: 209805 - DNA, 13 bp, Artificial Sequence
  Oligonucleotide for detection of SNP TSC0051221
tgaattcgagtay

SEQ ID NO: 209806 - DNA, 13 bp, Artificial Sequence
  Oligonucleotide for detection of SNP TSC0051221
rtactcgaattca

SEQ ID NO: 209807 - DNA, 13 bp, Artificial Sequence
  Oligonucleotide for detection of SNP TSC0051223
ttgttaaatttty

SEQ ID NO: 209808 - DNA, 13 bp, Artificial Sequence
  Oligonucleotide for detection of SNP TSC0051223
raaaatttaacaa

SEQ ID NO: 209809 - DNA, 13 bp, Artificial Sequence
  Oligonucleotide for detection of SNP TSC0051223
ttgttagatttty

SEQ ID NO: 209810 - DNA, 13 bp, Artificial Sequence
  Oligonucleotide for detection of SNP TSC0051223
raaaatctaacaa

SEQ ID NO: 209811 - DNA, 13 bp, Artificial Sequence
  Oligonucleotide for detection of SNP TSC0051224
taggggaagtgga

SEQ ID NO: 209812 - DNA, 13 bp, Artificial Sequence
  Oligonucleotide for detection of SNP TSC0051224
tccacttccccta

SEQ ID NO: 209813 - DNA, 13 bp, Artificial Sequence
  Oligonucleotide for detection of SNP TSC0051224
tagggggagtgga

SEQ ID NO: 209814 - DNA, 13 bp, Artificial Sequence
  Oligonucleotide for detection of SNP TSC0051224
tccactcccccta

SEQ ID NO: 209815 - DNA, 13 bp, Artificial Sequence
  Oligonucleotide for detection of SNP TSC0051224
taggggaagcgga

SEQ ID NO: 209816 - DNA, 13 bp, Artificial Sequence
  Oligonucleotide for detection of SNP TSC0051224
tccgcttccccta

SEQ ID NO: 209817 - DNA, 13 bp, Artificial Sequence
  Oligonucleotide for detection of SNP TSC0051224
tagggggagcgga

SEQ ID NO: 209818 - DNA, 13 bp, Artificial Sequence
  Oligonucleotide for detection of SNP TSC0051224
tccgctcccccta

SEQ ID NO: 209819 - DNA, 13 bp, Artificial Sequence
  Oligonucleotide for detection of SNP TSC0051225
gtaattgatttta

SEQ ID NO: 209820 - DNA, 13 bp, Artificial Sequence
  Oligonucleotide for detection of SNP TSC0051225
taaaatcaattac

SEQ ID NO: 209821 - DNA, 13 bp, Artificial Sequence
  Oligonucleotide for detection of SNP TSC0051225
gtaattaatttta

SEQ ID NO: 209822 - DNA, 13 bp, Artificial Sequence
  Oligonucleotide for detection of SNP TSC0051225
taaaattaattac

SEQ ID NO: 209823 - DNA, 13 bp, Artificial Sequence
  Oligonucleotide for detection of SNP TSC0009890
gtttgagttgtaa

SEQ ID NO: 209824 - DNA, 13 bp, Artificial Sequence
  Oligonucleotide for detection of SNP TSC0009890
ttacaactcaaac

SEQ ID NO: 209825 - DNA, 13 bp, Artificial Sequence
  Oligonucleotide for detection of SNP TSC0009890
gtttgaattgtaa

SEQ ID NO: 209826 - DNA, 13 bp, Artificial Sequence
  Oligonucleotide for detection of SNP TSC0009890
ttacaattcaaac

SEQ ID NO: 209827 - DNA, 13 bp, Artificial Sequence
  Oligonucleotide for detection of SNP TSC0010120
tggaagttttagt

SEQ ID NO: 209828 - DNA, 13 bp, Artificial Sequence
  Oligonucleotide for detection of SNP TSC0010120
actaaaacttcca

SEQ ID NO: 209829 - DNA, 13 bp, Artificial Sequence
  Oligonucleotide for detection of SNP TSC0010120
tggaaggtttagt

SEQ ID NO: 209830 - DNA, 13 bp, Artificial Sequence
  Oligonucleotide for detection of SNP TSC0010120
actaaaccttcca

SEQ ID NO: 209831 - DNA, 13 bp, Artificial Sequence
  Oligonucleotide for detection of SNP TSC0010120
attagaattttta

SEQ ID NO: 209832 - DNA, 13 bp, Artificial Sequence
  Oligonucleotide for detection of SNP TSC0010120
taaaaattctaat

SEQ ID NO: 209833 - DNA, 13 bp, Artificial Sequence
  Oligonucleotide for detection of SNP TSC0010120
attagatttttta

SEQ ID NO: 209834 - DNA, 13 bp, Artificial Sequence
  Oligonucleotide for detection of SNP TSC0010120
taaaaaatctaat

SEQ ID NO: 209835 - DNA, 13 bp, Artificial Sequence
  Oligonucleotide for detection of SNP TSC0005245
ttataatttagga

SEQ ID NO: 209836 - DNA, 13 bp, Artificial Sequence
  Oligonucleotide for detection of SNP TSC0005245
tcctaaattataa

SEQ ID NO: 209837 - DNA, 13 bp, Artificial Sequence
  Oligonucleotide for detection of SNP TSC0005245
ttataagttagga

SEQ ID NO: 209838 - DNA, 13 bp, Artificial Sequence
  Oligonucleotide for detection of SNP TSC0005245
tcctaacttataa

SEQ ID NO: 209839 - DNA, 13 bp, Artificial Sequence
  Oligonucleotide for detection of SNP TSC0005245
ttttggattatag

SEQ ID NO: 209840 - DNA, 13 bp, Artificial Sequence
  Oligonucleotide for detection of SNP TSC0005245
ctataatccaaaa

SEQ ID NO: 209841 - DNA, 13 bp, Artificial Sequence
  Oligonucleotide for detection of SNP TSC0005245
ttttggtttatag

SEQ ID NO: 209842 - DNA, 13 bp, Artificial Sequence
  Oligonucleotide for detection of SNP TSC0005245
ctataaaccaaaa

SEQ ID NO: 209843 - DNA, 13 bp, Artificial Sequence
  Oligonucleotide for detection of SNP TSC0007657
ggttttgtgaatt

SEQ ID NO: 209844 - DNA, 13 bp, Artificial Sequence
  Oligonucleotide for detection of SNP TSC0007657
aattcacaaaacc

SEQ ID NO: 209845 - DNA, 13 bp, Artificial Sequence
  Oligonucleotide for detection of SNP TSC0007657
ggttttatgaatt

SEQ ID NO: 209846 - DNA, 13 bp, Artificial Sequence
  Oligonucleotide for detection of SNP TSC0007657
aattcataaaacc

SEQ ID NO: 209847 - DNA, 13 bp, Artificial Sequence
  Oligonucleotide for detection of SNP TSC0051227
aaaaaaaaaaagg

SEQ ID NO: 209848 - DNA, 13 bp, Artificial Sequence
  Oligonucleotide for detection of SNP TSC0051227
ccttttttttttt

SEQ ID NO: 209849 - DNA, 13 bp, Artificial Sequence
  Oligonucleotide for detection of SNP TSC0051227
aaaaaataaaagg

SEQ ID NO: 209850 - DNA, 13 bp, Artificial Sequence
  Oligonucleotide for detection of SNP TSC0051227
ccttttatttttt

SEQ ID NO: 209851 - DNA, 13 bp, Artificial Sequence
  Oligonucleotide for detection of SNP TSC0009262
aaagttatgatta

SEQ ID NO: 209852 - DNA, 13 bp, Artificial Sequence
  Oligonucleotide for detection of SNP TSC0009262
taatcataacttt

SEQ ID NO: 209853 - DNA, 13 bp, Artificial Sequence
  Oligonucleotide for detection of SNP TSC0009262
aaagttgtgatta

SEQ ID NO: 209854 - DNA, 13 bp, Artificial Sequence
  Oligonucleotide for detection of SNP TSC0009262
taatcacaacttt

SEQ ID NO: 209855 - DNA, 13 bp, Artificial Sequence
  Oligonucleotide for detection of SNP TSC0009262
aaagttacgatta

SEQ ID NO: 209856 - DNA, 13 bp, Artificial Sequence
  Oligonucleotide for detection of SNP TSC0009262
taatcgtaacttt

SEQ ID NO: 209857 - DNA, 13 bp, Artificial Sequence
  Oligonucleotide for detection of SNP TSC0009262
aaagtcgtgatta

SEQ ID NO: 209858 - DNA, 13 bp, Artificial Sequence
  Oligonucleotide for detection of SNP TSC0009262
taatcacgacttt

SEQ ID NO: 209859 - DNA, 13 bp, Artificial Sequence
  Oligonucleotide for detection of SNP TSC0009262
aaagttgcgatta

SEQ ID NO: 209860 - DNA, 13 bp, Artificial Sequence
  Oligonucleotide for detection of SNP TSC0009262
taatcgcaacttt

SEQ ID NO: 209861 - DNA, 13 bp, Artificial Sequence
  Oligonucleotide for detection of SNP TSC0009262
aaagtcgcgatta

SEQ ID NO: 209862 - DNA, 13 bp, Artificial Sequence
  Oligonucleotide for detection of SNP TSC0009262
taatcgcgacttt

SEQ ID NO: 209863 - DNA, 13 bp, Artificial Sequence
  Oligonucleotide for detection of SNP TSC0009262
tgattgtggtttt

SEQ ID NO: 209864 - DNA, 13 bp, Artificial Sequence
  Oligonucleotide for detection of SNP TSC0009262
aaaaccacaatca

SEQ ID NO: 209865 - DNA, 13 bp, Artificial Sequence
  Oligonucleotide for detection of SNP TSC0009262
tgatcgtggtttt

SEQ ID NO: 209866 - DNA, 13 bp, Artificial Sequence
  Oligonucleotide for detection of SNP TSC0009262
aaaaccacgatca

SEQ ID NO: 209867 - DNA, 13 bp, Artificial Sequence
  Oligonucleotide for detection of SNP TSC0009262
tgattgcggtttt

SEQ ID NO: 209868 - DNA, 13 bp, Artificial Sequence
  Oligonucleotide for detection of SNP TSC0009262
aaaaccgcaatca

SEQ ID NO: 209869 - DNA, 13 bp, Artificial Sequence
  Oligonucleotide for detection of SNP TSC0009262
tgatcgcggtttt

SEQ ID NO: 209870 - DNA, 13 bp, Artificial Sequence
  Oligonucleotide for detection of SNP TSC0009262
aaaaccgcgatca

SEQ ID NO: 209871 - DNA, 13 bp, Artificial Sequence
  Oligonucleotide for detection of SNP TSC0051228
ttagaggatattt

SEQ ID NO: 209872 - DNA, 13 bp, Artificial Sequence
  Oligonucleotide for detection of SNP TSC0051228
aaatatcctctaa

SEQ ID NO: 209873 - DNA, 13 bp, Artificial Sequence
  Oligonucleotide for detection of SNP TSC0051228
ttagagaatattt

SEQ ID NO: 209874 - DNA, 13 bp, Artificial Sequence
  Oligonucleotide for detection of SNP TSC0051228
aaatattctctaa

SEQ ID NO: 209875 - DNA, 13 bp, Artificial Sequence
  Oligonucleotide for detection of SNP TSC0051231
tttattatgggaa

SEQ ID NO: 209876 - DNA, 13 bp, Artificial Sequence
  Oligonucleotide for detection of SNP TSC0051231
ttcccataataaa

SEQ ID NO: 209877 - DNA, 13 bp, Artificial Sequence
  Oligonucleotide for detection of SNP TSC0051231
tttattgtgggaa

SEQ ID NO: 209878 - DNA, 13 bp, Artificial Sequence
  Oligonucleotide for detection of SNP TSC0051231
ttcccacaataaa

SEQ ID NO: 209879 - DNA, 13 bp, Artificial Sequence
  Oligonucleotide for detection of SNP TSC0051232
ttagggatttata

SEQ ID NO: 209880 - DNA, 13 bp, Artificial Sequence
  Oligonucleotide for detection of SNP TSC0051232
tataaatccctaa

SEQ ID NO: 209881 - DNA, 13 bp, Artificial Sequence
  Oligonucleotide for detection of SNP TSC0051232
ttaggggtttata

SEQ ID NO: 209882 - DNA, 13 bp, Artificial Sequence
  Oligonucleotide for detection of SNP TSC0051232
tataaacccctaa

SEQ ID NO: 209883 - DNA, 13 bp, Artificial Sequence
  Oligonucleotide for detection of SNP TSC0051234
atgataagttatt

SEQ ID NO: 209884 - DNA, 13 bp, Artificial Sequence
  Oligonucleotide for detection of SNP TSC0051234
aataacttatcat

SEQ ID NO: 209885 - DNA, 13 bp, Artificial Sequence
  Oligonucleotide for detection of SNP TSC0051234
atgataggttatt

SEQ ID NO: 209886 - DNA, 13 bp, Artificial Sequence
  Oligonucleotide for detection of SNP TSC0051234
aataacctatcat

SEQ ID NO: 209887 - DNA, 13 bp, Artificial Sequence
  Oligonucleotide for detection of SNP TSC0051238
ggatttattttay

SEQ ID NO: 209888 - DNA, 13 bp, Artificial Sequence
  Oligonucleotide for detection of SNP TSC0051238
rtaaaataaatcc

SEQ ID NO: 209889 - DNA, 13 bp, Artificial Sequence
  Oligonucleotide for detection of SNP TSC0051238
ggatttgttttay

SEQ ID NO: 209890 - DNA, 13 bp, Artificial Sequence
  Oligonucleotide for detection of SNP TSC0051238
rtaaaacaaatcc

SEQ ID NO: 209891 - DNA, 13 bp, Artificial Sequence
  Oligonucleotide for detection of SNP TSC0051238
ggattcgttttay

SEQ ID NO: 209892 - DNA, 13 bp, Artificial Sequence
  Oligonucleotide for detection of SNP TSC0051238
rtaaaacgaatcc

SEQ ID NO: 209893 - DNA, 13 bp, Artificial Sequence
  Oligonucleotide for detection of SNP TSC0051238
gtggagtgggtty

SEQ ID NO: 209894 - DNA, 13 bp, Artificial Sequence
  Oligonucleotide for detection of SNP TSC0051238
raacccactccac

SEQ ID NO: 209895 - DNA, 13 bp, Artificial Sequence
  Oligonucleotide for detection of SNP TSC0051238
gtggagcgggtty

SEQ ID NO: 209896 - DNA, 13 bp, Artificial Sequence
  Oligonucleotide for detection of SNP TSC0051238
raacccgctccac

SEQ ID NO: 209897 - DNA, 13 bp, Artificial Sequence
  Oligonucleotide for detection of SNP TSC0051239
gtgtttaattgat

SEQ ID NO: 209898 - DNA, 13 bp, Artificial Sequence
  Oligonucleotide for detection of SNP TSC0051239
atcaattaaacac

SEQ ID NO: 209899 - DNA, 13 bp, Artificial Sequence
  Oligonucleotide for detection of SNP TSC0051239
gtgtttgattgat

SEQ ID NO: 209900 - DNA, 13 bp, Artificial Sequence
  Oligonucleotide for detection of SNP TSC0051239
atcaatcaaacac

SEQ ID NO: 209901 - DNA, 13 bp, Artificial Sequence
  Oligonucleotide for detection of SNP TSC0051239
gcgtttaattgat

SEQ ID NO: 209902 - DNA, 13 bp, Artificial Sequence
  Oligonucleotide for detection of SNP TSC0051239
atcaattaaacgc

SEQ ID NO: 209903 - DNA, 13 bp, Artificial Sequence
  Oligonucleotide for detection of SNP TSC0051239
gcgtttgattgat

SEQ ID NO: 209904 - DNA, 13 bp, Artificial Sequence
  Oligonucleotide for detection of SNP TSC0051239
atcaatcaaacgc

SEQ ID NO: 209905 - DNA, 13 bp, Artificial Sequence
  Oligonucleotide for detection of SNP TSC0051240
agtggtattgtaa

SEQ ID NO: 209906 - DNA, 13 bp, Artificial Sequence
  Oligonucleotide for detection of SNP TSC0051240
ttacaataccact

SEQ ID NO: 209907 - DNA, 13 bp, Artificial Sequence
  Oligonucleotide for detection of SNP TSC0051240
agtggttttgtaa

SEQ ID NO: 209908 - DNA, 13 bp, Artificial Sequence
  Oligonucleotide for detection of SNP TSC0051240
ttacaaaaccact

SEQ ID NO: 209909 - DNA, 13 bp, Artificial Sequence
  Oligonucleotide for detection of SNP TSC0051240
ttgtaagattatt

SEQ ID NO: 209910 - DNA, 13 bp, Artificial Sequence
  Oligonucleotide for detection of SNP TSC0051240
aataatcttacaa

SEQ ID NO: 209911 - DNA, 13 bp, Artificial Sequence
  Oligonucleotide for detection of SNP TSC0051242
ttagttatgaatt

SEQ ID NO: 209912 - DNA, 13 bp, Artificial Sequence
  Oligonucleotide for detection of SNP TSC0051242
aattcataactaa

SEQ ID NO: 209913 - DNA, 13 bp, Artificial Sequence
  Oligonucleotide for detection of SNP TSC0051242
ttagttgtgaatt

SEQ ID NO: 209914 - DNA, 13 bp, Artificial Sequence
  Oligonucleotide for detection of SNP TSC0051242
aattcacaactaa

SEQ ID NO: 209915 - DNA, 13 bp, Artificial Sequence
  Oligonucleotide for detection of SNP TSC0051246
ttaataaagggta

SEQ ID NO: 209916 - DNA, 13 bp, Artificial Sequence
  Oligonucleotide for detection of SNP TSC0051246
taccctttattaa

SEQ ID NO: 209917 - DNA, 13 bp, Artificial Sequence
  Oligonucleotide for detection of SNP TSC0051246
ttaatagagggta

SEQ ID NO: 209918 - DNA, 13 bp, Artificial Sequence
  Oligonucleotide for detection of SNP TSC0051246
taccctctattaa

SEQ ID NO: 209919 - DNA, 13 bp, Artificial Sequence
  Oligonucleotide for detection of SNP TSC0051250
tttgtagatttty

SEQ ID NO: 209920 - DNA, 13 bp, Artificial Sequence
  Oligonucleotide for detection of SNP TSC0051250
raaaatctacaaa

SEQ ID NO: 209921 - DNA, 13 bp, Artificial Sequence
  Oligonucleotide for detection of SNP TSC0051250
tttgtaaatttty

SEQ ID NO: 209922 - DNA, 13 bp, Artificial Sequence
  Oligonucleotide for detection of SNP TSC0051250
raaaatttacaaa

SEQ ID NO: 209923 - DNA, 13 bp, Artificial Sequence
  Oligonucleotide for detection of SNP TSC0051251
aatatatggattt

SEQ ID NO: 209924 - DNA, 13 bp, Artificial Sequence
  Oligonucleotide for detection of SNP TSC0051251
aaatccatatatt

SEQ ID NO: 209925 - DNA, 13 bp, Artificial Sequence
  Oligonucleotide for detection of SNP TSC0051251
aatatacggattt

SEQ ID NO: 209926 - DNA, 13 bp, Artificial Sequence
  Oligonucleotide for detection of SNP TSC0051251
aaatccgtatatt

SEQ ID NO: 209927 - DNA, 13 bp, Artificial Sequence
  Oligonucleotide for detection of SNP TSC0051251
agatttgtgtatt

SEQ ID NO: 209928 - DNA, 13 bp, Artificial Sequence
  Oligonucleotide for detection of SNP TSC0051251
aatacacaaatct

SEQ ID NO: 209929 - DNA, 13 bp, Artificial Sequence
  Oligonucleotide for detection of SNP TSC0051251
agatttatgtatt

SEQ ID NO: 209930 - DNA, 13 bp, Artificial Sequence
  Oligonucleotide for detection of SNP TSC0051251
aatacataaatct

SEQ ID NO: 209931 - DNA, 13 bp, Artificial Sequence
  Oligonucleotide for detection of SNP TSC0051251
agattcgtgtatt

SEQ ID NO: 209932 - DNA, 13 bp, Artificial Sequence
  Oligonucleotide for detection of SNP TSC0051251
aatacacgaatct

SEQ ID NO: 209933 - DNA, 13 bp, Artificial Sequence
  Oligonucleotide for detection of SNP TSC0051252
aggataaaattat

SEQ ID NO: 209934 - DNA, 13 bp, Artificial Sequence
  Oligonucleotide for detection of SNP TSC0051252
ataattttatcct

SEQ ID NO: 209935 - DNA, 13 bp, Artificial Sequence
  Oligonucleotide for detection of SNP TSC0051252
aggatataattat

SEQ ID NO: 209936 - DNA, 13 bp, Artificial Sequence
  Oligonucleotide for detection of SNP TSC0051252
ataattatatcct

SEQ ID NO: 209937 - DNA, 13 bp, Artificial Sequence
  Oligonucleotide for detection of SNP TSC0051252
ataattttatttt

SEQ ID NO: 209938 - DNA, 13 bp, Artificial Sequence
  Oligonucleotide for detection of SNP TSC0051252
aaaataaaattat

SEQ ID NO: 209939 - DNA, 13 bp, Artificial Sequence
  Oligonucleotide for detection of SNP TSC0051253
tgtttagtaaata

SEQ ID NO: 209940 - DNA, 13 bp, Artificial Sequence
  Oligonucleotide for detection of SNP TSC0051253
tatttactaaaca

SEQ ID NO: 209941 - DNA, 13 bp, Artificial Sequence
  Oligonucleotide for detection of SNP TSC0051253
tgtttaataaata

SEQ ID NO: 209942 - DNA, 13 bp, Artificial Sequence
  Oligonucleotide for detection of SNP TSC0051253
tatttattaaaca

SEQ ID NO: 209943 - DNA, 13 bp, Artificial Sequence
  Oligonucleotide for detection of SNP TSC0051257
aataatatatttt

SEQ ID NO: 209944 - DNA, 13 bp, Artificial Sequence
  Oligonucleotide for detection of SNP TSC0051257
aaaatatattatt

SEQ ID NO: 209945 - DNA, 13 bp, Artificial Sequence
  Oligonucleotide for detection of SNP TSC0051257
aaaatagattatt

SEQ ID NO: 209946 - DNA, 13 bp, Artificial Sequence
  Oligonucleotide for detection of SNP TSC0051257
aataatctatttt

SEQ ID NO: 209947 - DNA, 13 bp, Artificial Sequence
  Oligonucleotide for detection of SNP TSC0051258
agtaagtgtggat

SEQ ID NO: 209948 - DNA, 13 bp, Artificial Sequence
  Oligonucleotide for detection of SNP TSC0051258
atccacacttact

SEQ ID NO: 209949 - DNA, 13 bp, Artificial Sequence
  Oligonucleotide for detection of SNP TSC0051258
agtaagcgtggat

SEQ ID NO: 209950 - DNA, 13 bp, Artificial Sequence
  Oligonucleotide for detection of SNP TSC0051258
atccacgcttact

SEQ ID NO: 209951 - DNA, 13 bp, Artificial Sequence
  Oligonucleotide for detection of SNP TSC0051259
attttagaattty

SEQ ID NO: 209952 - DNA, 13 bp, Artificial Sequence
  Oligonucleotide for detection of SNP TSC0051259
raaattctaaaat

SEQ ID NO: 209953 - DNA, 13 bp, Artificial Sequence
  Oligonucleotide for detection of SNP TSC0051259
ggggttatgagat

SEQ ID NO: 209954 - DNA, 13 bp, Artificial Sequence
  Oligonucleotide for detection of SNP TSC0051259
atctcataacccc

SEQ ID NO: 209955 - DNA, 13 bp, Artificial Sequence
  Oligonucleotide for detection of SNP TSC0051259
ggggttttgagat

SEQ ID NO: 209956 - DNA, 13 bp, Artificial Sequence
  Oligonucleotide for detection of SNP TSC0051259
atctcaaaacccc

SEQ ID NO: 209957 - DNA, 13 bp, Artificial Sequence
  Oligonucleotide for detection of SNP TSC0051260
gaaaatatatgty

SEQ ID NO: 209958 - DNA, 13 bp, Artificial Sequence
  Oligonucleotide for detection of SNP TSC0051260
racatatattttc

SEQ ID NO: 209959 - DNA, 13 bp, Artificial Sequence
  Oligonucleotide for detection of SNP TSC0051261
gataatatatgay

SEQ ID NO: 209960 - DNA, 13 bp, Artificial Sequence
  Oligonucleotide for detection of SNP TSC0051261
rtcatatattatc

SEQ ID NO: 209961 - DNA, 13 bp, Artificial Sequence
  Oligonucleotide for detection of SNP TSC0051261
gataatgtatgay

SEQ ID NO: 209962 - DNA, 13 bp, Artificial Sequence
  Oligonucleotide for detection of SNP TSC0051261
rtcatacattatc

SEQ ID NO: 209963 - DNA, 13 bp, Artificial Sequence
  Oligonucleotide for detection of SNP TSC0051262
ggtttagaaaggy

SEQ ID NO: 209964 - DNA, 13 bp, Artificial Sequence
  Oligonucleotide for detection of SNP TSC0051262
rcctttctaaacc

SEQ ID NO: 209965 - DNA, 13 bp, Artificial Sequence
  Oligonucleotide for detection of SNP TSC0051262
ggtttaaaaaggy

SEQ ID NO: 209966 - DNA, 13 bp, Artificial Sequence
  Oligonucleotide for detection of SNP TSC0051262
rcctttttaaacc

SEQ ID NO: 209967 - DNA, 13 bp, Artificial Sequence
  Oligonucleotide for detection of SNP TSC0051263
tatattatgttta

SEQ ID NO: 209968 - DNA, 13 bp, Artificial Sequence
  Oligonucleotide for detection of SNP TSC0051263
taaacataatata

SEQ ID NO: 209969 - DNA, 13 bp, Artificial Sequence
  Oligonucleotide for detection of SNP TSC0051263
tatatcgtgttta

SEQ ID NO: 209970 - DNA, 13 bp, Artificial Sequence
  Oligonucleotide for detection of SNP TSC0051263
taaacacgatata

SEQ ID NO: 209971 - DNA, 13 bp, Artificial Sequence
  Oligonucleotide for detection of SNP TSC0051263
taaatatgatata

SEQ ID NO: 209972 - DNA, 13 bp, Artificial Sequence
  Oligonucleotide for detection of SNP TSC0051263
tatatcatattta

SEQ ID NO: 209973 - DNA, 13 bp, Artificial Sequence
  Oligonucleotide for detection of SNP TSC0051263
taaatacgatata

SEQ ID NO: 209974 - DNA, 13 bp, Artificial Sequence
  Oligonucleotide for detection of SNP TSC0051263
tatatcgtattta

SEQ ID NO: 209975 - DNA, 13 bp, Artificial Sequence
  Oligonucleotide for detection of SNP TSC0051264
gaatatatagtta

SEQ ID NO: 209976 - DNA, 13 bp, Artificial Sequence
  Oligonucleotide for detection of SNP TSC0051264
taactatatattc

SEQ ID NO: 209977 - DNA, 13 bp, Artificial Sequence
  Oligonucleotide for detection of SNP TSC0051264
gaatatgtagtta

SEQ ID NO: 209978 - DNA, 13 bp, Artificial Sequence
  Oligonucleotide for detection of SNP TSC0051264
taactacatattc

SEQ ID NO: 209979 - DNA, 13 bp, Artificial Sequence
  Oligonucleotide for detection of SNP TSC0051264
gaatacgtagtta

SEQ ID NO: 209980 - DNA, 13 bp, Artificial Sequence
  Oligonucleotide for detection of SNP TSC0051264
taactacgtattc

SEQ ID NO: 209981 - DNA, 13 bp, Artificial Sequence
  Oligonucleotide for detection of SNP TSC0051264
tagttgtgtgtty

SEQ ID NO: 209982 - DNA, 13 bp, Artificial Sequence
  Oligonucleotide for detection of SNP TSC0051264
raacacacaacta

SEQ ID NO: 209983 - DNA, 13 bp, Artificial Sequence
  Oligonucleotide for detection of SNP TSC0051264
tagttgcgtgtty

SEQ ID NO: 209984 - DNA, 13 bp, Artificial Sequence
  Oligonucleotide for detection of SNP TSC0051264
raacacgcaacta

SEQ ID NO: 209985 - DNA, 13 bp, Artificial Sequence
  Oligonucleotide for detection of SNP TSC0051266
gtagttggtttga

SEQ ID NO: 209986 - DNA, 13 bp, Artificial Sequence
  Oligonucleotide for detection of SNP TSC0051266
tcaaaccaactac

SEQ ID NO: 209987 - DNA, 13 bp, Artificial Sequence
  Oligonucleotide for detection of SNP TSC0051266
gtagttagtttga

SEQ ID NO: 209988 - DNA, 13 bp, Artificial Sequence
  Oligonucleotide for detection of SNP TSC0051266
tcaaactaactac

SEQ ID NO: 209989 - DNA, 13 bp, Artificial Sequence
  Oligonucleotide for detection of SNP TSC0051267
gtaagagtggtay

SEQ ID NO: 209990 - DNA, 13 bp, Artificial Sequence
  Oligonucleotide for detection of SNP TSC0051267
rtaccactcttac

SEQ ID NO: 209991 - DNA, 13 bp, Artificial Sequence
  Oligonucleotide for detection of SNP TSC0051267
gtaagaatggtay

SEQ ID NO: 209992 - DNA, 13 bp, Artificial Sequence
  Oligonucleotide for detection of SNP TSC0051267
rtaccattcttac

SEQ ID NO: 209993 - DNA, 13 bp, Artificial Sequence
  Oligonucleotide for detection of SNP TSC0051268
tttgtaaatttgt

SEQ ID NO: 209994 - DNA, 13 bp, Artificial Sequence
  Oligonucleotide for detection of SNP TSC0051268
acaaatttacaaa

SEQ ID NO: 209995 - DNA, 13 bp, Artificial Sequence
  Oligonucleotide for detection of SNP TSC0051268
tttgtatatttgt

SEQ ID NO: 209996 - DNA, 13 bp, Artificial Sequence
  Oligonucleotide for detection of SNP TSC0051268
acaaatatacaaa

SEQ ID NO: 209997 - DNA, 13 bp, Artificial Sequence
  Oligonucleotide for detection of SNP TSC0051268
ataagtttataaa

SEQ ID NO: 209998 - DNA, 13 bp, Artificial Sequence
  Oligonucleotide for detection of SNP TSC0051268
tttataaacttat

SEQ ID NO: 209999 - DNA, 13 bp, Artificial Sequence
  Oligonucleotide for detection of SNP TSC0051269
gtatgattaaaga

SEQ ID NO: 210000 - DNA, 13 bp, Artificial Sequence
  Oligonucleotide for detection of SNP TSC0051269
tctttaatcatac

SEQ ID NO: 210001 - DNA, 13 bp, Artificial Sequence
  Oligonucleotide for detection of SNP TSC0051269
gtatgagtaaaga

SEQ ID NO: 210002 - DNA, 13 bp, Artificial Sequence
  Oligonucleotide for detection of SNP TSC0051269
tctttactcatac

SEQ ID NO: 210003 - DNA, 13 bp, Artificial Sequence
  Oligonucleotide for detection of SNP TSC0051269
tttttagttatay

SEQ ID NO: 210004 - DNA, 13 bp, Artificial Sequence
  Oligonucleotide for detection of SNP TSC0051269
rtataactaaaaa

SEQ ID NO: 210005 - DNA, 13 bp, Artificial Sequence
  Oligonucleotide for detection of SNP TSC0051269
tttttatttatay

SEQ ID NO: 210006 - DNA, 13 bp, Artificial Sequence
  Oligonucleotide for detection of SNP TSC0051269
rtataaataaaaa

SEQ ID NO: 210007 - DNA, 13 bp, Artificial Sequence
  Oligonucleotide for detection of SNP TSC0051270
ttaataatataty

SEQ ID NO: 210008 - DNA, 13 bp, Artificial Sequence
  Oligonucleotide for detection of SNP TSC0051270
ratatattattaa

SEQ ID NO: 210009 - DNA, 13 bp, Artificial Sequence
  Oligonucleotide for detection of SNP TSC0051270
ttaatattataty

SEQ ID NO: 210010 - DNA, 13 bp, Artificial Sequence
  Oligonucleotide for detection of SNP TSC0051270
ratataatattaa

SEQ ID NO: 210011 - DNA, 13 bp, Artificial Sequence
  Oligonucleotide for detection of SNP TSC0051270
gatgtgttgttag

SEQ ID NO: 210012 - DNA, 13 bp, Artificial Sequence
  Oligonucleotide for detection of SNP TSC0051270
ctaacaacacatc

SEQ ID NO: 210013 - DNA, 13 bp, Artificial Sequence
  Oligonucleotide for detection of SNP TSC0051270
gatgtgatgttag

SEQ ID NO: 210014 - DNA, 13 bp, Artificial Sequence
  Oligonucleotide for detection of SNP TSC0051270
ctaacatcacatc

SEQ ID NO: 210015 - DNA, 13 bp, Artificial Sequence
  Oligonucleotide for detection of SNP TSC0051271
gagtattataaga

SEQ ID NO: 210016 - DNA, 13 bp, Artificial Sequence
  Oligonucleotide for detection of SNP TSC0051271
tcttataatactc

SEQ ID NO: 210017 - DNA, 13 bp, Artificial Sequence
  Oligonucleotide for detection of SNP TSC0051271
gagtatgataaga

SEQ ID NO: 210018 - DNA, 13 bp, Artificial Sequence
  Oligonucleotide for detection of SNP TSC0051271
tcttatcatactc

SEQ ID NO: 210019 - DNA, 13 bp, Artificial Sequence
  Oligonucleotide for detection of SNP TSC0051271
ttttgtgatatty

SEQ ID NO: 210020 - DNA, 13 bp, Artificial Sequence
  Oligonucleotide for detection of SNP TSC0051271
raatatcacaaaa

SEQ ID NO: 210021 - DNA, 13 bp, Artificial Sequence
  Oligonucleotide for detection of SNP TSC0051271
ttttgttatatty

SEQ ID NO: 210022 - DNA, 13 bp, Artificial Sequence
  Oligonucleotide for detection of SNP TSC0051271
raatataacaaaa

SEQ ID NO: 210023 - DNA, 13 bp, Artificial Sequence
  Oligonucleotide for detection of SNP TSC0051273
aaattattagtgt

SEQ ID NO: 210024 - DNA, 13 bp, Artificial Sequence
  Oligonucleotide for detection of SNP TSC0051273
acactaataattt

SEQ ID NO: 210025 - DNA, 13 bp, Artificial Sequence
  Oligonucleotide for detection of SNP TSC0051273
aaattagtagtgt

SEQ ID NO: 210026 - DNA, 13 bp, Artificial Sequence
  Oligonucleotide for detection of SNP TSC0051273
acactactaattt

SEQ ID NO: 210027 - DNA, 13 bp, Artificial Sequence
  Oligonucleotide for detection of SNP TSC0051273
atattggtgattt

SEQ ID NO: 210028 - DNA, 13 bp, Artificial Sequence
  Oligonucleotide for detection of SNP TSC0051273
aaatcaccaatat

SEQ ID NO: 210029 - DNA, 13 bp, Artificial Sequence
  Oligonucleotide for detection of SNP TSC0051273
atattgttgattt

SEQ ID NO: 210030 - DNA, 13 bp, Artificial Sequence
  Oligonucleotide for detection of SNP TSC0051273
aaatcaacaatat

SEQ ID NO: 210031 - DNA, 13 bp, Artificial Sequence
  Oligonucleotide for detection of SNP TSC0051274
gttggggggaggy

SEQ ID NO: 210032 - DNA, 13 bp, Artificial Sequence
  Oligonucleotide for detection of SNP TSC0051274
rcctccccccaac

SEQ ID NO: 210033 - DNA, 13 bp, Artificial Sequence
  Oligonucleotide for detection of SNP TSC0051274
gttgggaggaggy

SEQ ID NO: 210034 - DNA, 13 bp, Artificial Sequence
  Oligonucleotide for detection of SNP TSC0051274
rcctcctcccaac

SEQ ID NO: 210035 - DNA, 13 bp, Artificial Sequence
  Oligonucleotide for detection of SNP TSC0051275
gtatataaaattg

SEQ ID NO: 210036 - DNA, 13 bp, Artificial Sequence
  Oligonucleotide for detection of SNP TSC0051275
caattttatatac

SEQ ID NO: 210037 - DNA, 13 bp, Artificial Sequence
  Oligonucleotide for detection of SNP TSC0051275
gtatatgaaattg

SEQ ID NO: 210038 - DNA, 13 bp, Artificial Sequence
  Oligonucleotide for detection of SNP TSC0051275
caatttcatatac

SEQ ID NO: 210039 - DNA, 13 bp, Artificial Sequence
  Oligonucleotide for detection of SNP TSC0051276
ttattatggtata

SEQ ID NO: 210040 - DNA, 13 bp, Artificial Sequence
  Oligonucleotide for detection of SNP TSC0051276
tataccataataa

SEQ ID NO: 210041 - DNA, 13 bp, Artificial Sequence
  Oligonucleotide for detection of SNP TSC0051276
ttattacggtata

SEQ ID NO: 210042 - DNA, 13 bp, Artificial Sequence
  Oligonucleotide for detection of SNP TSC0051276
tataccgtaataa

SEQ ID NO: 210043 - DNA, 13 bp, Artificial Sequence
  Oligonucleotide for detection of SNP TSC0051276
tgtgttatagtga

SEQ ID NO: 210044 - DNA, 13 bp, Artificial Sequence
  Oligonucleotide for detection of SNP TSC0051276
tcactataacaca

SEQ ID NO: 210045 - DNA, 13 bp, Artificial Sequence
  Oligonucleotide for detection of SNP TSC0051279
ataatatggtgtg

SEQ ID NO: 210046 - DNA, 13 bp, Artificial Sequence
  Oligonucleotide for detection of SNP TSC0051279
cacaccatattat

SEQ ID NO: 210047 - DNA, 13 bp, Artificial Sequence
  Oligonucleotide for detection of SNP TSC0051279
ataatacggtgtg

SEQ ID NO: 210048 - DNA, 13 bp, Artificial Sequence
  Oligonucleotide for detection of SNP TSC0051279
cacaccgtattat

SEQ ID NO: 210049 - DNA, 13 bp, Artificial Sequence
  Oligonucleotide for detection of SNP TSC0051279
tatattgtattgt

SEQ ID NO: 210050 - DNA, 13 bp, Artificial Sequence
  Oligonucleotide for detection of SNP TSC0051279
acaatacaatata

SEQ ID NO: 210051 - DNA, 13 bp, Artificial Sequence
  Oligonucleotide for detection of SNP TSC0051279
tatattatattgt

SEQ ID NO: 210052 - DNA, 13 bp, Artificial Sequence
  Oligonucleotide for detection of SNP TSC0051279
acaatataatata

SEQ ID NO: 210053 - DNA, 13 bp, Artificial Sequence
  Oligonucleotide for detection of SNP TSC0051279
tatatcgtattgt

SEQ ID NO: 210054 - DNA, 13 bp, Artificial Sequence
  Oligonucleotide for detection of SNP TSC0051279
acaatacgatata

SEQ ID NO: 210055 - DNA, 13 bp, Artificial Sequence
  Oligonucleotide for detection of SNP TSC0051280
ttggatagtatag

SEQ ID NO: 210056 - DNA, 13 bp, Artificial Sequence
  Oligonucleotide for detection of SNP TSC0051280
ctatactatccaa

SEQ ID NO: 210057 - DNA, 13 bp, Artificial Sequence
  Oligonucleotide for detection of SNP TSC0051280
ttatgttgtttaa

SEQ ID NO: 210058 - DNA, 13 bp, Artificial Sequence
  Oligonucleotide for detection of SNP TSC0051280
ttaaacaacataa

SEQ ID NO: 210059 - DNA, 13 bp, Artificial Sequence
  Oligonucleotide for detection of SNP TSC0051280
ttatgtagtttaa

SEQ ID NO: 210060 - DNA, 13 bp, Artificial Sequence
  Oligonucleotide for detection of SNP TSC0051280
ttaaactacataa

SEQ ID NO: 210061 - DNA, 13 bp, Artificial Sequence
  Oligonucleotide for detection of SNP TSC0051281
aaataaagaaagt

SEQ ID NO: 210062 - DNA, 13 bp, Artificial Sequence
  Oligonucleotide for detection of SNP TSC0051281
actttctttattt

SEQ ID NO: 210063 - DNA, 13 bp, Artificial Sequence
  Oligonucleotide for detection of SNP TSC0051281
aaataaggaaagt

SEQ ID NO: 210064 - DNA, 13 bp, Artificial Sequence
  Oligonucleotide for detection of SNP TSC0051281
actttccttattt

SEQ ID NO: 210065 - DNA, 13 bp, Artificial Sequence
  Oligonucleotide for detection of SNP TSC0051290
gtttaatgttagg

SEQ ID NO: 210066 - DNA, 13 bp, Artificial Sequence
  Oligonucleotide for detection of SNP TSC0051290
cctaacattaaac

SEQ ID NO: 210067 - DNA, 13 bp, Artificial Sequence
  Oligonucleotide for detection of SNP TSC0051290
gtttaacgttagg

SEQ ID NO: 210068 - DNA, 13 bp, Artificial Sequence
  Oligonucleotide for detection of SNP TSC0051290
cctaacgttaaac

SEQ ID NO: 210069 - DNA, 13 bp, Artificial Sequence
  Oligonucleotide for detection of SNP TSC0051290
tttaatgttaagy

SEQ ID NO: 210070 - DNA, 13 bp, Artificial Sequence
  Oligonucleotide for detection of SNP TSC0051290
rcttaacattaaa

SEQ ID NO: 210071 - DNA, 13 bp, Artificial Sequence
  Oligonucleotide for detection of SNP TSC0051290
tttaatattaagy

SEQ ID NO: 210072 - DNA, 13 bp, Artificial Sequence
  Oligonucleotide for detection of SNP TSC0051290
rcttaatattaaa

SEQ ID NO: 210073 - DNA, 13 bp, Artificial Sequence
  Oligonucleotide for detection of SNP TSC0051290
tttaacgttaagy

SEQ ID NO: 210074 - DNA, 13 bp, Artificial Sequence
  Oligonucleotide for detection of SNP TSC0051290
rcttaacgttaaa

SEQ ID NO: 210075 - DNA, 13 bp, Artificial Sequence
  Oligonucleotide for detection of SNP TSC0051293
atttggatgtaaa

SEQ ID NO: 210076 - DNA, 13 bp, Artificial Sequence
  Oligonucleotide for detection of SNP TSC0051293
tttacatccaaat

SEQ ID NO: 210077 - DNA, 13 bp, Artificial Sequence
  Oligonucleotide for detection of SNP TSC0051293
atttggttgtaaa

SEQ ID NO: 210078 - DNA, 13 bp, Artificial Sequence
  Oligonucleotide for detection of SNP TSC0051293
tttacaaccaaat

SEQ ID NO: 210079 - DNA, 13 bp, Artificial Sequence
  Oligonucleotide for detection of SNP TSC0051293
tttatatttaagt

SEQ ID NO: 210080 - DNA, 13 bp, Artificial Sequence
  Oligonucleotide for detection of SNP TSC0051293
acttaaatataaa

SEQ ID NO: 210081 - DNA, 13 bp, Artificial Sequence
  Oligonucleotide for detection of SNP TSC0051293
tttataattaagt

SEQ ID NO: 210082 - DNA, 13 bp, Artificial Sequence
  Oligonucleotide for detection of SNP TSC0051293
acttaattataaa

SEQ ID NO: 210083 - DNA, 13 bp, Artificial Sequence
  Oligonucleotide for detection of SNP TSC0051294
tgggtggagtatt

SEQ ID NO: 210084 - DNA, 13 bp, Artificial Sequence
  Oligonucleotide for detection of SNP TSC0051294
aatactccaccca

SEQ ID NO: 210085 - DNA, 13 bp, Artificial Sequence
  Oligonucleotide for detection of SNP TSC0051294
tgggtgaagtatt

SEQ ID NO: 210086 - DNA, 13 bp, Artificial Sequence
  Oligonucleotide for detection of SNP TSC0051294
aatacttcaccca

SEQ ID NO: 210087 - DNA, 13 bp, Artificial Sequence
  Oligonucleotide for detection of SNP TSC0051295
aaatagagaaata

SEQ ID NO: 210088 - DNA, 13 bp, Artificial Sequence
  Oligonucleotide for detection of SNP TSC0051295
tatttctctattt

SEQ ID NO: 210089 - DNA, 13 bp, Artificial Sequence
  Oligonucleotide for detection of SNP TSC0051295
aaatagtgaaata

SEQ ID NO: 210090 - DNA, 13 bp, Artificial Sequence
  Oligonucleotide for detection of SNP TSC0051295
tatttcactattt

SEQ ID NO: 210091 - DNA, 13 bp, Artificial Sequence
  Oligonucleotide for detection of SNP TSC0051299
tattagggaaaay

SEQ ID NO: 210092 - DNA, 13 bp, Artificial Sequence
  Oligonucleotide for detection of SNP TSC0051299
rttttccctaata

SEQ ID NO: 210093 - DNA, 13 bp, Artificial Sequence
  Oligonucleotide for detection of SNP TSC0051299
tattagagaaaay

SEQ ID NO: 210094 - DNA, 13 bp, Artificial Sequence
  Oligonucleotide for detection of SNP TSC0051299
rttttctctaata

SEQ ID NO: 210095 - DNA, 13 bp, Artificial Sequence
  Oligonucleotide for detection of SNP TSC0051300
tttagtataagtg

SEQ ID NO: 210096 - DNA, 13 bp, Artificial Sequence
  Oligonucleotide for detection of SNP TSC0051300
cacttatactaaa

SEQ ID NO: 210097 - DNA, 13 bp, Artificial Sequence
  Oligonucleotide for detection of SNP TSC0051300
tttagtttaagtg

SEQ ID NO: 210098 - DNA, 13 bp, Artificial Sequence
  Oligonucleotide for detection of SNP TSC0051300
cacttaaactaaa

SEQ ID NO: 210099 - DNA, 13 bp, Artificial Sequence
  Oligonucleotide for detection of SNP TSC0051300
tatttgtattggg

SEQ ID NO: 210100 - DNA, 13 bp, Artificial Sequence
  Oligonucleotide for detection of SNP TSC0051300
cccaatacaaata

SEQ ID NO: 210101 - DNA, 13 bp, Artificial Sequence
  Oligonucleotide for detection of SNP TSC0051300
tatttgaattggg

SEQ ID NO: 210102 - DNA, 13 bp, Artificial Sequence
  Oligonucleotide for detection of SNP TSC0051300
cccaattcaaata

SEQ ID NO: 210103 - DNA, 13 bp, Artificial Sequence
  Oligonucleotide for detection of SNP TSC0051301
aattaaatagtaa

SEQ ID NO: 210104 - DNA, 13 bp, Artificial Sequence
  Oligonucleotide for detection of SNP TSC0051301
ttactatttaatt

SEQ ID NO: 210105 - DNA, 13 bp, Artificial Sequence
  Oligonucleotide for detection of SNP TSC0051301
aattaagtagtaa

SEQ ID NO: 210106 - DNA, 13 bp, Artificial Sequence
  Oligonucleotide for detection of SNP TSC0051301
ttactacttaatt

SEQ ID NO: 210107 - DNA, 13 bp, Artificial Sequence
  Oligonucleotide for detection of SNP TSC0051305
agatgaagtgagt

SEQ ID NO: 210108 - DNA, 13 bp, Artificial Sequence
  Oligonucleotide for detection of SNP TSC0051305
actcacttcatct

SEQ ID NO: 210109 - DNA, 13 bp, Artificial Sequence
  Oligonucleotide for detection of SNP TSC0051305
agatgatgtgagt

SEQ ID NO: 210110 - DNA, 13 bp, Artificial Sequence
  Oligonucleotide for detection of SNP TSC0051305
actcacatcatct

SEQ ID NO: 210111 - DNA, 13 bp, Artificial Sequence
  Oligonucleotide for detection of SNP TSC0051305
agatgaagcgagt

SEQ ID NO: 210112 - DNA, 13 bp, Artificial Sequence
  Oligonucleotide for detection of SNP TSC0051305
actcgcttcatct

SEQ ID NO: 210113 - DNA, 13 bp, Artificial Sequence
  Oligonucleotide for detection of SNP TSC0051305
agatgacgtgagt

SEQ ID NO: 210114 - DNA, 13 bp, Artificial Sequence
  Oligonucleotide for detection of SNP TSC0051305
actcacgtcatct

SEQ ID NO: 210115 - DNA, 13 bp, Artificial Sequence
  Oligonucleotide for detection of SNP TSC0051305
agatgatgcgagt

SEQ ID NO: 210116 - DNA, 13 bp, Artificial Sequence
  Oligonucleotide for detection of SNP TSC0051305
actcgcatcatct

SEQ ID NO: 210117 - DNA, 13 bp, Artificial Sequence
  Oligonucleotide for detection of SNP TSC0051305
agatgacgcgagt

SEQ ID NO: 210118 - DNA, 13 bp, Artificial Sequence
  Oligonucleotide for detection of SNP TSC0051305
actcgcgtcatct

SEQ ID NO: 210119 - DNA, 13 bp, Artificial Sequence
  Oligonucleotide for detection of SNP TSC0051305
atttgttttattt

SEQ ID NO: 210120 - DNA, 13 bp, Artificial Sequence
  Oligonucleotide for detection of SNP TSC0051305
aaataaaacaaat

SEQ ID NO: 210121 - DNA, 13 bp, Artificial Sequence
  Oligonucleotide for detection of SNP TSC0051305
attcgttttattt

SEQ ID NO: 210122 - DNA, 13 bp, Artificial Sequence
  Oligonucleotide for detection of SNP TSC0051305
aaataaaacgaat

SEQ ID NO: 210123 - DNA, 13 bp, Artificial Sequence
  Oligonucleotide for detection of SNP TSC0051305
attcgtgttattt

SEQ ID NO: 210124 - DNA, 13 bp, Artificial Sequence
  Oligonucleotide for detection of SNP TSC0051305
aaataacacgaat

SEQ ID NO: 210125 - DNA, 13 bp, Artificial Sequence
  Oligonucleotide for detection of SNP TSC0051305
atttgcgttattt

SEQ ID NO: 210126 - DNA, 13 bp, Artificial Sequence
  Oligonucleotide for detection of SNP TSC0051305
aaataacgcaaat

SEQ ID NO: 210127 - DNA, 13 bp, Artificial Sequence
  Oligonucleotide for detection of SNP TSC0051305
attcgcgttattt

SEQ ID NO: 210128 - DNA, 13 bp, Artificial Sequence
  Oligonucleotide for detection of SNP TSC0051305
aaataacgcgaat

SEQ ID NO: 210129 - DNA, 13 bp, Artificial Sequence
  Oligonucleotide for detection of SNP TSC0051306
ttgagaatatgaa

SEQ ID NO: 210130 - DNA, 13 bp, Artificial Sequence
  Oligonucleotide for detection of SNP TSC0051306
ttcatattctcaa

SEQ ID NO: 210131 - DNA, 13 bp, Artificial Sequence
  Oligonucleotide for detection of SNP TSC0051306
ttgagagtatgaa

SEQ ID NO: 210132 - DNA, 13 bp, Artificial Sequence
  Oligonucleotide for detection of SNP TSC0051306
ttcatactctcaa

SEQ ID NO: 210133 - DNA, 13 bp, Artificial Sequence
  Oligonucleotide for detection of SNP TSC0051308
tatagtatattta

SEQ ID NO: 210134 - DNA, 13 bp, Artificial Sequence
  Oligonucleotide for detection of SNP TSC0051308
taaatatactata

SEQ ID NO: 210135 - DNA, 13 bp, Artificial Sequence
  Oligonucleotide for detection of SNP TSC0051308
tatagtgtattta

SEQ ID NO: 210136 - DNA, 13 bp, Artificial Sequence
  Oligonucleotide for detection of SNP TSC0051308
taaatacactata

SEQ ID NO: 210137 - DNA, 13 bp, Artificial Sequence
  Oligonucleotide for detection of SNP TSC0051309
tgagaaagttgta

SEQ ID NO: 210138 - DNA, 13 bp, Artificial Sequence
  Oligonucleotide for detection of SNP TSC0051309
tacaactttctca

SEQ ID NO: 210139 - DNA, 13 bp, Artificial Sequence
  Oligonucleotide for detection of SNP TSC0051309
tgagaaggttgta

SEQ ID NO: 210140 - DNA, 13 bp, Artificial Sequence
  Oligonucleotide for detection of SNP TSC0051309
tacaaccttctca

SEQ ID NO: 210141 - DNA, 13 bp, Artificial Sequence
  Oligonucleotide for detection of SNP TSC0051310
ttttataggtttt

SEQ ID NO: 210142 - DNA, 13 bp, Artificial Sequence
  Oligonucleotide for detection of SNP TSC0051310
aaaacctataaaa

SEQ ID NO: 210143 - DNA, 13 bp, Artificial Sequence
  Oligonucleotide for detection of SNP TSC0051310
ttttatgggtttt

SEQ ID NO: 210144 - DNA, 13 bp, Artificial Sequence
  Oligonucleotide for detection of SNP TSC0051310
aaaacccataaaa

SEQ ID NO: 210145 - DNA, 13 bp, Artificial Sequence
  Oligonucleotide for detection of SNP TSC0051310
ttttacgggtttt

SEQ ID NO: 210146 - DNA, 13 bp, Artificial Sequence
  Oligonucleotide for detection of SNP TSC0051310
aaaacccgtaaaa

SEQ ID NO: 210147 - DNA, 13 bp, Artificial Sequence
  Oligonucleotide for detection of SNP TSC0051310
agagtttgtagag

SEQ ID NO: 210148 - DNA, 13 bp, Artificial Sequence
  Oligonucleotide for detection of SNP TSC0051310
ctctacaaactct

SEQ ID NO: 210149 - DNA, 13 bp, Artificial Sequence
  Oligonucleotide for detection of SNP TSC0051310
agagttcgtagag

SEQ ID NO: 210150 - DNA, 13 bp, Artificial Sequence
  Oligonucleotide for detection of SNP TSC0051310
ctctacgaactct

SEQ ID NO: 210151 - DNA, 13 bp, Artificial Sequence
  Oligonucleotide for detection of SNP TSC0051314
gtttgagtttgty

SEQ ID NO: 210152 - DNA, 13 bp, Artificial Sequence
  Oligonucleotide for detection of SNP TSC0051314
racaaactcaaac

SEQ ID NO: 210153 - DNA, 13 bp, Artificial Sequence
  Oligonucleotide for detection of SNP TSC0051314
gtttgaatttgty

SEQ ID NO: 210154 - DNA, 13 bp, Artificial Sequence
  Oligonucleotide for detection of SNP TSC0051314
racaaattcaaac

SEQ ID NO: 210155 - DNA, 13 bp, Artificial Sequence
  Oligonucleotide for detection of SNP TSC0051315
ataaaggtttttg

SEQ ID NO: 210156 - DNA, 13 bp, Artificial Sequence
  Oligonucleotide for detection of SNP TSC0051315
caaaaacctttat

SEQ ID NO: 210157 - DNA, 13 bp, Artificial Sequence
  Oligonucleotide for detection of SNP TSC0051315
ataaagatttttg

SEQ ID NO: 210158 - DNA, 13 bp, Artificial Sequence
  Oligonucleotide for detection of SNP TSC0051315
caaaaatctttat

SEQ ID NO: 210159 - DNA, 13 bp, Artificial Sequence
  Oligonucleotide for detection of SNP TSC0051316
atgtaaataaata

SEQ ID NO: 210160 - DNA, 13 bp, Artificial Sequence
  Oligonucleotide for detection of SNP TSC0051316
tatttatttacat

SEQ ID NO: 210161 - DNA, 13 bp, Artificial Sequence
  Oligonucleotide for detection of SNP TSC0051316
atgtaattaaata

SEQ ID NO: 210162 - DNA, 13 bp, Artificial Sequence
  Oligonucleotide for detection of SNP TSC0051316
tatttaattacat

SEQ ID NO: 210163 - DNA, 13 bp, Artificial Sequence
  Oligonucleotide for detection of SNP TSC0051316
tgtttgtttgtat

SEQ ID NO: 210164 - DNA, 13 bp, Artificial Sequence
  Oligonucleotide for detection of SNP TSC0051316
atacaaacaaaca

SEQ ID NO: 210165 - DNA, 13 bp, Artificial Sequence
  Oligonucleotide for detection of SNP TSC0051316
tgtttggttgtat

SEQ ID NO: 210166 - DNA, 13 bp, Artificial Sequence
  Oligonucleotide for detection of SNP TSC0051316
atacaaccaaaca

SEQ ID NO: 210167 - DNA, 13 bp, Artificial Sequence
  Oligonucleotide for detection of SNP TSC0051317
ttaagtatggtty

SEQ ID NO: 210168 - DNA, 13 bp, Artificial Sequence
  Oligonucleotide for detection of SNP TSC0051317
raaccatacttaa

SEQ ID NO: 210169 - DNA, 13 bp, Artificial Sequence
  Oligonucleotide for detection of SNP TSC0051317
ttaagtgtggtty

SEQ ID NO: 210170 - DNA, 13 bp, Artificial Sequence
  Oligonucleotide for detection of SNP TSC0051317
raaccacacttaa

SEQ ID NO: 210171 - DNA, 13 bp, Artificial Sequence
  Oligonucleotide for detection of SNP TSC0051320
gttgtaaagttay

SEQ ID NO: 210172 - DNA, 13 bp, Artificial Sequence
  Oligonucleotide for detection of SNP TSC0051320
rtaactttacaac

SEQ ID NO: 210173 - DNA, 13 bp, Artificial Sequence
  Oligonucleotide for detection of SNP TSC0051320
gttgtatagttay

SEQ ID NO: 210174 - DNA, 13 bp, Artificial Sequence
  Oligonucleotide for detection of SNP TSC0051320
rtaactatacaac

SEQ ID NO: 210175 - DNA, 13 bp, Artificial Sequence
  Oligonucleotide for detection of SNP TSC0051320
gtaattttgtagy

SEQ ID NO: 210176 - DNA, 13 bp, Artificial Sequence
  Oligonucleotide for detection of SNP TSC0051320
rctacaaaattac

SEQ ID NO: 210177 - DNA, 13 bp, Artificial Sequence
  Oligonucleotide for detection of SNP TSC0051320
gtaattatgtagy

SEQ ID NO: 210178 - DNA, 13 bp, Artificial Sequence
  Oligonucleotide for detection of SNP TSC0051320
rctacataattac

SEQ ID NO: 210179 - DNA, 13 bp, Artificial Sequence
  Oligonucleotide for detection of SNP TSC0051321
agagatgaaggaa

SEQ ID NO: 210180 - DNA, 13 bp, Artificial Sequence
  Oligonucleotide for detection of SNP TSC0051321
ttccttcatctct

SEQ ID NO: 210181 - DNA, 13 bp, Artificial Sequence
  Oligonucleotide for detection of SNP TSC0051321
agagataaaggaa

SEQ ID NO: 210182 - DNA, 13 bp, Artificial Sequence
  Oligonucleotide for detection of SNP TSC0051321
ttcctttatctct

SEQ ID NO: 210183 - DNA, 13 bp, Artificial Sequence
  Oligonucleotide for detection of SNP TSC0051321
agagacgaaggaa

SEQ ID NO: 210184 - DNA, 13 bp, Artificial Sequence
  Oligonucleotide for detection of SNP TSC0051321
ttccttcgtctct

SEQ ID NO: 210185 - DNA, 13 bp, Artificial Sequence
  Oligonucleotide for detection of SNP TSC0051322
tgaggtataattg

SEQ ID NO: 210186 - DNA, 13 bp, Artificial Sequence
  Oligonucleotide for detection of SNP TSC0051322
caattatacctca

SEQ ID NO: 210187 - DNA, 13 bp, Artificial Sequence
  Oligonucleotide for detection of SNP TSC0051322
tgaggtgtaattg

SEQ ID NO: 210188 - DNA, 13 bp, Artificial Sequence
  Oligonucleotide for detection of SNP TSC0051322
caattacacctca

SEQ ID NO: 210189 - DNA, 13 bp, Artificial Sequence
  Oligonucleotide for detection of SNP TSC0051325
aaagtttggaaaa

SEQ ID NO: 210190 - DNA, 13 bp, Artificial Sequence
  Oligonucleotide for detection of SNP TSC0051325
ttttccaaacttt

SEQ ID NO: 210191 - DNA, 13 bp, Artificial Sequence
  Oligonucleotide for detection of SNP TSC0051326
tttttattgatty

SEQ ID NO: 210192 - DNA, 13 bp, Artificial Sequence
  Oligonucleotide for detection of SNP TSC0051326
raatcaataaaaa

SEQ ID NO: 210193 - DNA, 13 bp, Artificial Sequence
  Oligonucleotide for detection of SNP TSC0051326
tttttagtgatty

SEQ ID NO: 210194 - DNA, 13 bp, Artificial Sequence
  Oligonucleotide for detection of SNP TSC0051326
raatcactaaaaa

SEQ ID NO: 210195 - DNA, 13 bp, Artificial Sequence
  Oligonucleotide for detection of SNP TSC0051326
gggttagtgaggg

SEQ ID NO: 210196 - DNA, 13 bp, Artificial Sequence
  Oligonucleotide for detection of SNP TSC0051326
ccctcactaaccc

SEQ ID NO: 210197 - DNA, 13 bp, Artificial Sequence
  Oligonucleotide for detection of SNP TSC0051326
gggttattgaggg

SEQ ID NO: 210198 - DNA, 13 bp, Artificial Sequence
  Oligonucleotide for detection of SNP TSC0051326
ccctcaataaccc

SEQ ID NO: 210199 - DNA, 13 bp, Artificial Sequence
  Oligonucleotide for detection of SNP TSC0051331
ttttatttttatg

SEQ ID NO: 210200 - DNA, 13 bp, Artificial Sequence
  Oligonucleotide for detection of SNP TSC0051331
cataaaaataaaa

SEQ ID NO: 210201 - DNA, 13 bp, Artificial Sequence
  Oligonucleotide for detection of SNP TSC0051331
tatagatgtagag

SEQ ID NO: 210202 - DNA, 13 bp, Artificial Sequence
  Oligonucleotide for detection of SNP TSC0051331
ctctacatctata

SEQ ID NO: 210203 - DNA, 13 bp, Artificial Sequence
  Oligonucleotide for detection of SNP TSC0051331
tatagaggtagag

SEQ ID NO: 210204 - DNA, 13 bp, Artificial Sequence
  Oligonucleotide for detection of SNP TSC0051331
ctctacctctata

SEQ ID NO: 210205 - DNA, 13 bp, Artificial Sequence
  Oligonucleotide for detection of SNP TSC0051332
gggagtgtttgga

SEQ ID NO: 210206 - DNA, 13 bp, Artificial Sequence
  Oligonucleotide for detection of SNP TSC0051332
tccaaacactccc

SEQ ID NO: 210207 - DNA, 13 bp, Artificial Sequence
  Oligonucleotide for detection of SNP TSC0051332
gggagtatttgga

SEQ ID NO: 210208 - DNA, 13 bp, Artificial Sequence
  Oligonucleotide for detection of SNP TSC0051332
tccaaatactccc

SEQ ID NO: 210209 - DNA, 13 bp, Artificial Sequence
  Oligonucleotide for detection of SNP TSC0051332
gggagcgtttgga

SEQ ID NO: 210210 - DNA, 13 bp, Artificial Sequence
  Oligonucleotide for detection of SNP TSC0051332
tccaaacgctccc

SEQ ID NO: 210211 - DNA, 13 bp, Artificial Sequence
  Oligonucleotide for detection of SNP TSC0051333
attttgttattay

SEQ ID NO: 210212 - DNA, 13 bp, Artificial Sequence
  Oligonucleotide for detection of SNP TSC0051333
rtaataacaaaat

SEQ ID NO: 210213 - DNA, 13 bp, Artificial Sequence
  Oligonucleotide for detection of SNP TSC0051333
attttggtattay

SEQ ID NO: 210214 - DNA, 13 bp, Artificial Sequence
  Oligonucleotide for detection of SNP TSC0051333
rtaataccaaaat

SEQ ID NO: 210215 - DNA, 13 bp, Artificial Sequence
  Oligonucleotide for detection of SNP TSC0051333
gtggtaataaagt

SEQ ID NO: 210216 - DNA, 13 bp, Artificial Sequence
  Oligonucleotide for detection of SNP TSC0051333
actttattaccac

SEQ ID NO: 210217 - DNA, 13 bp, Artificial Sequence
  Oligonucleotide for detection of SNP TSC0051333
gtggtattaaagt

SEQ ID NO: 210218 - DNA, 13 bp, Artificial Sequence
  Oligonucleotide for detection of SNP TSC0051333
actttaataccac

SEQ ID NO: 210219 - DNA, 13 bp, Artificial Sequence
  Oligonucleotide for detection of SNP TSC0051334
ataaagataattt

SEQ ID NO: 210220 - DNA, 13 bp, Artificial Sequence
  Oligonucleotide for detection of SNP TSC0051334
aaattatctttat

SEQ ID NO: 210221 - DNA, 13 bp, Artificial Sequence
  Oligonucleotide for detection of SNP TSC0051334
ataaaggtaattt

SEQ ID NO: 210222 - DNA, 13 bp, Artificial Sequence
  Oligonucleotide for detection of SNP TSC0051334
aaattacctttat

SEQ ID NO: 210223 - DNA, 13 bp, Artificial Sequence
  Oligonucleotide for detection of SNP TSC0051335
agtaaggtagatg

SEQ ID NO: 210224 - DNA, 13 bp, Artificial Sequence
  Oligonucleotide for detection of SNP TSC0051335
catctaccttact

SEQ ID NO: 210225 - DNA, 13 bp, Artificial Sequence
  Oligonucleotide for detection of SNP TSC0051335
agtaagatagatg

SEQ ID NO: 210226 - DNA, 13 bp, Artificial Sequence
  Oligonucleotide for detection of SNP TSC0051335
catctatcttact

SEQ ID NO: 210227 - DNA, 13 bp, Artificial Sequence
  Oligonucleotide for detection of SNP TSC0051336
ataattattaaag

SEQ ID NO: 210228 - DNA, 13 bp, Artificial Sequence
  Oligonucleotide for detection of SNP TSC0051336
ctttaataattat

SEQ ID NO: 210229 - DNA, 13 bp, Artificial Sequence
  Oligonucleotide for detection of SNP TSC0051336
ataatttttaaag

SEQ ID NO: 210230 - DNA, 13 bp, Artificial Sequence
  Oligonucleotide for detection of SNP TSC0051336
ctttaaaaattat

SEQ ID NO: 210231 - DNA, 13 bp, Artificial Sequence
  Oligonucleotide for detection of SNP TSC0051336
ttttagtaattat

SEQ ID NO: 210232 - DNA, 13 bp, Artificial Sequence
  Oligonucleotide for detection of SNP TSC0051336
ataattactaaaa

SEQ ID NO: 210233 - DNA, 13 bp, Artificial Sequence
  Oligonucleotide for detection of SNP TSC0051336
ttttagaaattat

SEQ ID NO: 210234 - DNA, 13 bp, Artificial Sequence
  Oligonucleotide for detection of SNP TSC0051336
ataatttctaaaa

SEQ ID NO: 210235 - DNA, 13 bp, Artificial Sequence
  Oligonucleotide for detection of SNP TSC0051337
aaataaatatatt

SEQ ID NO: 210236 - DNA, 13 bp, Artificial Sequence
  Oligonucleotide for detection of SNP TSC0051337
aatatatttattt

SEQ ID NO: 210237 - DNA, 13 bp, Artificial Sequence
  Oligonucleotide for detection of SNP TSC0051337
aaataagtatatt

SEQ ID NO: 210238 - DNA, 13 bp, Artificial Sequence
  Oligonucleotide for detection of SNP TSC0051337
aatatacttattt

SEQ ID NO: 210239 - DNA, 13 bp, Artificial Sequence
  Oligonucleotide for detection of SNP TSC0051338
gaaagtattttty

SEQ ID NO: 210240 - DNA, 13 bp, Artificial Sequence
  Oligonucleotide for detection of SNP TSC0051338
raaaaatactttc

SEQ ID NO: 210241 - DNA, 13 bp, Artificial Sequence
  Oligonucleotide for detection of SNP TSC0051343
agtttcgtttgty

SEQ ID NO: 210242 - DNA, 13 bp, Artificial Sequence
  Oligonucleotide for detection of SNP TSC0051343
racaaacgaaact

SEQ ID NO: 210243 - DNA, 13 bp, Artificial Sequence
  Oligonucleotide for detection of SNP TSC0051343
agtttcgttcgty

SEQ ID NO: 210244 - DNA, 13 bp, Artificial Sequence
  Oligonucleotide for detection of SNP TSC0051343
racgaacgaaact

SEQ ID NO: 210245 - DNA, 13 bp, Artificial Sequence
  Oligonucleotide for detection of SNP TSC0051343
ggtggatgaaatt

SEQ ID NO: 210246 - DNA, 13 bp, Artificial Sequence
  Oligonucleotide for detection of SNP TSC0051343
aatttcatccacc

SEQ ID NO: 210247 - DNA, 13 bp, Artificial Sequence
  Oligonucleotide for detection of SNP TSC0051343
ggcggatgaaatt

SEQ ID NO: 210248 - DNA, 13 bp, Artificial Sequence
  Oligonucleotide for detection of SNP TSC0051343
aatttcatccgcc

SEQ ID NO: 210249 - DNA, 13 bp, Artificial Sequence
  Oligonucleotide for detection of SNP TSC0051343
ggtggacgaaatt

SEQ ID NO: 210250 - DNA, 13 bp, Artificial Sequence
  Oligonucleotide for detection of SNP TSC0051343
aatttcgtccacc

SEQ ID NO: 210251 - DNA, 13 bp, Artificial Sequence
  Oligonucleotide for detection of SNP TSC0051343
ggcggacgaaatt

SEQ ID NO: 210252 - DNA, 13 bp, Artificial Sequence
  Oligonucleotide for detection of SNP TSC0051343
aatttcgtccgcc

SEQ ID NO: 210253 - DNA, 13 bp, Artificial Sequence
  Oligonucleotide for detection of SNP TSC0051344
atttgttaatttg

SEQ ID NO: 210254 - DNA, 13 bp, Artificial Sequence
  Oligonucleotide for detection of SNP TSC0051344
caaattaacaaat

SEQ ID NO: 210255 - DNA, 13 bp, Artificial Sequence
  Oligonucleotide for detection of SNP TSC0051344
atttgtgaatttg

SEQ ID NO: 210256 - DNA, 13 bp, Artificial Sequence
  Oligonucleotide for detection of SNP TSC0051344
caaattcacaaat

SEQ ID NO: 210257 - DNA, 13 bp, Artificial Sequence
  Oligonucleotide for detection of SNP TSC0051344
atttgcgaatttg

SEQ ID NO: 210258 - DNA, 13 bp, Artificial Sequence
  Oligonucleotide for detection of SNP TSC0051344
caaattcgcaaat

SEQ ID NO: 210259 - DNA, 13 bp, Artificial Sequence
  Oligonucleotide for detection of SNP TSC0051344
taaattggtaaat

SEQ ID NO: 210260 - DNA, 13 bp, Artificial Sequence
  Oligonucleotide for detection of SNP TSC0051344
atttaccaattta

SEQ ID NO: 210261 - DNA, 13 bp, Artificial Sequence
  Oligonucleotide for detection of SNP TSC0051344
taaatttgtaaat

SEQ ID NO: 210262 - DNA, 13 bp, Artificial Sequence
  Oligonucleotide for detection of SNP TSC0051344
atttacaaattta

SEQ ID NO: 210263 - DNA, 13 bp, Artificial Sequence
  Oligonucleotide for detection of SNP TSC0051344
taaattcgtaaat

SEQ ID NO: 210264 - DNA, 13 bp, Artificial Sequence
  Oligonucleotide for detection of SNP TSC0051344
atttacgaattta

SEQ ID NO: 210265 - DNA, 13 bp, Artificial Sequence
  Oligonucleotide for detection of SNP TSC0051345
tttttataaggty

SEQ ID NO: 210266 - DNA, 13 bp, Artificial Sequence
  Oligonucleotide for detection of SNP TSC0051345
raccttataaaaa

SEQ ID NO: 210267 - DNA, 13 bp, Artificial Sequence
  Oligonucleotide for detection of SNP TSC0051345
tttttagaaggty

SEQ ID NO: 210268 - DNA, 13 bp, Artificial Sequence
  Oligonucleotide for detection of SNP TSC0051345
raccttctaaaaa

SEQ ID NO: 210269 - DNA, 13 bp, Artificial Sequence
  Oligonucleotide for detection of SNP TSC0051345
gattttgtgagga

SEQ ID NO: 210270 - DNA, 13 bp, Artificial Sequence
  Oligonucleotide for detection of SNP TSC0051345
tcctcacaaaatc

SEQ ID NO: 210271 - DNA, 13 bp, Artificial Sequence
  Oligonucleotide for detection of SNP TSC0051345
gattttttgagga

SEQ ID NO: 210272 - DNA, 13 bp, Artificial Sequence
  Oligonucleotide for detection of SNP TSC0051345
tcctcaaaaaatc

SEQ ID NO: 210273 - DNA, 13 bp, Artificial Sequence
  Oligonucleotide for detection of SNP TSC0051346
ttgattttatgtg

SEQ ID NO: 210274 - DNA, 13 bp, Artificial Sequence
  Oligonucleotide for detection of SNP TSC0051346
cacataaaatcaa

SEQ ID NO: 210275 - DNA, 13 bp, Artificial Sequence
  Oligonucleotide for detection of SNP TSC0051346
ttgattgtatgtg

SEQ ID NO: 210276 - DNA, 13 bp, Artificial Sequence
  Oligonucleotide for detection of SNP TSC0051346
cacatacaatcaa

SEQ ID NO: 210277 - DNA, 13 bp, Artificial Sequence
  Oligonucleotide for detection of SNP TSC0051347
agttatgataata

SEQ ID NO: 210278 - DNA, 13 bp, Artificial Sequence
  Oligonucleotide for detection of SNP TSC0051347
tattatcataact

SEQ ID NO: 210279 - DNA, 13 bp, Artificial Sequence
  Oligonucleotide for detection of SNP TSC0008847
ggttaagtgttaa

SEQ ID NO: 210280 - DNA, 13 bp, Artificial Sequence
  Oligonucleotide for detection of SNP TSC0008847
ttaacacttaacc

SEQ ID NO: 210281 - DNA, 13 bp, Artificial Sequence
  Oligonucleotide for detection of SNP TSC0008847
ggttaattgttaa

SEQ ID NO: 210282 - DNA, 13 bp, Artificial Sequence
  Oligonucleotide for detection of SNP TSC0008847
ttaacaattaacc

SEQ ID NO: 210283 - DNA, 13 bp, Artificial Sequence
  Oligonucleotide for detection of SNP TSC0051348
agggataagtgay

SEQ ID NO: 210284 - DNA, 13 bp, Artificial Sequence
  Oligonucleotide for detection of SNP TSC0051348
rtcacttatccct

SEQ ID NO: 210285 - DNA, 13 bp, Artificial Sequence
  Oligonucleotide for detection of SNP TSC0051348
agggatgagtgay

SEQ ID NO: 210286 - DNA, 13 bp, Artificial Sequence
  Oligonucleotide for detection of SNP TSC0051348
rtcactcatccct

SEQ ID NO: 210287 - DNA, 13 bp, Artificial Sequence
  Oligonucleotide for detection of SNP TSC0051348
agggacgagtgay

SEQ ID NO: 210288 - DNA, 13 bp, Artificial Sequence
  Oligonucleotide for detection of SNP TSC0051348
rtcactcgtccct

SEQ ID NO: 210289 - DNA, 13 bp, Artificial Sequence
  Oligonucleotide for detection of SNP TSC0051348
gttatttgttttt

SEQ ID NO: 210290 - DNA, 13 bp, Artificial Sequence
  Oligonucleotide for detection of SNP TSC0051348
aaaaacaaataac

SEQ ID NO: 210291 - DNA, 13 bp, Artificial Sequence
  Oligonucleotide for detection of SNP TSC0051348
gttattcgttttt

SEQ ID NO: 210292 - DNA, 13 bp, Artificial Sequence
  Oligonucleotide for detection of SNP TSC0051348
aaaaacgaataac

SEQ ID NO: 210293 - DNA, 13 bp, Artificial Sequence
  Oligonucleotide for detection of SNP TSC0051352
tagtaaatattay

SEQ ID NO: 210294 - DNA, 13 bp, Artificial Sequence
  Oligonucleotide for detection of SNP TSC0051352
rtaatatttacta

SEQ ID NO: 210295 - DNA, 13 bp, Artificial Sequence
  Oligonucleotide for detection of SNP TSC0051352
tagtaagtattay

SEQ ID NO: 210296 - DNA, 13 bp, Artificial Sequence
  Oligonucleotide for detection of SNP TSC0051352
rtaatacttacta

SEQ ID NO: 210297 - DNA, 13 bp, Artificial Sequence
  Oligonucleotide for detection of SNP TSC0005129
aattaatgaagag

SEQ ID NO: 210298 - DNA, 13 bp, Artificial Sequence
  Oligonucleotide for detection of SNP TSC0005129
ctcttcattaatt

SEQ ID NO: 210299 - DNA, 13 bp, Artificial Sequence
  Oligonucleotide for detection of SNP TSC0005129
aattaacgaagag

SEQ ID NO: 210300 - DNA, 13 bp, Artificial Sequence
  Oligonucleotide for detection of SNP TSC0005129
ctcttcgttaatt

SEQ ID NO: 210301 - DNA, 13 bp, Artificial Sequence
  Oligonucleotide for detection of SNP TSC0051353
tgaattataataa

SEQ ID NO: 210302 - DNA, 13 bp, Artificial Sequence
  Oligonucleotide for detection of SNP TSC0051353
ttattataattca

SEQ ID NO: 210303 - DNA, 13 bp, Artificial Sequence
  Oligonucleotide for detection of SNP TSC0051353
tgaattgtaataa

SEQ ID NO: 210304 - DNA, 13 bp, Artificial Sequence
  Oligonucleotide for detection of SNP TSC0051353
ttattacaattca

SEQ ID NO: 210305 - DNA, 13 bp, Artificial Sequence
  Oligonucleotide for detection of SNP TSC0051354
tgaatgataaaaa

SEQ ID NO: 210306 - DNA, 13 bp, Artificial Sequence
  Oligonucleotide for detection of SNP TSC0051354
tttttatcattca

SEQ ID NO: 210307 - DNA, 13 bp, Artificial Sequence
  Oligonucleotide for detection of SNP TSC0051354
tgaatgttaaaaa

SEQ ID NO: 210308 - DNA, 13 bp, Artificial Sequence
  Oligonucleotide for detection of SNP TSC0051354
tttttaacattca

SEQ ID NO: 210309 - DNA, 13 bp, Artificial Sequence
  Oligonucleotide for detection of SNP TSC0007818
aaggttgtattay

SEQ ID NO: 210310 - DNA, 13 bp, Artificial Sequence
  Oligonucleotide for detection of SNP TSC0007818
rtaatacaacctt

SEQ ID NO: 210311 - DNA, 13 bp, Artificial Sequence
  Oligonucleotide for detection of SNP TSC0007818
aaggttatattay

SEQ ID NO: 210312 - DNA, 13 bp, Artificial Sequence
  Oligonucleotide for detection of SNP TSC0007818
rtaatataacctt

SEQ ID NO: 210313 - DNA, 13 bp, Artificial Sequence
  Oligonucleotide for detection of SNP TSC0051358
aattatatgtatg

SEQ ID NO: 210314 - DNA, 13 bp, Artificial Sequence
  Oligonucleotide for detection of SNP TSC0051358
catacatataatt

SEQ ID NO: 210315 - DNA, 13 bp, Artificial Sequence
  Oligonucleotide for detection of SNP TSC0051358
aattatgtgtatg

SEQ ID NO: 210316 - DNA, 13 bp, Artificial Sequence
  Oligonucleotide for detection of SNP TSC0051358
catacacataatt

SEQ ID NO: 210317 - DNA, 13 bp, Artificial Sequence
  Oligonucleotide for detection of SNP TSC0051360
agaaaatggaaay

SEQ ID NO: 210318 - DNA, 13 bp, Artificial Sequence
  Oligonucleotide for detection of SNP TSC0051360
rtttccattttct

SEQ ID NO: 210319 - DNA, 13 bp, Artificial Sequence
  Oligonucleotide for detection of SNP TSC0051360
agaaaacggaaay

SEQ ID NO: 210320 - DNA, 13 bp, Artificial Sequence
  Oligonucleotide for detection of SNP TSC0051360
rtttccgttttct

SEQ ID NO: 210321 - DNA, 13 bp, Artificial Sequence
  Oligonucleotide for detection of SNP TSC0051361
tatttatttatta

SEQ ID NO: 210322 - DNA, 13 bp, Artificial Sequence
  Oligonucleotide for detection of SNP TSC0051361
taataaataaata

SEQ ID NO: 210323 - DNA, 13 bp, Artificial Sequence
  Oligonucleotide for detection of SNP TSC0051361
taataagtagatg

SEQ ID NO: 210324 - DNA, 13 bp, Artificial Sequence
  Oligonucleotide for detection of SNP TSC0051361
catctacttatta

SEQ ID NO: 210325 - DNA, 13 bp, Artificial Sequence
  Oligonucleotide for detection of SNP TSC0051362
tgattatgagaga

SEQ ID NO: 210326 - DNA, 13 bp, Artificial Sequence
  Oligonucleotide for detection of SNP TSC0051362
tctctcataatca

SEQ ID NO: 210327 - DNA, 13 bp, Artificial Sequence
  Oligonucleotide for detection of SNP TSC0051362
tgattacgagaga

SEQ ID NO: 210328 - DNA, 13 bp, Artificial Sequence
  Oligonucleotide for detection of SNP TSC0051362
tctctcgtaatca

SEQ ID NO: 210329 - DNA, 13 bp, Artificial Sequence
  Oligonucleotide for detection of SNP TSC0051363
agggaggagataa

SEQ ID NO: 210330 - DNA, 13 bp, Artificial Sequence
  Oligonucleotide for detection of SNP TSC0051363
ttatctcctccct

SEQ ID NO: 210331 - DNA, 13 bp, Artificial Sequence
  Oligonucleotide for detection of SNP TSC0051363
agggagtagataa

SEQ ID NO: 210332 - DNA, 13 bp, Artificial Sequence
  Oligonucleotide for detection of SNP TSC0051363
ttatctactccct

SEQ ID NO: 210333 - DNA, 13 bp, Artificial Sequence
  Oligonucleotide for detection of SNP TSC0051365
atatgtatgaaat

SEQ ID NO: 210334 - DNA, 13 bp, Artificial Sequence
  Oligonucleotide for detection of SNP TSC0051365
atttcatacatat

SEQ ID NO: 210335 - DNA, 13 bp, Artificial Sequence
  Oligonucleotide for detection of SNP TSC0051365
atatgtgtgaaat

SEQ ID NO: 210336 - DNA, 13 bp, Artificial Sequence
  Oligonucleotide for detection of SNP TSC0051365
atttcacacatat

SEQ ID NO: 210337 - DNA, 13 bp, Artificial Sequence
  Oligonucleotide for detection of SNP TSC0051366
tataataataatt

SEQ ID NO: 210338 - DNA, 13 bp, Artificial Sequence
  Oligonucleotide for detection of SNP TSC0051366
aattattattata

SEQ ID NO: 210339 - DNA, 13 bp, Artificial Sequence
  Oligonucleotide for detection of SNP TSC0051366
tataatgataatt

SEQ ID NO: 210340 - DNA, 13 bp, Artificial Sequence
  Oligonucleotide for detection of SNP TSC0051366
aattatcattata

SEQ ID NO: 210341 - DNA, 13 bp, Artificial Sequence
  Oligonucleotide for detection of SNP TSC0051367
ttataataaagtt

SEQ ID NO: 210342 - DNA, 13 bp, Artificial Sequence
  Oligonucleotide for detection of SNP TSC0051367
aactttattataa

SEQ ID NO: 210343 - DNA, 13 bp, Artificial Sequence
  Oligonucleotide for detection of SNP TSC0051367
ttataagaaagtt

SEQ ID NO: 210344 - DNA, 13 bp, Artificial Sequence
  Oligonucleotide for detection of SNP TSC0051367
aactttcttataa

SEQ ID NO: 210345 - DNA, 13 bp, Artificial Sequence
  Oligonucleotide for detection of SNP TSC0051367
aatttttttatag

SEQ ID NO: 210346 - DNA, 13 bp, Artificial Sequence
  Oligonucleotide for detection of SNP TSC0051367
ctataaaaaaatt

SEQ ID NO: 210347 - DNA, 13 bp, Artificial Sequence
  Oligonucleotide for detection of SNP TSC0051369
tttttgaaattty

SEQ ID NO: 210348 - DNA, 13 bp, Artificial Sequence
  Oligonucleotide for detection of SNP TSC0051369
raaatttcaaaaa

SEQ ID NO: 210349 - DNA, 13 bp, Artificial Sequence
  Oligonucleotide for detection of SNP TSC0051369
gaaattttaaaaa

SEQ ID NO: 210350 - DNA, 13 bp, Artificial Sequence
  Oligonucleotide for detection of SNP TSC0051369
tttttaaaatttc

SEQ ID NO: 210351 - DNA, 13 bp, Artificial Sequence
  Oligonucleotide for detection of SNP TSC0051369
gaaattataaaaa

SEQ ID NO: 210352 - DNA, 13 bp, Artificial Sequence
  Oligonucleotide for detection of SNP TSC0051369
tttttataatttc

SEQ ID NO: 210353 - DNA, 13 bp, Artificial Sequence
  Oligonucleotide for detection of SNP TSC0051370
tttaaggttagtt

SEQ ID NO: 210354 - DNA, 13 bp, Artificial Sequence
  Oligonucleotide for detection of SNP TSC0051370
aactaaccttaaa

SEQ ID NO: 210355 - DNA, 13 bp, Artificial Sequence
  Oligonucleotide for detection of SNP TSC0051370
tttaagattagtt

SEQ ID NO: 210356 - DNA, 13 bp, Artificial Sequence
  Oligonucleotide for detection of SNP TSC0051370
aactaatcttaaa

SEQ ID NO: 210357 - DNA, 13 bp, Artificial Sequence
  Oligonucleotide for detection of SNP TSC0051372
agaaaaagaaaaa

SEQ ID NO: 210358 - DNA, 13 bp, Artificial Sequence
  Oligonucleotide for detection of SNP TSC0051372
tttttctttttct

SEQ ID NO: 210359 - DNA, 13 bp, Artificial Sequence
  Oligonucleotide for detection of SNP TSC0051372
agaaaaggaaaaa

SEQ ID NO: 210360 - DNA, 13 bp, Artificial Sequence
  Oligonucleotide for detection of SNP TSC0051372
tttttccttttct

SEQ ID NO: 210361 - DNA, 13 bp, Artificial Sequence
  Oligonucleotide for detection of SNP TSC0008255
aaggataggatgt

SEQ ID NO: 210362 - DNA, 13 bp, Artificial Sequence
  Oligonucleotide for detection of SNP TSC0008255
acatcctatcctt

SEQ ID NO: 210363 - DNA, 13 bp, Artificial Sequence
  Oligonucleotide for detection of SNP TSC0008255
aaggatgggatgt

SEQ ID NO: 210364 - DNA, 13 bp, Artificial Sequence
  Oligonucleotide for detection of SNP TSC0008255
acatcccatcctt

SEQ ID NO: 210365 - DNA, 13 bp, Artificial Sequence
  Oligonucleotide for detection of SNP TSC0008255
aaggacgggatgt

SEQ ID NO: 210366 - DNA, 13 bp, Artificial Sequence
  Oligonucleotide for detection of SNP TSC0008255
acatcccgtcctt

SEQ ID NO: 210367 - DNA, 13 bp, Artificial Sequence
  Oligonucleotide for detection of SNP TSC0051373
atattggagtaat

SEQ ID NO: 210368 - DNA, 13 bp, Artificial Sequence
  Oligonucleotide for detection of SNP TSC0051373
attactccaatat

SEQ ID NO: 210369 - DNA, 13 bp, Artificial Sequence
  Oligonucleotide for detection of SNP TSC0051373
atattgaagtaat

SEQ ID NO: 210370 - DNA, 13 bp, Artificial Sequence
  Oligonucleotide for detection of SNP TSC0051373
attacttcaatat

SEQ ID NO: 210371 - DNA, 13 bp, Artificial Sequence
  Oligonucleotide for detection of SNP TSC0051374
tattttttttatg

SEQ ID NO: 210372 - DNA, 13 bp, Artificial Sequence
  Oligonucleotide for detection of SNP TSC0051374
cataaaaaaaata

SEQ ID NO: 210373 - DNA, 13 bp, Artificial Sequence
  Oligonucleotide for detection of SNP TSC0051374
tatgggtgggata

SEQ ID NO: 210374 - DNA, 13 bp, Artificial Sequence
  Oligonucleotide for detection of SNP TSC0051374
tatcccacccata

SEQ ID NO: 210375 - DNA, 13 bp, Artificial Sequence
  Oligonucleotide for detection of SNP TSC0051374
tatgggggggata

SEQ ID NO: 210376 - DNA, 13 bp, Artificial Sequence
  Oligonucleotide for detection of SNP TSC0051374
tatcccccccata

SEQ ID NO: 210377 - DNA, 13 bp, Artificial Sequence
  Oligonucleotide for detection of SNP TSC0051375
tttttggttatta

SEQ ID NO: 210378 - DNA, 13 bp, Artificial Sequence
  Oligonucleotide for detection of SNP TSC0051375
taataaccaaaaa

SEQ ID NO: 210379 - DNA, 13 bp, Artificial Sequence
  Oligonucleotide for detection of SNP TSC0051375
tttttgattatta

SEQ ID NO: 210380 - DNA, 13 bp, Artificial Sequence
  Oligonucleotide for detection of SNP TSC0051375
taataatcaaaaa

SEQ ID NO: 210381 - DNA, 13 bp, Artificial Sequence
  Oligonucleotide for detection of SNP TSC0051375
ttttcggttatta

SEQ ID NO: 210382 - DNA, 13 bp, Artificial Sequence
  Oligonucleotide for detection of SNP TSC0051375
taataaccgaaaa

SEQ ID NO: 210383 - DNA, 13 bp, Artificial Sequence
  Oligonucleotide for detection of SNP TSC0051375
ttttcgattatta

SEQ ID NO: 210384 - DNA, 13 bp, Artificial Sequence
  Oligonucleotide for detection of SNP TSC0051375
taataatcgaaaa

SEQ ID NO: 210385 - DNA, 13 bp, Artificial Sequence
  Oligonucleotide for detection of SNP TSC0005915
gatattgaggaaa

SEQ ID NO: 210386 - DNA, 13 bp, Artificial Sequence
  Oligonucleotide for detection of SNP TSC0005915
tttcctcaatatc

SEQ ID NO: 210387 - DNA, 13 bp, Artificial Sequence
  Oligonucleotide for detection of SNP TSC0005915
gatattaaggaaa

SEQ ID NO: 210388 - DNA, 13 bp, Artificial Sequence
  Oligonucleotide for detection of SNP TSC0005915
tttccttaatatc

SEQ ID NO: 210389 - DNA, 13 bp, Artificial Sequence
  Oligonucleotide for detection of SNP TSC0051376
ttatgtgtttgga

SEQ ID NO: 210390 - DNA, 13 bp, Artificial Sequence
  Oligonucleotide for detection of SNP TSC0051376
tccaaacacataa

SEQ ID NO: 210391 - DNA, 13 bp, Artificial Sequence
  Oligonucleotide for detection of SNP TSC0004549
ttaatggtttttt

SEQ ID NO: 210392 - DNA, 13 bp, Artificial Sequence
  Oligonucleotide for detection of SNP TSC0004549
aaaaaaccattaa

SEQ ID NO: 210393 - DNA, 13 bp, Artificial Sequence
  Oligonucleotide for detection of SNP TSC0051377
taattattttaat

SEQ ID NO: 210394 - DNA, 13 bp, Artificial Sequence
  Oligonucleotide for detection of SNP TSC0051377
attaaaataatta

SEQ ID NO: 210395 - DNA, 13 bp, Artificial Sequence
  Oligonucleotide for detection of SNP TSC0051377
taattagtttaat

SEQ ID NO: 210396 - DNA, 13 bp, Artificial Sequence
  Oligonucleotide for detection of SNP TSC0051377
attaaactaatta

SEQ ID NO: 210397 - DNA, 13 bp, Artificial Sequence
  Oligonucleotide for detection of SNP TSC0051377
attagggtggttg

SEQ ID NO: 210398 - DNA, 13 bp, Artificial Sequence
  Oligonucleotide for detection of SNP TSC0051377
caaccaccctaat

SEQ ID NO: 210399 - DNA, 13 bp, Artificial Sequence
  Oligonucleotide for detection of SNP TSC0051377
attaggttggttg

SEQ ID NO: 210400 - DNA, 13 bp, Artificial Sequence
  Oligonucleotide for detection of SNP TSC0051377
caaccaacctaat

SEQ ID NO: 210401 - DNA, 13 bp, Artificial Sequence
  Oligonucleotide for detection of SNP TSC0051378
ggtttttgtatat

SEQ ID NO: 210402 - DNA, 13 bp, Artificial Sequence
  Oligonucleotide for detection of SNP TSC0051378
atatacaaaaacc

SEQ ID NO: 210403 - DNA, 13 bp, Artificial Sequence
  Oligonucleotide for detection of SNP TSC0051378
ggttttggtatat

SEQ ID NO: 210404 - DNA, 13 bp, Artificial Sequence
  Oligonucleotide for detection of SNP TSC0051378
atataccaaaacc

SEQ ID NO: 210405 - DNA, 13 bp, Artificial Sequence
  Oligonucleotide for detection of SNP TSC0051378
atgtataaaagty

SEQ ID NO: 210406 - DNA, 13 bp, Artificial Sequence
  Oligonucleotide for detection of SNP TSC0051378
racttttatacat

SEQ ID NO: 210407 - DNA, 13 bp, Artificial Sequence
  Oligonucleotide for detection of SNP TSC0051378
atgtattaaagty

SEQ ID NO: 210408 - DNA, 13 bp, Artificial Sequence
  Oligonucleotide for detection of SNP TSC0051378
ractttaatacat

SEQ ID NO: 210409 - DNA, 13 bp, Artificial Sequence
  Oligonucleotide for detection of SNP TSC0051379
taatttgttaaag

SEQ ID NO: 210410 - DNA, 13 bp, Artificial Sequence
  Oligonucleotide for detection of SNP TSC0051379
ctttaacaaatta

SEQ ID NO: 210411 - DNA, 13 bp, Artificial Sequence
  Oligonucleotide for detection of SNP TSC0051379
taatttattaaag

SEQ ID NO: 210412 - DNA, 13 bp, Artificial Sequence
  Oligonucleotide for detection of SNP TSC0051379
ctttaataaatta

SEQ ID NO: 210413 - DNA, 13 bp, Artificial Sequence
  Oligonucleotide for detection of SNP TSC0051380
aaaatagtttgta

SEQ ID NO: 210414 - DNA, 13 bp, Artificial Sequence
  Oligonucleotide for detection of SNP TSC0051380
tacaaactatttt

SEQ ID NO: 210415 - DNA, 13 bp, Artificial Sequence
  Oligonucleotide for detection of SNP TSC0051380
tataaagtgtttt

SEQ ID NO: 210416 - DNA, 13 bp, Artificial Sequence
  Oligonucleotide for detection of SNP TSC0051380
aaaacactttata

SEQ ID NO: 210417 - DNA, 13 bp, Artificial Sequence
  Oligonucleotide for detection of SNP TSC0051380
tataaattgtttt

SEQ ID NO: 210418 - DNA, 13 bp, Artificial Sequence
  Oligonucleotide for detection of SNP TSC0051380
aaaacaatttata

SEQ ID NO: 210419 - DNA, 13 bp, Artificial Sequence
  Oligonucleotide for detection of SNP TSC0051383
tgttttaaattta

SEQ ID NO: 210420 - DNA, 13 bp, Artificial Sequence
  Oligonucleotide for detection of SNP TSC0051383
taaatttaaaaca

SEQ ID NO: 210421 - DNA, 13 bp, Artificial Sequence
  Oligonucleotide for detection of SNP TSC0051383
tgtttttaattta

SEQ ID NO: 210422 - DNA, 13 bp, Artificial Sequence
  Oligonucleotide for detection of SNP TSC0051383
taaattaaaaaca

SEQ ID NO: 210423 - DNA, 13 bp, Artificial Sequence
  Oligonucleotide for detection of SNP TSC0051383
tagatttaaaata

SEQ ID NO: 210424 - DNA, 13 bp, Artificial Sequence
  Oligonucleotide for detection of SNP TSC0051383
tattttaaatcta

SEQ ID NO: 210425 - DNA, 13 bp, Artificial Sequence
  Oligonucleotide for detection of SNP TSC0051383
tagattaaaaata

SEQ ID NO: 210426 - DNA, 13 bp, Artificial Sequence
  Oligonucleotide for detection of SNP TSC0051383
tatttttaatcta

SEQ ID NO: 210427 - DNA, 13 bp, Artificial Sequence
  Oligonucleotide for detection of SNP TSC0051384
aaataatagaaat

SEQ ID NO: 210428 - DNA, 13 bp, Artificial Sequence
  Oligonucleotide for detection of SNP TSC0051384
atttctattattt

SEQ ID NO: 210429 - DNA, 13 bp, Artificial Sequence
  Oligonucleotide for detection of SNP TSC0051384
aaataagagaaat

SEQ ID NO: 210430 - DNA, 13 bp, Artificial Sequence
  Oligonucleotide for detection of SNP TSC0051384
atttctcttattt

SEQ ID NO: 210431 - DNA, 13 bp, Artificial Sequence
  Oligonucleotide for detection of SNP TSC0051385
atattagtgggty

SEQ ID NO: 210432 - DNA, 13 bp, Artificial Sequence
  Oligonucleotide for detection of SNP TSC0051385
racccactaatat

SEQ ID NO: 210433 - DNA, 13 bp, Artificial Sequence
  Oligonucleotide for detection of SNP TSC0051385
atattaatgggty

SEQ ID NO: 210434 - DNA, 13 bp, Artificial Sequence
  Oligonucleotide for detection of SNP TSC0051385
racccattaatat

SEQ ID NO: 210435 - DNA, 13 bp, Artificial Sequence
  Oligonucleotide for detection of SNP TSC0051387
atgagggtagaaa

SEQ ID NO: 210436 - DNA, 13 bp, Artificial Sequence
  Oligonucleotide for detection of SNP TSC0051387
tttctaccctcat

SEQ ID NO: 210437 - DNA, 13 bp, Artificial Sequence
  Oligonucleotide for detection of SNP TSC0051387
atgaggatagaaa

SEQ ID NO: 210438 - DNA, 13 bp, Artificial Sequence
  Oligonucleotide for detection of SNP TSC0051387
tttctatcctcat

SEQ ID NO: 210439 - DNA, 13 bp, Artificial Sequence
  Oligonucleotide for detection of SNP TSC0051388
ttgtaaatgattt

SEQ ID NO: 210440 - DNA, 13 bp, Artificial Sequence
  Oligonucleotide for detection of SNP TSC0051388
aaatcatttacaa

SEQ ID NO: 210441 - DNA, 13 bp, Artificial Sequence
  Oligonucleotide for detection of SNP TSC0051388
ttgtaagtgattt

SEQ ID NO: 210442 - DNA, 13 bp, Artificial Sequence
  Oligonucleotide for detection of SNP TSC0051388
aaatcacttacaa

SEQ ID NO: 210443 - DNA, 13 bp, Artificial Sequence
  Oligonucleotide for detection of SNP TSC0051389
attaattgtataa

SEQ ID NO: 210444 - DNA, 13 bp, Artificial Sequence
  Oligonucleotide for detection of SNP TSC0051389
ttatacaattaat

SEQ ID NO: 210445 - DNA, 13 bp, Artificial Sequence
  Oligonucleotide for detection of SNP TSC0051389
attaatggtataa

SEQ ID NO: 210446 - DNA, 13 bp, Artificial Sequence
  Oligonucleotide for detection of SNP TSC0051389
ttataccattaat

SEQ ID NO: 210447 - DNA, 13 bp, Artificial Sequence
  Oligonucleotide for detection of SNP TSC0051389
attaatcgtataa

SEQ ID NO: 210448 - DNA, 13 bp, Artificial Sequence
  Oligonucleotide for detection of SNP TSC0051389
ttatacgattaat

SEQ ID NO: 210449 - DNA, 13 bp, Artificial Sequence
  Oligonucleotide for detection of SNP TSC0051389
ttgtatgattggt

SEQ ID NO: 210450 - DNA, 13 bp, Artificial Sequence
  Oligonucleotide for detection of SNP TSC0051389
accaatcatacaa

SEQ ID NO: 210451 - DNA, 13 bp, Artificial Sequence
  Oligonucleotide for detection of SNP TSC0051389
ttgtattattggt

SEQ ID NO: 210452 - DNA, 13 bp, Artificial Sequence
  Oligonucleotide for detection of SNP TSC0051389
accaataatacaa

SEQ ID NO: 210453 - DNA, 13 bp, Artificial Sequence
  Oligonucleotide for detection of SNP TSC0051389
ttgtacgattggt

SEQ ID NO: 210454 - DNA, 13 bp, Artificial Sequence
  Oligonucleotide for detection of SNP TSC0051389
accaatcgtacaa

SEQ ID NO: 210455 - DNA, 13 bp, Artificial Sequence
  Oligonucleotide for detection of SNP TSC0004560
aggtaaattttat

SEQ ID NO: 210456 - DNA, 13 bp, Artificial Sequence
  Oligonucleotide for detection of SNP TSC0004560
ataaaatttacct

SEQ ID NO: 210457 - DNA, 13 bp, Artificial Sequence
  Oligonucleotide for detection of SNP TSC0004560
aggtaatttttat

SEQ ID NO: 210458 - DNA, 13 bp, Artificial Sequence
  Oligonucleotide for detection of SNP TSC0004560
ataaaaattacct

SEQ ID NO: 210459 - DNA, 13 bp, Artificial Sequence
  Oligonucleotide for detection of SNP TSC0004560
atagaatttgttt

SEQ ID NO: 210460 - DNA, 13 bp, Artificial Sequence
  Oligonucleotide for detection of SNP TSC0004560
aaacaaattctat

SEQ ID NO: 210461 - DNA, 13 bp, Artificial Sequence
  Oligonucleotide for detection of SNP TSC0004560
atagaaattgttt

SEQ ID NO: 210462 - DNA, 13 bp, Artificial Sequence
  Oligonucleotide for detection of SNP TSC0004560
aaacaatttctat

SEQ ID NO: 210463 - DNA, 13 bp, Artificial Sequence
  Oligonucleotide for detection of SNP TSC0004561
tggtagtgtaatg

SEQ ID NO: 210464 - DNA, 13 bp, Artificial Sequence
  Oligonucleotide for detection of SNP TSC0004561
cattacactacca

SEQ ID NO: 210465 - DNA, 13 bp, Artificial Sequence
  Oligonucleotide for detection of SNP TSC0004561
tggtagcgtaatg

SEQ ID NO: 210466 - DNA, 13 bp, Artificial Sequence
  Oligonucleotide for detection of SNP TSC0004561
cattacgctacca

SEQ ID NO: 210467 - DNA, 13 bp, Artificial Sequence
  Oligonucleotide for detection of SNP TSC0004561
tattgtgttgtta

SEQ ID NO: 210468 - DNA, 13 bp, Artificial Sequence
  Oligonucleotide for detection of SNP TSC0004561
taacaacacaata

SEQ ID NO: 210469 - DNA, 13 bp, Artificial Sequence
  Oligonucleotide for detection of SNP TSC0004561
tattgtattgtta

SEQ ID NO: 210470 - DNA, 13 bp, Artificial Sequence
  Oligonucleotide for detection of SNP TSC0004561
taacaatacaata

SEQ ID NO: 210471 - DNA, 13 bp, Artificial Sequence
  Oligonucleotide for detection of SNP TSC0004561
tattgcgttgtta

SEQ ID NO: 210472 - DNA, 13 bp, Artificial Sequence
  Oligonucleotide for detection of SNP TSC0004561
taacaacgcaata

SEQ ID NO: 210473 - DNA, 13 bp, Artificial Sequence
  Oligonucleotide for detection of SNP TSC0051393
tagtttggtgtta

SEQ ID NO: 210474 - DNA, 13 bp, Artificial Sequence
  Oligonucleotide for detection of SNP TSC0051393
taacaccaaacta

SEQ ID NO: 210475 - DNA, 13 bp, Artificial Sequence
  Oligonucleotide for detection of SNP TSC0051393
taatataaggttg

SEQ ID NO: 210476 - DNA, 13 bp, Artificial Sequence
  Oligonucleotide for detection of SNP TSC0051393
caaccttatatta

SEQ ID NO: 210477 - DNA, 13 bp, Artificial Sequence
  Oligonucleotide for detection of SNP TSC0051393
taatattaggttg

SEQ ID NO: 210478 - DNA, 13 bp, Artificial Sequence
  Oligonucleotide for detection of SNP TSC0051393
caacctaatatta

SEQ ID NO: 210479 - DNA, 13 bp, Artificial Sequence
  Oligonucleotide for detection of SNP TSC0051394
tgaatagatttty

SEQ ID NO: 210480 - DNA, 13 bp, Artificial Sequence
  Oligonucleotide for detection of SNP TSC0051394
raaaatctattca

SEQ ID NO: 210481 - DNA, 13 bp, Artificial Sequence
  Oligonucleotide for detection of SNP TSC0051394
tgaataaatttty

SEQ ID NO: 210482 - DNA, 13 bp, Artificial Sequence
  Oligonucleotide for detection of SNP TSC0051394
raaaatttattca

SEQ ID NO: 210483 - DNA, 13 bp, Artificial Sequence
  Oligonucleotide for detection of SNP TSC0051395
ttttgtatatata

SEQ ID NO: 210484 - DNA, 13 bp, Artificial Sequence
  Oligonucleotide for detection of SNP TSC0051395
tatatatacaaaa

SEQ ID NO: 210485 - DNA, 13 bp, Artificial Sequence
  Oligonucleotide for detection of SNP TSC0051395
tgtgtgtgtaagg

SEQ ID NO: 210486 - DNA, 13 bp, Artificial Sequence
  Oligonucleotide for detection of SNP TSC0051395
ccttacacacaca

SEQ ID NO: 210487 - DNA, 13 bp, Artificial Sequence
  Oligonucleotide for detection of SNP TSC0051395
tgtgtgcgtaagg

SEQ ID NO: 210488 - DNA, 13 bp, Artificial Sequence
  Oligonucleotide for detection of SNP TSC0051395
ccttacgcacaca

SEQ ID NO: 210489 - DNA, 13 bp, Artificial Sequence
  Oligonucleotide for detection of SNP TSC0051397
gtttaaaaattay

SEQ ID NO: 210490 - DNA, 13 bp, Artificial Sequence
  Oligonucleotide for detection of SNP TSC0051397
rtaatttttaaac

SEQ ID NO: 210491 - DNA, 13 bp, Artificial Sequence
  Oligonucleotide for detection of SNP TSC0051397
gtttaataattay

SEQ ID NO: 210492 - DNA, 13 bp, Artificial Sequence
  Oligonucleotide for detection of SNP TSC0051397
rtaattattaaac

SEQ ID NO: 210493 - DNA, 13 bp, Artificial Sequence
  Oligonucleotide for detection of SNP TSC0051397
gtgatttttaaay

SEQ ID NO: 210494 - DNA, 13 bp, Artificial Sequence
  Oligonucleotide for detection of SNP TSC0051397
rtttaaaaatcac

SEQ ID NO: 210495 - DNA, 13 bp, Artificial Sequence
  Oligonucleotide for detection of SNP TSC0051397
gtgattgttaaay

SEQ ID NO: 210496 - DNA, 13 bp, Artificial Sequence
  Oligonucleotide for detection of SNP TSC0051397
rtttaacaatcac

SEQ ID NO: 210497 - DNA, 13 bp, Artificial Sequence
  Oligonucleotide for detection of SNP TSC0009167
taatttatagtty

SEQ ID NO: 210498 - DNA, 13 bp, Artificial Sequence
  Oligonucleotide for detection of SNP TSC0009167
raactataaatta

SEQ ID NO: 210499 - DNA, 13 bp, Artificial Sequence
  Oligonucleotide for detection of SNP TSC0009167
taatttgtagtty

SEQ ID NO: 210500 - DNA, 13 bp, Artificial Sequence
  Oligonucleotide for detection of SNP TSC0009167
raactacaaatta

SEQ ID NO: 210501 - DNA, 13 bp, Artificial Sequence
  Oligonucleotide for detection of SNP TSC0009167
taattcgtagtty

SEQ ID NO: 210502 - DNA, 13 bp, Artificial Sequence
  Oligonucleotide for detection of SNP TSC0009167
raactacgaatta

SEQ ID NO: 210503 - DNA, 13 bp, Artificial Sequence
  Oligonucleotide for detection of SNP TSC0009167
gggttatgggtta

SEQ ID NO: 210504 - DNA, 13 bp, Artificial Sequence
  Oligonucleotide for detection of SNP TSC0009167
taacccataaccc

SEQ ID NO: 210505 - DNA, 13 bp, Artificial Sequence
  Oligonucleotide for detection of SNP TSC0009167
gggttacgggtta

SEQ ID NO: 210506 - DNA, 13 bp, Artificial Sequence
  Oligonucleotide for detection of SNP TSC0009167
taacccgtaaccc

SEQ ID NO: 210507 - DNA, 13 bp, Artificial Sequence
  Oligonucleotide for detection of SNP TSC0009168
atgtttagggtta

SEQ ID NO: 210508 - DNA, 13 bp, Artificial Sequence
  Oligonucleotide for detection of SNP TSC0009168
taaccctaaacat

SEQ ID NO: 210509 - DNA, 13 bp, Artificial Sequence
  Oligonucleotide for detection of SNP TSC0009168
atgtttggggtta

SEQ ID NO: 210510 - DNA, 13 bp, Artificial Sequence
  Oligonucleotide for detection of SNP TSC0009168
taaccccaaacat

SEQ ID NO: 210511 - DNA, 13 bp, Artificial Sequence
  Oligonucleotide for detection of SNP TSC0009168
atgttcggggtta

SEQ ID NO: 210512 - DNA, 13 bp, Artificial Sequence
  Oligonucleotide for detection of SNP TSC0009168
taaccccgaacat

SEQ ID NO: 210513 - DNA, 13 bp, Artificial Sequence
  Oligonucleotide for detection of SNP TSC0009168
tgattttgggtat

SEQ ID NO: 210514 - DNA, 13 bp, Artificial Sequence
  Oligonucleotide for detection of SNP TSC0009168
atacccaaaatca

SEQ ID NO: 210515 - DNA, 13 bp, Artificial Sequence
  Oligonucleotide for detection of SNP TSC0009168
tgatttcgggtat

SEQ ID NO: 210516 - DNA, 13 bp, Artificial Sequence
  Oligonucleotide for detection of SNP TSC0009168
atacccgaaatca

SEQ ID NO: 210517 - DNA, 13 bp, Artificial Sequence
  Oligonucleotide for detection of SNP TSC0009169
ttggggaaatttt

SEQ ID NO: 210518 - DNA, 13 bp, Artificial Sequence
  Oligonucleotide for detection of SNP TSC0009169
aaaatttccccaa

SEQ ID NO: 210519 - DNA, 13 bp, Artificial Sequence
  Oligonucleotide for detection of SNP TSC0009169
ttgggggaatttt

SEQ ID NO: 210520 - DNA, 13 bp, Artificial Sequence
  Oligonucleotide for detection of SNP TSC0009169
aaaattcccccaa

SEQ ID NO: 210521 - DNA, 13 bp, Artificial Sequence
  Oligonucleotide for detection of SNP TSC0009169
tcggggaaatttt

SEQ ID NO: 210522 - DNA, 13 bp, Artificial Sequence
  Oligonucleotide for detection of SNP TSC0009169
aaaatttccccga

SEQ ID NO: 210523 - DNA, 13 bp, Artificial Sequence
  Oligonucleotide for detection of SNP TSC0009169
tcgggggaatttt

SEQ ID NO: 210524 - DNA, 13 bp, Artificial Sequence
  Oligonucleotide for detection of SNP TSC0009169
aaaattcccccga

SEQ ID NO: 210525 - DNA, 13 bp, Artificial Sequence
  Oligonucleotide for detection of SNP TSC0051398
gtttatttttttt

SEQ ID NO: 210526 - DNA, 13 bp, Artificial Sequence
  Oligonucleotide for detection of SNP TSC0051398
aaaaaaaataaac

SEQ ID NO: 210527 - DNA, 13 bp, Artificial Sequence
  Oligonucleotide for detection of SNP TSC0051398
agggaaggtgggy

SEQ ID NO: 210528 - DNA, 13 bp, Artificial Sequence
  Oligonucleotide for detection of SNP TSC0051398
rcccaccttccct

SEQ ID NO: 210529 - DNA, 13 bp, Artificial Sequence
  Oligonucleotide for detection of SNP TSC0051398
agggaatgtgggy

SEQ ID NO: 210530 - DNA, 13 bp, Artificial Sequence
  Oligonucleotide for detection of SNP TSC0051398
rcccacattccct

SEQ ID NO: 210531 - DNA, 13 bp, Artificial Sequence
  Oligonucleotide for detection of SNP TSC0051398
agggaacgtgggy

SEQ ID NO: 210532 - DNA, 13 bp, Artificial Sequence
  Oligonucleotide for detection of SNP TSC0051398
rcccacgttccct

SEQ ID NO: 210533 - DNA, 13 bp, Artificial Sequence
  Oligonucleotide for detection of SNP TSC0051399
atttttgtttatg

SEQ ID NO: 210534 - DNA, 13 bp, Artificial Sequence
  Oligonucleotide for detection of SNP TSC0051399
cataaacaaaaat

SEQ ID NO: 210535 - DNA, 13 bp, Artificial Sequence
  Oligonucleotide for detection of SNP TSC0051400
tgaaatttttttt

SEQ ID NO: 210536 - DNA, 13 bp, Artificial Sequence
  Oligonucleotide for detection of SNP TSC0051400
aaaaaaaatttca

SEQ ID NO: 210537 - DNA, 13 bp, Artificial Sequence
  Oligonucleotide for detection of SNP TSC0051400
aaaaaatatttta

SEQ ID NO: 210538 - DNA, 13 bp, Artificial Sequence
  Oligonucleotide for detection of SNP TSC0051400
taaaatatttttt

SEQ ID NO: 210539 - DNA, 13 bp, Artificial Sequence
  Oligonucleotide for detection of SNP TSC0051400
aaaaaagatttta

SEQ ID NO: 210540 - DNA, 13 bp, Artificial Sequence
  Oligonucleotide for detection of SNP TSC0051400
taaaatctttttt

SEQ ID NO: 210541 - DNA, 13 bp, Artificial Sequence
  Oligonucleotide for detection of SNP TSC0051402
tttgtatatgaaa

SEQ ID NO: 210542 - DNA, 13 bp, Artificial Sequence
  Oligonucleotide for detection of SNP TSC0051402
tttcatatacaaa

SEQ ID NO: 210543 - DNA, 13 bp, Artificial Sequence
  Oligonucleotide for detection of SNP TSC0051402
tttgtagatgaaa

SEQ ID NO: 210544 - DNA, 13 bp, Artificial Sequence
  Oligonucleotide for detection of SNP TSC0051402
tttcatctacaaa

SEQ ID NO: 210545 - DNA, 13 bp, Artificial Sequence
  Oligonucleotide for detection of SNP TSC0051402
ttttatgtgtaag

SEQ ID NO: 210546 - DNA, 13 bp, Artificial Sequence
  Oligonucleotide for detection of SNP TSC0051402
cttacacataaaa

SEQ ID NO: 210547 - DNA, 13 bp, Artificial Sequence
  Oligonucleotide for detection of SNP TSC0051402
ttttatttgtaag

SEQ ID NO: 210548 - DNA, 13 bp, Artificial Sequence
  Oligonucleotide for detection of SNP TSC0051402
cttacaaataaaa

SEQ ID NO: 210549 - DNA, 13 bp, Artificial Sequence
  Oligonucleotide for detection of SNP TSC0051403
tgtttgataggga

SEQ ID NO: 210550 - DNA, 13 bp, Artificial Sequence
  Oligonucleotide for detection of SNP TSC0051403
tccctatcaaaca

SEQ ID NO: 210551 - DNA, 13 bp, Artificial Sequence
  Oligonucleotide for detection of SNP TSC0051403
tgtttggtaggga

SEQ ID NO: 210552 - DNA, 13 bp, Artificial Sequence
  Oligonucleotide for detection of SNP TSC0051403
tccctaccaaaca

SEQ ID NO: 210553 - DNA, 13 bp, Artificial Sequence
  Oligonucleotide for detection of SNP TSC0051404
tagtaaattagga

SEQ ID NO: 210554 - DNA, 13 bp, Artificial Sequence
  Oligonucleotide for detection of SNP TSC0051404
tcctaatttacta

SEQ ID NO: 210555 - DNA, 13 bp, Artificial Sequence
  Oligonucleotide for detection of SNP TSC0051404
tagtaagttagga

SEQ ID NO: 210556 - DNA, 13 bp, Artificial Sequence
  Oligonucleotide for detection of SNP TSC0051404
tcctaacttacta

SEQ ID NO: 210557 - DNA, 13 bp, Artificial Sequence
  Oligonucleotide for detection of SNP TSC0051406
atggagagtttta

SEQ ID NO: 210558 - DNA, 13 bp, Artificial Sequence
  Oligonucleotide for detection of SNP TSC0051406
taaaactctccat

SEQ ID NO: 210559 - DNA, 13 bp, Artificial Sequence
  Oligonucleotide for detection of SNP TSC0051406
atggagggtttta

SEQ ID NO: 210560 - DNA, 13 bp, Artificial Sequence
  Oligonucleotide for detection of SNP TSC0051406
taaaaccctccat

SEQ ID NO: 210561 - DNA, 13 bp, Artificial Sequence
  Oligonucleotide for detection of SNP TSC0051407
aattgatgagttt

SEQ ID NO: 210562 - DNA, 13 bp, Artificial Sequence
  Oligonucleotide for detection of SNP TSC0051407
aaactcatcaatt

SEQ ID NO: 210563 - DNA, 13 bp, Artificial Sequence
  Oligonucleotide for detection of SNP TSC0051407
aattgacgagttt

SEQ ID NO: 210564 - DNA, 13 bp, Artificial Sequence
  Oligonucleotide for detection of SNP TSC0051407
aaactcgtcaatt

SEQ ID NO: 210565 - DNA, 13 bp, Artificial Sequence
  Oligonucleotide for detection of SNP TSC0051407
agatttgttagtt

SEQ ID NO: 210566 - DNA, 13 bp, Artificial Sequence
  Oligonucleotide for detection of SNP TSC0051407
aactaacaaatct

SEQ ID NO: 210567 - DNA, 13 bp, Artificial Sequence
  Oligonucleotide for detection of SNP TSC0051407
agatttattagtt

SEQ ID NO: 210568 - DNA, 13 bp, Artificial Sequence
  Oligonucleotide for detection of SNP TSC0051407
aactaataaatct

SEQ ID NO: 210569 - DNA, 13 bp, Artificial Sequence
  Oligonucleotide for detection of SNP TSC0051407
agattcgttagtt

SEQ ID NO: 210570 - DNA, 13 bp, Artificial Sequence
  Oligonucleotide for detection of SNP TSC0051407
aactaacgaatct

SEQ ID NO: 210571 - DNA, 13 bp, Artificial Sequence
  Oligonucleotide for detection of SNP TSC0051408
gaggggttaggtg

SEQ ID NO: 210572 - DNA, 13 bp, Artificial Sequence
  Oligonucleotide for detection of SNP TSC0051408
cacctaacccctc

SEQ ID NO: 210573 - DNA, 13 bp, Artificial Sequence
  Oligonucleotide for detection of SNP TSC0051408
gagggggtaggtg

SEQ ID NO: 210574 - DNA, 13 bp, Artificial Sequence
  Oligonucleotide for detection of SNP TSC0051408
cacctaccccctc

SEQ ID NO: 210575 - DNA, 13 bp, Artificial Sequence
  Oligonucleotide for detection of SNP TSC0051412
attagtgtgtgat

SEQ ID NO: 210576 - DNA, 13 bp, Artificial Sequence
  Oligonucleotide for detection of SNP TSC0051412
atcacacactaat

SEQ ID NO: 210577 - DNA, 13 bp, Artificial Sequence
  Oligonucleotide for detection of SNP TSC0051412
attagtatgtgat

SEQ ID NO: 210578 - DNA, 13 bp, Artificial Sequence
  Oligonucleotide for detection of SNP TSC0051412
atcacatactaat

SEQ ID NO: 210579 - DNA, 13 bp, Artificial Sequence
  Oligonucleotide for detection of SNP TSC0051414
aatttaaatgttt

SEQ ID NO: 210580 - DNA, 13 bp, Artificial Sequence
  Oligonucleotide for detection of SNP TSC0051414
aaacatttaaatt

SEQ ID NO: 210581 - DNA, 13 bp, Artificial Sequence
  Oligonucleotide for detection of SNP TSC0051414
aatttagatgttt

SEQ ID NO: 210582 - DNA, 13 bp, Artificial Sequence
  Oligonucleotide for detection of SNP TSC0051414
aaacatctaaatt

SEQ ID NO: 210583 - DNA, 13 bp, Artificial Sequence
  Oligonucleotide for detection of SNP TSC0051415
attatatttattt

SEQ ID NO: 210584 - DNA, 13 bp, Artificial Sequence
  Oligonucleotide for detection of SNP TSC0051415
aaataaatataat

SEQ ID NO: 210585 - DNA, 13 bp, Artificial Sequence
  Oligonucleotide for detection of SNP TSC0051415
agatggttgtggt

SEQ ID NO: 210586 - DNA, 13 bp, Artificial Sequence
  Oligonucleotide for detection of SNP TSC0051415
accacaaccatct

SEQ ID NO: 210587 - DNA, 13 bp, Artificial Sequence
  Oligonucleotide for detection of SNP TSC0051415
agatgggtgtggt

SEQ ID NO: 210588 - DNA, 13 bp, Artificial Sequence
  Oligonucleotide for detection of SNP TSC0051415
accacacccatct

SEQ ID NO: 210589 - DNA, 13 bp, Artificial Sequence
  Oligonucleotide for detection of SNP TSC0051416
gtggatatggtaa

SEQ ID NO: 210590 - DNA, 13 bp, Artificial Sequence
  Oligonucleotide for detection of SNP TSC0051416
ttaccatatccac

SEQ ID NO: 210591 - DNA, 13 bp, Artificial Sequence
  Oligonucleotide for detection of SNP TSC0051416
gtggatgtggtaa

SEQ ID NO: 210592 - DNA, 13 bp, Artificial Sequence
  Oligonucleotide for detection of SNP TSC0051416
ttaccacatccac

SEQ ID NO: 210593 - DNA, 13 bp, Artificial Sequence
  Oligonucleotide for detection of SNP TSC0010504
agtttgatagggg

SEQ ID NO: 210594 - DNA, 13 bp, Artificial Sequence
  Oligonucleotide for detection of SNP TSC0010504
cccctatcaaact

SEQ ID NO: 210595 - DNA, 13 bp, Artificial Sequence
  Oligonucleotide for detection of SNP TSC0010504
agtttggtagggg

SEQ ID NO: 210596 - DNA, 13 bp, Artificial Sequence
  Oligonucleotide for detection of SNP TSC0010504
cccctaccaaact

SEQ ID NO: 210597 - DNA, 13 bp, Artificial Sequence
  Oligonucleotide for detection of SNP TSC0051417
tttatagtattty

SEQ ID NO: 210598 - DNA, 13 bp, Artificial Sequence
  Oligonucleotide for detection of SNP TSC0051417
raaatactataaa

SEQ ID NO: 210599 - DNA, 13 bp, Artificial Sequence
  Oligonucleotide for detection of SNP TSC0051417
tttataatattty

SEQ ID NO: 210600 - DNA, 13 bp, Artificial Sequence
  Oligonucleotide for detection of SNP TSC0051417
raaatattataaa

SEQ ID NO: 210601 - DNA, 13 bp, Artificial Sequence
  Oligonucleotide for detection of SNP TSC0051420
gttaagagttgta

SEQ ID NO: 210602 - DNA, 13 bp, Artificial Sequence
  Oligonucleotide for detection of SNP TSC0051420
tacaactcttaac

SEQ ID NO: 210603 - DNA, 13 bp, Artificial Sequence
  Oligonucleotide for detection of SNP TSC0051420
gttaagggttgta

SEQ ID NO: 210604 - DNA, 13 bp, Artificial Sequence
  Oligonucleotide for detection of SNP TSC0051420
tacaacccttaac

SEQ ID NO: 210605 - DNA, 13 bp, Artificial Sequence
  Oligonucleotide for detection of SNP TSC0051421
ggatatataaata

SEQ ID NO: 210606 - DNA, 13 bp, Artificial Sequence
  Oligonucleotide for detection of SNP TSC0051421
tatttatatatcc

SEQ ID NO: 210607 - DNA, 13 bp, Artificial Sequence
  Oligonucleotide for detection of SNP TSC0051421
ggatatgtaaata

SEQ ID NO: 210608 - DNA, 13 bp, Artificial Sequence
  Oligonucleotide for detection of SNP TSC0051421
tatttacatatcc

SEQ ID NO: 210609 - DNA, 13 bp, Artificial Sequence
  Oligonucleotide for detection of SNP TSC0006968
atgttaaatagga

SEQ ID NO: 210610 - DNA, 13 bp, Artificial Sequence
  Oligonucleotide for detection of SNP TSC0006968
tcctatttaacat

SEQ ID NO: 210611 - DNA, 13 bp, Artificial Sequence
  Oligonucleotide for detection of SNP TSC0006968
atgttatatagga

SEQ ID NO: 210612 - DNA, 13 bp, Artificial Sequence
  Oligonucleotide for detection of SNP TSC0006968
tcctatataacat

SEQ ID NO: 210613 - DNA, 13 bp, Artificial Sequence
  Oligonucleotide for detection of SNP TSC0006969
gtgttaatatatt

SEQ ID NO: 210614 - DNA, 13 bp, Artificial Sequence
  Oligonucleotide for detection of SNP TSC0006969
aatatattaacac

SEQ ID NO: 210615 - DNA, 13 bp, Artificial Sequence
  Oligonucleotide for detection of SNP TSC0006969
gtgttattatatt

SEQ ID NO: 210616 - DNA, 13 bp, Artificial Sequence
  Oligonucleotide for detection of SNP TSC0006969
aatataataacac

SEQ ID NO: 210617 - DNA, 13 bp, Artificial Sequence
  Oligonucleotide for detection of SNP TSC0006969
aatgtattagtay

SEQ ID NO: 210618 - DNA, 13 bp, Artificial Sequence
  Oligonucleotide for detection of SNP TSC0006969
rtactaatacatt

SEQ ID NO: 210619 - DNA, 13 bp, Artificial Sequence
  Oligonucleotide for detection of SNP TSC0006969
aatgtagtagtay

SEQ ID NO: 210620 - DNA, 13 bp, Artificial Sequence
  Oligonucleotide for detection of SNP TSC0006969
rtactactacatt

SEQ ID NO: 210621 - DNA, 13 bp, Artificial Sequence
  Oligonucleotide for detection of SNP TSC0051422
attttgtgggagy

SEQ ID NO: 210622 - DNA, 13 bp, Artificial Sequence
  Oligonucleotide for detection of SNP TSC0051422
rctcccacaaaat

SEQ ID NO: 210623 - DNA, 13 bp, Artificial Sequence
  Oligonucleotide for detection of SNP TSC0051422
attttgggggagy

SEQ ID NO: 210624 - DNA, 13 bp, Artificial Sequence
  Oligonucleotide for detection of SNP TSC0051422
rctcccccaaaat

SEQ ID NO: 210625 - DNA, 13 bp, Artificial Sequence
  Oligonucleotide for detection of SNP TSC0051422
attttgcgggagy

SEQ ID NO: 210626 - DNA, 13 bp, Artificial Sequence
  Oligonucleotide for detection of SNP TSC0051422
rctcccgcaaaat

SEQ ID NO: 210627 - DNA, 13 bp, Artificial Sequence
  Oligonucleotide for detection of SNP TSC0051422
gtttttgtaaggt

SEQ ID NO: 210628 - DNA, 13 bp, Artificial Sequence
  Oligonucleotide for detection of SNP TSC0051422
accttacaaaaac

SEQ ID NO: 210629 - DNA, 13 bp, Artificial Sequence
  Oligonucleotide for detection of SNP TSC0051422
gtttttttaaggt

SEQ ID NO: 210630 - DNA, 13 bp, Artificial Sequence
  Oligonucleotide for detection of SNP TSC0051422
accttaaaaaaac

SEQ ID NO: 210631 - DNA, 13 bp, Artificial Sequence
  Oligonucleotide for detection of SNP TSC0051422
gttttcgtaaggt

SEQ ID NO: 210632 - DNA, 13 bp, Artificial Sequence
  Oligonucleotide for detection of SNP TSC0051422
accttacgaaaac

SEQ ID NO: 210633 - DNA, 13 bp, Artificial Sequence
  Oligonucleotide for detection of SNP TSC0051423
tataattgtaaty

SEQ ID NO: 210634 - DNA, 13 bp, Artificial Sequence
  Oligonucleotide for detection of SNP TSC0051423
rattacaattata

SEQ ID NO: 210635 - DNA, 13 bp, Artificial Sequence
  Oligonucleotide for detection of SNP TSC0051423
tataatcgtaaty

SEQ ID NO: 210636 - DNA, 13 bp, Artificial Sequence
  Oligonucleotide for detection of SNP TSC0051423
rattacgattata

SEQ ID NO: 210637 - DNA, 13 bp, Artificial Sequence
  Oligonucleotide for detection of SNP TSC0051423
ggttatggttgta

SEQ ID NO: 210638 - DNA, 13 bp, Artificial Sequence
  Oligonucleotide for detection of SNP TSC0051423
tacaaccataacc

SEQ ID NO: 210639 - DNA, 13 bp, Artificial Sequence
  Oligonucleotide for detection of SNP TSC0051423
ggttatagttgta

SEQ ID NO: 210640 - DNA, 13 bp, Artificial Sequence
  Oligonucleotide for detection of SNP TSC0051423
tacaactataacc

SEQ ID NO: 210641 - DNA, 13 bp, Artificial Sequence
  Oligonucleotide for detection of SNP TSC0051423
ggttacggttgta

SEQ ID NO: 210642 - DNA, 13 bp, Artificial Sequence
  Oligonucleotide for detection of SNP TSC0051423
tacaaccgtaacc

SEQ ID NO: 210643 - DNA, 13 bp, Artificial Sequence
  Oligonucleotide for detection of SNP TSC0010345
atttgaatatatt

SEQ ID NO: 210644 - DNA, 13 bp, Artificial Sequence
  Oligonucleotide for detection of SNP TSC0010345
aatatattcaaat

SEQ ID NO: 210645 - DNA, 13 bp, Artificial Sequence
  Oligonucleotide for detection of SNP TSC0010345
atttgagtatatt

SEQ ID NO: 210646 - DNA, 13 bp, Artificial Sequence
  Oligonucleotide for detection of SNP TSC0010345
aatatactcaaat

SEQ ID NO: 210647 - DNA, 13 bp, Artificial Sequence
  Oligonucleotide for detection of SNP TSC0051424
tttaaggttggat

SEQ ID NO: 210648 - DNA, 13 bp, Artificial Sequence
  Oligonucleotide for detection of SNP TSC0051424
atccaaccttaaa

SEQ ID NO: 210649 - DNA, 13 bp, Artificial Sequence
  Oligonucleotide for detection of SNP TSC0051424
tttaagattggat

SEQ ID NO: 210650 - DNA, 13 bp, Artificial Sequence
  Oligonucleotide for detection of SNP TSC0051424
atccaatcttaaa

SEQ ID NO: 210651 - DNA, 13 bp, Artificial Sequence
  Oligonucleotide for detection of SNP TSC0051425
taatttatagttg

SEQ ID NO: 210652 - DNA, 13 bp, Artificial Sequence
  Oligonucleotide for detection of SNP TSC0051425
caactataaatta

SEQ ID NO: 210653 - DNA, 13 bp, Artificial Sequence
  Oligonucleotide for detection of SNP TSC0051425
taatttttagttg

SEQ ID NO: 210654 - DNA, 13 bp, Artificial Sequence
  Oligonucleotide for detection of SNP TSC0051425
caactaaaaatta

SEQ ID NO: 210655 - DNA, 13 bp, Artificial Sequence
  Oligonucleotide for detection of SNP TSC0051425
taattgtgagtta

SEQ ID NO: 210656 - DNA, 13 bp, Artificial Sequence
  Oligonucleotide for detection of SNP TSC0051425
taactcacaatta

SEQ ID NO: 210657 - DNA, 13 bp, Artificial Sequence
  Oligonucleotide for detection of SNP TSC0051425
taattgggagtta

SEQ ID NO: 210658 - DNA, 13 bp, Artificial Sequence
  Oligonucleotide for detection of SNP TSC0051425
taactcccaatta

SEQ ID NO: 210659 - DNA, 13 bp, Artificial Sequence
  Oligonucleotide for detection of SNP TSC0051426
gaagttaggtttg

SEQ ID NO: 210660 - DNA, 13 bp, Artificial Sequence
  Oligonucleotide for detection of SNP TSC0051426
caaacctaacttc

SEQ ID NO: 210661 - DNA, 13 bp, Artificial Sequence
  Oligonucleotide for detection of SNP TSC0051426
gaagtttggtttg

SEQ ID NO: 210662 - DNA, 13 bp, Artificial Sequence
  Oligonucleotide for detection of SNP TSC0051426
caaaccaaacttc

SEQ ID NO: 210663 - DNA, 13 bp, Artificial Sequence
  Oligonucleotide for detection of SNP TSC0051426
gaagttcggtttg

SEQ ID NO: 210664 - DNA, 13 bp, Artificial Sequence
  Oligonucleotide for detection of SNP TSC0051426
caaaccgaacttc

SEQ ID NO: 210665 - DNA, 13 bp, Artificial Sequence
  Oligonucleotide for detection of SNP TSC0051426
taagtttaattty

SEQ ID NO: 210666 - DNA, 13 bp, Artificial Sequence
  Oligonucleotide for detection of SNP TSC0051426
raaattaaactta

SEQ ID NO: 210667 - DNA, 13 bp, Artificial Sequence
  Oligonucleotide for detection of SNP TSC0051427
ggaaaaagttaat

SEQ ID NO: 210668 - DNA, 13 bp, Artificial Sequence
  Oligonucleotide for detection of SNP TSC0051427
attaactttttcc

SEQ ID NO: 210669 - DNA, 13 bp, Artificial Sequence
  Oligonucleotide for detection of SNP TSC0051427
ggaaaaggttaat

SEQ ID NO: 210670 - DNA, 13 bp, Artificial Sequence
  Oligonucleotide for detection of SNP TSC0051427
attaaccttttcc

SEQ ID NO: 210671 - DNA, 13 bp, Artificial Sequence
  Oligonucleotide for detection of SNP TSC0010819
tttgggtggggay

SEQ ID NO: 210672 - DNA, 13 bp, Artificial Sequence
  Oligonucleotide for detection of SNP TSC0010819
rtccccacccaaa

SEQ ID NO: 210673 - DNA, 13 bp, Artificial Sequence
  Oligonucleotide for detection of SNP TSC0010819
tttgggcggggay

SEQ ID NO: 210674 - DNA, 13 bp, Artificial Sequence
  Oligonucleotide for detection of SNP TSC0010819
rtccccgcccaaa

SEQ ID NO: 210675 - DNA, 13 bp, Artificial Sequence
  Oligonucleotide for detection of SNP TSC0010819
gtttttatttaaa

SEQ ID NO: 210676 - DNA, 13 bp, Artificial Sequence
  Oligonucleotide for detection of SNP TSC0010819
tttaaataaaaac

SEQ ID NO: 210677 - DNA, 13 bp, Artificial Sequence
  Oligonucleotide for detection of SNP TSC0010819
gttttcgtttaaa

SEQ ID NO: 210678 - DNA, 13 bp, Artificial Sequence
  Oligonucleotide for detection of SNP TSC0010819
tttaaacgaaaac

SEQ ID NO: 210679 - DNA, 13 bp, Artificial Sequence
  Oligonucleotide for detection of SNP TSC0051428
atatatgaattta

SEQ ID NO: 210680 - DNA, 13 bp, Artificial Sequence
  Oligonucleotide for detection of SNP TSC0051428
taaattcatatat

SEQ ID NO: 210681 - DNA, 13 bp, Artificial Sequence
  Oligonucleotide for detection of SNP TSC0051428
atatataaattta

SEQ ID NO: 210682 - DNA, 13 bp, Artificial Sequence
  Oligonucleotide for detection of SNP TSC0051428
taaatttatatat

SEQ ID NO: 210683 - DNA, 13 bp, Artificial Sequence
  Oligonucleotide for detection of SNP TSC0051429
taattatgttatt

SEQ ID NO: 210684 - DNA, 13 bp, Artificial Sequence
  Oligonucleotide for detection of SNP TSC0051429
aataacataatta

SEQ ID NO: 210685 - DNA, 13 bp, Artificial Sequence
  Oligonucleotide for detection of SNP TSC0051429
taattacgttatt

SEQ ID NO: 210686 - DNA, 13 bp, Artificial Sequence
  Oligonucleotide for detection of SNP TSC0051429
aataacgtaatta

SEQ ID NO: 210687 - DNA, 13 bp, Artificial Sequence
  Oligonucleotide for detection of SNP TSC0051429
aatgatgtaattg

SEQ ID NO: 210688 - DNA, 13 bp, Artificial Sequence
  Oligonucleotide for detection of SNP TSC0051429
caattacatcatt

SEQ ID NO: 210689 - DNA, 13 bp, Artificial Sequence
  Oligonucleotide for detection of SNP TSC0051429
aatgatataattg

SEQ ID NO: 210690 - DNA, 13 bp, Artificial Sequence
  Oligonucleotide for detection of SNP TSC0051429
caattatatcatt

SEQ ID NO: 210691 - DNA, 13 bp, Artificial Sequence
  Oligonucleotide for detection of SNP TSC0051429
aatgacgtaattg

SEQ ID NO: 210692 - DNA, 13 bp, Artificial Sequence
  Oligonucleotide for detection of SNP TSC0051429
caattacgtcatt

SEQ ID NO: 210693 - DNA, 13 bp, Artificial Sequence
  Oligonucleotide for detection of SNP TSC0051430
tatatggaggtgt

SEQ ID NO: 210694 - DNA, 13 bp, Artificial Sequence
  Oligonucleotide for detection of SNP TSC0051430
acacctccatata

SEQ ID NO: 210695 - DNA, 13 bp, Artificial Sequence
  Oligonucleotide for detection of SNP TSC0051430
tatatgaaggtgt

SEQ ID NO: 210696 - DNA, 13 bp, Artificial Sequence
  Oligonucleotide for detection of SNP TSC0051430
acaccttcatata

SEQ ID NO: 210697 - DNA, 13 bp, Artificial Sequence
  Oligonucleotide for detection of SNP TSC0051431
aatatttaataga

SEQ ID NO: 210698 - DNA, 13 bp, Artificial Sequence
  Oligonucleotide for detection of SNP TSC0051431
tctattaaatatt

SEQ ID NO: 210699 - DNA, 13 bp, Artificial Sequence
  Oligonucleotide for detection of SNP TSC0051431
aatattgaataga

SEQ ID NO: 210700 - DNA, 13 bp, Artificial Sequence
  Oligonucleotide for detection of SNP TSC0051431
tctattcaatatt

SEQ ID NO: 210701 - DNA, 13 bp, Artificial Sequence
  Oligonucleotide for detection of SNP TSC0006643
gagaaatggttta

SEQ ID NO: 210702 - DNA, 13 bp, Artificial Sequence
  Oligonucleotide for detection of SNP TSC0006643
taaaccatttctc

SEQ ID NO: 210703 - DNA, 13 bp, Artificial Sequence
  Oligonucleotide for detection of SNP TSC0006643
gagaaacggttta

SEQ ID NO: 210704 - DNA, 13 bp, Artificial Sequence
  Oligonucleotide for detection of SNP TSC0006643
taaaccgtttctc

SEQ ID NO: 210705 - DNA, 13 bp, Artificial Sequence
  Oligonucleotide for detection of SNP TSC0051432
gaagttaggtaty

SEQ ID NO: 210706 - DNA, 13 bp, Artificial Sequence
  Oligonucleotide for detection of SNP TSC0051432
ratacctaacttc

SEQ ID NO: 210707 - DNA, 13 bp, Artificial Sequence
  Oligonucleotide for detection of SNP TSC0051432
gaagttgggtaty

SEQ ID NO: 210708 - DNA, 13 bp, Artificial Sequence
  Oligonucleotide for detection of SNP TSC0051432
ratacccaacttc

SEQ ID NO: 210709 - DNA, 13 bp, Artificial Sequence
  Oligonucleotide for detection of SNP TSC0051433
ttattaatattta

SEQ ID NO: 210710 - DNA, 13 bp, Artificial Sequence
  Oligonucleotide for detection of SNP TSC0051433
taaatattaataa

SEQ ID NO: 210711 - DNA, 13 bp, Artificial Sequence
  Oligonucleotide for detection of SNP TSC0051433
ttattagtattta

SEQ ID NO: 210712 - DNA, 13 bp, Artificial Sequence
  Oligonucleotide for detection of SNP TSC0051433
taaatactaataa

SEQ ID NO: 210713 - DNA, 13 bp, Artificial Sequence
  Oligonucleotide for detection of SNP TSC0009336
aatgtaatattta

SEQ ID NO: 210714 - DNA, 13 bp, Artificial Sequence
  Oligonucleotide for detection of SNP TSC0009336
taaatattacatt

SEQ ID NO: 210715 - DNA, 13 bp, Artificial Sequence
  Oligonucleotide for detection of SNP TSC0009336
aatgtagtattta

SEQ ID NO: 210716 - DNA, 13 bp, Artificial Sequence
  Oligonucleotide for detection of SNP TSC0009336
taaatactacatt

SEQ ID NO: 210717 - DNA, 13 bp, Artificial Sequence
  Oligonucleotide for detection of SNP TSC0051436
agtgtgtattttt

SEQ ID NO: 210718 - DNA, 13 bp, Artificial Sequence
  Oligonucleotide for detection of SNP TSC0051436
aaaaatacacact

SEQ ID NO: 210719 - DNA, 13 bp, Artificial Sequence
  Oligonucleotide for detection of SNP TSC0051436
agtgtggattttt

SEQ ID NO: 210720 - DNA, 13 bp, Artificial Sequence
  Oligonucleotide for detection of SNP TSC0051436
aaaaatccacact

SEQ ID NO: 210721 - DNA, 13 bp, Artificial Sequence
  Oligonucleotide for detection of SNP TSC0051436
agaaatgtatatt

SEQ ID NO: 210722 - DNA, 13 bp, Artificial Sequence
  Oligonucleotide for detection of SNP TSC0051436
aatatacatttct

SEQ ID NO: 210723 - DNA, 13 bp, Artificial Sequence
  Oligonucleotide for detection of SNP TSC0051436
agaaatttatatt

SEQ ID NO: 210724 - DNA, 13 bp, Artificial Sequence
  Oligonucleotide for detection of SNP TSC0051436
aatataaatttct

SEQ ID NO: 210725 - DNA, 13 bp, Artificial Sequence
  Oligonucleotide for detection of SNP TSC0005338
tggagttggggay

SEQ ID NO: 210726 - DNA, 13 bp, Artificial Sequence
  Oligonucleotide for detection of SNP TSC0005338
rtccccaactcca

SEQ ID NO: 210727 - DNA, 13 bp, Artificial Sequence
  Oligonucleotide for detection of SNP TSC0005338
tggagtgggggay

SEQ ID NO: 210728 - DNA, 13 bp, Artificial Sequence
  Oligonucleotide for detection of SNP TSC0005338
rtcccccactcca

SEQ ID NO: 210729 - DNA, 13 bp, Artificial Sequence
  Oligonucleotide for detection of SNP TSC0005338
tggagcgggggay

SEQ ID NO: 210730 - DNA, 13 bp, Artificial Sequence
  Oligonucleotide for detection of SNP TSC0005338
rtcccccgctcca

SEQ ID NO: 210731 - DNA, 13 bp, Artificial Sequence
  Oligonucleotide for detection of SNP TSC0051440
ttatagatagttg

SEQ ID NO: 210732 - DNA, 13 bp, Artificial Sequence
  Oligonucleotide for detection of SNP TSC0051440
caactatctataa

SEQ ID NO: 210733 - DNA, 13 bp, Artificial Sequence
  Oligonucleotide for detection of SNP TSC0051440
ttataggtagttg

SEQ ID NO: 210734 - DNA, 13 bp, Artificial Sequence
  Oligonucleotide for detection of SNP TSC0051440
caactacctataa

SEQ ID NO: 210735 - DNA, 13 bp, Artificial Sequence
  Oligonucleotide for detection of SNP TSC0051441
gtatggttgggga

SEQ ID NO: 210736 - DNA, 13 bp, Artificial Sequence
  Oligonucleotide for detection of SNP TSC0051441
tccccaaccatac

SEQ ID NO: 210737 - DNA, 13 bp, Artificial Sequence
  Oligonucleotide for detection of SNP TSC0051441
gtatgggtgggga

SEQ ID NO: 210738 - DNA, 13 bp, Artificial Sequence
  Oligonucleotide for detection of SNP TSC0051441
tccccacccatac

SEQ ID NO: 210739 - DNA, 13 bp, Artificial Sequence
  Oligonucleotide for detection of SNP TSC0051445
ttttgtattaata

SEQ ID NO: 210740 - DNA, 13 bp, Artificial Sequence
  Oligonucleotide for detection of SNP TSC0051445
tattaatacaaaa

SEQ ID NO: 210741 - DNA, 13 bp, Artificial Sequence
  Oligonucleotide for detection of SNP TSC0051445
ttttgtgttaata

SEQ ID NO: 210742 - DNA, 13 bp, Artificial Sequence
  Oligonucleotide for detection of SNP TSC0051445
tattaacacaaaa

SEQ ID NO: 210743 - DNA, 13 bp, Artificial Sequence
  Oligonucleotide for detection of SNP TSC0051445
ttttgcgttaata

SEQ ID NO: 210744 - DNA, 13 bp, Artificial Sequence
  Oligonucleotide for detection of SNP TSC0051445
tattaacgcaaaa

SEQ ID NO: 210745 - DNA, 13 bp, Artificial Sequence
  Oligonucleotide for detection of SNP TSC0051445
tattggtgtaggg

SEQ ID NO: 210746 - DNA, 13 bp, Artificial Sequence
  Oligonucleotide for detection of SNP TSC0051445
ccctacaccaata

SEQ ID NO: 210747 - DNA, 13 bp, Artificial Sequence
  Oligonucleotide for detection of SNP TSC0051445
tattggcgtaggg

SEQ ID NO: 210748 - DNA, 13 bp, Artificial Sequence
  Oligonucleotide for detection of SNP TSC0051445
ccctacgccaata

SEQ ID NO: 210749 - DNA, 13 bp, Artificial Sequence
  Oligonucleotide for detection of SNP TSC0051446
gagagttgaggaa

SEQ ID NO: 210750 - DNA, 13 bp, Artificial Sequence
  Oligonucleotide for detection of SNP TSC0051446
ttcctcaactctc

SEQ ID NO: 210751 - DNA, 13 bp, Artificial Sequence
  Oligonucleotide for detection of SNP TSC0051446
gagagtcgaggaa

SEQ ID NO: 210752 - DNA, 13 bp, Artificial Sequence
  Oligonucleotide for detection of SNP TSC0051446
ttcctcgactctc

SEQ ID NO: 210753 - DNA, 13 bp, Artificial Sequence
  Oligonucleotide for detection of SNP TSC0010437
agaggaatataat

SEQ ID NO: 210754 - DNA, 13 bp, Artificial Sequence
  Oligonucleotide for detection of SNP TSC0010437
attatattcctct

SEQ ID NO: 210755 - DNA, 13 bp, Artificial Sequence
  Oligonucleotide for detection of SNP TSC0010437
agaggagtataat

SEQ ID NO: 210756 - DNA, 13 bp, Artificial Sequence
  Oligonucleotide for detection of SNP TSC0010437
attatactcctct

SEQ ID NO: 210757 - DNA, 13 bp, Artificial Sequence
  Oligonucleotide for detection of SNP TSC0051448
attgatatttaga

SEQ ID NO: 210758 - DNA, 13 bp, Artificial Sequence
  Oligonucleotide for detection of SNP TSC0051448
tctaaatatcaat

SEQ ID NO: 210759 - DNA, 13 bp, Artificial Sequence
  Oligonucleotide for detection of SNP TSC0051448
attgatgtttaga

SEQ ID NO: 210760 - DNA, 13 bp, Artificial Sequence
  Oligonucleotide for detection of SNP TSC0051448
tctaaacatcaat

SEQ ID NO: 210761 - DNA, 13 bp, Artificial Sequence
  Oligonucleotide for detection of SNP TSC0051448
attgacgtttaga

SEQ ID NO: 210762 - DNA, 13 bp, Artificial Sequence
  Oligonucleotide for detection of SNP TSC0051448
tctaaacgtcaat

SEQ ID NO: 210763 - DNA, 13 bp, Artificial Sequence
  Oligonucleotide for detection of SNP TSC0051448
tttaaatgttagt

SEQ ID NO: 210764 - DNA, 13 bp, Artificial Sequence
  Oligonucleotide for detection of SNP TSC0051448
actaacatttaaa

SEQ ID NO: 210765 - DNA, 13 bp, Artificial Sequence
  Oligonucleotide for detection of SNP TSC0051448
tttaaacgttagt

SEQ ID NO: 210766 - DNA, 13 bp, Artificial Sequence
  Oligonucleotide for detection of SNP TSC0051448
actaacgtttaaa

SEQ ID NO: 210767 - DNA, 13 bp, Artificial Sequence
  Oligonucleotide for detection of SNP TSC0001074
ttaaagattaata

SEQ ID NO: 210768 - DNA, 13 bp, Artificial Sequence
  Oligonucleotide for detection of SNP TSC0001074
tattaatctttaa

SEQ ID NO: 210769 - DNA, 13 bp, Artificial Sequence
  Oligonucleotide for detection of SNP TSC0001074
ttaaagtttaata

SEQ ID NO: 210770 - DNA, 13 bp, Artificial Sequence
  Oligonucleotide for detection of SNP TSC0001074
tattaaactttaa

SEQ ID NO: 210771 - DNA, 13 bp, Artificial Sequence
  Oligonucleotide for detection of SNP TSC0001074
tgttgatttttga

SEQ ID NO: 210772 - DNA, 13 bp, Artificial Sequence
  Oligonucleotide for detection of SNP TSC0001074
tcaaaaatcaaca

SEQ ID NO: 210773 - DNA, 13 bp, Artificial Sequence
  Oligonucleotide for detection of SNP TSC0001074
tgttgaattttga

SEQ ID NO: 210774 - DNA, 13 bp, Artificial Sequence
  Oligonucleotide for detection of SNP TSC0001074
tcaaaattcaaca

SEQ ID NO: 210775 - DNA, 13 bp, Artificial Sequence
  Oligonucleotide for detection of SNP TSC0001075
ttttggttgtttg

SEQ ID NO: 210776 - DNA, 13 bp, Artificial Sequence
  Oligonucleotide for detection of SNP TSC0001075
caaacaaccaaaa

SEQ ID NO: 210777 - DNA, 13 bp, Artificial Sequence
  Oligonucleotide for detection of SNP TSC0001075
ttttgggtgtttg

SEQ ID NO: 210778 - DNA, 13 bp, Artificial Sequence
  Oligonucleotide for detection of SNP TSC0001075
caaacacccaaaa

SEQ ID NO: 210779 - DNA, 13 bp, Artificial Sequence
  Oligonucleotide for detection of SNP TSC0001075
tagataattagaa

SEQ ID NO: 210780 - DNA, 13 bp, Artificial Sequence
  Oligonucleotide for detection of SNP TSC0001075
ttctaattatcta

SEQ ID NO: 210781 - DNA, 13 bp, Artificial Sequence
  Oligonucleotide for detection of SNP TSC0001075
tagatatttagaa

SEQ ID NO: 210782 - DNA, 13 bp, Artificial Sequence
  Oligonucleotide for detection of SNP TSC0001075
ttctaaatatcta

SEQ ID NO: 210783 - DNA, 13 bp, Artificial Sequence
  Oligonucleotide for detection of SNP TSC0010483
agtgaaggggtag

SEQ ID NO: 210784 - DNA, 13 bp, Artificial Sequence
  Oligonucleotide for detection of SNP TSC0010483
ctaccccttcact

SEQ ID NO: 210785 - DNA, 13 bp, Artificial Sequence
  Oligonucleotide for detection of SNP TSC0010483
agtgaaagggtag

SEQ ID NO: 210786 - DNA, 13 bp, Artificial Sequence
  Oligonucleotide for detection of SNP TSC0010483
ctaccctttcact

SEQ ID NO: 210787 - DNA, 13 bp, Artificial Sequence
  Oligonucleotide for detection of SNP TSC0010484
tgtttaatgtgta

SEQ ID NO: 210788 - DNA, 13 bp, Artificial Sequence
  Oligonucleotide for detection of SNP TSC0010484
tacacattaaaca

SEQ ID NO: 210789 - DNA, 13 bp, Artificial Sequence
  Oligonucleotide for detection of SNP TSC0010484
tgtttagtgtgta

SEQ ID NO: 210790 - DNA, 13 bp, Artificial Sequence
  Oligonucleotide for detection of SNP TSC0010484
tacacactaaaca

SEQ ID NO: 210791 - DNA, 13 bp, Artificial Sequence
  Oligonucleotide for detection of SNP TSC0051451
tgtaataattatt

SEQ ID NO: 210792 - DNA, 13 bp, Artificial Sequence
  Oligonucleotide for detection of SNP TSC0051451
aataattattaca

SEQ ID NO: 210793 - DNA, 13 bp, Artificial Sequence
  Oligonucleotide for detection of SNP TSC0051451
tgtaattattatt

SEQ ID NO: 210794 - DNA, 13 bp, Artificial Sequence
  Oligonucleotide for detection of SNP TSC0051451
aataataattaca

SEQ ID NO: 210795 - DNA, 13 bp, Artificial Sequence
  Oligonucleotide for detection of SNP TSC0051451
aataattattgta

SEQ ID NO: 210796 - DNA, 13 bp, Artificial Sequence
  Oligonucleotide for detection of SNP TSC0051451
tacaataattatt

SEQ ID NO: 210797 - DNA, 13 bp, Artificial Sequence
  Oligonucleotide for detection of SNP TSC0051451
aataatgattgta

SEQ ID NO: 210798 - DNA, 13 bp, Artificial Sequence
  Oligonucleotide for detection of SNP TSC0051451
tacaatcattatt

SEQ ID NO: 210799 - DNA, 13 bp, Artificial Sequence
  Oligonucleotide for detection of SNP TSC0051452
tgtatagattatg

SEQ ID NO: 210800 - DNA, 13 bp, Artificial Sequence
  Oligonucleotide for detection of SNP TSC0051452
cataatctataca

SEQ ID NO: 210801 - DNA, 13 bp, Artificial Sequence
  Oligonucleotide for detection of SNP TSC0051452
tgtataaattatg

SEQ ID NO: 210802 - DNA, 13 bp, Artificial Sequence
  Oligonucleotide for detection of SNP TSC0051452
cataatttataca

SEQ ID NO: 210803 - DNA, 13 bp, Artificial Sequence
  Oligonucleotide for detection of SNP TSC0004804
gaaatgtgtttag

SEQ ID NO: 210804 - DNA, 13 bp, Artificial Sequence
  Oligonucleotide for detection of SNP TSC0004804
ctaaacacatttc

SEQ ID NO: 210805 - DNA, 13 bp, Artificial Sequence
  Oligonucleotide for detection of SNP TSC0004804
gaaatgcgtttag

SEQ ID NO: 210806 - DNA, 13 bp, Artificial Sequence
  Oligonucleotide for detection of SNP TSC0004804
ctaaacgcatttc

SEQ ID NO: 210807 - DNA, 13 bp, Artificial Sequence
  Oligonucleotide for detection of SNP TSC0004804
ttgagtgtattty

SEQ ID NO: 210808 - DNA, 13 bp, Artificial Sequence
  Oligonucleotide for detection of SNP TSC0004804
raaatacactcaa

SEQ ID NO: 210809 - DNA, 13 bp, Artificial Sequence
  Oligonucleotide for detection of SNP TSC0004804
ttgagtatattty

SEQ ID NO: 210810 - DNA, 13 bp, Artificial Sequence
  Oligonucleotide for detection of SNP TSC0004804
raaatatactcaa

SEQ ID NO: 210811 - DNA, 13 bp, Artificial Sequence
  Oligonucleotide for detection of SNP TSC0004804
ttgagcgtattty

SEQ ID NO: 210812 - DNA, 13 bp, Artificial Sequence
  Oligonucleotide for detection of SNP TSC0004804
raaatacgctcaa

SEQ ID NO: 210813 - DNA, 13 bp, Artificial Sequence
  Oligonucleotide for detection of SNP TSC0004805
gtatgttggtatt

SEQ ID NO: 210814 - DNA, 13 bp, Artificial Sequence
  Oligonucleotide for detection of SNP TSC0004805
aataccaacatac

SEQ ID NO: 210815 - DNA, 13 bp, Artificial Sequence
  Oligonucleotide for detection of SNP TSC0004805
gtatgtcggtatt

SEQ ID NO: 210816 - DNA, 13 bp, Artificial Sequence
  Oligonucleotide for detection of SNP TSC0004805
aataccgacatac

SEQ ID NO: 210817 - DNA, 13 bp, Artificial Sequence
  Oligonucleotide for detection of SNP TSC0004805
agtattggtatgy

SEQ ID NO: 210818 - DNA, 13 bp, Artificial Sequence
  Oligonucleotide for detection of SNP TSC0004805
rcataccaatact

SEQ ID NO: 210819 - DNA, 13 bp, Artificial Sequence
  Oligonucleotide for detection of SNP TSC0004805
agtattagtatgy

SEQ ID NO: 210820 - DNA, 13 bp, Artificial Sequence
  Oligonucleotide for detection of SNP TSC0004805
rcatactaatact

SEQ ID NO: 210821 - DNA, 13 bp, Artificial Sequence
  Oligonucleotide for detection of SNP TSC0004805
agtatcggtatgy

SEQ ID NO: 210822 - DNA, 13 bp, Artificial Sequence
  Oligonucleotide for detection of SNP TSC0004805
rcataccgatact

SEQ ID NO: 210823 - DNA, 13 bp, Artificial Sequence
  Oligonucleotide for detection of SNP TSC0009354
ttgaaagaagttg

SEQ ID NO: 210824 - DNA, 13 bp, Artificial Sequence
  Oligonucleotide for detection of SNP TSC0009354
caacttctttcaa

SEQ ID NO: 210825 - DNA, 13 bp, Artificial Sequence
  Oligonucleotide for detection of SNP TSC0009354
ttgaaaaaagttg

SEQ ID NO: 210826 - DNA, 13 bp, Artificial Sequence
  Oligonucleotide for detection of SNP TSC0009354
caacttttttcaa

SEQ ID NO: 210827 - DNA, 13 bp, Artificial Sequence
  Oligonucleotide for detection of SNP TSC0051455
taaataggtagga

SEQ ID NO: 210828 - DNA, 13 bp, Artificial Sequence
  Oligonucleotide for detection of SNP TSC0051455
tcctacctattta

SEQ ID NO: 210829 - DNA, 13 bp, Artificial Sequence
  Oligonucleotide for detection of SNP TSC0051455
taaatatgtagga

SEQ ID NO: 210830 - DNA, 13 bp, Artificial Sequence
  Oligonucleotide for detection of SNP TSC0051455
tcctacatattta

SEQ ID NO: 210831 - DNA, 13 bp, Artificial Sequence
  Oligonucleotide for detection of SNP TSC0051455
taaatacgtagga

SEQ ID NO: 210832 - DNA, 13 bp, Artificial Sequence
  Oligonucleotide for detection of SNP TSC0051455
tcctacgtattta

SEQ ID NO: 210833 - DNA, 13 bp, Artificial Sequence
  Oligonucleotide for detection of SNP TSC0008463
tttttagaggtaa

SEQ ID NO: 210834 - DNA, 13 bp, Artificial Sequence
  Oligonucleotide for detection of SNP TSC0008463
ttacctctaaaaa

SEQ ID NO: 210835 - DNA, 13 bp, Artificial Sequence
  Oligonucleotide for detection of SNP TSC0051461
attggaggtttty

SEQ ID NO: 210836 - DNA, 13 bp, Artificial Sequence
  Oligonucleotide for detection of SNP TSC0051461
raaaacctccaat

SEQ ID NO: 210837 - DNA, 13 bp, Artificial Sequence
  Oligonucleotide for detection of SNP TSC0051461
attggaagtttty

SEQ ID NO: 210838 - DNA, 13 bp, Artificial Sequence
  Oligonucleotide for detection of SNP TSC0051461
raaaacttccaat

SEQ ID NO: 210839 - DNA, 13 bp, Artificial Sequence
  Oligonucleotide for detection of SNP TSC0051463
aggaggattgtat

SEQ ID NO: 210840 - DNA, 13 bp, Artificial Sequence
  Oligonucleotide for detection of SNP TSC0051463
atacaatcctcct

SEQ ID NO: 210841 - DNA, 13 bp, Artificial Sequence
  Oligonucleotide for detection of SNP TSC0051463
aggagggttgtat

SEQ ID NO: 210842 - DNA, 13 bp, Artificial Sequence
  Oligonucleotide for detection of SNP TSC0051463
atacaaccctcct

SEQ ID NO: 210843 - DNA, 13 bp, Artificial Sequence
  Oligonucleotide for detection of SNP TSC0051464
tttcgtggttttt

SEQ ID NO: 210844 - DNA, 13 bp, Artificial Sequence
  Oligonucleotide for detection of SNP TSC0051464
aaaaaccacgaaa

SEQ ID NO: 210845 - DNA, 13 bp, Artificial Sequence
  Oligonucleotide for detection of SNP TSC0051464
tttcgtagttttt

SEQ ID NO: 210846 - DNA, 13 bp, Artificial Sequence
  Oligonucleotide for detection of SNP TSC0051464
aaaaactacgaaa

SEQ ID NO: 210847 - DNA, 13 bp, Artificial Sequence
  Oligonucleotide for detection of SNP TSC0051465
gtgggtattttgg

SEQ ID NO: 210848 - DNA, 13 bp, Artificial Sequence
  Oligonucleotide for detection of SNP TSC0051465
ccaaaatacccac

SEQ ID NO: 210849 - DNA, 13 bp, Artificial Sequence
  Oligonucleotide for detection of SNP TSC0051465
gtgggtgttttgg

SEQ ID NO: 210850 - DNA, 13 bp, Artificial Sequence
  Oligonucleotide for detection of SNP TSC0051465
ccaaaacacccac

SEQ ID NO: 210851 - DNA, 13 bp, Artificial Sequence
  Oligonucleotide for detection of SNP TSC0008874
gtaataaagtaag

SEQ ID NO: 210852 - DNA, 13 bp, Artificial Sequence
  Oligonucleotide for detection of SNP TSC0008874
cttactttattac

SEQ ID NO: 210853 - DNA, 13 bp, Artificial Sequence
  Oligonucleotide for detection of SNP TSC0008874
gtaatatagtaag

SEQ ID NO: 210854 - DNA, 13 bp, Artificial Sequence
  Oligonucleotide for detection of SNP TSC0008874
cttactatattac

SEQ ID NO: 210855 - DNA, 13 bp, Artificial Sequence
  Oligonucleotide for detection of SNP TSC0009017
tgaatgtataaay

SEQ ID NO: 210856 - DNA, 13 bp, Artificial Sequence
  Oligonucleotide for detection of SNP TSC0009017
rtttatacattca

SEQ ID NO: 210857 - DNA, 13 bp, Artificial Sequence
  Oligonucleotide for detection of SNP TSC0009017
tgaatggataaay

SEQ ID NO: 210858 - DNA, 13 bp, Artificial Sequence
  Oligonucleotide for detection of SNP TSC0009017
rtttatccattca

SEQ ID NO: 210859 - DNA, 13 bp, Artificial Sequence
  Oligonucleotide for detection of SNP TSC0009017
gtttatgtattta

SEQ ID NO: 210860 - DNA, 13 bp, Artificial Sequence
  Oligonucleotide for detection of SNP TSC0009017
taaatacataaac

SEQ ID NO: 210861 - DNA, 13 bp, Artificial Sequence
  Oligonucleotide for detection of SNP TSC0009017
gtttatttattta

SEQ ID NO: 210862 - DNA, 13 bp, Artificial Sequence
  Oligonucleotide for detection of SNP TSC0009017
taaataaataaac

SEQ ID NO: 210863 - DNA, 13 bp, Artificial Sequence
  Oligonucleotide for detection of SNP TSC0051467
gtttttagttggt

SEQ ID NO: 210864 - DNA, 13 bp, Artificial Sequence
  Oligonucleotide for detection of SNP TSC0051467
accaactaaaaac

SEQ ID NO: 210865 - DNA, 13 bp, Artificial Sequence
  Oligonucleotide for detection of SNP TSC0051467
gttttttgttggt

SEQ ID NO: 210866 - DNA, 13 bp, Artificial Sequence
  Oligonucleotide for detection of SNP TSC0051467
accaacaaaaaac

SEQ ID NO: 210867 - DNA, 13 bp, Artificial Sequence
  Oligonucleotide for detection of SNP TSC0051467
attagttgaaggy

SEQ ID NO: 210868 - DNA, 13 bp, Artificial Sequence
  Oligonucleotide for detection of SNP TSC0051467
rccttcaactaat

SEQ ID NO: 210869 - DNA, 13 bp, Artificial Sequence
  Oligonucleotide for detection of SNP TSC0051467
attagtagaaggy

SEQ ID NO: 210870 - DNA, 13 bp, Artificial Sequence
  Oligonucleotide for detection of SNP TSC0051467
rccttctactaat

SEQ ID NO: 210871 - DNA, 13 bp, Artificial Sequence
  Oligonucleotide for detection of SNP TSC0051468
attgttgttttga

SEQ ID NO: 210872 - DNA, 13 bp, Artificial Sequence
  Oligonucleotide for detection of SNP TSC0051468
tcaaaacaacaat

SEQ ID NO: 210873 - DNA, 13 bp, Artificial Sequence
  Oligonucleotide for detection of SNP TSC0051468
attgttattttga

SEQ ID NO: 210874 - DNA, 13 bp, Artificial Sequence
  Oligonucleotide for detection of SNP TSC0051468
tcaaaataacaat

SEQ ID NO: 210875 - DNA, 13 bp, Artificial Sequence
  Oligonucleotide for detection of SNP TSC0005641
taatatatggatt

SEQ ID NO: 210876 - DNA, 13 bp, Artificial Sequence
  Oligonucleotide for detection of SNP TSC0005641
aatccatatatta

SEQ ID NO: 210877 - DNA, 13 bp, Artificial Sequence
  Oligonucleotide for detection of SNP TSC0005641
taatatgtggatt

SEQ ID NO: 210878 - DNA, 13 bp, Artificial Sequence
  Oligonucleotide for detection of SNP TSC0005641
aatccacatatta

SEQ ID NO: 210879 - DNA, 13 bp, Artificial Sequence
  Oligonucleotide for detection of SNP TSC0007913
aaaaaatgtaatt

SEQ ID NO: 210880 - DNA, 13 bp, Artificial Sequence
  Oligonucleotide for detection of SNP TSC0007913
aattacatttttt

SEQ ID NO: 210881 - DNA, 13 bp, Artificial Sequence
  Oligonucleotide for detection of SNP TSC0007913
aaaaaaggtaatt

SEQ ID NO: 210882 - DNA, 13 bp, Artificial Sequence
  Oligonucleotide for detection of SNP TSC0007913
aattacctttttt

SEQ ID NO: 210883 - DNA, 13 bp, Artificial Sequence
  Oligonucleotide for detection of SNP TSC0007913
agttgtgtttttt

SEQ ID NO: 210884 - DNA, 13 bp, Artificial Sequence
  Oligonucleotide for detection of SNP TSC0007913
aaaaaacacaact

SEQ ID NO: 210885 - DNA, 13 bp, Artificial Sequence
  Oligonucleotide for detection of SNP TSC0007913
agttgtttttttt

SEQ ID NO: 210886 - DNA, 13 bp, Artificial Sequence
  Oligonucleotide for detection of SNP TSC0007913
aaaaaaaacaact

SEQ ID NO: 210887 - DNA, 13 bp, Artificial Sequence
  Oligonucleotide for detection of SNP TSC0007913
agttgcgtttttt

SEQ ID NO: 210888 - DNA, 13 bp, Artificial Sequence
  Oligonucleotide for detection of SNP TSC0007913
aaaaaacgcaact

SEQ ID NO: 210889 - DNA, 13 bp, Artificial Sequence
  Oligonucleotide for detection of SNP TSC0051470
gatattgagagga

SEQ ID NO: 210890 - DNA, 13 bp, Artificial Sequence
  Oligonucleotide for detection of SNP TSC0051470
tcctctcaatatc

SEQ ID NO: 210891 - DNA, 13 bp, Artificial Sequence
  Oligonucleotide for detection of SNP TSC0051470
gatattaagagga

SEQ ID NO: 210892 - DNA, 13 bp, Artificial Sequence
  Oligonucleotide for detection of SNP TSC0051470
tcctcttaatatc

SEQ ID NO: 210893 - DNA, 13 bp, Artificial Sequence
  Oligonucleotide for detection of SNP TSC0051472
aatataatgagat

SEQ ID NO: 210894 - DNA, 13 bp, Artificial Sequence
  Oligonucleotide for detection of SNP TSC0051472
atctcattatatt

SEQ ID NO: 210895 - DNA, 13 bp, Artificial Sequence
  Oligonucleotide for detection of SNP TSC0051472
aatatagtgagat

SEQ ID NO: 210896 - DNA, 13 bp, Artificial Sequence
  Oligonucleotide for detection of SNP TSC0051472
atctcactatatt

SEQ ID NO: 210897 - DNA, 13 bp, Artificial Sequence
  Oligonucleotide for detection of SNP TSC0051472
aatataacgagat

SEQ ID NO: 210898 - DNA, 13 bp, Artificial Sequence
  Oligonucleotide for detection of SNP TSC0051472
atctcgttatatt

SEQ ID NO: 210899 - DNA, 13 bp, Artificial Sequence
  Oligonucleotide for detection of SNP TSC0051472
aatatagcgagat

SEQ ID NO: 210900 - DNA, 13 bp, Artificial Sequence
  Oligonucleotide for detection of SNP TSC0051472
atctcgctatatt

SEQ ID NO: 210901 - DNA, 13 bp, Artificial Sequence
  Oligonucleotide for detection of SNP TSC0051474
ggtttttgggtat

SEQ ID NO: 210902 - DNA, 13 bp, Artificial Sequence
  Oligonucleotide for detection of SNP TSC0051474
atacccaaaaacc

SEQ ID NO: 210903 - DNA, 13 bp, Artificial Sequence
  Oligonucleotide for detection of SNP TSC0051474
ggttttcgggtat

SEQ ID NO: 210904 - DNA, 13 bp, Artificial Sequence
  Oligonucleotide for detection of SNP TSC0051474
atacccgaaaacc

SEQ ID NO: 210905 - DNA, 13 bp, Artificial Sequence
  Oligonucleotide for detection of SNP TSC0051474
atatttgagggty

SEQ ID NO: 210906 - DNA, 13 bp, Artificial Sequence
  Oligonucleotide for detection of SNP TSC0051474
raccctcaaatat

SEQ ID NO: 210907 - DNA, 13 bp, Artificial Sequence
  Oligonucleotide for detection of SNP TSC0051474
atatttaagggty

SEQ ID NO: 210908 - DNA, 13 bp, Artificial Sequence
  Oligonucleotide for detection of SNP TSC0051474
racccttaaatat

SEQ ID NO: 210909 - DNA, 13 bp, Artificial Sequence
  Oligonucleotide for detection of SNP TSC0051474
atattcgagggty

SEQ ID NO: 210910 - DNA, 13 bp, Artificial Sequence
  Oligonucleotide for detection of SNP TSC0051474
raccctcgaatat

SEQ ID NO: 210911 - DNA, 13 bp, Artificial Sequence
  Oligonucleotide for detection of SNP TSC0051475
gtgggttgggatt

SEQ ID NO: 210912 - DNA, 13 bp, Artificial Sequence
  Oligonucleotide for detection of SNP TSC0051475
aatcccaacccac

SEQ ID NO: 210913 - DNA, 13 bp, Artificial Sequence
  Oligonucleotide for detection of SNP TSC0051475
gtgggtcgggatt

SEQ ID NO: 210914 - DNA, 13 bp, Artificial Sequence
  Oligonucleotide for detection of SNP TSC0051475
aatcccgacccac

SEQ ID NO: 210915 - DNA, 13 bp, Artificial Sequence
  Oligonucleotide for detection of SNP TSC0051476
ttggttgttagga

SEQ ID NO: 210916 - DNA, 13 bp, Artificial Sequence
  Oligonucleotide for detection of SNP TSC0051476
tcctaacaaccaa

SEQ ID NO: 210917 - DNA, 13 bp, Artificial Sequence
  Oligonucleotide for detection of SNP TSC0051476
ttggttattagga

SEQ ID NO: 210918 - DNA, 13 bp, Artificial Sequence
  Oligonucleotide for detection of SNP TSC0051476
tcctaataaccaa

SEQ ID NO: 210919 - DNA, 13 bp, Artificial Sequence
  Oligonucleotide for detection of SNP TSC0051476
tcggttgttagga

SEQ ID NO: 210920 - DNA, 13 bp, Artificial Sequence
  Oligonucleotide for detection of SNP TSC0051476
tcctaacaaccga

SEQ ID NO: 210921 - DNA, 13 bp, Artificial Sequence
  Oligonucleotide for detection of SNP TSC0051476
tcggttattagga

SEQ ID NO: 210922 - DNA, 13 bp, Artificial Sequence
  Oligonucleotide for detection of SNP TSC0051476
tcctaataaccga

SEQ ID NO: 210923 - DNA, 13 bp, Artificial Sequence
  Oligonucleotide for detection of SNP TSC0051477
tagagagattttt

SEQ ID NO: 210924 - DNA, 13 bp, Artificial Sequence
  Oligonucleotide for detection of SNP TSC0051477
aaaaatctctcta

SEQ ID NO: 210925 - DNA, 13 bp, Artificial Sequence
  Oligonucleotide for detection of SNP TSC0051477
tagagaaattttt

SEQ ID NO: 210926 - DNA, 13 bp, Artificial Sequence
  Oligonucleotide for detection of SNP TSC0051477
aaaaatttctcta

SEQ ID NO: 210927 - DNA, 13 bp, Artificial Sequence
  Oligonucleotide for detection of SNP TSC0051479
gtagtaggtattt

SEQ ID NO: 210928 - DNA, 13 bp, Artificial Sequence
  Oligonucleotide for detection of SNP TSC0051479
aaatacctactac

SEQ ID NO: 210929 - DNA, 13 bp, Artificial Sequence
  Oligonucleotide for detection of SNP TSC0051479
gtagtaagtattt

SEQ ID NO: 210930 - DNA, 13 bp, Artificial Sequence
  Oligonucleotide for detection of SNP TSC0051479
aaatacttactac

SEQ ID NO: 210931 - DNA, 13 bp, Artificial Sequence
  Oligonucleotide for detection of SNP TSC0051480
agtttagaatagy

SEQ ID NO: 210932 - DNA, 13 bp, Artificial Sequence
  Oligonucleotide for detection of SNP TSC0051480
rctattctaaact

SEQ ID NO: 210933 - DNA, 13 bp, Artificial Sequence
  Oligonucleotide for detection of SNP TSC0051480
agtttaaaatagy

SEQ ID NO: 210934 - DNA, 13 bp, Artificial Sequence
  Oligonucleotide for detection of SNP TSC0051480
rctattttaaact

SEQ ID NO: 210935 - DNA, 13 bp, Artificial Sequence
  Oligonucleotide for detection of SNP TSC0051481
tttaaattttagy

SEQ ID NO: 210936 - DNA, 13 bp, Artificial Sequence
  Oligonucleotide for detection of SNP TSC0051481
rctaaaatttaaa

SEQ ID NO: 210937 - DNA, 13 bp, Artificial Sequence
  Oligonucleotide for detection of SNP TSC0051481
tttaaagtttagy

SEQ ID NO: 210938 - DNA, 13 bp, Artificial Sequence
  Oligonucleotide for detection of SNP TSC0051481
rctaaactttaaa

SEQ ID NO: 210939 - DNA, 13 bp, Artificial Sequence
  Oligonucleotide for detection of SNP TSC0051481
gttggggtttgag

SEQ ID NO: 210940 - DNA, 13 bp, Artificial Sequence
  Oligonucleotide for detection of SNP TSC0051481
ctcaaaccccaac

SEQ ID NO: 210941 - DNA, 13 bp, Artificial Sequence
  Oligonucleotide for detection of SNP TSC0051481
gttgggttttgag

SEQ ID NO: 210942 - DNA, 13 bp, Artificial Sequence
  Oligonucleotide for detection of SNP TSC0051481
ctcaaaacccaac

SEQ ID NO: 210943 - DNA, 13 bp, Artificial Sequence
  Oligonucleotide for detection of SNP TSC0051482
gtttttggggttt

SEQ ID NO: 210944 - DNA, 13 bp, Artificial Sequence
  Oligonucleotide for detection of SNP TSC0051482
aaaccccaaaaac

SEQ ID NO: 210945 - DNA, 13 bp, Artificial Sequence
  Oligonucleotide for detection of SNP TSC0051482
gttttcggggttt

SEQ ID NO: 210946 - DNA, 13 bp, Artificial Sequence
  Oligonucleotide for detection of SNP TSC0051482
aaaccccgaaaac

SEQ ID NO: 210947 - DNA, 13 bp, Artificial Sequence
  Oligonucleotide for detection of SNP TSC0051482
aaattttgggagy

SEQ ID NO: 210948 - DNA, 13 bp, Artificial Sequence
  Oligonucleotide for detection of SNP TSC0051482
rctcccaaaattt

SEQ ID NO: 210949 - DNA, 13 bp, Artificial Sequence
  Oligonucleotide for detection of SNP TSC0051482
aaatttcgggagy

SEQ ID NO: 210950 - DNA, 13 bp, Artificial Sequence
  Oligonucleotide for detection of SNP TSC0051482
rctcccgaaattt

SEQ ID NO: 210951 - DNA, 13 bp, Artificial Sequence
  Oligonucleotide for detection of SNP TSC0009322
aattttaaagtta

SEQ ID NO: 210952 - DNA, 13 bp, Artificial Sequence
  Oligonucleotide for detection of SNP TSC0009322
taactttaaaatt

SEQ ID NO: 210953 - DNA, 13 bp, Artificial Sequence
  Oligonucleotide for detection of SNP TSC0009322
aattttgaagtta

SEQ ID NO: 210954 - DNA, 13 bp, Artificial Sequence
  Oligonucleotide for detection of SNP TSC0009322
taacttcaaaatt

SEQ ID NO: 210955 - DNA, 13 bp, Artificial Sequence
  Oligonucleotide for detection of SNP TSC0051485
ttgttaaatgtty

SEQ ID NO: 210956 - DNA, 13 bp, Artificial Sequence
  Oligonucleotide for detection of SNP TSC0051485
raacatttaacaa

SEQ ID NO: 210957 - DNA, 13 bp, Artificial Sequence
  Oligonucleotide for detection of SNP TSC0051485
ttgttagatgtty

SEQ ID NO: 210958 - DNA, 13 bp, Artificial Sequence
  Oligonucleotide for detection of SNP TSC0051485
raacatctaacaa

SEQ ID NO: 210959 - DNA, 13 bp, Artificial Sequence
  Oligonucleotide for detection of SNP TSC0008875
tttgtaagaattg

SEQ ID NO: 210960 - DNA, 13 bp, Artificial Sequence
  Oligonucleotide for detection of SNP TSC0008875
caattcttacaaa

SEQ ID NO: 210961 - DNA, 13 bp, Artificial Sequence
  Oligonucleotide for detection of SNP TSC0008875
tttgtaggaattg

SEQ ID NO: 210962 - DNA, 13 bp, Artificial Sequence
  Oligonucleotide for detection of SNP TSC0008875
caattcctacaaa

SEQ ID NO: 210963 - DNA, 13 bp, Artificial Sequence
  Oligonucleotide for detection of SNP TSC0051486
tttttggatgtat

SEQ ID NO: 210964 - DNA, 13 bp, Artificial Sequence
  Oligonucleotide for detection of SNP TSC0051486
atacatccaaaaa

SEQ ID NO: 210965 - DNA, 13 bp, Artificial Sequence
  Oligonucleotide for detection of SNP TSC0051486
tttttgaatgtat

SEQ ID NO: 210966 - DNA, 13 bp, Artificial Sequence
  Oligonucleotide for detection of SNP TSC0051486
atacattcaaaaa

SEQ ID NO: 210967 - DNA, 13 bp, Artificial Sequence
  Oligonucleotide for detection of SNP TSC0004603
aattttgaaattt

SEQ ID NO: 210968 - DNA, 13 bp, Artificial Sequence
  Oligonucleotide for detection of SNP TSC0004603
aaatttcaaaatt

SEQ ID NO: 210969 - DNA, 13 bp, Artificial Sequence
  Oligonucleotide for detection of SNP TSC0004603
agatttaaaaatt

SEQ ID NO: 210970 - DNA, 13 bp, Artificial Sequence
  Oligonucleotide for detection of SNP TSC0004603
aatttttaaatct

SEQ ID NO: 210971 - DNA, 13 bp, Artificial Sequence
  Oligonucleotide for detection of SNP TSC0004603
agattttaaaatt

SEQ ID NO: 210972 - DNA, 13 bp, Artificial Sequence
  Oligonucleotide for detection of SNP TSC0004603
aattttaaaatct

SEQ ID NO: 210973 - DNA, 13 bp, Artificial Sequence
  Oligonucleotide for detection of SNP TSC0051487
ttggatttttata

SEQ ID NO: 210974 - DNA, 13 bp, Artificial Sequence
  Oligonucleotide for detection of SNP TSC0051487
tataaaaatccaa

SEQ ID NO: 210975 - DNA, 13 bp, Artificial Sequence
  Oligonucleotide for detection of SNP TSC0051487
ttggatatttata

SEQ ID NO: 210976 - DNA, 13 bp, Artificial Sequence
  Oligonucleotide for detection of SNP TSC0051487
tataaatatccaa

SEQ ID NO: 210977 - DNA, 13 bp, Artificial Sequence
  Oligonucleotide for detection of SNP TSC0009158
tgaaaaataggat

SEQ ID NO: 210978 - DNA, 13 bp, Artificial Sequence
  Oligonucleotide for detection of SNP TSC0009158
atcctatttttca

SEQ ID NO: 210979 - DNA, 13 bp, Artificial Sequence
  Oligonucleotide for detection of SNP TSC0009158
tgaaaagtaggat

SEQ ID NO: 210980 - DNA, 13 bp, Artificial Sequence
  Oligonucleotide for detection of SNP TSC0009158
atcctacttttca

SEQ ID NO: 210981 - DNA, 13 bp, Artificial Sequence
  Oligonucleotide for detection of SNP TSC0051489
gagaagaggattt

SEQ ID NO: 210982 - DNA, 13 bp, Artificial Sequence
  Oligonucleotide for detection of SNP TSC0051489
aaatcctcttctc

SEQ ID NO: 210983 - DNA, 13 bp, Artificial Sequence
  Oligonucleotide for detection of SNP TSC0051489
gagaaggggattt

SEQ ID NO: 210984 - DNA, 13 bp, Artificial Sequence
  Oligonucleotide for detection of SNP TSC0051489
aaatccccttctc

SEQ ID NO: 210985 - DNA, 13 bp, Artificial Sequence
  Oligonucleotide for detection of SNP TSC0051490
aggagaggagagg

SEQ ID NO: 210986 - DNA, 13 bp, Artificial Sequence
  Oligonucleotide for detection of SNP TSC0051490
cctctcctctcct

SEQ ID NO: 210987 - DNA, 13 bp, Artificial Sequence
  Oligonucleotide for detection of SNP TSC0051490
aggagaagagagg

SEQ ID NO: 210988 - DNA, 13 bp, Artificial Sequence
  Oligonucleotide for detection of SNP TSC0051490
cctctcttctcct

SEQ ID NO: 210989 - DNA, 13 bp, Artificial Sequence
  Oligonucleotide for detection of SNP TSC0051491
aagggaggggagg

SEQ ID NO: 210990 - DNA, 13 bp, Artificial Sequence
  Oligonucleotide for detection of SNP TSC0051491
cctcccctccctt

SEQ ID NO: 210991 - DNA, 13 bp, Artificial Sequence
  Oligonucleotide for detection of SNP TSC0051491
aagggaagggagg

SEQ ID NO: 210992 - DNA, 13 bp, Artificial Sequence
  Oligonucleotide for detection of SNP TSC0051491
cctcccttccctt

SEQ ID NO: 210993 - DNA, 13 bp, Artificial Sequence
  Oligonucleotide for detection of SNP TSC0051492
ttattggaaagta

SEQ ID NO: 210994 - DNA, 13 bp, Artificial Sequence
  Oligonucleotide for detection of SNP TSC0051492
tactttccaataa

SEQ ID NO: 210995 - DNA, 13 bp, Artificial Sequence
  Oligonucleotide for detection of SNP TSC0051492
ttattgaaaagta

SEQ ID NO: 210996 - DNA, 13 bp, Artificial Sequence
  Oligonucleotide for detection of SNP TSC0051492
tacttttcaataa

SEQ ID NO: 210997 - DNA, 13 bp, Artificial Sequence
  Oligonucleotide for detection of SNP TSC0051493
tgattaattaaaa

SEQ ID NO: 210998 - DNA, 13 bp, Artificial Sequence
  Oligonucleotide for detection of SNP TSC0051493
ttttaattaatca

SEQ ID NO: 210999 - DNA, 13 bp, Artificial Sequence
  Oligonucleotide for detection of SNP TSC0051493
tgattatttaaaa

SEQ ID NO: 211000 - DNA, 13 bp, Artificial Sequence
  Oligonucleotide for detection of SNP TSC0051493
ttttaaataatca

SEQ ID NO: 211001 - DNA, 13 bp, Artificial Sequence
  Oligonucleotide for detection of SNP TSC0051493
ttttagttgatta

SEQ ID NO: 211002 - DNA, 13 bp, Artificial Sequence
  Oligonucleotide for detection of SNP TSC0051493
taatcaactaaaa

SEQ ID NO: 211003 - DNA, 13 bp, Artificial Sequence
  Oligonucleotide for detection of SNP TSC0051493
ttttaggtgatta

SEQ ID NO: 211004 - DNA, 13 bp, Artificial Sequence
  Oligonucleotide for detection of SNP TSC0051493
taatcacctaaaa

SEQ ID NO: 211005 - DNA, 13 bp, Artificial Sequence
  Oligonucleotide for detection of SNP TSC0051494
gtagagtgattty

SEQ ID NO: 211006 - DNA, 13 bp, Artificial Sequence
  Oligonucleotide for detection of SNP TSC0051494
raaatcactctac

SEQ ID NO: 211007 - DNA, 13 bp, Artificial Sequence
  Oligonucleotide for detection of SNP TSC0051494
gtagagcgattty

SEQ ID NO: 211008 - DNA, 13 bp, Artificial Sequence
  Oligonucleotide for detection of SNP TSC0051494
raaatcgctctac

SEQ ID NO: 211009 - DNA, 13 bp, Artificial Sequence
  Oligonucleotide for detection of SNP TSC0051494
ggagttgttttay

SEQ ID NO: 211010 - DNA, 13 bp, Artificial Sequence
  Oligonucleotide for detection of SNP TSC0051494
rtaaaacaactcc

SEQ ID NO: 211011 - DNA, 13 bp, Artificial Sequence
  Oligonucleotide for detection of SNP TSC0051494
ggagttattttay

SEQ ID NO: 211012 - DNA, 13 bp, Artificial Sequence
  Oligonucleotide for detection of SNP TSC0051494
rtaaaataactcc

SEQ ID NO: 211013 - DNA, 13 bp, Artificial Sequence
  Oligonucleotide for detection of SNP TSC0051494
ggagtcgttttay

SEQ ID NO: 211014 - DNA, 13 bp, Artificial Sequence
  Oligonucleotide for detection of SNP TSC0051494
rtaaaacgactcc

SEQ ID NO: 211015 - DNA, 13 bp, Artificial Sequence
  Oligonucleotide for detection of SNP TSC0051495
taaagaatattaa

SEQ ID NO: 211016 - DNA, 13 bp, Artificial Sequence
  Oligonucleotide for detection of SNP TSC0051495
ttaatattcttta

SEQ ID NO: 211017 - DNA, 13 bp, Artificial Sequence
  Oligonucleotide for detection of SNP TSC0051495
taaagagtattaa

SEQ ID NO: 211018 - DNA, 13 bp, Artificial Sequence
  Oligonucleotide for detection of SNP TSC0051495
ttaatactcttta

SEQ ID NO: 211019 - DNA, 13 bp, Artificial Sequence
  Oligonucleotide for detection of SNP TSC0051498
tgttggttatatt

SEQ ID NO: 211020 - DNA, 13 bp, Artificial Sequence
  Oligonucleotide for detection of SNP TSC0051498
aatataaccaaca

SEQ ID NO: 211021 - DNA, 13 bp, Artificial Sequence
  Oligonucleotide for detection of SNP TSC0051498
tgttgggtatatt

SEQ ID NO: 211022 - DNA, 13 bp, Artificial Sequence
  Oligonucleotide for detection of SNP TSC0051498
aatatacccaaca

SEQ ID NO: 211023 - DNA, 13 bp, Artificial Sequence
  Oligonucleotide for detection of SNP TSC0051498
agtatgattaata

SEQ ID NO: 211024 - DNA, 13 bp, Artificial Sequence
  Oligonucleotide for detection of SNP TSC0051498
tattaatcatact

SEQ ID NO: 211025 - DNA, 13 bp, Artificial Sequence
  Oligonucleotide for detection of SNP TSC0051498
agtatgtttaata

SEQ ID NO: 211026 - DNA, 13 bp, Artificial Sequence
  Oligonucleotide for detection of SNP TSC0051498
tattaaacatact

SEQ ID NO: 211027 - DNA, 13 bp, Artificial Sequence
  Oligonucleotide for detection of SNP TSC0051499
tagtgaggtatga

SEQ ID NO: 211028 - DNA, 13 bp, Artificial Sequence
  Oligonucleotide for detection of SNP TSC0051499
tcatacctcacta

SEQ ID NO: 211029 - DNA, 13 bp, Artificial Sequence
  Oligonucleotide for detection of SNP TSC0051499
tagtgaagtatga

SEQ ID NO: 211030 - DNA, 13 bp, Artificial Sequence
  Oligonucleotide for detection of SNP TSC0051499
tcatacttcacta

SEQ ID NO: 211031 - DNA, 13 bp, Artificial Sequence
  Oligonucleotide for detection of SNP TSC0051500
aatatatgatgaa

SEQ ID NO: 211032 - DNA, 13 bp, Artificial Sequence
  Oligonucleotide for detection of SNP TSC0051500
ttcatcatatatt

SEQ ID NO: 211033 - DNA, 13 bp, Artificial Sequence
  Oligonucleotide for detection of SNP TSC0051500
aatataggatgaa

SEQ ID NO: 211034 - DNA, 13 bp, Artificial Sequence
  Oligonucleotide for detection of SNP TSC0051500
ttcatcctatatt

SEQ ID NO: 211035 - DNA, 13 bp, Artificial Sequence
  Oligonucleotide for detection of SNP TSC0051500
aatatatgacgaa

SEQ ID NO: 211036 - DNA, 13 bp, Artificial Sequence
  Oligonucleotide for detection of SNP TSC0051500
ttcgtcatatatt

SEQ ID NO: 211037 - DNA, 13 bp, Artificial Sequence
  Oligonucleotide for detection of SNP TSC0051500
aatataggacgaa

SEQ ID NO: 211038 - DNA, 13 bp, Artificial Sequence
  Oligonucleotide for detection of SNP TSC0051500
ttcgtcctatatt

SEQ ID NO: 211039 - DNA, 13 bp, Artificial Sequence
  Oligonucleotide for detection of SNP TSC0051500
tttgttatgtgtt

SEQ ID NO: 211040 - DNA, 13 bp, Artificial Sequence
  Oligonucleotide for detection of SNP TSC0051500
aacacataacaaa

SEQ ID NO: 211041 - DNA, 13 bp, Artificial Sequence
  Oligonucleotide for detection of SNP TSC0051500
tttgttttgtgtt

SEQ ID NO: 211042 - DNA, 13 bp, Artificial Sequence
  Oligonucleotide for detection of SNP TSC0051500
aacacaaaacaaa

SEQ ID NO: 211043 - DNA, 13 bp, Artificial Sequence
  Oligonucleotide for detection of SNP TSC0051500
ttcgttatgtgtt

SEQ ID NO: 211044 - DNA, 13 bp, Artificial Sequence
  Oligonucleotide for detection of SNP TSC0051500
aacacataacgaa

SEQ ID NO: 211045 - DNA, 13 bp, Artificial Sequence
  Oligonucleotide for detection of SNP TSC0051500
ttcgttttgtgtt

SEQ ID NO: 211046 - DNA, 13 bp, Artificial Sequence
  Oligonucleotide for detection of SNP TSC0051500
aacacaaaacgaa

SEQ ID NO: 211047 - DNA, 13 bp, Artificial Sequence
  Oligonucleotide for detection of SNP TSC0051501
ttgattgttatty

SEQ ID NO: 211048 - DNA, 13 bp, Artificial Sequence
  Oligonucleotide for detection of SNP TSC0051501
raataacaatcaa

SEQ ID NO: 211049 - DNA, 13 bp, Artificial Sequence
  Oligonucleotide for detection of SNP TSC0051501
ttgattattatty

SEQ ID NO: 211050 - DNA, 13 bp, Artificial Sequence
  Oligonucleotide for detection of SNP TSC0051501
raataataatcaa

SEQ ID NO: 211051 - DNA, 13 bp, Artificial Sequence
  Oligonucleotide for detection of SNP TSC0051502
tgtgttgaaagtg

SEQ ID NO: 211052 - DNA, 13 bp, Artificial Sequence
  Oligonucleotide for detection of SNP TSC0051502
cactttcaacaca

SEQ ID NO: 211053 - DNA, 13 bp, Artificial Sequence
  Oligonucleotide for detection of SNP TSC0051502
tgtgttaaaagtg

SEQ ID NO: 211054 - DNA, 13 bp, Artificial Sequence
  Oligonucleotide for detection of SNP TSC0051502
cacttttaacaca

SEQ ID NO: 211055 - DNA, 13 bp, Artificial Sequence
  Oligonucleotide for detection of SNP TSC0051503
aaaaaaataagat

SEQ ID NO: 211056 - DNA, 13 bp, Artificial Sequence
  Oligonucleotide for detection of SNP TSC0051503
atcttattttttt

SEQ ID NO: 211057 - DNA, 13 bp, Artificial Sequence
  Oligonucleotide for detection of SNP TSC0051503
aaaaaattaagat

SEQ ID NO: 211058 - DNA, 13 bp, Artificial Sequence
  Oligonucleotide for detection of SNP TSC0051503
atcttaatttttt

SEQ ID NO: 211059 - DNA, 13 bp, Artificial Sequence
  Oligonucleotide for detection of SNP TSC0051503
attttggtttttt

SEQ ID NO: 211060 - DNA, 13 bp, Artificial Sequence
  Oligonucleotide for detection of SNP TSC0051503
aaaaaaccaaaat

SEQ ID NO: 211061 - DNA, 13 bp, Artificial Sequence
  Oligonucleotide for detection of SNP TSC0051505
ggaattataagty

SEQ ID NO: 211062 - DNA, 13 bp, Artificial Sequence
  Oligonucleotide for detection of SNP TSC0051505
racttataattcc

SEQ ID NO: 211063 - DNA, 13 bp, Artificial Sequence
  Oligonucleotide for detection of SNP TSC0051506
ttgataaatttgt

SEQ ID NO: 211064 - DNA, 13 bp, Artificial Sequence
  Oligonucleotide for detection of SNP TSC0051506
acaaatttatcaa

SEQ ID NO: 211065 - DNA, 13 bp, Artificial Sequence
  Oligonucleotide for detection of SNP TSC0051506
ttgatagatttgt

SEQ ID NO: 211066 - DNA, 13 bp, Artificial Sequence
  Oligonucleotide for detection of SNP TSC0051506
acaaatctatcaa

SEQ ID NO: 211067 - DNA, 13 bp, Artificial Sequence
  Oligonucleotide for detection of SNP TSC0051508
agtttttgggaga

SEQ ID NO: 211068 - DNA, 13 bp, Artificial Sequence
  Oligonucleotide for detection of SNP TSC0051508
tctcccaaaaact

SEQ ID NO: 211069 - DNA, 13 bp, Artificial Sequence
  Oligonucleotide for detection of SNP TSC0051508
agttttcgggaga

SEQ ID NO: 211070 - DNA, 13 bp, Artificial Sequence
  Oligonucleotide for detection of SNP TSC0051508
tctcccgaaaact

SEQ ID NO: 211071 - DNA, 13 bp, Artificial Sequence
  Oligonucleotide for detection of SNP TSC0051508
ttttttgaggatt

SEQ ID NO: 211072 - DNA, 13 bp, Artificial Sequence
  Oligonucleotide for detection of SNP TSC0051508
aatcctcaaaaaa

SEQ ID NO: 211073 - DNA, 13 bp, Artificial Sequence
  Oligonucleotide for detection of SNP TSC0051508
ttttttaaggatt

SEQ ID NO: 211074 - DNA, 13 bp, Artificial Sequence
  Oligonucleotide for detection of SNP TSC0051508
aatccttaaaaaa

SEQ ID NO: 211075 - DNA, 13 bp, Artificial Sequence
  Oligonucleotide for detection of SNP TSC0051508
tttttcgaggatt

SEQ ID NO: 211076 - DNA, 13 bp, Artificial Sequence
  Oligonucleotide for detection of SNP TSC0051508
aatcctcgaaaaa

SEQ ID NO: 211077 - DNA, 13 bp, Artificial Sequence
  Oligonucleotide for detection of SNP TSC0051509
gtgttagaattta

SEQ ID NO: 211078 - DNA, 13 bp, Artificial Sequence
  Oligonucleotide for detection of SNP TSC0051509
taaattctaacac

SEQ ID NO: 211079 - DNA, 13 bp, Artificial Sequence
  Oligonucleotide for detection of SNP TSC0051509
gtgttaaaattta

SEQ ID NO: 211080 - DNA, 13 bp, Artificial Sequence
  Oligonucleotide for detection of SNP TSC0051509
taaattttaacac

SEQ ID NO: 211081 - DNA, 13 bp, Artificial Sequence
  Oligonucleotide for detection of SNP TSC0051513
tttataataaagy

SEQ ID NO: 211082 - DNA, 13 bp, Artificial Sequence
  Oligonucleotide for detection of SNP TSC0051513
rctttattataaa

SEQ ID NO: 211083 - DNA, 13 bp, Artificial Sequence
  Oligonucleotide for detection of SNP TSC0051513
tttatagtaaagy

SEQ ID NO: 211084 - DNA, 13 bp, Artificial Sequence
  Oligonucleotide for detection of SNP TSC0051513
rctttactataaa

SEQ ID NO: 211085 - DNA, 13 bp, Artificial Sequence
  Oligonucleotide for detection of SNP TSC0051514
tatttgtaaggtt

SEQ ID NO: 211086 - DNA, 13 bp, Artificial Sequence
  Oligonucleotide for detection of SNP TSC0051514
aaccttacaaata

SEQ ID NO: 211087 - DNA, 13 bp, Artificial Sequence
  Oligonucleotide for detection of SNP TSC0051514
tatttggaaggtt

SEQ ID NO: 211088 - DNA, 13 bp, Artificial Sequence
  Oligonucleotide for detection of SNP TSC0051514
aaccttccaaata

SEQ ID NO: 211089 - DNA, 13 bp, Artificial Sequence
  Oligonucleotide for detection of SNP TSC0051514
tattcgtaaggtt

SEQ ID NO: 211090 - DNA, 13 bp, Artificial Sequence
  Oligonucleotide for detection of SNP TSC0051514
aaccttacgaata

SEQ ID NO: 211091 - DNA, 13 bp, Artificial Sequence
  Oligonucleotide for detection of SNP TSC0051514
tattcggaaggtt

SEQ ID NO: 211092 - DNA, 13 bp, Artificial Sequence
  Oligonucleotide for detection of SNP TSC0051514
aaccttccgaata

SEQ ID NO: 211093 - DNA, 13 bp, Artificial Sequence
  Oligonucleotide for detection of SNP TSC0051514
agttttgtgagta

SEQ ID NO: 211094 - DNA, 13 bp, Artificial Sequence
  Oligonucleotide for detection of SNP TSC0051514
tactcacaaaact

SEQ ID NO: 211095 - DNA, 13 bp, Artificial Sequence
  Oligonucleotide for detection of SNP TSC0051514
agttttgcgagta

SEQ ID NO: 211096 - DNA, 13 bp, Artificial Sequence
  Oligonucleotide for detection of SNP TSC0051514
tactcgcaaaact

SEQ ID NO: 211097 - DNA, 13 bp, Artificial Sequence
  Oligonucleotide for detection of SNP TSC0051514
agtttttcgagta

SEQ ID NO: 211098 - DNA, 13 bp, Artificial Sequence
  Oligonucleotide for detection of SNP TSC0051514
tactcgaaaaact

SEQ ID NO: 211099 - DNA, 13 bp, Artificial Sequence
  Oligonucleotide for detection of SNP TSC0008216
ttatgtgatttgt

SEQ ID NO: 211100 - DNA, 13 bp, Artificial Sequence
  Oligonucleotide for detection of SNP TSC0008216
acaaatcacataa

SEQ ID NO: 211101 - DNA, 13 bp, Artificial Sequence
  Oligonucleotide for detection of SNP TSC0008216
ttatgtaatttgt

SEQ ID NO: 211102 - DNA, 13 bp, Artificial Sequence
  Oligonucleotide for detection of SNP TSC0008216
acaaattacataa

SEQ ID NO: 211103 - DNA, 13 bp, Artificial Sequence
  Oligonucleotide for detection of SNP TSC0008216
ttacgtgatttgt

SEQ ID NO: 211104 - DNA, 13 bp, Artificial Sequence
  Oligonucleotide for detection of SNP TSC0008216
acaaatcacgtaa

SEQ ID NO: 211105 - DNA, 13 bp, Artificial Sequence
  Oligonucleotide for detection of SNP TSC0008216
ttacgtaatttgt

SEQ ID NO: 211106 - DNA, 13 bp, Artificial Sequence
  Oligonucleotide for detection of SNP TSC0008216
acaaattacgtaa

SEQ ID NO: 211107 - DNA, 13 bp, Artificial Sequence
  Oligonucleotide for detection of SNP TSC0051516
ttgggtgttttgg

SEQ ID NO: 211108 - DNA, 13 bp, Artificial Sequence
  Oligonucleotide for detection of SNP TSC0051516
ccaaaacacccaa

SEQ ID NO: 211109 - DNA, 13 bp, Artificial Sequence
  Oligonucleotide for detection of SNP TSC0051516
ttgggtattttgg

SEQ ID NO: 211110 - DNA, 13 bp, Artificial Sequence
  Oligonucleotide for detection of SNP TSC0051516
ccaaaatacccaa

SEQ ID NO: 211111 - DNA, 13 bp, Artificial Sequence
  Oligonucleotide for detection of SNP TSC0051516
ttgggcgttttgg

SEQ ID NO: 211112 - DNA, 13 bp, Artificial Sequence
  Oligonucleotide for detection of SNP TSC0051516
ccaaaacgcccaa

SEQ ID NO: 211113 - DNA, 13 bp, Artificial Sequence
  Oligonucleotide for detection of SNP TSC0051517
gtatttagttggg

SEQ ID NO: 211114 - DNA, 13 bp, Artificial Sequence
  Oligonucleotide for detection of SNP TSC0051517
cccaactaaatac

SEQ ID NO: 211115 - DNA, 13 bp, Artificial Sequence
  Oligonucleotide for detection of SNP TSC0051517
gtatttggttggg

SEQ ID NO: 211116 - DNA, 13 bp, Artificial Sequence
  Oligonucleotide for detection of SNP TSC0051517
cccaaccaaatac

SEQ ID NO: 211117 - DNA, 13 bp, Artificial Sequence
  Oligonucleotide for detection of SNP TSC0051518
atttaatgatggt

SEQ ID NO: 211118 - DNA, 13 bp, Artificial Sequence
  Oligonucleotide for detection of SNP TSC0051518
accatcattaaat

SEQ ID NO: 211119 - DNA, 13 bp, Artificial Sequence
  Oligonucleotide for detection of SNP TSC0051518
atttaacgatggt

SEQ ID NO: 211120 - DNA, 13 bp, Artificial Sequence
  Oligonucleotide for detection of SNP TSC0051518
accatcgttaaat

SEQ ID NO: 211121 - DNA, 13 bp, Artificial Sequence
  Oligonucleotide for detection of SNP TSC0051518
attattgttaagt

SEQ ID NO: 211122 - DNA, 13 bp, Artificial Sequence
  Oligonucleotide for detection of SNP TSC0051518
acttaacaataat

SEQ ID NO: 211123 - DNA, 13 bp, Artificial Sequence
  Oligonucleotide for detection of SNP TSC0051518
attattattaagt

SEQ ID NO: 211124 - DNA, 13 bp, Artificial Sequence
  Oligonucleotide for detection of SNP TSC0051518
acttaataataat

SEQ ID NO: 211125 - DNA, 13 bp, Artificial Sequence
  Oligonucleotide for detection of SNP TSC0051518
attatcgttaagt

SEQ ID NO: 211126 - DNA, 13 bp, Artificial Sequence
  Oligonucleotide for detection of SNP TSC0051518
acttaacgataat

SEQ ID NO: 211127 - DNA, 13 bp, Artificial Sequence
  Oligonucleotide for detection of SNP TSC0051519
tttagaattttat

SEQ ID NO: 211128 - DNA, 13 bp, Artificial Sequence
  Oligonucleotide for detection of SNP TSC0051519
ataaaattctaaa

SEQ ID NO: 211129 - DNA, 13 bp, Artificial Sequence
  Oligonucleotide for detection of SNP TSC0051519
tttagagttttat

SEQ ID NO: 211130 - DNA, 13 bp, Artificial Sequence
  Oligonucleotide for detection of SNP TSC0051519
ataaaactctaaa

SEQ ID NO: 211131 - DNA, 13 bp, Artificial Sequence
  Oligonucleotide for detection of SNP TSC0051520
aaatggagttttg

SEQ ID NO: 211132 - DNA, 13 bp, Artificial Sequence
  Oligonucleotide for detection of SNP TSC0051520
caaaactccattt

SEQ ID NO: 211133 - DNA, 13 bp, Artificial Sequence
  Oligonucleotide for detection of SNP TSC0051520
aaatggggttttg

SEQ ID NO: 211134 - DNA, 13 bp, Artificial Sequence
  Oligonucleotide for detection of SNP TSC0051520
caaaaccccattt

SEQ ID NO: 211135 - DNA, 13 bp, Artificial Sequence
  Oligonucleotide for detection of SNP TSC0051520
aaacggagttttg

SEQ ID NO: 211136 - DNA, 13 bp, Artificial Sequence
  Oligonucleotide for detection of SNP TSC0051520
caaaactccgttt

SEQ ID NO: 211137 - DNA, 13 bp, Artificial Sequence
  Oligonucleotide for detection of SNP TSC0051520
aaacggggttttg

SEQ ID NO: 211138 - DNA, 13 bp, Artificial Sequence
  Oligonucleotide for detection of SNP TSC0051520
caaaaccccgttt

SEQ ID NO: 211139 - DNA, 13 bp, Artificial Sequence
  Oligonucleotide for detection of SNP TSC0051521
tgatagggtaaga

SEQ ID NO: 211140 - DNA, 13 bp, Artificial Sequence
  Oligonucleotide for detection of SNP TSC0051521
tcttaccctatca

SEQ ID NO: 211141 - DNA, 13 bp, Artificial Sequence
  Oligonucleotide for detection of SNP TSC0051521
tgatagagtaaga

SEQ ID NO: 211142 - DNA, 13 bp, Artificial Sequence
  Oligonucleotide for detection of SNP TSC0051521
tcttactctatca

SEQ ID NO: 211143 - DNA, 13 bp, Artificial Sequence
  Oligonucleotide for detection of SNP TSC0051522
taaaatggtgtag

SEQ ID NO: 211144 - DNA, 13 bp, Artificial Sequence
  Oligonucleotide for detection of SNP TSC0051522
ctacaccatttta

SEQ ID NO: 211145 - DNA, 13 bp, Artificial Sequence
  Oligonucleotide for detection of SNP TSC0051522
taaaatagtgtag

SEQ ID NO: 211146 - DNA, 13 bp, Artificial Sequence
  Oligonucleotide for detection of SNP TSC0051522
ctacactatttta

SEQ ID NO: 211147 - DNA, 13 bp, Artificial Sequence
  Oligonucleotide for detection of SNP TSC0051522
taaaatggcgtag

SEQ ID NO: 211148 - DNA, 13 bp, Artificial Sequence
  Oligonucleotide for detection of SNP TSC0051522
ctacgccatttta

SEQ ID NO: 211149 - DNA, 13 bp, Artificial Sequence
  Oligonucleotide for detection of SNP TSC0051522
taaaatagcgtag

SEQ ID NO: 211150 - DNA, 13 bp, Artificial Sequence
  Oligonucleotide for detection of SNP TSC0051522
ctacgctatttta

SEQ ID NO: 211151 - DNA, 13 bp, Artificial Sequence
  Oligonucleotide for detection of SNP TSC0051523
taaaaattttgga

SEQ ID NO: 211152 - DNA, 13 bp, Artificial Sequence
  Oligonucleotide for detection of SNP TSC0051523
tccaaaattttta

SEQ ID NO: 211153 - DNA, 13 bp, Artificial Sequence
  Oligonucleotide for detection of SNP TSC0051523
taaaaagtttgga

SEQ ID NO: 211154 - DNA, 13 bp, Artificial Sequence
  Oligonucleotide for detection of SNP TSC0051523
tccaaacttttta

SEQ ID NO: 211155 - DNA, 13 bp, Artificial Sequence
  Oligonucleotide for detection of SNP TSC0051523
tttagagttttta

SEQ ID NO: 211156 - DNA, 13 bp, Artificial Sequence
  Oligonucleotide for detection of SNP TSC0051523
taaaaactctaaa

SEQ ID NO: 211157 - DNA, 13 bp, Artificial Sequence
  Oligonucleotide for detection of SNP TSC0051523
tttagatttttta

SEQ ID NO: 211158 - DNA, 13 bp, Artificial Sequence
  Oligonucleotide for detection of SNP TSC0051523
taaaaaatctaaa

SEQ ID NO: 211159 - DNA, 13 bp, Artificial Sequence
  Oligonucleotide for detection of SNP TSC0051524
agagtaagtgata

SEQ ID NO: 211160 - DNA, 13 bp, Artificial Sequence
  Oligonucleotide for detection of SNP TSC0051524
tatcacttactct

SEQ ID NO: 211161 - DNA, 13 bp, Artificial Sequence
  Oligonucleotide for detection of SNP TSC0051524
agagtaggtgata

SEQ ID NO: 211162 - DNA, 13 bp, Artificial Sequence
  Oligonucleotide for detection of SNP TSC0051524
tatcacctactct

SEQ ID NO: 211163 - DNA, 13 bp, Artificial Sequence
  Oligonucleotide for detection of SNP TSC0051525
gttttttaggggt

SEQ ID NO: 211164 - DNA, 13 bp, Artificial Sequence
  Oligonucleotide for detection of SNP TSC0051525
acccctaaaaaac

SEQ ID NO: 211165 - DNA, 13 bp, Artificial Sequence
  Oligonucleotide for detection of SNP TSC0051525
gtttttgaggggt

SEQ ID NO: 211166 - DNA, 13 bp, Artificial Sequence
  Oligonucleotide for detection of SNP TSC0051525
acccctcaaaaac

SEQ ID NO: 211167 - DNA, 13 bp, Artificial Sequence
  Oligonucleotide for detection of SNP TSC0051525
atttttgaaaggy

SEQ ID NO: 211168 - DNA, 13 bp, Artificial Sequence
  Oligonucleotide for detection of SNP TSC0051525
rcctttcaaaaat

SEQ ID NO: 211169 - DNA, 13 bp, Artificial Sequence
  Oligonucleotide for detection of SNP TSC0051525
attttttaaaggy

SEQ ID NO: 211170 - DNA, 13 bp, Artificial Sequence
  Oligonucleotide for detection of SNP TSC0051525
rcctttaaaaaat

SEQ ID NO: 211171 - DNA, 13 bp, Artificial Sequence
  Oligonucleotide for detection of SNP TSC0051526
attgttatgtttt

SEQ ID NO: 211172 - DNA, 13 bp, Artificial Sequence
  Oligonucleotide for detection of SNP TSC0051526
aaaacataacaat

SEQ ID NO: 211173 - DNA, 13 bp, Artificial Sequence
  Oligonucleotide for detection of SNP TSC0051526
attgttgtgtttt

SEQ ID NO: 211174 - DNA, 13 bp, Artificial Sequence
  Oligonucleotide for detection of SNP TSC0051526
aaaacacaacaat

SEQ ID NO: 211175 - DNA, 13 bp, Artificial Sequence
  Oligonucleotide for detection of SNP TSC0051526
attgtcgtgtttt

SEQ ID NO: 211176 - DNA, 13 bp, Artificial Sequence
  Oligonucleotide for detection of SNP TSC0051526
aaaacacgacaat

SEQ ID NO: 211177 - DNA, 13 bp, Artificial Sequence
  Oligonucleotide for detection of SNP TSC0051526
aagatatggtaat

SEQ ID NO: 211178 - DNA, 13 bp, Artificial Sequence
  Oligonucleotide for detection of SNP TSC0051526
attaccatatctt

SEQ ID NO: 211179 - DNA, 13 bp, Artificial Sequence
  Oligonucleotide for detection of SNP TSC0051526
aagatacggtaat

SEQ ID NO: 211180 - DNA, 13 bp, Artificial Sequence
  Oligonucleotide for detection of SNP TSC0051526
attaccgtatctt

SEQ ID NO: 211181 - DNA, 13 bp, Artificial Sequence
  Oligonucleotide for detection of SNP TSC0051527
tatgaaatagaga

SEQ ID NO: 211182 - DNA, 13 bp, Artificial Sequence
  Oligonucleotide for detection of SNP TSC0051527
tctctatttcata

SEQ ID NO: 211183 - DNA, 13 bp, Artificial Sequence
  Oligonucleotide for detection of SNP TSC0051527
tatgaagtagaga

SEQ ID NO: 211184 - DNA, 13 bp, Artificial Sequence
  Oligonucleotide for detection of SNP TSC0051527
tctctacttcata

SEQ ID NO: 211185 - DNA, 13 bp, Artificial Sequence
  Oligonucleotide for detection of SNP TSC0051528
tatgtgtagatay

SEQ ID NO: 211186 - DNA, 13 bp, Artificial Sequence
  Oligonucleotide for detection of SNP TSC0051528
rtatctacacata

SEQ ID NO: 211187 - DNA, 13 bp, Artificial Sequence
  Oligonucleotide for detection of SNP TSC0051528
tatgtggagatay

SEQ ID NO: 211188 - DNA, 13 bp, Artificial Sequence
  Oligonucleotide for detection of SNP TSC0051528
rtatctccacata

SEQ ID NO: 211189 - DNA, 13 bp, Artificial Sequence
  Oligonucleotide for detection of SNP TSC0051528
gtgtttatatata

SEQ ID NO: 211190 - DNA, 13 bp, Artificial Sequence
  Oligonucleotide for detection of SNP TSC0051528
tatatataaacac

SEQ ID NO: 211191 - DNA, 13 bp, Artificial Sequence
  Oligonucleotide for detection of SNP TSC0051528
gtgtttttatata

SEQ ID NO: 211192 - DNA, 13 bp, Artificial Sequence
  Oligonucleotide for detection of SNP TSC0051528
tatataaaaacac

SEQ ID NO: 211193 - DNA, 13 bp, Artificial Sequence
  Oligonucleotide for detection of SNP TSC0051529
tataagtgaaaty

SEQ ID NO: 211194 - DNA, 13 bp, Artificial Sequence
  Oligonucleotide for detection of SNP TSC0051529
ratttcacttata

SEQ ID NO: 211195 - DNA, 13 bp, Artificial Sequence
  Oligonucleotide for detection of SNP TSC0051529
tataagcgaaaty

SEQ ID NO: 211196 - DNA, 13 bp, Artificial Sequence
  Oligonucleotide for detection of SNP TSC0051529
ratttcgcttata

SEQ ID NO: 211197 - DNA, 13 bp, Artificial Sequence
  Oligonucleotide for detection of SNP TSC0051529
ggttttatttata

SEQ ID NO: 211198 - DNA, 13 bp, Artificial Sequence
  Oligonucleotide for detection of SNP TSC0051529
tataaataaaacc

SEQ ID NO: 211199 - DNA, 13 bp, Artificial Sequence
  Oligonucleotide for detection of SNP TSC0051529
ggtttcgtttata

SEQ ID NO: 211200 - DNA, 13 bp, Artificial Sequence
  Oligonucleotide for detection of SNP TSC0051529
tataaacgaaacc

SEQ ID NO: 211201 - DNA, 13 bp, Artificial Sequence
  Oligonucleotide for detection of SNP TSC0051530
tttgtagatagat

SEQ ID NO: 211202 - DNA, 13 bp, Artificial Sequence
  Oligonucleotide for detection of SNP TSC0051530
atctatctacaaa

SEQ ID NO: 211203 - DNA, 13 bp, Artificial Sequence
  Oligonucleotide for detection of SNP TSC0051530
tttgtaaatagat

SEQ ID NO: 211204 - DNA, 13 bp, Artificial Sequence
  Oligonucleotide for detection of SNP TSC0051530
atctatttacaaa

SEQ ID NO: 211205 - DNA, 13 bp, Artificial Sequence
  Oligonucleotide for detection of SNP TSC0051531
aaatttaggtttt

SEQ ID NO: 211206 - DNA, 13 bp, Artificial Sequence
  Oligonucleotide for detection of SNP TSC0051531
aaaacctaaattt

SEQ ID NO: 211207 - DNA, 13 bp, Artificial Sequence
  Oligonucleotide for detection of SNP TSC0051531
aaatttgggtttt

SEQ ID NO: 211208 - DNA, 13 bp, Artificial Sequence
  Oligonucleotide for detection of SNP TSC0051531
aaaacccaaattt

SEQ ID NO: 211209 - DNA, 13 bp, Artificial Sequence
  Oligonucleotide for detection of SNP TSC0051531
aaattcgggtttt

SEQ ID NO: 211210 - DNA, 13 bp, Artificial Sequence
  Oligonucleotide for detection of SNP TSC0051531
aaaacccgaattt

SEQ ID NO: 211211 - DNA, 13 bp, Artificial Sequence
  Oligonucleotide for detection of SNP TSC0051531
agagtttgaattt

SEQ ID NO: 211212 - DNA, 13 bp, Artificial Sequence
  Oligonucleotide for detection of SNP TSC0051531
aaattcaaactct

SEQ ID NO: 211213 - DNA, 13 bp, Artificial Sequence
  Oligonucleotide for detection of SNP TSC0051531
agagttcgaattt

SEQ ID NO: 211214 - DNA, 13 bp, Artificial Sequence
  Oligonucleotide for detection of SNP TSC0051531
aaattcgaactct

SEQ ID NO: 211215 - DNA, 13 bp, Artificial Sequence
  Oligonucleotide for detection of SNP TSC0051533
gaagaagatggtt

SEQ ID NO: 211216 - DNA, 13 bp, Artificial Sequence
  Oligonucleotide for detection of SNP TSC0051533
aaccatcttcttc

SEQ ID NO: 211217 - DNA, 13 bp, Artificial Sequence
  Oligonucleotide for detection of SNP TSC0051533
gaagaaaatggtt

SEQ ID NO: 211218 - DNA, 13 bp, Artificial Sequence
  Oligonucleotide for detection of SNP TSC0051533
aaccattttcttc

SEQ ID NO: 211219 - DNA, 13 bp, Artificial Sequence
  Oligonucleotide for detection of SNP TSC0051534
tatttcgttattt

SEQ ID NO: 211220 - DNA, 13 bp, Artificial Sequence
  Oligonucleotide for detection of SNP TSC0051534
aaataacgaaata

SEQ ID NO: 211221 - DNA, 13 bp, Artificial Sequence
  Oligonucleotide for detection of SNP TSC0051534
aaataatgaaata

SEQ ID NO: 211222 - DNA, 13 bp, Artificial Sequence
  Oligonucleotide for detection of SNP TSC0051534
tatttcattattt

SEQ ID NO: 211223 - DNA, 13 bp, Artificial Sequence
  Oligonucleotide for detection of SNP TSC0051535
tgagaaatttttg

SEQ ID NO: 211224 - DNA, 13 bp, Artificial Sequence
  Oligonucleotide for detection of SNP TSC0051535
caaaaatttctca

SEQ ID NO: 211225 - DNA, 13 bp, Artificial Sequence
  Oligonucleotide for detection of SNP TSC0051535
tgagaagtttttg

SEQ ID NO: 211226 - DNA, 13 bp, Artificial Sequence
  Oligonucleotide for detection of SNP TSC0051535
caaaaacttctca

SEQ ID NO: 211227 - DNA, 13 bp, Artificial Sequence
  Oligonucleotide for detection of SNP TSC0051536
tagtgtgtgtaat

SEQ ID NO: 211228 - DNA, 13 bp, Artificial Sequence
  Oligonucleotide for detection of SNP TSC0051536
attacacacacta

SEQ ID NO: 211229 - DNA, 13 bp, Artificial Sequence
  Oligonucleotide for detection of SNP TSC0051536
tagtgtatgtaat

SEQ ID NO: 211230 - DNA, 13 bp, Artificial Sequence
  Oligonucleotide for detection of SNP TSC0051536
attacatacacta

SEQ ID NO: 211231 - DNA, 13 bp, Artificial Sequence
  Oligonucleotide for detection of SNP TSC0051538
aaatattgtttat

SEQ ID NO: 211232 - DNA, 13 bp, Artificial Sequence
  Oligonucleotide for detection of SNP TSC0051538
ataaacaatattt

SEQ ID NO: 211233 - DNA, 13 bp, Artificial Sequence
  Oligonucleotide for detection of SNP TSC0051538
aaatatggtttat

SEQ ID NO: 211234 - DNA, 13 bp, Artificial Sequence
  Oligonucleotide for detection of SNP TSC0051538
ataaaccatattt

SEQ ID NO: 211235 - DNA, 13 bp, Artificial Sequence
  Oligonucleotide for detection of SNP TSC0051538
aaatatcgtttat

SEQ ID NO: 211236 - DNA, 13 bp, Artificial Sequence
  Oligonucleotide for detection of SNP TSC0051538
ataaacgatattt

SEQ ID NO: 211237 - DNA, 13 bp, Artificial Sequence
  Oligonucleotide for detection of SNP TSC0051538
atgaatgatgttt

SEQ ID NO: 211238 - DNA, 13 bp, Artificial Sequence
  Oligonucleotide for detection of SNP TSC0051538
aaacatcattcat

SEQ ID NO: 211239 - DNA, 13 bp, Artificial Sequence
  Oligonucleotide for detection of SNP TSC0051538
atgaattatgttt

SEQ ID NO: 211240 - DNA, 13 bp, Artificial Sequence
  Oligonucleotide for detection of SNP TSC0051538
aaacataattcat

SEQ ID NO: 211241 - DNA, 13 bp, Artificial Sequence
  Oligonucleotide for detection of SNP TSC0051538
atgaacgatgttt

SEQ ID NO: 211242 - DNA, 13 bp, Artificial Sequence
  Oligonucleotide for detection of SNP TSC0051538
aaacatcgttcat

SEQ ID NO: 211243 - DNA, 13 bp, Artificial Sequence
  Oligonucleotide for detection of SNP TSC0051539
taaaggatgtatg

SEQ ID NO: 211244 - DNA, 13 bp, Artificial Sequence
  Oligonucleotide for detection of SNP TSC0051539
catacatccttta

SEQ ID NO: 211245 - DNA, 13 bp, Artificial Sequence
  Oligonucleotide for detection of SNP TSC0051539
taaagggtgtatg

SEQ ID NO: 211246 - DNA, 13 bp, Artificial Sequence
  Oligonucleotide for detection of SNP TSC0051539
catacacccttta

SEQ ID NO: 211247 - DNA, 13 bp, Artificial Sequence
  Oligonucleotide for detection of SNP TSC0008283
atgcgtattttty

SEQ ID NO: 211248 - DNA, 13 bp, Artificial Sequence
  Oligonucleotide for detection of SNP TSC0008283
raaaaatacgcat

SEQ ID NO: 211249 - DNA, 13 bp, Artificial Sequence
  Oligonucleotide for detection of SNP TSC0008283
atgcgtgttttty

SEQ ID NO: 211250 - DNA, 13 bp, Artificial Sequence
  Oligonucleotide for detection of SNP TSC0008283
raaaaacacgcat

SEQ ID NO: 211251 - DNA, 13 bp, Artificial Sequence
  Oligonucleotide for detection of SNP TSC0008283
acgcgtattttty

SEQ ID NO: 211252 - DNA, 13 bp, Artificial Sequence
  Oligonucleotide for detection of SNP TSC0008283
raaaaatacgcgt

SEQ ID NO: 211253 - DNA, 13 bp, Artificial Sequence
  Oligonucleotide for detection of SNP TSC0008283
acgcgtgttttty

SEQ ID NO: 211254 - DNA, 13 bp, Artificial Sequence
  Oligonucleotide for detection of SNP TSC0008283
raaaaacacgcgt

SEQ ID NO: 211255 - DNA, 13 bp, Artificial Sequence
  Oligonucleotide for detection of SNP TSC0008283
atgcgcgttttty

SEQ ID NO: 211256 - DNA, 13 bp, Artificial Sequence
  Oligonucleotide for detection of SNP TSC0008283
raaaaacgcgcat

SEQ ID NO: 211257 - DNA, 13 bp, Artificial Sequence
  Oligonucleotide for detection of SNP TSC0008283
acgcgcgttttty

SEQ ID NO: 211258 - DNA, 13 bp, Artificial Sequence
  Oligonucleotide for detection of SNP TSC0008283
raaaaacgcgcgt

SEQ ID NO: 211259 - DNA, 13 bp, Artificial Sequence
  Oligonucleotide for detection of SNP TSC0008283
ggggagtgtgtgt

SEQ ID NO: 211260 - DNA, 13 bp, Artificial Sequence
  Oligonucleotide for detection of SNP TSC0008283
acacacactcccc

SEQ ID NO: 211261 - DNA, 13 bp, Artificial Sequence
  Oligonucleotide for detection of SNP TSC0008283
ggggagtgcgtgt

SEQ ID NO: 211262 - DNA, 13 bp, Artificial Sequence
  Oligonucleotide for detection of SNP TSC0008283
acacgcactcccc

SEQ ID NO: 211263 - DNA, 13 bp, Artificial Sequence
  Oligonucleotide for detection of SNP TSC0008283
ggggagcgtgtgt

SEQ ID NO: 211264 - DNA, 13 bp, Artificial Sequence
  Oligonucleotide for detection of SNP TSC0008283
acacacgctcccc

SEQ ID NO: 211265 - DNA, 13 bp, Artificial Sequence
  Oligonucleotide for detection of SNP TSC0008283
ggggagtgtgcgt

SEQ ID NO: 211266 - DNA, 13 bp, Artificial Sequence
  Oligonucleotide for detection of SNP TSC0008283
acgcacactcccc

SEQ ID NO: 211267 - DNA, 13 bp, Artificial Sequence
  Oligonucleotide for detection of SNP TSC0008283
ggggagtgcgcgt

SEQ ID NO: 211268 - DNA, 13 bp, Artificial Sequence
  Oligonucleotide for detection of SNP TSC0008283
acgcgcactcccc

SEQ ID NO: 211269 - DNA, 13 bp, Artificial Sequence
  Oligonucleotide for detection of SNP TSC0008283
ggggagcgcgtgt

SEQ ID NO: 211270 - DNA, 13 bp, Artificial Sequence
  Oligonucleotide for detection of SNP TSC0008283
acacgcgctcccc

SEQ ID NO: 211271 - DNA, 13 bp, Artificial Sequence
  Oligonucleotide for detection of SNP TSC0008283
ggggagcgtgcgt

SEQ ID NO: 211272 - DNA, 13 bp, Artificial Sequence
  Oligonucleotide for detection of SNP TSC0008283
acgcacgctcccc

SEQ ID NO: 211273 - DNA, 13 bp, Artificial Sequence
  Oligonucleotide for detection of SNP TSC0008283
ggggagcgcgcgt

SEQ ID NO: 211274 - DNA, 13 bp, Artificial Sequence
  Oligonucleotide for detection of SNP TSC0008283
acgcgcgctcccc

SEQ ID NO: 211275 - DNA, 13 bp, Artificial Sequence
  Oligonucleotide for detection of SNP TSC0051541
tattttagaatga

SEQ ID NO: 211276 - DNA, 13 bp, Artificial Sequence
  Oligonucleotide for detection of SNP TSC0051541
tcattctaaaata

SEQ ID NO: 211277 - DNA, 13 bp, Artificial Sequence
  Oligonucleotide for detection of SNP TSC0051541
tatttttgaatga

SEQ ID NO: 211278 - DNA, 13 bp, Artificial Sequence
  Oligonucleotide for detection of SNP TSC0051541
tcattcaaaaata

SEQ ID NO: 211279 - DNA, 13 bp, Artificial Sequence
  Oligonucleotide for detection of SNP TSC0051541
ttatttaagggta

SEQ ID NO: 211280 - DNA, 13 bp, Artificial Sequence
  Oligonucleotide for detection of SNP TSC0051541
tacccttaaataa

SEQ ID NO: 211281 - DNA, 13 bp, Artificial Sequence
  Oligonucleotide for detection of SNP TSC0051542
tttggttgttgga

SEQ ID NO: 211282 - DNA, 13 bp, Artificial Sequence
  Oligonucleotide for detection of SNP TSC0051542
tccaacaaccaaa

SEQ ID NO: 211283 - DNA, 13 bp, Artificial Sequence
  Oligonucleotide for detection of SNP TSC0051542
tttggtcgttgga

SEQ ID NO: 211284 - DNA, 13 bp, Artificial Sequence
  Oligonucleotide for detection of SNP TSC0051542
tccaacgaccaaa

SEQ ID NO: 211285 - DNA, 13 bp, Artificial Sequence
  Oligonucleotide for detection of SNP TSC0051542
tttggttgtcgga

SEQ ID NO: 211286 - DNA, 13 bp, Artificial Sequence
  Oligonucleotide for detection of SNP TSC0051542
tccgacaaccaaa

SEQ ID NO: 211287 - DNA, 13 bp, Artificial Sequence
  Oligonucleotide for detection of SNP TSC0051542
tttggtcgtcgga

SEQ ID NO: 211288 - DNA, 13 bp, Artificial Sequence
  Oligonucleotide for detection of SNP TSC0051542
tccgacgaccaaa

SEQ ID NO: 211289 - DNA, 13 bp, Artificial Sequence
  Oligonucleotide for detection of SNP TSC0051542
tttggtggttaag

SEQ ID NO: 211290 - DNA, 13 bp, Artificial Sequence
  Oligonucleotide for detection of SNP TSC0051542
cttaaccaccaaa

SEQ ID NO: 211291 - DNA, 13 bp, Artificial Sequence
  Oligonucleotide for detection of SNP TSC0051542
tttggtagttaag

SEQ ID NO: 211292 - DNA, 13 bp, Artificial Sequence
  Oligonucleotide for detection of SNP TSC0051542
cttaactaccaaa

SEQ ID NO: 211293 - DNA, 13 bp, Artificial Sequence
  Oligonucleotide for detection of SNP TSC0051542
ttcggtggttaag

SEQ ID NO: 211294 - DNA, 13 bp, Artificial Sequence
  Oligonucleotide for detection of SNP TSC0051542
cttaaccaccgaa

SEQ ID NO: 211295 - DNA, 13 bp, Artificial Sequence
  Oligonucleotide for detection of SNP TSC0051542
ttcggtagttaag

SEQ ID NO: 211296 - DNA, 13 bp, Artificial Sequence
  Oligonucleotide for detection of SNP TSC0051542
cttaactaccgaa

SEQ ID NO: 211297 - DNA, 13 bp, Artificial Sequence
  Oligonucleotide for detection of SNP TSC0051542
tttggcggttaag

SEQ ID NO: 211298 - DNA, 13 bp, Artificial Sequence
  Oligonucleotide for detection of SNP TSC0051542
cttaaccgccaaa

SEQ ID NO: 211299 - DNA, 13 bp, Artificial Sequence
  Oligonucleotide for detection of SNP TSC0051542
ttcggcggttaag

SEQ ID NO: 211300 - DNA, 13 bp, Artificial Sequence
  Oligonucleotide for detection of SNP TSC0051542
cttaaccgccgaa

SEQ ID NO: 211301 - DNA, 13 bp, Artificial Sequence
  Oligonucleotide for detection of SNP TSC0051543
tgggagaagaagy

SEQ ID NO: 211302 - DNA, 13 bp, Artificial Sequence
  Oligonucleotide for detection of SNP TSC0051543
rcttcttctccca

SEQ ID NO: 211303 - DNA, 13 bp, Artificial Sequence
  Oligonucleotide for detection of SNP TSC0051543
tgggaggagaagy

SEQ ID NO: 211304 - DNA, 13 bp, Artificial Sequence
  Oligonucleotide for detection of SNP TSC0051543
rcttctcctccca

SEQ ID NO: 211305 - DNA, 13 bp, Artificial Sequence
  Oligonucleotide for detection of SNP TSC0051544
tgaaaagatatta

SEQ ID NO: 211306 - DNA, 13 bp, Artificial Sequence
  Oligonucleotide for detection of SNP TSC0051544
taatatcttttca

SEQ ID NO: 211307 - DNA, 13 bp, Artificial Sequence
  Oligonucleotide for detection of SNP TSC0051544
tgaaaaaatatta

SEQ ID NO: 211308 - DNA, 13 bp, Artificial Sequence
  Oligonucleotide for detection of SNP TSC0051544
taatattttttca

SEQ ID NO: 211309 - DNA, 13 bp, Artificial Sequence
  Oligonucleotide for detection of SNP TSC0051547
tagagaaaaatgt

SEQ ID NO: 211310 - DNA, 13 bp, Artificial Sequence
  Oligonucleotide for detection of SNP TSC0051547
acatttttctcta

SEQ ID NO: 211311 - DNA, 13 bp, Artificial Sequence
  Oligonucleotide for detection of SNP TSC0051547
tagagataaatgt

SEQ ID NO: 211312 - DNA, 13 bp, Artificial Sequence
  Oligonucleotide for detection of SNP TSC0051547
acatttatctcta

SEQ ID NO: 211313 - DNA, 13 bp, Artificial Sequence
  Oligonucleotide for detection of SNP TSC0051547
atatttttttttg

SEQ ID NO: 211314 - DNA, 13 bp, Artificial Sequence
  Oligonucleotide for detection of SNP TSC0051547
caaaaaaaaatat

SEQ ID NO: 211315 - DNA, 13 bp, Artificial Sequence
  Oligonucleotide for detection of SNP TSC0051547
atatttgtttttg

SEQ ID NO: 211316 - DNA, 13 bp, Artificial Sequence
  Oligonucleotide for detection of SNP TSC0051547
caaaaacaaatat

SEQ ID NO: 211317 - DNA, 13 bp, Artificial Sequence
  Oligonucleotide for detection of SNP TSC0051553
agagtttgtttty

SEQ ID NO: 211318 - DNA, 13 bp, Artificial Sequence
  Oligonucleotide for detection of SNP TSC0051553
raaaacaaactct

SEQ ID NO: 211319 - DNA, 13 bp, Artificial Sequence
  Oligonucleotide for detection of SNP TSC0051553
agagttggtttty

SEQ ID NO: 211320 - DNA, 13 bp, Artificial Sequence
  Oligonucleotide for detection of SNP TSC0051553
raaaaccaactct

SEQ ID NO: 211321 - DNA, 13 bp, Artificial Sequence
  Oligonucleotide for detection of SNP TSC0051553
gaaagtaaatttt

SEQ ID NO: 211322 - DNA, 13 bp, Artificial Sequence
  Oligonucleotide for detection of SNP TSC0051553
aaaatttactttc

SEQ ID NO: 211323 - DNA, 13 bp, Artificial Sequence
  Oligonucleotide for detection of SNP TSC0051553
gaaagttaatttt

SEQ ID NO: 211324 - DNA, 13 bp, Artificial Sequence
  Oligonucleotide for detection of SNP TSC0051553
aaaattaactttc

SEQ ID NO: 211325 - DNA, 13 bp, Artificial Sequence
  Oligonucleotide for detection of SNP TSC0051555
taatataatgaaa

SEQ ID NO: 211326 - DNA, 13 bp, Artificial Sequence
  Oligonucleotide for detection of SNP TSC0051555
tttcattatatta

SEQ ID NO: 211327 - DNA, 13 bp, Artificial Sequence
  Oligonucleotide for detection of SNP TSC0051555
taatatgatgaaa

SEQ ID NO: 211328 - DNA, 13 bp, Artificial Sequence
  Oligonucleotide for detection of SNP TSC0051555
tttcatcatatta

SEQ ID NO: 211329 - DNA, 13 bp, Artificial Sequence
  Oligonucleotide for detection of SNP TSC0051559
aatatataagtgt

SEQ ID NO: 211330 - DNA, 13 bp, Artificial Sequence
  Oligonucleotide for detection of SNP TSC0051559
acacttatatatt

SEQ ID NO: 211331 - DNA, 13 bp, Artificial Sequence
  Oligonucleotide for detection of SNP TSC0051559
atatttttatgtt

SEQ ID NO: 211332 - DNA, 13 bp, Artificial Sequence
  Oligonucleotide for detection of SNP TSC0051559
aacataaaaatat

SEQ ID NO: 211333 - DNA, 13 bp, Artificial Sequence
  Oligonucleotide for detection of SNP TSC0051560
ttttataagattg

SEQ ID NO: 211334 - DNA, 13 bp, Artificial Sequence
  Oligonucleotide for detection of SNP TSC0051560
caatcttataaaa

SEQ ID NO: 211335 - DNA, 13 bp, Artificial Sequence
  Oligonucleotide for detection of SNP TSC0051560
ttttatgagattg

SEQ ID NO: 211336 - DNA, 13 bp, Artificial Sequence
  Oligonucleotide for detection of SNP TSC0051560
caatctcataaaa

SEQ ID NO: 211337 - DNA, 13 bp, Artificial Sequence
  Oligonucleotide for detection of SNP TSC0051563
tgtttatgttaga

SEQ ID NO: 211338 - DNA, 13 bp, Artificial Sequence
  Oligonucleotide for detection of SNP TSC0051563
tctaacataaaca

SEQ ID NO: 211339 - DNA, 13 bp, Artificial Sequence
  Oligonucleotide for detection of SNP TSC0051563
tgtttaggttaga

SEQ ID NO: 211340 - DNA, 13 bp, Artificial Sequence
  Oligonucleotide for detection of SNP TSC0051563
tctaacctaaaca

SEQ ID NO: 211341 - DNA, 13 bp, Artificial Sequence
  Oligonucleotide for detection of SNP TSC0051563
tgtttacgttaga

SEQ ID NO: 211342 - DNA, 13 bp, Artificial Sequence
  Oligonucleotide for detection of SNP TSC0051563
tctaacgtaaaca

SEQ ID NO: 211343 - DNA, 13 bp, Artificial Sequence
  Oligonucleotide for detection of SNP TSC0051563
tttgatgtagata

SEQ ID NO: 211344 - DNA, 13 bp, Artificial Sequence
  Oligonucleotide for detection of SNP TSC0051563
tatctacatcaaa

SEQ ID NO: 211345 - DNA, 13 bp, Artificial Sequence
  Oligonucleotide for detection of SNP TSC0051563
tttgatttagata

SEQ ID NO: 211346 - DNA, 13 bp, Artificial Sequence
  Oligonucleotide for detection of SNP TSC0051563
tatctaaatcaaa

SEQ ID NO: 211347 - DNA, 13 bp, Artificial Sequence
  Oligonucleotide for detection of SNP TSC0051563
tttgacgtagata

SEQ ID NO: 211348 - DNA, 13 bp, Artificial Sequence
  Oligonucleotide for detection of SNP TSC0051563
tatctacgtcaaa

SEQ ID NO: 211349 - DNA, 13 bp, Artificial Sequence
  Oligonucleotide for detection of SNP TSC0051564
gatggtatataaa

SEQ ID NO: 211350 - DNA, 13 bp, Artificial Sequence
  Oligonucleotide for detection of SNP TSC0051564
tttatataccatc

SEQ ID NO: 211351 - DNA, 13 bp, Artificial Sequence
  Oligonucleotide for detection of SNP TSC0051564
gatggtttataaa

SEQ ID NO: 211352 - DNA, 13 bp, Artificial Sequence
  Oligonucleotide for detection of SNP TSC0051564
tttataaaccatc

SEQ ID NO: 211353 - DNA, 13 bp, Artificial Sequence
  Oligonucleotide for detection of SNP TSC0051564
tttatgtattaty

SEQ ID NO: 211354 - DNA, 13 bp, Artificial Sequence
  Oligonucleotide for detection of SNP TSC0051564
rataatacataaa

SEQ ID NO: 211355 - DNA, 13 bp, Artificial Sequence
  Oligonucleotide for detection of SNP TSC0051564
tttatgaattaty

SEQ ID NO: 211356 - DNA, 13 bp, Artificial Sequence
  Oligonucleotide for detection of SNP TSC0051564
rataattcataaa

SEQ ID NO: 211357 - DNA, 13 bp, Artificial Sequence
  Oligonucleotide for detection of SNP TSC0000292
aagttaatatagt

SEQ ID NO: 211358 - DNA, 13 bp, Artificial Sequence
  Oligonucleotide for detection of SNP TSC0000292
actatattaactt

SEQ ID NO: 211359 - DNA, 13 bp, Artificial Sequence
  Oligonucleotide for detection of SNP TSC0000292
aagttagtatagt

SEQ ID NO: 211360 - DNA, 13 bp, Artificial Sequence
  Oligonucleotide for detection of SNP TSC0000292
actatactaactt

SEQ ID NO: 211361 - DNA, 13 bp, Artificial Sequence
  Oligonucleotide for detection of SNP TSC0051565
gtgggagagagtg

SEQ ID NO: 211362 - DNA, 13 bp, Artificial Sequence
  Oligonucleotide for detection of SNP TSC0051565
cactctctcccac

SEQ ID NO: 211363 - DNA, 13 bp, Artificial Sequence
  Oligonucleotide for detection of SNP TSC0051565
gtgggatagagtg

SEQ ID NO: 211364 - DNA, 13 bp, Artificial Sequence
  Oligonucleotide for detection of SNP TSC0051565
cactctatcccac

SEQ ID NO: 211365 - DNA, 13 bp, Artificial Sequence
  Oligonucleotide for detection of SNP TSC0051566
gttttagaattat

SEQ ID NO: 211366 - DNA, 13 bp, Artificial Sequence
  Oligonucleotide for detection of SNP TSC0051566
ataattctaaaac

SEQ ID NO: 211367 - DNA, 13 bp, Artificial Sequence
  Oligonucleotide for detection of SNP TSC0051566
gttttaaaattat

SEQ ID NO: 211368 - DNA, 13 bp, Artificial Sequence
  Oligonucleotide for detection of SNP TSC0051566
ataattttaaaac

SEQ ID NO: 211369 - DNA, 13 bp, Artificial Sequence
  Oligonucleotide for detection of SNP TSC0051567
attggtattaatt

SEQ ID NO: 211370 - DNA, 13 bp, Artificial Sequence
  Oligonucleotide for detection of SNP TSC0051567
aattaataccaat

SEQ ID NO: 211371 - DNA, 13 bp, Artificial Sequence
  Oligonucleotide for detection of SNP TSC0051567
attggtgttaatt

SEQ ID NO: 211372 - DNA, 13 bp, Artificial Sequence
  Oligonucleotide for detection of SNP TSC0051567
aattaacaccaat

SEQ ID NO: 211373 - DNA, 13 bp, Artificial Sequence
  Oligonucleotide for detection of SNP TSC0051567
attggcgttaatt

SEQ ID NO: 211374 - DNA, 13 bp, Artificial Sequence
  Oligonucleotide for detection of SNP TSC0051567
aattaacgccaat

SEQ ID NO: 211375 - DNA, 13 bp, Artificial Sequence
  Oligonucleotide for detection of SNP TSC0051567
agttgatgttaat

SEQ ID NO: 211376 - DNA, 13 bp, Artificial Sequence
  Oligonucleotide for detection of SNP TSC0051567
attaacatcaact

SEQ ID NO: 211377 - DNA, 13 bp, Artificial Sequence
  Oligonucleotide for detection of SNP TSC0051567
agttgacgttaat

SEQ ID NO: 211378 - DNA, 13 bp, Artificial Sequence
  Oligonucleotide for detection of SNP TSC0051567
attaacgtcaact

SEQ ID NO: 211379 - DNA, 13 bp, Artificial Sequence
  Oligonucleotide for detection of SNP TSC0051568
gtaaaattatgtt

SEQ ID NO: 211380 - DNA, 13 bp, Artificial Sequence
  Oligonucleotide for detection of SNP TSC0051568
aacataattttac

SEQ ID NO: 211381 - DNA, 13 bp, Artificial Sequence
  Oligonucleotide for detection of SNP TSC0051568
gtaaaagtatgtt

SEQ ID NO: 211382 - DNA, 13 bp, Artificial Sequence
  Oligonucleotide for detection of SNP TSC0051568
aacatacttttac

SEQ ID NO: 211383 - DNA, 13 bp, Artificial Sequence
  Oligonucleotide for detection of SNP TSC0051568
agtatggttttay

SEQ ID NO: 211384 - DNA, 13 bp, Artificial Sequence
  Oligonucleotide for detection of SNP TSC0051568
rtaaaaccatact

SEQ ID NO: 211385 - DNA, 13 bp, Artificial Sequence
  Oligonucleotide for detection of SNP TSC0051568
agtatgtttttay

SEQ ID NO: 211386 - DNA, 13 bp, Artificial Sequence
  Oligonucleotide for detection of SNP TSC0051568
rtaaaaacatact

SEQ ID NO: 211387 - DNA, 13 bp, Artificial Sequence
  Oligonucleotide for detection of SNP TSC0051569
gtatggtataagt

SEQ ID NO: 211388 - DNA, 13 bp, Artificial Sequence
  Oligonucleotide for detection of SNP TSC0051569
acttataccatac

SEQ ID NO: 211389 - DNA, 13 bp, Artificial Sequence
  Oligonucleotide for detection of SNP TSC0051569
gtatgggataagt

SEQ ID NO: 211390 - DNA, 13 bp, Artificial Sequence
  Oligonucleotide for detection of SNP TSC0051569
acttatcccatac

SEQ ID NO: 211391 - DNA, 13 bp, Artificial Sequence
  Oligonucleotide for detection of SNP TSC0051569
atttgtattatgy

SEQ ID NO: 211392 - DNA, 13 bp, Artificial Sequence
  Oligonucleotide for detection of SNP TSC0051569
rcataatacaaat

SEQ ID NO: 211393 - DNA, 13 bp, Artificial Sequence
  Oligonucleotide for detection of SNP TSC0051569
atttgttttatgy

SEQ ID NO: 211394 - DNA, 13 bp, Artificial Sequence
  Oligonucleotide for detection of SNP TSC0051569
rcataaaacaaat

SEQ ID NO: 211395 - DNA, 13 bp, Artificial Sequence
  Oligonucleotide for detection of SNP TSC0051570
ttggatgggtaag

SEQ ID NO: 211396 - DNA, 13 bp, Artificial Sequence
  Oligonucleotide for detection of SNP TSC0051570
cttacccatccaa

SEQ ID NO: 211397 - DNA, 13 bp, Artificial Sequence
  Oligonucleotide for detection of SNP TSC0051570
ttggataggtaag

SEQ ID NO: 211398 - DNA, 13 bp, Artificial Sequence
  Oligonucleotide for detection of SNP TSC0051570
cttacctatccaa

SEQ ID NO: 211399 - DNA, 13 bp, Artificial Sequence
  Oligonucleotide for detection of SNP TSC0051571
atatagtgaagty

SEQ ID NO: 211400 - DNA, 13 bp, Artificial Sequence
  Oligonucleotide for detection of SNP TSC0051571
racttcactatat

SEQ ID NO: 211401 - DNA, 13 bp, Artificial Sequence
  Oligonucleotide for detection of SNP TSC0051571
atatagcgaagty

SEQ ID NO: 211402 - DNA, 13 bp, Artificial Sequence
  Oligonucleotide for detection of SNP TSC0051571
racttcgctatat

SEQ ID NO: 211403 - DNA, 13 bp, Artificial Sequence
  Oligonucleotide for detection of SNP TSC0051571
gattttgttgtat

SEQ ID NO: 211404 - DNA, 13 bp, Artificial Sequence
  Oligonucleotide for detection of SNP TSC0051571
atacaacaaaatc

SEQ ID NO: 211405 - DNA, 13 bp, Artificial Sequence
  Oligonucleotide for detection of SNP TSC0051571
gattttattgtat

SEQ ID NO: 211406 - DNA, 13 bp, Artificial Sequence
  Oligonucleotide for detection of SNP TSC0051571
atacaataaaatc

SEQ ID NO: 211407 - DNA, 13 bp, Artificial Sequence
  Oligonucleotide for detection of SNP TSC0051571
gatttcgttgtat

SEQ ID NO: 211408 - DNA, 13 bp, Artificial Sequence
  Oligonucleotide for detection of SNP TSC0051571
atacaacgaaatc

SEQ ID NO: 211409 - DNA, 13 bp, Artificial Sequence
  Oligonucleotide for detection of SNP TSC0005034
tgtttgtttttay

SEQ ID NO: 211410 - DNA, 13 bp, Artificial Sequence
  Oligonucleotide for detection of SNP TSC0005034
rtaaaaacaaaca

SEQ ID NO: 211411 - DNA, 13 bp, Artificial Sequence
  Oligonucleotide for detection of SNP TSC0005034
tgtttggttttay

SEQ ID NO: 211412 - DNA, 13 bp, Artificial Sequence
  Oligonucleotide for detection of SNP TSC0005034
rtaaaaccaaaca

SEQ ID NO: 211413 - DNA, 13 bp, Artificial Sequence
  Oligonucleotide for detection of SNP TSC0005034
gtgaaggtaagta

SEQ ID NO: 211414 - DNA, 13 bp, Artificial Sequence
  Oligonucleotide for detection of SNP TSC0005034
tacttaccttcac

SEQ ID NO: 211415 - DNA, 13 bp, Artificial Sequence
  Oligonucleotide for detection of SNP TSC0005034
gtgaagttaagta

SEQ ID NO: 211416 - DNA, 13 bp, Artificial Sequence
  Oligonucleotide for detection of SNP TSC0005034
tacttaacttcac

SEQ ID NO: 211417 - DNA, 13 bp, Artificial Sequence
  Oligonucleotide for detection of SNP TSC0005035
ttgggattatgag

SEQ ID NO: 211418 - DNA, 13 bp, Artificial Sequence
  Oligonucleotide for detection of SNP TSC0005035
ctcataatcccaa

SEQ ID NO: 211419 - DNA, 13 bp, Artificial Sequence
  Oligonucleotide for detection of SNP TSC0005035
ttgggagtatgag

SEQ ID NO: 211420 - DNA, 13 bp, Artificial Sequence
  Oligonucleotide for detection of SNP TSC0005035
ctcatactcccaa

SEQ ID NO: 211421 - DNA, 13 bp, Artificial Sequence
  Oligonucleotide for detection of SNP TSC0005035
ttgggattacgag

SEQ ID NO: 211422 - DNA, 13 bp, Artificial Sequence
  Oligonucleotide for detection of SNP TSC0005035
ctcgtaatcccaa

SEQ ID NO: 211423 - DNA, 13 bp, Artificial Sequence
  Oligonucleotide for detection of SNP TSC0005035
ttgggagtacgag

SEQ ID NO: 211424 - DNA, 13 bp, Artificial Sequence
  Oligonucleotide for detection of SNP TSC0005035
ctcgtactcccaa

SEQ ID NO: 211425 - DNA, 13 bp, Artificial Sequence
  Oligonucleotide for detection of SNP TSC0005035
ttcgtagttttag

SEQ ID NO: 211426 - DNA, 13 bp, Artificial Sequence
  Oligonucleotide for detection of SNP TSC0005035
ctaaaactacgaa

SEQ ID NO: 211427 - DNA, 13 bp, Artificial Sequence
  Oligonucleotide for detection of SNP TSC0005035
ttcgtatttttag

SEQ ID NO: 211428 - DNA, 13 bp, Artificial Sequence
  Oligonucleotide for detection of SNP TSC0005035
ctaaaaatacgaa

SEQ ID NO: 211429 - DNA, 13 bp, Artificial Sequence
  Oligonucleotide for detection of SNP TSC0005036
gggtagagttttt

SEQ ID NO: 211430 - DNA, 13 bp, Artificial Sequence
  Oligonucleotide for detection of SNP TSC0005036
aaaaactctaccc

SEQ ID NO: 211431 - DNA, 13 bp, Artificial Sequence
  Oligonucleotide for detection of SNP TSC0005036
gggtagggttttt

SEQ ID NO: 211432 - DNA, 13 bp, Artificial Sequence
  Oligonucleotide for detection of SNP TSC0005036
aaaaaccctaccc

SEQ ID NO: 211433 - DNA, 13 bp, Artificial Sequence
  Oligonucleotide for detection of SNP TSC0000917
ataggggtgttay

SEQ ID NO: 211434 - DNA, 13 bp, Artificial Sequence
  Oligonucleotide for detection of SNP TSC0000917
rtaacacccctat

SEQ ID NO: 211435 - DNA, 13 bp, Artificial Sequence
  Oligonucleotide for detection of SNP TSC0000917
atagggatgttay

SEQ ID NO: 211436 - DNA, 13 bp, Artificial Sequence
  Oligonucleotide for detection of SNP TSC0000917
rtaacatccctat

SEQ ID NO: 211437 - DNA, 13 bp, Artificial Sequence
  Oligonucleotide for detection of SNP TSC0051573
tttgtaattaatg

SEQ ID NO: 211438 - DNA, 13 bp, Artificial Sequence
  Oligonucleotide for detection of SNP TSC0051573
cattaattacaaa

SEQ ID NO: 211439 - DNA, 13 bp, Artificial Sequence
  Oligonucleotide for detection of SNP TSC0051573
tttgtagttaatg

SEQ ID NO: 211440 - DNA, 13 bp, Artificial Sequence
  Oligonucleotide for detection of SNP TSC0051573
cattaactacaaa

SEQ ID NO: 211441 - DNA, 13 bp, Artificial Sequence
  Oligonucleotide for detection of SNP TSC0005314
gagattcgtttty

SEQ ID NO: 211442 - DNA, 13 bp, Artificial Sequence
  Oligonucleotide for detection of SNP TSC0005314
raaaacgaatctc

SEQ ID NO: 211443 - DNA, 13 bp, Artificial Sequence
  Oligonucleotide for detection of SNP TSC0005314
ggagatgaattty

SEQ ID NO: 211444 - DNA, 13 bp, Artificial Sequence
  Oligonucleotide for detection of SNP TSC0005314
raaattcatctcc

SEQ ID NO: 211445 - DNA, 13 bp, Artificial Sequence
  Oligonucleotide for detection of SNP TSC0005314
ggagataaattty

SEQ ID NO: 211446 - DNA, 13 bp, Artificial Sequence
  Oligonucleotide for detection of SNP TSC0005314
raaatttatctcc

SEQ ID NO: 211447 - DNA, 13 bp, Artificial Sequence
  Oligonucleotide for detection of SNP TSC0005314
ggagacgaattty

SEQ ID NO: 211448 - DNA, 13 bp, Artificial Sequence
  Oligonucleotide for detection of SNP TSC0005314
raaattcgtctcc

SEQ ID NO: 211449 - DNA, 13 bp, Artificial Sequence
  Oligonucleotide for detection of SNP TSC0051576
tgtttaaaaaaag

SEQ ID NO: 211450 - DNA, 13 bp, Artificial Sequence
  Oligonucleotide for detection of SNP TSC0051576
ctttttttaaaca

SEQ ID NO: 211451 - DNA, 13 bp, Artificial Sequence
  Oligonucleotide for detection of SNP TSC0051576
tgtttagaaaaag

SEQ ID NO: 211452 - DNA, 13 bp, Artificial Sequence
  Oligonucleotide for detection of SNP TSC0051576
ctttttctaaaca

SEQ ID NO: 211453 - DNA, 13 bp, Artificial Sequence
  Oligonucleotide for detection of SNP TSC0051578
ttataattattta

SEQ ID NO: 211454 - DNA, 13 bp, Artificial Sequence
  Oligonucleotide for detection of SNP TSC0051578
taaataattataa

SEQ ID NO: 211455 - DNA, 13 bp, Artificial Sequence
  Oligonucleotide for detection of SNP TSC0051578
taaatatttatgg

SEQ ID NO: 211456 - DNA, 13 bp, Artificial Sequence
  Oligonucleotide for detection of SNP TSC0051578
ccataaatattta

SEQ ID NO: 211457 - DNA, 13 bp, Artificial Sequence
  Oligonucleotide for detection of SNP TSC0051578
taaataattatgg

SEQ ID NO: 211458 - DNA, 13 bp, Artificial Sequence
  Oligonucleotide for detection of SNP TSC0051578
ccataattattta

SEQ ID NO: 211459 - DNA, 13 bp, Artificial Sequence
  Oligonucleotide for detection of SNP TSC0051579
aggttgatataaa

SEQ ID NO: 211460 - DNA, 13 bp, Artificial Sequence
  Oligonucleotide for detection of SNP TSC0051579
tttatatcaacct

SEQ ID NO: 211461 - DNA, 13 bp, Artificial Sequence
  Oligonucleotide for detection of SNP TSC0051579
aggttgttataaa

SEQ ID NO: 211462 - DNA, 13 bp, Artificial Sequence
  Oligonucleotide for detection of SNP TSC0051579
tttataacaacct

SEQ ID NO: 211463 - DNA, 13 bp, Artificial Sequence
  Oligonucleotide for detection of SNP TSC0051579
tttatgatagttt

SEQ ID NO: 211464 - DNA, 13 bp, Artificial Sequence
  Oligonucleotide for detection of SNP TSC0051579
aaactatcataaa

SEQ ID NO: 211465 - DNA, 13 bp, Artificial Sequence
  Oligonucleotide for detection of SNP TSC0051582
gtgtttagtgttt

SEQ ID NO: 211466 - DNA, 13 bp, Artificial Sequence
  Oligonucleotide for detection of SNP TSC0051582
aaacactaaacac

SEQ ID NO: 211467 - DNA, 13 bp, Artificial Sequence
  Oligonucleotide for detection of SNP TSC0051582
gtgtttggtgttt

SEQ ID NO: 211468 - DNA, 13 bp, Artificial Sequence
  Oligonucleotide for detection of SNP TSC0051582
aaacaccaaacac

SEQ ID NO: 211469 - DNA, 13 bp, Artificial Sequence
  Oligonucleotide for detection of SNP TSC0006655
taggtttagaata

SEQ ID NO: 211470 - DNA, 13 bp, Artificial Sequence
  Oligonucleotide for detection of SNP TSC0006655
tattctaaaccta

SEQ ID NO: 211471 - DNA, 13 bp, Artificial Sequence
  Oligonucleotide for detection of SNP TSC0006655
taggttgagaata

SEQ ID NO: 211472 - DNA, 13 bp, Artificial Sequence
  Oligonucleotide for detection of SNP TSC0006655
tattctcaaccta

SEQ ID NO: 211473 - DNA, 13 bp, Artificial Sequence
  Oligonucleotide for detection of SNP TSC0051583
ggtataaatttay

SEQ ID NO: 211474 - DNA, 13 bp, Artificial Sequence
  Oligonucleotide for detection of SNP TSC0051583
rtaaatttatacc

SEQ ID NO: 211475 - DNA, 13 bp, Artificial Sequence
  Oligonucleotide for detection of SNP TSC0051583
ggtatagatttay

SEQ ID NO: 211476 - DNA, 13 bp, Artificial Sequence
  Oligonucleotide for detection of SNP TSC0051583
rtaaatctatacc

SEQ ID NO: 211477 - DNA, 13 bp, Artificial Sequence
  Oligonucleotide for detection of SNP TSC0051584
tttagtttggtgg

SEQ ID NO: 211478 - DNA, 13 bp, Artificial Sequence
  Oligonucleotide for detection of SNP TSC0051584
ccaccaaactaaa

SEQ ID NO: 211479 - DNA, 13 bp, Artificial Sequence
  Oligonucleotide for detection of SNP TSC0051584
tttagtgtggtgg

SEQ ID NO: 211480 - DNA, 13 bp, Artificial Sequence
  Oligonucleotide for detection of SNP TSC0051584
ccaccacactaaa

SEQ ID NO: 211481 - DNA, 13 bp, Artificial Sequence
  Oligonucleotide for detection of SNP TSC0051584
ttattagattgag

SEQ ID NO: 211482 - DNA, 13 bp, Artificial Sequence
  Oligonucleotide for detection of SNP TSC0051584
ctcaatctaataa

SEQ ID NO: 211483 - DNA, 13 bp, Artificial Sequence
  Oligonucleotide for detection of SNP TSC0051584
ttattatattgag

SEQ ID NO: 211484 - DNA, 13 bp, Artificial Sequence
  Oligonucleotide for detection of SNP TSC0051584
ctcaatataataa

SEQ ID NO: 211485 - DNA, 13 bp, Artificial Sequence
  Oligonucleotide for detection of SNP TSC0051585
ttttcggttttty

SEQ ID NO: 211486 - DNA, 13 bp, Artificial Sequence
  Oligonucleotide for detection of SNP TSC0051585
raaaaaccgaaaa

SEQ ID NO: 211487 - DNA, 13 bp, Artificial Sequence
  Oligonucleotide for detection of SNP TSC0051586
aataaaggaaaat

SEQ ID NO: 211488 - DNA, 13 bp, Artificial Sequence
  Oligonucleotide for detection of SNP TSC0051586
attttcctttatt

SEQ ID NO: 211489 - DNA, 13 bp, Artificial Sequence
  Oligonucleotide for detection of SNP TSC0051586
aataaatgaaaat

SEQ ID NO: 211490 - DNA, 13 bp, Artificial Sequence
  Oligonucleotide for detection of SNP TSC0051586
attttcatttatt

SEQ ID NO: 211491 - DNA, 13 bp, Artificial Sequence
  Oligonucleotide for detection of SNP TSC0051589
agattaaaattag

SEQ ID NO: 211492 - DNA, 13 bp, Artificial Sequence
  Oligonucleotide for detection of SNP TSC0051589
ctaattttaatct

SEQ ID NO: 211493 - DNA, 13 bp, Artificial Sequence
  Oligonucleotide for detection of SNP TSC0051589
agattagaattag

SEQ ID NO: 211494 - DNA, 13 bp, Artificial Sequence
  Oligonucleotide for detection of SNP TSC0051589
ctaattctaatct

SEQ ID NO: 211495 - DNA, 13 bp, Artificial Sequence
  Oligonucleotide for detection of SNP TSC0051591
ttttgattttgag

SEQ ID NO: 211496 - DNA, 13 bp, Artificial Sequence
  Oligonucleotide for detection of SNP TSC0051591
ctcaaaatcaaaa

SEQ ID NO: 211497 - DNA, 13 bp, Artificial Sequence
  Oligonucleotide for detection of SNP TSC0051591
ttttgagtttgag

SEQ ID NO: 211498 - DNA, 13 bp, Artificial Sequence
  Oligonucleotide for detection of SNP TSC0051591
ctcaaactcaaaa

SEQ ID NO: 211499 - DNA, 13 bp, Artificial Sequence
  Oligonucleotide for detection of SNP TSC0051593
tataataataaag

SEQ ID NO: 211500 - DNA, 13 bp, Artificial Sequence
  Oligonucleotide for detection of SNP TSC0051593
ctttattattata

SEQ ID NO: 211501 - DNA, 13 bp, Artificial Sequence
  Oligonucleotide for detection of SNP TSC0051597
tttttgtagtgta

SEQ ID NO: 211502 - DNA, 13 bp, Artificial Sequence
  Oligonucleotide for detection of SNP TSC0051597
tacactacaaaaa

SEQ ID NO: 211503 - DNA, 13 bp, Artificial Sequence
  Oligonucleotide for detection of SNP TSC0051597
tttttggagtgta

SEQ ID NO: 211504 - DNA, 13 bp, Artificial Sequence
  Oligonucleotide for detection of SNP TSC0051597
tacactccaaaaa

SEQ ID NO: 211505 - DNA, 13 bp, Artificial Sequence
  Oligonucleotide for detection of SNP TSC0051597
tgtattgtaggga

SEQ ID NO: 211506 - DNA, 13 bp, Artificial Sequence
  Oligonucleotide for detection of SNP TSC0051597
tccctacaataca

SEQ ID NO: 211507 - DNA, 13 bp, Artificial Sequence
  Oligonucleotide for detection of SNP TSC0051597
tgtattttaggga

SEQ ID NO: 211508 - DNA, 13 bp, Artificial Sequence
  Oligonucleotide for detection of SNP TSC0051597
tccctaaaataca

SEQ ID NO: 211509 - DNA, 13 bp, Artificial Sequence
  Oligonucleotide for detection of SNP TSC0051599
aatggattatgta

SEQ ID NO: 211510 - DNA, 13 bp, Artificial Sequence
  Oligonucleotide for detection of SNP TSC0051599
tacataatccatt

SEQ ID NO: 211511 - DNA, 13 bp, Artificial Sequence
  Oligonucleotide for detection of SNP TSC0051599
aatggagtatgta

SEQ ID NO: 211512 - DNA, 13 bp, Artificial Sequence
  Oligonucleotide for detection of SNP TSC0051599
tacatactccatt

SEQ ID NO: 211513 - DNA, 13 bp, Artificial Sequence
  Oligonucleotide for detection of SNP TSC0051599
tgtatattttatt

SEQ ID NO: 211514 - DNA, 13 bp, Artificial Sequence
  Oligonucleotide for detection of SNP TSC0051599
aataaaatataca

SEQ ID NO: 211515 - DNA, 13 bp, Artificial Sequence
  Oligonucleotide for detection of SNP TSC0051600
tgattaatattag

SEQ ID NO: 211516 - DNA, 13 bp, Artificial Sequence
  Oligonucleotide for detection of SNP TSC0051600
ctaatattaatca

SEQ ID NO: 211517 - DNA, 13 bp, Artificial Sequence
  Oligonucleotide for detection of SNP TSC0051600
tgattattattag

SEQ ID NO: 211518 - DNA, 13 bp, Artificial Sequence
  Oligonucleotide for detection of SNP TSC0051600
ctaataataatca

SEQ ID NO: 211519 - DNA, 13 bp, Artificial Sequence
  Oligonucleotide for detection of SNP TSC0051600
ttggtgttaatta

SEQ ID NO: 211520 - DNA, 13 bp, Artificial Sequence
  Oligonucleotide for detection of SNP TSC0051600
taattaacaccaa

SEQ ID NO: 211521 - DNA, 13 bp, Artificial Sequence
  Oligonucleotide for detection of SNP TSC0051600
ttggtggtaatta

SEQ ID NO: 211522 - DNA, 13 bp, Artificial Sequence
  Oligonucleotide for detection of SNP TSC0051600
taattaccaccaa

SEQ ID NO: 211523 - DNA, 13 bp, Artificial Sequence
  Oligonucleotide for detection of SNP TSC0051601
ttttatatggtag

SEQ ID NO: 211524 - DNA, 13 bp, Artificial Sequence
  Oligonucleotide for detection of SNP TSC0051601
ctaccatataaaa

SEQ ID NO: 211525 - DNA, 13 bp, Artificial Sequence
  Oligonucleotide for detection of SNP TSC0051601
ttttatgtggtag

SEQ ID NO: 211526 - DNA, 13 bp, Artificial Sequence
  Oligonucleotide for detection of SNP TSC0051601
ctaccacataaaa

SEQ ID NO: 211527 - DNA, 13 bp, Artificial Sequence
  Oligonucleotide for detection of SNP TSC0051601
ttttacgtggtag

SEQ ID NO: 211528 - DNA, 13 bp, Artificial Sequence
  Oligonucleotide for detection of SNP TSC0051601
ctaccacgtaaaa

SEQ ID NO: 211529 - DNA, 13 bp, Artificial Sequence
  Oligonucleotide for detection of SNP TSC0051601
ttattatgtggag

SEQ ID NO: 211530 - DNA, 13 bp, Artificial Sequence
  Oligonucleotide for detection of SNP TSC0051601
ctccacataataa

SEQ ID NO: 211531 - DNA, 13 bp, Artificial Sequence
  Oligonucleotide for detection of SNP TSC0051601
ttattacgtggag

SEQ ID NO: 211532 - DNA, 13 bp, Artificial Sequence
  Oligonucleotide for detection of SNP TSC0051601
ctccacgtaataa

SEQ ID NO: 211533 - DNA, 13 bp, Artificial Sequence
  Oligonucleotide for detection of SNP TSC0051602
tgtgggagaggag

SEQ ID NO: 211534 - DNA, 13 bp, Artificial Sequence
  Oligonucleotide for detection of SNP TSC0051602
ctcctctcccaca

SEQ ID NO: 211535 - DNA, 13 bp, Artificial Sequence
  Oligonucleotide for detection of SNP TSC0051602
tgtgggtgaggag

SEQ ID NO: 211536 - DNA, 13 bp, Artificial Sequence
  Oligonucleotide for detection of SNP TSC0051602
ctcctcacccaca

SEQ ID NO: 211537 - DNA, 13 bp, Artificial Sequence
  Oligonucleotide for detection of SNP TSC0051602
tgtgggcgaggag

SEQ ID NO: 211538 - DNA, 13 bp, Artificial Sequence
  Oligonucleotide for detection of SNP TSC0051602
ctcctcgcccaca

SEQ ID NO: 211539 - DNA, 13 bp, Artificial Sequence
  Oligonucleotide for detection of SNP TSC0051603
agtttaagtagaa

SEQ ID NO: 211540 - DNA, 13 bp, Artificial Sequence
  Oligonucleotide for detection of SNP TSC0051603
ttctacttaaact

SEQ ID NO: 211541 - DNA, 13 bp, Artificial Sequence
  Oligonucleotide for detection of SNP TSC0051603
agtttatgtagaa

SEQ ID NO: 211542 - DNA, 13 bp, Artificial Sequence
  Oligonucleotide for detection of SNP TSC0051603
ttctacataaact

SEQ ID NO: 211543 - DNA, 13 bp, Artificial Sequence
  Oligonucleotide for detection of SNP TSC0051603
ttttatttagatt

SEQ ID NO: 211544 - DNA, 13 bp, Artificial Sequence
  Oligonucleotide for detection of SNP TSC0051603
aatctaaataaaa

SEQ ID NO: 211545 - DNA, 13 bp, Artificial Sequence
  Oligonucleotide for detection of SNP TSC0051603
ttttatatagatt

SEQ ID NO: 211546 - DNA, 13 bp, Artificial Sequence
  Oligonucleotide for detection of SNP TSC0051603
aatctatataaaa

SEQ ID NO: 211547 - DNA, 13 bp, Artificial Sequence
  Oligonucleotide for detection of SNP TSC0005124
tgtttttgaattt

SEQ ID NO: 211548 - DNA, 13 bp, Artificial Sequence
  Oligonucleotide for detection of SNP TSC0005124
aaattcaaaaaca

SEQ ID NO: 211549 - DNA, 13 bp, Artificial Sequence
  Oligonucleotide for detection of SNP TSC0005124
tgttttcgaattt

SEQ ID NO: 211550 - DNA, 13 bp, Artificial Sequence
  Oligonucleotide for detection of SNP TSC0005124
aaattcgaaaaca

SEQ ID NO: 211551 - DNA, 13 bp, Artificial Sequence
  Oligonucleotide for detection of SNP TSC0005124
aggtttgaaaata

SEQ ID NO: 211552 - DNA, 13 bp, Artificial Sequence
  Oligonucleotide for detection of SNP TSC0005124
tattttcaaacct

SEQ ID NO: 211553 - DNA, 13 bp, Artificial Sequence
  Oligonucleotide for detection of SNP TSC0005124
aggtttaaaaata

SEQ ID NO: 211554 - DNA, 13 bp, Artificial Sequence
  Oligonucleotide for detection of SNP TSC0005124
tatttttaaacct

SEQ ID NO: 211555 - DNA, 13 bp, Artificial Sequence
  Oligonucleotide for detection of SNP TSC0005124
aggttcgaaaata

SEQ ID NO: 211556 - DNA, 13 bp, Artificial Sequence
  Oligonucleotide for detection of SNP TSC0005124
tattttcgaacct

SEQ ID NO: 211557 - DNA, 13 bp, Artificial Sequence
  Oligonucleotide for detection of SNP TSC0051604
ggattttttattg

SEQ ID NO: 211558 - DNA, 13 bp, Artificial Sequence
  Oligonucleotide for detection of SNP TSC0051604
caataaaaaatcc

SEQ ID NO: 211559 - DNA, 13 bp, Artificial Sequence
  Oligonucleotide for detection of SNP TSC0051604
ggatttgttattg

SEQ ID NO: 211560 - DNA, 13 bp, Artificial Sequence
  Oligonucleotide for detection of SNP TSC0051604
caataacaaatcc

SEQ ID NO: 211561 - DNA, 13 bp, Artificial Sequence
  Oligonucleotide for detection of SNP TSC0051604
ggattttttatcg

SEQ ID NO: 211562 - DNA, 13 bp, Artificial Sequence
  Oligonucleotide for detection of SNP TSC0051604
cgataaaaaatcc

SEQ ID NO: 211563 - DNA, 13 bp, Artificial Sequence
  Oligonucleotide for detection of SNP TSC0051604
ggattcgttattg

SEQ ID NO: 211564 - DNA, 13 bp, Artificial Sequence
  Oligonucleotide for detection of SNP TSC0051604
caataacgaatcc

SEQ ID NO: 211565 - DNA, 13 bp, Artificial Sequence
  Oligonucleotide for detection of SNP TSC0051604
ggatttgttatcg

SEQ ID NO: 211566 - DNA, 13 bp, Artificial Sequence
  Oligonucleotide for detection of SNP TSC0051604
cgataacaaatcc

SEQ ID NO: 211567 - DNA, 13 bp, Artificial Sequence
  Oligonucleotide for detection of SNP TSC0051604
ggattcgttatcg

SEQ ID NO: 211568 - DNA, 13 bp, Artificial Sequence
  Oligonucleotide for detection of SNP TSC0051604
cgataacgaatcc

SEQ ID NO: 211569 - DNA, 13 bp, Artificial Sequence
  Oligonucleotide for detection of SNP TSC0051604
tgatggggagtty

SEQ ID NO: 211570 - DNA, 13 bp, Artificial Sequence
  Oligonucleotide for detection of SNP TSC0051604
raactccccatca

SEQ ID NO: 211571 - DNA, 13 bp, Artificial Sequence
  Oligonucleotide for detection of SNP TSC0051604
tgatggtgagtty

SEQ ID NO: 211572 - DNA, 13 bp, Artificial Sequence
  Oligonucleotide for detection of SNP TSC0051604
raactcaccatca

SEQ ID NO: 211573 - DNA, 13 bp, Artificial Sequence
  Oligonucleotide for detection of SNP TSC0051604
cgatggggagtty

SEQ ID NO: 211574 - DNA, 13 bp, Artificial Sequence
  Oligonucleotide for detection of SNP TSC0051604
raactccccatcg

SEQ ID NO: 211575 - DNA, 13 bp, Artificial Sequence
  Oligonucleotide for detection of SNP TSC0051604
cgatggtgagtty

SEQ ID NO: 211576 - DNA, 13 bp, Artificial Sequence
  Oligonucleotide for detection of SNP TSC0051604
raactcaccatcg

SEQ ID NO: 211577 - DNA, 13 bp, Artificial Sequence
  Oligonucleotide for detection of SNP TSC0051604
tgatggcgagtty

SEQ ID NO: 211578 - DNA, 13 bp, Artificial Sequence
  Oligonucleotide for detection of SNP TSC0051604
raactcgccatca

SEQ ID NO: 211579 - DNA, 13 bp, Artificial Sequence
  Oligonucleotide for detection of SNP TSC0051604
cgatggcgagtty

SEQ ID NO: 211580 - DNA, 13 bp, Artificial Sequence
  Oligonucleotide for detection of SNP TSC0051604
raactcgccatcg

SEQ ID NO: 211581 - DNA, 13 bp, Artificial Sequence
  Oligonucleotide for detection of SNP TSC0007433
taaaaagagtgay

SEQ ID NO: 211582 - DNA, 13 bp, Artificial Sequence
  Oligonucleotide for detection of SNP TSC0007433
rtcactcttttta

SEQ ID NO: 211583 - DNA, 13 bp, Artificial Sequence
  Oligonucleotide for detection of SNP TSC0007433
taaaaatagtgay

SEQ ID NO: 211584 - DNA, 13 bp, Artificial Sequence
  Oligonucleotide for detection of SNP TSC0007433
rtcactattttta

SEQ ID NO: 211585 - DNA, 13 bp, Artificial Sequence
  Oligonucleotide for detection of SNP TSC0051605
taattgtgtgtga

SEQ ID NO: 211586 - DNA, 13 bp, Artificial Sequence
  Oligonucleotide for detection of SNP TSC0051605
tcacacacaatta

SEQ ID NO: 211587 - DNA, 13 bp, Artificial Sequence
  Oligonucleotide for detection of SNP TSC0051605
taattgcgtgtga

SEQ ID NO: 211588 - DNA, 13 bp, Artificial Sequence
  Oligonucleotide for detection of SNP TSC0051605
tcacacgcaatta

SEQ ID NO: 211589 - DNA, 13 bp, Artificial Sequence
  Oligonucleotide for detection of SNP TSC0051605
ttatatgtagtta

SEQ ID NO: 211590 - DNA, 13 bp, Artificial Sequence
  Oligonucleotide for detection of SNP TSC0051605
taactacatataa

SEQ ID NO: 211591 - DNA, 13 bp, Artificial Sequence
  Oligonucleotide for detection of SNP TSC0051605
ttatacgtagtta

SEQ ID NO: 211592 - DNA, 13 bp, Artificial Sequence
  Oligonucleotide for detection of SNP TSC0051605
taactacgtataa

SEQ ID NO: 211593 - DNA, 13 bp, Artificial Sequence
  Oligonucleotide for detection of SNP TSC0051606
attgttattttag

SEQ ID NO: 211594 - DNA, 13 bp, Artificial Sequence
  Oligonucleotide for detection of SNP TSC0051606
ctaaaataacaat

SEQ ID NO: 211595 - DNA, 13 bp, Artificial Sequence
  Oligonucleotide for detection of SNP TSC0051606
attgtcgttttag

SEQ ID NO: 211596 - DNA, 13 bp, Artificial Sequence
  Oligonucleotide for detection of SNP TSC0051606
ctaaaacgacaat

SEQ ID NO: 211597 - DNA, 13 bp, Artificial Sequence
  Oligonucleotide for detection of SNP TSC0051606
ttgaggtggtagt

SEQ ID NO: 211598 - DNA, 13 bp, Artificial Sequence
  Oligonucleotide for detection of SNP TSC0051606
actaccacctcaa

SEQ ID NO: 211599 - DNA, 13 bp, Artificial Sequence
  Oligonucleotide for detection of SNP TSC0051606
ttgaggcggtagt

SEQ ID NO: 211600 - DNA, 13 bp, Artificial Sequence
  Oligonucleotide for detection of SNP TSC0051606
actaccgcctcaa

SEQ ID NO: 211601 - DNA, 13 bp, Artificial Sequence
  Oligonucleotide for detection of SNP TSC0051607
ttagttataataa

SEQ ID NO: 211602 - DNA, 13 bp, Artificial Sequence
  Oligonucleotide for detection of SNP TSC0051607
ttattataactaa

SEQ ID NO: 211603 - DNA, 13 bp, Artificial Sequence
  Oligonucleotide for detection of SNP TSC0051607
ttagttttaataa

SEQ ID NO: 211604 - DNA, 13 bp, Artificial Sequence
  Oligonucleotide for detection of SNP TSC0051607
ttattaaaactaa

SEQ ID NO: 211605 - DNA, 13 bp, Artificial Sequence
  Oligonucleotide for detection of SNP TSC0051607
ttgttatgattgg

SEQ ID NO: 211606 - DNA, 13 bp, Artificial Sequence
  Oligonucleotide for detection of SNP TSC0051607
ccaatcataacaa

SEQ ID NO: 211607 - DNA, 13 bp, Artificial Sequence
  Oligonucleotide for detection of SNP TSC0051607
ttgttaagattgg

SEQ ID NO: 211608 - DNA, 13 bp, Artificial Sequence
  Oligonucleotide for detection of SNP TSC0051607
ccaatcttaacaa

SEQ ID NO: 211609 - DNA, 13 bp, Artificial Sequence
  Oligonucleotide for detection of SNP TSC0051608
aagatgtggttty

SEQ ID NO: 211610 - DNA, 13 bp, Artificial Sequence
  Oligonucleotide for detection of SNP TSC0051608
raaaccacatctt

SEQ ID NO: 211611 - DNA, 13 bp, Artificial Sequence
  Oligonucleotide for detection of SNP TSC0051608
aagacgtggttty

SEQ ID NO: 211612 - DNA, 13 bp, Artificial Sequence
  Oligonucleotide for detection of SNP TSC0051608
raaaccacgtctt

SEQ ID NO: 211613 - DNA, 13 bp, Artificial Sequence
  Oligonucleotide for detection of SNP TSC0051608
aagatgcggttty

SEQ ID NO: 211614 - DNA, 13 bp, Artificial Sequence
  Oligonucleotide for detection of SNP TSC0051608
raaaccgcatctt

SEQ ID NO: 211615 - DNA, 13 bp, Artificial Sequence
  Oligonucleotide for detection of SNP TSC0051608
aagacgcggttty

SEQ ID NO: 211616 - DNA, 13 bp, Artificial Sequence
  Oligonucleotide for detection of SNP TSC0051608
raaaccgcgtctt

SEQ ID NO: 211617 - DNA, 13 bp, Artificial Sequence
  Oligonucleotide for detection of SNP TSC0051608
gaaattgtgtttt

SEQ ID NO: 211618 - DNA, 13 bp, Artificial Sequence
  Oligonucleotide for detection of SNP TSC0051608
aaaacacaatttc

SEQ ID NO: 211619 - DNA, 13 bp, Artificial Sequence
  Oligonucleotide for detection of SNP TSC0051608
gaaattatgtttt

SEQ ID NO: 211620 - DNA, 13 bp, Artificial Sequence
  Oligonucleotide for detection of SNP TSC0051608
aaaacataatttc

SEQ ID NO: 211621 - DNA, 13 bp, Artificial Sequence
  Oligonucleotide for detection of SNP TSC0051608
gaaatcgtgtttt

SEQ ID NO: 211622 - DNA, 13 bp, Artificial Sequence
  Oligonucleotide for detection of SNP TSC0051608
aaaacacgatttc

SEQ ID NO: 211623 - DNA, 13 bp, Artificial Sequence
  Oligonucleotide for detection of SNP TSC0051608
gaaattacgtttt

SEQ ID NO: 211624 - DNA, 13 bp, Artificial Sequence
  Oligonucleotide for detection of SNP TSC0051608
aaaacgtaatttc

SEQ ID NO: 211625 - DNA, 13 bp, Artificial Sequence
  Oligonucleotide for detection of SNP TSC0051608
gaaattgcgtttt

SEQ ID NO: 211626 - DNA, 13 bp, Artificial Sequence
  Oligonucleotide for detection of SNP TSC0051608
aaaacgcaatttc

SEQ ID NO: 211627 - DNA, 13 bp, Artificial Sequence
  Oligonucleotide for detection of SNP TSC0051608
gaaatcgcgtttt

SEQ ID NO: 211628 - DNA, 13 bp, Artificial Sequence
  Oligonucleotide for detection of SNP TSC0051608
aaaacgcgatttc

SEQ ID NO: 211629 - DNA, 13 bp, Artificial Sequence
  Oligonucleotide for detection of SNP TSC0051609
ggattaaataagt

SEQ ID NO: 211630 - DNA, 13 bp, Artificial Sequence
  Oligonucleotide for detection of SNP TSC0051609
acttatttaatcc

SEQ ID NO: 211631 - DNA, 13 bp, Artificial Sequence
  Oligonucleotide for detection of SNP TSC0051609
ggattatataagt

SEQ ID NO: 211632 - DNA, 13 bp, Artificial Sequence
  Oligonucleotide for detection of SNP TSC0051609
acttatataatcc

SEQ ID NO: 211633 - DNA, 13 bp, Artificial Sequence
  Oligonucleotide for detection of SNP TSC0051609
atttgtttaatty

SEQ ID NO: 211634 - DNA, 13 bp, Artificial Sequence
  Oligonucleotide for detection of SNP TSC0051609
raattaaacaaat

SEQ ID NO: 211635 - DNA, 13 bp, Artificial Sequence
  Oligonucleotide for detection of SNP TSC0051609
atttgtgtaatty

SEQ ID NO: 211636 - DNA, 13 bp, Artificial Sequence
  Oligonucleotide for detection of SNP TSC0051609
raattacacaaat

SEQ ID NO: 211637 - DNA, 13 bp, Artificial Sequence
  Oligonucleotide for detection of SNP TSC0051610
tgtttggtagtta

SEQ ID NO: 211638 - DNA, 13 bp, Artificial Sequence
  Oligonucleotide for detection of SNP TSC0051610
taactaccaaaca

SEQ ID NO: 211639 - DNA, 13 bp, Artificial Sequence
  Oligonucleotide for detection of SNP TSC0051610
tgtttgatagtta

SEQ ID NO: 211640 - DNA, 13 bp, Artificial Sequence
  Oligonucleotide for detection of SNP TSC0051610
taactatcaaaca

SEQ ID NO: 211641 - DNA, 13 bp, Artificial Sequence
  Oligonucleotide for detection of SNP TSC0051611
gttagtgtagtgy

SEQ ID NO: 211642 - DNA, 13 bp, Artificial Sequence
  Oligonucleotide for detection of SNP TSC0051611
rcactacactaac

SEQ ID NO: 211643 - DNA, 13 bp, Artificial Sequence
  Oligonucleotide for detection of SNP TSC0051611
gttagtatagtgy

SEQ ID NO: 211644 - DNA, 13 bp, Artificial Sequence
  Oligonucleotide for detection of SNP TSC0051611
rcactatactaac

SEQ ID NO: 211645 - DNA, 13 bp, Artificial Sequence
  Oligonucleotide for detection of SNP TSC0051612
tgtgattgttgaa

SEQ ID NO: 211646 - DNA, 13 bp, Artificial Sequence
  Oligonucleotide for detection of SNP TSC0051612
ttcaacaatcaca

SEQ ID NO: 211647 - DNA, 13 bp, Artificial Sequence
  Oligonucleotide for detection of SNP TSC0051612
tgtgatcgttgaa

SEQ ID NO: 211648 - DNA, 13 bp, Artificial Sequence
  Oligonucleotide for detection of SNP TSC0051612
ttcaacgatcaca

SEQ ID NO: 211649 - DNA, 13 bp, Artificial Sequence
  Oligonucleotide for detection of SNP TSC0051612
tttagtggttata

SEQ ID NO: 211650 - DNA, 13 bp, Artificial Sequence
  Oligonucleotide for detection of SNP TSC0051612
tataaccactaaa

SEQ ID NO: 211651 - DNA, 13 bp, Artificial Sequence
  Oligonucleotide for detection of SNP TSC0051612
tttagtagttata

SEQ ID NO: 211652 - DNA, 13 bp, Artificial Sequence
  Oligonucleotide for detection of SNP TSC0051612
tataactactaaa

SEQ ID NO: 211653 - DNA, 13 bp, Artificial Sequence
  Oligonucleotide for detection of SNP TSC0051612
tttagcggttata

SEQ ID NO: 211654 - DNA, 13 bp, Artificial Sequence
  Oligonucleotide for detection of SNP TSC0051612
tataaccgctaaa

SEQ ID NO: 211655 - DNA, 13 bp, Artificial Sequence
  Oligonucleotide for detection of SNP TSC0051613
tttgtggaatagg

SEQ ID NO: 211656 - DNA, 13 bp, Artificial Sequence
  Oligonucleotide for detection of SNP TSC0051613
cctattccacaaa

SEQ ID NO: 211657 - DNA, 13 bp, Artificial Sequence
  Oligonucleotide for detection of SNP TSC0051613
tttgtgaaatagg

SEQ ID NO: 211658 - DNA, 13 bp, Artificial Sequence
  Oligonucleotide for detection of SNP TSC0051613
cctatttcacaaa

SEQ ID NO: 211659 - DNA, 13 bp, Artificial Sequence
  Oligonucleotide for detection of SNP TSC0051614
aaaaaaggttggg

SEQ ID NO: 211660 - DNA, 13 bp, Artificial Sequence
  Oligonucleotide for detection of SNP TSC0051614
cccaacctttttt

SEQ ID NO: 211661 - DNA, 13 bp, Artificial Sequence
  Oligonucleotide for detection of SNP TSC0051614
aaaaaatgttggg

SEQ ID NO: 211662 - DNA, 13 bp, Artificial Sequence
  Oligonucleotide for detection of SNP TSC0051614
cccaacatttttt

SEQ ID NO: 211663 - DNA, 13 bp, Artificial Sequence
  Oligonucleotide for detection of SNP TSC0051614
aaaaaacgttggg

SEQ ID NO: 211664 - DNA, 13 bp, Artificial Sequence
  Oligonucleotide for detection of SNP TSC0051614
cccaacgtttttt

SEQ ID NO: 211665 - DNA, 13 bp, Artificial Sequence
  Oligonucleotide for detection of SNP TSC0051615
gggagaaaaggga

SEQ ID NO: 211666 - DNA, 13 bp, Artificial Sequence
  Oligonucleotide for detection of SNP TSC0051615
tcccttttctccc

SEQ ID NO: 211667 - DNA, 13 bp, Artificial Sequence
  Oligonucleotide for detection of SNP TSC0051615
gggagagaaggga

SEQ ID NO: 211668 - DNA, 13 bp, Artificial Sequence
  Oligonucleotide for detection of SNP TSC0051615
tcccttctctccc

SEQ ID NO: 211669 - DNA, 13 bp, Artificial Sequence
  Oligonucleotide for detection of SNP TSC0051618
ggaaatataaaat

SEQ ID NO: 211670 - DNA, 13 bp, Artificial Sequence
  Oligonucleotide for detection of SNP TSC0051618
attttatatttcc

SEQ ID NO: 211671 - DNA, 13 bp, Artificial Sequence
  Oligonucleotide for detection of SNP TSC0051618
ggaaatgtaaaat

SEQ ID NO: 211672 - DNA, 13 bp, Artificial Sequence
  Oligonucleotide for detection of SNP TSC0051618
attttacatttcc

SEQ ID NO: 211673 - DNA, 13 bp, Artificial Sequence
  Oligonucleotide for detection of SNP TSC0051619
tagtgagagttat

SEQ ID NO: 211674 - DNA, 13 bp, Artificial Sequence
  Oligonucleotide for detection of SNP TSC0051619
ataactctcacta

SEQ ID NO: 211675 - DNA, 13 bp, Artificial Sequence
  Oligonucleotide for detection of SNP TSC0051619
tagtgaaagttat

SEQ ID NO: 211676 - DNA, 13 bp, Artificial Sequence
  Oligonucleotide for detection of SNP TSC0051619
ataactttcacta

SEQ ID NO: 211677 - DNA, 13 bp, Artificial Sequence
  Oligonucleotide for detection of SNP TSC0051621
atgataattttag

SEQ ID NO: 211678 - DNA, 13 bp, Artificial Sequence
  Oligonucleotide for detection of SNP TSC0051621
ctaaaattatcat

SEQ ID NO: 211679 - DNA, 13 bp, Artificial Sequence
  Oligonucleotide for detection of SNP TSC0051621
atgatagttttag

SEQ ID NO: 211680 - DNA, 13 bp, Artificial Sequence
  Oligonucleotide for detection of SNP TSC0051621
ctaaaactatcat

SEQ ID NO: 211681 - DNA, 13 bp, Artificial Sequence
  Oligonucleotide for detection of SNP TSC0004609
ttgaaatgttttt

SEQ ID NO: 211682 - DNA, 13 bp, Artificial Sequence
  Oligonucleotide for detection of SNP TSC0004609
aaaaacatttcaa

SEQ ID NO: 211683 - DNA, 13 bp, Artificial Sequence
  Oligonucleotide for detection of SNP TSC0004609
tcgaaatgttttt

SEQ ID NO: 211684 - DNA, 13 bp, Artificial Sequence
  Oligonucleotide for detection of SNP TSC0004609
aaaaacatttcga

SEQ ID NO: 211685 - DNA, 13 bp, Artificial Sequence
  Oligonucleotide for detection of SNP TSC0004609
ttgaaacgttttt

SEQ ID NO: 211686 - DNA, 13 bp, Artificial Sequence
  Oligonucleotide for detection of SNP TSC0004609
aaaaacgtttcaa

SEQ ID NO: 211687 - DNA, 13 bp, Artificial Sequence
  Oligonucleotide for detection of SNP TSC0004609
tcgaaacgttttt

SEQ ID NO: 211688 - DNA, 13 bp, Artificial Sequence
  Oligonucleotide for detection of SNP TSC0004609
aaaaacgtttcga

SEQ ID NO: 211689 - DNA, 13 bp, Artificial Sequence
  Oligonucleotide for detection of SNP TSC0004609
aaaaatgttttgg

SEQ ID NO: 211690 - DNA, 13 bp, Artificial Sequence
  Oligonucleotide for detection of SNP TSC0004609
ccaaaacattttt

SEQ ID NO: 211691 - DNA, 13 bp, Artificial Sequence
  Oligonucleotide for detection of SNP TSC0004609
aaaaatattttgg

SEQ ID NO: 211692 - DNA, 13 bp, Artificial Sequence
  Oligonucleotide for detection of SNP TSC0004609
ccaaaatattttt

SEQ ID NO: 211693 - DNA, 13 bp, Artificial Sequence
  Oligonucleotide for detection of SNP TSC0004609
aaaaacgttttgg

SEQ ID NO: 211694 - DNA, 13 bp, Artificial Sequence
  Oligonucleotide for detection of SNP TSC0004609
ccaaaacgttttt

SEQ ID NO: 211695 - DNA, 13 bp, Artificial Sequence
  Oligonucleotide for detection of SNP TSC0004609
aaaaatatttcgg

SEQ ID NO: 211696 - DNA, 13 bp, Artificial Sequence
  Oligonucleotide for detection of SNP TSC0004609
ccgaaatattttt

SEQ ID NO: 211697 - DNA, 13 bp, Artificial Sequence
  Oligonucleotide for detection of SNP TSC0004609
aaaaatgtttcgg

SEQ ID NO: 211698 - DNA, 13 bp, Artificial Sequence
  Oligonucleotide for detection of SNP TSC0004609
ccgaaacattttt

SEQ ID NO: 211699 - DNA, 13 bp, Artificial Sequence
  Oligonucleotide for detection of SNP TSC0004609
aaaaacgtttcgg

SEQ ID NO: 211700 - DNA, 13 bp, Artificial Sequence
  Oligonucleotide for detection of SNP TSC0004609
ccgaaacgttttt

SEQ ID NO: 211701 - DNA, 13 bp, Artificial Sequence
  Oligonucleotide for detection of SNP TSC0051624
ttgtgttgtataa

SEQ ID NO: 211702 - DNA, 13 bp, Artificial Sequence
  Oligonucleotide for detection of SNP TSC0051624
ttatacaacacaa

SEQ ID NO: 211703 - DNA, 13 bp, Artificial Sequence
  Oligonucleotide for detection of SNP TSC0051624
tcgtgttgtataa

SEQ ID NO: 211704 - DNA, 13 bp, Artificial Sequence
  Oligonucleotide for detection of SNP TSC0051624
ttatacaacacga

SEQ ID NO: 211705 - DNA, 13 bp, Artificial Sequence
  Oligonucleotide for detection of SNP TSC0051624
ttgtgtcgtataa

SEQ ID NO: 211706 - DNA, 13 bp, Artificial Sequence
  Oligonucleotide for detection of SNP TSC0051624
ttatacgacacaa

SEQ ID NO: 211707 - DNA, 13 bp, Artificial Sequence
  Oligonucleotide for detection of SNP TSC0051624
tcgtgtcgtataa

SEQ ID NO: 211708 - DNA, 13 bp, Artificial Sequence
  Oligonucleotide for detection of SNP TSC0051624
ttatacgacacga

SEQ ID NO: 211709 - DNA, 13 bp, Artificial Sequence
  Oligonucleotide for detection of SNP TSC0051624
ttatgtgatatgg

SEQ ID NO: 211710 - DNA, 13 bp, Artificial Sequence
  Oligonucleotide for detection of SNP TSC0051624
ccatatcacataa

SEQ ID NO: 211711 - DNA, 13 bp, Artificial Sequence
  Oligonucleotide for detection of SNP TSC0051624
ttatgtaatatgg

SEQ ID NO: 211712 - DNA, 13 bp, Artificial Sequence
  Oligonucleotide for detection of SNP TSC0051624
ccatattacataa

SEQ ID NO: 211713 - DNA, 13 bp, Artificial Sequence
  Oligonucleotide for detection of SNP TSC0051624
ttatgcgatatgg

SEQ ID NO: 211714 - DNA, 13 bp, Artificial Sequence
  Oligonucleotide for detection of SNP TSC0051624
ccatatcgcataa

SEQ ID NO: 211715 - DNA, 13 bp, Artificial Sequence
  Oligonucleotide for detection of SNP TSC0051624
ttatgtaatacgg

SEQ ID NO: 211716 - DNA, 13 bp, Artificial Sequence
  Oligonucleotide for detection of SNP TSC0051624
ccgtattacataa

SEQ ID NO: 211717 - DNA, 13 bp, Artificial Sequence
  Oligonucleotide for detection of SNP TSC0051624
ttatgtgatacgg

SEQ ID NO: 211718 - DNA, 13 bp, Artificial Sequence
  Oligonucleotide for detection of SNP TSC0051624
ccgtatcacataa

SEQ ID NO: 211719 - DNA, 13 bp, Artificial Sequence
  Oligonucleotide for detection of SNP TSC0051624
ttatgcgatacgg

SEQ ID NO: 211720 - DNA, 13 bp, Artificial Sequence
  Oligonucleotide for detection of SNP TSC0051624
ccgtatcgcataa

SEQ ID NO: 211721 - DNA, 13 bp, Artificial Sequence
  Oligonucleotide for detection of SNP TSC0051625
aggggaataaata

SEQ ID NO: 211722 - DNA, 13 bp, Artificial Sequence
  Oligonucleotide for detection of SNP TSC0051625
tatttattcccct

SEQ ID NO: 211723 - DNA, 13 bp, Artificial Sequence
  Oligonucleotide for detection of SNP TSC0051625
aggggagtaaata

SEQ ID NO: 211724 - DNA, 13 bp, Artificial Sequence
  Oligonucleotide for detection of SNP TSC0051625
tatttactcccct

SEQ ID NO: 211725 - DNA, 13 bp, Artificial Sequence
  Oligonucleotide for detection of SNP TSC0010509
tttttaatagagt

SEQ ID NO: 211726 - DNA, 13 bp, Artificial Sequence
  Oligonucleotide for detection of SNP TSC0010509
actctattaaaaa

SEQ ID NO: 211727 - DNA, 13 bp, Artificial Sequence
  Oligonucleotide for detection of SNP TSC0010509
tttttattagagt

SEQ ID NO: 211728 - DNA, 13 bp, Artificial Sequence
  Oligonucleotide for detection of SNP TSC0010509
actctaataaaaa

SEQ ID NO: 211729 - DNA, 13 bp, Artificial Sequence
  Oligonucleotide for detection of SNP TSC0051627
tttaaagggattt

SEQ ID NO: 211730 - DNA, 13 bp, Artificial Sequence
  Oligonucleotide for detection of SNP TSC0051627
aaatccctttaaa

SEQ ID NO: 211731 - DNA, 13 bp, Artificial Sequence
  Oligonucleotide for detection of SNP TSC0051627
tttaaaaggattt

SEQ ID NO: 211732 - DNA, 13 bp, Artificial Sequence
  Oligonucleotide for detection of SNP TSC0051627
aaatccttttaaa

SEQ ID NO: 211733 - DNA, 13 bp, Artificial Sequence
  Oligonucleotide for detection of SNP TSC0051629
tgtaattgttaag

SEQ ID NO: 211734 - DNA, 13 bp, Artificial Sequence
  Oligonucleotide for detection of SNP TSC0051629
cttaacaattaca

SEQ ID NO: 211735 - DNA, 13 bp, Artificial Sequence
  Oligonucleotide for detection of SNP TSC0051629
tgtaatcgttaag

SEQ ID NO: 211736 - DNA, 13 bp, Artificial Sequence
  Oligonucleotide for detection of SNP TSC0051629
cttaacgattaca

SEQ ID NO: 211737 - DNA, 13 bp, Artificial Sequence
  Oligonucleotide for detection of SNP TSC0051629
tttaatggttgta

SEQ ID NO: 211738 - DNA, 13 bp, Artificial Sequence
  Oligonucleotide for detection of SNP TSC0051629
tacaaccattaaa

SEQ ID NO: 211739 - DNA, 13 bp, Artificial Sequence
  Oligonucleotide for detection of SNP TSC0051629
tttaatagttgta

SEQ ID NO: 211740 - DNA, 13 bp, Artificial Sequence
  Oligonucleotide for detection of SNP TSC0051629
tacaactattaaa

SEQ ID NO: 211741 - DNA, 13 bp, Artificial Sequence
  Oligonucleotide for detection of SNP TSC0051629
tttaacggttgta

SEQ ID NO: 211742 - DNA, 13 bp, Artificial Sequence
  Oligonucleotide for detection of SNP TSC0051629
tacaaccgttaaa

SEQ ID NO: 211743 - DNA, 13 bp, Artificial Sequence
  Oligonucleotide for detection of SNP TSC0051630
tttaaatagttgg

SEQ ID NO: 211744 - DNA, 13 bp, Artificial Sequence
  Oligonucleotide for detection of SNP TSC0051630
ccaactatttaaa

SEQ ID NO: 211745 - DNA, 13 bp, Artificial Sequence
  Oligonucleotide for detection of SNP TSC0051630
tttaaagagttgg

SEQ ID NO: 211746 - DNA, 13 bp, Artificial Sequence
  Oligonucleotide for detection of SNP TSC0051630
ccaactctttaaa

SEQ ID NO: 211747 - DNA, 13 bp, Artificial Sequence
  Oligonucleotide for detection of SNP TSC0051632
attatcgttatat

SEQ ID NO: 211748 - DNA, 13 bp, Artificial Sequence
  Oligonucleotide for detection of SNP TSC0051632
atataacgataat

SEQ ID NO: 211749 - DNA, 13 bp, Artificial Sequence
  Oligonucleotide for detection of SNP TSC0051632
atataatggtggt

SEQ ID NO: 211750 - DNA, 13 bp, Artificial Sequence
  Oligonucleotide for detection of SNP TSC0051632
accaccattatat

SEQ ID NO: 211751 - DNA, 13 bp, Artificial Sequence
  Oligonucleotide for detection of SNP TSC0051632
atataacggtggt

SEQ ID NO: 211752 - DNA, 13 bp, Artificial Sequence
  Oligonucleotide for detection of SNP TSC0051632
accaccgttatat

SEQ ID NO: 211753 - DNA, 13 bp, Artificial Sequence
  Oligonucleotide for detection of SNP TSC0051633
ataattagaatgt

SEQ ID NO: 211754 - DNA, 13 bp, Artificial Sequence
  Oligonucleotide for detection of SNP TSC0051633
acattctaattat

SEQ ID NO: 211755 - DNA, 13 bp, Artificial Sequence
  Oligonucleotide for detection of SNP TSC0051633
ataattggaatgt

SEQ ID NO: 211756 - DNA, 13 bp, Artificial Sequence
  Oligonucleotide for detection of SNP TSC0051633
acattccaattat

SEQ ID NO: 211757 - DNA, 13 bp, Artificial Sequence
  Oligonucleotide for detection of SNP TSC0051633
ataatcggaatgt

SEQ ID NO: 211758 - DNA, 13 bp, Artificial Sequence
  Oligonucleotide for detection of SNP TSC0051633
acattccgattat

SEQ ID NO: 211759 - DNA, 13 bp, Artificial Sequence
  Oligonucleotide for detection of SNP TSC0051633
atattttgattgt

SEQ ID NO: 211760 - DNA, 13 bp, Artificial Sequence
  Oligonucleotide for detection of SNP TSC0051633
acaatcaaaatat

SEQ ID NO: 211761 - DNA, 13 bp, Artificial Sequence
  Oligonucleotide for detection of SNP TSC0051633
atatttcgattgt

SEQ ID NO: 211762 - DNA, 13 bp, Artificial Sequence
  Oligonucleotide for detection of SNP TSC0051633
acaatcgaaatat

SEQ ID NO: 211763 - DNA, 13 bp, Artificial Sequence
  Oligonucleotide for detection of SNP TSC0051634
tttttaagtttay

SEQ ID NO: 211764 - DNA, 13 bp, Artificial Sequence
  Oligonucleotide for detection of SNP TSC0051634
rtaaacttaaaaa

SEQ ID NO: 211765 - DNA, 13 bp, Artificial Sequence
  Oligonucleotide for detection of SNP TSC0051634
tttttaggtttay

SEQ ID NO: 211766 - DNA, 13 bp, Artificial Sequence
  Oligonucleotide for detection of SNP TSC0051634
rtaaacctaaaaa

SEQ ID NO: 211767 - DNA, 13 bp, Artificial Sequence
  Oligonucleotide for detection of SNP TSC0051635
ggtgggagggaaa

SEQ ID NO: 211768 - DNA, 13 bp, Artificial Sequence
  Oligonucleotide for detection of SNP TSC0051635
tttccctcccacc

SEQ ID NO: 211769 - DNA, 13 bp, Artificial Sequence
  Oligonucleotide for detection of SNP TSC0051635
ggtgggggggaaa

SEQ ID NO: 211770 - DNA, 13 bp, Artificial Sequence
  Oligonucleotide for detection of SNP TSC0051635
tttcccccccacc

SEQ ID NO: 211771 - DNA, 13 bp, Artificial Sequence
  Oligonucleotide for detection of SNP TSC0051635
ggcgggagggaaa

SEQ ID NO: 211772 - DNA, 13 bp, Artificial Sequence
  Oligonucleotide for detection of SNP TSC0051635
tttccctcccgcc

SEQ ID NO: 211773 - DNA, 13 bp, Artificial Sequence
  Oligonucleotide for detection of SNP TSC0051635
ggcgggggggaaa

SEQ ID NO: 211774 - DNA, 13 bp, Artificial Sequence
  Oligonucleotide for detection of SNP TSC0051635
tttcccccccgcc

SEQ ID NO: 211775 - DNA, 13 bp, Artificial Sequence
  Oligonucleotide for detection of SNP TSC0010776
gtaaatatttgta

SEQ ID NO: 211776 - DNA, 13 bp, Artificial Sequence
  Oligonucleotide for detection of SNP TSC0010776
tacaaatatttac

SEQ ID NO: 211777 - DNA, 13 bp, Artificial Sequence
  Oligonucleotide for detection of SNP TSC0010776
gtaaatgtttgta

SEQ ID NO: 211778 - DNA, 13 bp, Artificial Sequence
  Oligonucleotide for detection of SNP TSC0010776
tacaaacatttac

SEQ ID NO: 211779 - DNA, 13 bp, Artificial Sequence
  Oligonucleotide for detection of SNP TSC0010776
gtaaatattcgta

SEQ ID NO: 211780 - DNA, 13 bp, Artificial Sequence
  Oligonucleotide for detection of SNP TSC0010776
tacgaatatttac

SEQ ID NO: 211781 - DNA, 13 bp, Artificial Sequence
  Oligonucleotide for detection of SNP TSC0010776
gtaaacgtttgta

SEQ ID NO: 211782 - DNA, 13 bp, Artificial Sequence
  Oligonucleotide for detection of SNP TSC0010776
tacaaacgtttac

SEQ ID NO: 211783 - DNA, 13 bp, Artificial Sequence
  Oligonucleotide for detection of SNP TSC0010776
gtaaatgttcgta

SEQ ID NO: 211784 - DNA, 13 bp, Artificial Sequence
  Oligonucleotide for detection of SNP TSC0010776
tacgaacatttac

SEQ ID NO: 211785 - DNA, 13 bp, Artificial Sequence
  Oligonucleotide for detection of SNP TSC0010776
gtaaacgttcgta

SEQ ID NO: 211786 - DNA, 13 bp, Artificial Sequence
  Oligonucleotide for detection of SNP TSC0010776
tacgaacgtttac

SEQ ID NO: 211787 - DNA, 13 bp, Artificial Sequence
  Oligonucleotide for detection of SNP TSC0010776
tgtgaatgtttgy

SEQ ID NO: 211788 - DNA, 13 bp, Artificial Sequence
  Oligonucleotide for detection of SNP TSC0010776
rcaaacattcaca

SEQ ID NO: 211789 - DNA, 13 bp, Artificial Sequence
  Oligonucleotide for detection of SNP TSC0010776
tgcgaatgtttgy

SEQ ID NO: 211790 - DNA, 13 bp, Artificial Sequence
  Oligonucleotide for detection of SNP TSC0010776
rcaaacattcgca

SEQ ID NO: 211791 - DNA, 13 bp, Artificial Sequence
  Oligonucleotide for detection of SNP TSC0010776
tgtgaacgtttgy

SEQ ID NO: 211792 - DNA, 13 bp, Artificial Sequence
  Oligonucleotide for detection of SNP TSC0010776
rcaaacgttcaca

SEQ ID NO: 211793 - DNA, 13 bp, Artificial Sequence
  Oligonucleotide for detection of SNP TSC0010776
tgcgaacgtttgy

SEQ ID NO: 211794 - DNA, 13 bp, Artificial Sequence
  Oligonucleotide for detection of SNP TSC0010776
rcaaacgttcgca

SEQ ID NO: 211795 - DNA, 13 bp, Artificial Sequence
  Oligonucleotide for detection of SNP TSC0051636
attagaaaagtat

SEQ ID NO: 211796 - DNA, 13 bp, Artificial Sequence
  Oligonucleotide for detection of SNP TSC0051636
atacttttctaat

SEQ ID NO: 211797 - DNA, 13 bp, Artificial Sequence
  Oligonucleotide for detection of SNP TSC0051636
attagataagtat

SEQ ID NO: 211798 - DNA, 13 bp, Artificial Sequence
  Oligonucleotide for detection of SNP TSC0051636
atacttatctaat

SEQ ID NO: 211799 - DNA, 13 bp, Artificial Sequence
  Oligonucleotide for detection of SNP TSC0051636
atgtttttttgat

SEQ ID NO: 211800 - DNA, 13 bp, Artificial Sequence
  Oligonucleotide for detection of SNP TSC0051636
atcaaaaaaacat

SEQ ID NO: 211801 - DNA, 13 bp, Artificial Sequence
  Oligonucleotide for detection of SNP TSC0051636
atgtttgtttgat

SEQ ID NO: 211802 - DNA, 13 bp, Artificial Sequence
  Oligonucleotide for detection of SNP TSC0051636
atcaaacaaacat

SEQ ID NO: 211803 - DNA, 13 bp, Artificial Sequence
  Oligonucleotide for detection of SNP TSC0051636
atgtttatttgat

SEQ ID NO: 211804 - DNA, 13 bp, Artificial Sequence
  Oligonucleotide for detection of SNP TSC0051636
atcaaataaacat

SEQ ID NO: 211805 - DNA, 13 bp, Artificial Sequence
  Oligonucleotide for detection of SNP TSC0051637
tatgtatgtttay

SEQ ID NO: 211806 - DNA, 13 bp, Artificial Sequence
  Oligonucleotide for detection of SNP TSC0051637
rtaaacatacata

SEQ ID NO: 211807 - DNA, 13 bp, Artificial Sequence
  Oligonucleotide for detection of SNP TSC0051637
tatgtacgtttay

SEQ ID NO: 211808 - DNA, 13 bp, Artificial Sequence
  Oligonucleotide for detection of SNP TSC0051637
rtaaacgtacata

SEQ ID NO: 211809 - DNA, 13 bp, Artificial Sequence
  Oligonucleotide for detection of SNP TSC0051638
ttattaattaaat

SEQ ID NO: 211810 - DNA, 13 bp, Artificial Sequence
  Oligonucleotide for detection of SNP TSC0051638
atttaattaataa

SEQ ID NO: 211811 - DNA, 13 bp, Artificial Sequence
  Oligonucleotide for detection of SNP TSC0051638
ttattagttaaat

SEQ ID NO: 211812 - DNA, 13 bp, Artificial Sequence
  Oligonucleotide for detection of SNP TSC0051638
atttaactaataa

SEQ ID NO: 211813 - DNA, 13 bp, Artificial Sequence
  Oligonucleotide for detection of SNP TSC0006883
tttttatgtaggt

SEQ ID NO: 211814 - DNA, 13 bp, Artificial Sequence
  Oligonucleotide for detection of SNP TSC0006883
acctacataaaaa

SEQ ID NO: 211815 - DNA, 13 bp, Artificial Sequence
  Oligonucleotide for detection of SNP TSC0006883
tttttacgtaggt

SEQ ID NO: 211816 - DNA, 13 bp, Artificial Sequence
  Oligonucleotide for detection of SNP TSC0006883
acctacgtaaaaa

SEQ ID NO: 211817 - DNA, 13 bp, Artificial Sequence
  Oligonucleotide for detection of SNP TSC0006883
atttgtgtgaagg

SEQ ID NO: 211818 - DNA, 13 bp, Artificial Sequence
  Oligonucleotide for detection of SNP TSC0006883
ccttcacacaaat

SEQ ID NO: 211819 - DNA, 13 bp, Artificial Sequence
  Oligonucleotide for detection of SNP TSC0006883
atttgtatgaagg

SEQ ID NO: 211820 - DNA, 13 bp, Artificial Sequence
  Oligonucleotide for detection of SNP TSC0006883
ccttcatacaaat

SEQ ID NO: 211821 - DNA, 13 bp, Artificial Sequence
  Oligonucleotide for detection of SNP TSC0006883
atttgcgtgaagg

SEQ ID NO: 211822 - DNA, 13 bp, Artificial Sequence
  Oligonucleotide for detection of SNP TSC0006883
ccttcacgcaaat

SEQ ID NO: 211823 - DNA, 13 bp, Artificial Sequence
  Oligonucleotide for detection of SNP TSC0006884
agagtatgtttty

SEQ ID NO: 211824 - DNA, 13 bp, Artificial Sequence
  Oligonucleotide for detection of SNP TSC0006884
raaaacatactct

SEQ ID NO: 211825 - DNA, 13 bp, Artificial Sequence
  Oligonucleotide for detection of SNP TSC0006884
agagtaggtttty

SEQ ID NO: 211826 - DNA, 13 bp, Artificial Sequence
  Oligonucleotide for detection of SNP TSC0006884
raaaacctactct

SEQ ID NO: 211827 - DNA, 13 bp, Artificial Sequence
  Oligonucleotide for detection of SNP TSC0051639
gatatgtggtttt

SEQ ID NO: 211828 - DNA, 13 bp, Artificial Sequence
  Oligonucleotide for detection of SNP TSC0051639
aaaaccacatatc

SEQ ID NO: 211829 - DNA, 13 bp, Artificial Sequence
  Oligonucleotide for detection of SNP TSC0051639
gatatgcggtttt

SEQ ID NO: 211830 - DNA, 13 bp, Artificial Sequence
  Oligonucleotide for detection of SNP TSC0051639
aaaaccgcatatc

SEQ ID NO: 211831 - DNA, 13 bp, Artificial Sequence
  Oligonucleotide for detection of SNP TSC0051639
aagattgtataty

SEQ ID NO: 211832 - DNA, 13 bp, Artificial Sequence
  Oligonucleotide for detection of SNP TSC0051639
ratatacaatctt

SEQ ID NO: 211833 - DNA, 13 bp, Artificial Sequence
  Oligonucleotide for detection of SNP TSC0051639
aagattatataty

SEQ ID NO: 211834 - DNA, 13 bp, Artificial Sequence
  Oligonucleotide for detection of SNP TSC0051639
ratatataatctt

SEQ ID NO: 211835 - DNA, 13 bp, Artificial Sequence
  Oligonucleotide for detection of SNP TSC0051639
aagatcgtataty

SEQ ID NO: 211836 - DNA, 13 bp, Artificial Sequence
  Oligonucleotide for detection of SNP TSC0051639
ratatacgatctt

SEQ ID NO: 211837 - DNA, 13 bp, Artificial Sequence
  Oligonucleotide for detection of SNP TSC0051640
aaattcgttaaat

SEQ ID NO: 211838 - DNA, 13 bp, Artificial Sequence
  Oligonucleotide for detection of SNP TSC0051640
atttaacgaattt

SEQ ID NO: 211839 - DNA, 13 bp, Artificial Sequence
  Oligonucleotide for detection of SNP TSC0007475
aagatttgtatta

SEQ ID NO: 211840 - DNA, 13 bp, Artificial Sequence
  Oligonucleotide for detection of SNP TSC0007475
taatacaaatctt

SEQ ID NO: 211841 - DNA, 13 bp, Artificial Sequence
  Oligonucleotide for detection of SNP TSC0007475
aagattcgtatta

SEQ ID NO: 211842 - DNA, 13 bp, Artificial Sequence
  Oligonucleotide for detection of SNP TSC0007475
taatacgaatctt

SEQ ID NO: 211843 - DNA, 13 bp, Artificial Sequence
  Oligonucleotide for detection of SNP TSC0051645
aaatgtatatttt

SEQ ID NO: 211844 - DNA, 13 bp, Artificial Sequence
  Oligonucleotide for detection of SNP TSC0051645
aaaatatacattt

SEQ ID NO: 211845 - DNA, 13 bp, Artificial Sequence
  Oligonucleotide for detection of SNP TSC0051645
aaatgtgtatttt

SEQ ID NO: 211846 - DNA, 13 bp, Artificial Sequence
  Oligonucleotide for detection of SNP TSC0051645
aaaatacacattt

SEQ ID NO: 211847 - DNA, 13 bp, Artificial Sequence
  Oligonucleotide for detection of SNP TSC0051645
aaatgcgtatttt

SEQ ID NO: 211848 - DNA, 13 bp, Artificial Sequence
  Oligonucleotide for detection of SNP TSC0051645
aaaatacgcattt

SEQ ID NO: 211849 - DNA, 13 bp, Artificial Sequence
  Oligonucleotide for detection of SNP TSC0051645
agggtgtgtattt

SEQ ID NO: 211850 - DNA, 13 bp, Artificial Sequence
  Oligonucleotide for detection of SNP TSC0051645
aaatacacaccct

SEQ ID NO: 211851 - DNA, 13 bp, Artificial Sequence
  Oligonucleotide for detection of SNP TSC0051645
agggtgcgtattt

SEQ ID NO: 211852 - DNA, 13 bp, Artificial Sequence
  Oligonucleotide for detection of SNP TSC0051645
aaatacgcaccct

SEQ ID NO: 211853 - DNA, 13 bp, Artificial Sequence
  Oligonucleotide for detection of SNP TSC0051646
gaatttttaaagy

SEQ ID NO: 211854 - DNA, 13 bp, Artificial Sequence
  Oligonucleotide for detection of SNP TSC0051646
rctttaaaaattc

SEQ ID NO: 211855 - DNA, 13 bp, Artificial Sequence
  Oligonucleotide for detection of SNP TSC0051646
gaatttgtaaagy

SEQ ID NO: 211856 - DNA, 13 bp, Artificial Sequence
  Oligonucleotide for detection of SNP TSC0051646
rctttacaaattc

SEQ ID NO: 211857 - DNA, 13 bp, Artificial Sequence
  Oligonucleotide for detection of SNP TSC0051646
gttttaaaaatty

SEQ ID NO: 211858 - DNA, 13 bp, Artificial Sequence
  Oligonucleotide for detection of SNP TSC0051646
raatttttaaaac

SEQ ID NO: 211859 - DNA, 13 bp, Artificial Sequence
  Oligonucleotide for detection of SNP TSC0051646
gttttataaatty

SEQ ID NO: 211860 - DNA, 13 bp, Artificial Sequence
  Oligonucleotide for detection of SNP TSC0051646
raatttataaaac

SEQ ID NO: 211861 - DNA, 13 bp, Artificial Sequence
  Oligonucleotide for detection of SNP TSC0051648
ttgatttattttg

SEQ ID NO: 211862 - DNA, 13 bp, Artificial Sequence
  Oligonucleotide for detection of SNP TSC0051648
caaaataaatcaa

SEQ ID NO: 211863 - DNA, 13 bp, Artificial Sequence
  Oligonucleotide for detection of SNP TSC0051648
ttgattgattttg

SEQ ID NO: 211864 - DNA, 13 bp, Artificial Sequence
  Oligonucleotide for detection of SNP TSC0051648
caaaatcaatcaa

SEQ ID NO: 211865 - DNA, 13 bp, Artificial Sequence
  Oligonucleotide for detection of SNP TSC0051648
tagaatgaattag

SEQ ID NO: 211866 - DNA, 13 bp, Artificial Sequence
  Oligonucleotide for detection of SNP TSC0051648
ctaattcattcta

SEQ ID NO: 211867 - DNA, 13 bp, Artificial Sequence
  Oligonucleotide for detection of SNP TSC0051648
tagaattaattag

SEQ ID NO: 211868 - DNA, 13 bp, Artificial Sequence
  Oligonucleotide for detection of SNP TSC0051648
ctaattaattcta

SEQ ID NO: 211869 - DNA, 13 bp, Artificial Sequence
  Oligonucleotide for detection of SNP TSC0051649
tgtttttaaaata

SEQ ID NO: 211870 - DNA, 13 bp, Artificial Sequence
  Oligonucleotide for detection of SNP TSC0051649
tattttaaaaaca

SEQ ID NO: 211871 - DNA, 13 bp, Artificial Sequence
  Oligonucleotide for detection of SNP TSC0051649
tatttttggggta

SEQ ID NO: 211872 - DNA, 13 bp, Artificial Sequence
  Oligonucleotide for detection of SNP TSC0051649
taccccaaaaata

SEQ ID NO: 211873 - DNA, 13 bp, Artificial Sequence
  Oligonucleotide for detection of SNP TSC0051649
tattttgggggta

SEQ ID NO: 211874 - DNA, 13 bp, Artificial Sequence
  Oligonucleotide for detection of SNP TSC0051649
tacccccaaaata

SEQ ID NO: 211875 - DNA, 13 bp, Artificial Sequence
  Oligonucleotide for detection of SNP TSC0051650
tttttaaatgttt

SEQ ID NO: 211876 - DNA, 13 bp, Artificial Sequence
  Oligonucleotide for detection of SNP TSC0051650
aaacatttaaaaa

SEQ ID NO: 211877 - DNA, 13 bp, Artificial Sequence
  Oligonucleotide for detection of SNP TSC0051650
tttttagatgttt

SEQ ID NO: 211878 - DNA, 13 bp, Artificial Sequence
  Oligonucleotide for detection of SNP TSC0051650
aaacatctaaaaa

SEQ ID NO: 211879 - DNA, 13 bp, Artificial Sequence
  Oligonucleotide for detection of SNP TSC0051651
ttatttgtagata

SEQ ID NO: 211880 - DNA, 13 bp, Artificial Sequence
  Oligonucleotide for detection of SNP TSC0051651
tatctacaaataa

SEQ ID NO: 211881 - DNA, 13 bp, Artificial Sequence
  Oligonucleotide for detection of SNP TSC0051651
ttatttatagata

SEQ ID NO: 211882 - DNA, 13 bp, Artificial Sequence
  Oligonucleotide for detection of SNP TSC0051651
tatctataaataa

SEQ ID NO: 211883 - DNA, 13 bp, Artificial Sequence
  Oligonucleotide for detection of SNP TSC0051654
ttaaaataaaaay

SEQ ID NO: 211884 - DNA, 13 bp, Artificial Sequence
  Oligonucleotide for detection of SNP TSC0051654
rtttttattttaa

SEQ ID NO: 211885 - DNA, 13 bp, Artificial Sequence
  Oligonucleotide for detection of SNP TSC0051654
ttaaaagaaaaay

SEQ ID NO: 211886 - DNA, 13 bp, Artificial Sequence
  Oligonucleotide for detection of SNP TSC0051654
rtttttcttttaa

SEQ ID NO: 211887 - DNA, 13 bp, Artificial Sequence
  Oligonucleotide for detection of SNP TSC0051655
taaaagaaaaata

SEQ ID NO: 211888 - DNA, 13 bp, Artificial Sequence
  Oligonucleotide for detection of SNP TSC0051655
tatttttctttta

SEQ ID NO: 211889 - DNA, 13 bp, Artificial Sequence
  Oligonucleotide for detection of SNP TSC0051655
taaaaggaaaata

SEQ ID NO: 211890 - DNA, 13 bp, Artificial Sequence
  Oligonucleotide for detection of SNP TSC0051655
tattttcctttta

SEQ ID NO: 211891 - DNA, 13 bp, Artificial Sequence
  Oligonucleotide for detection of SNP TSC0005186
tgatttagagagt

SEQ ID NO: 211892 - DNA, 13 bp, Artificial Sequence
  Oligonucleotide for detection of SNP TSC0005186
actctctaaatca

SEQ ID NO: 211893 - DNA, 13 bp, Artificial Sequence
  Oligonucleotide for detection of SNP TSC0005186
tgattttgagagt

SEQ ID NO: 211894 - DNA, 13 bp, Artificial Sequence
  Oligonucleotide for detection of SNP TSC0005186
actctcaaaatca

SEQ ID NO: 211895 - DNA, 13 bp, Artificial Sequence
  Oligonucleotide for detection of SNP TSC0005186
tgatttcgagagt

SEQ ID NO: 211896 - DNA, 13 bp, Artificial Sequence
  Oligonucleotide for detection of SNP TSC0005186
actctcgaaatca

SEQ ID NO: 211897 - DNA, 13 bp, Artificial Sequence
  Oligonucleotide for detection of SNP TSC0005186
attttttgggtta

SEQ ID NO: 211898 - DNA, 13 bp, Artificial Sequence
  Oligonucleotide for detection of SNP TSC0005186
taacccaaaaaat

SEQ ID NO: 211899 - DNA, 13 bp, Artificial Sequence
  Oligonucleotide for detection of SNP TSC0005186
atttttggggtta

SEQ ID NO: 211900 - DNA, 13 bp, Artificial Sequence
  Oligonucleotide for detection of SNP TSC0005186
taaccccaaaaat

SEQ ID NO: 211901 - DNA, 13 bp, Artificial Sequence
  Oligonucleotide for detection of SNP TSC0005186
attttcggggtta

SEQ ID NO: 211902 - DNA, 13 bp, Artificial Sequence
  Oligonucleotide for detection of SNP TSC0005186
taaccccgaaaat

SEQ ID NO: 211903 - DNA, 13 bp, Artificial Sequence
  Oligonucleotide for detection of SNP TSC0009479
ttttgaattatty

SEQ ID NO: 211904 - DNA, 13 bp, Artificial Sequence
  Oligonucleotide for detection of SNP TSC0009479
raataattcaaaa

SEQ ID NO: 211905 - DNA, 13 bp, Artificial Sequence
  Oligonucleotide for detection of SNP TSC0009479
ttttgatttatty

SEQ ID NO: 211906 - DNA, 13 bp, Artificial Sequence
  Oligonucleotide for detection of SNP TSC0009479
raataaatcaaaa

SEQ ID NO: 211907 - DNA, 13 bp, Artificial Sequence
  Oligonucleotide for detection of SNP TSC0009479
tttcgaattatty

SEQ ID NO: 211908 - DNA, 13 bp, Artificial Sequence
  Oligonucleotide for detection of SNP TSC0009479
raataattcgaaa

SEQ ID NO: 211909 - DNA, 13 bp, Artificial Sequence
  Oligonucleotide for detection of SNP TSC0009479
tttcgatttatty

SEQ ID NO: 211910 - DNA, 13 bp, Artificial Sequence
  Oligonucleotide for detection of SNP TSC0009479
raataaatcgaaa

SEQ ID NO: 211911 - DNA, 13 bp, Artificial Sequence
  Oligonucleotide for detection of SNP TSC0009479
gggtgatttggag

SEQ ID NO: 211912 - DNA, 13 bp, Artificial Sequence
  Oligonucleotide for detection of SNP TSC0009479
ctccaaatcaccc

SEQ ID NO: 211913 - DNA, 13 bp, Artificial Sequence
  Oligonucleotide for detection of SNP TSC0009479
gggtgaattggag

SEQ ID NO: 211914 - DNA, 13 bp, Artificial Sequence
  Oligonucleotide for detection of SNP TSC0009479
ctccaattcaccc

SEQ ID NO: 211915 - DNA, 13 bp, Artificial Sequence
  Oligonucleotide for detection of SNP TSC0009479
gggtgattcggag

SEQ ID NO: 211916 - DNA, 13 bp, Artificial Sequence
  Oligonucleotide for detection of SNP TSC0009479
ctccgaatcaccc

SEQ ID NO: 211917 - DNA, 13 bp, Artificial Sequence
  Oligonucleotide for detection of SNP TSC0009479
gggtgaatcggag

SEQ ID NO: 211918 - DNA, 13 bp, Artificial Sequence
  Oligonucleotide for detection of SNP TSC0009479
ctccgattcaccc

SEQ ID NO: 211919 - DNA, 13 bp, Artificial Sequence
  Oligonucleotide for detection of SNP TSC0010587
aaattttataaaa

SEQ ID NO: 211920 - DNA, 13 bp, Artificial Sequence
  Oligonucleotide for detection of SNP TSC0010587
ttttataaaattt

SEQ ID NO: 211921 - DNA, 13 bp, Artificial Sequence
  Oligonucleotide for detection of SNP TSC0010587
aaatttgataaaa

SEQ ID NO: 211922 - DNA, 13 bp, Artificial Sequence
  Oligonucleotide for detection of SNP TSC0010587
ttttatcaaattt

SEQ ID NO: 211923 - DNA, 13 bp, Artificial Sequence
  Oligonucleotide for detection of SNP TSC0010587
aaattcgataaaa

SEQ ID NO: 211924 - DNA, 13 bp, Artificial Sequence
  Oligonucleotide for detection of SNP TSC0010587
ttttatcgaattt

SEQ ID NO: 211925 - DNA, 13 bp, Artificial Sequence
  Oligonucleotide for detection of SNP TSC0010587
ttttatggagttt

SEQ ID NO: 211926 - DNA, 13 bp, Artificial Sequence
  Oligonucleotide for detection of SNP TSC0010587
aaactccataaaa

SEQ ID NO: 211927 - DNA, 13 bp, Artificial Sequence
  Oligonucleotide for detection of SNP TSC0051665
aaaatatgtgtag

SEQ ID NO: 211928 - DNA, 13 bp, Artificial Sequence
  Oligonucleotide for detection of SNP TSC0051665
ctacacatatttt

SEQ ID NO: 211929 - DNA, 13 bp, Artificial Sequence
  Oligonucleotide for detection of SNP TSC0051665
aaaatacgtgtag

SEQ ID NO: 211930 - DNA, 13 bp, Artificial Sequence
  Oligonucleotide for detection of SNP TSC0051665
ctacacgtatttt

SEQ ID NO: 211931 - DNA, 13 bp, Artificial Sequence
  Oligonucleotide for detection of SNP TSC0051666
agtaattaatgag

SEQ ID NO: 211932 - DNA, 13 bp, Artificial Sequence
  Oligonucleotide for detection of SNP TSC0051666
ctcattaattact

SEQ ID NO: 211933 - DNA, 13 bp, Artificial Sequence
  Oligonucleotide for detection of SNP TSC0051666
agtaatgaatgag

SEQ ID NO: 211934 - DNA, 13 bp, Artificial Sequence
  Oligonucleotide for detection of SNP TSC0051666
ctcattcattact

SEQ ID NO: 211935 - DNA, 13 bp, Artificial Sequence
  Oligonucleotide for detection of SNP TSC0010458
tatagatgaatta

SEQ ID NO: 211936 - DNA, 13 bp, Artificial Sequence
  Oligonucleotide for detection of SNP TSC0010458
taattcatctata

SEQ ID NO: 211937 - DNA, 13 bp, Artificial Sequence
  Oligonucleotide for detection of SNP TSC0010458
tatagaggaatta

SEQ ID NO: 211938 - DNA, 13 bp, Artificial Sequence
  Oligonucleotide for detection of SNP TSC0010458
taattcctctata

SEQ ID NO: 211939 - DNA, 13 bp, Artificial Sequence
  Oligonucleotide for detection of SNP TSC0010458
tggtttatttgtg

SEQ ID NO: 211940 - DNA, 13 bp, Artificial Sequence
  Oligonucleotide for detection of SNP TSC0010458
cacaaataaacca

SEQ ID NO: 211941 - DNA, 13 bp, Artificial Sequence
  Oligonucleotide for detection of SNP TSC0010458
tggtttttttgtg

SEQ ID NO: 211942 - DNA, 13 bp, Artificial Sequence
  Oligonucleotide for detection of SNP TSC0010458
cacaaaaaaacca

SEQ ID NO: 211943 - DNA, 13 bp, Artificial Sequence
  Oligonucleotide for detection of SNP TSC0010459
tgggaaagggtty

SEQ ID NO: 211944 - DNA, 13 bp, Artificial Sequence
  Oligonucleotide for detection of SNP TSC0010459
raaccctttccca

SEQ ID NO: 211945 - DNA, 13 bp, Artificial Sequence
  Oligonucleotide for detection of SNP TSC0010459
tgggaaggggtty

SEQ ID NO: 211946 - DNA, 13 bp, Artificial Sequence
  Oligonucleotide for detection of SNP TSC0010459
raaccccttccca

SEQ ID NO: 211947 - DNA, 13 bp, Artificial Sequence
  Oligonucleotide for detection of SNP TSC0051667
gatattataggaa

SEQ ID NO: 211948 - DNA, 13 bp, Artificial Sequence
  Oligonucleotide for detection of SNP TSC0051667
ttcctataatatc

SEQ ID NO: 211949 - DNA, 13 bp, Artificial Sequence
  Oligonucleotide for detection of SNP TSC0051667
gatattgtaggaa

SEQ ID NO: 211950 - DNA, 13 bp, Artificial Sequence
  Oligonucleotide for detection of SNP TSC0051667
ttcctacaatatc

SEQ ID NO: 211951 - DNA, 13 bp, Artificial Sequence
  Oligonucleotide for detection of SNP TSC0051667
gatatcgtaggaa

SEQ ID NO: 211952 - DNA, 13 bp, Artificial Sequence
  Oligonucleotide for detection of SNP TSC0051667
ttcctacgatatc

SEQ ID NO: 211953 - DNA, 13 bp, Artificial Sequence
  Oligonucleotide for detection of SNP TSC0051667
tttttatggtgty

SEQ ID NO: 211954 - DNA, 13 bp, Artificial Sequence
  Oligonucleotide for detection of SNP TSC0051667
racaccataaaaa

SEQ ID NO: 211955 - DNA, 13 bp, Artificial Sequence
  Oligonucleotide for detection of SNP TSC0051667
tttttacggtgty

SEQ ID NO: 211956 - DNA, 13 bp, Artificial Sequence
  Oligonucleotide for detection of SNP TSC0051667
racaccgtaaaaa

SEQ ID NO: 211957 - DNA, 13 bp, Artificial Sequence
  Oligonucleotide for detection of SNP TSC0004686
atttataatttta

SEQ ID NO: 211958 - DNA, 13 bp, Artificial Sequence
  Oligonucleotide for detection of SNP TSC0004686
taaaattataaat

SEQ ID NO: 211959 - DNA, 13 bp, Artificial Sequence
  Oligonucleotide for detection of SNP TSC0004686
atttatgatttta

SEQ ID NO: 211960 - DNA, 13 bp, Artificial Sequence
  Oligonucleotide for detection of SNP TSC0004686
taaaatcataaat

SEQ ID NO: 211961 - DNA, 13 bp, Artificial Sequence
  Oligonucleotide for detection of SNP TSC0004686
atttacgatttta

SEQ ID NO: 211962 - DNA, 13 bp, Artificial Sequence
  Oligonucleotide for detection of SNP TSC0004686
taaaatcgtaaat

SEQ ID NO: 211963 - DNA, 13 bp, Artificial Sequence
  Oligonucleotide for detection of SNP TSC0004686
tgaaattgtaggt

SEQ ID NO: 211964 - DNA, 13 bp, Artificial Sequence
  Oligonucleotide for detection of SNP TSC0004686
acctacaatttca

SEQ ID NO: 211965 - DNA, 13 bp, Artificial Sequence
  Oligonucleotide for detection of SNP TSC0004686
tgaaatcgtaggt

SEQ ID NO: 211966 - DNA, 13 bp, Artificial Sequence
  Oligonucleotide for detection of SNP TSC0004686
acctacgatttca

SEQ ID NO: 211967 - DNA, 13 bp, Artificial Sequence
  Oligonucleotide for detection of SNP TSC0051670
tgtgtgtggggag

SEQ ID NO: 211968 - DNA, 13 bp, Artificial Sequence
  Oligonucleotide for detection of SNP TSC0051670
ctccccacacaca

SEQ ID NO: 211969 - DNA, 13 bp, Artificial Sequence
  Oligonucleotide for detection of SNP TSC0051670
cgtgtgtggggag

SEQ ID NO: 211970 - DNA, 13 bp, Artificial Sequence
  Oligonucleotide for detection of SNP TSC0051670
ctccccacacacg

SEQ ID NO: 211971 - DNA, 13 bp, Artificial Sequence
  Oligonucleotide for detection of SNP TSC0051670
tgtgtgcggggag

SEQ ID NO: 211972 - DNA, 13 bp, Artificial Sequence
  Oligonucleotide for detection of SNP TSC0051670
ctccccgcacaca

SEQ ID NO: 211973 - DNA, 13 bp, Artificial Sequence
  Oligonucleotide for detection of SNP TSC0051670
cgtgtgcggggag

SEQ ID NO: 211974 - DNA, 13 bp, Artificial Sequence
  Oligonucleotide for detection of SNP TSC0051670
ctccccgcacacg

SEQ ID NO: 211975 - DNA, 13 bp, Artificial Sequence
  Oligonucleotide for detection of SNP TSC0051670
ttttttatatatg

SEQ ID NO: 211976 - DNA, 13 bp, Artificial Sequence
  Oligonucleotide for detection of SNP TSC0051670
catatataaaaaa

SEQ ID NO: 211977 - DNA, 13 bp, Artificial Sequence
  Oligonucleotide for detection of SNP TSC0051670
ttttttatatacg

SEQ ID NO: 211978 - DNA, 13 bp, Artificial Sequence
  Oligonucleotide for detection of SNP TSC0051670
cgtatataaaaaa

SEQ ID NO: 211979 - DNA, 13 bp, Artificial Sequence
  Oligonucleotide for detection of SNP TSC0051670
ttttttgtatacg

SEQ ID NO: 211980 - DNA, 13 bp, Artificial Sequence
  Oligonucleotide for detection of SNP TSC0051670
cgtatacaaaaaa

SEQ ID NO: 211981 - DNA, 13 bp, Artificial Sequence
  Oligonucleotide for detection of SNP TSC0051670
tttttcgtatacg

SEQ ID NO: 211982 - DNA, 13 bp, Artificial Sequence
  Oligonucleotide for detection of SNP TSC0051670
cgtatacgaaaaa

SEQ ID NO: 211983 - DNA, 13 bp, Artificial Sequence
  Oligonucleotide for detection of SNP TSC0051671
gtgttgtatagtt

SEQ ID NO: 211984 - DNA, 13 bp, Artificial Sequence
  Oligonucleotide for detection of SNP TSC0051671
aactatacaacac

SEQ ID NO: 211985 - DNA, 13 bp, Artificial Sequence
  Oligonucleotide for detection of SNP TSC0051671
gtgttggatagtt

SEQ ID NO: 211986 - DNA, 13 bp, Artificial Sequence
  Oligonucleotide for detection of SNP TSC0051671
aactatccaacac

SEQ ID NO: 211987 - DNA, 13 bp, Artificial Sequence
  Oligonucleotide for detection of SNP TSC0051671
agttgtgtagtay

SEQ ID NO: 211988 - DNA, 13 bp, Artificial Sequence
  Oligonucleotide for detection of SNP TSC0051671
rtactacacaact

SEQ ID NO: 211989 - DNA, 13 bp, Artificial Sequence
  Oligonucleotide for detection of SNP TSC0051671
agttgtttagtay

SEQ ID NO: 211990 - DNA, 13 bp, Artificial Sequence
  Oligonucleotide for detection of SNP TSC0051671
rtactaaacaact

SEQ ID NO: 211991 - DNA, 13 bp, Artificial Sequence
  Oligonucleotide for detection of SNP TSC0051672
tgttgtatagttg

SEQ ID NO: 211992 - DNA, 13 bp, Artificial Sequence
  Oligonucleotide for detection of SNP TSC0051672
caactatacaaca

SEQ ID NO: 211993 - DNA, 13 bp, Artificial Sequence
  Oligonucleotide for detection of SNP TSC0051672
tgttgtgtagttg

SEQ ID NO: 211994 - DNA, 13 bp, Artificial Sequence
  Oligonucleotide for detection of SNP TSC0051672
caactacacaaca

SEQ ID NO: 211995 - DNA, 13 bp, Artificial Sequence
  Oligonucleotide for detection of SNP TSC0051672
tgttgcgtagttg

SEQ ID NO: 211996 - DNA, 13 bp, Artificial Sequence
  Oligonucleotide for detection of SNP TSC0051672
caactacgcaaca

SEQ ID NO: 211997 - DNA, 13 bp, Artificial Sequence
  Oligonucleotide for detection of SNP TSC0051672
tagttgtgtagta

SEQ ID NO: 211998 - DNA, 13 bp, Artificial Sequence
  Oligonucleotide for detection of SNP TSC0051672
tactacacaacta

SEQ ID NO: 211999 - DNA, 13 bp, Artificial Sequence
  Oligonucleotide for detection of SNP TSC0051672
tagttgcgtagta

SEQ ID NO: 212000 - DNA, 13 bp, Artificial Sequence
  Oligonucleotide for detection of SNP TSC0051672
tactacgcaacta

SEQ ID NO: 212001 - DNA, 13 bp, Artificial Sequence
  Oligonucleotide for detection of SNP TSC0051674
ggttgtagatgta

SEQ ID NO: 212002 - DNA, 13 bp, Artificial Sequence
  Oligonucleotide for detection of SNP TSC0051674
tacatctacaacc

SEQ ID NO: 212003 - DNA, 13 bp, Artificial Sequence
  Oligonucleotide for detection of SNP TSC0051674
ggttgttgatgta

SEQ ID NO: 212004 - DNA, 13 bp, Artificial Sequence
  Oligonucleotide for detection of SNP TSC0051674
tacatcaacaacc

SEQ ID NO: 212005 - DNA, 13 bp, Artificial Sequence
  Oligonucleotide for detection of SNP TSC0051674
ggttgtcgatgta

SEQ ID NO: 212006 - DNA, 13 bp, Artificial Sequence
  Oligonucleotide for detection of SNP TSC0051674
tacatcgacaacc

SEQ ID NO: 212007 - DNA, 13 bp, Artificial Sequence
  Oligonucleotide for detection of SNP TSC0051674
tgtatttgtaaty

SEQ ID NO: 212008 - DNA, 13 bp, Artificial Sequence
  Oligonucleotide for detection of SNP TSC0051674
rattacaaataca

SEQ ID NO: 212009 - DNA, 13 bp, Artificial Sequence
  Oligonucleotide for detection of SNP TSC0051674
tgtattggtaaty

SEQ ID NO: 212010 - DNA, 13 bp, Artificial Sequence
  Oligonucleotide for detection of SNP TSC0051674
rattaccaataca

SEQ ID NO: 212011 - DNA, 13 bp, Artificial Sequence
  Oligonucleotide for detection of SNP TSC0051674
tgtatcggtaaty

SEQ ID NO: 212012 - DNA, 13 bp, Artificial Sequence
  Oligonucleotide for detection of SNP TSC0051674
rattaccgataca

SEQ ID NO: 212013 - DNA, 13 bp, Artificial Sequence
  Oligonucleotide for detection of SNP TSC0005975
ttagaggttttgg

SEQ ID NO: 212014 - DNA, 13 bp, Artificial Sequence
  Oligonucleotide for detection of SNP TSC0005975
ccaaaacctctaa

SEQ ID NO: 212015 - DNA, 13 bp, Artificial Sequence
  Oligonucleotide for detection of SNP TSC0051678
gatgtaattgtta

SEQ ID NO: 212016 - DNA, 13 bp, Artificial Sequence
  Oligonucleotide for detection of SNP TSC0051678
taacaattacatc

SEQ ID NO: 212017 - DNA, 13 bp, Artificial Sequence
  Oligonucleotide for detection of SNP TSC0051678
gatgtatttgtta

SEQ ID NO: 212018 - DNA, 13 bp, Artificial Sequence
  Oligonucleotide for detection of SNP TSC0051678
taacaaatacatc

SEQ ID NO: 212019 - DNA, 13 bp, Artificial Sequence
  Oligonucleotide for detection of SNP TSC0051678
gatgtaatcgtta

SEQ ID NO: 212020 - DNA, 13 bp, Artificial Sequence
  Oligonucleotide for detection of SNP TSC0051678
taacgattacatc

SEQ ID NO: 212021 - DNA, 13 bp, Artificial Sequence
  Oligonucleotide for detection of SNP TSC0051678
gatgtattcgtta

SEQ ID NO: 212022 - DNA, 13 bp, Artificial Sequence
  Oligonucleotide for detection of SNP TSC0051678
taacgaatacatc

SEQ ID NO: 212023 - DNA, 13 bp, Artificial Sequence
  Oligonucleotide for detection of SNP TSC0051678
tgatgattgtaty

SEQ ID NO: 212024 - DNA, 13 bp, Artificial Sequence
  Oligonucleotide for detection of SNP TSC0051678
ratacaatcatca

SEQ ID NO: 212025 - DNA, 13 bp, Artificial Sequence
  Oligonucleotide for detection of SNP TSC0051678
tgatgaatgtaty

SEQ ID NO: 212026 - DNA, 13 bp, Artificial Sequence
  Oligonucleotide for detection of SNP TSC0051678
ratacattcatca

SEQ ID NO: 212027 - DNA, 13 bp, Artificial Sequence
  Oligonucleotide for detection of SNP TSC0051678
tgacgattgtaty

SEQ ID NO: 212028 - DNA, 13 bp, Artificial Sequence
  Oligonucleotide for detection of SNP TSC0051678
ratacaatcgtca

SEQ ID NO: 212029 - DNA, 13 bp, Artificial Sequence
  Oligonucleotide for detection of SNP TSC0051678
tgacgaatgtaty

SEQ ID NO: 212030 - DNA, 13 bp, Artificial Sequence
  Oligonucleotide for detection of SNP TSC0051678
ratacattcgtca

SEQ ID NO: 212031 - DNA, 13 bp, Artificial Sequence
  Oligonucleotide for detection of SNP TSC0051679
tggttgatgttty

SEQ ID NO: 212032 - DNA, 13 bp, Artificial Sequence
  Oligonucleotide for detection of SNP TSC0051679
raaacatcaacca

SEQ ID NO: 212033 - DNA, 13 bp, Artificial Sequence
  Oligonucleotide for detection of SNP TSC0051679
tggttggtgttty

SEQ ID NO: 212034 - DNA, 13 bp, Artificial Sequence
  Oligonucleotide for detection of SNP TSC0051679
raaacaccaacca

SEQ ID NO: 212035 - DNA, 13 bp, Artificial Sequence
  Oligonucleotide for detection of SNP TSC0010648
ttgtatatgtagy

SEQ ID NO: 212036 - DNA, 13 bp, Artificial Sequence
  Oligonucleotide for detection of SNP TSC0010648
rctacatatacaa

SEQ ID NO: 212037 - DNA, 13 bp, Artificial Sequence
  Oligonucleotide for detection of SNP TSC0010648
ttgtatgtgtagy

SEQ ID NO: 212038 - DNA, 13 bp, Artificial Sequence
  Oligonucleotide for detection of SNP TSC0010648
rctacacatacaa

SEQ ID NO: 212039 - DNA, 13 bp, Artificial Sequence
  Oligonucleotide for detection of SNP TSC0010648
tcgtatatgtagy

SEQ ID NO: 212040 - DNA, 13 bp, Artificial Sequence
  Oligonucleotide for detection of SNP TSC0010648
rctacatatacga

SEQ ID NO: 212041 - DNA, 13 bp, Artificial Sequence
  Oligonucleotide for detection of SNP TSC0010648
tcgtatgtgtagy

SEQ ID NO: 212042 - DNA, 13 bp, Artificial Sequence
  Oligonucleotide for detection of SNP TSC0010648
rctacacatacga

SEQ ID NO: 212043 - DNA, 13 bp, Artificial Sequence
  Oligonucleotide for detection of SNP TSC0010648
ttgtacgtgtagy

SEQ ID NO: 212044 - DNA, 13 bp, Artificial Sequence
  Oligonucleotide for detection of SNP TSC0010648
rctacacgtacaa

SEQ ID NO: 212045 - DNA, 13 bp, Artificial Sequence
  Oligonucleotide for detection of SNP TSC0010648
tcgtacgtgtagy

SEQ ID NO: 212046 - DNA, 13 bp, Artificial Sequence
  Oligonucleotide for detection of SNP TSC0010648
rctacacgtacga

SEQ ID NO: 212047 - DNA, 13 bp, Artificial Sequence
  Oligonucleotide for detection of SNP TSC0010648
gttgtatgtgtga

SEQ ID NO: 212048 - DNA, 13 bp, Artificial Sequence
  Oligonucleotide for detection of SNP TSC0010648
tcacacatacaac

SEQ ID NO: 212049 - DNA, 13 bp, Artificial Sequence
  Oligonucleotide for detection of SNP TSC0010648
gttgtatgtgcga

SEQ ID NO: 212050 - DNA, 13 bp, Artificial Sequence
  Oligonucleotide for detection of SNP TSC0010648
tcgcacatacaac

SEQ ID NO: 212051 - DNA, 13 bp, Artificial Sequence
  Oligonucleotide for detection of SNP TSC0010648
gttgtacgtgtga

SEQ ID NO: 212052 - DNA, 13 bp, Artificial Sequence
  Oligonucleotide for detection of SNP TSC0010648
tcacacgtacaac

SEQ ID NO: 212053 - DNA, 13 bp, Artificial Sequence
  Oligonucleotide for detection of SNP TSC0010648
gttgtacgtgcga

SEQ ID NO: 212054 - DNA, 13 bp, Artificial Sequence
  Oligonucleotide for detection of SNP TSC0010648
tcgcacgtacaac

SEQ ID NO: 212055 - DNA, 13 bp, Artificial Sequence
  Oligonucleotide for detection of SNP TSC0010649
tgattgggaggga

SEQ ID NO: 212056 - DNA, 13 bp, Artificial Sequence
  Oligonucleotide for detection of SNP TSC0010649
tccctcccaatca

SEQ ID NO: 212057 - DNA, 13 bp, Artificial Sequence
  Oligonucleotide for detection of SNP TSC0010649
tgattgagaggga

SEQ ID NO: 212058 - DNA, 13 bp, Artificial Sequence
  Oligonucleotide for detection of SNP TSC0010649
tccctctcaatca

SEQ ID NO: 212059 - DNA, 13 bp, Artificial Sequence
  Oligonucleotide for detection of SNP TSC0010649
tgatcgggaggga

SEQ ID NO: 212060 - DNA, 13 bp, Artificial Sequence
  Oligonucleotide for detection of SNP TSC0010649
tccctcccgatca

SEQ ID NO: 212061 - DNA, 13 bp, Artificial Sequence
  Oligonucleotide for detection of SNP TSC0010649
tgatcgagaggga

SEQ ID NO: 212062 - DNA, 13 bp, Artificial Sequence
  Oligonucleotide for detection of SNP TSC0010649
tccctctcgatca

SEQ ID NO: 212063 - DNA, 13 bp, Artificial Sequence
  Oligonucleotide for detection of SNP TSC0051683
tagatgaagttay

SEQ ID NO: 212064 - DNA, 13 bp, Artificial Sequence
  Oligonucleotide for detection of SNP TSC0051683
rtaacttcatcta

SEQ ID NO: 212065 - DNA, 13 bp, Artificial Sequence
  Oligonucleotide for detection of SNP TSC0051683
tagatgtagttay

SEQ ID NO: 212066 - DNA, 13 bp, Artificial Sequence
  Oligonucleotide for detection of SNP TSC0051683
rtaactacatcta

SEQ ID NO: 212067 - DNA, 13 bp, Artificial Sequence
  Oligonucleotide for detection of SNP TSC0051683
gtgattttatttg

SEQ ID NO: 212068 - DNA, 13 bp, Artificial Sequence
  Oligonucleotide for detection of SNP TSC0051683
caaataaaatcac

SEQ ID NO: 212069 - DNA, 13 bp, Artificial Sequence
  Oligonucleotide for detection of SNP TSC0051683
gtgattatatttg

SEQ ID NO: 212070 - DNA, 13 bp, Artificial Sequence
  Oligonucleotide for detection of SNP TSC0051683
caaatataatcac

SEQ ID NO: 212071 - DNA, 13 bp, Artificial Sequence
  Oligonucleotide for detection of SNP TSC0051684
agaatagtatagy

SEQ ID NO: 212072 - DNA, 13 bp, Artificial Sequence
  Oligonucleotide for detection of SNP TSC0051684
rctatactattct

SEQ ID NO: 212073 - DNA, 13 bp, Artificial Sequence
  Oligonucleotide for detection of SNP TSC0051684
agaataatatagy

SEQ ID NO: 212074 - DNA, 13 bp, Artificial Sequence
  Oligonucleotide for detection of SNP TSC0051684
rctatattattct

SEQ ID NO: 212075 - DNA, 13 bp, Artificial Sequence
  Oligonucleotide for detection of SNP TSC0051685
ttagagtatttag

SEQ ID NO: 212076 - DNA, 13 bp, Artificial Sequence
  Oligonucleotide for detection of SNP TSC0051685
ctaaatactctaa

SEQ ID NO: 212077 - DNA, 13 bp, Artificial Sequence
  Oligonucleotide for detection of SNP TSC0051685
ttagaggatttag

SEQ ID NO: 212078 - DNA, 13 bp, Artificial Sequence
  Oligonucleotide for detection of SNP TSC0051685
ctaaatcctctaa

SEQ ID NO: 212079 - DNA, 13 bp, Artificial Sequence
  Oligonucleotide for detection of SNP TSC0051686
gtagattgtaagy

SEQ ID NO: 212080 - DNA, 13 bp, Artificial Sequence
  Oligonucleotide for detection of SNP TSC0051686
rcttacaatctac

SEQ ID NO: 212081 - DNA, 13 bp, Artificial Sequence
  Oligonucleotide for detection of SNP TSC0051686
gtagatcgtaagy

SEQ ID NO: 212082 - DNA, 13 bp, Artificial Sequence
  Oligonucleotide for detection of SNP TSC0051686
rcttacgatctac

SEQ ID NO: 212083 - DNA, 13 bp, Artificial Sequence
  Oligonucleotide for detection of SNP TSC0051686
gtttgtgatttgy

SEQ ID NO: 212084 - DNA, 13 bp, Artificial Sequence
  Oligonucleotide for detection of SNP TSC0051686
rcaaatcacaaac

SEQ ID NO: 212085 - DNA, 13 bp, Artificial Sequence
  Oligonucleotide for detection of SNP TSC0051686
gtttgtaatttgy

SEQ ID NO: 212086 - DNA, 13 bp, Artificial Sequence
  Oligonucleotide for detection of SNP TSC0051686
rcaaattacaaac

SEQ ID NO: 212087 - DNA, 13 bp, Artificial Sequence
  Oligonucleotide for detection of SNP TSC0051686
gtttgcgatttgy

SEQ ID NO: 212088 - DNA, 13 bp, Artificial Sequence
  Oligonucleotide for detection of SNP TSC0051686
rcaaatcgcaaac

SEQ ID NO: 212089 - DNA, 13 bp, Artificial Sequence
  Oligonucleotide for detection of SNP TSC0051687
attggttttatgy

SEQ ID NO: 212090 - DNA, 13 bp, Artificial Sequence
  Oligonucleotide for detection of SNP TSC0051687
rcataaaaccaat

SEQ ID NO: 212091 - DNA, 13 bp, Artificial Sequence
  Oligonucleotide for detection of SNP TSC0051687
attggtgttatgy

SEQ ID NO: 212092 - DNA, 13 bp, Artificial Sequence
  Oligonucleotide for detection of SNP TSC0051687
rcataacaccaat

SEQ ID NO: 212093 - DNA, 13 bp, Artificial Sequence
  Oligonucleotide for detection of SNP TSC0051687
attggcgttatgy

SEQ ID NO: 212094 - DNA, 13 bp, Artificial Sequence
  Oligonucleotide for detection of SNP TSC0051687
rcataacgccaat

SEQ ID NO: 212095 - DNA, 13 bp, Artificial Sequence
  Oligonucleotide for detection of SNP TSC0051687
gtataaggttaat

SEQ ID NO: 212096 - DNA, 13 bp, Artificial Sequence
  Oligonucleotide for detection of SNP TSC0051687
attaaccttatac

SEQ ID NO: 212097 - DNA, 13 bp, Artificial Sequence
  Oligonucleotide for detection of SNP TSC0051687
gtataatgttaat

SEQ ID NO: 212098 - DNA, 13 bp, Artificial Sequence
  Oligonucleotide for detection of SNP TSC0051687
attaacattatac

SEQ ID NO: 212099 - DNA, 13 bp, Artificial Sequence
  Oligonucleotide for detection of SNP TSC0051687
gtataacgttaat

SEQ ID NO: 212100 - DNA, 13 bp, Artificial Sequence
  Oligonucleotide for detection of SNP TSC0051687
attaacgttatac

SEQ ID NO: 212101 - DNA, 13 bp, Artificial Sequence
  Oligonucleotide for detection of SNP TSC0051688
ggggttattaggg

SEQ ID NO: 212102 - DNA, 13 bp, Artificial Sequence
  Oligonucleotide for detection of SNP TSC0051688
ccctaataacccc

SEQ ID NO: 212103 - DNA, 13 bp, Artificial Sequence
  Oligonucleotide for detection of SNP TSC0051688
ggggtttttaggg

SEQ ID NO: 212104 - DNA, 13 bp, Artificial Sequence
  Oligonucleotide for detection of SNP TSC0051688
ccctaaaaacccc

SEQ ID NO: 212105 - DNA, 13 bp, Artificial Sequence
  Oligonucleotide for detection of SNP TSC0051688
ttttggtggttty

SEQ ID NO: 212106 - DNA, 13 bp, Artificial Sequence
  Oligonucleotide for detection of SNP TSC0051688
raaaccaccaaaa

SEQ ID NO: 212107 - DNA, 13 bp, Artificial Sequence
  Oligonucleotide for detection of SNP TSC0051688
ttttgggggttty

SEQ ID NO: 212108 - DNA, 13 bp, Artificial Sequence
  Oligonucleotide for detection of SNP TSC0051688
raaacccccaaaa

SEQ ID NO: 212109 - DNA, 13 bp, Artificial Sequence
  Oligonucleotide for detection of SNP TSC0051689
atgtgtatgtgta

SEQ ID NO: 212110 - DNA, 13 bp, Artificial Sequence
  Oligonucleotide for detection of SNP TSC0051689
tacacatacacat

SEQ ID NO: 212111 - DNA, 13 bp, Artificial Sequence
  Oligonucleotide for detection of SNP TSC0051689
atgtgcgtgtgta

SEQ ID NO: 212112 - DNA, 13 bp, Artificial Sequence
  Oligonucleotide for detection of SNP TSC0051689
tacacacgcacat

SEQ ID NO: 212113 - DNA, 13 bp, Artificial Sequence
  Oligonucleotide for detection of SNP TSC0051690
gttttattggtta

SEQ ID NO: 212114 - DNA, 13 bp, Artificial Sequence
  Oligonucleotide for detection of SNP TSC0051690
taaccaataaaac

SEQ ID NO: 212115 - DNA, 13 bp, Artificial Sequence
  Oligonucleotide for detection of SNP TSC0051690
gttttagtggtta

SEQ ID NO: 212116 - DNA, 13 bp, Artificial Sequence
  Oligonucleotide for detection of SNP TSC0051690
taaccactaaaac

SEQ ID NO: 212117 - DNA, 13 bp, Artificial Sequence
  Oligonucleotide for detection of SNP TSC0051690
taattaataaagy

SEQ ID NO: 212118 - DNA, 13 bp, Artificial Sequence
  Oligonucleotide for detection of SNP TSC0051690
rctttattaatta

SEQ ID NO: 212119 - DNA, 13 bp, Artificial Sequence
  Oligonucleotide for detection of SNP TSC0051690
taattattaaagy

SEQ ID NO: 212120 - DNA, 13 bp, Artificial Sequence
  Oligonucleotide for detection of SNP TSC0051690
rctttaataatta

SEQ ID NO: 212121 - DNA, 13 bp, Artificial Sequence
  Oligonucleotide for detection of SNP TSC0000533
ttaggagtgagtt

SEQ ID NO: 212122 - DNA, 13 bp, Artificial Sequence
  Oligonucleotide for detection of SNP TSC0000533
aactcactcctaa

SEQ ID NO: 212123 - DNA, 13 bp, Artificial Sequence
  Oligonucleotide for detection of SNP TSC0000533
ttaggaatgagtt

SEQ ID NO: 212124 - DNA, 13 bp, Artificial Sequence
  Oligonucleotide for detection of SNP TSC0000533
aactcattcctaa

SEQ ID NO: 212125 - DNA, 13 bp, Artificial Sequence
  Oligonucleotide for detection of SNP TSC0051694
ggtttgtgagtta

SEQ ID NO: 212126 - DNA, 13 bp, Artificial Sequence
  Oligonucleotide for detection of SNP TSC0051694
taactcacaaacc

SEQ ID NO: 212127 - DNA, 13 bp, Artificial Sequence
  Oligonucleotide for detection of SNP TSC0051694
ggtttgggagtta

SEQ ID NO: 212128 - DNA, 13 bp, Artificial Sequence
  Oligonucleotide for detection of SNP TSC0051694
taactcccaaacc

SEQ ID NO: 212129 - DNA, 13 bp, Artificial Sequence
  Oligonucleotide for detection of SNP TSC0051694
taatttataagty

SEQ ID NO: 212130 - DNA, 13 bp, Artificial Sequence
  Oligonucleotide for detection of SNP TSC0051694
racttataaatta

SEQ ID NO: 212131 - DNA, 13 bp, Artificial Sequence
  Oligonucleotide for detection of SNP TSC0051694
taatttttaagty

SEQ ID NO: 212132 - DNA, 13 bp, Artificial Sequence
  Oligonucleotide for detection of SNP TSC0051694
racttaaaaatta

SEQ ID NO: 212133 - DNA, 13 bp, Artificial Sequence
  Oligonucleotide for detection of SNP TSC0051695
aattgaagtttay

SEQ ID NO: 212134 - DNA, 13 bp, Artificial Sequence
  Oligonucleotide for detection of SNP TSC0051695
rtaaacttcaatt

SEQ ID NO: 212135 - DNA, 13 bp, Artificial Sequence
  Oligonucleotide for detection of SNP TSC0051695
aattgatgtttay

SEQ ID NO: 212136 - DNA, 13 bp, Artificial Sequence
  Oligonucleotide for detection of SNP TSC0051695
rtaaacatcaatt

SEQ ID NO: 212137 - DNA, 13 bp, Artificial Sequence
  Oligonucleotide for detection of SNP TSC0051695
gtaaattttagtt

SEQ ID NO: 212138 - DNA, 13 bp, Artificial Sequence
  Oligonucleotide for detection of SNP TSC0051695
aactaaaatttac

SEQ ID NO: 212139 - DNA, 13 bp, Artificial Sequence
  Oligonucleotide for detection of SNP TSC0051695
gtaaatattagtt

SEQ ID NO: 212140 - DNA, 13 bp, Artificial Sequence
  Oligonucleotide for detection of SNP TSC0051695
aactaatatttac

SEQ ID NO: 212141 - DNA, 13 bp, Artificial Sequence
  Oligonucleotide for detection of SNP TSC0051696
aaaataataatat

SEQ ID NO: 212142 - DNA, 13 bp, Artificial Sequence
  Oligonucleotide for detection of SNP TSC0051696
atattattatttt

SEQ ID NO: 212143 - DNA, 13 bp, Artificial Sequence
  Oligonucleotide for detection of SNP TSC0051696
aaaatagtaatat

SEQ ID NO: 212144 - DNA, 13 bp, Artificial Sequence
  Oligonucleotide for detection of SNP TSC0051696
atattactatttt

SEQ ID NO: 212145 - DNA, 13 bp, Artificial Sequence
  Oligonucleotide for detection of SNP TSC0051697
ttaaaaaatatat

SEQ ID NO: 212146 - DNA, 13 bp, Artificial Sequence
  Oligonucleotide for detection of SNP TSC0051697
atatattttttaa

SEQ ID NO: 212147 - DNA, 13 bp, Artificial Sequence
  Oligonucleotide for detection of SNP TSC0051697
ttaaaatatatat

SEQ ID NO: 212148 - DNA, 13 bp, Artificial Sequence
  Oligonucleotide for detection of SNP TSC0051697
atatatattttaa

SEQ ID NO: 212149 - DNA, 13 bp, Artificial Sequence
  Oligonucleotide for detection of SNP TSC0051699
gtgtgtatttgta

SEQ ID NO: 212150 - DNA, 13 bp, Artificial Sequence
  Oligonucleotide for detection of SNP TSC0051699
tacaaatacacac

SEQ ID NO: 212151 - DNA, 13 bp, Artificial Sequence
  Oligonucleotide for detection of SNP TSC0051699
gtgtgtgtttgta

SEQ ID NO: 212152 - DNA, 13 bp, Artificial Sequence
  Oligonucleotide for detection of SNP TSC0051699
tacaaacacacac

SEQ ID NO: 212153 - DNA, 13 bp, Artificial Sequence
  Oligonucleotide for detection of SNP TSC0051699
gcgtgtatttgta

SEQ ID NO: 212154 - DNA, 13 bp, Artificial Sequence
  Oligonucleotide for detection of SNP TSC0051699
tacaaatacacgc

SEQ ID NO: 212155 - DNA, 13 bp, Artificial Sequence
  Oligonucleotide for detection of SNP TSC0051699
gcgtgtgtttgta

SEQ ID NO: 212156 - DNA, 13 bp, Artificial Sequence
  Oligonucleotide for detection of SNP TSC0051699
tacaaacacacgc

SEQ ID NO: 212157 - DNA, 13 bp, Artificial Sequence
  Oligonucleotide for detection of SNP TSC0051699
gtgtgcgtttgta

SEQ ID NO: 212158 - DNA, 13 bp, Artificial Sequence
  Oligonucleotide for detection of SNP TSC0051699
tacaaacgcacac

SEQ ID NO: 212159 - DNA, 13 bp, Artificial Sequence
  Oligonucleotide for detection of SNP TSC0051699
gcgtgcgtttgta

SEQ ID NO: 212160 - DNA, 13 bp, Artificial Sequence
  Oligonucleotide for detection of SNP TSC0051699
tacaaacgcacgc

SEQ ID NO: 212161 - DNA, 13 bp, Artificial Sequence
  Oligonucleotide for detection of SNP TSC0051699
tataggtgtacgy

SEQ ID NO: 212162 - DNA, 13 bp, Artificial Sequence
  Oligonucleotide for detection of SNP TSC0051699
rcgtacacctata

SEQ ID NO: 212163 - DNA, 13 bp, Artificial Sequence
  Oligonucleotide for detection of SNP TSC0051699
tataggcgtacgy

SEQ ID NO: 212164 - DNA, 13 bp, Artificial Sequence
  Oligonucleotide for detection of SNP TSC0051699
rcgtacgcctata

SEQ ID NO: 212165 - DNA, 13 bp, Artificial Sequence
  Oligonucleotide for detection of SNP TSC0001691
gttagtgtttgtt

SEQ ID NO: 212166 - DNA, 13 bp, Artificial Sequence
  Oligonucleotide for detection of SNP TSC0001691
aacaaacactaac

SEQ ID NO: 212167 - DNA, 13 bp, Artificial Sequence
  Oligonucleotide for detection of SNP TSC0001691
gttagtatttgtt

SEQ ID NO: 212168 - DNA, 13 bp, Artificial Sequence
  Oligonucleotide for detection of SNP TSC0001691
aacaaatactaac

SEQ ID NO: 212169 - DNA, 13 bp, Artificial Sequence
  Oligonucleotide for detection of SNP TSC0001692
atttatagagatt

SEQ ID NO: 212170 - DNA, 13 bp, Artificial Sequence
  Oligonucleotide for detection of SNP TSC0001692
aatctctataaat

SEQ ID NO: 212171 - DNA, 13 bp, Artificial Sequence
  Oligonucleotide for detection of SNP TSC0001692
atttatggagatt

SEQ ID NO: 212172 - DNA, 13 bp, Artificial Sequence
  Oligonucleotide for detection of SNP TSC0001692
aatctccataaat

SEQ ID NO: 212173 - DNA, 13 bp, Artificial Sequence
  Oligonucleotide for detection of SNP TSC0001692
atttacggagatt

SEQ ID NO: 212174 - DNA, 13 bp, Artificial Sequence
  Oligonucleotide for detection of SNP TSC0001692
aatctccgtaaat

SEQ ID NO: 212175 - DNA, 13 bp, Artificial Sequence
  Oligonucleotide for detection of SNP TSC0001692
agtttttgtaggt

SEQ ID NO: 212176 - DNA, 13 bp, Artificial Sequence
  Oligonucleotide for detection of SNP TSC0001692
acctacaaaaact

SEQ ID NO: 212177 - DNA, 13 bp, Artificial Sequence
  Oligonucleotide for detection of SNP TSC0001692
agttttcgtaggt

SEQ ID NO: 212178 - DNA, 13 bp, Artificial Sequence
  Oligonucleotide for detection of SNP TSC0001692
acctacgaaaact

SEQ ID NO: 212179 - DNA, 13 bp, Artificial Sequence
  Oligonucleotide for detection of SNP TSC0051701
gttaaggtattty

SEQ ID NO: 212180 - DNA, 13 bp, Artificial Sequence
  Oligonucleotide for detection of SNP TSC0051701
raaataccttaac

SEQ ID NO: 212181 - DNA, 13 bp, Artificial Sequence
  Oligonucleotide for detection of SNP TSC0051701
gttaagatattty

SEQ ID NO: 212182 - DNA, 13 bp, Artificial Sequence
  Oligonucleotide for detection of SNP TSC0051701
raaatatcttaac

SEQ ID NO: 212183 - DNA, 13 bp, Artificial Sequence
  Oligonucleotide for detection of SNP TSC0051702
agaagaattatat

SEQ ID NO: 212184 - DNA, 13 bp, Artificial Sequence
  Oligonucleotide for detection of SNP TSC0051702
atataattcttct

SEQ ID NO: 212185 - DNA, 13 bp, Artificial Sequence
  Oligonucleotide for detection of SNP TSC0051702
agaagagttatat

SEQ ID NO: 212186 - DNA, 13 bp, Artificial Sequence
  Oligonucleotide for detection of SNP TSC0051702
atataactcttct

SEQ ID NO: 212187 - DNA, 13 bp, Artificial Sequence
  Oligonucleotide for detection of SNP TSC0009958
ttttaatgatgay

SEQ ID NO: 212188 - DNA, 13 bp, Artificial Sequence
  Oligonucleotide for detection of SNP TSC0009958
rtcatcattaaaa

SEQ ID NO: 212189 - DNA, 13 bp, Artificial Sequence
  Oligonucleotide for detection of SNP TSC0009958
ttttaacgatgay

SEQ ID NO: 212190 - DNA, 13 bp, Artificial Sequence
  Oligonucleotide for detection of SNP TSC0009958
rtcatcgttaaaa

SEQ ID NO: 212191 - DNA, 13 bp, Artificial Sequence
  Oligonucleotide for detection of SNP TSC0009958
gttattgttaagg

SEQ ID NO: 212192 - DNA, 13 bp, Artificial Sequence
  Oligonucleotide for detection of SNP TSC0009958
ccttaacaataac

SEQ ID NO: 212193 - DNA, 13 bp, Artificial Sequence
  Oligonucleotide for detection of SNP TSC0009958
gttattattaagg

SEQ ID NO: 212194 - DNA, 13 bp, Artificial Sequence
  Oligonucleotide for detection of SNP TSC0009958
ccttaataataac

SEQ ID NO: 212195 - DNA, 13 bp, Artificial Sequence
  Oligonucleotide for detection of SNP TSC0009958
gttatcgttaagg

SEQ ID NO: 212196 - DNA, 13 bp, Artificial Sequence
  Oligonucleotide for detection of SNP TSC0009958
ccttaacgataac

SEQ ID NO: 212197 - DNA, 13 bp, Artificial Sequence
  Oligonucleotide for detection of SNP TSC0001042
ttatggaagtgaa

SEQ ID NO: 212198 - DNA, 13 bp, Artificial Sequence
  Oligonucleotide for detection of SNP TSC0001042
ttcacttccataa

SEQ ID NO: 212199 - DNA, 13 bp, Artificial Sequence
  Oligonucleotide for detection of SNP TSC0001042
ttatggtagtgaa

SEQ ID NO: 212200 - DNA, 13 bp, Artificial Sequence
  Oligonucleotide for detection of SNP TSC0001042
ttcactaccataa

SEQ ID NO: 212201 - DNA, 13 bp, Artificial Sequence
  Oligonucleotide for detection of SNP TSC0001042
tttatttttatag

SEQ ID NO: 212202 - DNA, 13 bp, Artificial Sequence
  Oligonucleotide for detection of SNP TSC0001042
ctataaaaataaa

SEQ ID NO: 212203 - DNA, 13 bp, Artificial Sequence
  Oligonucleotide for detection of SNP TSC0001042
tttattattatag

SEQ ID NO: 212204 - DNA, 13 bp, Artificial Sequence
  Oligonucleotide for detection of SNP TSC0001042
ctataataataaa

SEQ ID NO: 212205 - DNA, 13 bp, Artificial Sequence
  Oligonucleotide for detection of SNP TSC0001043
aatgggaagttat

SEQ ID NO: 212206 - DNA, 13 bp, Artificial Sequence
  Oligonucleotide for detection of SNP TSC0001043
ataacttcccatt

SEQ ID NO: 212207 - DNA, 13 bp, Artificial Sequence
  Oligonucleotide for detection of SNP TSC0001043
aatggggagttat

SEQ ID NO: 212208 - DNA, 13 bp, Artificial Sequence
  Oligonucleotide for detection of SNP TSC0001043
ataactccccatt

SEQ ID NO: 212209 - DNA, 13 bp, Artificial Sequence
  Oligonucleotide for detection of SNP TSC0001044
ggggtaagttata

SEQ ID NO: 212210 - DNA, 13 bp, Artificial Sequence
  Oligonucleotide for detection of SNP TSC0001044
tataacttacccc

SEQ ID NO: 212211 - DNA, 13 bp, Artificial Sequence
  Oligonucleotide for detection of SNP TSC0001044
ggggtaggttata

SEQ ID NO: 212212 - DNA, 13 bp, Artificial Sequence
  Oligonucleotide for detection of SNP TSC0001044
tataacctacccc

SEQ ID NO: 212213 - DNA, 13 bp, Artificial Sequence
  Oligonucleotide for detection of SNP TSC0051705
agattttgtaaaa

SEQ ID NO: 212214 - DNA, 13 bp, Artificial Sequence
  Oligonucleotide for detection of SNP TSC0051705
ttttacaaaatct

SEQ ID NO: 212215 - DNA, 13 bp, Artificial Sequence
  Oligonucleotide for detection of SNP TSC0051705
agatttcgtaaaa

SEQ ID NO: 212216 - DNA, 13 bp, Artificial Sequence
  Oligonucleotide for detection of SNP TSC0051705
ttttacgaaatct

SEQ ID NO: 212217 - DNA, 13 bp, Artificial Sequence
  Oligonucleotide for detection of SNP TSC0051705
ttttatagagttt

SEQ ID NO: 212218 - DNA, 13 bp, Artificial Sequence
  Oligonucleotide for detection of SNP TSC0051705
aaactctataaaa

SEQ ID NO: 212219 - DNA, 13 bp, Artificial Sequence
  Oligonucleotide for detection of SNP TSC0051705
ttttacggagttt

SEQ ID NO: 212220 - DNA, 13 bp, Artificial Sequence
  Oligonucleotide for detection of SNP TSC0051705
aaactccgtaaaa

SEQ ID NO: 212221 - DNA, 13 bp, Artificial Sequence
  Oligonucleotide for detection of SNP TSC0051706
gtttatatgaaaa

SEQ ID NO: 212222 - DNA, 13 bp, Artificial Sequence
  Oligonucleotide for detection of SNP TSC0051706
ttttcatataaac

SEQ ID NO: 212223 - DNA, 13 bp, Artificial Sequence
  Oligonucleotide for detection of SNP TSC0051706
gtttatgtgaaaa

SEQ ID NO: 212224 - DNA, 13 bp, Artificial Sequence
  Oligonucleotide for detection of SNP TSC0051706
ttttcacataaac

SEQ ID NO: 212225 - DNA, 13 bp, Artificial Sequence
  Oligonucleotide for detection of SNP TSC0051706
gtttacgtgaaaa

SEQ ID NO: 212226 - DNA, 13 bp, Artificial Sequence
  Oligonucleotide for detection of SNP TSC0051706
ttttcacgtaaac

SEQ ID NO: 212227 - DNA, 13 bp, Artificial Sequence
  Oligonucleotide for detection of SNP TSC0051706
tttttatgtgagy

SEQ ID NO: 212228 - DNA, 13 bp, Artificial Sequence
  Oligonucleotide for detection of SNP TSC0051706
rctcacataaaaa

SEQ ID NO: 212229 - DNA, 13 bp, Artificial Sequence
  Oligonucleotide for detection of SNP TSC0051706
tttttacgtgagy

SEQ ID NO: 212230 - DNA, 13 bp, Artificial Sequence
  Oligonucleotide for detection of SNP TSC0051706
rctcacgtaaaaa

SEQ ID NO: 212231 - DNA, 13 bp, Artificial Sequence
  Oligonucleotide for detection of SNP TSC0051707
ataaagttgtgat

SEQ ID NO: 212232 - DNA, 13 bp, Artificial Sequence
  Oligonucleotide for detection of SNP TSC0051707
atcacaactttat

SEQ ID NO: 212233 - DNA, 13 bp, Artificial Sequence
  Oligonucleotide for detection of SNP TSC0051707
ataaaggtgtgat

SEQ ID NO: 212234 - DNA, 13 bp, Artificial Sequence
  Oligonucleotide for detection of SNP TSC0051707
atcacacctttat

SEQ ID NO: 212235 - DNA, 13 bp, Artificial Sequence
  Oligonucleotide for detection of SNP TSC0051707
attataattttgt

SEQ ID NO: 212236 - DNA, 13 bp, Artificial Sequence
  Oligonucleotide for detection of SNP TSC0051707
acaaaattataat

SEQ ID NO: 212237 - DNA, 13 bp, Artificial Sequence
  Oligonucleotide for detection of SNP TSC0051707
attatatttttgt

SEQ ID NO: 212238 - DNA, 13 bp, Artificial Sequence
  Oligonucleotide for detection of SNP TSC0051707
acaaaaatataat

SEQ ID NO: 212239 - DNA, 13 bp, Artificial Sequence
  Oligonucleotide for detection of SNP TSC0051708
ttaataagttggy

SEQ ID NO: 212240 - DNA, 13 bp, Artificial Sequence
  Oligonucleotide for detection of SNP TSC0051708
rccaacttattaa

SEQ ID NO: 212241 - DNA, 13 bp, Artificial Sequence
  Oligonucleotide for detection of SNP TSC0051708
ttaatatgttggy

SEQ ID NO: 212242 - DNA, 13 bp, Artificial Sequence
  Oligonucleotide for detection of SNP TSC0051708
rccaacatattaa

SEQ ID NO: 212243 - DNA, 13 bp, Artificial Sequence
  Oligonucleotide for detection of SNP TSC0051708
gttagtttgttgg

SEQ ID NO: 212244 - DNA, 13 bp, Artificial Sequence
  Oligonucleotide for detection of SNP TSC0051708
ccaacaaactaac

SEQ ID NO: 212245 - DNA, 13 bp, Artificial Sequence
  Oligonucleotide for detection of SNP TSC0051708
gttagtatgttgg

SEQ ID NO: 212246 - DNA, 13 bp, Artificial Sequence
  Oligonucleotide for detection of SNP TSC0051708
ccaacatactaac

SEQ ID NO: 212247 - DNA, 13 bp, Artificial Sequence
  Oligonucleotide for detection of SNP TSC0051709
attaatagatgty

SEQ ID NO: 212248 - DNA, 13 bp, Artificial Sequence
  Oligonucleotide for detection of SNP TSC0051709
racatctattaat

SEQ ID NO: 212249 - DNA, 13 bp, Artificial Sequence
  Oligonucleotide for detection of SNP TSC0051709
attaatggatgty

SEQ ID NO: 212250 - DNA, 13 bp, Artificial Sequence
  Oligonucleotide for detection of SNP TSC0051709
racatccattaat

SEQ ID NO: 212251 - DNA, 13 bp, Artificial Sequence
  Oligonucleotide for detection of SNP TSC0051709
attaacggatgty

SEQ ID NO: 212252 - DNA, 13 bp, Artificial Sequence
  Oligonucleotide for detection of SNP TSC0051709
racatccgttaat

SEQ ID NO: 212253 - DNA, 13 bp, Artificial Sequence
  Oligonucleotide for detection of SNP TSC0051709
ggtatttgttaat

SEQ ID NO: 212254 - DNA, 13 bp, Artificial Sequence
  Oligonucleotide for detection of SNP TSC0051709
attaacaaatacc

SEQ ID NO: 212255 - DNA, 13 bp, Artificial Sequence
  Oligonucleotide for detection of SNP TSC0051709
ggtattcgttaat

SEQ ID NO: 212256 - DNA, 13 bp, Artificial Sequence
  Oligonucleotide for detection of SNP TSC0051709
attaacgaatacc

SEQ ID NO: 212257 - DNA, 13 bp, Artificial Sequence
  Oligonucleotide for detection of SNP TSC0004558
ttttgataatgta

SEQ ID NO: 212258 - DNA, 13 bp, Artificial Sequence
  Oligonucleotide for detection of SNP TSC0004558
tacattatcaaaa

SEQ ID NO: 212259 - DNA, 13 bp, Artificial Sequence
  Oligonucleotide for detection of SNP TSC0004558
ttttgagaatgta

SEQ ID NO: 212260 - DNA, 13 bp, Artificial Sequence
  Oligonucleotide for detection of SNP TSC0004558
tacattctcaaaa

SEQ ID NO: 212261 - DNA, 13 bp, Artificial Sequence
  Oligonucleotide for detection of SNP TSC0004558
tatattattagga

SEQ ID NO: 212262 - DNA, 13 bp, Artificial Sequence
  Oligonucleotide for detection of SNP TSC0004558
tcctaataatata

SEQ ID NO: 212263 - DNA, 13 bp, Artificial Sequence
  Oligonucleotide for detection of SNP TSC0004558
tatatttttagga

SEQ ID NO: 212264 - DNA, 13 bp, Artificial Sequence
  Oligonucleotide for detection of SNP TSC0004558
tcctaaaaatata

SEQ ID NO: 212265 - DNA, 13 bp, Artificial Sequence
  Oligonucleotide for detection of SNP TSC0004559
ttatttatgtaat

SEQ ID NO: 212266 - DNA, 13 bp, Artificial Sequence
  Oligonucleotide for detection of SNP TSC0004559
attacataaataa

SEQ ID NO: 212267 - DNA, 13 bp, Artificial Sequence
  Oligonucleotide for detection of SNP TSC0051710
agtggaaagaatg

SEQ ID NO: 212268 - DNA, 13 bp, Artificial Sequence
  Oligonucleotide for detection of SNP TSC0051710
cattctttccact

SEQ ID NO: 212269 - DNA, 13 bp, Artificial Sequence
  Oligonucleotide for detection of SNP TSC0051710
agtggatagaatg

SEQ ID NO: 212270 - DNA, 13 bp, Artificial Sequence
  Oligonucleotide for detection of SNP TSC0051710
cattctatccact

SEQ ID NO: 212271 - DNA, 13 bp, Artificial Sequence
  Oligonucleotide for detection of SNP TSC0051711
gaggtgggtagat

SEQ ID NO: 212272 - DNA, 13 bp, Artificial Sequence
  Oligonucleotide for detection of SNP TSC0051711
atctacccacctc

SEQ ID NO: 212273 - DNA, 13 bp, Artificial Sequence
  Oligonucleotide for detection of SNP TSC0051711
gaggtgagtagat

SEQ ID NO: 212274 - DNA, 13 bp, Artificial Sequence
  Oligonucleotide for detection of SNP TSC0051711
atctactcacctc

SEQ ID NO: 212275 - DNA, 13 bp, Artificial Sequence
  Oligonucleotide for detection of SNP TSC0051713
ttatattgaggtt

SEQ ID NO: 212276 - DNA, 13 bp, Artificial Sequence
  Oligonucleotide for detection of SNP TSC0051713
aacctcaatataa

SEQ ID NO: 212277 - DNA, 13 bp, Artificial Sequence
  Oligonucleotide for detection of SNP TSC0051713
ttatatcgaggtt

SEQ ID NO: 212278 - DNA, 13 bp, Artificial Sequence
  Oligonucleotide for detection of SNP TSC0051713
aacctcgatataa

SEQ ID NO: 212279 - DNA, 13 bp, Artificial Sequence
  Oligonucleotide for detection of SNP TSC0051713
aattttggtgtgg

SEQ ID NO: 212280 - DNA, 13 bp, Artificial Sequence
  Oligonucleotide for detection of SNP TSC0051713
ccacaccaaaatt

SEQ ID NO: 212281 - DNA, 13 bp, Artificial Sequence
  Oligonucleotide for detection of SNP TSC0051713
aattttagtgtgg

SEQ ID NO: 212282 - DNA, 13 bp, Artificial Sequence
  Oligonucleotide for detection of SNP TSC0051713
ccacactaaaatt

SEQ ID NO: 212283 - DNA, 13 bp, Artificial Sequence
  Oligonucleotide for detection of SNP TSC0051713
aatttcggtgtgg

SEQ ID NO: 212284 - DNA, 13 bp, Artificial Sequence
  Oligonucleotide for detection of SNP TSC0051713
ccacaccgaaatt

SEQ ID NO: 212285 - DNA, 13 bp, Artificial Sequence
  Oligonucleotide for detection of SNP TSC0051714
ttttttgttgaat

SEQ ID NO: 212286 - DNA, 13 bp, Artificial Sequence
  Oligonucleotide for detection of SNP TSC0051714
attcaacaaaaaa

SEQ ID NO: 212287 - DNA, 13 bp, Artificial Sequence
  Oligonucleotide for detection of SNP TSC0051714
atttaaaaagaag

SEQ ID NO: 212288 - DNA, 13 bp, Artificial Sequence
  Oligonucleotide for detection of SNP TSC0051714
cttctttttaaat

SEQ ID NO: 212289 - DNA, 13 bp, Artificial Sequence
  Oligonucleotide for detection of SNP TSC0051714
atttaataagaag

SEQ ID NO: 212290 - DNA, 13 bp, Artificial Sequence
  Oligonucleotide for detection of SNP TSC0051714
cttcttattaaat

SEQ ID NO: 212291 - DNA, 13 bp, Artificial Sequence
  Oligonucleotide for detection of SNP TSC0008489
gaggaagtataga

SEQ ID NO: 212292 - DNA, 13 bp, Artificial Sequence
  Oligonucleotide for detection of SNP TSC0008489
tctatacttcctc

SEQ ID NO: 212293 - DNA, 13 bp, Artificial Sequence
  Oligonucleotide for detection of SNP TSC0008489
gaggaaatataga

SEQ ID NO: 212294 - DNA, 13 bp, Artificial Sequence
  Oligonucleotide for detection of SNP TSC0008489
tctatatttcctc

SEQ ID NO: 212295 - DNA, 13 bp, Artificial Sequence
  Oligonucleotide for detection of SNP TSC0051715
ttgggtatgtatg

SEQ ID NO: 212296 - DNA, 13 bp, Artificial Sequence
  Oligonucleotide for detection of SNP TSC0051715
catacatacccaa

SEQ ID NO: 212297 - DNA, 13 bp, Artificial Sequence
  Oligonucleotide for detection of SNP TSC0051715
ttgggtttgtatg

SEQ ID NO: 212298 - DNA, 13 bp, Artificial Sequence
  Oligonucleotide for detection of SNP TSC0051715
catacaaacccaa

SEQ ID NO: 212299 - DNA, 13 bp, Artificial Sequence
  Oligonucleotide for detection of SNP TSC0051715
tcgggtatgtatg

SEQ ID NO: 212300 - DNA, 13 bp, Artificial Sequence
  Oligonucleotide for detection of SNP TSC0051715
catacatacccga

SEQ ID NO: 212301 - DNA, 13 bp, Artificial Sequence
  Oligonucleotide for detection of SNP TSC0051715
tcgggtttgtatg

SEQ ID NO: 212302 - DNA, 13 bp, Artificial Sequence
  Oligonucleotide for detection of SNP TSC0051715
catacaaacccga

SEQ ID NO: 212303 - DNA, 13 bp, Artificial Sequence
  Oligonucleotide for detection of SNP TSC0051715
tatgtatgtttga

SEQ ID NO: 212304 - DNA, 13 bp, Artificial Sequence
  Oligonucleotide for detection of SNP TSC0051715
tcaaacatacata

SEQ ID NO: 212305 - DNA, 13 bp, Artificial Sequence
  Oligonucleotide for detection of SNP TSC0051715
tatgtaggtttga

SEQ ID NO: 212306 - DNA, 13 bp, Artificial Sequence
  Oligonucleotide for detection of SNP TSC0051715
tcaaacctacata

SEQ ID NO: 212307 - DNA, 13 bp, Artificial Sequence
  Oligonucleotide for detection of SNP TSC0051715
tatgtatgttcga

SEQ ID NO: 212308 - DNA, 13 bp, Artificial Sequence
  Oligonucleotide for detection of SNP TSC0051715
tcgaacatacata

SEQ ID NO: 212309 - DNA, 13 bp, Artificial Sequence
  Oligonucleotide for detection of SNP TSC0051715
tatgtaggttcga

SEQ ID NO: 212310 - DNA, 13 bp, Artificial Sequence
  Oligonucleotide for detection of SNP TSC0051715
tcgaacctacata

SEQ ID NO: 212311 - DNA, 13 bp, Artificial Sequence
  Oligonucleotide for detection of SNP TSC0051717
tgggggaataggg

SEQ ID NO: 212312 - DNA, 13 bp, Artificial Sequence
  Oligonucleotide for detection of SNP TSC0051717
ccctattccccca

SEQ ID NO: 212313 - DNA, 13 bp, Artificial Sequence
  Oligonucleotide for detection of SNP TSC0051717
tggggggataggg

SEQ ID NO: 212314 - DNA, 13 bp, Artificial Sequence
  Oligonucleotide for detection of SNP TSC0051717
ccctatcccccca

SEQ ID NO: 212315 - DNA, 13 bp, Artificial Sequence
  Oligonucleotide for detection of SNP TSC0051718
ttttttgtttaaa

SEQ ID NO: 212316 - DNA, 13 bp, Artificial Sequence
  Oligonucleotide for detection of SNP TSC0051718
tttaaacaaaaaa

SEQ ID NO: 212317 - DNA, 13 bp, Artificial Sequence
  Oligonucleotide for detection of SNP TSC0051719
gtgtagtaaatta

SEQ ID NO: 212318 - DNA, 13 bp, Artificial Sequence
  Oligonucleotide for detection of SNP TSC0051719
taatttactacac

SEQ ID NO: 212319 - DNA, 13 bp, Artificial Sequence
  Oligonucleotide for detection of SNP TSC0051719
gtgtaggaaatta

SEQ ID NO: 212320 - DNA, 13 bp, Artificial Sequence
  Oligonucleotide for detection of SNP TSC0051719
taatttcctacac

SEQ ID NO: 212321 - DNA, 13 bp, Artificial Sequence
  Oligonucleotide for detection of SNP TSC0051719
tggtttgttgtay

SEQ ID NO: 212322 - DNA, 13 bp, Artificial Sequence
  Oligonucleotide for detection of SNP TSC0051719
rtacaacaaacca

SEQ ID NO: 212323 - DNA, 13 bp, Artificial Sequence
  Oligonucleotide for detection of SNP TSC0051719
tggttttttgtay

SEQ ID NO: 212324 - DNA, 13 bp, Artificial Sequence
  Oligonucleotide for detection of SNP TSC0051719
rtacaaaaaacca

SEQ ID NO: 212325 - DNA, 13 bp, Artificial Sequence
  Oligonucleotide for detection of SNP TSC0051720
gggtgaaaaaggg

SEQ ID NO: 212326 - DNA, 13 bp, Artificial Sequence
  Oligonucleotide for detection of SNP TSC0051720
ccctttttcaccc

SEQ ID NO: 212327 - DNA, 13 bp, Artificial Sequence
  Oligonucleotide for detection of SNP TSC0051720
gggtgataaaggg

SEQ ID NO: 212328 - DNA, 13 bp, Artificial Sequence
  Oligonucleotide for detection of SNP TSC0051720
ccctttatcaccc

SEQ ID NO: 212329 - DNA, 13 bp, Artificial Sequence
  Oligonucleotide for detection of SNP TSC0051721
ataaaatttttga

SEQ ID NO: 212330 - DNA, 13 bp, Artificial Sequence
  Oligonucleotide for detection of SNP TSC0051721
tcaaaaattttat

SEQ ID NO: 212331 - DNA, 13 bp, Artificial Sequence
  Oligonucleotide for detection of SNP TSC0051721
ataaaagttttga

SEQ ID NO: 212332 - DNA, 13 bp, Artificial Sequence
  Oligonucleotide for detection of SNP TSC0051721
tcaaaacttttat

SEQ ID NO: 212333 - DNA, 13 bp, Artificial Sequence
  Oligonucleotide for detection of SNP TSC0051721
ttagggattttgt

SEQ ID NO: 212334 - DNA, 13 bp, Artificial Sequence
  Oligonucleotide for detection of SNP TSC0051721
acaaaatccctaa

SEQ ID NO: 212335 - DNA, 13 bp, Artificial Sequence
  Oligonucleotide for detection of SNP TSC0051721
ttagggtttttgt

SEQ ID NO: 212336 - DNA, 13 bp, Artificial Sequence
  Oligonucleotide for detection of SNP TSC0051721
acaaaaaccctaa

SEQ ID NO: 212337 - DNA, 13 bp, Artificial Sequence
  Oligonucleotide for detection of SNP TSC0051726
tggttaatacggt

SEQ ID NO: 212338 - DNA, 13 bp, Artificial Sequence
  Oligonucleotide for detection of SNP TSC0051726
accgtattaacca

SEQ ID NO: 212339 - DNA, 13 bp, Artificial Sequence
  Oligonucleotide for detection of SNP TSC0051726
tggttagtacggt

SEQ ID NO: 212340 - DNA, 13 bp, Artificial Sequence
  Oligonucleotide for detection of SNP TSC0051726
accgtactaacca

SEQ ID NO: 212341 - DNA, 13 bp, Artificial Sequence
  Oligonucleotide for detection of SNP TSC0051728
aaagtgagtttta

SEQ ID NO: 212342 - DNA, 13 bp, Artificial Sequence
  Oligonucleotide for detection of SNP TSC0051728
taaaactcacttt

SEQ ID NO: 212343 - DNA, 13 bp, Artificial Sequence
  Oligonucleotide for detection of SNP TSC0051728
aaagtgggtttta

SEQ ID NO: 212344 - DNA, 13 bp, Artificial Sequence
  Oligonucleotide for detection of SNP TSC0051728
taaaacccacttt

SEQ ID NO: 212345 - DNA, 13 bp, Artificial Sequence
  Oligonucleotide for detection of SNP TSC0051729
aatttaaaggtaa

SEQ ID NO: 212346 - DNA, 13 bp, Artificial Sequence
  Oligonucleotide for detection of SNP TSC0051729
ttacctttaaatt

SEQ ID NO: 212347 - DNA, 13 bp, Artificial Sequence
  Oligonucleotide for detection of SNP TSC0051729
aatttataggtaa

SEQ ID NO: 212348 - DNA, 13 bp, Artificial Sequence
  Oligonucleotide for detection of SNP TSC0051729
ttacctataaatt

SEQ ID NO: 212349 - DNA, 13 bp, Artificial Sequence
  Oligonucleotide for detection of SNP TSC0051729
ttgtttttgaatt

SEQ ID NO: 212350 - DNA, 13 bp, Artificial Sequence
  Oligonucleotide for detection of SNP TSC0051729
aattcaaaaacaa

SEQ ID NO: 212351 - DNA, 13 bp, Artificial Sequence
  Oligonucleotide for detection of SNP TSC0051729
ttgtttatgaatt

SEQ ID NO: 212352 - DNA, 13 bp, Artificial Sequence
  Oligonucleotide for detection of SNP TSC0051729
aattcataaacaa

SEQ ID NO: 212353 - DNA, 13 bp, Artificial Sequence
  Oligonucleotide for detection of SNP TSC0051730
gttttaagattgy

SEQ ID NO: 212354 - DNA, 13 bp, Artificial Sequence
  Oligonucleotide for detection of SNP TSC0051730
rcaatcttaaaac

SEQ ID NO: 212355 - DNA, 13 bp, Artificial Sequence
  Oligonucleotide for detection of SNP TSC0051730
gttttatgattgy

SEQ ID NO: 212356 - DNA, 13 bp, Artificial Sequence
  Oligonucleotide for detection of SNP TSC0051730
rcaatcataaaac

SEQ ID NO: 212357 - DNA, 13 bp, Artificial Sequence
  Oligonucleotide for detection of SNP TSC0051730
gtagttttggagy

SEQ ID NO: 212358 - DNA, 13 bp, Artificial Sequence
  Oligonucleotide for detection of SNP TSC0051730
rctccaaaactac

SEQ ID NO: 212359 - DNA, 13 bp, Artificial Sequence
  Oligonucleotide for detection of SNP TSC0051730
gtagttatggagy

SEQ ID NO: 212360 - DNA, 13 bp, Artificial Sequence
  Oligonucleotide for detection of SNP TSC0051730
rctccataactac

SEQ ID NO: 212361 - DNA, 13 bp, Artificial Sequence
  Oligonucleotide for detection of SNP TSC0051731
ttttgtttattgy

SEQ ID NO: 212362 - DNA, 13 bp, Artificial Sequence
  Oligonucleotide for detection of SNP TSC0051731
rcaataaacaaaa

SEQ ID NO: 212363 - DNA, 13 bp, Artificial Sequence
  Oligonucleotide for detection of SNP TSC0051731
ttttgtgtattgy

SEQ ID NO: 212364 - DNA, 13 bp, Artificial Sequence
  Oligonucleotide for detection of SNP TSC0051731
rcaatacacaaaa

SEQ ID NO: 212365 - DNA, 13 bp, Artificial Sequence
  Oligonucleotide for detection of SNP TSC0051731
ttttgcgtattgy

SEQ ID NO: 212366 - DNA, 13 bp, Artificial Sequence
  Oligonucleotide for detection of SNP TSC0051731
rcaatacgcaaaa

SEQ ID NO: 212367 - DNA, 13 bp, Artificial Sequence
  Oligonucleotide for detection of SNP TSC0051731
gtaataggtagaa

SEQ ID NO: 212368 - DNA, 13 bp, Artificial Sequence
  Oligonucleotide for detection of SNP TSC0051731
ttctacctattac

SEQ ID NO: 212369 - DNA, 13 bp, Artificial Sequence
  Oligonucleotide for detection of SNP TSC0051731
gtaatatgtagaa

SEQ ID NO: 212370 - DNA, 13 bp, Artificial Sequence
  Oligonucleotide for detection of SNP TSC0051731
ttctacatattac

SEQ ID NO: 212371 - DNA, 13 bp, Artificial Sequence
  Oligonucleotide for detection of SNP TSC0051731
gtaatacgtagaa

SEQ ID NO: 212372 - DNA, 13 bp, Artificial Sequence
  Oligonucleotide for detection of SNP TSC0051731
ttctacgtattac

SEQ ID NO: 212373 - DNA, 13 bp, Artificial Sequence
  Oligonucleotide for detection of SNP TSC0051732
ggttgggggtagg

SEQ ID NO: 212374 - DNA, 13 bp, Artificial Sequence
  Oligonucleotide for detection of SNP TSC0051732
cctacccccaacc

SEQ ID NO: 212375 - DNA, 13 bp, Artificial Sequence
  Oligonucleotide for detection of SNP TSC0051732
ggttggaggtagg

SEQ ID NO: 212376 - DNA, 13 bp, Artificial Sequence
  Oligonucleotide for detection of SNP TSC0051732
cctacctccaacc

SEQ ID NO: 212377 - DNA, 13 bp, Artificial Sequence
  Oligonucleotide for detection of SNP TSC0051733
tatggatgtatta

SEQ ID NO: 212378 - DNA, 13 bp, Artificial Sequence
  Oligonucleotide for detection of SNP TSC0051733
taatacatccata

SEQ ID NO: 212379 - DNA, 13 bp, Artificial Sequence
  Oligonucleotide for detection of SNP TSC0051733
tatggacgtatta

SEQ ID NO: 212380 - DNA, 13 bp, Artificial Sequence
  Oligonucleotide for detection of SNP TSC0051733
taatacgtccata

SEQ ID NO: 212381 - DNA, 13 bp, Artificial Sequence
  Oligonucleotide for detection of SNP TSC0051733
tggtatgtttata

SEQ ID NO: 212382 - DNA, 13 bp, Artificial Sequence
  Oligonucleotide for detection of SNP TSC0051733
tataaacatacca

SEQ ID NO: 212383 - DNA, 13 bp, Artificial Sequence
  Oligonucleotide for detection of SNP TSC0051733
tggtatatttata

SEQ ID NO: 212384 - DNA, 13 bp, Artificial Sequence
  Oligonucleotide for detection of SNP TSC0051733
tataaatatacca

SEQ ID NO: 212385 - DNA, 13 bp, Artificial Sequence
  Oligonucleotide for detection of SNP TSC0051733
tggtacgtttata

SEQ ID NO: 212386 - DNA, 13 bp, Artificial Sequence
  Oligonucleotide for detection of SNP TSC0051733
tataaacgtacca

SEQ ID NO: 212387 - DNA, 13 bp, Artificial Sequence
  Oligonucleotide for detection of SNP TSC0051734
atttttttatatg

SEQ ID NO: 212388 - DNA, 13 bp, Artificial Sequence
  Oligonucleotide for detection of SNP TSC0051734
catataaaaaaat

SEQ ID NO: 212389 - DNA, 13 bp, Artificial Sequence
  Oligonucleotide for detection of SNP TSC0051734
atttttgtatatg

SEQ ID NO: 212390 - DNA, 13 bp, Artificial Sequence
  Oligonucleotide for detection of SNP TSC0051734
catatacaaaaat

SEQ ID NO: 212391 - DNA, 13 bp, Artificial Sequence
  Oligonucleotide for detection of SNP TSC0051734
tatataaagaaat

SEQ ID NO: 212392 - DNA, 13 bp, Artificial Sequence
  Oligonucleotide for detection of SNP TSC0051734
atttctttatata

SEQ ID NO: 212393 - DNA, 13 bp, Artificial Sequence
  Oligonucleotide for detection of SNP TSC0051734
tatatatagaaat

SEQ ID NO: 212394 - DNA, 13 bp, Artificial Sequence
  Oligonucleotide for detection of SNP TSC0051734
atttctatatata

SEQ ID NO: 212395 - DNA, 13 bp, Artificial Sequence
  Oligonucleotide for detection of SNP TSC0051736
gttggaagagtgg

SEQ ID NO: 212396 - DNA, 13 bp, Artificial Sequence
  Oligonucleotide for detection of SNP TSC0051736
ccactcttccaac

SEQ ID NO: 212397 - DNA, 13 bp, Artificial Sequence
  Oligonucleotide for detection of SNP TSC0051736
gttggaggagtgg

SEQ ID NO: 212398 - DNA, 13 bp, Artificial Sequence
  Oligonucleotide for detection of SNP TSC0051736
ccactcctccaac

SEQ ID NO: 212399 - DNA, 13 bp, Artificial Sequence
  Oligonucleotide for detection of SNP TSC0051737
aagtggtttttgg

SEQ ID NO: 212400 - DNA, 13 bp, Artificial Sequence
  Oligonucleotide for detection of SNP TSC0051737
ccaaaaaccactt

SEQ ID NO: 212401 - DNA, 13 bp, Artificial Sequence
  Oligonucleotide for detection of SNP TSC0051737
aagtgggttttgg

SEQ ID NO: 212402 - DNA, 13 bp, Artificial Sequence
  Oligonucleotide for detection of SNP TSC0051737
ccaaaacccactt

SEQ ID NO: 212403 - DNA, 13 bp, Artificial Sequence
  Oligonucleotide for detection of SNP TSC0051737
aagcggtttttgg

SEQ ID NO: 212404 - DNA, 13 bp, Artificial Sequence
  Oligonucleotide for detection of SNP TSC0051737
ccaaaaaccgctt

SEQ ID NO: 212405 - DNA, 13 bp, Artificial Sequence
  Oligonucleotide for detection of SNP TSC0051737
aagcgggttttgg

SEQ ID NO: 212406 - DNA, 13 bp, Artificial Sequence
  Oligonucleotide for detection of SNP TSC0051737
ccaaaacccgctt

SEQ ID NO: 212407 - DNA, 13 bp, Artificial Sequence
  Oligonucleotide for detection of SNP TSC0051737
ttaaaggttgttt

SEQ ID NO: 212408 - DNA, 13 bp, Artificial Sequence
  Oligonucleotide for detection of SNP TSC0051737
aaacaacctttaa

SEQ ID NO: 212409 - DNA, 13 bp, Artificial Sequence
  Oligonucleotide for detection of SNP TSC0051737
ttaaagtttgttt

SEQ ID NO: 212410 - DNA, 13 bp, Artificial Sequence
  Oligonucleotide for detection of SNP TSC0051737
aaacaaactttaa

SEQ ID NO: 212411 - DNA, 13 bp, Artificial Sequence
  Oligonucleotide for detection of SNP TSC0051737
ttaaaggtcgttt

SEQ ID NO: 212412 - DNA, 13 bp, Artificial Sequence
  Oligonucleotide for detection of SNP TSC0051737
aaacgacctttaa

SEQ ID NO: 212413 - DNA, 13 bp, Artificial Sequence
  Oligonucleotide for detection of SNP TSC0051737
ttaaagttcgttt

SEQ ID NO: 212414 - DNA, 13 bp, Artificial Sequence
  Oligonucleotide for detection of SNP TSC0051737
aaacgaactttaa

SEQ ID NO: 212415 - DNA, 13 bp, Artificial Sequence
  Oligonucleotide for detection of SNP TSC0051738
aaggattttgtag

SEQ ID NO: 212416 - DNA, 13 bp, Artificial Sequence
  Oligonucleotide for detection of SNP TSC0051738
ctacaaaatcctt

SEQ ID NO: 212417 - DNA, 13 bp, Artificial Sequence
  Oligonucleotide for detection of SNP TSC0051738
aaggatgttgtag

SEQ ID NO: 212418 - DNA, 13 bp, Artificial Sequence
  Oligonucleotide for detection of SNP TSC0051738
ctacaacatcctt

SEQ ID NO: 212419 - DNA, 13 bp, Artificial Sequence
  Oligonucleotide for detection of SNP TSC0051738
aaggatttcgtag

SEQ ID NO: 212420 - DNA, 13 bp, Artificial Sequence
  Oligonucleotide for detection of SNP TSC0051738
ctacgaaatcctt

SEQ ID NO: 212421 - DNA, 13 bp, Artificial Sequence
  Oligonucleotide for detection of SNP TSC0051738
aaggacgttgtag

SEQ ID NO: 212422 - DNA, 13 bp, Artificial Sequence
  Oligonucleotide for detection of SNP TSC0051738
ctacaacgtcctt

SEQ ID NO: 212423 - DNA, 13 bp, Artificial Sequence
  Oligonucleotide for detection of SNP TSC0051738
aaggatgtcgtag

SEQ ID NO: 212424 - DNA, 13 bp, Artificial Sequence
  Oligonucleotide for detection of SNP TSC0051738
ctacgacatcctt

SEQ ID NO: 212425 - DNA, 13 bp, Artificial Sequence
  Oligonucleotide for detection of SNP TSC0051738
aaggacgtcgtag

SEQ ID NO: 212426 - DNA, 13 bp, Artificial Sequence
  Oligonucleotide for detection of SNP TSC0051738
ctacgacgtcctt

SEQ ID NO: 212427 - DNA, 13 bp, Artificial Sequence
  Oligonucleotide for detection of SNP TSC0051738
ttatgaagttttt

SEQ ID NO: 212428 - DNA, 13 bp, Artificial Sequence
  Oligonucleotide for detection of SNP TSC0051738
aaaaacttcataa

SEQ ID NO: 212429 - DNA, 13 bp, Artificial Sequence
  Oligonucleotide for detection of SNP TSC0051738
ttacgaagttttt

SEQ ID NO: 212430 - DNA, 13 bp, Artificial Sequence
  Oligonucleotide for detection of SNP TSC0051738
aaaaacttcgtaa

SEQ ID NO: 212431 - DNA, 13 bp, Artificial Sequence
  Oligonucleotide for detection of SNP TSC0051738
ttacgatgttttt

SEQ ID NO: 212432 - DNA, 13 bp, Artificial Sequence
  Oligonucleotide for detection of SNP TSC0051738
aaaaacatcgtaa

SEQ ID NO: 212433 - DNA, 13 bp, Artificial Sequence
  Oligonucleotide for detection of SNP TSC0051738
ttacgacgttttt

SEQ ID NO: 212434 - DNA, 13 bp, Artificial Sequence
  Oligonucleotide for detection of SNP TSC0051738
aaaaacgtcgtaa

SEQ ID NO: 212435 - DNA, 13 bp, Artificial Sequence
  Oligonucleotide for detection of SNP TSC0051739
ttttttgtggggt

SEQ ID NO: 212436 - DNA, 13 bp, Artificial Sequence
  Oligonucleotide for detection of SNP TSC0051739
accccacaaaaaa

SEQ ID NO: 212437 - DNA, 13 bp, Artificial Sequence
  Oligonucleotide for detection of SNP TSC0051739
ttttttatggggt

SEQ ID NO: 212438 - DNA, 13 bp, Artificial Sequence
  Oligonucleotide for detection of SNP TSC0051739
accccataaaaaa

SEQ ID NO: 212439 - DNA, 13 bp, Artificial Sequence
  Oligonucleotide for detection of SNP TSC0051741
gaggttttttttg

SEQ ID NO: 212440 - DNA, 13 bp, Artificial Sequence
  Oligonucleotide for detection of SNP TSC0051741
caaaaaaaacctc

SEQ ID NO: 212441 - DNA, 13 bp, Artificial Sequence
  Oligonucleotide for detection of SNP TSC0051741
taggagaagttty

SEQ ID NO: 212442 - DNA, 13 bp, Artificial Sequence
  Oligonucleotide for detection of SNP TSC0051741
raaacttctccta

SEQ ID NO: 212443 - DNA, 13 bp, Artificial Sequence
  Oligonucleotide for detection of SNP TSC0051741
taggagtagttty

SEQ ID NO: 212444 - DNA, 13 bp, Artificial Sequence
  Oligonucleotide for detection of SNP TSC0051741
raaactactccta

SEQ ID NO: 212445 - DNA, 13 bp, Artificial Sequence
  Oligonucleotide for detection of SNP TSC0051742
gttatggtaaatg

SEQ ID NO: 212446 - DNA, 13 bp, Artificial Sequence
  Oligonucleotide for detection of SNP TSC0051742
catttaccataac

SEQ ID NO: 212447 - DNA, 13 bp, Artificial Sequence
  Oligonucleotide for detection of SNP TSC0051742
gttatgataaatg

SEQ ID NO: 212448 - DNA, 13 bp, Artificial Sequence
  Oligonucleotide for detection of SNP TSC0051742
catttatcataac

SEQ ID NO: 212449 - DNA, 13 bp, Artificial Sequence
  Oligonucleotide for detection of SNP TSC0051743
ttagtttgggtgy

SEQ ID NO: 212450 - DNA, 13 bp, Artificial Sequence
  Oligonucleotide for detection of SNP TSC0051743
rcacccaaactaa

SEQ ID NO: 212451 - DNA, 13 bp, Artificial Sequence
  Oligonucleotide for detection of SNP TSC0051743
ttagttcgggtgy

SEQ ID NO: 212452 - DNA, 13 bp, Artificial Sequence
  Oligonucleotide for detection of SNP TSC0051743
rcacccgaactaa

SEQ ID NO: 212453 - DNA, 13 bp, Artificial Sequence
  Oligonucleotide for detection of SNP TSC0051743
gtatttgggttag

SEQ ID NO: 212454 - DNA, 13 bp, Artificial Sequence
  Oligonucleotide for detection of SNP TSC0051743
ctaacccaaatac

SEQ ID NO: 212455 - DNA, 13 bp, Artificial Sequence
  Oligonucleotide for detection of SNP TSC0051743
gtatttaggttag

SEQ ID NO: 212456 - DNA, 13 bp, Artificial Sequence
  Oligonucleotide for detection of SNP TSC0051743
ctaacctaaatac

SEQ ID NO: 212457 - DNA, 13 bp, Artificial Sequence
  Oligonucleotide for detection of SNP TSC0051743
gtattcgggttag

SEQ ID NO: 212458 - DNA, 13 bp, Artificial Sequence
  Oligonucleotide for detection of SNP TSC0051743
ctaacccgaatac

SEQ ID NO: 212459 - DNA, 13 bp, Artificial Sequence
  Oligonucleotide for detection of SNP TSC0051744
gatgtgattatat

SEQ ID NO: 212460 - DNA, 13 bp, Artificial Sequence
  Oligonucleotide for detection of SNP TSC0051744
atataatcacatc

SEQ ID NO: 212461 - DNA, 13 bp, Artificial Sequence
  Oligonucleotide for detection of SNP TSC0051744
gatgtgtttatat

SEQ ID NO: 212462 - DNA, 13 bp, Artificial Sequence
  Oligonucleotide for detection of SNP TSC0051744
atataaacacatc

SEQ ID NO: 212463 - DNA, 13 bp, Artificial Sequence
  Oligonucleotide for detection of SNP TSC0051744
atataattataty

SEQ ID NO: 212464 - DNA, 13 bp, Artificial Sequence
  Oligonucleotide for detection of SNP TSC0051744
ratataattatat

SEQ ID NO: 212465 - DNA, 13 bp, Artificial Sequence
  Oligonucleotide for detection of SNP TSC0051745
tgggatattttaa

SEQ ID NO: 212466 - DNA, 13 bp, Artificial Sequence
  Oligonucleotide for detection of SNP TSC0051745
ttaaaatatccca

SEQ ID NO: 212467 - DNA, 13 bp, Artificial Sequence
  Oligonucleotide for detection of SNP TSC0051745
ttaaaatgtttta

SEQ ID NO: 212468 - DNA, 13 bp, Artificial Sequence
  Oligonucleotide for detection of SNP TSC0051745
taaaacattttaa

SEQ ID NO: 212469 - DNA, 13 bp, Artificial Sequence
  Oligonucleotide for detection of SNP TSC0051745
ttaaaaggtttta

SEQ ID NO: 212470 - DNA, 13 bp, Artificial Sequence
  Oligonucleotide for detection of SNP TSC0051745
taaaaccttttaa

SEQ ID NO: 212471 - DNA, 13 bp, Artificial Sequence
  Oligonucleotide for detection of SNP TSC0051746
ggtggagtattta

SEQ ID NO: 212472 - DNA, 13 bp, Artificial Sequence
  Oligonucleotide for detection of SNP TSC0051746
taaatactccacc

SEQ ID NO: 212473 - DNA, 13 bp, Artificial Sequence
  Oligonucleotide for detection of SNP TSC0051746
ggtggaatattta

SEQ ID NO: 212474 - DNA, 13 bp, Artificial Sequence
  Oligonucleotide for detection of SNP TSC0051746
taaatattccacc

SEQ ID NO: 212475 - DNA, 13 bp, Artificial Sequence
  Oligonucleotide for detection of SNP TSC0051748
tatttaaattaay

SEQ ID NO: 212476 - DNA, 13 bp, Artificial Sequence
  Oligonucleotide for detection of SNP TSC0051748
rttaatttaaata

SEQ ID NO: 212477 - DNA, 13 bp, Artificial Sequence
  Oligonucleotide for detection of SNP TSC0051748
tatttagattaay

SEQ ID NO: 212478 - DNA, 13 bp, Artificial Sequence
  Oligonucleotide for detection of SNP TSC0051748
rttaatctaaata

SEQ ID NO: 212479 - DNA, 13 bp, Artificial Sequence
  Oligonucleotide for detection of SNP TSC0051749
aggttaatatttt

SEQ ID NO: 212480 - DNA, 13 bp, Artificial Sequence
  Oligonucleotide for detection of SNP TSC0051749
aaaatattaacct

SEQ ID NO: 212481 - DNA, 13 bp, Artificial Sequence
  Oligonucleotide for detection of SNP TSC0051749
aggttagtatttt

SEQ ID NO: 212482 - DNA, 13 bp, Artificial Sequence
  Oligonucleotide for detection of SNP TSC0051749
aaaatactaacct

SEQ ID NO: 212483 - DNA, 13 bp, Artificial Sequence
  Oligonucleotide for detection of SNP TSC0051750
tttttaggtgttt

SEQ ID NO: 212484 - DNA, 13 bp, Artificial Sequence
  Oligonucleotide for detection of SNP TSC0051750
aaacacctaaaaa

SEQ ID NO: 212485 - DNA, 13 bp, Artificial Sequence
  Oligonucleotide for detection of SNP TSC0051750
agatatgtggaag

SEQ ID NO: 212486 - DNA, 13 bp, Artificial Sequence
  Oligonucleotide for detection of SNP TSC0051750
cttccacatatct

SEQ ID NO: 212487 - DNA, 13 bp, Artificial Sequence
  Oligonucleotide for detection of SNP TSC0051750
agatatttggaag

SEQ ID NO: 212488 - DNA, 13 bp, Artificial Sequence
  Oligonucleotide for detection of SNP TSC0051750
cttccaaatatct

SEQ ID NO: 212489 - DNA, 13 bp, Artificial Sequence
  Oligonucleotide for detection of SNP TSC0051750
agatacgtggaag

SEQ ID NO: 212490 - DNA, 13 bp, Artificial Sequence
  Oligonucleotide for detection of SNP TSC0051750
cttccacgtatct

SEQ ID NO: 212491 - DNA, 13 bp, Artificial Sequence
  Oligonucleotide for detection of SNP TSC0051755
gttgtaataaaty

SEQ ID NO: 212492 - DNA, 13 bp, Artificial Sequence
  Oligonucleotide for detection of SNP TSC0051755
ratttattacaac

SEQ ID NO: 212493 - DNA, 13 bp, Artificial Sequence
  Oligonucleotide for detection of SNP TSC0051755
gttgtagtaaaty

SEQ ID NO: 212494 - DNA, 13 bp, Artificial Sequence
  Oligonucleotide for detection of SNP TSC0051755
ratttactacaac

SEQ ID NO: 212495 - DNA, 13 bp, Artificial Sequence
  Oligonucleotide for detection of SNP TSC0051759
atgtttattaaat

SEQ ID NO: 212496 - DNA, 13 bp, Artificial Sequence
  Oligonucleotide for detection of SNP TSC0051759
atttaataaacat

SEQ ID NO: 212497 - DNA, 13 bp, Artificial Sequence
  Oligonucleotide for detection of SNP TSC0051759
atgtttgttaaat

SEQ ID NO: 212498 - DNA, 13 bp, Artificial Sequence
  Oligonucleotide for detection of SNP TSC0051759
atttaacaaacat

SEQ ID NO: 212499 - DNA, 13 bp, Artificial Sequence
  Oligonucleotide for detection of SNP TSC0051759
atgttcgttaaat

SEQ ID NO: 212500 - DNA, 13 bp, Artificial Sequence
  Oligonucleotide for detection of SNP TSC0051759
atttaacgaacat

SEQ ID NO: 212501 - DNA, 13 bp, Artificial Sequence
  Oligonucleotide for detection of SNP TSC0051759
atttggtggatat

SEQ ID NO: 212502 - DNA, 13 bp, Artificial Sequence
  Oligonucleotide for detection of SNP TSC0051759
atatccaccaaat

SEQ ID NO: 212503 - DNA, 13 bp, Artificial Sequence
  Oligonucleotide for detection of SNP TSC0051759
atttggcggatat

SEQ ID NO: 212504 - DNA, 13 bp, Artificial Sequence
  Oligonucleotide for detection of SNP TSC0051759
atatccgccaaat

SEQ ID NO: 212505 - DNA, 13 bp, Artificial Sequence
  Oligonucleotide for detection of SNP TSC0051760
agagttgttgtty

SEQ ID NO: 212506 - DNA, 13 bp, Artificial Sequence
  Oligonucleotide for detection of SNP TSC0051760
raacaacaactct

SEQ ID NO: 212507 - DNA, 13 bp, Artificial Sequence
  Oligonucleotide for detection of SNP TSC0051760
agagttattgtty

SEQ ID NO: 212508 - DNA, 13 bp, Artificial Sequence
  Oligonucleotide for detection of SNP TSC0051760
raacaataactct

SEQ ID NO: 212509 - DNA, 13 bp, Artificial Sequence
  Oligonucleotide for detection of SNP TSC0051762
tgttttgttttat

SEQ ID NO: 212510 - DNA, 13 bp, Artificial Sequence
  Oligonucleotide for detection of SNP TSC0051762
ataaaacaaaaca

SEQ ID NO: 212511 - DNA, 13 bp, Artificial Sequence
  Oligonucleotide for detection of SNP TSC0051762
tgttttattttat

SEQ ID NO: 212512 - DNA, 13 bp, Artificial Sequence
  Oligonucleotide for detection of SNP TSC0051762
ataaaataaaaca

SEQ ID NO: 212513 - DNA, 13 bp, Artificial Sequence
  Oligonucleotide for detection of SNP TSC0051764
gttttaatgatag

SEQ ID NO: 212514 - DNA, 13 bp, Artificial Sequence
  Oligonucleotide for detection of SNP TSC0051764
ctatcattaaaac

SEQ ID NO: 212515 - DNA, 13 bp, Artificial Sequence
  Oligonucleotide for detection of SNP TSC0051764
gttttagtgatag

SEQ ID NO: 212516 - DNA, 13 bp, Artificial Sequence
  Oligonucleotide for detection of SNP TSC0051764
ctatcactaaaac

SEQ ID NO: 212517 - DNA, 13 bp, Artificial Sequence
  Oligonucleotide for detection of SNP TSC0008946
ttggaggatgtta

SEQ ID NO: 212518 - DNA, 13 bp, Artificial Sequence
  Oligonucleotide for detection of SNP TSC0008946
taacatcctccaa

SEQ ID NO: 212519 - DNA, 13 bp, Artificial Sequence
  Oligonucleotide for detection of SNP TSC0008946
ttggagaatgtta

SEQ ID NO: 212520 - DNA, 13 bp, Artificial Sequence
  Oligonucleotide for detection of SNP TSC0008946
taacattctccaa

SEQ ID NO: 212521 - DNA, 13 bp, Artificial Sequence
  Oligonucleotide for detection of SNP TSC0008946
ttggaggacgtta

SEQ ID NO: 212522 - DNA, 13 bp, Artificial Sequence
  Oligonucleotide for detection of SNP TSC0008946
taacgtcctccaa

SEQ ID NO: 212523 - DNA, 13 bp, Artificial Sequence
  Oligonucleotide for detection of SNP TSC0008946
ttggagaacgtta

SEQ ID NO: 212524 - DNA, 13 bp, Artificial Sequence
  Oligonucleotide for detection of SNP TSC0008946
taacgttctccaa

SEQ ID NO: 212525 - DNA, 13 bp, Artificial Sequence
  Oligonucleotide for detection of SNP TSC0008947
aaaaagtggtgtt

SEQ ID NO: 212526 - DNA, 13 bp, Artificial Sequence
  Oligonucleotide for detection of SNP TSC0008947
aacaccacttttt

SEQ ID NO: 212527 - DNA, 13 bp, Artificial Sequence
  Oligonucleotide for detection of SNP TSC0008947
aaaaagaggtgtt

SEQ ID NO: 212528 - DNA, 13 bp, Artificial Sequence
  Oligonucleotide for detection of SNP TSC0008947
aacacctcttttt

SEQ ID NO: 212529 - DNA, 13 bp, Artificial Sequence
  Oligonucleotide for detection of SNP TSC0051765
tagtgaggagaga

SEQ ID NO: 212530 - DNA, 13 bp, Artificial Sequence
  Oligonucleotide for detection of SNP TSC0051765
tctctcctcacta

SEQ ID NO: 212531 - DNA, 13 bp, Artificial Sequence
  Oligonucleotide for detection of SNP TSC0051765
tagtgaagagaga

SEQ ID NO: 212532 - DNA, 13 bp, Artificial Sequence
  Oligonucleotide for detection of SNP TSC0051765
tctctcttcacta

SEQ ID NO: 212533 - DNA, 13 bp, Artificial Sequence
  Oligonucleotide for detection of SNP TSC0051767
gatagtggtatty

SEQ ID NO: 212534 - DNA, 13 bp, Artificial Sequence
  Oligonucleotide for detection of SNP TSC0051767
raataccactatc

SEQ ID NO: 212535 - DNA, 13 bp, Artificial Sequence
  Oligonucleotide for detection of SNP TSC0051767
gatagcggtatty

SEQ ID NO: 212536 - DNA, 13 bp, Artificial Sequence
  Oligonucleotide for detection of SNP TSC0051767
raataccgctatc

SEQ ID NO: 212537 - DNA, 13 bp, Artificial Sequence
  Oligonucleotide for detection of SNP TSC0051767
gaatatagttgty

SEQ ID NO: 212538 - DNA, 13 bp, Artificial Sequence
  Oligonucleotide for detection of SNP TSC0051767
racaactatattc

SEQ ID NO: 212539 - DNA, 13 bp, Artificial Sequence
  Oligonucleotide for detection of SNP TSC0051767
gaatattgttgty

SEQ ID NO: 212540 - DNA, 13 bp, Artificial Sequence
  Oligonucleotide for detection of SNP TSC0051767
racaacaatattc

SEQ ID NO: 212541 - DNA, 13 bp, Artificial Sequence
  Oligonucleotide for detection of SNP TSC0051767
gaatatcgttgty

SEQ ID NO: 212542 - DNA, 13 bp, Artificial Sequence
  Oligonucleotide for detection of SNP TSC0051767
racaacgatattc

SEQ ID NO: 212543 - DNA, 13 bp, Artificial Sequence
  Oligonucleotide for detection of SNP TSC0051768
aagtagataggag

SEQ ID NO: 212544 - DNA, 13 bp, Artificial Sequence
  Oligonucleotide for detection of SNP TSC0051768
ctcctatctactt

SEQ ID NO: 212545 - DNA, 13 bp, Artificial Sequence
  Oligonucleotide for detection of SNP TSC0051768
aagtagttaggag

SEQ ID NO: 212546 - DNA, 13 bp, Artificial Sequence
  Oligonucleotide for detection of SNP TSC0051768
ctcctaactactt

SEQ ID NO: 212547 - DNA, 13 bp, Artificial Sequence
  Oligonucleotide for detection of SNP TSC0051769
taagtatgaagta

SEQ ID NO: 212548 - DNA, 13 bp, Artificial Sequence
  Oligonucleotide for detection of SNP TSC0051769
tacttcatactta

SEQ ID NO: 212549 - DNA, 13 bp, Artificial Sequence
  Oligonucleotide for detection of SNP TSC0051769
taagtacgaagta

SEQ ID NO: 212550 - DNA, 13 bp, Artificial Sequence
  Oligonucleotide for detection of SNP TSC0051769
tacttcgtactta

SEQ ID NO: 212551 - DNA, 13 bp, Artificial Sequence
  Oligonucleotide for detection of SNP TSC0051770
gtagatataatta

SEQ ID NO: 212552 - DNA, 13 bp, Artificial Sequence
  Oligonucleotide for detection of SNP TSC0051770
taattatatctac

SEQ ID NO: 212553 - DNA, 13 bp, Artificial Sequence
  Oligonucleotide for detection of SNP TSC0051770
gtagatgtaatta

SEQ ID NO: 212554 - DNA, 13 bp, Artificial Sequence
  Oligonucleotide for detection of SNP TSC0051770
taattacatctac

SEQ ID NO: 212555 - DNA, 13 bp, Artificial Sequence
  Oligonucleotide for detection of SNP TSC0051770
gtagacgtaatta

SEQ ID NO: 212556 - DNA, 13 bp, Artificial Sequence
  Oligonucleotide for detection of SNP TSC0051770
taattacgtctac

SEQ ID NO: 212557 - DNA, 13 bp, Artificial Sequence
  Oligonucleotide for detection of SNP TSC0051772
gattttataaata

SEQ ID NO: 212558 - DNA, 13 bp, Artificial Sequence
  Oligonucleotide for detection of SNP TSC0051772
tatttataaaatc

SEQ ID NO: 212559 - DNA, 13 bp, Artificial Sequence
  Oligonucleotide for detection of SNP TSC0051772
gattttttaaata

SEQ ID NO: 212560 - DNA, 13 bp, Artificial Sequence
  Oligonucleotide for detection of SNP TSC0051772
tatttaaaaaatc

SEQ ID NO: 212561 - DNA, 13 bp, Artificial Sequence
  Oligonucleotide for detection of SNP TSC0051772
tgtttatgaagty

SEQ ID NO: 212562 - DNA, 13 bp, Artificial Sequence
  Oligonucleotide for detection of SNP TSC0051772
racttcataaaca

SEQ ID NO: 212563 - DNA, 13 bp, Artificial Sequence
  Oligonucleotide for detection of SNP TSC0051772
tgtttaggaagty

SEQ ID NO: 212564 - DNA, 13 bp, Artificial Sequence
  Oligonucleotide for detection of SNP TSC0051772
racttcctaaaca

SEQ ID NO: 212565 - DNA, 13 bp, Artificial Sequence
  Oligonucleotide for detection of SNP TSC0051777
aggaaaaggattt

SEQ ID NO: 212566 - DNA, 13 bp, Artificial Sequence
  Oligonucleotide for detection of SNP TSC0051777
aaatccttttcct

SEQ ID NO: 212567 - DNA, 13 bp, Artificial Sequence
  Oligonucleotide for detection of SNP TSC0051777
aggaaatggattt

SEQ ID NO: 212568 - DNA, 13 bp, Artificial Sequence
  Oligonucleotide for detection of SNP TSC0051777
aaatccatttcct

SEQ ID NO: 212569 - DNA, 13 bp, Artificial Sequence
  Oligonucleotide for detection of SNP TSC0051781
aattatagtatgy

SEQ ID NO: 212570 - DNA, 13 bp, Artificial Sequence
  Oligonucleotide for detection of SNP TSC0051781
rcatactataatt

SEQ ID NO: 212571 - DNA, 13 bp, Artificial Sequence
  Oligonucleotide for detection of SNP TSC0051781
aattatggtatgy

SEQ ID NO: 212572 - DNA, 13 bp, Artificial Sequence
  Oligonucleotide for detection of SNP TSC0051781
rcataccataatt

SEQ ID NO: 212573 - DNA, 13 bp, Artificial Sequence
  Oligonucleotide for detection of SNP TSC0051781
aattacggtatgy

SEQ ID NO: 212574 - DNA, 13 bp, Artificial Sequence
  Oligonucleotide for detection of SNP TSC0051781
rcataccgtaatt

SEQ ID NO: 212575 - DNA, 13 bp, Artificial Sequence
  Oligonucleotide for detection of SNP TSC0051781
gtatattgtgatt

SEQ ID NO: 212576 - DNA, 13 bp, Artificial Sequence
  Oligonucleotide for detection of SNP TSC0051781
aatcacaatatac

SEQ ID NO: 212577 - DNA, 13 bp, Artificial Sequence
  Oligonucleotide for detection of SNP TSC0051781
gtatatcgtgatt

SEQ ID NO: 212578 - DNA, 13 bp, Artificial Sequence
  Oligonucleotide for detection of SNP TSC0051781
aatcacgatatac

SEQ ID NO: 212579 - DNA, 13 bp, Artificial Sequence
  Oligonucleotide for detection of SNP TSC0051782
gttgggttggttt

SEQ ID NO: 212580 - DNA, 13 bp, Artificial Sequence
  Oligonucleotide for detection of SNP TSC0051782
aaaccaacccaac

SEQ ID NO: 212581 - DNA, 13 bp, Artificial Sequence
  Oligonucleotide for detection of SNP TSC0051782
gttggggtggttt

SEQ ID NO: 212582 - DNA, 13 bp, Artificial Sequence
  Oligonucleotide for detection of SNP TSC0051782
aaaccaccccaac

SEQ ID NO: 212583 - DNA, 13 bp, Artificial Sequence
  Oligonucleotide for detection of SNP TSC0051782
aaattaatttagy

SEQ ID NO: 212584 - DNA, 13 bp, Artificial Sequence
  Oligonucleotide for detection of SNP TSC0051782
rctaaattaattt

SEQ ID NO: 212585 - DNA, 13 bp, Artificial Sequence
  Oligonucleotide for detection of SNP TSC0051782
aaattattttagy

SEQ ID NO: 212586 - DNA, 13 bp, Artificial Sequence
  Oligonucleotide for detection of SNP TSC0051782
rctaaaataattt

SEQ ID NO: 212587 - DNA, 13 bp, Artificial Sequence
  Oligonucleotide for detection of SNP TSC0051783
gaaattgtaaata

SEQ ID NO: 212588 - DNA, 13 bp, Artificial Sequence
  Oligonucleotide for detection of SNP TSC0051783
tatttacaatttc

SEQ ID NO: 212589 - DNA, 13 bp, Artificial Sequence
  Oligonucleotide for detection of SNP TSC0051783
gaaattataaata

SEQ ID NO: 212590 - DNA, 13 bp, Artificial Sequence
  Oligonucleotide for detection of SNP TSC0051783
tatttataatttc

SEQ ID NO: 212591 - DNA, 13 bp, Artificial Sequence
  Oligonucleotide for detection of SNP TSC0051783
gaaatcgtaaata

SEQ ID NO: 212592 - DNA, 13 bp, Artificial Sequence
  Oligonucleotide for detection of SNP TSC0051783
tatttacgatttc

SEQ ID NO: 212593 - DNA, 13 bp, Artificial Sequence
  Oligonucleotide for detection of SNP TSC0051784
gttagtaggttag

SEQ ID NO: 212594 - DNA, 13 bp, Artificial Sequence
  Oligonucleotide for detection of SNP TSC0051784
ctaacctactaac

SEQ ID NO: 212595 - DNA, 13 bp, Artificial Sequence
  Oligonucleotide for detection of SNP TSC0051784
gttagtgggttag

SEQ ID NO: 212596 - DNA, 13 bp, Artificial Sequence
  Oligonucleotide for detection of SNP TSC0051784
ctaacccactaac

SEQ ID NO: 212597 - DNA, 13 bp, Artificial Sequence
  Oligonucleotide for detection of SNP TSC0051784
gttagcgggttag

SEQ ID NO: 212598 - DNA, 13 bp, Artificial Sequence
  Oligonucleotide for detection of SNP TSC0051784
ctaacccgctaac

SEQ ID NO: 212599 - DNA, 13 bp, Artificial Sequence
  Oligonucleotide for detection of SNP TSC0051784
ttgatttgttggy

SEQ ID NO: 212600 - DNA, 13 bp, Artificial Sequence
  Oligonucleotide for detection of SNP TSC0051784
rccaacaaatcaa

SEQ ID NO: 212601 - DNA, 13 bp, Artificial Sequence
  Oligonucleotide for detection of SNP TSC0051784
ttgattcgttggy

SEQ ID NO: 212602 - DNA, 13 bp, Artificial Sequence
  Oligonucleotide for detection of SNP TSC0051784
rccaacgaatcaa

SEQ ID NO: 212603 - DNA, 13 bp, Artificial Sequence
  Oligonucleotide for detection of SNP TSC0051785
aatatatagttaa

SEQ ID NO: 212604 - DNA, 13 bp, Artificial Sequence
  Oligonucleotide for detection of SNP TSC0051785
ttaactatatatt

SEQ ID NO: 212605 - DNA, 13 bp, Artificial Sequence
  Oligonucleotide for detection of SNP TSC0051785
aatatagagttaa

SEQ ID NO: 212606 - DNA, 13 bp, Artificial Sequence
  Oligonucleotide for detection of SNP TSC0051785
ttaactctatatt

SEQ ID NO: 212607 - DNA, 13 bp, Artificial Sequence
  Oligonucleotide for detection of SNP TSC0051785
ttgattgtgtgtt

SEQ ID NO: 212608 - DNA, 13 bp, Artificial Sequence
  Oligonucleotide for detection of SNP TSC0051785
aacacacaatcaa

SEQ ID NO: 212609 - DNA, 13 bp, Artificial Sequence
  Oligonucleotide for detection of SNP TSC0051785
ttgattttgtgtt

SEQ ID NO: 212610 - DNA, 13 bp, Artificial Sequence
  Oligonucleotide for detection of SNP TSC0051785
aacacaaaatcaa

SEQ ID NO: 212611 - DNA, 13 bp, Artificial Sequence
  Oligonucleotide for detection of SNP TSC0051786
tattagaatttta

SEQ ID NO: 212612 - DNA, 13 bp, Artificial Sequence
  Oligonucleotide for detection of SNP TSC0051786
taaaattctaata

SEQ ID NO: 212613 - DNA, 13 bp, Artificial Sequence
  Oligonucleotide for detection of SNP TSC0051786
tattagtatttta

SEQ ID NO: 212614 - DNA, 13 bp, Artificial Sequence
  Oligonucleotide for detection of SNP TSC0051786
taaaatactaata

SEQ ID NO: 212615 - DNA, 13 bp, Artificial Sequence
  Oligonucleotide for detection of SNP TSC0051786
taaaattttagtg

SEQ ID NO: 212616 - DNA, 13 bp, Artificial Sequence
  Oligonucleotide for detection of SNP TSC0051786
cactaaaatttta

SEQ ID NO: 212617 - DNA, 13 bp, Artificial Sequence
  Oligonucleotide for detection of SNP TSC0051786
taaaatattagtg

SEQ ID NO: 212618 - DNA, 13 bp, Artificial Sequence
  Oligonucleotide for detection of SNP TSC0051786
cactaatatttta

SEQ ID NO: 212619 - DNA, 13 bp, Artificial Sequence
  Oligonucleotide for detection of SNP TSC0051788
aaatatgtaataa

SEQ ID NO: 212620 - DNA, 13 bp, Artificial Sequence
  Oligonucleotide for detection of SNP TSC0051788
ttattacatattt

SEQ ID NO: 212621 - DNA, 13 bp, Artificial Sequence
  Oligonucleotide for detection of SNP TSC0051789
aaaaatgaaataa

SEQ ID NO: 212622 - DNA, 13 bp, Artificial Sequence
  Oligonucleotide for detection of SNP TSC0051789
ttatttcattttt

SEQ ID NO: 212623 - DNA, 13 bp, Artificial Sequence
  Oligonucleotide for detection of SNP TSC0051791
attgtaattttaa

SEQ ID NO: 212624 - DNA, 13 bp, Artificial Sequence
  Oligonucleotide for detection of SNP TSC0051791
ttaaaattacaat

SEQ ID NO: 212625 - DNA, 13 bp, Artificial Sequence
  Oligonucleotide for detection of SNP TSC0051791
attgtagttttaa

SEQ ID NO: 212626 - DNA, 13 bp, Artificial Sequence
  Oligonucleotide for detection of SNP TSC0051791
ttaaaactacaat

SEQ ID NO: 212627 - DNA, 13 bp, Artificial Sequence
  Oligonucleotide for detection of SNP TSC0051795
tgtttaataagga

SEQ ID NO: 212628 - DNA, 13 bp, Artificial Sequence
  Oligonucleotide for detection of SNP TSC0051795
tccttattaaaca

SEQ ID NO: 212629 - DNA, 13 bp, Artificial Sequence
  Oligonucleotide for detection of SNP TSC0051795
tgtttagtaagga

SEQ ID NO: 212630 - DNA, 13 bp, Artificial Sequence
  Oligonucleotide for detection of SNP TSC0051795
tccttactaaaca

SEQ ID NO: 212631 - DNA, 13 bp, Artificial Sequence
  Oligonucleotide for detection of SNP TSC0051795
cgtttaataagga

SEQ ID NO: 212632 - DNA, 13 bp, Artificial Sequence
  Oligonucleotide for detection of SNP TSC0051795
tccttattaaacg

SEQ ID NO: 212633 - DNA, 13 bp, Artificial Sequence
  Oligonucleotide for detection of SNP TSC0051795
cgtttagtaagga

SEQ ID NO: 212634 - DNA, 13 bp, Artificial Sequence
  Oligonucleotide for detection of SNP TSC0051795
tccttactaaacg

SEQ ID NO: 212635 - DNA, 13 bp, Artificial Sequence
  Oligonucleotide for detection of SNP TSC0051796
agatatgagaaaa

SEQ ID NO: 212636 - DNA, 13 bp, Artificial Sequence
  Oligonucleotide for detection of SNP TSC0051796
ttttctcatatct

SEQ ID NO: 212637 - DNA, 13 bp, Artificial Sequence
  Oligonucleotide for detection of SNP TSC0051796
agatataagaaaa

SEQ ID NO: 212638 - DNA, 13 bp, Artificial Sequence
  Oligonucleotide for detection of SNP TSC0051796
ttttcttatatct

SEQ ID NO: 212639 - DNA, 13 bp, Artificial Sequence
  Oligonucleotide for detection of SNP TSC0051796
agatacgagaaaa

SEQ ID NO: 212640 - DNA, 13 bp, Artificial Sequence
  Oligonucleotide for detection of SNP TSC0051796
ttttctcgtatct

SEQ ID NO: 212641 - DNA, 13 bp, Artificial Sequence
  Oligonucleotide for detection of SNP TSC0051800
ggagttgtaggta

SEQ ID NO: 212642 - DNA, 13 bp, Artificial Sequence
  Oligonucleotide for detection of SNP TSC0051800
tacctacaactcc

SEQ ID NO: 212643 - DNA, 13 bp, Artificial Sequence
  Oligonucleotide for detection of SNP TSC0051800
ggagttataggta

SEQ ID NO: 212644 - DNA, 13 bp, Artificial Sequence
  Oligonucleotide for detection of SNP TSC0051800
tacctataactcc

SEQ ID NO: 212645 - DNA, 13 bp, Artificial Sequence
  Oligonucleotide for detection of SNP TSC0051800
ggagtcgtaggta

SEQ ID NO: 212646 - DNA, 13 bp, Artificial Sequence
  Oligonucleotide for detection of SNP TSC0051800
tacctacgactcc

SEQ ID NO: 212647 - DNA, 13 bp, Artificial Sequence
  Oligonucleotide for detection of SNP TSC0051801
tgatttgtatgtg

SEQ ID NO: 212648 - DNA, 13 bp, Artificial Sequence
  Oligonucleotide for detection of SNP TSC0051801
cacatacaaatca

SEQ ID NO: 212649 - DNA, 13 bp, Artificial Sequence
  Oligonucleotide for detection of SNP TSC0051801
tgatttttatgtg

SEQ ID NO: 212650 - DNA, 13 bp, Artificial Sequence
  Oligonucleotide for detection of SNP TSC0051801
cacataaaaatca

SEQ ID NO: 212651 - DNA, 13 bp, Artificial Sequence
  Oligonucleotide for detection of SNP TSC0051804
aagaaaattgatt

SEQ ID NO: 212652 - DNA, 13 bp, Artificial Sequence
  Oligonucleotide for detection of SNP TSC0051804
aatcaattttctt

SEQ ID NO: 212653 - DNA, 13 bp, Artificial Sequence
  Oligonucleotide for detection of SNP TSC0051804
aagaaagttgatt

SEQ ID NO: 212654 - DNA, 13 bp, Artificial Sequence
  Oligonucleotide for detection of SNP TSC0051804
aatcaactttctt

SEQ ID NO: 212655 - DNA, 13 bp, Artificial Sequence
  Oligonucleotide for detection of SNP TSC0006247
tgtttttgttaga

SEQ ID NO: 212656 - DNA, 13 bp, Artificial Sequence
  Oligonucleotide for detection of SNP TSC0006247
tctaacaaaaaca

SEQ ID NO: 212657 - DNA, 13 bp, Artificial Sequence
  Oligonucleotide for detection of SNP TSC0006247
tgttttcgttaga

SEQ ID NO: 212658 - DNA, 13 bp, Artificial Sequence
  Oligonucleotide for detection of SNP TSC0006247
tctaacgaaaaca

SEQ ID NO: 212659 - DNA, 13 bp, Artificial Sequence
  Oligonucleotide for detection of SNP TSC0006247
tttagtgaaggta

SEQ ID NO: 212660 - DNA, 13 bp, Artificial Sequence
  Oligonucleotide for detection of SNP TSC0006247
taccttcactaaa

SEQ ID NO: 212661 - DNA, 13 bp, Artificial Sequence
  Oligonucleotide for detection of SNP TSC0006247
tttagtaaaggta

SEQ ID NO: 212662 - DNA, 13 bp, Artificial Sequence
  Oligonucleotide for detection of SNP TSC0006247
tacctttactaaa

SEQ ID NO: 212663 - DNA, 13 bp, Artificial Sequence
  Oligonucleotide for detection of SNP TSC0006247
tttagcgaaggta

SEQ ID NO: 212664 - DNA, 13 bp, Artificial Sequence
  Oligonucleotide for detection of SNP TSC0006247
taccttcgctaaa

SEQ ID NO: 212665 - DNA, 13 bp, Artificial Sequence
  Oligonucleotide for detection of SNP TSC0051807
attaaaataaaay

SEQ ID NO: 212666 - DNA, 13 bp, Artificial Sequence
  Oligonucleotide for detection of SNP TSC0051807
rttttattttaat

SEQ ID NO: 212667 - DNA, 13 bp, Artificial Sequence
  Oligonucleotide for detection of SNP TSC0051807
attaaagtaaaay

SEQ ID NO: 212668 - DNA, 13 bp, Artificial Sequence
  Oligonucleotide for detection of SNP TSC0051807
rttttactttaat

SEQ ID NO: 212669 - DNA, 13 bp, Artificial Sequence
  Oligonucleotide for detection of SNP TSC0051808
ggtttaggatttt

SEQ ID NO: 212670 - DNA, 13 bp, Artificial Sequence
  Oligonucleotide for detection of SNP TSC0051808
aaaatcctaaacc

SEQ ID NO: 212671 - DNA, 13 bp, Artificial Sequence
  Oligonucleotide for detection of SNP TSC0051808
ggtttaagatttt

SEQ ID NO: 212672 - DNA, 13 bp, Artificial Sequence
  Oligonucleotide for detection of SNP TSC0051808
aaaatcttaaacc

SEQ ID NO: 212673 - DNA, 13 bp, Artificial Sequence
  Oligonucleotide for detection of SNP TSC0051809
gtttggagaaatt

SEQ ID NO: 212674 - DNA, 13 bp, Artificial Sequence
  Oligonucleotide for detection of SNP TSC0051809
aatttctccaaac

SEQ ID NO: 212675 - DNA, 13 bp, Artificial Sequence
  Oligonucleotide for detection of SNP TSC0051809
gtttggggaaatt

SEQ ID NO: 212676 - DNA, 13 bp, Artificial Sequence
  Oligonucleotide for detection of SNP TSC0051809
aatttccccaaac

SEQ ID NO: 212677 - DNA, 13 bp, Artificial Sequence
  Oligonucleotide for detection of SNP TSC0051810
ttttttgatatty

SEQ ID NO: 212678 - DNA, 13 bp, Artificial Sequence
  Oligonucleotide for detection of SNP TSC0051810
raatatcaaaaaa

SEQ ID NO: 212679 - DNA, 13 bp, Artificial Sequence
  Oligonucleotide for detection of SNP TSC0051810
tttttcgatatty

SEQ ID NO: 212680 - DNA, 13 bp, Artificial Sequence
  Oligonucleotide for detection of SNP TSC0051810
raatatcgaaaaa

SEQ ID NO: 212681 - DNA, 13 bp, Artificial Sequence
  Oligonucleotide for detection of SNP TSC0051810
ggatattgggaaa

SEQ ID NO: 212682 - DNA, 13 bp, Artificial Sequence
  Oligonucleotide for detection of SNP TSC0051810
tttcccaatatcc

SEQ ID NO: 212683 - DNA, 13 bp, Artificial Sequence
  Oligonucleotide for detection of SNP TSC0051810
ggatatcgggaaa

SEQ ID NO: 212684 - DNA, 13 bp, Artificial Sequence
  Oligonucleotide for detection of SNP TSC0051810
tttcccgatatcc

SEQ ID NO: 212685 - DNA, 13 bp, Artificial Sequence
  Oligonucleotide for detection of SNP TSC0051814
ggttatgttgtag

SEQ ID NO: 212686 - DNA, 13 bp, Artificial Sequence
  Oligonucleotide for detection of SNP TSC0051814
ctacaacataacc

SEQ ID NO: 212687 - DNA, 13 bp, Artificial Sequence
  Oligonucleotide for detection of SNP TSC0051816
gaaaaataaatag

SEQ ID NO: 212688 - DNA, 13 bp, Artificial Sequence
  Oligonucleotide for detection of SNP TSC0051816
ctatttatttttc

SEQ ID NO: 212689 - DNA, 13 bp, Artificial Sequence
  Oligonucleotide for detection of SNP TSC0051816
gaaaaagaaatag

SEQ ID NO: 212690 - DNA, 13 bp, Artificial Sequence
  Oligonucleotide for detection of SNP TSC0051816
ctatttctttttc

SEQ ID NO: 212691 - DNA, 13 bp, Artificial Sequence
  Oligonucleotide for detection of SNP TSC0051817
ggtaatataatay

SEQ ID NO: 212692 - DNA, 13 bp, Artificial Sequence
  Oligonucleotide for detection of SNP TSC0051817
rtattatattacc

SEQ ID NO: 212693 - DNA, 13 bp, Artificial Sequence
  Oligonucleotide for detection of SNP TSC0051817
ggtaatgtaatay

SEQ ID NO: 212694 - DNA, 13 bp, Artificial Sequence
  Oligonucleotide for detection of SNP TSC0051817
rtattacattacc

SEQ ID NO: 212695 - DNA, 13 bp, Artificial Sequence
  Oligonucleotide for detection of SNP TSC0051818
aagttgatagtgt

SEQ ID NO: 212696 - DNA, 13 bp, Artificial Sequence
  Oligonucleotide for detection of SNP TSC0051818
acactatcaactt

SEQ ID NO: 212697 - DNA, 13 bp, Artificial Sequence
  Oligonucleotide for detection of SNP TSC0051818
aagttggtagtgt

SEQ ID NO: 212698 - DNA, 13 bp, Artificial Sequence
  Oligonucleotide for detection of SNP TSC0051818
acactaccaactt

SEQ ID NO: 212699 - DNA, 13 bp, Artificial Sequence
  Oligonucleotide for detection of SNP TSC0051819
aatatattataat

SEQ ID NO: 212700 - DNA, 13 bp, Artificial Sequence
  Oligonucleotide for detection of SNP TSC0051819
attataatatatt

SEQ ID NO: 212701 - DNA, 13 bp, Artificial Sequence
  Oligonucleotide for detection of SNP TSC0051819
attatattgtatt

SEQ ID NO: 212702 - DNA, 13 bp, Artificial Sequence
  Oligonucleotide for detection of SNP TSC0051819
aatacaatataat

SEQ ID NO: 212703 - DNA, 13 bp, Artificial Sequence
  Oligonucleotide for detection of SNP TSC0051820
ttttagataatty

SEQ ID NO: 212704 - DNA, 13 bp, Artificial Sequence
  Oligonucleotide for detection of SNP TSC0051820
raattatctaaaa

SEQ ID NO: 212705 - DNA, 13 bp, Artificial Sequence
  Oligonucleotide for detection of SNP TSC0051820
ttttaggtaatty

SEQ ID NO: 212706 - DNA, 13 bp, Artificial Sequence
  Oligonucleotide for detection of SNP TSC0051820
raattacctaaaa

SEQ ID NO: 212707 - DNA, 13 bp, Artificial Sequence
  Oligonucleotide for detection of SNP TSC0051823
tgtaatgtattga

SEQ ID NO: 212708 - DNA, 13 bp, Artificial Sequence
  Oligonucleotide for detection of SNP TSC0051823
tcaatacattaca

SEQ ID NO: 212709 - DNA, 13 bp, Artificial Sequence
  Oligonucleotide for detection of SNP TSC0051823
tgtaatatattga

SEQ ID NO: 212710 - DNA, 13 bp, Artificial Sequence
  Oligonucleotide for detection of SNP TSC0051823
tcaatatattaca

SEQ ID NO: 212711 - DNA, 13 bp, Artificial Sequence
  Oligonucleotide for detection of SNP TSC0051823
tgtaacgtattga

SEQ ID NO: 212712 - DNA, 13 bp, Artificial Sequence
  Oligonucleotide for detection of SNP TSC0051823
tcaatacgttaca

SEQ ID NO: 212713 - DNA, 13 bp, Artificial Sequence
  Oligonucleotide for detection of SNP TSC0051824
gtaaaatgatata

SEQ ID NO: 212714 - DNA, 13 bp, Artificial Sequence
  Oligonucleotide for detection of SNP TSC0051824
tatatcattttac

SEQ ID NO: 212715 - DNA, 13 bp, Artificial Sequence
  Oligonucleotide for detection of SNP TSC0051824
gtaaaaggatata

SEQ ID NO: 212716 - DNA, 13 bp, Artificial Sequence
  Oligonucleotide for detection of SNP TSC0051824
tatatccttttac

SEQ ID NO: 212717 - DNA, 13 bp, Artificial Sequence
  Oligonucleotide for detection of SNP TSC0051828
aaaggttgagaag

SEQ ID NO: 212718 - DNA, 13 bp, Artificial Sequence
  Oligonucleotide for detection of SNP TSC0051828
cttctcaaccttt

SEQ ID NO: 212719 - DNA, 13 bp, Artificial Sequence
  Oligonucleotide for detection of SNP TSC0051828
aaaggtcgagaag

SEQ ID NO: 212720 - DNA, 13 bp, Artificial Sequence
  Oligonucleotide for detection of SNP TSC0051828
cttctcgaccttt

SEQ ID NO: 212721 - DNA, 13 bp, Artificial Sequence
  Oligonucleotide for detection of SNP TSC0005270
atatgtgagaaaa

SEQ ID NO: 212722 - DNA, 13 bp, Artificial Sequence
  Oligonucleotide for detection of SNP TSC0005270
ttttctcacatat

SEQ ID NO: 212723 - DNA, 13 bp, Artificial Sequence
  Oligonucleotide for detection of SNP TSC0005270
atatgtaagaaaa

SEQ ID NO: 212724 - DNA, 13 bp, Artificial Sequence
  Oligonucleotide for detection of SNP TSC0005270
ttttcttacatat

SEQ ID NO: 212725 - DNA, 13 bp, Artificial Sequence
  Oligonucleotide for detection of SNP TSC0051830
aataagatagaga

SEQ ID NO: 212726 - DNA, 13 bp, Artificial Sequence
  Oligonucleotide for detection of SNP TSC0051830
tctctatcttatt

SEQ ID NO: 212727 - DNA, 13 bp, Artificial Sequence
  Oligonucleotide for detection of SNP TSC0051830
aataaggtagaga

SEQ ID NO: 212728 - DNA, 13 bp, Artificial Sequence
  Oligonucleotide for detection of SNP TSC0051830
tctctaccttatt

SEQ ID NO: 212729 - DNA, 13 bp, Artificial Sequence
  Oligonucleotide for detection of SNP TSC0051831
tttagtaaaaaga

SEQ ID NO: 212730 - DNA, 13 bp, Artificial Sequence
  Oligonucleotide for detection of SNP TSC0051831
tctttttactaaa

SEQ ID NO: 212731 - DNA, 13 bp, Artificial Sequence
  Oligonucleotide for detection of SNP TSC0051831
tttagtgaaaaga

SEQ ID NO: 212732 - DNA, 13 bp, Artificial Sequence
  Oligonucleotide for detection of SNP TSC0051831
tcttttcactaaa

SEQ ID NO: 212733 - DNA, 13 bp, Artificial Sequence
  Oligonucleotide for detection of SNP TSC0051833
tttttgggggggg

SEQ ID NO: 212734 - DNA, 13 bp, Artificial Sequence
  Oligonucleotide for detection of SNP TSC0051833
ccccccccaaaaa

SEQ ID NO: 212735 - DNA, 13 bp, Artificial Sequence
  Oligonucleotide for detection of SNP TSC0051833
tttttgagggggg

SEQ ID NO: 212736 - DNA, 13 bp, Artificial Sequence
  Oligonucleotide for detection of SNP TSC0051833
cccccctcaaaaa

SEQ ID NO: 212737 - DNA, 13 bp, Artificial Sequence
  Oligonucleotide for detection of SNP TSC0051834
gaatgtgtttggy

SEQ ID NO: 212738 - DNA, 13 bp, Artificial Sequence
  Oligonucleotide for detection of SNP TSC0051834
rccaaacacattc

SEQ ID NO: 212739 - DNA, 13 bp, Artificial Sequence
  Oligonucleotide for detection of SNP TSC0051834
gaatgtatttggy

SEQ ID NO: 212740 - DNA, 13 bp, Artificial Sequence
  Oligonucleotide for detection of SNP TSC0051834
rccaaatacattc

SEQ ID NO: 212741 - DNA, 13 bp, Artificial Sequence
  Oligonucleotide for detection of SNP TSC0051835
taaggaatatata

SEQ ID NO: 212742 - DNA, 13 bp, Artificial Sequence
  Oligonucleotide for detection of SNP TSC0051835
tatatattcctta

SEQ ID NO: 212743 - DNA, 13 bp, Artificial Sequence
  Oligonucleotide for detection of SNP TSC0051836
atattgtatttga

SEQ ID NO: 212744 - DNA, 13 bp, Artificial Sequence
  Oligonucleotide for detection of SNP TSC0051836
tcaaatacaatat

SEQ ID NO: 212745 - DNA, 13 bp, Artificial Sequence
  Oligonucleotide for detection of SNP TSC0051836
atattggatttga

SEQ ID NO: 212746 - DNA, 13 bp, Artificial Sequence
  Oligonucleotide for detection of SNP TSC0051836
tcaaatccaatat

SEQ ID NO: 212747 - DNA, 13 bp, Artificial Sequence
  Oligonucleotide for detection of SNP TSC0051836
ttaagtgtaatgt

SEQ ID NO: 212748 - DNA, 13 bp, Artificial Sequence
  Oligonucleotide for detection of SNP TSC0051836
acattacacttaa

SEQ ID NO: 212749 - DNA, 13 bp, Artificial Sequence
  Oligonucleotide for detection of SNP TSC0051836
ttaagtttaatgt

SEQ ID NO: 212750 - DNA, 13 bp, Artificial Sequence
  Oligonucleotide for detection of SNP TSC0051836
acattaaacttaa

SEQ ID NO: 212751 - DNA, 13 bp, Artificial Sequence
  Oligonucleotide for detection of SNP TSC0007161
gtttattgtttat

SEQ ID NO: 212752 - DNA, 13 bp, Artificial Sequence
  Oligonucleotide for detection of SNP TSC0007161
ataaacaataaac

SEQ ID NO: 212753 - DNA, 13 bp, Artificial Sequence
  Oligonucleotide for detection of SNP TSC0007161
gtttatcgtttat

SEQ ID NO: 212754 - DNA, 13 bp, Artificial Sequence
  Oligonucleotide for detection of SNP TSC0007161
ataaacgataaac

SEQ ID NO: 212755 - DNA, 13 bp, Artificial Sequence
  Oligonucleotide for detection of SNP TSC0007161
ataggtggtggay

SEQ ID NO: 212756 - DNA, 13 bp, Artificial Sequence
  Oligonucleotide for detection of SNP TSC0007161
rtccaccacctat

SEQ ID NO: 212757 - DNA, 13 bp, Artificial Sequence
  Oligonucleotide for detection of SNP TSC0007161
ataggtagtggay

SEQ ID NO: 212758 - DNA, 13 bp, Artificial Sequence
  Oligonucleotide for detection of SNP TSC0007161
rtccactacctat

SEQ ID NO: 212759 - DNA, 13 bp, Artificial Sequence
  Oligonucleotide for detection of SNP TSC0007161
ataggcggtggay

SEQ ID NO: 212760 - DNA, 13 bp, Artificial Sequence
  Oligonucleotide for detection of SNP TSC0007161
rtccaccgcctat

SEQ ID NO: 212761 - DNA, 13 bp, Artificial Sequence
  Oligonucleotide for detection of SNP TSC0051837
tttttgggatatg

SEQ ID NO: 212762 - DNA, 13 bp, Artificial Sequence
  Oligonucleotide for detection of SNP TSC0051837
catatcccaaaaa

SEQ ID NO: 212763 - DNA, 13 bp, Artificial Sequence
  Oligonucleotide for detection of SNP TSC0051837
tttttgagatatg

SEQ ID NO: 212764 - DNA, 13 bp, Artificial Sequence
  Oligonucleotide for detection of SNP TSC0051837
catatctcaaaaa

SEQ ID NO: 212765 - DNA, 13 bp, Artificial Sequence
  Oligonucleotide for detection of SNP TSC0051838
atgttggtataga

SEQ ID NO: 212766 - DNA, 13 bp, Artificial Sequence
  Oligonucleotide for detection of SNP TSC0051838
tctataccaacat

SEQ ID NO: 212767 - DNA, 13 bp, Artificial Sequence
  Oligonucleotide for detection of SNP TSC0051838
atgttgatataga

SEQ ID NO: 212768 - DNA, 13 bp, Artificial Sequence
  Oligonucleotide for detection of SNP TSC0051838
tctatatcaacat

SEQ ID NO: 212769 - DNA, 13 bp, Artificial Sequence
  Oligonucleotide for detection of SNP TSC0006118
ttgttgtttaatt

SEQ ID NO: 212770 - DNA, 13 bp, Artificial Sequence
  Oligonucleotide for detection of SNP TSC0006118
aattaaacaacaa

SEQ ID NO: 212771 - DNA, 13 bp, Artificial Sequence
  Oligonucleotide for detection of SNP TSC0006118
ttgttggttaatt

SEQ ID NO: 212772 - DNA, 13 bp, Artificial Sequence
  Oligonucleotide for detection of SNP TSC0006118
aattaaccaacaa

SEQ ID NO: 212773 - DNA, 13 bp, Artificial Sequence
  Oligonucleotide for detection of SNP TSC0006118
agttaaatagtaa

SEQ ID NO: 212774 - DNA, 13 bp, Artificial Sequence
  Oligonucleotide for detection of SNP TSC0006118
ttactatttaact

SEQ ID NO: 212775 - DNA, 13 bp, Artificial Sequence
  Oligonucleotide for detection of SNP TSC0006118
agttaattagtaa

SEQ ID NO: 212776 - DNA, 13 bp, Artificial Sequence
  Oligonucleotide for detection of SNP TSC0006118
ttactaattaact

SEQ ID NO: 212777 - DNA, 13 bp, Artificial Sequence
  Oligonucleotide for detection of SNP TSC0051839
tttaatgaatata

SEQ ID NO: 212778 - DNA, 13 bp, Artificial Sequence
  Oligonucleotide for detection of SNP TSC0051839
tatattcattaaa

SEQ ID NO: 212779 - DNA, 13 bp, Artificial Sequence
  Oligonucleotide for detection of SNP TSC0051839
tttaacgaatata

SEQ ID NO: 212780 - DNA, 13 bp, Artificial Sequence
  Oligonucleotide for detection of SNP TSC0051839
tatattcgttaaa

SEQ ID NO: 212781 - DNA, 13 bp, Artificial Sequence
  Oligonucleotide for detection of SNP TSC0051839
tgtattagttagg

SEQ ID NO: 212782 - DNA, 13 bp, Artificial Sequence
  Oligonucleotide for detection of SNP TSC0051839
cctaactaataca

SEQ ID NO: 212783 - DNA, 13 bp, Artificial Sequence
  Oligonucleotide for detection of SNP TSC0051839
tgtatttgttagg

SEQ ID NO: 212784 - DNA, 13 bp, Artificial Sequence
  Oligonucleotide for detection of SNP TSC0051839
cctaacaaataca

SEQ ID NO: 212785 - DNA, 13 bp, Artificial Sequence
  Oligonucleotide for detection of SNP TSC0051839
tgtattcgttagg

SEQ ID NO: 212786 - DNA, 13 bp, Artificial Sequence
  Oligonucleotide for detection of SNP TSC0051839
cctaacgaataca

SEQ ID NO: 212787 - DNA, 13 bp, Artificial Sequence
  Oligonucleotide for detection of SNP TSC0051842
atagatatataga

SEQ ID NO: 212788 - DNA, 13 bp, Artificial Sequence
  Oligonucleotide for detection of SNP TSC0051842
tctatatatctat

SEQ ID NO: 212789 - DNA, 13 bp, Artificial Sequence
  Oligonucleotide for detection of SNP TSC0051842
atagatgtataga

SEQ ID NO: 212790 - DNA, 13 bp, Artificial Sequence
  Oligonucleotide for detection of SNP TSC0051842
tctatacatctat

SEQ ID NO: 212791 - DNA, 13 bp, Artificial Sequence
  Oligonucleotide for detection of SNP TSC0051843
tggagtgttttaa

SEQ ID NO: 212792 - DNA, 13 bp, Artificial Sequence
  Oligonucleotide for detection of SNP TSC0051843
ttaaaacactcca

SEQ ID NO: 212793 - DNA, 13 bp, Artificial Sequence
  Oligonucleotide for detection of SNP TSC0051843
tggagtattttaa

SEQ ID NO: 212794 - DNA, 13 bp, Artificial Sequence
  Oligonucleotide for detection of SNP TSC0051843
ttaaaatactcca

SEQ ID NO: 212795 - DNA, 13 bp, Artificial Sequence
  Oligonucleotide for detection of SNP TSC0051844
tttggggtatttt

SEQ ID NO: 212796 - DNA, 13 bp, Artificial Sequence
  Oligonucleotide for detection of SNP TSC0051844
aaaataccccaaa

SEQ ID NO: 212797 - DNA, 13 bp, Artificial Sequence
  Oligonucleotide for detection of SNP TSC0051845
gaagttgagttaa

SEQ ID NO: 212798 - DNA, 13 bp, Artificial Sequence
  Oligonucleotide for detection of SNP TSC0051845
ttaactcaacttc

SEQ ID NO: 212799 - DNA, 13 bp, Artificial Sequence
  Oligonucleotide for detection of SNP TSC0051845
gaagtttagttaa

SEQ ID NO: 212800 - DNA, 13 bp, Artificial Sequence
  Oligonucleotide for detection of SNP TSC0051845
ttaactaaacttc

SEQ ID NO: 212801 - DNA, 13 bp, Artificial Sequence
  Oligonucleotide for detection of SNP TSC0051846
ttaagtattttat

SEQ ID NO: 212802 - DNA, 13 bp, Artificial Sequence
  Oligonucleotide for detection of SNP TSC0051846
ataaaatacttaa

SEQ ID NO: 212803 - DNA, 13 bp, Artificial Sequence
  Oligonucleotide for detection of SNP TSC0051846
ttaagtgttttat

SEQ ID NO: 212804 - DNA, 13 bp, Artificial Sequence
  Oligonucleotide for detection of SNP TSC0051846
ataaaacacttaa

SEQ ID NO: 212805 - DNA, 13 bp, Artificial Sequence
  Oligonucleotide for detection of SNP TSC0051848
aatggattatagt

SEQ ID NO: 212806 - DNA, 13 bp, Artificial Sequence
  Oligonucleotide for detection of SNP TSC0051848
actataatccatt

SEQ ID NO: 212807 - DNA, 13 bp, Artificial Sequence
  Oligonucleotide for detection of SNP TSC0051848
aatggagtatagt

SEQ ID NO: 212808 - DNA, 13 bp, Artificial Sequence
  Oligonucleotide for detection of SNP TSC0051848
actatactccatt

SEQ ID NO: 212809 - DNA, 13 bp, Artificial Sequence
  Oligonucleotide for detection of SNP TSC0051848
attgtagtttatt

SEQ ID NO: 212810 - DNA, 13 bp, Artificial Sequence
  Oligonucleotide for detection of SNP TSC0051848
aataaactacaat

SEQ ID NO: 212811 - DNA, 13 bp, Artificial Sequence
  Oligonucleotide for detection of SNP TSC0051848
attgtattttatt

SEQ ID NO: 212812 - DNA, 13 bp, Artificial Sequence
  Oligonucleotide for detection of SNP TSC0051848
aataaaatacaat

SEQ ID NO: 212813 - DNA, 13 bp, Artificial Sequence
  Oligonucleotide for detection of SNP TSC0051849
gtttttaattgtt

SEQ ID NO: 212814 - DNA, 13 bp, Artificial Sequence
  Oligonucleotide for detection of SNP TSC0051849
aacaattaaaaac

SEQ ID NO: 212815 - DNA, 13 bp, Artificial Sequence
  Oligonucleotide for detection of SNP TSC0051849
gttttttattgtt

SEQ ID NO: 212816 - DNA, 13 bp, Artificial Sequence
  Oligonucleotide for detection of SNP TSC0051849
aacaataaaaaac

SEQ ID NO: 212817 - DNA, 13 bp, Artificial Sequence
  Oligonucleotide for detection of SNP TSC0051849
aatagttgggggy

SEQ ID NO: 212818 - DNA, 13 bp, Artificial Sequence
  Oligonucleotide for detection of SNP TSC0051849
rcccccaactatt

SEQ ID NO: 212819 - DNA, 13 bp, Artificial Sequence
  Oligonucleotide for detection of SNP TSC0051849
aatagtggggggy

SEQ ID NO: 212820 - DNA, 13 bp, Artificial Sequence
  Oligonucleotide for detection of SNP TSC0051849
rccccccactatt

SEQ ID NO: 212821 - DNA, 13 bp, Artificial Sequence
  Oligonucleotide for detection of SNP TSC0051853
aggttatatagtg

SEQ ID NO: 212822 - DNA, 13 bp, Artificial Sequence
  Oligonucleotide for detection of SNP TSC0051853
cactatataacct

SEQ ID NO: 212823 - DNA, 13 bp, Artificial Sequence
  Oligonucleotide for detection of SNP TSC0051853
aggttagatagtg

SEQ ID NO: 212824 - DNA, 13 bp, Artificial Sequence
  Oligonucleotide for detection of SNP TSC0051853
cactatctaacct

SEQ ID NO: 212825 - DNA, 13 bp, Artificial Sequence
  Oligonucleotide for detection of SNP TSC0051853
tattatgtagttt

SEQ ID NO: 212826 - DNA, 13 bp, Artificial Sequence
  Oligonucleotide for detection of SNP TSC0051853
aaactacataata

SEQ ID NO: 212827 - DNA, 13 bp, Artificial Sequence
  Oligonucleotide for detection of SNP TSC0051853
tattatttagttt

SEQ ID NO: 212828 - DNA, 13 bp, Artificial Sequence
  Oligonucleotide for detection of SNP TSC0051853
aaactaaataata

SEQ ID NO: 212829 - DNA, 13 bp, Artificial Sequence
  Oligonucleotide for detection of SNP TSC0051854
gttgttaggtgta

SEQ ID NO: 212830 - DNA, 13 bp, Artificial Sequence
  Oligonucleotide for detection of SNP TSC0051854
tacacctaacaac

SEQ ID NO: 212831 - DNA, 13 bp, Artificial Sequence
  Oligonucleotide for detection of SNP TSC0051854
gttgttgggtgta

SEQ ID NO: 212832 - DNA, 13 bp, Artificial Sequence
  Oligonucleotide for detection of SNP TSC0051854
tacacccaacaac

SEQ ID NO: 212833 - DNA, 13 bp, Artificial Sequence
  Oligonucleotide for detection of SNP TSC0051854
gttgtcgggtgta

SEQ ID NO: 212834 - DNA, 13 bp, Artificial Sequence
  Oligonucleotide for detection of SNP TSC0051854
tacacccgacaac

SEQ ID NO: 212835 - DNA, 13 bp, Artificial Sequence
  Oligonucleotide for detection of SNP TSC0051854
tatatttgatagy

SEQ ID NO: 212836 - DNA, 13 bp, Artificial Sequence
  Oligonucleotide for detection of SNP TSC0051854
rctatcaaatata

SEQ ID NO: 212837 - DNA, 13 bp, Artificial Sequence
  Oligonucleotide for detection of SNP TSC0051854
tatattcgatagy

SEQ ID NO: 212838 - DNA, 13 bp, Artificial Sequence
  Oligonucleotide for detection of SNP TSC0051854
rctatcgaatata

SEQ ID NO: 212839 - DNA, 13 bp, Artificial Sequence
  Oligonucleotide for detection of SNP TSC0051857
attgagataggtg

SEQ ID NO: 212840 - DNA, 13 bp, Artificial Sequence
  Oligonucleotide for detection of SNP TSC0051857
cacctatctcaat

SEQ ID NO: 212841 - DNA, 13 bp, Artificial Sequence
  Oligonucleotide for detection of SNP TSC0051857
attgaggtaggtg

SEQ ID NO: 212842 - DNA, 13 bp, Artificial Sequence
  Oligonucleotide for detection of SNP TSC0051857
cacctacctcaat

SEQ ID NO: 212843 - DNA, 13 bp, Artificial Sequence
  Oligonucleotide for detection of SNP TSC0051857
atcgagataggtg

SEQ ID NO: 212844 - DNA, 13 bp, Artificial Sequence
  Oligonucleotide for detection of SNP TSC0051857
cacctatctcgat

SEQ ID NO: 212845 - DNA, 13 bp, Artificial Sequence
  Oligonucleotide for detection of SNP TSC0051857
atcgaggtaggtg

SEQ ID NO: 212846 - DNA, 13 bp, Artificial Sequence
  Oligonucleotide for detection of SNP TSC0051857
cacctacctcgat

SEQ ID NO: 212847 - DNA, 13 bp, Artificial Sequence
  Oligonucleotide for detection of SNP TSC0010403
gtatgatgtttag

SEQ ID NO: 212848 - DNA, 13 bp, Artificial Sequence
  Oligonucleotide for detection of SNP TSC0010403
ctaaacatcatac

SEQ ID NO: 212849 - DNA, 13 bp, Artificial Sequence
  Oligonucleotide for detection of SNP TSC0010403
gtatgaggtttag

SEQ ID NO: 212850 - DNA, 13 bp, Artificial Sequence
  Oligonucleotide for detection of SNP TSC0010403
ctaaacctcatac

SEQ ID NO: 212851 - DNA, 13 bp, Artificial Sequence
  Oligonucleotide for detection of SNP TSC0010403
ttggattttatgy

SEQ ID NO: 212852 - DNA, 13 bp, Artificial Sequence
  Oligonucleotide for detection of SNP TSC0010403
rcataaaatccaa

SEQ ID NO: 212853 - DNA, 13 bp, Artificial Sequence
  Oligonucleotide for detection of SNP TSC0051858
ttatataatagga

SEQ ID NO: 212854 - DNA, 13 bp, Artificial Sequence
  Oligonucleotide for detection of SNP TSC0051858
tcctattatataa

SEQ ID NO: 212855 - DNA, 13 bp, Artificial Sequence
  Oligonucleotide for detection of SNP TSC0051858
ttatatgatagga

SEQ ID NO: 212856 - DNA, 13 bp, Artificial Sequence
  Oligonucleotide for detection of SNP TSC0051858
tcctatcatataa

SEQ ID NO: 212857 - DNA, 13 bp, Artificial Sequence
  Oligonucleotide for detection of SNP TSC0051858
ttatacgatagga

SEQ ID NO: 212858 - DNA, 13 bp, Artificial Sequence
  Oligonucleotide for detection of SNP TSC0051858
tcctatcgtataa

SEQ ID NO: 212859 - DNA, 13 bp, Artificial Sequence
  Oligonucleotide for detection of SNP TSC0051858
ttttattgtataa

SEQ ID NO: 212860 - DNA, 13 bp, Artificial Sequence
  Oligonucleotide for detection of SNP TSC0051858
ttatacaataaaa

SEQ ID NO: 212861 - DNA, 13 bp, Artificial Sequence
  Oligonucleotide for detection of SNP TSC0051858
ttttatcgtataa

SEQ ID NO: 212862 - DNA, 13 bp, Artificial Sequence
  Oligonucleotide for detection of SNP TSC0051858
ttatacgataaaa

SEQ ID NO: 212863 - DNA, 13 bp, Artificial Sequence
  Oligonucleotide for detection of SNP TSC0051859
ttttttgatgggg

SEQ ID NO: 212864 - DNA, 13 bp, Artificial Sequence
  Oligonucleotide for detection of SNP TSC0051859
ccccatcaaaaaa

SEQ ID NO: 212865 - DNA, 13 bp, Artificial Sequence
  Oligonucleotide for detection of SNP TSC0051864
agagattgtatat

SEQ ID NO: 212866 - DNA, 13 bp, Artificial Sequence
  Oligonucleotide for detection of SNP TSC0051864
atatacaatctct

SEQ ID NO: 212867 - DNA, 13 bp, Artificial Sequence
  Oligonucleotide for detection of SNP TSC0051864
agagatggtatat

SEQ ID NO: 212868 - DNA, 13 bp, Artificial Sequence
  Oligonucleotide for detection of SNP TSC0051864
atataccatctct

SEQ ID NO: 212869 - DNA, 13 bp, Artificial Sequence
  Oligonucleotide for detection of SNP TSC0051865
gagtttgttaata

SEQ ID NO: 212870 - DNA, 13 bp, Artificial Sequence
  Oligonucleotide for detection of SNP TSC0051865
tattaacaaactc

SEQ ID NO: 212871 - DNA, 13 bp, Artificial Sequence
  Oligonucleotide for detection of SNP TSC0051865
gagtttattaata

SEQ ID NO: 212872 - DNA, 13 bp, Artificial Sequence
  Oligonucleotide for detection of SNP TSC0051865
tattaataaactc

SEQ ID NO: 212873 - DNA, 13 bp, Artificial Sequence
  Oligonucleotide for detection of SNP TSC0051866
ttatattgttata

SEQ ID NO: 212874 - DNA, 13 bp, Artificial Sequence
  Oligonucleotide for detection of SNP TSC0051866
tataacaatataa

SEQ ID NO: 212875 - DNA, 13 bp, Artificial Sequence
  Oligonucleotide for detection of SNP TSC0051866
ttatatcgttata

SEQ ID NO: 212876 - DNA, 13 bp, Artificial Sequence
  Oligonucleotide for detection of SNP TSC0051866
tataacgatataa

SEQ ID NO: 212877 - DNA, 13 bp, Artificial Sequence
  Oligonucleotide for detection of SNP TSC0051866
tgtaatggtgtag

SEQ ID NO: 212878 - DNA, 13 bp, Artificial Sequence
  Oligonucleotide for detection of SNP TSC0051866
ctacaccattaca

SEQ ID NO: 212879 - DNA, 13 bp, Artificial Sequence
  Oligonucleotide for detection of SNP TSC0051866
tgtaatagtgtag

SEQ ID NO: 212880 - DNA, 13 bp, Artificial Sequence
  Oligonucleotide for detection of SNP TSC0051866
ctacactattaca

SEQ ID NO: 212881 - DNA, 13 bp, Artificial Sequence
  Oligonucleotide for detection of SNP TSC0051866
tgtaacggtgtag

SEQ ID NO: 212882 - DNA, 13 bp, Artificial Sequence
  Oligonucleotide for detection of SNP TSC0051866
ctacaccgttaca

SEQ ID NO: 212883 - DNA, 13 bp, Artificial Sequence
  Oligonucleotide for detection of SNP TSC0051867
gatttaagttggg

SEQ ID NO: 212884 - DNA, 13 bp, Artificial Sequence
  Oligonucleotide for detection of SNP TSC0051867
cccaacttaaatc

SEQ ID NO: 212885 - DNA, 13 bp, Artificial Sequence
  Oligonucleotide for detection of SNP TSC0051867
gatttaggttggg

SEQ ID NO: 212886 - DNA, 13 bp, Artificial Sequence
  Oligonucleotide for detection of SNP TSC0051867
cccaacctaaatc

SEQ ID NO: 212887 - DNA, 13 bp, Artificial Sequence
  Oligonucleotide for detection of SNP TSC0051868
aaaggtagagaaa

SEQ ID NO: 212888 - DNA, 13 bp, Artificial Sequence
  Oligonucleotide for detection of SNP TSC0051868
tttctctaccttt

SEQ ID NO: 212889 - DNA, 13 bp, Artificial Sequence
  Oligonucleotide for detection of SNP TSC0051868
aaaggtggagaaa

SEQ ID NO: 212890 - DNA, 13 bp, Artificial Sequence
  Oligonucleotide for detection of SNP TSC0051868
tttctccaccttt

SEQ ID NO: 212891 - DNA, 13 bp, Artificial Sequence
  Oligonucleotide for detection of SNP TSC0051869
gtgtgagtattay

SEQ ID NO: 212892 - DNA, 13 bp, Artificial Sequence
  Oligonucleotide for detection of SNP TSC0051869
rtaatactcacac

SEQ ID NO: 212893 - DNA, 13 bp, Artificial Sequence
  Oligonucleotide for detection of SNP TSC0051869
gtgtgaatattay

SEQ ID NO: 212894 - DNA, 13 bp, Artificial Sequence
  Oligonucleotide for detection of SNP TSC0051869
rtaatattcacac

SEQ ID NO: 212895 - DNA, 13 bp, Artificial Sequence
  Oligonucleotide for detection of SNP TSC0051870
agagtaatggtty

SEQ ID NO: 212896 - DNA, 13 bp, Artificial Sequence
  Oligonucleotide for detection of SNP TSC0051870
raaccattactct

SEQ ID NO: 212897 - DNA, 13 bp, Artificial Sequence
  Oligonucleotide for detection of SNP TSC0051870
agagtagtggtty

SEQ ID NO: 212898 - DNA, 13 bp, Artificial Sequence
  Oligonucleotide for detection of SNP TSC0051870
raaccactactct

SEQ ID NO: 212899 - DNA, 13 bp, Artificial Sequence
  Oligonucleotide for detection of SNP TSC0051872
atagttagatatg

SEQ ID NO: 212900 - DNA, 13 bp, Artificial Sequence
  Oligonucleotide for detection of SNP TSC0051872
catatctaactat

SEQ ID NO: 212901 - DNA, 13 bp, Artificial Sequence
  Oligonucleotide for detection of SNP TSC0051872
atagtttgatatg

SEQ ID NO: 212902 - DNA, 13 bp, Artificial Sequence
  Oligonucleotide for detection of SNP TSC0051872
catatcaaactat

SEQ ID NO: 212903 - DNA, 13 bp, Artificial Sequence
  Oligonucleotide for detection of SNP TSC0051872
tatgtttaattgt

SEQ ID NO: 212904 - DNA, 13 bp, Artificial Sequence
  Oligonucleotide for detection of SNP TSC0051872
acaattaaacata

SEQ ID NO: 212905 - DNA, 13 bp, Artificial Sequence
  Oligonucleotide for detection of SNP TSC0051873
tgtttttgtagga

SEQ ID NO: 212906 - DNA, 13 bp, Artificial Sequence
  Oligonucleotide for detection of SNP TSC0051873
tcctacaaaaaca

SEQ ID NO: 212907 - DNA, 13 bp, Artificial Sequence
  Oligonucleotide for detection of SNP TSC0051873
tgttttcgtagga

SEQ ID NO: 212908 - DNA, 13 bp, Artificial Sequence
  Oligonucleotide for detection of SNP TSC0051873
tcctacgaaaaca

SEQ ID NO: 212909 - DNA, 13 bp, Artificial Sequence
  Oligonucleotide for detection of SNP TSC0051873
ttttgtgaaagta

SEQ ID NO: 212910 - DNA, 13 bp, Artificial Sequence
  Oligonucleotide for detection of SNP TSC0051873
tactttcacaaaa

SEQ ID NO: 212911 - DNA, 13 bp, Artificial Sequence
  Oligonucleotide for detection of SNP TSC0051873
ttttgtaaaagta

SEQ ID NO: 212912 - DNA, 13 bp, Artificial Sequence
  Oligonucleotide for detection of SNP TSC0051873
tacttttacaaaa

SEQ ID NO: 212913 - DNA, 13 bp, Artificial Sequence
  Oligonucleotide for detection of SNP TSC0051873
ttttgcgaaagta

SEQ ID NO: 212914 - DNA, 13 bp, Artificial Sequence
  Oligonucleotide for detection of SNP TSC0051873
tactttcgcaaaa

SEQ ID NO: 212915 - DNA, 13 bp, Artificial Sequence
  Oligonucleotide for detection of SNP TSC0051878
tgttttaattttt

SEQ ID NO: 212916 - DNA, 13 bp, Artificial Sequence
  Oligonucleotide for detection of SNP TSC0051878
aaaaattaaaaca

SEQ ID NO: 212917 - DNA, 13 bp, Artificial Sequence
  Oligonucleotide for detection of SNP TSC0051878
aaaaattgaagta

SEQ ID NO: 212918 - DNA, 13 bp, Artificial Sequence
  Oligonucleotide for detection of SNP TSC0051878
tacttcaattttt

SEQ ID NO: 212919 - DNA, 13 bp, Artificial Sequence
  Oligonucleotide for detection of SNP TSC0051878
aaaaatagaagta

SEQ ID NO: 212920 - DNA, 13 bp, Artificial Sequence
  Oligonucleotide for detection of SNP TSC0051878
tacttctattttt

SEQ ID NO: 212921 - DNA, 13 bp, Artificial Sequence
  Oligonucleotide for detection of SNP TSC0051878
aaaaatcgaagta

SEQ ID NO: 212922 - DNA, 13 bp, Artificial Sequence
  Oligonucleotide for detection of SNP TSC0051878
tacttcgattttt

SEQ ID NO: 212923 - DNA, 13 bp, Artificial Sequence
  Oligonucleotide for detection of SNP TSC0006469
taatgaaagaatt

SEQ ID NO: 212924 - DNA, 13 bp, Artificial Sequence
  Oligonucleotide for detection of SNP TSC0006469
aattctttcatta

SEQ ID NO: 212925 - DNA, 13 bp, Artificial Sequence
  Oligonucleotide for detection of SNP TSC0006469
taatgagagaatt

SEQ ID NO: 212926 - DNA, 13 bp, Artificial Sequence
  Oligonucleotide for detection of SNP TSC0006469
aattctctcatta

SEQ ID NO: 212927 - DNA, 13 bp, Artificial Sequence
  Oligonucleotide for detection of SNP TSC0051879
gtaattggggtty

SEQ ID NO: 212928 - DNA, 13 bp, Artificial Sequence
  Oligonucleotide for detection of SNP TSC0051879
raaccccaattac

SEQ ID NO: 212929 - DNA, 13 bp, Artificial Sequence
  Oligonucleotide for detection of SNP TSC0051879
gtaattagggtty

SEQ ID NO: 212930 - DNA, 13 bp, Artificial Sequence
  Oligonucleotide for detection of SNP TSC0051879
raaccctaattac

SEQ ID NO: 212931 - DNA, 13 bp, Artificial Sequence
  Oligonucleotide for detection of SNP TSC0051880
tatgtaaagtatg

SEQ ID NO: 212932 - DNA, 13 bp, Artificial Sequence
  Oligonucleotide for detection of SNP TSC0051880
catactttacata

SEQ ID NO: 212933 - DNA, 13 bp, Artificial Sequence
  Oligonucleotide for detection of SNP TSC0051880
tatgtagagtatg

SEQ ID NO: 212934 - DNA, 13 bp, Artificial Sequence
  Oligonucleotide for detection of SNP TSC0051880
catactctacata

SEQ ID NO: 212935 - DNA, 13 bp, Artificial Sequence
  Oligonucleotide for detection of SNP TSC0051880
tacgtaaagtatg

SEQ ID NO: 212936 - DNA, 13 bp, Artificial Sequence
  Oligonucleotide for detection of SNP TSC0051880
catactttacgta

SEQ ID NO: 212937 - DNA, 13 bp, Artificial Sequence
  Oligonucleotide for detection of SNP TSC0051880
tacgtagagtatg

SEQ ID NO: 212938 - DNA, 13 bp, Artificial Sequence
  Oligonucleotide for detection of SNP TSC0051880
catactctacgta

SEQ ID NO: 212939 - DNA, 13 bp, Artificial Sequence
  Oligonucleotide for detection of SNP TSC0051883
tttttgagatttt

SEQ ID NO: 212940 - DNA, 13 bp, Artificial Sequence
  Oligonucleotide for detection of SNP TSC0051883
aaaatctcaaaaa

SEQ ID NO: 212941 - DNA, 13 bp, Artificial Sequence
  Oligonucleotide for detection of SNP TSC0010103
atatgtgtagtga

SEQ ID NO: 212942 - DNA, 13 bp, Artificial Sequence
  Oligonucleotide for detection of SNP TSC0010103
tcactacacatat

SEQ ID NO: 212943 - DNA, 13 bp, Artificial Sequence
  Oligonucleotide for detection of SNP TSC0010103
atatgtatagtga

SEQ ID NO: 212944 - DNA, 13 bp, Artificial Sequence
  Oligonucleotide for detection of SNP TSC0010103
tcactatacatat

SEQ ID NO: 212945 - DNA, 13 bp, Artificial Sequence
  Oligonucleotide for detection of SNP TSC0010103
atatgtgtagcga

SEQ ID NO: 212946 - DNA, 13 bp, Artificial Sequence
  Oligonucleotide for detection of SNP TSC0010103
tcgctacacatat

SEQ ID NO: 212947 - DNA, 13 bp, Artificial Sequence
  Oligonucleotide for detection of SNP TSC0010103
atatgtatagcga

SEQ ID NO: 212948 - DNA, 13 bp, Artificial Sequence
  Oligonucleotide for detection of SNP TSC0010103
tcgctatacatat

SEQ ID NO: 212949 - DNA, 13 bp, Artificial Sequence
  Oligonucleotide for detection of SNP TSC0051886
taggttgtgttta

SEQ ID NO: 212950 - DNA, 13 bp, Artificial Sequence
  Oligonucleotide for detection of SNP TSC0051886
taaacacaaccta

SEQ ID NO: 212951 - DNA, 13 bp, Artificial Sequence
  Oligonucleotide for detection of SNP TSC0051886
taggttatgttta

SEQ ID NO: 212952 - DNA, 13 bp, Artificial Sequence
  Oligonucleotide for detection of SNP TSC0051886
taaacataaccta

SEQ ID NO: 212953 - DNA, 13 bp, Artificial Sequence
  Oligonucleotide for detection of SNP TSC0051886
taggtcgtgttta

SEQ ID NO: 212954 - DNA, 13 bp, Artificial Sequence
  Oligonucleotide for detection of SNP TSC0051886
taaacacgaccta

SEQ ID NO: 212955 - DNA, 13 bp, Artificial Sequence
  Oligonucleotide for detection of SNP TSC0051887
ttatttattaatg

SEQ ID NO: 212956 - DNA, 13 bp, Artificial Sequence
  Oligonucleotide for detection of SNP TSC0051887
cattaataaataa

SEQ ID NO: 212957 - DNA, 13 bp, Artificial Sequence
  Oligonucleotide for detection of SNP TSC0051887
ttatttgttaatg

SEQ ID NO: 212958 - DNA, 13 bp, Artificial Sequence
  Oligonucleotide for detection of SNP TSC0051887
cattaacaaataa

SEQ ID NO: 212959 - DNA, 13 bp, Artificial Sequence
  Oligonucleotide for detection of SNP TSC0051887
ttattcgttaatg

SEQ ID NO: 212960 - DNA, 13 bp, Artificial Sequence
  Oligonucleotide for detection of SNP TSC0051887
cattaacgaataa

SEQ ID NO: 212961 - DNA, 13 bp, Artificial Sequence
  Oligonucleotide for detection of SNP TSC0051887
tattaatgaataa

SEQ ID NO: 212962 - DNA, 13 bp, Artificial Sequence
  Oligonucleotide for detection of SNP TSC0051887
ttattcattaata

SEQ ID NO: 212963 - DNA, 13 bp, Artificial Sequence
  Oligonucleotide for detection of SNP TSC0051887
tattaacgaataa

SEQ ID NO: 212964 - DNA, 13 bp, Artificial Sequence
  Oligonucleotide for detection of SNP TSC0051887
ttattcgttaata

SEQ ID NO: 212965 - DNA, 13 bp, Artificial Sequence
  Oligonucleotide for detection of SNP TSC0051888
tggaaaaaattgy

SEQ ID NO: 212966 - DNA, 13 bp, Artificial Sequence
  Oligonucleotide for detection of SNP TSC0051888
rcaattttttcca

SEQ ID NO: 212967 - DNA, 13 bp, Artificial Sequence
  Oligonucleotide for detection of SNP TSC0051888
tggaaagaattgy

SEQ ID NO: 212968 - DNA, 13 bp, Artificial Sequence
  Oligonucleotide for detection of SNP TSC0051888
rcaattctttcca

SEQ ID NO: 212969 - DNA, 13 bp, Artificial Sequence
  Oligonucleotide for detection of SNP TSC0051889
gtgggtatagggy

SEQ ID NO: 212970 - DNA, 13 bp, Artificial Sequence
  Oligonucleotide for detection of SNP TSC0051889
rccctatacccac

SEQ ID NO: 212971 - DNA, 13 bp, Artificial Sequence
  Oligonucleotide for detection of SNP TSC0051889
gtgggtgtagggy

SEQ ID NO: 212972 - DNA, 13 bp, Artificial Sequence
  Oligonucleotide for detection of SNP TSC0051889
rccctacacccac

SEQ ID NO: 212973 - DNA, 13 bp, Artificial Sequence
  Oligonucleotide for detection of SNP TSC0051889
gtgggcgtagggy

SEQ ID NO: 212974 - DNA, 13 bp, Artificial Sequence
  Oligonucleotide for detection of SNP TSC0051889
rccctacgcccac

SEQ ID NO: 212975 - DNA, 13 bp, Artificial Sequence
  Oligonucleotide for detection of SNP TSC0051889
gttttatgtttay

SEQ ID NO: 212976 - DNA, 13 bp, Artificial Sequence
  Oligonucleotide for detection of SNP TSC0051889
rtaaacataaaac

SEQ ID NO: 212977 - DNA, 13 bp, Artificial Sequence
  Oligonucleotide for detection of SNP TSC0051889
gttttacgtttay

SEQ ID NO: 212978 - DNA, 13 bp, Artificial Sequence
  Oligonucleotide for detection of SNP TSC0051889
rtaaacgtaaaac

SEQ ID NO: 212979 - DNA, 13 bp, Artificial Sequence
  Oligonucleotide for detection of SNP TSC0007017
tgaattgtttaay

SEQ ID NO: 212980 - DNA, 13 bp, Artificial Sequence
  Oligonucleotide for detection of SNP TSC0007017
rttaaacaattca

SEQ ID NO: 212981 - DNA, 13 bp, Artificial Sequence
  Oligonucleotide for detection of SNP TSC0007017
tgaattatttaay

SEQ ID NO: 212982 - DNA, 13 bp, Artificial Sequence
  Oligonucleotide for detection of SNP TSC0007017
rttaaataattca

SEQ ID NO: 212983 - DNA, 13 bp, Artificial Sequence
  Oligonucleotide for detection of SNP TSC0007017
tgaatcgtttaay

SEQ ID NO: 212984 - DNA, 13 bp, Artificial Sequence
  Oligonucleotide for detection of SNP TSC0007017
rttaaacgattca

SEQ ID NO: 212985 - DNA, 13 bp, Artificial Sequence
  Oligonucleotide for detection of SNP TSC0007018
atattaaaattgy

SEQ ID NO: 212986 - DNA, 13 bp, Artificial Sequence
  Oligonucleotide for detection of SNP TSC0007018
rcaattttaatat

SEQ ID NO: 212987 - DNA, 13 bp, Artificial Sequence
  Oligonucleotide for detection of SNP TSC0007018
atattagaattgy

SEQ ID NO: 212988 - DNA, 13 bp, Artificial Sequence
  Oligonucleotide for detection of SNP TSC0007018
rcaattctaatat

SEQ ID NO: 212989 - DNA, 13 bp, Artificial Sequence
  Oligonucleotide for detection of SNP TSC0051890
gattttgtgtata

SEQ ID NO: 212990 - DNA, 13 bp, Artificial Sequence
  Oligonucleotide for detection of SNP TSC0051890
tatacacaaaatc

SEQ ID NO: 212991 - DNA, 13 bp, Artificial Sequence
  Oligonucleotide for detection of SNP TSC0051890
gattttatgtata

SEQ ID NO: 212992 - DNA, 13 bp, Artificial Sequence
  Oligonucleotide for detection of SNP TSC0051890
tatacataaaatc

SEQ ID NO: 212993 - DNA, 13 bp, Artificial Sequence
  Oligonucleotide for detection of SNP TSC0001746
taaaaggatttgg

SEQ ID NO: 212994 - DNA, 13 bp, Artificial Sequence
  Oligonucleotide for detection of SNP TSC0001746
ccaaatcctttta

SEQ ID NO: 212995 - DNA, 13 bp, Artificial Sequence
  Oligonucleotide for detection of SNP TSC0001746
taaaagaatttgg

SEQ ID NO: 212996 - DNA, 13 bp, Artificial Sequence
  Oligonucleotide for detection of SNP TSC0001746
ccaaattctttta

SEQ ID NO: 212997 - DNA, 13 bp, Artificial Sequence
  Oligonucleotide for detection of SNP TSC0000317
tatgttgattaat

SEQ ID NO: 212998 - DNA, 13 bp, Artificial Sequence
  Oligonucleotide for detection of SNP TSC0000317
attaatcaacata

SEQ ID NO: 212999 - DNA, 13 bp, Artificial Sequence
  Oligonucleotide for detection of SNP TSC0000317
tatgttaattaat

SEQ ID NO: 213000 - DNA, 13 bp, Artificial Sequence
  Oligonucleotide for detection of SNP TSC0000317
attaattaacata

SEQ ID NO: 213001 - DNA, 13 bp, Artificial Sequence
  Oligonucleotide for detection of SNP TSC0051891
gggagtgtttgaa

SEQ ID NO: 213002 - DNA, 13 bp, Artificial Sequence
  Oligonucleotide for detection of SNP TSC0051891
ttcaaacactccc

SEQ ID NO: 213003 - DNA, 13 bp, Artificial Sequence
  Oligonucleotide for detection of SNP TSC0051891
gggagtatttgaa

SEQ ID NO: 213004 - DNA, 13 bp, Artificial Sequence
  Oligonucleotide for detection of SNP TSC0051891
ttcaaatactccc

SEQ ID NO: 213005 - DNA, 13 bp, Artificial Sequence
  Oligonucleotide for detection of SNP TSC0051891
gggagcgtttgaa

SEQ ID NO: 213006 - DNA, 13 bp, Artificial Sequence
  Oligonucleotide for detection of SNP TSC0051891
ttcaaacgctccc

SEQ ID NO: 213007 - DNA, 13 bp, Artificial Sequence
  Oligonucleotide for detection of SNP TSC0051893
gatttaaattgay

SEQ ID NO: 213008 - DNA, 13 bp, Artificial Sequence
  Oligonucleotide for detection of SNP TSC0051893
rtcaatttaaatc

SEQ ID NO: 213009 - DNA, 13 bp, Artificial Sequence
  Oligonucleotide for detection of SNP TSC0051893
gatttagattgay

SEQ ID NO: 213010 - DNA, 13 bp, Artificial Sequence
  Oligonucleotide for detection of SNP TSC0051893
rtcaatctaaatc

SEQ ID NO: 213011 - DNA, 13 bp, Artificial Sequence
  Oligonucleotide for detection of SNP TSC0008246
attagtaaaaaat

SEQ ID NO: 213012 - DNA, 13 bp, Artificial Sequence
  Oligonucleotide for detection of SNP TSC0008246
attttttactaat

SEQ ID NO: 213013 - DNA, 13 bp, Artificial Sequence
  Oligonucleotide for detection of SNP TSC0008246
attagttaaaaat

SEQ ID NO: 213014 - DNA, 13 bp, Artificial Sequence
  Oligonucleotide for detection of SNP TSC0008246
atttttaactaat

SEQ ID NO: 213015 - DNA, 13 bp, Artificial Sequence
  Oligonucleotide for detection of SNP TSC0008246
attttttattggt

SEQ ID NO: 213016 - DNA, 13 bp, Artificial Sequence
  Oligonucleotide for detection of SNP TSC0008246
accaataaaaaat

SEQ ID NO: 213017 - DNA, 13 bp, Artificial Sequence
  Oligonucleotide for detection of SNP TSC0008246
atttttgattggt

SEQ ID NO: 213018 - DNA, 13 bp, Artificial Sequence
  Oligonucleotide for detection of SNP TSC0008246
accaatcaaaaat

SEQ ID NO: 213019 - DNA, 13 bp, Artificial Sequence
  Oligonucleotide for detection of SNP TSC0051894
agtttagttaaay

SEQ ID NO: 213020 - DNA, 13 bp, Artificial Sequence
  Oligonucleotide for detection of SNP TSC0051894
rtttaactaaact

SEQ ID NO: 213021 - DNA, 13 bp, Artificial Sequence
  Oligonucleotide for detection of SNP TSC0051894
agtttaattaaay

SEQ ID NO: 213022 - DNA, 13 bp, Artificial Sequence
  Oligonucleotide for detection of SNP TSC0051894
rtttaattaaact

SEQ ID NO: 213023 - DNA, 13 bp, Artificial Sequence
  Oligonucleotide for detection of SNP TSC0051895
ataaagaaattaa

SEQ ID NO: 213024 - DNA, 13 bp, Artificial Sequence
  Oligonucleotide for detection of SNP TSC0051895
ttaatttctttat

SEQ ID NO: 213025 - DNA, 13 bp, Artificial Sequence
  Oligonucleotide for detection of SNP TSC0051895
ataaagtaattaa

SEQ ID NO: 213026 - DNA, 13 bp, Artificial Sequence
  Oligonucleotide for detection of SNP TSC0051895
ttaattactttat

SEQ ID NO: 213027 - DNA, 13 bp, Artificial Sequence
  Oligonucleotide for detection of SNP TSC0051896
gttttgataagta

SEQ ID NO: 213028 - DNA, 13 bp, Artificial Sequence
  Oligonucleotide for detection of SNP TSC0051896
tacttatcaaaac

SEQ ID NO: 213029 - DNA, 13 bp, Artificial Sequence
  Oligonucleotide for detection of SNP TSC0051896
gttttggtaagta

SEQ ID NO: 213030 - DNA, 13 bp, Artificial Sequence
  Oligonucleotide for detection of SNP TSC0051896
tacttaccaaaac

SEQ ID NO: 213031 - DNA, 13 bp, Artificial Sequence
  Oligonucleotide for detection of SNP TSC0009711
tagtatgtgttgg

SEQ ID NO: 213032 - DNA, 13 bp, Artificial Sequence
  Oligonucleotide for detection of SNP TSC0009711
ccaacacatacta

SEQ ID NO: 213033 - DNA, 13 bp, Artificial Sequence
  Oligonucleotide for detection of SNP TSC0009711
tagtatatgttgg

SEQ ID NO: 213034 - DNA, 13 bp, Artificial Sequence
  Oligonucleotide for detection of SNP TSC0009711
ccaacatatacta

SEQ ID NO: 213035 - DNA, 13 bp, Artificial Sequence
  Oligonucleotide for detection of SNP TSC0051897
taagtataaataa

SEQ ID NO: 213036 - DNA, 13 bp, Artificial Sequence
  Oligonucleotide for detection of SNP TSC0051897
ttatttatactta

SEQ ID NO: 213037 - DNA, 13 bp, Artificial Sequence
  Oligonucleotide for detection of SNP TSC0051897
taagtagaaataa

SEQ ID NO: 213038 - DNA, 13 bp, Artificial Sequence
  Oligonucleotide for detection of SNP TSC0051897
ttatttctactta

SEQ ID NO: 213039 - DNA, 13 bp, Artificial Sequence
  Oligonucleotide for detection of SNP TSC0051897
ttgtttatatttg

SEQ ID NO: 213040 - DNA, 13 bp, Artificial Sequence
  Oligonucleotide for detection of SNP TSC0051897
caaatataaacaa

SEQ ID NO: 213041 - DNA, 13 bp, Artificial Sequence
  Oligonucleotide for detection of SNP TSC0051897
ttgtttttatttg

SEQ ID NO: 213042 - DNA, 13 bp, Artificial Sequence
  Oligonucleotide for detection of SNP TSC0051897
caaataaaaacaa

SEQ ID NO: 213043 - DNA, 13 bp, Artificial Sequence
  Oligonucleotide for detection of SNP TSC0051899
tgtatagtattgy

SEQ ID NO: 213044 - DNA, 13 bp, Artificial Sequence
  Oligonucleotide for detection of SNP TSC0051899
rcaatactataca

SEQ ID NO: 213045 - DNA, 13 bp, Artificial Sequence
  Oligonucleotide for detection of SNP TSC0051899
tgtataatattgy

SEQ ID NO: 213046 - DNA, 13 bp, Artificial Sequence
  Oligonucleotide for detection of SNP TSC0051899
rcaatattataca

SEQ ID NO: 213047 - DNA, 13 bp, Artificial Sequence
  Oligonucleotide for detection of SNP TSC0051900
aattgtgttttty

SEQ ID NO: 213048 - DNA, 13 bp, Artificial Sequence
  Oligonucleotide for detection of SNP TSC0051900
raaaaacacaatt

SEQ ID NO: 213049 - DNA, 13 bp, Artificial Sequence
  Oligonucleotide for detection of SNP TSC0051900
aattgtattttty

SEQ ID NO: 213050 - DNA, 13 bp, Artificial Sequence
  Oligonucleotide for detection of SNP TSC0051900
raaaaatacaatt

SEQ ID NO: 213051 - DNA, 13 bp, Artificial Sequence
  Oligonucleotide for detection of SNP TSC0051901
atttaaatatagt

SEQ ID NO: 213052 - DNA, 13 bp, Artificial Sequence
  Oligonucleotide for detection of SNP TSC0051901
actatatttaaat

SEQ ID NO: 213053 - DNA, 13 bp, Artificial Sequence
  Oligonucleotide for detection of SNP TSC0051901
atttaagtatagt

SEQ ID NO: 213054 - DNA, 13 bp, Artificial Sequence
  Oligonucleotide for detection of SNP TSC0051901
actatacttaaat

SEQ ID NO: 213055 - DNA, 13 bp, Artificial Sequence
  Oligonucleotide for detection of SNP TSC0000592
ttaggagattaag

SEQ ID NO: 213056 - DNA, 13 bp, Artificial Sequence
  Oligonucleotide for detection of SNP TSC0000592
cttaatctcctaa

SEQ ID NO: 213057 - DNA, 13 bp, Artificial Sequence
  Oligonucleotide for detection of SNP TSC0000592
ttaggaaattaag

SEQ ID NO: 213058 - DNA, 13 bp, Artificial Sequence
  Oligonucleotide for detection of SNP TSC0000592
cttaatttcctaa

SEQ ID NO: 213059 - DNA, 13 bp, Artificial Sequence
  Oligonucleotide for detection of SNP TSC0051902
atggttatttgga

SEQ ID NO: 213060 - DNA, 13 bp, Artificial Sequence
  Oligonucleotide for detection of SNP TSC0051902
tccaaataaccat

SEQ ID NO: 213061 - DNA, 13 bp, Artificial Sequence
  Oligonucleotide for detection of SNP TSC0051902
atggttgtttgga

SEQ ID NO: 213062 - DNA, 13 bp, Artificial Sequence
  Oligonucleotide for detection of SNP TSC0051902
tccaaacaaccat

SEQ ID NO: 213063 - DNA, 13 bp, Artificial Sequence
  Oligonucleotide for detection of SNP TSC0051902
atggtcgtttgga

SEQ ID NO: 213064 - DNA, 13 bp, Artificial Sequence
  Oligonucleotide for detection of SNP TSC0051902
tccaaacgaccat

SEQ ID NO: 213065 - DNA, 13 bp, Artificial Sequence
  Oligonucleotide for detection of SNP TSC0051902
tttagatggttat

SEQ ID NO: 213066 - DNA, 13 bp, Artificial Sequence
  Oligonucleotide for detection of SNP TSC0051902
ataaccatctaaa

SEQ ID NO: 213067 - DNA, 13 bp, Artificial Sequence
  Oligonucleotide for detection of SNP TSC0051902
tttagacggttat

SEQ ID NO: 213068 - DNA, 13 bp, Artificial Sequence
  Oligonucleotide for detection of SNP TSC0051902
ataaccgtctaaa

SEQ ID NO: 213069 - DNA, 13 bp, Artificial Sequence
  Oligonucleotide for detection of SNP TSC0051903
ggggaatagttaa

SEQ ID NO: 213070 - DNA, 13 bp, Artificial Sequence
  Oligonucleotide for detection of SNP TSC0051903
ttaactattcccc

SEQ ID NO: 213071 - DNA, 13 bp, Artificial Sequence
  Oligonucleotide for detection of SNP TSC0051903
ggggaagagttaa

SEQ ID NO: 213072 - DNA, 13 bp, Artificial Sequence
  Oligonucleotide for detection of SNP TSC0051903
ttaactcttcccc

SEQ ID NO: 213073 - DNA, 13 bp, Artificial Sequence
  Oligonucleotide for detection of SNP TSC0051903
ttagtttttttty

SEQ ID NO: 213074 - DNA, 13 bp, Artificial Sequence
  Oligonucleotide for detection of SNP TSC0051903
raaaaaaaactaa

SEQ ID NO: 213075 - DNA, 13 bp, Artificial Sequence
  Oligonucleotide for detection of SNP TSC0051905
aaggagtttaaag

SEQ ID NO: 213076 - DNA, 13 bp, Artificial Sequence
  Oligonucleotide for detection of SNP TSC0051905
ctttaaactcctt

SEQ ID NO: 213077 - DNA, 13 bp, Artificial Sequence
  Oligonucleotide for detection of SNP TSC0051905
aaggaggttaaag

SEQ ID NO: 213078 - DNA, 13 bp, Artificial Sequence
  Oligonucleotide for detection of SNP TSC0051905
ctttaacctcctt

SEQ ID NO: 213079 - DNA, 13 bp, Artificial Sequence
  Oligonucleotide for detection of SNP TSC0051905
ttttgattttttt

SEQ ID NO: 213080 - DNA, 13 bp, Artificial Sequence
  Oligonucleotide for detection of SNP TSC0051905
aaaaaaatcaaaa

SEQ ID NO: 213081 - DNA, 13 bp, Artificial Sequence
  Oligonucleotide for detection of SNP TSC0007107
tttttcgttttaa

SEQ ID NO: 213082 - DNA, 13 bp, Artificial Sequence
  Oligonucleotide for detection of SNP TSC0007107
ttaaaacgaaaaa

SEQ ID NO: 213083 - DNA, 13 bp, Artificial Sequence
  Oligonucleotide for detection of SNP TSC0007107
ttgagatgagaag

SEQ ID NO: 213084 - DNA, 13 bp, Artificial Sequence
  Oligonucleotide for detection of SNP TSC0007107
cttctcatctcaa

SEQ ID NO: 213085 - DNA, 13 bp, Artificial Sequence
  Oligonucleotide for detection of SNP TSC0007107
ttgagacgagaag

SEQ ID NO: 213086 - DNA, 13 bp, Artificial Sequence
  Oligonucleotide for detection of SNP TSC0007107
cttctcgtctcaa

SEQ ID NO: 213087 - DNA, 13 bp, Artificial Sequence
  Oligonucleotide for detection of SNP TSC0007108
tggaaaaagaata

SEQ ID NO: 213088 - DNA, 13 bp, Artificial Sequence
  Oligonucleotide for detection of SNP TSC0007108
tattctttttcca

SEQ ID NO: 213089 - DNA, 13 bp, Artificial Sequence
  Oligonucleotide for detection of SNP TSC0007108
tggaaagagaata

SEQ ID NO: 213090 - DNA, 13 bp, Artificial Sequence
  Oligonucleotide for detection of SNP TSC0007108
tattctctttcca

SEQ ID NO: 213091 - DNA, 13 bp, Artificial Sequence
  Oligonucleotide for detection of SNP TSC0010069
atggtatgattag

SEQ ID NO: 213092 - DNA, 13 bp, Artificial Sequence
  Oligonucleotide for detection of SNP TSC0010069
ctaatcataccat

SEQ ID NO: 213093 - DNA, 13 bp, Artificial Sequence
  Oligonucleotide for detection of SNP TSC0010069
atggtaggattag

SEQ ID NO: 213094 - DNA, 13 bp, Artificial Sequence
  Oligonucleotide for detection of SNP TSC0010069
ctaatcctaccat

SEQ ID NO: 213095 - DNA, 13 bp, Artificial Sequence
  Oligonucleotide for detection of SNP TSC0010069
atggtacgattag

SEQ ID NO: 213096 - DNA, 13 bp, Artificial Sequence
  Oligonucleotide for detection of SNP TSC0010069
ctaatcgtaccat

SEQ ID NO: 213097 - DNA, 13 bp, Artificial Sequence
  Oligonucleotide for detection of SNP TSC0010069
ttgattgtgttat

SEQ ID NO: 213098 - DNA, 13 bp, Artificial Sequence
  Oligonucleotide for detection of SNP TSC0010069
ataacacaatcaa

SEQ ID NO: 213099 - DNA, 13 bp, Artificial Sequence
  Oligonucleotide for detection of SNP TSC0010069
ttgattttgttat

SEQ ID NO: 213100 - DNA, 13 bp, Artificial Sequence
  Oligonucleotide for detection of SNP TSC0010069
ataacaaaatcaa

SEQ ID NO: 213101 - DNA, 13 bp, Artificial Sequence
  Oligonucleotide for detection of SNP TSC0010069
ttgatcgtgttat

SEQ ID NO: 213102 - DNA, 13 bp, Artificial Sequence
  Oligonucleotide for detection of SNP TSC0010069
ataacacgatcaa

SEQ ID NO: 213103 - DNA, 13 bp, Artificial Sequence
  Oligonucleotide for detection of SNP TSC0051906
gggtaattgtttg

SEQ ID NO: 213104 - DNA, 13 bp, Artificial Sequence
  Oligonucleotide for detection of SNP TSC0051906
caaacaattaccc

SEQ ID NO: 213105 - DNA, 13 bp, Artificial Sequence
  Oligonucleotide for detection of SNP TSC0051906
gggtaagtgtttg

SEQ ID NO: 213106 - DNA, 13 bp, Artificial Sequence
  Oligonucleotide for detection of SNP TSC0051906
caaacacttaccc

SEQ ID NO: 213107 - DNA, 13 bp, Artificial Sequence
  Oligonucleotide for detection of SNP TSC0051906
taagtagttgtty

SEQ ID NO: 213108 - DNA, 13 bp, Artificial Sequence
  Oligonucleotide for detection of SNP TSC0051906
raacaactactta

SEQ ID NO: 213109 - DNA, 13 bp, Artificial Sequence
  Oligonucleotide for detection of SNP TSC0051906
taagtatttgtty

SEQ ID NO: 213110 - DNA, 13 bp, Artificial Sequence
  Oligonucleotide for detection of SNP TSC0051906
raacaaatactta

SEQ ID NO: 213111 - DNA, 13 bp, Artificial Sequence
  Oligonucleotide for detection of SNP TSC0001663
ataatatggagaa

SEQ ID NO: 213112 - DNA, 13 bp, Artificial Sequence
  Oligonucleotide for detection of SNP TSC0001663
ttctccatattat

SEQ ID NO: 213113 - DNA, 13 bp, Artificial Sequence
  Oligonucleotide for detection of SNP TSC0001663
ataatacggagaa

SEQ ID NO: 213114 - DNA, 13 bp, Artificial Sequence
  Oligonucleotide for detection of SNP TSC0001663
ttctccgtattat

SEQ ID NO: 213115 - DNA, 13 bp, Artificial Sequence
  Oligonucleotide for detection of SNP TSC0005429
tggggtagatatt

SEQ ID NO: 213116 - DNA, 13 bp, Artificial Sequence
  Oligonucleotide for detection of SNP TSC0005429
aatatctacccca

SEQ ID NO: 213117 - DNA, 13 bp, Artificial Sequence
  Oligonucleotide for detection of SNP TSC0005429
tggggttgatatt

SEQ ID NO: 213118 - DNA, 13 bp, Artificial Sequence
  Oligonucleotide for detection of SNP TSC0005429
aatatcaacccca

SEQ ID NO: 213119 - DNA, 13 bp, Artificial Sequence
  Oligonucleotide for detection of SNP TSC0005429
tggggtcgatatt

SEQ ID NO: 213120 - DNA, 13 bp, Artificial Sequence
  Oligonucleotide for detection of SNP TSC0005429
aatatcgacccca

SEQ ID NO: 213121 - DNA, 13 bp, Artificial Sequence
  Oligonucleotide for detection of SNP TSC0005429
agtgtttgtttta

SEQ ID NO: 213122 - DNA, 13 bp, Artificial Sequence
  Oligonucleotide for detection of SNP TSC0005429
taaaacaaacact

SEQ ID NO: 213123 - DNA, 13 bp, Artificial Sequence
  Oligonucleotide for detection of SNP TSC0005429
agtgttggtttta

SEQ ID NO: 213124 - DNA, 13 bp, Artificial Sequence
  Oligonucleotide for detection of SNP TSC0005429
taaaaccaacact

SEQ ID NO: 213125 - DNA, 13 bp, Artificial Sequence
  Oligonucleotide for detection of SNP TSC0005429
agtgtcggtttta

SEQ ID NO: 213126 - DNA, 13 bp, Artificial Sequence
  Oligonucleotide for detection of SNP TSC0005429
taaaaccgacact

SEQ ID NO: 213127 - DNA, 13 bp, Artificial Sequence
  Oligonucleotide for detection of SNP TSC0000394
ttagaattatatt

SEQ ID NO: 213128 - DNA, 13 bp, Artificial Sequence
  Oligonucleotide for detection of SNP TSC0000394
aatataattctaa

SEQ ID NO: 213129 - DNA, 13 bp, Artificial Sequence
  Oligonucleotide for detection of SNP TSC0000394
ttagaagtatatt

SEQ ID NO: 213130 - DNA, 13 bp, Artificial Sequence
  Oligonucleotide for detection of SNP TSC0000394
aatatacttctaa

SEQ ID NO: 213131 - DNA, 13 bp, Artificial Sequence
  Oligonucleotide for detection of SNP TSC0000394
agtatagttttga

SEQ ID NO: 213132 - DNA, 13 bp, Artificial Sequence
  Oligonucleotide for detection of SNP TSC0000394
tcaaaactatact

SEQ ID NO: 213133 - DNA, 13 bp, Artificial Sequence
  Oligonucleotide for detection of SNP TSC0000394
agtatatttttga

SEQ ID NO: 213134 - DNA, 13 bp, Artificial Sequence
  Oligonucleotide for detection of SNP TSC0000394
tcaaaaatatact

SEQ ID NO: 213135 - DNA, 13 bp, Artificial Sequence
  Oligonucleotide for detection of SNP TSC0051907
aatatgtatagty

SEQ ID NO: 213136 - DNA, 13 bp, Artificial Sequence
  Oligonucleotide for detection of SNP TSC0051907
ractatacatatt

SEQ ID NO: 213137 - DNA, 13 bp, Artificial Sequence
  Oligonucleotide for detection of SNP TSC0051907
aatatggatagty

SEQ ID NO: 213138 - DNA, 13 bp, Artificial Sequence
  Oligonucleotide for detection of SNP TSC0051907
ractatccatatt

SEQ ID NO: 213139 - DNA, 13 bp, Artificial Sequence
  Oligonucleotide for detection of SNP TSC0051907
gattatgtatgtt

SEQ ID NO: 213140 - DNA, 13 bp, Artificial Sequence
  Oligonucleotide for detection of SNP TSC0051907
aacatacataatc

SEQ ID NO: 213141 - DNA, 13 bp, Artificial Sequence
  Oligonucleotide for detection of SNP TSC0051907
gattatttatgtt

SEQ ID NO: 213142 - DNA, 13 bp, Artificial Sequence
  Oligonucleotide for detection of SNP TSC0051907
aacataaataatc

SEQ ID NO: 213143 - DNA, 13 bp, Artificial Sequence
  Oligonucleotide for detection of SNP TSC0001557
ttttttaatagtt

SEQ ID NO: 213144 - DNA, 13 bp, Artificial Sequence
  Oligonucleotide for detection of SNP TSC0001557
aactattaaaaaa

SEQ ID NO: 213145 - DNA, 13 bp, Artificial Sequence
  Oligonucleotide for detection of SNP TSC0001557
tttttttatagtt

SEQ ID NO: 213146 - DNA, 13 bp, Artificial Sequence
  Oligonucleotide for detection of SNP TSC0001557
aactataaaaaaa

SEQ ID NO: 213147 - DNA, 13 bp, Artificial Sequence
  Oligonucleotide for detection of SNP TSC0001557
aattattggaaaa

SEQ ID NO: 213148 - DNA, 13 bp, Artificial Sequence
  Oligonucleotide for detection of SNP TSC0001557
ttttccaataatt

SEQ ID NO: 213149 - DNA, 13 bp, Artificial Sequence
  Oligonucleotide for detection of SNP TSC0001557
aattatgggaaaa

SEQ ID NO: 213150 - DNA, 13 bp, Artificial Sequence
  Oligonucleotide for detection of SNP TSC0001557
ttttcccataatt

SEQ ID NO: 213151 - DNA, 13 bp, Artificial Sequence
  Oligonucleotide for detection of SNP TSC0001558
tgttatataatgt

SEQ ID NO: 213152 - DNA, 13 bp, Artificial Sequence
  Oligonucleotide for detection of SNP TSC0001558
acattatataaca

SEQ ID NO: 213153 - DNA, 13 bp, Artificial Sequence
  Oligonucleotide for detection of SNP TSC0001558
tgttatgtaatgt

SEQ ID NO: 213154 - DNA, 13 bp, Artificial Sequence
  Oligonucleotide for detection of SNP TSC0001558
acattacataaca

SEQ ID NO: 213155 - DNA, 13 bp, Artificial Sequence
  Oligonucleotide for detection of SNP TSC0001559
agatgtgtaatgg

SEQ ID NO: 213156 - DNA, 13 bp, Artificial Sequence
  Oligonucleotide for detection of SNP TSC0001559
ccattacacatct

SEQ ID NO: 213157 - DNA, 13 bp, Artificial Sequence
  Oligonucleotide for detection of SNP TSC0001559
agatgtataatgg

SEQ ID NO: 213158 - DNA, 13 bp, Artificial Sequence
  Oligonucleotide for detection of SNP TSC0001559
ccattatacatct

SEQ ID NO: 213159 - DNA, 13 bp, Artificial Sequence
  Oligonucleotide for detection of SNP TSC0001559
agatgcgtaatgg

SEQ ID NO: 213160 - DNA, 13 bp, Artificial Sequence
  Oligonucleotide for detection of SNP TSC0001559
ccattacgcatct

SEQ ID NO: 213161 - DNA, 13 bp, Artificial Sequence
  Oligonucleotide for detection of SNP TSC0010105
tttttagaattta

SEQ ID NO: 213162 - DNA, 13 bp, Artificial Sequence
  Oligonucleotide for detection of SNP TSC0010105
taaattctaaaaa

SEQ ID NO: 213163 - DNA, 13 bp, Artificial Sequence
  Oligonucleotide for detection of SNP TSC0010105
tttttaaaattta

SEQ ID NO: 213164 - DNA, 13 bp, Artificial Sequence
  Oligonucleotide for detection of SNP TSC0010105
taaattttaaaaa

SEQ ID NO: 213165 - DNA, 13 bp, Artificial Sequence
  Oligonucleotide for detection of SNP TSC0010034
gtttattgtaaty

SEQ ID NO: 213166 - DNA, 13 bp, Artificial Sequence
  Oligonucleotide for detection of SNP TSC0010034
rattacaataaac

SEQ ID NO: 213167 - DNA, 13 bp, Artificial Sequence
  Oligonucleotide for detection of SNP TSC0010034
gtttatcgtaaty

SEQ ID NO: 213168 - DNA, 13 bp, Artificial Sequence
  Oligonucleotide for detection of SNP TSC0010034
rattacgataaac

SEQ ID NO: 213169 - DNA, 13 bp, Artificial Sequence
  Oligonucleotide for detection of SNP TSC0010034
ggttgtggtgagy

SEQ ID NO: 213170 - DNA, 13 bp, Artificial Sequence
  Oligonucleotide for detection of SNP TSC0010034
rctcaccacaacc

SEQ ID NO: 213171 - DNA, 13 bp, Artificial Sequence
  Oligonucleotide for detection of SNP TSC0010034
ggttgtagtgagy

SEQ ID NO: 213172 - DNA, 13 bp, Artificial Sequence
  Oligonucleotide for detection of SNP TSC0010034
rctcactacaacc

SEQ ID NO: 213173 - DNA, 13 bp, Artificial Sequence
  Oligonucleotide for detection of SNP TSC0010034
ggttgcggtgagy

SEQ ID NO: 213174 - DNA, 13 bp, Artificial Sequence
  Oligonucleotide for detection of SNP TSC0010034
rctcaccgcaacc

SEQ ID NO: 213175 - DNA, 13 bp, Artificial Sequence
  Oligonucleotide for detection of SNP TSC0051915
tttttgagaatty

SEQ ID NO: 213176 - DNA, 13 bp, Artificial Sequence
  Oligonucleotide for detection of SNP TSC0051915
raattctcaaaaa

SEQ ID NO: 213177 - DNA, 13 bp, Artificial Sequence
  Oligonucleotide for detection of SNP TSC0051915
tttttgggaatty

SEQ ID NO: 213178 - DNA, 13 bp, Artificial Sequence
  Oligonucleotide for detection of SNP TSC0051915
raattcccaaaaa

SEQ ID NO: 213179 - DNA, 13 bp, Artificial Sequence
  Oligonucleotide for detection of SNP TSC0001620
tgtataaaatttg

SEQ ID NO: 213180 - DNA, 13 bp, Artificial Sequence
  Oligonucleotide for detection of SNP TSC0001620
caaattttataca

SEQ ID NO: 213181 - DNA, 13 bp, Artificial Sequence
  Oligonucleotide for detection of SNP TSC0001620
tgtatagaatttg

SEQ ID NO: 213182 - DNA, 13 bp, Artificial Sequence
  Oligonucleotide for detection of SNP TSC0001620
caaattctataca

SEQ ID NO: 213183 - DNA, 13 bp, Artificial Sequence
  Oligonucleotide for detection of SNP TSC0000210
aagtataggtatg

SEQ ID NO: 213184 - DNA, 13 bp, Artificial Sequence
  Oligonucleotide for detection of SNP TSC0000210
catacctatactt

SEQ ID NO: 213185 - DNA, 13 bp, Artificial Sequence
  Oligonucleotide for detection of SNP TSC0000210
aagtatgggtatg

SEQ ID NO: 213186 - DNA, 13 bp, Artificial Sequence
  Oligonucleotide for detection of SNP TSC0000210
catacccatactt

SEQ ID NO: 213187 - DNA, 13 bp, Artificial Sequence
  Oligonucleotide for detection of SNP TSC0000210
aagtataggtacg

SEQ ID NO: 213188 - DNA, 13 bp, Artificial Sequence
  Oligonucleotide for detection of SNP TSC0000210
cgtacctatactt

SEQ ID NO: 213189 - DNA, 13 bp, Artificial Sequence
  Oligonucleotide for detection of SNP TSC0000210
aagtatgggtacg

SEQ ID NO: 213190 - DNA, 13 bp, Artificial Sequence
  Oligonucleotide for detection of SNP TSC0000210
cgtacccatactt

SEQ ID NO: 213191 - DNA, 13 bp, Artificial Sequence
  Oligonucleotide for detection of SNP TSC0010019
tgaagtgaatata

SEQ ID NO: 213192 - DNA, 13 bp, Artificial Sequence
  Oligonucleotide for detection of SNP TSC0010019
tatattcacttca

SEQ ID NO: 213193 - DNA, 13 bp, Artificial Sequence
  Oligonucleotide for detection of SNP TSC0010019
tgaagtaaatata

SEQ ID NO: 213194 - DNA, 13 bp, Artificial Sequence
  Oligonucleotide for detection of SNP TSC0010019
tatatttacttca

SEQ ID NO: 213195 - DNA, 13 bp, Artificial Sequence
  Oligonucleotide for detection of SNP TSC0010019
cgaagtgaatata

SEQ ID NO: 213196 - DNA, 13 bp, Artificial Sequence
  Oligonucleotide for detection of SNP TSC0010019
tatattcacttcg

SEQ ID NO: 213197 - DNA, 13 bp, Artificial Sequence
  Oligonucleotide for detection of SNP TSC0010019
cgaagtaaatata

SEQ ID NO: 213198 - DNA, 13 bp, Artificial Sequence
  Oligonucleotide for detection of SNP TSC0010019
tatatttacttcg

SEQ ID NO: 213199 - DNA, 13 bp, Artificial Sequence
  Oligonucleotide for detection of SNP TSC0001080
gtaaagaggaaat

SEQ ID NO: 213200 - DNA, 13 bp, Artificial Sequence
  Oligonucleotide for detection of SNP TSC0001080
atttcctctttac

SEQ ID NO: 213201 - DNA, 13 bp, Artificial Sequence
  Oligonucleotide for detection of SNP TSC0001080
gtaaaggggaaat

SEQ ID NO: 213202 - DNA, 13 bp, Artificial Sequence
  Oligonucleotide for detection of SNP TSC0001080
atttcccctttac

SEQ ID NO: 213203 - DNA, 13 bp, Artificial Sequence
  Oligonucleotide for detection of SNP TSC0000640
tttttgggttttt

SEQ ID NO: 213204 - DNA, 13 bp, Artificial Sequence
  Oligonucleotide for detection of SNP TSC0000640
aaaaacccaaaaa

SEQ ID NO: 213205 - DNA, 13 bp, Artificial Sequence
  Oligonucleotide for detection of SNP TSC0000640
tttttgagttttt

SEQ ID NO: 213206 - DNA, 13 bp, Artificial Sequence
  Oligonucleotide for detection of SNP TSC0000640
aaaaactcaaaaa

SEQ ID NO: 213207 - DNA, 13 bp, Artificial Sequence
  Oligonucleotide for detection of SNP TSC0000640
ttttcgggttttt

SEQ ID NO: 213208 - DNA, 13 bp, Artificial Sequence
  Oligonucleotide for detection of SNP TSC0000640
aaaaacccgaaaa

SEQ ID NO: 213209 - DNA, 13 bp, Artificial Sequence
  Oligonucleotide for detection of SNP TSC0000640
ttttcgagttttt

SEQ ID NO: 213210 - DNA, 13 bp, Artificial Sequence
  Oligonucleotide for detection of SNP TSC0000640
aaaaactcgaaaa

SEQ ID NO: 213211 - DNA, 13 bp, Artificial Sequence
  Oligonucleotide for detection of SNP TSC0051919
attttagaataaa

SEQ ID NO: 213212 - DNA, 13 bp, Artificial Sequence
  Oligonucleotide for detection of SNP TSC0051919
tttattctaaaat

SEQ ID NO: 213213 - DNA, 13 bp, Artificial Sequence
  Oligonucleotide for detection of SNP TSC0051919
attttaaaataaa

SEQ ID NO: 213214 - DNA, 13 bp, Artificial Sequence
  Oligonucleotide for detection of SNP TSC0051919
tttattttaaaat

SEQ ID NO: 213215 - DNA, 13 bp, Artificial Sequence
  Oligonucleotide for detection of SNP TSC0005297
gtaaatgtgattt

SEQ ID NO: 213216 - DNA, 13 bp, Artificial Sequence
  Oligonucleotide for detection of SNP TSC0005297
aaatcacatttac

SEQ ID NO: 213217 - DNA, 13 bp, Artificial Sequence
  Oligonucleotide for detection of SNP TSC0005297
gtaaatatgattt

SEQ ID NO: 213218 - DNA, 13 bp, Artificial Sequence
  Oligonucleotide for detection of SNP TSC0005297
aaatcatatttac

SEQ ID NO: 213219 - DNA, 13 bp, Artificial Sequence
  Oligonucleotide for detection of SNP TSC0010128
ttgtggtataata

SEQ ID NO: 213220 - DNA, 13 bp, Artificial Sequence
  Oligonucleotide for detection of SNP TSC0010128
tattataccacaa

SEQ ID NO: 213221 - DNA, 13 bp, Artificial Sequence
  Oligonucleotide for detection of SNP TSC0010128
ttgtgggataata

SEQ ID NO: 213222 - DNA, 13 bp, Artificial Sequence
  Oligonucleotide for detection of SNP TSC0010128
tattatcccacaa

SEQ ID NO: 213223 - DNA, 13 bp, Artificial Sequence
  Oligonucleotide for detection of SNP TSC0010128
tgttgtattatag

SEQ ID NO: 213224 - DNA, 13 bp, Artificial Sequence
  Oligonucleotide for detection of SNP TSC0010128
ctataatacaaca

SEQ ID NO: 213225 - DNA, 13 bp, Artificial Sequence
  Oligonucleotide for detection of SNP TSC0010128
tgttgttttatag

SEQ ID NO: 213226 - DNA, 13 bp, Artificial Sequence
  Oligonucleotide for detection of SNP TSC0010128
ctataaaacaaca

SEQ ID NO: 213227 - DNA, 13 bp, Artificial Sequence
  Oligonucleotide for detection of SNP TSC0010050
aaaatgtaaatta

SEQ ID NO: 213228 - DNA, 13 bp, Artificial Sequence
  Oligonucleotide for detection of SNP TSC0010050
taatttacatttt

SEQ ID NO: 213229 - DNA, 13 bp, Artificial Sequence
  Oligonucleotide for detection of SNP TSC0010050
taatttttatttt

SEQ ID NO: 213230 - DNA, 13 bp, Artificial Sequence
  Oligonucleotide for detection of SNP TSC0010050
aaaataaaaatta

SEQ ID NO: 213231 - DNA, 13 bp, Artificial Sequence
  Oligonucleotide for detection of SNP TSC0051923
gttttggggggat

SEQ ID NO: 213232 - DNA, 13 bp, Artificial Sequence
  Oligonucleotide for detection of SNP TSC0051923
atccccccaaaac

SEQ ID NO: 213233 - DNA, 13 bp, Artificial Sequence
  Oligonucleotide for detection of SNP TSC0051923
gttttgaggggat

SEQ ID NO: 213234 - DNA, 13 bp, Artificial Sequence
  Oligonucleotide for detection of SNP TSC0051923
atcccctcaaaac

SEQ ID NO: 213235 - DNA, 13 bp, Artificial Sequence
  Oligonucleotide for detection of SNP TSC0051924
gtaattagggaaa

SEQ ID NO: 213236 - DNA, 13 bp, Artificial Sequence
  Oligonucleotide for detection of SNP TSC0051924
tttccctaattac

SEQ ID NO: 213237 - DNA, 13 bp, Artificial Sequence
  Oligonucleotide for detection of SNP TSC0051924
gtaattggggaaa

SEQ ID NO: 213238 - DNA, 13 bp, Artificial Sequence
  Oligonucleotide for detection of SNP TSC0051924
tttccccaattac

SEQ ID NO: 213239 - DNA, 13 bp, Artificial Sequence
  Oligonucleotide for detection of SNP TSC0051924
gtaatcggggaaa

SEQ ID NO: 213240 - DNA, 13 bp, Artificial Sequence
  Oligonucleotide for detection of SNP TSC0051924
tttccccgattac

SEQ ID NO: 213241 - DNA, 13 bp, Artificial Sequence
  Oligonucleotide for detection of SNP TSC0001442
gaagttaagtaga

SEQ ID NO: 213242 - DNA, 13 bp, Artificial Sequence
  Oligonucleotide for detection of SNP TSC0001442
tctacttaacttc

SEQ ID NO: 213243 - DNA, 13 bp, Artificial Sequence
  Oligonucleotide for detection of SNP TSC0001442
gaagttgagtaga

SEQ ID NO: 213244 - DNA, 13 bp, Artificial Sequence
  Oligonucleotide for detection of SNP TSC0001442
tctactcaacttc

SEQ ID NO: 213245 - DNA, 13 bp, Artificial Sequence
  Oligonucleotide for detection of SNP TSC0051925
ggttatatgatgt

SEQ ID NO: 213246 - DNA, 13 bp, Artificial Sequence
  Oligonucleotide for detection of SNP TSC0051925
acatcatataacc

SEQ ID NO: 213247 - DNA, 13 bp, Artificial Sequence
  Oligonucleotide for detection of SNP TSC0051925
ggttatgtgatgt

SEQ ID NO: 213248 - DNA, 13 bp, Artificial Sequence
  Oligonucleotide for detection of SNP TSC0051925
acatcacataacc

SEQ ID NO: 213249 - DNA, 13 bp, Artificial Sequence
  Oligonucleotide for detection of SNP TSC0001153
aataaatgtaaay

SEQ ID NO: 213250 - DNA, 13 bp, Artificial Sequence
  Oligonucleotide for detection of SNP TSC0001153
rtttacatttatt

SEQ ID NO: 213251 - DNA, 13 bp, Artificial Sequence
  Oligonucleotide for detection of SNP TSC0001153
aataaacgtaaay

SEQ ID NO: 213252 - DNA, 13 bp, Artificial Sequence
  Oligonucleotide for detection of SNP TSC0001153
rtttacgtttatt

SEQ ID NO: 213253 - DNA, 13 bp, Artificial Sequence
  Oligonucleotide for detection of SNP TSC0001153
gtttacgtttgtt

SEQ ID NO: 213254 - DNA, 13 bp, Artificial Sequence
  Oligonucleotide for detection of SNP TSC0001153
aacaaacgtaaac

SEQ ID NO: 213255 - DNA, 13 bp, Artificial Sequence
  Oligonucleotide for detection of SNP TSC0051926
tataggggagaty

SEQ ID NO: 213256 - DNA, 13 bp, Artificial Sequence
  Oligonucleotide for detection of SNP TSC0051926
ratctcccctata

SEQ ID NO: 213257 - DNA, 13 bp, Artificial Sequence
  Oligonucleotide for detection of SNP TSC0051926
tataggagagaty

SEQ ID NO: 213258 - DNA, 13 bp, Artificial Sequence
  Oligonucleotide for detection of SNP TSC0051926
ratctctcctata

SEQ ID NO: 213259 - DNA, 13 bp, Artificial Sequence
  Oligonucleotide for detection of SNP TSC0051927
tgtttatgatatg

SEQ ID NO: 213260 - DNA, 13 bp, Artificial Sequence
  Oligonucleotide for detection of SNP TSC0051927
catatcataaaca

SEQ ID NO: 213261 - DNA, 13 bp, Artificial Sequence
  Oligonucleotide for detection of SNP TSC0051927
tgtttacgatatg

SEQ ID NO: 213262 - DNA, 13 bp, Artificial Sequence
  Oligonucleotide for detection of SNP TSC0051927
catatcgtaaaca

SEQ ID NO: 213263 - DNA, 13 bp, Artificial Sequence
  Oligonucleotide for detection of SNP TSC0051927
tatatcgtaaata

SEQ ID NO: 213264 - DNA, 13 bp, Artificial Sequence
  Oligonucleotide for detection of SNP TSC0051927
tatttacgatata

SEQ ID NO: 213265 - DNA, 13 bp, Artificial Sequence
  Oligonucleotide for detection of SNP TSC0051928
gtatttatggatt

SEQ ID NO: 213266 - DNA, 13 bp, Artificial Sequence
  Oligonucleotide for detection of SNP TSC0051928
aatccataaatac

SEQ ID NO: 213267 - DNA, 13 bp, Artificial Sequence
  Oligonucleotide for detection of SNP TSC0051928
gtatttgtggatt

SEQ ID NO: 213268 - DNA, 13 bp, Artificial Sequence
  Oligonucleotide for detection of SNP TSC0051928
aatccacaaatac

SEQ ID NO: 213269 - DNA, 13 bp, Artificial Sequence
  Oligonucleotide for detection of SNP TSC0051930
agtttatataaat

SEQ ID NO: 213270 - DNA, 13 bp, Artificial Sequence
  Oligonucleotide for detection of SNP TSC0051930
atttatataaact

SEQ ID NO: 213271 - DNA, 13 bp, Artificial Sequence
  Oligonucleotide for detection of SNP TSC0051930
agtttagataaat

SEQ ID NO: 213272 - DNA, 13 bp, Artificial Sequence
  Oligonucleotide for detection of SNP TSC0051930
atttatctaaact

SEQ ID NO: 213273 - DNA, 13 bp, Artificial Sequence
  Oligonucleotide for detection of SNP TSC0051930
atttatgtaaatt

SEQ ID NO: 213274 - DNA, 13 bp, Artificial Sequence
  Oligonucleotide for detection of SNP TSC0051930
aatttacataaat

SEQ ID NO: 213275 - DNA, 13 bp, Artificial Sequence
  Oligonucleotide for detection of SNP TSC0051930
atttatttaaatt

SEQ ID NO: 213276 - DNA, 13 bp, Artificial Sequence
  Oligonucleotide for detection of SNP TSC0051930
aatttaaataaat

SEQ ID NO: 213277 - DNA, 13 bp, Artificial Sequence
  Oligonucleotide for detection of SNP TSC0051931
tgtgtatgatata

SEQ ID NO: 213278 - DNA, 13 bp, Artificial Sequence
  Oligonucleotide for detection of SNP TSC0051931
tatatcatacaca

SEQ ID NO: 213279 - DNA, 13 bp, Artificial Sequence
  Oligonucleotide for detection of SNP TSC0051931
tgtgtaggatata

SEQ ID NO: 213280 - DNA, 13 bp, Artificial Sequence
  Oligonucleotide for detection of SNP TSC0051931
tatatcctacaca

SEQ ID NO: 213281 - DNA, 13 bp, Artificial Sequence
  Oligonucleotide for detection of SNP TSC0051931
tgcgtatgatata

SEQ ID NO: 213282 - DNA, 13 bp, Artificial Sequence
  Oligonucleotide for detection of SNP TSC0051931
tatatcatacgca

SEQ ID NO: 213283 - DNA, 13 bp, Artificial Sequence
  Oligonucleotide for detection of SNP TSC0051931
tgcgtaggatata

SEQ ID NO: 213284 - DNA, 13 bp, Artificial Sequence
  Oligonucleotide for detection of SNP TSC0051931
tatatcctacgca

SEQ ID NO: 213285 - DNA, 13 bp, Artificial Sequence
  Oligonucleotide for detection of SNP TSC0051931
tgtgtacgatata

SEQ ID NO: 213286 - DNA, 13 bp, Artificial Sequence
  Oligonucleotide for detection of SNP TSC0051931
tatatcgtacaca

SEQ ID NO: 213287 - DNA, 13 bp, Artificial Sequence
  Oligonucleotide for detection of SNP TSC0051931
tgcgtacgatata

SEQ ID NO: 213288 - DNA, 13 bp, Artificial Sequence
  Oligonucleotide for detection of SNP TSC0051931
tatatcgtacgca

SEQ ID NO: 213289 - DNA, 13 bp, Artificial Sequence
  Oligonucleotide for detection of SNP TSC0051931
tgtgttgtatgta

SEQ ID NO: 213290 - DNA, 13 bp, Artificial Sequence
  Oligonucleotide for detection of SNP TSC0051931
tacatacaacaca

SEQ ID NO: 213291 - DNA, 13 bp, Artificial Sequence
  Oligonucleotide for detection of SNP TSC0051931
tgtgttttatgta

SEQ ID NO: 213292 - DNA, 13 bp, Artificial Sequence
  Oligonucleotide for detection of SNP TSC0051931
tacataaaacaca

SEQ ID NO: 213293 - DNA, 13 bp, Artificial Sequence
  Oligonucleotide for detection of SNP TSC0051931
tgtgtcgtatgta

SEQ ID NO: 213294 - DNA, 13 bp, Artificial Sequence
  Oligonucleotide for detection of SNP TSC0051931
tacatacgacaca

SEQ ID NO: 213295 - DNA, 13 bp, Artificial Sequence
  Oligonucleotide for detection of SNP TSC0051931
tgtgttttacgta

SEQ ID NO: 213296 - DNA, 13 bp, Artificial Sequence
  Oligonucleotide for detection of SNP TSC0051931
tacgtaaaacaca

SEQ ID NO: 213297 - DNA, 13 bp, Artificial Sequence
  Oligonucleotide for detection of SNP TSC0051931
tgtgttgtacgta

SEQ ID NO: 213298 - DNA, 13 bp, Artificial Sequence
  Oligonucleotide for detection of SNP TSC0051931
tacgtacaacaca

SEQ ID NO: 213299 - DNA, 13 bp, Artificial Sequence
  Oligonucleotide for detection of SNP TSC0051931
tgtgtcgtacgta

SEQ ID NO: 213300 - DNA, 13 bp, Artificial Sequence
  Oligonucleotide for detection of SNP TSC0051931
tacgtacgacaca

SEQ ID NO: 213301 - DNA, 13 bp, Artificial Sequence
  Oligonucleotide for detection of SNP TSC0051932
gttggtatgtttt

SEQ ID NO: 213302 - DNA, 13 bp, Artificial Sequence
  Oligonucleotide for detection of SNP TSC0051932
aaaacataccaac

SEQ ID NO: 213303 - DNA, 13 bp, Artificial Sequence
  Oligonucleotide for detection of SNP TSC0051932
gttggtttgtttt

SEQ ID NO: 213304 - DNA, 13 bp, Artificial Sequence
  Oligonucleotide for detection of SNP TSC0051932
aaaacaaaccaac

SEQ ID NO: 213305 - DNA, 13 bp, Artificial Sequence
  Oligonucleotide for detection of SNP TSC0051932
aaagtatattagy

SEQ ID NO: 213306 - DNA, 13 bp, Artificial Sequence
  Oligonucleotide for detection of SNP TSC0051932
rctaatatacttt

SEQ ID NO: 213307 - DNA, 13 bp, Artificial Sequence
  Oligonucleotide for detection of SNP TSC0051932
aaagtagattagy

SEQ ID NO: 213308 - DNA, 13 bp, Artificial Sequence
  Oligonucleotide for detection of SNP TSC0051932
rctaatctacttt

SEQ ID NO: 213309 - DNA, 13 bp, Artificial Sequence
  Oligonucleotide for detection of SNP TSC0051934
tgtaatattgaay

SEQ ID NO: 213310 - DNA, 13 bp, Artificial Sequence
  Oligonucleotide for detection of SNP TSC0051934
rttcaatattaca

SEQ ID NO: 213311 - DNA, 13 bp, Artificial Sequence
  Oligonucleotide for detection of SNP TSC0051934
tgtaatgttgaay

SEQ ID NO: 213312 - DNA, 13 bp, Artificial Sequence
  Oligonucleotide for detection of SNP TSC0051934
rttcaacattaca

SEQ ID NO: 213313 - DNA, 13 bp, Artificial Sequence
  Oligonucleotide for detection of SNP TSC0051934
tgtaacgttgaay

SEQ ID NO: 213314 - DNA, 13 bp, Artificial Sequence
  Oligonucleotide for detection of SNP TSC0051934
rttcaacgttaca

SEQ ID NO: 213315 - DNA, 13 bp, Artificial Sequence
  Oligonucleotide for detection of SNP TSC0051934
gtttaatgttgta

SEQ ID NO: 213316 - DNA, 13 bp, Artificial Sequence
  Oligonucleotide for detection of SNP TSC0051934
tacaacattaaac

SEQ ID NO: 213317 - DNA, 13 bp, Artificial Sequence
  Oligonucleotide for detection of SNP TSC0051934
gtttaacgttgta

SEQ ID NO: 213318 - DNA, 13 bp, Artificial Sequence
  Oligonucleotide for detection of SNP TSC0051934
tacaacgttaaac

SEQ ID NO: 213319 - DNA, 13 bp, Artificial Sequence
  Oligonucleotide for detection of SNP TSC0051935
tagagtgttaaga

SEQ ID NO: 213320 - DNA, 13 bp, Artificial Sequence
  Oligonucleotide for detection of SNP TSC0051935
tcttaacactcta

SEQ ID NO: 213321 - DNA, 13 bp, Artificial Sequence
  Oligonucleotide for detection of SNP TSC0051935
tagagtattaaga

SEQ ID NO: 213322 - DNA, 13 bp, Artificial Sequence
  Oligonucleotide for detection of SNP TSC0051935
tcttaatactcta

SEQ ID NO: 213323 - DNA, 13 bp, Artificial Sequence
  Oligonucleotide for detection of SNP TSC0051935
tagagcgttaaga

SEQ ID NO: 213324 - DNA, 13 bp, Artificial Sequence
  Oligonucleotide for detection of SNP TSC0051935
tcttaacgctcta

SEQ ID NO: 213325 - DNA, 13 bp, Artificial Sequence
  Oligonucleotide for detection of SNP TSC0051936
gaataatgtttay

SEQ ID NO: 213326 - DNA, 13 bp, Artificial Sequence
  Oligonucleotide for detection of SNP TSC0051936
rtaaacattattc

SEQ ID NO: 213327 - DNA, 13 bp, Artificial Sequence
  Oligonucleotide for detection of SNP TSC0051936
gaataacgtttay

SEQ ID NO: 213328 - DNA, 13 bp, Artificial Sequence
  Oligonucleotide for detection of SNP TSC0051936
rtaaacgttattc

SEQ ID NO: 213329 - DNA, 13 bp, Artificial Sequence
  Oligonucleotide for detection of SNP TSC0051936
gtaaatgttatty

SEQ ID NO: 213330 - DNA, 13 bp, Artificial Sequence
  Oligonucleotide for detection of SNP TSC0051936
raataacatttac

SEQ ID NO: 213331 - DNA, 13 bp, Artificial Sequence
  Oligonucleotide for detection of SNP TSC0051936
gtaaatattatty

SEQ ID NO: 213332 - DNA, 13 bp, Artificial Sequence
  Oligonucleotide for detection of SNP TSC0051936
raataatatttac

SEQ ID NO: 213333 - DNA, 13 bp, Artificial Sequence
  Oligonucleotide for detection of SNP TSC0051936
gtaaacgttatty

SEQ ID NO: 213334 - DNA, 13 bp, Artificial Sequence
  Oligonucleotide for detection of SNP TSC0051936
raataacgtttac

SEQ ID NO: 213335 - DNA, 13 bp, Artificial Sequence
  Oligonucleotide for detection of SNP TSC0051937
aagtttgttaaga

SEQ ID NO: 213336 - DNA, 13 bp, Artificial Sequence
  Oligonucleotide for detection of SNP TSC0051937
tcttaacaaactt

SEQ ID NO: 213337 - DNA, 13 bp, Artificial Sequence
  Oligonucleotide for detection of SNP TSC0051937
aagtttattaaga

SEQ ID NO: 213338 - DNA, 13 bp, Artificial Sequence
  Oligonucleotide for detection of SNP TSC0051937
tcttaataaactt

SEQ ID NO: 213339 - DNA, 13 bp, Artificial Sequence
  Oligonucleotide for detection of SNP TSC0051948
tattatgtatgty

SEQ ID NO: 213340 - DNA, 13 bp, Artificial Sequence
  Oligonucleotide for detection of SNP TSC0051948
racatacataata

SEQ ID NO: 213341 - DNA, 13 bp, Artificial Sequence
  Oligonucleotide for detection of SNP TSC0051948
tattatatatgty

SEQ ID NO: 213342 - DNA, 13 bp, Artificial Sequence
  Oligonucleotide for detection of SNP TSC0051948
racatatataata

SEQ ID NO: 213343 - DNA, 13 bp, Artificial Sequence
  Oligonucleotide for detection of SNP TSC0051949
taggttaggataa

SEQ ID NO: 213344 - DNA, 13 bp, Artificial Sequence
  Oligonucleotide for detection of SNP TSC0051949
ttatcctaaccta

SEQ ID NO: 213345 - DNA, 13 bp, Artificial Sequence
  Oligonucleotide for detection of SNP TSC0051949
taggttgggataa

SEQ ID NO: 213346 - DNA, 13 bp, Artificial Sequence
  Oligonucleotide for detection of SNP TSC0051949
ttatcccaaccta

SEQ ID NO: 213347 - DNA, 13 bp, Artificial Sequence
  Oligonucleotide for detection of SNP TSC0051949
taggtcgggataa

SEQ ID NO: 213348 - DNA, 13 bp, Artificial Sequence
  Oligonucleotide for detection of SNP TSC0051949
ttatcccgaccta

SEQ ID NO: 213349 - DNA, 13 bp, Artificial Sequence
  Oligonucleotide for detection of SNP TSC0051949
ttatttcgatttg

SEQ ID NO: 213350 - DNA, 13 bp, Artificial Sequence
  Oligonucleotide for detection of SNP TSC0051949
caaatcgaaataa

SEQ ID NO: 213351 - DNA, 13 bp, Artificial Sequence
  Oligonucleotide for detection of SNP TSC0051950
tattaagaaataa

SEQ ID NO: 213352 - DNA, 13 bp, Artificial Sequence
  Oligonucleotide for detection of SNP TSC0051950
ttatttcttaata

SEQ ID NO: 213353 - DNA, 13 bp, Artificial Sequence
  Oligonucleotide for detection of SNP TSC0051952
ttttaattattta

SEQ ID NO: 213354 - DNA, 13 bp, Artificial Sequence
  Oligonucleotide for detection of SNP TSC0051952
taaataattaaaa

SEQ ID NO: 213355 - DNA, 13 bp, Artificial Sequence
  Oligonucleotide for detection of SNP TSC0051953
aagagtagtttay

SEQ ID NO: 213356 - DNA, 13 bp, Artificial Sequence
  Oligonucleotide for detection of SNP TSC0051953
rtaaactactctt

SEQ ID NO: 213357 - DNA, 13 bp, Artificial Sequence
  Oligonucleotide for detection of SNP TSC0051953
aagagtggtttay

SEQ ID NO: 213358 - DNA, 13 bp, Artificial Sequence
  Oligonucleotide for detection of SNP TSC0051953
rtaaaccactctt

SEQ ID NO: 213359 - DNA, 13 bp, Artificial Sequence
  Oligonucleotide for detection of SNP TSC0051953
aagagcggtttay

SEQ ID NO: 213360 - DNA, 13 bp, Artificial Sequence
  Oligonucleotide for detection of SNP TSC0051953
rtaaaccgctctt

SEQ ID NO: 213361 - DNA, 13 bp, Artificial Sequence
  Oligonucleotide for detection of SNP TSC0051954
agatggattaaaa

SEQ ID NO: 213362 - DNA, 13 bp, Artificial Sequence
  Oligonucleotide for detection of SNP TSC0051954
ttttaatccatct

SEQ ID NO: 213363 - DNA, 13 bp, Artificial Sequence
  Oligonucleotide for detection of SNP TSC0051954
agatgggttaaaa

SEQ ID NO: 213364 - DNA, 13 bp, Artificial Sequence
  Oligonucleotide for detection of SNP TSC0051954
ttttaacccatct

SEQ ID NO: 213365 - DNA, 13 bp, Artificial Sequence
  Oligonucleotide for detection of SNP TSC0051956
ttgtttgtaattg

SEQ ID NO: 213366 - DNA, 13 bp, Artificial Sequence
  Oligonucleotide for detection of SNP TSC0051956
caattacaaacaa

SEQ ID NO: 213367 - DNA, 13 bp, Artificial Sequence
  Oligonucleotide for detection of SNP TSC0051956
ttgtttataattg

SEQ ID NO: 213368 - DNA, 13 bp, Artificial Sequence
  Oligonucleotide for detection of SNP TSC0051956
caattataaacaa

SEQ ID NO: 213369 - DNA, 13 bp, Artificial Sequence
  Oligonucleotide for detection of SNP TSC0051958
ggtattagtgtay

SEQ ID NO: 213370 - DNA, 13 bp, Artificial Sequence
  Oligonucleotide for detection of SNP TSC0051958
rtacactaatacc

SEQ ID NO: 213371 - DNA, 13 bp, Artificial Sequence
  Oligonucleotide for detection of SNP TSC0051958
ggtattggtgtay

SEQ ID NO: 213372 - DNA, 13 bp, Artificial Sequence
  Oligonucleotide for detection of SNP TSC0051958
rtacaccaatacc

SEQ ID NO: 213373 - DNA, 13 bp, Artificial Sequence
  Oligonucleotide for detection of SNP TSC0051958
ggtatcggtgtay

SEQ ID NO: 213374 - DNA, 13 bp, Artificial Sequence
  Oligonucleotide for detection of SNP TSC0051958
rtacaccgatacc

SEQ ID NO: 213375 - DNA, 13 bp, Artificial Sequence
  Oligonucleotide for detection of SNP TSC0051958
gtgtattggtgty

SEQ ID NO: 213376 - DNA, 13 bp, Artificial Sequence
  Oligonucleotide for detection of SNP TSC0051958
racaccaatacac

SEQ ID NO: 213377 - DNA, 13 bp, Artificial Sequence
  Oligonucleotide for detection of SNP TSC0051958
gtgtatcggtgty

SEQ ID NO: 213378 - DNA, 13 bp, Artificial Sequence
  Oligonucleotide for detection of SNP TSC0051958
racaccgatacac

SEQ ID NO: 213379 - DNA, 13 bp, Artificial Sequence
  Oligonucleotide for detection of SNP TSC0051959
attaatagtatat

SEQ ID NO: 213380 - DNA, 13 bp, Artificial Sequence
  Oligonucleotide for detection of SNP TSC0051959
atatactattaat

SEQ ID NO: 213381 - DNA, 13 bp, Artificial Sequence
  Oligonucleotide for detection of SNP TSC0051959
attaattgtatat

SEQ ID NO: 213382 - DNA, 13 bp, Artificial Sequence
  Oligonucleotide for detection of SNP TSC0051959
atatacaattaat

SEQ ID NO: 213383 - DNA, 13 bp, Artificial Sequence
  Oligonucleotide for detection of SNP TSC0051959
attaatcgtatat

SEQ ID NO: 213384 - DNA, 13 bp, Artificial Sequence
  Oligonucleotide for detection of SNP TSC0051959
atatacgattaat

SEQ ID NO: 213385 - DNA, 13 bp, Artificial Sequence
  Oligonucleotide for detection of SNP TSC0051959
atatattgttagt

SEQ ID NO: 213386 - DNA, 13 bp, Artificial Sequence
  Oligonucleotide for detection of SNP TSC0051959
actaacaatatat

SEQ ID NO: 213387 - DNA, 13 bp, Artificial Sequence
  Oligonucleotide for detection of SNP TSC0051959
atatatggttagt

SEQ ID NO: 213388 - DNA, 13 bp, Artificial Sequence
  Oligonucleotide for detection of SNP TSC0051959
actaaccatatat

SEQ ID NO: 213389 - DNA, 13 bp, Artificial Sequence
  Oligonucleotide for detection of SNP TSC0051959
atatacggttagt

SEQ ID NO: 213390 - DNA, 13 bp, Artificial Sequence
  Oligonucleotide for detection of SNP TSC0051959
actaaccgtatat

SEQ ID NO: 213391 - DNA, 13 bp, Artificial Sequence
  Oligonucleotide for detection of SNP TSC0051961
tttattgtaaaga

SEQ ID NO: 213392 - DNA, 13 bp, Artificial Sequence
  Oligonucleotide for detection of SNP TSC0051961
tctttacaataaa

SEQ ID NO: 213393 - DNA, 13 bp, Artificial Sequence
  Oligonucleotide for detection of SNP TSC0051962
tgtattatttaaa

SEQ ID NO: 213394 - DNA, 13 bp, Artificial Sequence
  Oligonucleotide for detection of SNP TSC0051962
tttaaataataca

SEQ ID NO: 213395 - DNA, 13 bp, Artificial Sequence
  Oligonucleotide for detection of SNP TSC0051962
tgtattgtttaaa

SEQ ID NO: 213396 - DNA, 13 bp, Artificial Sequence
  Oligonucleotide for detection of SNP TSC0051962
tttaaacaataca

SEQ ID NO: 213397 - DNA, 13 bp, Artificial Sequence
  Oligonucleotide for detection of SNP TSC0051962
tgtatcgtttaaa

SEQ ID NO: 213398 - DNA, 13 bp, Artificial Sequence
  Oligonucleotide for detection of SNP TSC0051962
tttaaacgataca

SEQ ID NO: 213399 - DNA, 13 bp, Artificial Sequence
  Oligonucleotide for detection of SNP TSC0051962
tttaaatgatata

SEQ ID NO: 213400 - DNA, 13 bp, Artificial Sequence
  Oligonucleotide for detection of SNP TSC0051962
tatatcatttaaa

SEQ ID NO: 213401 - DNA, 13 bp, Artificial Sequence
  Oligonucleotide for detection of SNP TSC0051967
ttatttagtaaty

SEQ ID NO: 213402 - DNA, 13 bp, Artificial Sequence
  Oligonucleotide for detection of SNP TSC0051967
rattactaaataa

SEQ ID NO: 213403 - DNA, 13 bp, Artificial Sequence
  Oligonucleotide for detection of SNP TSC0051967
ttattttgtaaty

SEQ ID NO: 213404 - DNA, 13 bp, Artificial Sequence
  Oligonucleotide for detection of SNP TSC0051967
rattacaaaataa

SEQ ID NO: 213405 - DNA, 13 bp, Artificial Sequence
  Oligonucleotide for detection of SNP TSC0051967
gattattaaataa

SEQ ID NO: 213406 - DNA, 13 bp, Artificial Sequence
  Oligonucleotide for detection of SNP TSC0051967
ttatttaataatc

SEQ ID NO: 213407 - DNA, 13 bp, Artificial Sequence
  Oligonucleotide for detection of SNP TSC0051967
gattataaaataa

SEQ ID NO: 213408 - DNA, 13 bp, Artificial Sequence
  Oligonucleotide for detection of SNP TSC0051967
ttattttataatc

SEQ ID NO: 213409 - DNA, 13 bp, Artificial Sequence
  Oligonucleotide for detection of SNP TSC0051968
tagattgtgtata

SEQ ID NO: 213410 - DNA, 13 bp, Artificial Sequence
  Oligonucleotide for detection of SNP TSC0051968
tatacacaatcta

SEQ ID NO: 213411 - DNA, 13 bp, Artificial Sequence
  Oligonucleotide for detection of SNP TSC0051968
tagattatgtata

SEQ ID NO: 213412 - DNA, 13 bp, Artificial Sequence
  Oligonucleotide for detection of SNP TSC0051968
tatacataatcta

SEQ ID NO: 213413 - DNA, 13 bp, Artificial Sequence
  Oligonucleotide for detection of SNP TSC0051972
taagtatgataat

SEQ ID NO: 213414 - DNA, 13 bp, Artificial Sequence
  Oligonucleotide for detection of SNP TSC0051972
attatcatactta

SEQ ID NO: 213415 - DNA, 13 bp, Artificial Sequence
  Oligonucleotide for detection of SNP TSC0051972
taagtacgataat

SEQ ID NO: 213416 - DNA, 13 bp, Artificial Sequence
  Oligonucleotide for detection of SNP TSC0051972
attatcgtactta

SEQ ID NO: 213417 - DNA, 13 bp, Artificial Sequence
  Oligonucleotide for detection of SNP TSC0006702
atttaatgttaay

SEQ ID NO: 213418 - DNA, 13 bp, Artificial Sequence
  Oligonucleotide for detection of SNP TSC0006702
rttaacattaaat

SEQ ID NO: 213419 - DNA, 13 bp, Artificial Sequence
  Oligonucleotide for detection of SNP TSC0006702
atttaacgttaay

SEQ ID NO: 213420 - DNA, 13 bp, Artificial Sequence
  Oligonucleotide for detection of SNP TSC0006702
rttaacgttaaat

SEQ ID NO: 213421 - DNA, 13 bp, Artificial Sequence
  Oligonucleotide for detection of SNP TSC0006702
gttaatgttaaat

SEQ ID NO: 213422 - DNA, 13 bp, Artificial Sequence
  Oligonucleotide for detection of SNP TSC0006702
atttaacattaac

SEQ ID NO: 213423 - DNA, 13 bp, Artificial Sequence
  Oligonucleotide for detection of SNP TSC0006702
gttaacgttaaat

SEQ ID NO: 213424 - DNA, 13 bp, Artificial Sequence
  Oligonucleotide for detection of SNP TSC0006702
atttaacgttaac

SEQ ID NO: 213425 - DNA, 13 bp, Artificial Sequence
  Oligonucleotide for detection of SNP TSC0051976
tataattgagtta

SEQ ID NO: 213426 - DNA, 13 bp, Artificial Sequence
  Oligonucleotide for detection of SNP TSC0051976
taactcaattata

SEQ ID NO: 213427 - DNA, 13 bp, Artificial Sequence
  Oligonucleotide for detection of SNP TSC0051976
tataatcgagtta

SEQ ID NO: 213428 - DNA, 13 bp, Artificial Sequence
  Oligonucleotide for detection of SNP TSC0051976
taactcgattata

SEQ ID NO: 213429 - DNA, 13 bp, Artificial Sequence
  Oligonucleotide for detection of SNP TSC0051976
tgatttgattatg

SEQ ID NO: 213430 - DNA, 13 bp, Artificial Sequence
  Oligonucleotide for detection of SNP TSC0051976
cataatcaaatca

SEQ ID NO: 213431 - DNA, 13 bp, Artificial Sequence
  Oligonucleotide for detection of SNP TSC0051976
tgatttaattatg

SEQ ID NO: 213432 - DNA, 13 bp, Artificial Sequence
  Oligonucleotide for detection of SNP TSC0051976
cataattaaatca

SEQ ID NO: 213433 - DNA, 13 bp, Artificial Sequence
  Oligonucleotide for detection of SNP TSC0051976
tgattcgattatg

SEQ ID NO: 213434 - DNA, 13 bp, Artificial Sequence
  Oligonucleotide for detection of SNP TSC0051976
cataatcgaatca

SEQ ID NO: 213435 - DNA, 13 bp, Artificial Sequence
  Oligonucleotide for detection of SNP TSC0051977
tagattgtttaaa

SEQ ID NO: 213436 - DNA, 13 bp, Artificial Sequence
  Oligonucleotide for detection of SNP TSC0051977
tttaaacaatcta

SEQ ID NO: 213437 - DNA, 13 bp, Artificial Sequence
  Oligonucleotide for detection of SNP TSC0051977
tagattatttaaa

SEQ ID NO: 213438 - DNA, 13 bp, Artificial Sequence
  Oligonucleotide for detection of SNP TSC0051977
tttaaataatcta

SEQ ID NO: 213439 - DNA, 13 bp, Artificial Sequence
  Oligonucleotide for detection of SNP TSC0051977
tagatcgtttaaa

SEQ ID NO: 213440 - DNA, 13 bp, Artificial Sequence
  Oligonucleotide for detection of SNP TSC0051977
tttaaacgatcta

SEQ ID NO: 213441 - DNA, 13 bp, Artificial Sequence
  Oligonucleotide for detection of SNP TSC0008090
attaatatatagt

SEQ ID NO: 213442 - DNA, 13 bp, Artificial Sequence
  Oligonucleotide for detection of SNP TSC0008090
actatatattaat

SEQ ID NO: 213443 - DNA, 13 bp, Artificial Sequence
  Oligonucleotide for detection of SNP TSC0008090
attaatgtatagt

SEQ ID NO: 213444 - DNA, 13 bp, Artificial Sequence
  Oligonucleotide for detection of SNP TSC0008090
actatacattaat

SEQ ID NO: 213445 - DNA, 13 bp, Artificial Sequence
  Oligonucleotide for detection of SNP TSC0051978
agtaaaagttatt

SEQ ID NO: 213446 - DNA, 13 bp, Artificial Sequence
  Oligonucleotide for detection of SNP TSC0051978
aataacttttact

SEQ ID NO: 213447 - DNA, 13 bp, Artificial Sequence
  Oligonucleotide for detection of SNP TSC0051978
agtaaaggttatt

SEQ ID NO: 213448 - DNA, 13 bp, Artificial Sequence
  Oligonucleotide for detection of SNP TSC0051978
aataacctttact

SEQ ID NO: 213449 - DNA, 13 bp, Artificial Sequence
  Oligonucleotide for detection of SNP TSC0051979
agttggtattaag

SEQ ID NO: 213450 - DNA, 13 bp, Artificial Sequence
  Oligonucleotide for detection of SNP TSC0051979
cttaataccaact

SEQ ID NO: 213451 - DNA, 13 bp, Artificial Sequence
  Oligonucleotide for detection of SNP TSC0051979
agttgggattaag

SEQ ID NO: 213452 - DNA, 13 bp, Artificial Sequence
  Oligonucleotide for detection of SNP TSC0051979
cttaatcccaact

SEQ ID NO: 213453 - DNA, 13 bp, Artificial Sequence
  Oligonucleotide for detection of SNP TSC0051979
tttagtgttagtt

SEQ ID NO: 213454 - DNA, 13 bp, Artificial Sequence
  Oligonucleotide for detection of SNP TSC0051979
aactaacactaaa

SEQ ID NO: 213455 - DNA, 13 bp, Artificial Sequence
  Oligonucleotide for detection of SNP TSC0051979
tttagttttagtt

SEQ ID NO: 213456 - DNA, 13 bp, Artificial Sequence
  Oligonucleotide for detection of SNP TSC0051979
aactaaaactaaa

SEQ ID NO: 213457 - DNA, 13 bp, Artificial Sequence
  Oligonucleotide for detection of SNP TSC0051980
gtttggtttttgt

SEQ ID NO: 213458 - DNA, 13 bp, Artificial Sequence
  Oligonucleotide for detection of SNP TSC0051980
acaaaaaccaaac

SEQ ID NO: 213459 - DNA, 13 bp, Artificial Sequence
  Oligonucleotide for detection of SNP TSC0051980
gtttgggttttgt

SEQ ID NO: 213460 - DNA, 13 bp, Artificial Sequence
  Oligonucleotide for detection of SNP TSC0051980
acaaaacccaaac

SEQ ID NO: 213461 - DNA, 13 bp, Artificial Sequence
  Oligonucleotide for detection of SNP TSC0051980
gttcggtttttgt

SEQ ID NO: 213462 - DNA, 13 bp, Artificial Sequence
  Oligonucleotide for detection of SNP TSC0051980
acaaaaaccgaac

SEQ ID NO: 213463 - DNA, 13 bp, Artificial Sequence
  Oligonucleotide for detection of SNP TSC0051980
gttcgggttttgt

SEQ ID NO: 213464 - DNA, 13 bp, Artificial Sequence
  Oligonucleotide for detection of SNP TSC0051980
acaaaacccgaac

SEQ ID NO: 213465 - DNA, 13 bp, Artificial Sequence
  Oligonucleotide for detection of SNP TSC0051980
ataaaaattgagy

SEQ ID NO: 213466 - DNA, 13 bp, Artificial Sequence
  Oligonucleotide for detection of SNP TSC0051980
rctcaatttttat

SEQ ID NO: 213467 - DNA, 13 bp, Artificial Sequence
  Oligonucleotide for detection of SNP TSC0051980
ataaaatttgagy

SEQ ID NO: 213468 - DNA, 13 bp, Artificial Sequence
  Oligonucleotide for detection of SNP TSC0051980
rctcaaattttat

SEQ ID NO: 213469 - DNA, 13 bp, Artificial Sequence
  Oligonucleotide for detection of SNP TSC0051980
ataaaaatcgagy

SEQ ID NO: 213470 - DNA, 13 bp, Artificial Sequence
  Oligonucleotide for detection of SNP TSC0051980
rctcgatttttat

SEQ ID NO: 213471 - DNA, 13 bp, Artificial Sequence
  Oligonucleotide for detection of SNP TSC0051980
ataaaattcgagy

SEQ ID NO: 213472 - DNA, 13 bp, Artificial Sequence
  Oligonucleotide for detection of SNP TSC0051980
rctcgaattttat

SEQ ID NO: 213473 - DNA, 13 bp, Artificial Sequence
  Oligonucleotide for detection of SNP TSC0051981
atttaagatgtty

SEQ ID NO: 213474 - DNA, 13 bp, Artificial Sequence
  Oligonucleotide for detection of SNP TSC0051981
raacatcttaaat

SEQ ID NO: 213475 - DNA, 13 bp, Artificial Sequence
  Oligonucleotide for detection of SNP TSC0051981
atttaaaatgtty

SEQ ID NO: 213476 - DNA, 13 bp, Artificial Sequence
  Oligonucleotide for detection of SNP TSC0051981
raacattttaaat

SEQ ID NO: 213477 - DNA, 13 bp, Artificial Sequence
  Oligonucleotide for detection of SNP TSC0051982
ttttagttttgaa

SEQ ID NO: 213478 - DNA, 13 bp, Artificial Sequence
  Oligonucleotide for detection of SNP TSC0051982
ttcaaaactaaaa

SEQ ID NO: 213479 - DNA, 13 bp, Artificial Sequence
  Oligonucleotide for detection of SNP TSC0051982
ttttaggtttgaa

SEQ ID NO: 213480 - DNA, 13 bp, Artificial Sequence
  Oligonucleotide for detection of SNP TSC0051982
ttcaaacctaaaa

SEQ ID NO: 213481 - DNA, 13 bp, Artificial Sequence
  Oligonucleotide for detection of SNP TSC0051982
tttagggttgaaa

SEQ ID NO: 213482 - DNA, 13 bp, Artificial Sequence
  Oligonucleotide for detection of SNP TSC0051982
tttcaaccctaaa

SEQ ID NO: 213483 - DNA, 13 bp, Artificial Sequence
  Oligonucleotide for detection of SNP TSC0051982
tttaggtttgaaa

SEQ ID NO: 213484 - DNA, 13 bp, Artificial Sequence
  Oligonucleotide for detection of SNP TSC0051982
tttcaaacctaaa

SEQ ID NO: 213485 - DNA, 13 bp, Artificial Sequence
  Oligonucleotide for detection of SNP TSC0051985
agtttgtgtattg

SEQ ID NO: 213486 - DNA, 13 bp, Artificial Sequence
  Oligonucleotide for detection of SNP TSC0051985
caatacacaaact

SEQ ID NO: 213487 - DNA, 13 bp, Artificial Sequence
  Oligonucleotide for detection of SNP TSC0051985
agtttgcgtattg

SEQ ID NO: 213488 - DNA, 13 bp, Artificial Sequence
  Oligonucleotide for detection of SNP TSC0051985
caatacgcaaact

SEQ ID NO: 213489 - DNA, 13 bp, Artificial Sequence
  Oligonucleotide for detection of SNP TSC0051985
tagtgtgtaggtt

SEQ ID NO: 213490 - DNA, 13 bp, Artificial Sequence
  Oligonucleotide for detection of SNP TSC0051985
aacctacacacta

SEQ ID NO: 213491 - DNA, 13 bp, Artificial Sequence
  Oligonucleotide for detection of SNP TSC0051985
tagtgtataggtt

SEQ ID NO: 213492 - DNA, 13 bp, Artificial Sequence
  Oligonucleotide for detection of SNP TSC0051985
aacctatacacta

SEQ ID NO: 213493 - DNA, 13 bp, Artificial Sequence
  Oligonucleotide for detection of SNP TSC0051985
tagtgcgtaggtt

SEQ ID NO: 213494 - DNA, 13 bp, Artificial Sequence
  Oligonucleotide for detection of SNP TSC0051985
aacctacgcacta

SEQ ID NO: 213495 - DNA, 13 bp, Artificial Sequence
  Oligonucleotide for detection of SNP TSC0051986
aatttgggtttta

SEQ ID NO: 213496 - DNA, 13 bp, Artificial Sequence
  Oligonucleotide for detection of SNP TSC0051986
taaaacccaaatt

SEQ ID NO: 213497 - DNA, 13 bp, Artificial Sequence
  Oligonucleotide for detection of SNP TSC0051986
aatttgagtttta

SEQ ID NO: 213498 - DNA, 13 bp, Artificial Sequence
  Oligonucleotide for detection of SNP TSC0051986
taaaactcaaatt

SEQ ID NO: 213499 - DNA, 13 bp, Artificial Sequence
  Oligonucleotide for detection of SNP TSC0051986
aattcgggtttta

SEQ ID NO: 213500 - DNA, 13 bp, Artificial Sequence
  Oligonucleotide for detection of SNP TSC0051986
taaaacccgaatt

SEQ ID NO: 213501 - DNA, 13 bp, Artificial Sequence
  Oligonucleotide for detection of SNP TSC0051986
aattcgagtttta

SEQ ID NO: 213502 - DNA, 13 bp, Artificial Sequence
  Oligonucleotide for detection of SNP TSC0051986
taaaactcgaatt

SEQ ID NO: 213503 - DNA, 13 bp, Artificial Sequence
  Oligonucleotide for detection of SNP TSC0051987
ttgtgggtgtagg

SEQ ID NO: 213504 - DNA, 13 bp, Artificial Sequence
  Oligonucleotide for detection of SNP TSC0051987
cctacacccacaa

SEQ ID NO: 213505 - DNA, 13 bp, Artificial Sequence
  Oligonucleotide for detection of SNP TSC0051987
ttgtggatgtagg

SEQ ID NO: 213506 - DNA, 13 bp, Artificial Sequence
  Oligonucleotide for detection of SNP TSC0051987
cctacatccacaa

SEQ ID NO: 213507 - DNA, 13 bp, Artificial Sequence
  Oligonucleotide for detection of SNP TSC0051987
ttgcgggtgtagg

SEQ ID NO: 213508 - DNA, 13 bp, Artificial Sequence
  Oligonucleotide for detection of SNP TSC0051987
cctacacccgcaa

SEQ ID NO: 213509 - DNA, 13 bp, Artificial Sequence
  Oligonucleotide for detection of SNP TSC0051987
ttgcggatgtagg

SEQ ID NO: 213510 - DNA, 13 bp, Artificial Sequence
  Oligonucleotide for detection of SNP TSC0051987
cctacatccgcaa

SEQ ID NO: 213511 - DNA, 13 bp, Artificial Sequence
  Oligonucleotide for detection of SNP TSC0051988
atatgttgattat

SEQ ID NO: 213512 - DNA, 13 bp, Artificial Sequence
  Oligonucleotide for detection of SNP TSC0051988
ataatcaacatat

SEQ ID NO: 213513 - DNA, 13 bp, Artificial Sequence
  Oligonucleotide for detection of SNP TSC0051988
atatgtggattat

SEQ ID NO: 213514 - DNA, 13 bp, Artificial Sequence
  Oligonucleotide for detection of SNP TSC0051988
ataatccacatat

SEQ ID NO: 213515 - DNA, 13 bp, Artificial Sequence
  Oligonucleotide for detection of SNP TSC0051988
atatgcggattat

SEQ ID NO: 213516 - DNA, 13 bp, Artificial Sequence
  Oligonucleotide for detection of SNP TSC0051988
ataatccgcatat

SEQ ID NO: 213517 - DNA, 13 bp, Artificial Sequence
  Oligonucleotide for detection of SNP TSC0051988
atgattagtatgt

SEQ ID NO: 213518 - DNA, 13 bp, Artificial Sequence
  Oligonucleotide for detection of SNP TSC0051988
acatactaatcat

SEQ ID NO: 213519 - DNA, 13 bp, Artificial Sequence
  Oligonucleotide for detection of SNP TSC0051988
atgatttgtatgt

SEQ ID NO: 213520 - DNA, 13 bp, Artificial Sequence
  Oligonucleotide for detection of SNP TSC0051988
acatacaaatcat

SEQ ID NO: 213521 - DNA, 13 bp, Artificial Sequence
  Oligonucleotide for detection of SNP TSC0051988
atgattcgtatgt

SEQ ID NO: 213522 - DNA, 13 bp, Artificial Sequence
  Oligonucleotide for detection of SNP TSC0051988
acatacgaatcat

SEQ ID NO: 213523 - DNA, 13 bp, Artificial Sequence
  Oligonucleotide for detection of SNP TSC0051990
tatgtttatatta

SEQ ID NO: 213524 - DNA, 13 bp, Artificial Sequence
  Oligonucleotide for detection of SNP TSC0051990
taatataaacata

SEQ ID NO: 213525 - DNA, 13 bp, Artificial Sequence
  Oligonucleotide for detection of SNP TSC0051990
tatgttgatatta

SEQ ID NO: 213526 - DNA, 13 bp, Artificial Sequence
  Oligonucleotide for detection of SNP TSC0051990
taatatcaacata

SEQ ID NO: 213527 - DNA, 13 bp, Artificial Sequence
  Oligonucleotide for detection of SNP TSC0051990
taatatgagtata

SEQ ID NO: 213528 - DNA, 13 bp, Artificial Sequence
  Oligonucleotide for detection of SNP TSC0051990
tatactcatatta

SEQ ID NO: 213529 - DNA, 13 bp, Artificial Sequence
  Oligonucleotide for detection of SNP TSC0051990
taatattagtata

SEQ ID NO: 213530 - DNA, 13 bp, Artificial Sequence
  Oligonucleotide for detection of SNP TSC0051990
tatactaatatta

SEQ ID NO: 213531 - DNA, 13 bp, Artificial Sequence
  Oligonucleotide for detection of SNP TSC0051991
agtggagttggga

SEQ ID NO: 213532 - DNA, 13 bp, Artificial Sequence
  Oligonucleotide for detection of SNP TSC0051991
tcccaactccact

SEQ ID NO: 213533 - DNA, 13 bp, Artificial Sequence
  Oligonucleotide for detection of SNP TSC0051991
agtggaattggga

SEQ ID NO: 213534 - DNA, 13 bp, Artificial Sequence
  Oligonucleotide for detection of SNP TSC0051991
tcccaattccact

SEQ ID NO: 213535 - DNA, 13 bp, Artificial Sequence
  Oligonucleotide for detection of SNP TSC0051991
agcggagttggga

SEQ ID NO: 213536 - DNA, 13 bp, Artificial Sequence
  Oligonucleotide for detection of SNP TSC0051991
tcccaactccgct

SEQ ID NO: 213537 - DNA, 13 bp, Artificial Sequence
  Oligonucleotide for detection of SNP TSC0051991
agcggaattggga

SEQ ID NO: 213538 - DNA, 13 bp, Artificial Sequence
  Oligonucleotide for detection of SNP TSC0051991
tcccaattccgct

SEQ ID NO: 213539 - DNA, 13 bp, Artificial Sequence
  Oligonucleotide for detection of SNP TSC0051995
gaagtaagtatgg

SEQ ID NO: 213540 - DNA, 13 bp, Artificial Sequence
  Oligonucleotide for detection of SNP TSC0051995
ccatacttacttc

SEQ ID NO: 213541 - DNA, 13 bp, Artificial Sequence
  Oligonucleotide for detection of SNP TSC0051995
gaagtaggtatgg

SEQ ID NO: 213542 - DNA, 13 bp, Artificial Sequence
  Oligonucleotide for detection of SNP TSC0051995
ccatacctacttc

SEQ ID NO: 213543 - DNA, 13 bp, Artificial Sequence
  Oligonucleotide for detection of SNP TSC0051995
gaagtaagtacgg

SEQ ID NO: 213544 - DNA, 13 bp, Artificial Sequence
  Oligonucleotide for detection of SNP TSC0051995
ccgtacttacttc

SEQ ID NO: 213545 - DNA, 13 bp, Artificial Sequence
  Oligonucleotide for detection of SNP TSC0051995
gaagtaggtacgg

SEQ ID NO: 213546 - DNA, 13 bp, Artificial Sequence
  Oligonucleotide for detection of SNP TSC0051995
ccgtacctacttc

SEQ ID NO: 213547 - DNA, 13 bp, Artificial Sequence
  Oligonucleotide for detection of SNP TSC0052004
aaaaaagtttaat

SEQ ID NO: 213548 - DNA, 13 bp, Artificial Sequence
  Oligonucleotide for detection of SNP TSC0052004
attaaactttttt

SEQ ID NO: 213549 - DNA, 13 bp, Artificial Sequence
  Oligonucleotide for detection of SNP TSC0052005
gaaaagagtatat

SEQ ID NO: 213550 - DNA, 13 bp, Artificial Sequence
  Oligonucleotide for detection of SNP TSC0052005
atatactcttttc

SEQ ID NO: 213551 - DNA, 13 bp, Artificial Sequence
  Oligonucleotide for detection of SNP TSC0052005
gaaaagggtatat

SEQ ID NO: 213552 - DNA, 13 bp, Artificial Sequence
  Oligonucleotide for detection of SNP TSC0052005
atatacccttttc

SEQ ID NO: 213553 - DNA, 13 bp, Artificial Sequence
  Oligonucleotide for detection of SNP TSC0052006
cgttttaattttt

SEQ ID NO: 213554 - DNA, 13 bp, Artificial Sequence
  Oligonucleotide for detection of SNP TSC0052006
aaaaattaaaacg

SEQ ID NO: 213555 - DNA, 13 bp, Artificial Sequence
  Oligonucleotide for detection of SNP TSC0052006
cgtttttattttt

SEQ ID NO: 213556 - DNA, 13 bp, Artificial Sequence
  Oligonucleotide for detection of SNP TSC0052006
aaaaataaaaacg

SEQ ID NO: 213557 - DNA, 13 bp, Artificial Sequence
  Oligonucleotide for detection of SNP TSC0052006
aagaattaaggtg

SEQ ID NO: 213558 - DNA, 13 bp, Artificial Sequence
  Oligonucleotide for detection of SNP TSC0052006
caccttaattctt

SEQ ID NO: 213559 - DNA, 13 bp, Artificial Sequence
  Oligonucleotide for detection of SNP TSC0052006
aagaatgaaggtg

SEQ ID NO: 213560 - DNA, 13 bp, Artificial Sequence
  Oligonucleotide for detection of SNP TSC0052006
caccttcattctt

SEQ ID NO: 213561 - DNA, 13 bp, Artificial Sequence
  Oligonucleotide for detection of SNP TSC0052006
aagaattaaggcg

SEQ ID NO: 213562 - DNA, 13 bp, Artificial Sequence
  Oligonucleotide for detection of SNP TSC0052006
cgccttaattctt

SEQ ID NO: 213563 - DNA, 13 bp, Artificial Sequence
  Oligonucleotide for detection of SNP TSC0052006
aagaatgaaggcg

SEQ ID NO: 213564 - DNA, 13 bp, Artificial Sequence
  Oligonucleotide for detection of SNP TSC0052006
cgccttcattctt

SEQ ID NO: 213565 - DNA, 13 bp, Artificial Sequence
  Oligonucleotide for detection of SNP TSC0052007
aaattggtatagy

SEQ ID NO: 213566 - DNA, 13 bp, Artificial Sequence
  Oligonucleotide for detection of SNP TSC0052007
rctataccaattt

SEQ ID NO: 213567 - DNA, 13 bp, Artificial Sequence
  Oligonucleotide for detection of SNP TSC0052007
aaattgatatagy

SEQ ID NO: 213568 - DNA, 13 bp, Artificial Sequence
  Oligonucleotide for detection of SNP TSC0052007
rctatatcaattt

SEQ ID NO: 213569 - DNA, 13 bp, Artificial Sequence
  Oligonucleotide for detection of SNP TSC0052008
tggtagaagttta

SEQ ID NO: 213570 - DNA, 13 bp, Artificial Sequence
  Oligonucleotide for detection of SNP TSC0052008
taaacttctacca

SEQ ID NO: 213571 - DNA, 13 bp, Artificial Sequence
  Oligonucleotide for detection of SNP TSC0052008
tggtagtagttta

SEQ ID NO: 213572 - DNA, 13 bp, Artificial Sequence
  Oligonucleotide for detection of SNP TSC0052008
taaactactacca

SEQ ID NO: 213573 - DNA, 13 bp, Artificial Sequence
  Oligonucleotide for detection of SNP TSC0052009
atgttgaatagtt

SEQ ID NO: 213574 - DNA, 13 bp, Artificial Sequence
  Oligonucleotide for detection of SNP TSC0052009
aactattcaacat

SEQ ID NO: 213575 - DNA, 13 bp, Artificial Sequence
  Oligonucleotide for detection of SNP TSC0052009
atgttgtatagtt

SEQ ID NO: 213576 - DNA, 13 bp, Artificial Sequence
  Oligonucleotide for detection of SNP TSC0052009
aactatacaacat

SEQ ID NO: 213577 - DNA, 13 bp, Artificial Sequence
  Oligonucleotide for detection of SNP TSC0052009
agttatttagtat

SEQ ID NO: 213578 - DNA, 13 bp, Artificial Sequence
  Oligonucleotide for detection of SNP TSC0052009
atactaaataact

SEQ ID NO: 213579 - DNA, 13 bp, Artificial Sequence
  Oligonucleotide for detection of SNP TSC0052009
agttatgtagtat

SEQ ID NO: 213580 - DNA, 13 bp, Artificial Sequence
  Oligonucleotide for detection of SNP TSC0052009
atactacataact

SEQ ID NO: 213581 - DNA, 13 bp, Artificial Sequence
  Oligonucleotide for detection of SNP TSC0052010
aggttaaaggata

SEQ ID NO: 213582 - DNA, 13 bp, Artificial Sequence
  Oligonucleotide for detection of SNP TSC0052010
tatcctttaacct

SEQ ID NO: 213583 - DNA, 13 bp, Artificial Sequence
  Oligonucleotide for detection of SNP TSC0052010
aggttataggata

SEQ ID NO: 213584 - DNA, 13 bp, Artificial Sequence
  Oligonucleotide for detection of SNP TSC0052010
tatcctataacct

SEQ ID NO: 213585 - DNA, 13 bp, Artificial Sequence
  Oligonucleotide for detection of SNP TSC0052011
taaatagttagay

SEQ ID NO: 213586 - DNA, 13 bp, Artificial Sequence
  Oligonucleotide for detection of SNP TSC0052011
rtctaactattta

SEQ ID NO: 213587 - DNA, 13 bp, Artificial Sequence
  Oligonucleotide for detection of SNP TSC0052012
ggtaatataaatt

SEQ ID NO: 213588 - DNA, 13 bp, Artificial Sequence
  Oligonucleotide for detection of SNP TSC0052012
aatttatattacc

SEQ ID NO: 213589 - DNA, 13 bp, Artificial Sequence
  Oligonucleotide for detection of SNP TSC0052012
ggtaatgtaaatt

SEQ ID NO: 213590 - DNA, 13 bp, Artificial Sequence
  Oligonucleotide for detection of SNP TSC0052012
aatttacattacc

SEQ ID NO: 213591 - DNA, 13 bp, Artificial Sequence
  Oligonucleotide for detection of SNP TSC0052012
ggtaacgtaaatt

SEQ ID NO: 213592 - DNA, 13 bp, Artificial Sequence
  Oligonucleotide for detection of SNP TSC0052012
aatttacgttacc

SEQ ID NO: 213593 - DNA, 13 bp, Artificial Sequence
  Oligonucleotide for detection of SNP TSC0052012
agtttatgttgty

SEQ ID NO: 213594 - DNA, 13 bp, Artificial Sequence
  Oligonucleotide for detection of SNP TSC0052012
racaacataaact

SEQ ID NO: 213595 - DNA, 13 bp, Artificial Sequence
  Oligonucleotide for detection of SNP TSC0052012
agtttacgttgty

SEQ ID NO: 213596 - DNA, 13 bp, Artificial Sequence
  Oligonucleotide for detection of SNP TSC0052012
racaacgtaaact

SEQ ID NO: 213597 - DNA, 13 bp, Artificial Sequence
  Oligonucleotide for detection of SNP TSC0052013
tattaattataaa

SEQ ID NO: 213598 - DNA, 13 bp, Artificial Sequence
  Oligonucleotide for detection of SNP TSC0052013
tttataattaata

SEQ ID NO: 213599 - DNA, 13 bp, Artificial Sequence
  Oligonucleotide for detection of SNP TSC0052013
tattaagtataaa

SEQ ID NO: 213600 - DNA, 13 bp, Artificial Sequence
  Oligonucleotide for detection of SNP TSC0052013
tttatacttaata

SEQ ID NO: 213601 - DNA, 13 bp, Artificial Sequence
  Oligonucleotide for detection of SNP TSC0052013
tttgtaattgatg

SEQ ID NO: 213602 - DNA, 13 bp, Artificial Sequence
  Oligonucleotide for detection of SNP TSC0052013
catcaattacaaa

SEQ ID NO: 213603 - DNA, 13 bp, Artificial Sequence
  Oligonucleotide for detection of SNP TSC0052013
tttgtatttgatg

SEQ ID NO: 213604 - DNA, 13 bp, Artificial Sequence
  Oligonucleotide for detection of SNP TSC0052013
catcaaatacaaa

SEQ ID NO: 213605 - DNA, 13 bp, Artificial Sequence
  Oligonucleotide for detection of SNP TSC0052014
tttttagagaata

SEQ ID NO: 213606 - DNA, 13 bp, Artificial Sequence
  Oligonucleotide for detection of SNP TSC0052014
tattctctaaaaa

SEQ ID NO: 213607 - DNA, 13 bp, Artificial Sequence
  Oligonucleotide for detection of SNP TSC0052015
aatttttaattta

SEQ ID NO: 213608 - DNA, 13 bp, Artificial Sequence
  Oligonucleotide for detection of SNP TSC0052015
taaattaaaaatt

SEQ ID NO: 213609 - DNA, 13 bp, Artificial Sequence
  Oligonucleotide for detection of SNP TSC0052015
aattttgaattta

SEQ ID NO: 213610 - DNA, 13 bp, Artificial Sequence
  Oligonucleotide for detection of SNP TSC0052015
taaattcaaaatt

SEQ ID NO: 213611 - DNA, 13 bp, Artificial Sequence
  Oligonucleotide for detection of SNP TSC0052015
taagttaaaagtt

SEQ ID NO: 213612 - DNA, 13 bp, Artificial Sequence
  Oligonucleotide for detection of SNP TSC0052015
aacttttaactta

SEQ ID NO: 213613 - DNA, 13 bp, Artificial Sequence
  Oligonucleotide for detection of SNP TSC0052015
taagtttaaagtt

SEQ ID NO: 213614 - DNA, 13 bp, Artificial Sequence
  Oligonucleotide for detection of SNP TSC0052015
aactttaaactta

SEQ ID NO: 213615 - DNA, 13 bp, Artificial Sequence
  Oligonucleotide for detection of SNP TSC0052016
tgataatgaaggg

SEQ ID NO: 213616 - DNA, 13 bp, Artificial Sequence
  Oligonucleotide for detection of SNP TSC0052016
cccttcattatca

SEQ ID NO: 213617 - DNA, 13 bp, Artificial Sequence
  Oligonucleotide for detection of SNP TSC0052016
tgataacgaaggg

SEQ ID NO: 213618 - DNA, 13 bp, Artificial Sequence
  Oligonucleotide for detection of SNP TSC0052016
cccttcgttatca

SEQ ID NO: 213619 - DNA, 13 bp, Artificial Sequence
  Oligonucleotide for detection of SNP TSC0052017
agattatgttgaa

SEQ ID NO: 213620 - DNA, 13 bp, Artificial Sequence
  Oligonucleotide for detection of SNP TSC0052017
ttcaacataatct

SEQ ID NO: 213621 - DNA, 13 bp, Artificial Sequence
  Oligonucleotide for detection of SNP TSC0052017
agattacgttgaa

SEQ ID NO: 213622 - DNA, 13 bp, Artificial Sequence
  Oligonucleotide for detection of SNP TSC0052017
ttcaacgtaatct

SEQ ID NO: 213623 - DNA, 13 bp, Artificial Sequence
  Oligonucleotide for detection of SNP TSC0052018
ggttttattatat

SEQ ID NO: 213624 - DNA, 13 bp, Artificial Sequence
  Oligonucleotide for detection of SNP TSC0052018
atataataaaacc

SEQ ID NO: 213625 - DNA, 13 bp, Artificial Sequence
  Oligonucleotide for detection of SNP TSC0052018
ggttttgttatat

SEQ ID NO: 213626 - DNA, 13 bp, Artificial Sequence
  Oligonucleotide for detection of SNP TSC0052018
atataacaaaacc

SEQ ID NO: 213627 - DNA, 13 bp, Artificial Sequence
  Oligonucleotide for detection of SNP TSC0052019
ttgtttatggatt

SEQ ID NO: 213628 - DNA, 13 bp, Artificial Sequence
  Oligonucleotide for detection of SNP TSC0052019
aatccataaacaa

SEQ ID NO: 213629 - DNA, 13 bp, Artificial Sequence
  Oligonucleotide for detection of SNP TSC0052019
ttgtttgtggatt

SEQ ID NO: 213630 - DNA, 13 bp, Artificial Sequence
  Oligonucleotide for detection of SNP TSC0052019
aatccacaaacaa

SEQ ID NO: 213631 - DNA, 13 bp, Artificial Sequence
  Oligonucleotide for detection of SNP TSC0052019
ttgttcgtggatt

SEQ ID NO: 213632 - DNA, 13 bp, Artificial Sequence
  Oligonucleotide for detection of SNP TSC0052019
aatccacgaacaa

SEQ ID NO: 213633 - DNA, 13 bp, Artificial Sequence
  Oligonucleotide for detection of SNP TSC0052019
agtttacggatag

SEQ ID NO: 213634 - DNA, 13 bp, Artificial Sequence
  Oligonucleotide for detection of SNP TSC0052019
ctatccgtaaact

SEQ ID NO: 213635 - DNA, 13 bp, Artificial Sequence
  Oligonucleotide for detection of SNP TSC0052020
tgaggtaggaggg

SEQ ID NO: 213636 - DNA, 13 bp, Artificial Sequence
  Oligonucleotide for detection of SNP TSC0052020
ccctcctacctca

SEQ ID NO: 213637 - DNA, 13 bp, Artificial Sequence
  Oligonucleotide for detection of SNP TSC0052020
tgaggtgggaggg

SEQ ID NO: 213638 - DNA, 13 bp, Artificial Sequence
  Oligonucleotide for detection of SNP TSC0052020
ccctcccacctca

SEQ ID NO: 213639 - DNA, 13 bp, Artificial Sequence
  Oligonucleotide for detection of SNP TSC0052021
tgtttatgtgaty

SEQ ID NO: 213640 - DNA, 13 bp, Artificial Sequence
  Oligonucleotide for detection of SNP TSC0052021
ratcacataaaca

SEQ ID NO: 213641 - DNA, 13 bp, Artificial Sequence
  Oligonucleotide for detection of SNP TSC0052021
tgtttacgtgaty

SEQ ID NO: 213642 - DNA, 13 bp, Artificial Sequence
  Oligonucleotide for detection of SNP TSC0052021
ratcacgtaaaca

SEQ ID NO: 213643 - DNA, 13 bp, Artificial Sequence
  Oligonucleotide for detection of SNP TSC0052021
gattatgtggata

SEQ ID NO: 213644 - DNA, 13 bp, Artificial Sequence
  Oligonucleotide for detection of SNP TSC0052021
tatccacataatc

SEQ ID NO: 213645 - DNA, 13 bp, Artificial Sequence
  Oligonucleotide for detection of SNP TSC0052021
gattatatggata

SEQ ID NO: 213646 - DNA, 13 bp, Artificial Sequence
  Oligonucleotide for detection of SNP TSC0052021
tatccatataatc

SEQ ID NO: 213647 - DNA, 13 bp, Artificial Sequence
  Oligonucleotide for detection of SNP TSC0052021
gattacgtggata

SEQ ID NO: 213648 - DNA, 13 bp, Artificial Sequence
  Oligonucleotide for detection of SNP TSC0052021
tatccacgtaatc

SEQ ID NO: 213649 - DNA, 13 bp, Artificial Sequence
  Oligonucleotide for detection of SNP TSC0052022
gtattgggagatt

SEQ ID NO: 213650 - DNA, 13 bp, Artificial Sequence
  Oligonucleotide for detection of SNP TSC0052022
aatctcccaatac

SEQ ID NO: 213651 - DNA, 13 bp, Artificial Sequence
  Oligonucleotide for detection of SNP TSC0052022
gtattgagagatt

SEQ ID NO: 213652 - DNA, 13 bp, Artificial Sequence
  Oligonucleotide for detection of SNP TSC0052022
aatctctcaatac

SEQ ID NO: 213653 - DNA, 13 bp, Artificial Sequence
  Oligonucleotide for detection of SNP TSC0052023
tttataaaaaaat

SEQ ID NO: 213654 - DNA, 13 bp, Artificial Sequence
  Oligonucleotide for detection of SNP TSC0052023
atttttttataaa

SEQ ID NO: 213655 - DNA, 13 bp, Artificial Sequence
  Oligonucleotide for detection of SNP TSC0052023
tttatagaaaaat

SEQ ID NO: 213656 - DNA, 13 bp, Artificial Sequence
  Oligonucleotide for detection of SNP TSC0052023
atttttctataaa

SEQ ID NO: 213657 - DNA, 13 bp, Artificial Sequence
  Oligonucleotide for detection of SNP TSC0052024
tggtttatgtgty

SEQ ID NO: 213658 - DNA, 13 bp, Artificial Sequence
  Oligonucleotide for detection of SNP TSC0052024
racacataaacca

SEQ ID NO: 213659 - DNA, 13 bp, Artificial Sequence
  Oligonucleotide for detection of SNP TSC0052024
tggtttgtgtgty

SEQ ID NO: 213660 - DNA, 13 bp, Artificial Sequence
  Oligonucleotide for detection of SNP TSC0052024
racacacaaacca

SEQ ID NO: 213661 - DNA, 13 bp, Artificial Sequence
  Oligonucleotide for detection of SNP TSC0052025
tattaatggttga

SEQ ID NO: 213662 - DNA, 13 bp, Artificial Sequence
  Oligonucleotide for detection of SNP TSC0052025
tcaaccattaata

SEQ ID NO: 213663 - DNA, 13 bp, Artificial Sequence
  Oligonucleotide for detection of SNP TSC0052025
tattaacggttga

SEQ ID NO: 213664 - DNA, 13 bp, Artificial Sequence
  Oligonucleotide for detection of SNP TSC0052025
tcaaccgttaata

SEQ ID NO: 213665 - DNA, 13 bp, Artificial Sequence
  Oligonucleotide for detection of SNP TSC0052025
ttaattgttgata

SEQ ID NO: 213666 - DNA, 13 bp, Artificial Sequence
  Oligonucleotide for detection of SNP TSC0052025
tatcaacaattaa

SEQ ID NO: 213667 - DNA, 13 bp, Artificial Sequence
  Oligonucleotide for detection of SNP TSC0052025
ttaattattgata

SEQ ID NO: 213668 - DNA, 13 bp, Artificial Sequence
  Oligonucleotide for detection of SNP TSC0052025
tatcaataattaa

SEQ ID NO: 213669 - DNA, 13 bp, Artificial Sequence
  Oligonucleotide for detection of SNP TSC0052025
ttaatcgttgata

SEQ ID NO: 213670 - DNA, 13 bp, Artificial Sequence
  Oligonucleotide for detection of SNP TSC0052025
tatcaacgattaa

SEQ ID NO: 213671 - DNA, 13 bp, Artificial Sequence
  Oligonucleotide for detection of SNP TSC0052026
atagaagagagaa

SEQ ID NO: 213672 - DNA, 13 bp, Artificial Sequence
  Oligonucleotide for detection of SNP TSC0052026
ttctctcttctat

SEQ ID NO: 213673 - DNA, 13 bp, Artificial Sequence
  Oligonucleotide for detection of SNP TSC0052026
atagaaaagagaa

SEQ ID NO: 213674 - DNA, 13 bp, Artificial Sequence
  Oligonucleotide for detection of SNP TSC0052026
ttctcttttctat

SEQ ID NO: 213675 - DNA, 13 bp, Artificial Sequence
  Oligonucleotide for detection of SNP TSC0052027
ttaggagtattta

SEQ ID NO: 213676 - DNA, 13 bp, Artificial Sequence
  Oligonucleotide for detection of SNP TSC0052027
taaatactcctaa

SEQ ID NO: 213677 - DNA, 13 bp, Artificial Sequence
  Oligonucleotide for detection of SNP TSC0052027
ttaggaatattta

SEQ ID NO: 213678 - DNA, 13 bp, Artificial Sequence
  Oligonucleotide for detection of SNP TSC0052027
taaatattcctaa

SEQ ID NO: 213679 - DNA, 13 bp, Artificial Sequence
  Oligonucleotide for detection of SNP TSC0052028
ttagaataggaga

SEQ ID NO: 213680 - DNA, 13 bp, Artificial Sequence
  Oligonucleotide for detection of SNP TSC0052028
tctcctattctaa

SEQ ID NO: 213681 - DNA, 13 bp, Artificial Sequence
  Oligonucleotide for detection of SNP TSC0052028
ttagaagaggaga

SEQ ID NO: 213682 - DNA, 13 bp, Artificial Sequence
  Oligonucleotide for detection of SNP TSC0052028
tctcctcttctaa

SEQ ID NO: 213683 - DNA, 13 bp, Artificial Sequence
  Oligonucleotide for detection of SNP TSC0052029
tattttgtaaagy

SEQ ID NO: 213684 - DNA, 13 bp, Artificial Sequence
  Oligonucleotide for detection of SNP TSC0052029
rctttacaaaata

SEQ ID NO: 213685 - DNA, 13 bp, Artificial Sequence
  Oligonucleotide for detection of SNP TSC0052029
gttttagaaaatg

SEQ ID NO: 213686 - DNA, 13 bp, Artificial Sequence
  Oligonucleotide for detection of SNP TSC0052029
cattttctaaaac

SEQ ID NO: 213687 - DNA, 13 bp, Artificial Sequence
  Oligonucleotide for detection of SNP TSC0052029
gttttaaaaaatg

SEQ ID NO: 213688 - DNA, 13 bp, Artificial Sequence
  Oligonucleotide for detection of SNP TSC0052029
cattttttaaaac

SEQ ID NO: 213689 - DNA, 13 bp, Artificial Sequence
  Oligonucleotide for detection of SNP TSC0052029
gttttataaaatg

SEQ ID NO: 213690 - DNA, 13 bp, Artificial Sequence
  Oligonucleotide for detection of SNP TSC0052029
cattttataaaac

SEQ ID NO: 213691 - DNA, 13 bp, Artificial Sequence
  Oligonucleotide for detection of SNP TSC0052030
attttaggatttg

SEQ ID NO: 213692 - DNA, 13 bp, Artificial Sequence
  Oligonucleotide for detection of SNP TSC0052030
caaatcctaaaat

SEQ ID NO: 213693 - DNA, 13 bp, Artificial Sequence
  Oligonucleotide for detection of SNP TSC0052030
attttaggattcg

SEQ ID NO: 213694 - DNA, 13 bp, Artificial Sequence
  Oligonucleotide for detection of SNP TSC0052030
cgaatcctaaaat

SEQ ID NO: 213695 - DNA, 13 bp, Artificial Sequence
  Oligonucleotide for detection of SNP TSC0052030
tgagttataaaat

SEQ ID NO: 213696 - DNA, 13 bp, Artificial Sequence
  Oligonucleotide for detection of SNP TSC0052030
attttataactca

SEQ ID NO: 213697 - DNA, 13 bp, Artificial Sequence
  Oligonucleotide for detection of SNP TSC0052030
tgagttttaaaat

SEQ ID NO: 213698 - DNA, 13 bp, Artificial Sequence
  Oligonucleotide for detection of SNP TSC0052030
attttaaaactca

SEQ ID NO: 213699 - DNA, 13 bp, Artificial Sequence
  Oligonucleotide for detection of SNP TSC0052030
cgagttataaaat

SEQ ID NO: 213700 - DNA, 13 bp, Artificial Sequence
  Oligonucleotide for detection of SNP TSC0052030
attttataactcg

SEQ ID NO: 213701 - DNA, 13 bp, Artificial Sequence
  Oligonucleotide for detection of SNP TSC0052030
cgagttttaaaat

SEQ ID NO: 213702 - DNA, 13 bp, Artificial Sequence
  Oligonucleotide for detection of SNP TSC0052030
attttaaaactcg

SEQ ID NO: 213703 - DNA, 13 bp, Artificial Sequence
  Oligonucleotide for detection of SNP TSC0006977
gttttgtggaatt

SEQ ID NO: 213704 - DNA, 13 bp, Artificial Sequence
  Oligonucleotide for detection of SNP TSC0006977
aattccacaaaac

SEQ ID NO: 213705 - DNA, 13 bp, Artificial Sequence
  Oligonucleotide for detection of SNP TSC0006977
gttttggggaatt

SEQ ID NO: 213706 - DNA, 13 bp, Artificial Sequence
  Oligonucleotide for detection of SNP TSC0006977
aattccccaaaac

SEQ ID NO: 213707 - DNA, 13 bp, Artificial Sequence
  Oligonucleotide for detection of SNP TSC0006977
aattttatagaay

SEQ ID NO: 213708 - DNA, 13 bp, Artificial Sequence
  Oligonucleotide for detection of SNP TSC0006977
rttctataaaatt

SEQ ID NO: 213709 - DNA, 13 bp, Artificial Sequence
  Oligonucleotide for detection of SNP TSC0006977
aattttttagaay

SEQ ID NO: 213710 - DNA, 13 bp, Artificial Sequence
  Oligonucleotide for detection of SNP TSC0006977
rttctaaaaaatt

SEQ ID NO: 213711 - DNA, 13 bp, Artificial Sequence
  Oligonucleotide for detection of SNP TSC0052031
tatttattttttg

SEQ ID NO: 213712 - DNA, 13 bp, Artificial Sequence
  Oligonucleotide for detection of SNP TSC0052031
caaaaaataaata

SEQ ID NO: 213713 - DNA, 13 bp, Artificial Sequence
  Oligonucleotide for detection of SNP TSC0052031
taaaaagtaaata

SEQ ID NO: 213714 - DNA, 13 bp, Artificial Sequence
  Oligonucleotide for detection of SNP TSC0052031
tatttacttttta

SEQ ID NO: 213715 - DNA, 13 bp, Artificial Sequence
  Oligonucleotide for detection of SNP TSC0001139
tattaaaaatatt

SEQ ID NO: 213716 - DNA, 13 bp, Artificial Sequence
  Oligonucleotide for detection of SNP TSC0001139
aatatttttaata

SEQ ID NO: 213717 - DNA, 13 bp, Artificial Sequence
  Oligonucleotide for detection of SNP TSC0001139
tattaataatatt

SEQ ID NO: 213718 - DNA, 13 bp, Artificial Sequence
  Oligonucleotide for detection of SNP TSC0001139
aatattattaata

SEQ ID NO: 213719 - DNA, 13 bp, Artificial Sequence
  Oligonucleotide for detection of SNP TSC0001139
aatatttttgata

SEQ ID NO: 213720 - DNA, 13 bp, Artificial Sequence
  Oligonucleotide for detection of SNP TSC0001139
tatcaaaaatatt

SEQ ID NO: 213721 - DNA, 13 bp, Artificial Sequence
  Oligonucleotide for detection of SNP TSC0001139
aatattattgata

SEQ ID NO: 213722 - DNA, 13 bp, Artificial Sequence
  Oligonucleotide for detection of SNP TSC0001139
tatcaataatatt

SEQ ID NO: 213723 - DNA, 13 bp, Artificial Sequence
  Oligonucleotide for detection of SNP TSC0001140
taaatggttttaa

SEQ ID NO: 213724 - DNA, 13 bp, Artificial Sequence
  Oligonucleotide for detection of SNP TSC0001140
ttaaaaccattta

SEQ ID NO: 213725 - DNA, 13 bp, Artificial Sequence
  Oligonucleotide for detection of SNP TSC0001140
taaatgattttaa

SEQ ID NO: 213726 - DNA, 13 bp, Artificial Sequence
  Oligonucleotide for detection of SNP TSC0001140
ttaaaatcattta

SEQ ID NO: 213727 - DNA, 13 bp, Artificial Sequence
  Oligonucleotide for detection of SNP TSC0007073
ttatgaagattaa

SEQ ID NO: 213728 - DNA, 13 bp, Artificial Sequence
  Oligonucleotide for detection of SNP TSC0007073
ttaatcttcataa

SEQ ID NO: 213729 - DNA, 13 bp, Artificial Sequence
  Oligonucleotide for detection of SNP TSC0007073
ttatgatgattaa

SEQ ID NO: 213730 - DNA, 13 bp, Artificial Sequence
  Oligonucleotide for detection of SNP TSC0007073
ttaatcatcataa

SEQ ID NO: 213731 - DNA, 13 bp, Artificial Sequence
  Oligonucleotide for detection of SNP TSC0007073
ttatgacgattaa

SEQ ID NO: 213732 - DNA, 13 bp, Artificial Sequence
  Oligonucleotide for detection of SNP TSC0007073
ttaatcgtcataa

SEQ ID NO: 213733 - DNA, 13 bp, Artificial Sequence
  Oligonucleotide for detection of SNP TSC0007073
ttaatttttataa

SEQ ID NO: 213734 - DNA, 13 bp, Artificial Sequence
  Oligonucleotide for detection of SNP TSC0007073
ttataaaaattaa

SEQ ID NO: 213735 - DNA, 13 bp, Artificial Sequence
  Oligonucleotide for detection of SNP TSC0007074
gggtatgtagttg

SEQ ID NO: 213736 - DNA, 13 bp, Artificial Sequence
  Oligonucleotide for detection of SNP TSC0007074
caactacataccc

SEQ ID NO: 213737 - DNA, 13 bp, Artificial Sequence
  Oligonucleotide for detection of SNP TSC0007074
gggtatatagttg

SEQ ID NO: 213738 - DNA, 13 bp, Artificial Sequence
  Oligonucleotide for detection of SNP TSC0007074
caactatataccc

SEQ ID NO: 213739 - DNA, 13 bp, Artificial Sequence
  Oligonucleotide for detection of SNP TSC0007074
gggtacgtagttg

SEQ ID NO: 213740 - DNA, 13 bp, Artificial Sequence
  Oligonucleotide for detection of SNP TSC0007074
caactacgtaccc

SEQ ID NO: 213741 - DNA, 13 bp, Artificial Sequence
  Oligonucleotide for detection of SNP TSC0005588
atatagtgagata

SEQ ID NO: 213742 - DNA, 13 bp, Artificial Sequence
  Oligonucleotide for detection of SNP TSC0005588
tatctcactatat

SEQ ID NO: 213743 - DNA, 13 bp, Artificial Sequence
  Oligonucleotide for detection of SNP TSC0005588
atatagcgagata

SEQ ID NO: 213744 - DNA, 13 bp, Artificial Sequence
  Oligonucleotide for detection of SNP TSC0005588
tatctcgctatat

SEQ ID NO: 213745 - DNA, 13 bp, Artificial Sequence
  Oligonucleotide for detection of SNP TSC0005588
tattttgttgtat

SEQ ID NO: 213746 - DNA, 13 bp, Artificial Sequence
  Oligonucleotide for detection of SNP TSC0005588
atacaacaaaata

SEQ ID NO: 213747 - DNA, 13 bp, Artificial Sequence
  Oligonucleotide for detection of SNP TSC0005588
tattttattgtat

SEQ ID NO: 213748 - DNA, 13 bp, Artificial Sequence
  Oligonucleotide for detection of SNP TSC0005588
atacaataaaata

SEQ ID NO: 213749 - DNA, 13 bp, Artificial Sequence
  Oligonucleotide for detection of SNP TSC0005588
tatttcgttgtat

SEQ ID NO: 213750 - DNA, 13 bp, Artificial Sequence
  Oligonucleotide for detection of SNP TSC0005588
atacaacgaaata

SEQ ID NO: 213751 - DNA, 13 bp, Artificial Sequence
  Oligonucleotide for detection of SNP TSC0052036
agattaggagagt

SEQ ID NO: 213752 - DNA, 13 bp, Artificial Sequence
  Oligonucleotide for detection of SNP TSC0052036
actctcctaatct

SEQ ID NO: 213753 - DNA, 13 bp, Artificial Sequence
  Oligonucleotide for detection of SNP TSC0052036
agattaagagagt

SEQ ID NO: 213754 - DNA, 13 bp, Artificial Sequence
  Oligonucleotide for detection of SNP TSC0052036
actctcttaatct

SEQ ID NO: 213755 - DNA, 13 bp, Artificial Sequence
  Oligonucleotide for detection of SNP TSC0052037
ttatattatggag

SEQ ID NO: 213756 - DNA, 13 bp, Artificial Sequence
  Oligonucleotide for detection of SNP TSC0052037
ctccataatataa

SEQ ID NO: 213757 - DNA, 13 bp, Artificial Sequence
  Oligonucleotide for detection of SNP TSC0052037
ttatatgatggag

SEQ ID NO: 213758 - DNA, 13 bp, Artificial Sequence
  Oligonucleotide for detection of SNP TSC0052037
ctccatcatataa

SEQ ID NO: 213759 - DNA, 13 bp, Artificial Sequence
  Oligonucleotide for detection of SNP TSC0052037
ttttatgatgtgg

SEQ ID NO: 213760 - DNA, 13 bp, Artificial Sequence
  Oligonucleotide for detection of SNP TSC0052037
ccacatcataaaa

SEQ ID NO: 213761 - DNA, 13 bp, Artificial Sequence
  Oligonucleotide for detection of SNP TSC0052037
ttttattatgtgg

SEQ ID NO: 213762 - DNA, 13 bp, Artificial Sequence
  Oligonucleotide for detection of SNP TSC0052037
ccacataataaaa

SEQ ID NO: 213763 - DNA, 13 bp, Artificial Sequence
  Oligonucleotide for detection of SNP TSC0052038
agtgtagttttta

SEQ ID NO: 213764 - DNA, 13 bp, Artificial Sequence
  Oligonucleotide for detection of SNP TSC0052038
taaaaactacact

SEQ ID NO: 213765 - DNA, 13 bp, Artificial Sequence
  Oligonucleotide for detection of SNP TSC0052038
agtgtaattttta

SEQ ID NO: 213766 - DNA, 13 bp, Artificial Sequence
  Oligonucleotide for detection of SNP TSC0052038
taaaaattacact

SEQ ID NO: 213767 - DNA, 13 bp, Artificial Sequence
  Oligonucleotide for detection of SNP TSC0052039
attttaaaaatta

SEQ ID NO: 213768 - DNA, 13 bp, Artificial Sequence
  Oligonucleotide for detection of SNP TSC0052039
taatttttaaaat

SEQ ID NO: 213769 - DNA, 13 bp, Artificial Sequence
  Oligonucleotide for detection of SNP TSC0052039
attttagaaatta

SEQ ID NO: 213770 - DNA, 13 bp, Artificial Sequence
  Oligonucleotide for detection of SNP TSC0052039
taatttctaaaat

SEQ ID NO: 213771 - DNA, 13 bp, Artificial Sequence
  Oligonucleotide for detection of SNP TSC0052040
tgtaaagtatgta

SEQ ID NO: 213772 - DNA, 13 bp, Artificial Sequence
  Oligonucleotide for detection of SNP TSC0052040
tacatactttaca

SEQ ID NO: 213773 - DNA, 13 bp, Artificial Sequence
  Oligonucleotide for detection of SNP TSC0052040
tgtaaaatatgta

SEQ ID NO: 213774 - DNA, 13 bp, Artificial Sequence
  Oligonucleotide for detection of SNP TSC0052040
tacatattttaca

SEQ ID NO: 213775 - DNA, 13 bp, Artificial Sequence
  Oligonucleotide for detection of SNP TSC0052042
atattttgtttty

SEQ ID NO: 213776 - DNA, 13 bp, Artificial Sequence
  Oligonucleotide for detection of SNP TSC0052042
raaaacaaaatat

SEQ ID NO: 213777 - DNA, 13 bp, Artificial Sequence
  Oligonucleotide for detection of SNP TSC0052042
atatttcgtttty

SEQ ID NO: 213778 - DNA, 13 bp, Artificial Sequence
  Oligonucleotide for detection of SNP TSC0052042
raaaacgaaatat

SEQ ID NO: 213779 - DNA, 13 bp, Artificial Sequence
  Oligonucleotide for detection of SNP TSC0052042
gaaggtggaatgt

SEQ ID NO: 213780 - DNA, 13 bp, Artificial Sequence
  Oligonucleotide for detection of SNP TSC0052042
acattccaccttc

SEQ ID NO: 213781 - DNA, 13 bp, Artificial Sequence
  Oligonucleotide for detection of SNP TSC0052042
gaaggtagaatgt

SEQ ID NO: 213782 - DNA, 13 bp, Artificial Sequence
  Oligonucleotide for detection of SNP TSC0052042
acattctaccttc

SEQ ID NO: 213783 - DNA, 13 bp, Artificial Sequence
  Oligonucleotide for detection of SNP TSC0052042
gaaggcggaatgt

SEQ ID NO: 213784 - DNA, 13 bp, Artificial Sequence
  Oligonucleotide for detection of SNP TSC0052042
acattccgccttc

SEQ ID NO: 213785 - DNA, 13 bp, Artificial Sequence
  Oligonucleotide for detection of SNP TSC0052043
ttaagaagttttt

SEQ ID NO: 213786 - DNA, 13 bp, Artificial Sequence
  Oligonucleotide for detection of SNP TSC0052043
aaaaacttcttaa

SEQ ID NO: 213787 - DNA, 13 bp, Artificial Sequence
  Oligonucleotide for detection of SNP TSC0052043
ttaagatgttttt

SEQ ID NO: 213788 - DNA, 13 bp, Artificial Sequence
  Oligonucleotide for detection of SNP TSC0052043
aaaaacatcttaa

SEQ ID NO: 213789 - DNA, 13 bp, Artificial Sequence
  Oligonucleotide for detection of SNP TSC0052044
ttgaagaagaata

SEQ ID NO: 213790 - DNA, 13 bp, Artificial Sequence
  Oligonucleotide for detection of SNP TSC0052044
tattcttcttcaa

SEQ ID NO: 213791 - DNA, 13 bp, Artificial Sequence
  Oligonucleotide for detection of SNP TSC0052044
ttgaagtagaata

SEQ ID NO: 213792 - DNA, 13 bp, Artificial Sequence
  Oligonucleotide for detection of SNP TSC0052044
tattctacttcaa

SEQ ID NO: 213793 - DNA, 13 bp, Artificial Sequence
  Oligonucleotide for detection of SNP TSC0052045
aaaataagtaaat

SEQ ID NO: 213794 - DNA, 13 bp, Artificial Sequence
  Oligonucleotide for detection of SNP TSC0052045
atttacttatttt

SEQ ID NO: 213795 - DNA, 13 bp, Artificial Sequence
  Oligonucleotide for detection of SNP TSC0052046
ggtggtgtatagg

SEQ ID NO: 213796 - DNA, 13 bp, Artificial Sequence
  Oligonucleotide for detection of SNP TSC0052046
cctatacaccacc

SEQ ID NO: 213797 - DNA, 13 bp, Artificial Sequence
  Oligonucleotide for detection of SNP TSC0052046
ggtggtatatagg

SEQ ID NO: 213798 - DNA, 13 bp, Artificial Sequence
  Oligonucleotide for detection of SNP TSC0052046
cctatataccacc

SEQ ID NO: 213799 - DNA, 13 bp, Artificial Sequence
  Oligonucleotide for detection of SNP TSC0052048
tttagtattgtga

SEQ ID NO: 213800 - DNA, 13 bp, Artificial Sequence
  Oligonucleotide for detection of SNP TSC0052048
tcacaatactaaa

SEQ ID NO: 213801 - DNA, 13 bp, Artificial Sequence
  Oligonucleotide for detection of SNP TSC0052048
tttagttttgtga

SEQ ID NO: 213802 - DNA, 13 bp, Artificial Sequence
  Oligonucleotide for detection of SNP TSC0052048
tcacaaaactaaa

SEQ ID NO: 213803 - DNA, 13 bp, Artificial Sequence
  Oligonucleotide for detection of SNP TSC0052048
ttataatgttaag

SEQ ID NO: 213804 - DNA, 13 bp, Artificial Sequence
  Oligonucleotide for detection of SNP TSC0052048
cttaacattataa

SEQ ID NO: 213805 - DNA, 13 bp, Artificial Sequence
  Oligonucleotide for detection of SNP TSC0052049
atggttgagtaaa

SEQ ID NO: 213806 - DNA, 13 bp, Artificial Sequence
  Oligonucleotide for detection of SNP TSC0052049
tttactcaaccat

SEQ ID NO: 213807 - DNA, 13 bp, Artificial Sequence
  Oligonucleotide for detection of SNP TSC0052049
atggttaagtaaa

SEQ ID NO: 213808 - DNA, 13 bp, Artificial Sequence
  Oligonucleotide for detection of SNP TSC0052049
tttacttaaccat

SEQ ID NO: 213809 - DNA, 13 bp, Artificial Sequence
  Oligonucleotide for detection of SNP TSC0052049
atggtcgagtaaa

SEQ ID NO: 213810 - DNA, 13 bp, Artificial Sequence
  Oligonucleotide for detection of SNP TSC0052049
tttactcgaccat

SEQ ID NO: 213811 - DNA, 13 bp, Artificial Sequence
  Oligonucleotide for detection of SNP TSC0052050
atgttgtaaaagt

SEQ ID NO: 213812 - DNA, 13 bp, Artificial Sequence
  Oligonucleotide for detection of SNP TSC0052050
acttttacaacat

SEQ ID NO: 213813 - DNA, 13 bp, Artificial Sequence
  Oligonucleotide for detection of SNP TSC0052050
atgttggaaaagt

SEQ ID NO: 213814 - DNA, 13 bp, Artificial Sequence
  Oligonucleotide for detection of SNP TSC0052050
acttttccaacat

SEQ ID NO: 213815 - DNA, 13 bp, Artificial Sequence
  Oligonucleotide for detection of SNP TSC0052050
atttttgtagtat

SEQ ID NO: 213816 - DNA, 13 bp, Artificial Sequence
  Oligonucleotide for detection of SNP TSC0052050
atactacaaaaat

SEQ ID NO: 213817 - DNA, 13 bp, Artificial Sequence
  Oligonucleotide for detection of SNP TSC0052050
atttttttagtat

SEQ ID NO: 213818 - DNA, 13 bp, Artificial Sequence
  Oligonucleotide for detection of SNP TSC0052050
atactaaaaaaat

SEQ ID NO: 213819 - DNA, 13 bp, Artificial Sequence
  Oligonucleotide for detection of SNP TSC0052051
agtagaaataaat

SEQ ID NO: 213820 - DNA, 13 bp, Artificial Sequence
  Oligonucleotide for detection of SNP TSC0052051
atttatttctact

SEQ ID NO: 213821 - DNA, 13 bp, Artificial Sequence
  Oligonucleotide for detection of SNP TSC0052051
agtagatataaat

SEQ ID NO: 213822 - DNA, 13 bp, Artificial Sequence
  Oligonucleotide for detection of SNP TSC0052051
atttatatctact

SEQ ID NO: 213823 - DNA, 13 bp, Artificial Sequence
  Oligonucleotide for detection of SNP TSC0052051
atttatttttatt

SEQ ID NO: 213824 - DNA, 13 bp, Artificial Sequence
  Oligonucleotide for detection of SNP TSC0052051
aataaaaataaat

SEQ ID NO: 213825 - DNA, 13 bp, Artificial Sequence
  Oligonucleotide for detection of SNP TSC0052053
gggaaagagggaa

SEQ ID NO: 213826 - DNA, 13 bp, Artificial Sequence
  Oligonucleotide for detection of SNP TSC0052053
ttccctctttccc

SEQ ID NO: 213827 - DNA, 13 bp, Artificial Sequence
  Oligonucleotide for detection of SNP TSC0052053
gggaaaaagggaa

SEQ ID NO: 213828 - DNA, 13 bp, Artificial Sequence
  Oligonucleotide for detection of SNP TSC0052053
ttccctttttccc

SEQ ID NO: 213829 - DNA, 13 bp, Artificial Sequence
  Oligonucleotide for detection of SNP TSC0052055
ggtttggtgttgy

SEQ ID NO: 213830 - DNA, 13 bp, Artificial Sequence
  Oligonucleotide for detection of SNP TSC0052055
rcaacaccaaacc

SEQ ID NO: 213831 - DNA, 13 bp, Artificial Sequence
  Oligonucleotide for detection of SNP TSC0052055
ggtttgatgttgy

SEQ ID NO: 213832 - DNA, 13 bp, Artificial Sequence
  Oligonucleotide for detection of SNP TSC0052055
rcaacatcaaacc

SEQ ID NO: 213833 - DNA, 13 bp, Artificial Sequence
  Oligonucleotide for detection of SNP TSC0052056
agatagagattag

SEQ ID NO: 213834 - DNA, 13 bp, Artificial Sequence
  Oligonucleotide for detection of SNP TSC0052056
ctaatctctatct

SEQ ID NO: 213835 - DNA, 13 bp, Artificial Sequence
  Oligonucleotide for detection of SNP TSC0052056
agatagggattag

SEQ ID NO: 213836 - DNA, 13 bp, Artificial Sequence
  Oligonucleotide for detection of SNP TSC0052056
ctaatccctatct

SEQ ID NO: 213837 - DNA, 13 bp, Artificial Sequence
  Oligonucleotide for detection of SNP TSC0052057
gtaattgttttay

SEQ ID NO: 213838 - DNA, 13 bp, Artificial Sequence
  Oligonucleotide for detection of SNP TSC0052057
rtaaaacaattac

SEQ ID NO: 213839 - DNA, 13 bp, Artificial Sequence
  Oligonucleotide for detection of SNP TSC0052057
gtaatcgttttay

SEQ ID NO: 213840 - DNA, 13 bp, Artificial Sequence
  Oligonucleotide for detection of SNP TSC0052057
rtaaaacgattac

SEQ ID NO: 213841 - DNA, 13 bp, Artificial Sequence
  Oligonucleotide for detection of SNP TSC0052057
gtgggaggattay

SEQ ID NO: 213842 - DNA, 13 bp, Artificial Sequence
  Oligonucleotide for detection of SNP TSC0052057
rtaatcctcccac

SEQ ID NO: 213843 - DNA, 13 bp, Artificial Sequence
  Oligonucleotide for detection of SNP TSC0052057
gtgggatgattay

SEQ ID NO: 213844 - DNA, 13 bp, Artificial Sequence
  Oligonucleotide for detection of SNP TSC0052057
rtaatcatcccac

SEQ ID NO: 213845 - DNA, 13 bp, Artificial Sequence
  Oligonucleotide for detection of SNP TSC0052057
gtgggacgattay

SEQ ID NO: 213846 - DNA, 13 bp, Artificial Sequence
  Oligonucleotide for detection of SNP TSC0052057
rtaatcgtcccac

SEQ ID NO: 213847 - DNA, 13 bp, Artificial Sequence
  Oligonucleotide for detection of SNP TSC0052058
ttatgatgtgttg

SEQ ID NO: 213848 - DNA, 13 bp, Artificial Sequence
  Oligonucleotide for detection of SNP TSC0052058
caacacatcataa

SEQ ID NO: 213849 - DNA, 13 bp, Artificial Sequence
  Oligonucleotide for detection of SNP TSC0052058
ttatgaggtgttg

SEQ ID NO: 213850 - DNA, 13 bp, Artificial Sequence
  Oligonucleotide for detection of SNP TSC0052058
caacacctcataa

SEQ ID NO: 213851 - DNA, 13 bp, Artificial Sequence
  Oligonucleotide for detection of SNP TSC0052058
taatattttataa

SEQ ID NO: 213852 - DNA, 13 bp, Artificial Sequence
  Oligonucleotide for detection of SNP TSC0052058
ttataaaatatta

SEQ ID NO: 213853 - DNA, 13 bp, Artificial Sequence
  Oligonucleotide for detection of SNP TSC0052059
gaaaatgatagta

SEQ ID NO: 213854 - DNA, 13 bp, Artificial Sequence
  Oligonucleotide for detection of SNP TSC0052059
tactatcattttc

SEQ ID NO: 213855 - DNA, 13 bp, Artificial Sequence
  Oligonucleotide for detection of SNP TSC0052059
gaaaataatagta

SEQ ID NO: 213856 - DNA, 13 bp, Artificial Sequence
  Oligonucleotide for detection of SNP TSC0052059
tactattattttc

SEQ ID NO: 213857 - DNA, 13 bp, Artificial Sequence
  Oligonucleotide for detection of SNP TSC0052060
taaggtattaaag

SEQ ID NO: 213858 - DNA, 13 bp, Artificial Sequence
  Oligonucleotide for detection of SNP TSC0052060
ctttaatacctta

SEQ ID NO: 213859 - DNA, 13 bp, Artificial Sequence
  Oligonucleotide for detection of SNP TSC0052060
taaggtgttaaag

SEQ ID NO: 213860 - DNA, 13 bp, Artificial Sequence
  Oligonucleotide for detection of SNP TSC0052060
ctttaacacctta

SEQ ID NO: 213861 - DNA, 13 bp, Artificial Sequence
  Oligonucleotide for detection of SNP TSC0052060
taaggcgttaaag

SEQ ID NO: 213862 - DNA, 13 bp, Artificial Sequence
  Oligonucleotide for detection of SNP TSC0052060
ctttaacgcctta

SEQ ID NO: 213863 - DNA, 13 bp, Artificial Sequence
  Oligonucleotide for detection of SNP TSC0006791
atatttattataa

SEQ ID NO: 213864 - DNA, 13 bp, Artificial Sequence
  Oligonucleotide for detection of SNP TSC0006791
ttataataaatat

SEQ ID NO: 213865 - DNA, 13 bp, Artificial Sequence
  Oligonucleotide for detection of SNP TSC0006791
atattttttataa

SEQ ID NO: 213866 - DNA, 13 bp, Artificial Sequence
  Oligonucleotide for detection of SNP TSC0006791
ttataaaaaatat

SEQ ID NO: 213867 - DNA, 13 bp, Artificial Sequence
  Oligonucleotide for detection of SNP TSC0006791
ttgtgatgagtat

SEQ ID NO: 213868 - DNA, 13 bp, Artificial Sequence
  Oligonucleotide for detection of SNP TSC0006791
atactcatcacaa

SEQ ID NO: 213869 - DNA, 13 bp, Artificial Sequence
  Oligonucleotide for detection of SNP TSC0006791
ttgtgaggagtat

SEQ ID NO: 213870 - DNA, 13 bp, Artificial Sequence
  Oligonucleotide for detection of SNP TSC0006791
atactcctcacaa

SEQ ID NO: 213871 - DNA, 13 bp, Artificial Sequence
  Oligonucleotide for detection of SNP TSC0006036
gttattattttaa

SEQ ID NO: 213872 - DNA, 13 bp, Artificial Sequence
  Oligonucleotide for detection of SNP TSC0006036
ttaaaataataac

SEQ ID NO: 213873 - DNA, 13 bp, Artificial Sequence
  Oligonucleotide for detection of SNP TSC0006036
gttattgttttaa

SEQ ID NO: 213874 - DNA, 13 bp, Artificial Sequence
  Oligonucleotide for detection of SNP TSC0006036
ttaaaacaataac

SEQ ID NO: 213875 - DNA, 13 bp, Artificial Sequence
  Oligonucleotide for detection of SNP TSC0006036
gttatcgttttaa

SEQ ID NO: 213876 - DNA, 13 bp, Artificial Sequence
  Oligonucleotide for detection of SNP TSC0006036
ttaaaacgataac

SEQ ID NO: 213877 - DNA, 13 bp, Artificial Sequence
  Oligonucleotide for detection of SNP TSC0006036
ttgaaatgatagy

SEQ ID NO: 213878 - DNA, 13 bp, Artificial Sequence
  Oligonucleotide for detection of SNP TSC0006036
rctatcatttcaa

SEQ ID NO: 213879 - DNA, 13 bp, Artificial Sequence
  Oligonucleotide for detection of SNP TSC0006036
ttgaaacgatagy

SEQ ID NO: 213880 - DNA, 13 bp, Artificial Sequence
  Oligonucleotide for detection of SNP TSC0006036
rctatcgtttcaa

SEQ ID NO: 213881 - DNA, 13 bp, Artificial Sequence
  Oligonucleotide for detection of SNP TSC0052061
aatgatatgaaag

SEQ ID NO: 213882 - DNA, 13 bp, Artificial Sequence
  Oligonucleotide for detection of SNP TSC0052061
ctttcatatcatt

SEQ ID NO: 213883 - DNA, 13 bp, Artificial Sequence
  Oligonucleotide for detection of SNP TSC0052061
aatgatgtgaaag

SEQ ID NO: 213884 - DNA, 13 bp, Artificial Sequence
  Oligonucleotide for detection of SNP TSC0052061
ctttcacatcatt

SEQ ID NO: 213885 - DNA, 13 bp, Artificial Sequence
  Oligonucleotide for detection of SNP TSC0052061
aatgacgtgaaag

SEQ ID NO: 213886 - DNA, 13 bp, Artificial Sequence
  Oligonucleotide for detection of SNP TSC0052061
ctttcacgtcatt

SEQ ID NO: 213887 - DNA, 13 bp, Artificial Sequence
  Oligonucleotide for detection of SNP TSC0006480
ggtaatgaaagta

SEQ ID NO: 213888 - DNA, 13 bp, Artificial Sequence
  Oligonucleotide for detection of SNP TSC0006480
tactttcattacc

SEQ ID NO: 213889 - DNA, 13 bp, Artificial Sequence
  Oligonucleotide for detection of SNP TSC0006480
ggtaataaaagta

SEQ ID NO: 213890 - DNA, 13 bp, Artificial Sequence
  Oligonucleotide for detection of SNP TSC0006480
tacttttattacc

SEQ ID NO: 213891 - DNA, 13 bp, Artificial Sequence
  Oligonucleotide for detection of SNP TSC0052064
tggaaattaagtg

SEQ ID NO: 213892 - DNA, 13 bp, Artificial Sequence
  Oligonucleotide for detection of SNP TSC0052064
cacttaatttcca

SEQ ID NO: 213893 - DNA, 13 bp, Artificial Sequence
  Oligonucleotide for detection of SNP TSC0052064
tggaaagtaagtg

SEQ ID NO: 213894 - DNA, 13 bp, Artificial Sequence
  Oligonucleotide for detection of SNP TSC0052064
cacttactttcca

SEQ ID NO: 213895 - DNA, 13 bp, Artificial Sequence
  Oligonucleotide for detection of SNP TSC0052065
tttaattggttag

SEQ ID NO: 213896 - DNA, 13 bp, Artificial Sequence
  Oligonucleotide for detection of SNP TSC0052065
ctaaccaattaaa

SEQ ID NO: 213897 - DNA, 13 bp, Artificial Sequence
  Oligonucleotide for detection of SNP TSC0052065
tttaatcggttag

SEQ ID NO: 213898 - DNA, 13 bp, Artificial Sequence
  Oligonucleotide for detection of SNP TSC0052065
ctaaccgattaaa

SEQ ID NO: 213899 - DNA, 13 bp, Artificial Sequence
  Oligonucleotide for detection of SNP TSC0052065
ttagttggttagg

SEQ ID NO: 213900 - DNA, 13 bp, Artificial Sequence
  Oligonucleotide for detection of SNP TSC0052065
cctaaccaactaa

SEQ ID NO: 213901 - DNA, 13 bp, Artificial Sequence
  Oligonucleotide for detection of SNP TSC0052065
ttagttagttagg

SEQ ID NO: 213902 - DNA, 13 bp, Artificial Sequence
  Oligonucleotide for detection of SNP TSC0052065
cctaactaactaa

SEQ ID NO: 213903 - DNA, 13 bp, Artificial Sequence
  Oligonucleotide for detection of SNP TSC0052065
ttagtcggttagg

SEQ ID NO: 213904 - DNA, 13 bp, Artificial Sequence
  Oligonucleotide for detection of SNP TSC0052065
cctaaccgactaa

SEQ ID NO: 213905 - DNA, 13 bp, Artificial Sequence
  Oligonucleotide for detection of SNP TSC0052066
tggaaatgtaggt

SEQ ID NO: 213906 - DNA, 13 bp, Artificial Sequence
  Oligonucleotide for detection of SNP TSC0052066
acctacatttcca

SEQ ID NO: 213907 - DNA, 13 bp, Artificial Sequence
  Oligonucleotide for detection of SNP TSC0052066
tggaaacgtaggt

SEQ ID NO: 213908 - DNA, 13 bp, Artificial Sequence
  Oligonucleotide for detection of SNP TSC0052066
acctacgtttcca

SEQ ID NO: 213909 - DNA, 13 bp, Artificial Sequence
  Oligonucleotide for detection of SNP TSC0052067
attagagaaataa

SEQ ID NO: 213910 - DNA, 13 bp, Artificial Sequence
  Oligonucleotide for detection of SNP TSC0052067
ttatttctctaat

SEQ ID NO: 213911 - DNA, 13 bp, Artificial Sequence
  Oligonucleotide for detection of SNP TSC0052067
attagaaaaataa

SEQ ID NO: 213912 - DNA, 13 bp, Artificial Sequence
  Oligonucleotide for detection of SNP TSC0052067
ttatttttctaat

SEQ ID NO: 213913 - DNA, 13 bp, Artificial Sequence
  Oligonucleotide for detection of SNP TSC0006629
aaaaaatgttgag

SEQ ID NO: 213914 - DNA, 13 bp, Artificial Sequence
  Oligonucleotide for detection of SNP TSC0006629
ctcaacatttttt

SEQ ID NO: 213915 - DNA, 13 bp, Artificial Sequence
  Oligonucleotide for detection of SNP TSC0006629
aaaaaaggttgag

SEQ ID NO: 213916 - DNA, 13 bp, Artificial Sequence
  Oligonucleotide for detection of SNP TSC0006629
ctcaacctttttt

SEQ ID NO: 213917 - DNA, 13 bp, Artificial Sequence
  Oligonucleotide for detection of SNP TSC0007326
ggatattttttta

SEQ ID NO: 213918 - DNA, 13 bp, Artificial Sequence
  Oligonucleotide for detection of SNP TSC0007326
taaaaaaatatcc

SEQ ID NO: 213919 - DNA, 13 bp, Artificial Sequence
  Oligonucleotide for detection of SNP TSC0007326
ggatatgttttta

SEQ ID NO: 213920 - DNA, 13 bp, Artificial Sequence
  Oligonucleotide for detection of SNP TSC0007326
taaaaacatatcc

SEQ ID NO: 213921 - DNA, 13 bp, Artificial Sequence
  Oligonucleotide for detection of SNP TSC0007326
taaaaggatgtty

SEQ ID NO: 213922 - DNA, 13 bp, Artificial Sequence
  Oligonucleotide for detection of SNP TSC0007326
raacatcctttta

SEQ ID NO: 213923 - DNA, 13 bp, Artificial Sequence
  Oligonucleotide for detection of SNP TSC0007326
taaaagtatgtty

SEQ ID NO: 213924 - DNA, 13 bp, Artificial Sequence
  Oligonucleotide for detection of SNP TSC0007326
raacatactttta

SEQ ID NO: 213925 - DNA, 13 bp, Artificial Sequence
  Oligonucleotide for detection of SNP TSC0052068
ttaaataggtggg

SEQ ID NO: 213926 - DNA, 13 bp, Artificial Sequence
  Oligonucleotide for detection of SNP TSC0052068
cccacctatttaa

SEQ ID NO: 213927 - DNA, 13 bp, Artificial Sequence
  Oligonucleotide for detection of SNP TSC0052068
ttaaatgggtggg

SEQ ID NO: 213928 - DNA, 13 bp, Artificial Sequence
  Oligonucleotide for detection of SNP TSC0052068
cccacccatttaa

SEQ ID NO: 213929 - DNA, 13 bp, Artificial Sequence
  Oligonucleotide for detection of SNP TSC0007245
atatatagtttay

SEQ ID NO: 213930 - DNA, 13 bp, Artificial Sequence
  Oligonucleotide for detection of SNP TSC0007245
rtaaactatatat

SEQ ID NO: 213931 - DNA, 13 bp, Artificial Sequence
  Oligonucleotide for detection of SNP TSC0007245
atatatggtttay

SEQ ID NO: 213932 - DNA, 13 bp, Artificial Sequence
  Oligonucleotide for detection of SNP TSC0007245
rtaaaccatatat

SEQ ID NO: 213933 - DNA, 13 bp, Artificial Sequence
  Oligonucleotide for detection of SNP TSC0007245
atatacggtttay

SEQ ID NO: 213934 - DNA, 13 bp, Artificial Sequence
  Oligonucleotide for detection of SNP TSC0007245
rtaaaccgtatat

SEQ ID NO: 213935 - DNA, 13 bp, Artificial Sequence
  Oligonucleotide for detection of SNP TSC0007245
gtgggttgtgtgt

SEQ ID NO: 213936 - DNA, 13 bp, Artificial Sequence
  Oligonucleotide for detection of SNP TSC0007245
acacacaacccac

SEQ ID NO: 213937 - DNA, 13 bp, Artificial Sequence
  Oligonucleotide for detection of SNP TSC0007245
gtgggtcgtgtgt

SEQ ID NO: 213938 - DNA, 13 bp, Artificial Sequence
  Oligonucleotide for detection of SNP TSC0007245
acacacgacccac

SEQ ID NO: 213939 - DNA, 13 bp, Artificial Sequence
  Oligonucleotide for detection of SNP TSC0006142
gggtaattgagat

SEQ ID NO: 213940 - DNA, 13 bp, Artificial Sequence
  Oligonucleotide for detection of SNP TSC0006142
atctcaattaccc

SEQ ID NO: 213941 - DNA, 13 bp, Artificial Sequence
  Oligonucleotide for detection of SNP TSC0006142
gggtaagtgagat

SEQ ID NO: 213942 - DNA, 13 bp, Artificial Sequence
  Oligonucleotide for detection of SNP TSC0006142
atctcacttaccc

SEQ ID NO: 213943 - DNA, 13 bp, Artificial Sequence
  Oligonucleotide for detection of SNP TSC0006142
gggtaaatgagat

SEQ ID NO: 213944 - DNA, 13 bp, Artificial Sequence
  Oligonucleotide for detection of SNP TSC0006142
atctcatttaccc

SEQ ID NO: 213945 - DNA, 13 bp, Artificial Sequence
  Oligonucleotide for detection of SNP TSC0052072
taagaaatataag

SEQ ID NO: 213946 - DNA, 13 bp, Artificial Sequence
  Oligonucleotide for detection of SNP TSC0052072
cttatatttctta

SEQ ID NO: 213947 - DNA, 13 bp, Artificial Sequence
  Oligonucleotide for detection of SNP TSC0052072
taagaagtataag

SEQ ID NO: 213948 - DNA, 13 bp, Artificial Sequence
  Oligonucleotide for detection of SNP TSC0052072
cttatacttctta

SEQ ID NO: 213949 - DNA, 13 bp, Artificial Sequence
  Oligonucleotide for detection of SNP TSC0052073
atattgagggttt

SEQ ID NO: 213950 - DNA, 13 bp, Artificial Sequence
  Oligonucleotide for detection of SNP TSC0052073
aaaccctcaatat

SEQ ID NO: 213951 - DNA, 13 bp, Artificial Sequence
  Oligonucleotide for detection of SNP TSC0052073
atattgggggttt

SEQ ID NO: 213952 - DNA, 13 bp, Artificial Sequence
  Oligonucleotide for detection of SNP TSC0052073
aaacccccaatat

SEQ ID NO: 213953 - DNA, 13 bp, Artificial Sequence
  Oligonucleotide for detection of SNP TSC0052074
gtggatagattay

SEQ ID NO: 213954 - DNA, 13 bp, Artificial Sequence
  Oligonucleotide for detection of SNP TSC0052074
rtaatctatccac

SEQ ID NO: 213955 - DNA, 13 bp, Artificial Sequence
  Oligonucleotide for detection of SNP TSC0052074
gtggatggattay

SEQ ID NO: 213956 - DNA, 13 bp, Artificial Sequence
  Oligonucleotide for detection of SNP TSC0052074
rtaatccatccac

SEQ ID NO: 213957 - DNA, 13 bp, Artificial Sequence
  Oligonucleotide for detection of SNP TSC0052074
gtggacggattay

SEQ ID NO: 213958 - DNA, 13 bp, Artificial Sequence
  Oligonucleotide for detection of SNP TSC0052074
rtaatccgtccac

SEQ ID NO: 213959 - DNA, 13 bp, Artificial Sequence
  Oligonucleotide for detection of SNP TSC0010753
tgataatgtattg

SEQ ID NO: 213960 - DNA, 13 bp, Artificial Sequence
  Oligonucleotide for detection of SNP TSC0010753
caatacattatca

SEQ ID NO: 213961 - DNA, 13 bp, Artificial Sequence
  Oligonucleotide for detection of SNP TSC0010753
tgataacgtattg

SEQ ID NO: 213962 - DNA, 13 bp, Artificial Sequence
  Oligonucleotide for detection of SNP TSC0010753
caatacgttatca

SEQ ID NO: 213963 - DNA, 13 bp, Artificial Sequence
  Oligonucleotide for detection of SNP TSC0010753
tagtgtgttatta

SEQ ID NO: 213964 - DNA, 13 bp, Artificial Sequence
  Oligonucleotide for detection of SNP TSC0010753
taataacacacta

SEQ ID NO: 213965 - DNA, 13 bp, Artificial Sequence
  Oligonucleotide for detection of SNP TSC0010753
tagtgtattatta

SEQ ID NO: 213966 - DNA, 13 bp, Artificial Sequence
  Oligonucleotide for detection of SNP TSC0010753
taataatacacta

SEQ ID NO: 213967 - DNA, 13 bp, Artificial Sequence
  Oligonucleotide for detection of SNP TSC0010753
tagtgcgttatta

SEQ ID NO: 213968 - DNA, 13 bp, Artificial Sequence
  Oligonucleotide for detection of SNP TSC0010753
taataacgcacta

SEQ ID NO: 213969 - DNA, 13 bp, Artificial Sequence
  Oligonucleotide for detection of SNP TSC0052075
gtatttatatttg

SEQ ID NO: 213970 - DNA, 13 bp, Artificial Sequence
  Oligonucleotide for detection of SNP TSC0052075
caaatataaatac

SEQ ID NO: 213971 - DNA, 13 bp, Artificial Sequence
  Oligonucleotide for detection of SNP TSC0052075
gtatttgtatttg

SEQ ID NO: 213972 - DNA, 13 bp, Artificial Sequence
  Oligonucleotide for detection of SNP TSC0052075
caaatacaaatac

SEQ ID NO: 213973 - DNA, 13 bp, Artificial Sequence
  Oligonucleotide for detection of SNP TSC0052075
gtattcgtatttg

SEQ ID NO: 213974 - DNA, 13 bp, Artificial Sequence
  Oligonucleotide for detection of SNP TSC0052075
caaatacgaatac

SEQ ID NO: 213975 - DNA, 13 bp, Artificial Sequence
  Oligonucleotide for detection of SNP TSC0052075
taaatatggatgy

SEQ ID NO: 213976 - DNA, 13 bp, Artificial Sequence
  Oligonucleotide for detection of SNP TSC0052075
rcatccatattta

SEQ ID NO: 213977 - DNA, 13 bp, Artificial Sequence
  Oligonucleotide for detection of SNP TSC0052075
taaatacggatgy

SEQ ID NO: 213978 - DNA, 13 bp, Artificial Sequence
  Oligonucleotide for detection of SNP TSC0052075
rcatccgtattta

SEQ ID NO: 213979 - DNA, 13 bp, Artificial Sequence
  Oligonucleotide for detection of SNP TSC0052076
attggttagaata

SEQ ID NO: 213980 - DNA, 13 bp, Artificial Sequence
  Oligonucleotide for detection of SNP TSC0052076
tattctaaccaat

SEQ ID NO: 213981 - DNA, 13 bp, Artificial Sequence
  Oligonucleotide for detection of SNP TSC0052076
attggtgagaata

SEQ ID NO: 213982 - DNA, 13 bp, Artificial Sequence
  Oligonucleotide for detection of SNP TSC0052076
tattctcaccaat

SEQ ID NO: 213983 - DNA, 13 bp, Artificial Sequence
  Oligonucleotide for detection of SNP TSC0052076
atcggttagaata

SEQ ID NO: 213984 - DNA, 13 bp, Artificial Sequence
  Oligonucleotide for detection of SNP TSC0052076
tattctaaccgat

SEQ ID NO: 213985 - DNA, 13 bp, Artificial Sequence
  Oligonucleotide for detection of SNP TSC0052076
atcggtgagaata

SEQ ID NO: 213986 - DNA, 13 bp, Artificial Sequence
  Oligonucleotide for detection of SNP TSC0052076
tattctcaccgat

SEQ ID NO: 213987 - DNA, 13 bp, Artificial Sequence
  Oligonucleotide for detection of SNP TSC0052076
tgttttgattgat

SEQ ID NO: 213988 - DNA, 13 bp, Artificial Sequence
  Oligonucleotide for detection of SNP TSC0052076
atcaatcaaaaca

SEQ ID NO: 213989 - DNA, 13 bp, Artificial Sequence
  Oligonucleotide for detection of SNP TSC0052076
tgtttttattgat

SEQ ID NO: 213990 - DNA, 13 bp, Artificial Sequence
  Oligonucleotide for detection of SNP TSC0052076
atcaataaaaaca

SEQ ID NO: 213991 - DNA, 13 bp, Artificial Sequence
  Oligonucleotide for detection of SNP TSC0052076
tgttttgatcgat

SEQ ID NO: 213992 - DNA, 13 bp, Artificial Sequence
  Oligonucleotide for detection of SNP TSC0052076
atcgatcaaaaca

SEQ ID NO: 213993 - DNA, 13 bp, Artificial Sequence
  Oligonucleotide for detection of SNP TSC0052076
tgtttttatcgat

SEQ ID NO: 213994 - DNA, 13 bp, Artificial Sequence
  Oligonucleotide for detection of SNP TSC0052076
atcgataaaaaca

SEQ ID NO: 213995 - DNA, 13 bp, Artificial Sequence
  Oligonucleotide for detection of SNP TSC0052081
gttgtttttattt

SEQ ID NO: 213996 - DNA, 13 bp, Artificial Sequence
  Oligonucleotide for detection of SNP TSC0052081
aaataaaaacaac

SEQ ID NO: 213997 - DNA, 13 bp, Artificial Sequence
  Oligonucleotide for detection of SNP TSC0052081
gtcgtttttattt

SEQ ID NO: 213998 - DNA, 13 bp, Artificial Sequence
  Oligonucleotide for detection of SNP TSC0052081
aaataaaaacgac

SEQ ID NO: 213999 - DNA, 13 bp, Artificial Sequence
  Oligonucleotide for detection of SNP TSC0052081
gtcgttgttattt

SEQ ID NO: 214000 - DNA, 13 bp, Artificial Sequence
  Oligonucleotide for detection of SNP TSC0052081
aaataacaacgac

SEQ ID NO: 214001 - DNA, 13 bp, Artificial Sequence
  Oligonucleotide for detection of SNP TSC0052081
aagtggaaatgay

SEQ ID NO: 214002 - DNA, 13 bp, Artificial Sequence
  Oligonucleotide for detection of SNP TSC0052081
rtcatttccactt

SEQ ID NO: 214003 - DNA, 13 bp, Artificial Sequence
  Oligonucleotide for detection of SNP TSC0052081
aagtggtaatgay

SEQ ID NO: 214004 - DNA, 13 bp, Artificial Sequence
  Oligonucleotide for detection of SNP TSC0052081
rtcattaccactt

SEQ ID NO: 214005 - DNA, 13 bp, Artificial Sequence
  Oligonucleotide for detection of SNP TSC0052081
aagtggaaacgay

SEQ ID NO: 214006 - DNA, 13 bp, Artificial Sequence
  Oligonucleotide for detection of SNP TSC0052081
rtcgtttccactt

SEQ ID NO: 214007 - DNA, 13 bp, Artificial Sequence
  Oligonucleotide for detection of SNP TSC0052081
aagtggtaacgay

SEQ ID NO: 214008 - DNA, 13 bp, Artificial Sequence
  Oligonucleotide for detection of SNP TSC0052081
rtcgttaccactt

SEQ ID NO: 214009 - DNA, 13 bp, Artificial Sequence
  Oligonucleotide for detection of SNP TSC0052083
tagtgtgatttgt

SEQ ID NO: 214010 - DNA, 13 bp, Artificial Sequence
  Oligonucleotide for detection of SNP TSC0052083
acaaatcacacta

SEQ ID NO: 214011 - DNA, 13 bp, Artificial Sequence
  Oligonucleotide for detection of SNP TSC0052083
tagtgtaatttgt

SEQ ID NO: 214012 - DNA, 13 bp, Artificial Sequence
  Oligonucleotide for detection of SNP TSC0052083
acaaattacacta

SEQ ID NO: 214013 - DNA, 13 bp, Artificial Sequence
  Oligonucleotide for detection of SNP TSC0052084
gttttttgaaaga

SEQ ID NO: 214014 - DNA, 13 bp, Artificial Sequence
  Oligonucleotide for detection of SNP TSC0052084
tctttcaaaaaac

SEQ ID NO: 214015 - DNA, 13 bp, Artificial Sequence
  Oligonucleotide for detection of SNP TSC0052084
gtttttcgaaaga

SEQ ID NO: 214016 - DNA, 13 bp, Artificial Sequence
  Oligonucleotide for detection of SNP TSC0052084
tctttcgaaaaac

SEQ ID NO: 214017 - DNA, 13 bp, Artificial Sequence
  Oligonucleotide for detection of SNP TSC0052084
ttttttaggggay

SEQ ID NO: 214018 - DNA, 13 bp, Artificial Sequence
  Oligonucleotide for detection of SNP TSC0052084
rtcccctaaaaaa

SEQ ID NO: 214019 - DNA, 13 bp, Artificial Sequence
  Oligonucleotide for detection of SNP TSC0052084
tttttcgggggay

SEQ ID NO: 214020 - DNA, 13 bp, Artificial Sequence
  Oligonucleotide for detection of SNP TSC0052084
rtcccccgaaaaa

SEQ ID NO: 214021 - DNA, 13 bp, Artificial Sequence
  Oligonucleotide for detection of SNP TSC0008051
gggggagggttty

SEQ ID NO: 214022 - DNA, 13 bp, Artificial Sequence
  Oligonucleotide for detection of SNP TSC0008051
raaaccctccccc

SEQ ID NO: 214023 - DNA, 13 bp, Artificial Sequence
  Oligonucleotide for detection of SNP TSC0008051
gggggaaggttty

SEQ ID NO: 214024 - DNA, 13 bp, Artificial Sequence
  Oligonucleotide for detection of SNP TSC0008051
raaaccttccccc

SEQ ID NO: 214025 - DNA, 13 bp, Artificial Sequence
  Oligonucleotide for detection of SNP TSC0008052
tatgtttagtagg

SEQ ID NO: 214026 - DNA, 13 bp, Artificial Sequence
  Oligonucleotide for detection of SNP TSC0008052
cctactaaacata

SEQ ID NO: 214027 - DNA, 13 bp, Artificial Sequence
  Oligonucleotide for detection of SNP TSC0008052
tatgttgagtagg

SEQ ID NO: 214028 - DNA, 13 bp, Artificial Sequence
  Oligonucleotide for detection of SNP TSC0008052
cctactcaacata

SEQ ID NO: 214029 - DNA, 13 bp, Artificial Sequence
  Oligonucleotide for detection of SNP TSC0008052
tatgtcgagtagg

SEQ ID NO: 214030 - DNA, 13 bp, Artificial Sequence
  Oligonucleotide for detection of SNP TSC0008052
cctactcgacata

SEQ ID NO: 214031 - DNA, 13 bp, Artificial Sequence
  Oligonucleotide for detection of SNP TSC0008052
tttgttggatatg

SEQ ID NO: 214032 - DNA, 13 bp, Artificial Sequence
  Oligonucleotide for detection of SNP TSC0008052
catatccaacaaa

SEQ ID NO: 214033 - DNA, 13 bp, Artificial Sequence
  Oligonucleotide for detection of SNP TSC0008052
tttgtttgatatg

SEQ ID NO: 214034 - DNA, 13 bp, Artificial Sequence
  Oligonucleotide for detection of SNP TSC0008052
catatcaaacaaa

SEQ ID NO: 214035 - DNA, 13 bp, Artificial Sequence
  Oligonucleotide for detection of SNP TSC0008052
tttgttcgatatg

SEQ ID NO: 214036 - DNA, 13 bp, Artificial Sequence
  Oligonucleotide for detection of SNP TSC0008052
catatcgaacaaa

SEQ ID NO: 214037 - DNA, 13 bp, Artificial Sequence
  Oligonucleotide for detection of SNP TSC0001625
gaattaatattat

SEQ ID NO: 214038 - DNA, 13 bp, Artificial Sequence
  Oligonucleotide for detection of SNP TSC0001625
ataatattaattc

SEQ ID NO: 214039 - DNA, 13 bp, Artificial Sequence
  Oligonucleotide for detection of SNP TSC0001625
gaattagtattat

SEQ ID NO: 214040 - DNA, 13 bp, Artificial Sequence
  Oligonucleotide for detection of SNP TSC0001625
ataatactaattc

SEQ ID NO: 214041 - DNA, 13 bp, Artificial Sequence
  Oligonucleotide for detection of SNP TSC0052086
tatttatgtaaga

SEQ ID NO: 214042 - DNA, 13 bp, Artificial Sequence
  Oligonucleotide for detection of SNP TSC0052086
tcttacataaata

SEQ ID NO: 214043 - DNA, 13 bp, Artificial Sequence
  Oligonucleotide for detection of SNP TSC0052086
tatttacgtaaga

SEQ ID NO: 214044 - DNA, 13 bp, Artificial Sequence
  Oligonucleotide for detection of SNP TSC0052086
tcttacgtaaata

SEQ ID NO: 214045 - DNA, 13 bp, Artificial Sequence
  Oligonucleotide for detection of SNP TSC0052086
ttttatgtggatg

SEQ ID NO: 214046 - DNA, 13 bp, Artificial Sequence
  Oligonucleotide for detection of SNP TSC0052086
catccacataaaa

SEQ ID NO: 214047 - DNA, 13 bp, Artificial Sequence
  Oligonucleotide for detection of SNP TSC0052086
ttttatatggatg

SEQ ID NO: 214048 - DNA, 13 bp, Artificial Sequence
  Oligonucleotide for detection of SNP TSC0052086
catccatataaaa

SEQ ID NO: 214049 - DNA, 13 bp, Artificial Sequence
  Oligonucleotide for detection of SNP TSC0052086
ttttacgtggatg

SEQ ID NO: 214050 - DNA, 13 bp, Artificial Sequence
  Oligonucleotide for detection of SNP TSC0052086
catccacgtaaaa

SEQ ID NO: 214051 - DNA, 13 bp, Artificial Sequence
  Oligonucleotide for detection of SNP TSC0052087
gtaaaatgggaag

SEQ ID NO: 214052 - DNA, 13 bp, Artificial Sequence
  Oligonucleotide for detection of SNP TSC0052087
cttcccattttac

SEQ ID NO: 214053 - DNA, 13 bp, Artificial Sequence
  Oligonucleotide for detection of SNP TSC0052087
gtaaaacgggaag

SEQ ID NO: 214054 - DNA, 13 bp, Artificial Sequence
  Oligonucleotide for detection of SNP TSC0052087
cttcccgttttac

SEQ ID NO: 214055 - DNA, 13 bp, Artificial Sequence
  Oligonucleotide for detection of SNP TSC0001313
tttttaagtttgy

SEQ ID NO: 214056 - DNA, 13 bp, Artificial Sequence
  Oligonucleotide for detection of SNP TSC0001313
rcaaacttaaaaa

SEQ ID NO: 214057 - DNA, 13 bp, Artificial Sequence
  Oligonucleotide for detection of SNP TSC0000823
atttaaaagttgg

SEQ ID NO: 214058 - DNA, 13 bp, Artificial Sequence
  Oligonucleotide for detection of SNP TSC0000823
ccaacttttaaat

SEQ ID NO: 214059 - DNA, 13 bp, Artificial Sequence
  Oligonucleotide for detection of SNP TSC0000823
atttaatagttgg

SEQ ID NO: 214060 - DNA, 13 bp, Artificial Sequence
  Oligonucleotide for detection of SNP TSC0000823
ccaactattaaat

SEQ ID NO: 214061 - DNA, 13 bp, Artificial Sequence
  Oligonucleotide for detection of SNP TSC0000823
atttaaaagtcgg

SEQ ID NO: 214062 - DNA, 13 bp, Artificial Sequence
  Oligonucleotide for detection of SNP TSC0000823
ccgacttttaaat

SEQ ID NO: 214063 - DNA, 13 bp, Artificial Sequence
  Oligonucleotide for detection of SNP TSC0000823
atttaatagtcgg

SEQ ID NO: 214064 - DNA, 13 bp, Artificial Sequence
  Oligonucleotide for detection of SNP TSC0000823
ccgactattaaat

SEQ ID NO: 214065 - DNA, 13 bp, Artificial Sequence
  Oligonucleotide for detection of SNP TSC0000823
ttgatttttgagt

SEQ ID NO: 214066 - DNA, 13 bp, Artificial Sequence
  Oligonucleotide for detection of SNP TSC0000823
actcaaaaatcaa

SEQ ID NO: 214067 - DNA, 13 bp, Artificial Sequence
  Oligonucleotide for detection of SNP TSC0000823
ttgattattgagt

SEQ ID NO: 214068 - DNA, 13 bp, Artificial Sequence
  Oligonucleotide for detection of SNP TSC0000823
actcaataatcaa

SEQ ID NO: 214069 - DNA, 13 bp, Artificial Sequence
  Oligonucleotide for detection of SNP TSC0000823
tcgatttttgagt

SEQ ID NO: 214070 - DNA, 13 bp, Artificial Sequence
  Oligonucleotide for detection of SNP TSC0000823
actcaaaaatcga

SEQ ID NO: 214071 - DNA, 13 bp, Artificial Sequence
  Oligonucleotide for detection of SNP TSC0000823
tcgattattgagt

SEQ ID NO: 214072 - DNA, 13 bp, Artificial Sequence
  Oligonucleotide for detection of SNP TSC0000823
actcaataatcga

SEQ ID NO: 214073 - DNA, 13 bp, Artificial Sequence
  Oligonucleotide for detection of SNP TSC0009752
taattttttggga

SEQ ID NO: 214074 - DNA, 13 bp, Artificial Sequence
  Oligonucleotide for detection of SNP TSC0009752
tcccaaaaaatta

SEQ ID NO: 214075 - DNA, 13 bp, Artificial Sequence
  Oligonucleotide for detection of SNP TSC0009752
taatttgttggga

SEQ ID NO: 214076 - DNA, 13 bp, Artificial Sequence
  Oligonucleotide for detection of SNP TSC0009752
tcccaacaaatta

SEQ ID NO: 214077 - DNA, 13 bp, Artificial Sequence
  Oligonucleotide for detection of SNP TSC0009752
ttttaaaaagttg

SEQ ID NO: 214078 - DNA, 13 bp, Artificial Sequence
  Oligonucleotide for detection of SNP TSC0009752
caactttttaaaa

SEQ ID NO: 214079 - DNA, 13 bp, Artificial Sequence
  Oligonucleotide for detection of SNP TSC0009752
ttttaataagttg

SEQ ID NO: 214080 - DNA, 13 bp, Artificial Sequence
  Oligonucleotide for detection of SNP TSC0009752
caacttattaaaa

SEQ ID NO: 214081 - DNA, 13 bp, Artificial Sequence
  Oligonucleotide for detection of SNP TSC0052088
ttttggtgattgg

SEQ ID NO: 214082 - DNA, 13 bp, Artificial Sequence
  Oligonucleotide for detection of SNP TSC0052088
ccaatcaccaaaa

SEQ ID NO: 214083 - DNA, 13 bp, Artificial Sequence
  Oligonucleotide for detection of SNP TSC0052088
ttttggcgattgg

SEQ ID NO: 214084 - DNA, 13 bp, Artificial Sequence
  Oligonucleotide for detection of SNP TSC0052088
ccaatcgccaaaa

SEQ ID NO: 214085 - DNA, 13 bp, Artificial Sequence
  Oligonucleotide for detection of SNP TSC0052088
ttagttgttaaaa

SEQ ID NO: 214086 - DNA, 13 bp, Artificial Sequence
  Oligonucleotide for detection of SNP TSC0052088
ttttaacaactaa

SEQ ID NO: 214087 - DNA, 13 bp, Artificial Sequence
  Oligonucleotide for detection of SNP TSC0052088
ttagttattaaaa

SEQ ID NO: 214088 - DNA, 13 bp, Artificial Sequence
  Oligonucleotide for detection of SNP TSC0052088
ttttaataactaa

SEQ ID NO: 214089 - DNA, 13 bp, Artificial Sequence
  Oligonucleotide for detection of SNP TSC0052088
ttagtcgttaaaa

SEQ ID NO: 214090 - DNA, 13 bp, Artificial Sequence
  Oligonucleotide for detection of SNP TSC0052088
ttttaacgactaa

SEQ ID NO: 214091 - DNA, 13 bp, Artificial Sequence
  Oligonucleotide for detection of SNP TSC0009956
attataatgaagt

SEQ ID NO: 214092 - DNA, 13 bp, Artificial Sequence
  Oligonucleotide for detection of SNP TSC0009956
acttcattataat

SEQ ID NO: 214093 - DNA, 13 bp, Artificial Sequence
  Oligonucleotide for detection of SNP TSC0009956
attatagtgaagt

SEQ ID NO: 214094 - DNA, 13 bp, Artificial Sequence
  Oligonucleotide for detection of SNP TSC0009956
acttcactataat

SEQ ID NO: 214095 - DNA, 13 bp, Artificial Sequence
  Oligonucleotide for detection of SNP TSC0052089
gttagtattagta

SEQ ID NO: 214096 - DNA, 13 bp, Artificial Sequence
  Oligonucleotide for detection of SNP TSC0052089
tactaatactaac

SEQ ID NO: 214097 - DNA, 13 bp, Artificial Sequence
  Oligonucleotide for detection of SNP TSC0052089
gttagtgttagta

SEQ ID NO: 214098 - DNA, 13 bp, Artificial Sequence
  Oligonucleotide for detection of SNP TSC0052089
tactaacactaac

SEQ ID NO: 214099 - DNA, 13 bp, Artificial Sequence
  Oligonucleotide for detection of SNP TSC0052089
gttagcgttagta

SEQ ID NO: 214100 - DNA, 13 bp, Artificial Sequence
  Oligonucleotide for detection of SNP TSC0052089
tactaacgctaac

SEQ ID NO: 214101 - DNA, 13 bp, Artificial Sequence
  Oligonucleotide for detection of SNP TSC0052089
tattggtgttggy

SEQ ID NO: 214102 - DNA, 13 bp, Artificial Sequence
  Oligonucleotide for detection of SNP TSC0052089
rccaacaccaata

SEQ ID NO: 214103 - DNA, 13 bp, Artificial Sequence
  Oligonucleotide for detection of SNP TSC0052089
tattggcgttggy

SEQ ID NO: 214104 - DNA, 13 bp, Artificial Sequence
  Oligonucleotide for detection of SNP TSC0052089
rccaacgccaata

SEQ ID NO: 214105 - DNA, 13 bp, Artificial Sequence
  Oligonucleotide for detection of SNP TSC0052090
atttgaagtttag

SEQ ID NO: 214106 - DNA, 13 bp, Artificial Sequence
  Oligonucleotide for detection of SNP TSC0052090
ctaaacttcaaat

SEQ ID NO: 214107 - DNA, 13 bp, Artificial Sequence
  Oligonucleotide for detection of SNP TSC0052090
atttgaggtttag

SEQ ID NO: 214108 - DNA, 13 bp, Artificial Sequence
  Oligonucleotide for detection of SNP TSC0052090
ctaaacctcaaat

SEQ ID NO: 214109 - DNA, 13 bp, Artificial Sequence
  Oligonucleotide for detection of SNP TSC0052091
gttaaaagttgay

SEQ ID NO: 214110 - DNA, 13 bp, Artificial Sequence
  Oligonucleotide for detection of SNP TSC0052091
rtcaacttttaac

SEQ ID NO: 214111 - DNA, 13 bp, Artificial Sequence
  Oligonucleotide for detection of SNP TSC0052091
gttaaaggttgay

SEQ ID NO: 214112 - DNA, 13 bp, Artificial Sequence
  Oligonucleotide for detection of SNP TSC0052091
rtcaacctttaac

SEQ ID NO: 214113 - DNA, 13 bp, Artificial Sequence
  Oligonucleotide for detection of SNP TSC0052091
gttaaaagtcgay

SEQ ID NO: 214114 - DNA, 13 bp, Artificial Sequence
  Oligonucleotide for detection of SNP TSC0052091
rtcgacttttaac

SEQ ID NO: 214115 - DNA, 13 bp, Artificial Sequence
  Oligonucleotide for detection of SNP TSC0052091
gttaaaggtcgay

SEQ ID NO: 214116 - DNA, 13 bp, Artificial Sequence
  Oligonucleotide for detection of SNP TSC0052091
rtcgacctttaac

SEQ ID NO: 214117 - DNA, 13 bp, Artificial Sequence
  Oligonucleotide for detection of SNP TSC0052092
tgttgtgtatatt

SEQ ID NO: 214118 - DNA, 13 bp, Artificial Sequence
  Oligonucleotide for detection of SNP TSC0052092
aatatacacaaca

SEQ ID NO: 214119 - DNA, 13 bp, Artificial Sequence
  Oligonucleotide for detection of SNP TSC0052092
tgttgtatatatt

SEQ ID NO: 214120 - DNA, 13 bp, Artificial Sequence
  Oligonucleotide for detection of SNP TSC0052092
aatatatacaaca

SEQ ID NO: 214121 - DNA, 13 bp, Artificial Sequence
  Oligonucleotide for detection of SNP TSC0052093
aaataaagtttgt

SEQ ID NO: 214122 - DNA, 13 bp, Artificial Sequence
  Oligonucleotide for detection of SNP TSC0052093
acaaactttattt

SEQ ID NO: 214123 - DNA, 13 bp, Artificial Sequence
  Oligonucleotide for detection of SNP TSC0052093
aaataatgtttgt

SEQ ID NO: 214124 - DNA, 13 bp, Artificial Sequence
  Oligonucleotide for detection of SNP TSC0052093
acaaacattattt

SEQ ID NO: 214125 - DNA, 13 bp, Artificial Sequence
  Oligonucleotide for detection of SNP TSC0052093
aaataaagttcgt

SEQ ID NO: 214126 - DNA, 13 bp, Artificial Sequence
  Oligonucleotide for detection of SNP TSC0052093
acgaactttattt

SEQ ID NO: 214127 - DNA, 13 bp, Artificial Sequence
  Oligonucleotide for detection of SNP TSC0052093
aaataacgtttgt

SEQ ID NO: 214128 - DNA, 13 bp, Artificial Sequence
  Oligonucleotide for detection of SNP TSC0052093
acaaacgttattt

SEQ ID NO: 214129 - DNA, 13 bp, Artificial Sequence
  Oligonucleotide for detection of SNP TSC0052093
aaataatgttcgt

SEQ ID NO: 214130 - DNA, 13 bp, Artificial Sequence
  Oligonucleotide for detection of SNP TSC0052093
acgaacattattt

SEQ ID NO: 214131 - DNA, 13 bp, Artificial Sequence
  Oligonucleotide for detection of SNP TSC0052093
aaataacgttcgt

SEQ ID NO: 214132 - DNA, 13 bp, Artificial Sequence
  Oligonucleotide for detection of SNP TSC0052093
acgaacgttattt

SEQ ID NO: 214133 - DNA, 13 bp, Artificial Sequence
  Oligonucleotide for detection of SNP TSC0052093
atgaattttgttt

SEQ ID NO: 214134 - DNA, 13 bp, Artificial Sequence
  Oligonucleotide for detection of SNP TSC0052093
aaacaaaattcat

SEQ ID NO: 214135 - DNA, 13 bp, Artificial Sequence
  Oligonucleotide for detection of SNP TSC0052093
atgaatgttgttt

SEQ ID NO: 214136 - DNA, 13 bp, Artificial Sequence
  Oligonucleotide for detection of SNP TSC0052093
aaacaacattcat

SEQ ID NO: 214137 - DNA, 13 bp, Artificial Sequence
  Oligonucleotide for detection of SNP TSC0052093
acgaattttgttt

SEQ ID NO: 214138 - DNA, 13 bp, Artificial Sequence
  Oligonucleotide for detection of SNP TSC0052093
aaacaaaattcgt

SEQ ID NO: 214139 - DNA, 13 bp, Artificial Sequence
  Oligonucleotide for detection of SNP TSC0052093
acgaatgttgttt

SEQ ID NO: 214140 - DNA, 13 bp, Artificial Sequence
  Oligonucleotide for detection of SNP TSC0052093
aaacaacattcgt

SEQ ID NO: 214141 - DNA, 13 bp, Artificial Sequence
  Oligonucleotide for detection of SNP TSC0052093
atgaacgttgttt

SEQ ID NO: 214142 - DNA, 13 bp, Artificial Sequence
  Oligonucleotide for detection of SNP TSC0052093
aaacaacgttcat

SEQ ID NO: 214143 - DNA, 13 bp, Artificial Sequence
  Oligonucleotide for detection of SNP TSC0052093
acgaacgttgttt

SEQ ID NO: 214144 - DNA, 13 bp, Artificial Sequence
  Oligonucleotide for detection of SNP TSC0052093
aaacaacgttcgt

SEQ ID NO: 214145 - DNA, 13 bp, Artificial Sequence
  Oligonucleotide for detection of SNP TSC0052094
gttttttttagat

SEQ ID NO: 214146 - DNA, 13 bp, Artificial Sequence
  Oligonucleotide for detection of SNP TSC0052094
atctaaaaaaaac

SEQ ID NO: 214147 - DNA, 13 bp, Artificial Sequence
  Oligonucleotide for detection of SNP TSC0052094
gtttttgttagat

SEQ ID NO: 214148 - DNA, 13 bp, Artificial Sequence
  Oligonucleotide for detection of SNP TSC0052094
atctaacaaaaac

SEQ ID NO: 214149 - DNA, 13 bp, Artificial Sequence
  Oligonucleotide for detection of SNP TSC0052094
atttaggaggagy

SEQ ID NO: 214150 - DNA, 13 bp, Artificial Sequence
  Oligonucleotide for detection of SNP TSC0052094
rctcctcctaaat

SEQ ID NO: 214151 - DNA, 13 bp, Artificial Sequence
  Oligonucleotide for detection of SNP TSC0052094
atttagtaggagy

SEQ ID NO: 214152 - DNA, 13 bp, Artificial Sequence
  Oligonucleotide for detection of SNP TSC0052094
rctcctactaaat

SEQ ID NO: 214153 - DNA, 13 bp, Artificial Sequence
  Oligonucleotide for detection of SNP TSC0052095
tatgtgagtttaa

SEQ ID NO: 214154 - DNA, 13 bp, Artificial Sequence
  Oligonucleotide for detection of SNP TSC0052095
ttaaactcacata

SEQ ID NO: 214155 - DNA, 13 bp, Artificial Sequence
  Oligonucleotide for detection of SNP TSC0052095
tatgtgggtttaa

SEQ ID NO: 214156 - DNA, 13 bp, Artificial Sequence
  Oligonucleotide for detection of SNP TSC0052095
ttaaacccacata

SEQ ID NO: 214157 - DNA, 13 bp, Artificial Sequence
  Oligonucleotide for detection of SNP TSC0052095
tacgtgagtttaa

SEQ ID NO: 214158 - DNA, 13 bp, Artificial Sequence
  Oligonucleotide for detection of SNP TSC0052095
ttaaactcacgta

SEQ ID NO: 214159 - DNA, 13 bp, Artificial Sequence
  Oligonucleotide for detection of SNP TSC0052095
tacgtgggtttaa

SEQ ID NO: 214160 - DNA, 13 bp, Artificial Sequence
  Oligonucleotide for detection of SNP TSC0052095
ttaaacccacgta

SEQ ID NO: 214161 - DNA, 13 bp, Artificial Sequence
  Oligonucleotide for detection of SNP TSC0052096
gaaataaaaaagg

SEQ ID NO: 214162 - DNA, 13 bp, Artificial Sequence
  Oligonucleotide for detection of SNP TSC0052096
ccttttttatttc

SEQ ID NO: 214163 - DNA, 13 bp, Artificial Sequence
  Oligonucleotide for detection of SNP TSC0052096
gaaatagaaaagg

SEQ ID NO: 214164 - DNA, 13 bp, Artificial Sequence
  Oligonucleotide for detection of SNP TSC0052096
ccttttctatttc

SEQ ID NO: 214165 - DNA, 13 bp, Artificial Sequence
  Oligonucleotide for detection of SNP TSC0006625
gagttagtgtagy

SEQ ID NO: 214166 - DNA, 13 bp, Artificial Sequence
  Oligonucleotide for detection of SNP TSC0006625
rctacactaactc

SEQ ID NO: 214167 - DNA, 13 bp, Artificial Sequence
  Oligonucleotide for detection of SNP TSC0006625
gagttaatgtagy

SEQ ID NO: 214168 - DNA, 13 bp, Artificial Sequence
  Oligonucleotide for detection of SNP TSC0006625
rctacattaactc

SEQ ID NO: 214169 - DNA, 13 bp, Artificial Sequence
  Oligonucleotide for detection of SNP TSC0052099
ataatatagtgtg

SEQ ID NO: 214170 - DNA, 13 bp, Artificial Sequence
  Oligonucleotide for detection of SNP TSC0052099
cacactatattat

SEQ ID NO: 214171 - DNA, 13 bp, Artificial Sequence
  Oligonucleotide for detection of SNP TSC0052099
ataatagagtgtg

SEQ ID NO: 214172 - DNA, 13 bp, Artificial Sequence
  Oligonucleotide for detection of SNP TSC0052099
cacactctattat

SEQ ID NO: 214173 - DNA, 13 bp, Artificial Sequence
  Oligonucleotide for detection of SNP TSC0052099
tatattatattat

SEQ ID NO: 214174 - DNA, 13 bp, Artificial Sequence
  Oligonucleotide for detection of SNP TSC0052099
ataatataatata

SEQ ID NO: 214175 - DNA, 13 bp, Artificial Sequence
  Oligonucleotide for detection of SNP TSC0052099
tatattttattat

SEQ ID NO: 214176 - DNA, 13 bp, Artificial Sequence
  Oligonucleotide for detection of SNP TSC0052099
ataataaaatata

SEQ ID NO: 214177 - DNA, 13 bp, Artificial Sequence
  Oligonucleotide for detection of SNP TSC0000445
taaatataagttt

SEQ ID NO: 214178 - DNA, 13 bp, Artificial Sequence
  Oligonucleotide for detection of SNP TSC0000445
aaacttatattta

SEQ ID NO: 214179 - DNA, 13 bp, Artificial Sequence
  Oligonucleotide for detection of SNP TSC0000445
taaatagaagttt

SEQ ID NO: 214180 - DNA, 13 bp, Artificial Sequence
  Oligonucleotide for detection of SNP TSC0000445
aaacttctattta

SEQ ID NO: 214181 - DNA, 13 bp, Artificial Sequence
  Oligonucleotide for detection of SNP TSC0052101
tattaggtaatgy

SEQ ID NO: 214182 - DNA, 13 bp, Artificial Sequence
  Oligonucleotide for detection of SNP TSC0052101
rcattacctaata

SEQ ID NO: 214183 - DNA, 13 bp, Artificial Sequence
  Oligonucleotide for detection of SNP TSC0052101
tattagataatgy

SEQ ID NO: 214184 - DNA, 13 bp, Artificial Sequence
  Oligonucleotide for detection of SNP TSC0052101
rcattatctaata

SEQ ID NO: 214185 - DNA, 13 bp, Artificial Sequence
  Oligonucleotide for detection of SNP TSC0052102
ttgtaaggtaatt

SEQ ID NO: 214186 - DNA, 13 bp, Artificial Sequence
  Oligonucleotide for detection of SNP TSC0052102
aattaccttacaa

SEQ ID NO: 214187 - DNA, 13 bp, Artificial Sequence
  Oligonucleotide for detection of SNP TSC0052102
ttgtaaagtaatt

SEQ ID NO: 214188 - DNA, 13 bp, Artificial Sequence
  Oligonucleotide for detection of SNP TSC0052102
aattactttacaa

SEQ ID NO: 214189 - DNA, 13 bp, Artificial Sequence
  Oligonucleotide for detection of SNP TSC0052103
ttgtttatgatty

SEQ ID NO: 214190 - DNA, 13 bp, Artificial Sequence
  Oligonucleotide for detection of SNP TSC0052103
raatcataaacaa

SEQ ID NO: 214191 - DNA, 13 bp, Artificial Sequence
  Oligonucleotide for detection of SNP TSC0052103
ttgtttgtgatty

SEQ ID NO: 214192 - DNA, 13 bp, Artificial Sequence
  Oligonucleotide for detection of SNP TSC0052103
raatcacaaacaa

SEQ ID NO: 214193 - DNA, 13 bp, Artificial Sequence
  Oligonucleotide for detection of SNP TSC0052103
ttgttcgtgatty

SEQ ID NO: 214194 - DNA, 13 bp, Artificial Sequence
  Oligonucleotide for detection of SNP TSC0052103
raatcacgaacaa

SEQ ID NO: 214195 - DNA, 13 bp, Artificial Sequence
  Oligonucleotide for detection of SNP TSC0052103
gagttatgaatag

SEQ ID NO: 214196 - DNA, 13 bp, Artificial Sequence
  Oligonucleotide for detection of SNP TSC0052103
ctattcataactc

SEQ ID NO: 214197 - DNA, 13 bp, Artificial Sequence
  Oligonucleotide for detection of SNP TSC0052103
gagttacgaatag

SEQ ID NO: 214198 - DNA, 13 bp, Artificial Sequence
  Oligonucleotide for detection of SNP TSC0052103
ctattcgtaactc

SEQ ID NO: 214199 - DNA, 13 bp, Artificial Sequence
  Oligonucleotide for detection of SNP TSC0052104
aaaaaaagaatay

SEQ ID NO: 214200 - DNA, 13 bp, Artificial Sequence
  Oligonucleotide for detection of SNP TSC0052104
rtattcttttttt

SEQ ID NO: 214201 - DNA, 13 bp, Artificial Sequence
  Oligonucleotide for detection of SNP TSC0052104
aaaaaaggaatay

SEQ ID NO: 214202 - DNA, 13 bp, Artificial Sequence
  Oligonucleotide for detection of SNP TSC0052104
rtattcctttttt

SEQ ID NO: 214203 - DNA, 13 bp, Artificial Sequence
  Oligonucleotide for detection of SNP TSC0052105
tttatgatattat

SEQ ID NO: 214204 - DNA, 13 bp, Artificial Sequence
  Oligonucleotide for detection of SNP TSC0052105
ataatatcataaa

SEQ ID NO: 214205 - DNA, 13 bp, Artificial Sequence
  Oligonucleotide for detection of SNP TSC0052105
tttatggtattat

SEQ ID NO: 214206 - DNA, 13 bp, Artificial Sequence
  Oligonucleotide for detection of SNP TSC0052105
ataataccataaa

SEQ ID NO: 214207 - DNA, 13 bp, Artificial Sequence
  Oligonucleotide for detection of SNP TSC0007345
agggtagtttaaa

SEQ ID NO: 214208 - DNA, 13 bp, Artificial Sequence
  Oligonucleotide for detection of SNP TSC0007345
tttaaactaccct

SEQ ID NO: 214209 - DNA, 13 bp, Artificial Sequence
  Oligonucleotide for detection of SNP TSC0007345
agggtaatttaaa

SEQ ID NO: 214210 - DNA, 13 bp, Artificial Sequence
  Oligonucleotide for detection of SNP TSC0007345
tttaaattaccct

SEQ ID NO: 214211 - DNA, 13 bp, Artificial Sequence
  Oligonucleotide for detection of SNP TSC0052106
agatttttataag

SEQ ID NO: 214212 - DNA, 13 bp, Artificial Sequence
  Oligonucleotide for detection of SNP TSC0052106
cttataaaaatct

SEQ ID NO: 214213 - DNA, 13 bp, Artificial Sequence
  Oligonucleotide for detection of SNP TSC0052106
agatttgtataag

SEQ ID NO: 214214 - DNA, 13 bp, Artificial Sequence
  Oligonucleotide for detection of SNP TSC0052106
cttatacaaatct

SEQ ID NO: 214215 - DNA, 13 bp, Artificial Sequence
  Oligonucleotide for detection of SNP TSC0052106
tttgtagagattt

SEQ ID NO: 214216 - DNA, 13 bp, Artificial Sequence
  Oligonucleotide for detection of SNP TSC0052106
aaatctctacaaa

SEQ ID NO: 214217 - DNA, 13 bp, Artificial Sequence
  Oligonucleotide for detection of SNP TSC0052106
tttgtatagattt

SEQ ID NO: 214218 - DNA, 13 bp, Artificial Sequence
  Oligonucleotide for detection of SNP TSC0052106
aaatctatacaaa

SEQ ID NO: 214219 - DNA, 13 bp, Artificial Sequence
  Oligonucleotide for detection of SNP TSC0052107
atatagaggtaaa

SEQ ID NO: 214220 - DNA, 13 bp, Artificial Sequence
  Oligonucleotide for detection of SNP TSC0052107
tttacctctatat

SEQ ID NO: 214221 - DNA, 13 bp, Artificial Sequence
  Oligonucleotide for detection of SNP TSC0052107
atataggggtaaa

SEQ ID NO: 214222 - DNA, 13 bp, Artificial Sequence
  Oligonucleotide for detection of SNP TSC0052107
tttacccctatat

SEQ ID NO: 214223 - DNA, 13 bp, Artificial Sequence
  Oligonucleotide for detection of SNP TSC0052108
tatggggttatty

SEQ ID NO: 214224 - DNA, 13 bp, Artificial Sequence
  Oligonucleotide for detection of SNP TSC0052108
raataaccccata

SEQ ID NO: 214225 - DNA, 13 bp, Artificial Sequence
  Oligonucleotide for detection of SNP TSC0052108
tatgggattatty

SEQ ID NO: 214226 - DNA, 13 bp, Artificial Sequence
  Oligonucleotide for detection of SNP TSC0052108
raataatcccata

SEQ ID NO: 214227 - DNA, 13 bp, Artificial Sequence
  Oligonucleotide for detection of SNP TSC0052110
agtggtagtgtgg

SEQ ID NO: 214228 - DNA, 13 bp, Artificial Sequence
  Oligonucleotide for detection of SNP TSC0052110
ccacactaccact

SEQ ID NO: 214229 - DNA, 13 bp, Artificial Sequence
  Oligonucleotide for detection of SNP TSC0052110
agtggtggtgtgg

SEQ ID NO: 214230 - DNA, 13 bp, Artificial Sequence
  Oligonucleotide for detection of SNP TSC0052110
ccacaccaccact

SEQ ID NO: 214231 - DNA, 13 bp, Artificial Sequence
  Oligonucleotide for detection of SNP TSC0052110
agtggcggtgtgg

SEQ ID NO: 214232 - DNA, 13 bp, Artificial Sequence
  Oligonucleotide for detection of SNP TSC0052110
ccacaccgccact

SEQ ID NO: 214233 - DNA, 13 bp, Artificial Sequence
  Oligonucleotide for detection of SNP TSC0052110
ttatattgttatt

SEQ ID NO: 214234 - DNA, 13 bp, Artificial Sequence
  Oligonucleotide for detection of SNP TSC0052110
aataacaatataa

SEQ ID NO: 214235 - DNA, 13 bp, Artificial Sequence
  Oligonucleotide for detection of SNP TSC0052110
ttatatcgttatt

SEQ ID NO: 214236 - DNA, 13 bp, Artificial Sequence
  Oligonucleotide for detection of SNP TSC0052110
aataacgatataa

SEQ ID NO: 214237 - DNA, 13 bp, Artificial Sequence
  Oligonucleotide for detection of SNP TSC0052112
gagtgttggtttt

SEQ ID NO: 214238 - DNA, 13 bp, Artificial Sequence
  Oligonucleotide for detection of SNP TSC0052112
aaaaccaacactc

SEQ ID NO: 214239 - DNA, 13 bp, Artificial Sequence
  Oligonucleotide for detection of SNP TSC0052112
gagtgtcggtttt

SEQ ID NO: 214240 - DNA, 13 bp, Artificial Sequence
  Oligonucleotide for detection of SNP TSC0052112
aaaaccgacactc

SEQ ID NO: 214241 - DNA, 13 bp, Artificial Sequence
  Oligonucleotide for detection of SNP TSC0052112
aaagtcggtatty

SEQ ID NO: 214242 - DNA, 13 bp, Artificial Sequence
  Oligonucleotide for detection of SNP TSC0052112
raataccgacttt

SEQ ID NO: 214243 - DNA, 13 bp, Artificial Sequence
  Oligonucleotide for detection of SNP TSC0052113
agtgtatatgtaa

SEQ ID NO: 214244 - DNA, 13 bp, Artificial Sequence
  Oligonucleotide for detection of SNP TSC0052113
ttacatatacact

SEQ ID NO: 214245 - DNA, 13 bp, Artificial Sequence
  Oligonucleotide for detection of SNP TSC0052113
agtgtagatgtaa

SEQ ID NO: 214246 - DNA, 13 bp, Artificial Sequence
  Oligonucleotide for detection of SNP TSC0052113
ttacatctacact

SEQ ID NO: 214247 - DNA, 13 bp, Artificial Sequence
  Oligonucleotide for detection of SNP TSC0052113
ttgtatatatatt

SEQ ID NO: 214248 - DNA, 13 bp, Artificial Sequence
  Oligonucleotide for detection of SNP TSC0052113
aatatatatacaa

SEQ ID NO: 214249 - DNA, 13 bp, Artificial Sequence
  Oligonucleotide for detection of SNP TSC0052113
ttgtatttatatt

SEQ ID NO: 214250 - DNA, 13 bp, Artificial Sequence
  Oligonucleotide for detection of SNP TSC0052113
aatataaatacaa

SEQ ID NO: 214251 - DNA, 13 bp, Artificial Sequence
  Oligonucleotide for detection of SNP TSC0052115
gaaaaaaaattaa

SEQ ID NO: 214252 - DNA, 13 bp, Artificial Sequence
  Oligonucleotide for detection of SNP TSC0052115
ttaattttttttc

SEQ ID NO: 214253 - DNA, 13 bp, Artificial Sequence
  Oligonucleotide for detection of SNP TSC0052115
gaaaaataattaa

SEQ ID NO: 214254 - DNA, 13 bp, Artificial Sequence
  Oligonucleotide for detection of SNP TSC0052115
ttaattatttttc

SEQ ID NO: 214255 - DNA, 13 bp, Artificial Sequence
  Oligonucleotide for detection of SNP TSC0052116
ttttagaagagay

SEQ ID NO: 214256 - DNA, 13 bp, Artificial Sequence
  Oligonucleotide for detection of SNP TSC0052116
rtctcttctaaaa

SEQ ID NO: 214257 - DNA, 13 bp, Artificial Sequence
  Oligonucleotide for detection of SNP TSC0052116
ttttaggagagay

SEQ ID NO: 214258 - DNA, 13 bp, Artificial Sequence
  Oligonucleotide for detection of SNP TSC0052116
rtctctcctaaaa

SEQ ID NO: 214259 - DNA, 13 bp, Artificial Sequence
  Oligonucleotide for detection of SNP TSC0052118
attaatagtataa

SEQ ID NO: 214260 - DNA, 13 bp, Artificial Sequence
  Oligonucleotide for detection of SNP TSC0052118
ttatactattaat

SEQ ID NO: 214261 - DNA, 13 bp, Artificial Sequence
  Oligonucleotide for detection of SNP TSC0052118
ttatattattagt

SEQ ID NO: 214262 - DNA, 13 bp, Artificial Sequence
  Oligonucleotide for detection of SNP TSC0052118
actaataatataa

SEQ ID NO: 214263 - DNA, 13 bp, Artificial Sequence
  Oligonucleotide for detection of SNP TSC0052118
ttatataattagt

SEQ ID NO: 214264 - DNA, 13 bp, Artificial Sequence
  Oligonucleotide for detection of SNP TSC0052118
actaattatataa

SEQ ID NO: 214265 - DNA, 13 bp, Artificial Sequence
  Oligonucleotide for detection of SNP TSC0005510
aagtttgttaatg

SEQ ID NO: 214266 - DNA, 13 bp, Artificial Sequence
  Oligonucleotide for detection of SNP TSC0005510
cattaacaaactt

SEQ ID NO: 214267 - DNA, 13 bp, Artificial Sequence
  Oligonucleotide for detection of SNP TSC0005510
aagtttattaatg

SEQ ID NO: 214268 - DNA, 13 bp, Artificial Sequence
  Oligonucleotide for detection of SNP TSC0005510
cattaataaactt

SEQ ID NO: 214269 - DNA, 13 bp, Artificial Sequence
  Oligonucleotide for detection of SNP TSC0005511
attaatggaatta

SEQ ID NO: 214270 - DNA, 13 bp, Artificial Sequence
  Oligonucleotide for detection of SNP TSC0005511
taattccattaat

SEQ ID NO: 214271 - DNA, 13 bp, Artificial Sequence
  Oligonucleotide for detection of SNP TSC0005511
attaatagaatta

SEQ ID NO: 214272 - DNA, 13 bp, Artificial Sequence
  Oligonucleotide for detection of SNP TSC0005511
taattctattaat

SEQ ID NO: 214273 - DNA, 13 bp, Artificial Sequence
  Oligonucleotide for detection of SNP TSC0052119
taatatataggtg

SEQ ID NO: 214274 - DNA, 13 bp, Artificial Sequence
  Oligonucleotide for detection of SNP TSC0052119
cacctatatatta

SEQ ID NO: 214275 - DNA, 13 bp, Artificial Sequence
  Oligonucleotide for detection of SNP TSC0052119
taatatttaggtg

SEQ ID NO: 214276 - DNA, 13 bp, Artificial Sequence
  Oligonucleotide for detection of SNP TSC0052119
cacctaaatatta

SEQ ID NO: 214277 - DNA, 13 bp, Artificial Sequence
  Oligonucleotide for detection of SNP TSC0052120
tgatagtggggtg

SEQ ID NO: 214278 - DNA, 13 bp, Artificial Sequence
  Oligonucleotide for detection of SNP TSC0052120
caccccactatca

SEQ ID NO: 214279 - DNA, 13 bp, Artificial Sequence
  Oligonucleotide for detection of SNP TSC0052120
tgataggggggtg

SEQ ID NO: 214280 - DNA, 13 bp, Artificial Sequence
  Oligonucleotide for detection of SNP TSC0052120
cacccccctatca

SEQ ID NO: 214281 - DNA, 13 bp, Artificial Sequence
  Oligonucleotide for detection of SNP TSC0052121
ggaaattttaggy

SEQ ID NO: 214282 - DNA, 13 bp, Artificial Sequence
  Oligonucleotide for detection of SNP TSC0052121
rcctaaaatttcc

SEQ ID NO: 214283 - DNA, 13 bp, Artificial Sequence
  Oligonucleotide for detection of SNP TSC0052121
ggaaatgttaggy

SEQ ID NO: 214284 - DNA, 13 bp, Artificial Sequence
  Oligonucleotide for detection of SNP TSC0052121
rcctaacatttcc

SEQ ID NO: 214285 - DNA, 13 bp, Artificial Sequence
  Oligonucleotide for detection of SNP TSC0052121
gtttaagatttty

SEQ ID NO: 214286 - DNA, 13 bp, Artificial Sequence
  Oligonucleotide for detection of SNP TSC0052121
raaaatcttaaac

SEQ ID NO: 214287 - DNA, 13 bp, Artificial Sequence
  Oligonucleotide for detection of SNP TSC0052121
gtttaatatttty

SEQ ID NO: 214288 - DNA, 13 bp, Artificial Sequence
  Oligonucleotide for detection of SNP TSC0052121
raaaatattaaac

SEQ ID NO: 214289 - DNA, 13 bp, Artificial Sequence
  Oligonucleotide for detection of SNP TSC0007234
gttagaattgtta

SEQ ID NO: 214290 - DNA, 13 bp, Artificial Sequence
  Oligonucleotide for detection of SNP TSC0007234
taacaattctaac

SEQ ID NO: 214291 - DNA, 13 bp, Artificial Sequence
  Oligonucleotide for detection of SNP TSC0007234
gttagatttgtta

SEQ ID NO: 214292 - DNA, 13 bp, Artificial Sequence
  Oligonucleotide for detection of SNP TSC0007234
taacaaatctaac

SEQ ID NO: 214293 - DNA, 13 bp, Artificial Sequence
  Oligonucleotide for detection of SNP TSC0007234
tgatagttttgay

SEQ ID NO: 214294 - DNA, 13 bp, Artificial Sequence
  Oligonucleotide for detection of SNP TSC0007234
rtcaaaactatca

SEQ ID NO: 214295 - DNA, 13 bp, Artificial Sequence
  Oligonucleotide for detection of SNP TSC0007234
tgataggtttgay

SEQ ID NO: 214296 - DNA, 13 bp, Artificial Sequence
  Oligonucleotide for detection of SNP TSC0007234
rtcaaacctatca

SEQ ID NO: 214297 - DNA, 13 bp, Artificial Sequence
  Oligonucleotide for detection of SNP TSC0007235
aaaataattgtta

SEQ ID NO: 214298 - DNA, 13 bp, Artificial Sequence
  Oligonucleotide for detection of SNP TSC0007235
taacaattatttt

SEQ ID NO: 214299 - DNA, 13 bp, Artificial Sequence
  Oligonucleotide for detection of SNP TSC0007235
aaaatagttgtta

SEQ ID NO: 214300 - DNA, 13 bp, Artificial Sequence
  Oligonucleotide for detection of SNP TSC0007235
taacaactatttt

SEQ ID NO: 214301 - DNA, 13 bp, Artificial Sequence
  Oligonucleotide for detection of SNP TSC0052128
tttataatagttt

SEQ ID NO: 214302 - DNA, 13 bp, Artificial Sequence
  Oligonucleotide for detection of SNP TSC0052128
aaactattataaa

SEQ ID NO: 214303 - DNA, 13 bp, Artificial Sequence
  Oligonucleotide for detection of SNP TSC0052129
attgataagggtt

SEQ ID NO: 214304 - DNA, 13 bp, Artificial Sequence
  Oligonucleotide for detection of SNP TSC0052129
aacccttatcaat

SEQ ID NO: 214305 - DNA, 13 bp, Artificial Sequence
  Oligonucleotide for detection of SNP TSC0052129
attgattagggtt

SEQ ID NO: 214306 - DNA, 13 bp, Artificial Sequence
  Oligonucleotide for detection of SNP TSC0052129
aaccctaatcaat

SEQ ID NO: 214307 - DNA, 13 bp, Artificial Sequence
  Oligonucleotide for detection of SNP TSC0052129
aatttttattagt

SEQ ID NO: 214308 - DNA, 13 bp, Artificial Sequence
  Oligonucleotide for detection of SNP TSC0052129
actaataaaaatt

SEQ ID NO: 214309 - DNA, 13 bp, Artificial Sequence
  Oligonucleotide for detection of SNP TSC0052129
aattttaattagt

SEQ ID NO: 214310 - DNA, 13 bp, Artificial Sequence
  Oligonucleotide for detection of SNP TSC0052129
actaattaaaatt

SEQ ID NO: 214311 - DNA, 13 bp, Artificial Sequence
  Oligonucleotide for detection of SNP TSC0052130
gggttttggatay

SEQ ID NO: 214312 - DNA, 13 bp, Artificial Sequence
  Oligonucleotide for detection of SNP TSC0052130
rtatccaaaaccc

SEQ ID NO: 214313 - DNA, 13 bp, Artificial Sequence
  Oligonucleotide for detection of SNP TSC0052130
gggtttcggatay

SEQ ID NO: 214314 - DNA, 13 bp, Artificial Sequence
  Oligonucleotide for detection of SNP TSC0052130
rtatccgaaaccc

SEQ ID NO: 214315 - DNA, 13 bp, Artificial Sequence
  Oligonucleotide for detection of SNP TSC0052131
gtatatgtaatgg

SEQ ID NO: 214316 - DNA, 13 bp, Artificial Sequence
  Oligonucleotide for detection of SNP TSC0052131
ccattacatatac

SEQ ID NO: 214317 - DNA, 13 bp, Artificial Sequence
  Oligonucleotide for detection of SNP TSC0052131
gtatatataatgg

SEQ ID NO: 214318 - DNA, 13 bp, Artificial Sequence
  Oligonucleotide for detection of SNP TSC0052131
ccattatatatac

SEQ ID NO: 214319 - DNA, 13 bp, Artificial Sequence
  Oligonucleotide for detection of SNP TSC0052132
atggtaatttttg

SEQ ID NO: 214320 - DNA, 13 bp, Artificial Sequence
  Oligonucleotide for detection of SNP TSC0052132
caaaaattaccat

SEQ ID NO: 214321 - DNA, 13 bp, Artificial Sequence
  Oligonucleotide for detection of SNP TSC0052132
atggtagtttttg

SEQ ID NO: 214322 - DNA, 13 bp, Artificial Sequence
  Oligonucleotide for detection of SNP TSC0052132
caaaaactaccat

SEQ ID NO: 214323 - DNA, 13 bp, Artificial Sequence
  Oligonucleotide for detection of SNP TSC0052132
acggtaatttttg

SEQ ID NO: 214324 - DNA, 13 bp, Artificial Sequence
  Oligonucleotide for detection of SNP TSC0052132
caaaaattaccgt

SEQ ID NO: 214325 - DNA, 13 bp, Artificial Sequence
  Oligonucleotide for detection of SNP TSC0052132
acggtagtttttg

SEQ ID NO: 214326 - DNA, 13 bp, Artificial Sequence
  Oligonucleotide for detection of SNP TSC0052132
caaaaactaccgt

SEQ ID NO: 214327 - DNA, 13 bp, Artificial Sequence
  Oligonucleotide for detection of SNP TSC0052133
gagaatgaaataa

SEQ ID NO: 214328 - DNA, 13 bp, Artificial Sequence
  Oligonucleotide for detection of SNP TSC0052133
ttatttcattctc

SEQ ID NO: 214329 - DNA, 13 bp, Artificial Sequence
  Oligonucleotide for detection of SNP TSC0052133
gagaataaaataa

SEQ ID NO: 214330 - DNA, 13 bp, Artificial Sequence
  Oligonucleotide for detection of SNP TSC0052133
ttattttattctc

SEQ ID NO: 214331 - DNA, 13 bp, Artificial Sequence
  Oligonucleotide for detection of SNP TSC0052133
gagaacgaaataa

SEQ ID NO: 214332 - DNA, 13 bp, Artificial Sequence
  Oligonucleotide for detection of SNP TSC0052133
ttatttcgttctc

SEQ ID NO: 214333 - DNA, 13 bp, Artificial Sequence
  Oligonucleotide for detection of SNP TSC0052135
ttaaatatggttg

SEQ ID NO: 214334 - DNA, 13 bp, Artificial Sequence
  Oligonucleotide for detection of SNP TSC0052135
caaccatatttaa

SEQ ID NO: 214335 - DNA, 13 bp, Artificial Sequence
  Oligonucleotide for detection of SNP TSC0052135
ttaaatttggttg

SEQ ID NO: 214336 - DNA, 13 bp, Artificial Sequence
  Oligonucleotide for detection of SNP TSC0052135
caaccaaatttaa

SEQ ID NO: 214337 - DNA, 13 bp, Artificial Sequence
  Oligonucleotide for detection of SNP TSC0052135
tagttatgtttga

SEQ ID NO: 214338 - DNA, 13 bp, Artificial Sequence
  Oligonucleotide for detection of SNP TSC0052135
tcaaacataacta

SEQ ID NO: 214339 - DNA, 13 bp, Artificial Sequence
  Oligonucleotide for detection of SNP TSC0052135
tagttaggtttga

SEQ ID NO: 214340 - DNA, 13 bp, Artificial Sequence
  Oligonucleotide for detection of SNP TSC0052135
tcaaacctaacta

SEQ ID NO: 214341 - DNA, 13 bp, Artificial Sequence
  Oligonucleotide for detection of SNP TSC0052137
ttgaaaataagga

SEQ ID NO: 214342 - DNA, 13 bp, Artificial Sequence
  Oligonucleotide for detection of SNP TSC0052137
tccttattttcaa

SEQ ID NO: 214343 - DNA, 13 bp, Artificial Sequence
  Oligonucleotide for detection of SNP TSC0052137
ttgaaagtaagga

SEQ ID NO: 214344 - DNA, 13 bp, Artificial Sequence
  Oligonucleotide for detection of SNP TSC0052137
tccttactttcaa

SEQ ID NO: 214345 - DNA, 13 bp, Artificial Sequence
  Oligonucleotide for detection of SNP TSC0052138
atattaataatga

SEQ ID NO: 214346 - DNA, 13 bp, Artificial Sequence
  Oligonucleotide for detection of SNP TSC0052138
tcattattaatat

SEQ ID NO: 214347 - DNA, 13 bp, Artificial Sequence
  Oligonucleotide for detection of SNP TSC0052138
atattagtaatga

SEQ ID NO: 214348 - DNA, 13 bp, Artificial Sequence
  Oligonucleotide for detection of SNP TSC0052138
tcattactaatat

SEQ ID NO: 214349 - DNA, 13 bp, Artificial Sequence
  Oligonucleotide for detection of SNP TSC0052141
tattgtatgtgtt

SEQ ID NO: 214350 - DNA, 13 bp, Artificial Sequence
  Oligonucleotide for detection of SNP TSC0052141
aacacatacaata

SEQ ID NO: 214351 - DNA, 13 bp, Artificial Sequence
  Oligonucleotide for detection of SNP TSC0052141
tattgtgtgtgtt

SEQ ID NO: 214352 - DNA, 13 bp, Artificial Sequence
  Oligonucleotide for detection of SNP TSC0052141
aacacacacaata

SEQ ID NO: 214353 - DNA, 13 bp, Artificial Sequence
  Oligonucleotide for detection of SNP TSC0052143
agtttaggaatga

SEQ ID NO: 214354 - DNA, 13 bp, Artificial Sequence
  Oligonucleotide for detection of SNP TSC0052143
tcattcctaaact

SEQ ID NO: 214355 - DNA, 13 bp, Artificial Sequence
  Oligonucleotide for detection of SNP TSC0052143
agtttaagaatga

SEQ ID NO: 214356 - DNA, 13 bp, Artificial Sequence
  Oligonucleotide for detection of SNP TSC0052143
tcattcttaaact

SEQ ID NO: 214357 - DNA, 13 bp, Artificial Sequence
  Oligonucleotide for detection of SNP TSC0052144
attttgttttgtt

SEQ ID NO: 214358 - DNA, 13 bp, Artificial Sequence
  Oligonucleotide for detection of SNP TSC0052144
aacaaaacaaaat

SEQ ID NO: 214359 - DNA, 13 bp, Artificial Sequence
  Oligonucleotide for detection of SNP TSC0052144
attttggtttgtt

SEQ ID NO: 214360 - DNA, 13 bp, Artificial Sequence
  Oligonucleotide for detection of SNP TSC0052144
aacaaaccaaaat

SEQ ID NO: 214361 - DNA, 13 bp, Artificial Sequence
  Oligonucleotide for detection of SNP TSC0052144
aatagaatagagt

SEQ ID NO: 214362 - DNA, 13 bp, Artificial Sequence
  Oligonucleotide for detection of SNP TSC0052144
actctattctatt

SEQ ID NO: 214363 - DNA, 13 bp, Artificial Sequence
  Oligonucleotide for detection of SNP TSC0052144
aatagattagagt

SEQ ID NO: 214364 - DNA, 13 bp, Artificial Sequence
  Oligonucleotide for detection of SNP TSC0052144
actctaatctatt

SEQ ID NO: 214365 - DNA, 13 bp, Artificial Sequence
  Oligonucleotide for detection of SNP TSC0052145
taagttgtggttt

SEQ ID NO: 214366 - DNA, 13 bp, Artificial Sequence
  Oligonucleotide for detection of SNP TSC0052145
aaaccacaactta

SEQ ID NO: 214367 - DNA, 13 bp, Artificial Sequence
  Oligonucleotide for detection of SNP TSC0052146
tatttaggtttga

SEQ ID NO: 214368 - DNA, 13 bp, Artificial Sequence
  Oligonucleotide for detection of SNP TSC0052146
tcaaacctaaata

SEQ ID NO: 214369 - DNA, 13 bp, Artificial Sequence
  Oligonucleotide for detection of SNP TSC0052148
ttgtgagtattty

SEQ ID NO: 214370 - DNA, 13 bp, Artificial Sequence
  Oligonucleotide for detection of SNP TSC0052148
raaatactcacaa

SEQ ID NO: 214371 - DNA, 13 bp, Artificial Sequence
  Oligonucleotide for detection of SNP TSC0052148
ttgtgaatattty

SEQ ID NO: 214372 - DNA, 13 bp, Artificial Sequence
  Oligonucleotide for detection of SNP TSC0052148
raaatattcacaa

SEQ ID NO: 214373 - DNA, 13 bp, Artificial Sequence
  Oligonucleotide for detection of SNP TSC0052149
aggagggagatay

SEQ ID NO: 214374 - DNA, 13 bp, Artificial Sequence
  Oligonucleotide for detection of SNP TSC0052149
rtatctccctcct

SEQ ID NO: 214375 - DNA, 13 bp, Artificial Sequence
  Oligonucleotide for detection of SNP TSC0052149
aggaggaagatay

SEQ ID NO: 214376 - DNA, 13 bp, Artificial Sequence
  Oligonucleotide for detection of SNP TSC0052149
rtatcttcctcct

SEQ ID NO: 214377 - DNA, 13 bp, Artificial Sequence
  Oligonucleotide for detection of SNP TSC0052150
agaaaatggtgag

SEQ ID NO: 214378 - DNA, 13 bp, Artificial Sequence
  Oligonucleotide for detection of SNP TSC0052150
ctcaccattttct

SEQ ID NO: 214379 - DNA, 13 bp, Artificial Sequence
  Oligonucleotide for detection of SNP TSC0052150
agaaaacggtgag

SEQ ID NO: 214380 - DNA, 13 bp, Artificial Sequence
  Oligonucleotide for detection of SNP TSC0052150
ctcaccgttttct

SEQ ID NO: 214381 - DNA, 13 bp, Artificial Sequence
  Oligonucleotide for detection of SNP TSC0052150
agaaaatggcgag

SEQ ID NO: 214382 - DNA, 13 bp, Artificial Sequence
  Oligonucleotide for detection of SNP TSC0052150
ctcgccattttct

SEQ ID NO: 214383 - DNA, 13 bp, Artificial Sequence
  Oligonucleotide for detection of SNP TSC0052150
agaaaacggcgag

SEQ ID NO: 214384 - DNA, 13 bp, Artificial Sequence
  Oligonucleotide for detection of SNP TSC0052150
ctcgccgttttct

SEQ ID NO: 214385 - DNA, 13 bp, Artificial Sequence
  Oligonucleotide for detection of SNP TSC0052150
ttcgttgtttttt

SEQ ID NO: 214386 - DNA, 13 bp, Artificial Sequence
  Oligonucleotide for detection of SNP TSC0052150
aaaaaacaacgaa

SEQ ID NO: 214387 - DNA, 13 bp, Artificial Sequence
  Oligonucleotide for detection of SNP TSC0052150
ttcgttatttttt

SEQ ID NO: 214388 - DNA, 13 bp, Artificial Sequence
  Oligonucleotide for detection of SNP TSC0052150
aaaaaataacgaa

SEQ ID NO: 214389 - DNA, 13 bp, Artificial Sequence
  Oligonucleotide for detection of SNP TSC0052150
ttcgtcgtttttt

SEQ ID NO: 214390 - DNA, 13 bp, Artificial Sequence
  Oligonucleotide for detection of SNP TSC0052150
aaaaaacgacgaa

SEQ ID NO: 214391 - DNA, 13 bp, Artificial Sequence
  Oligonucleotide for detection of SNP TSC0052152
ttttgtatgaaat

SEQ ID NO: 214392 - DNA, 13 bp, Artificial Sequence
  Oligonucleotide for detection of SNP TSC0052152
atttcatacaaaa

SEQ ID NO: 214393 - DNA, 13 bp, Artificial Sequence
  Oligonucleotide for detection of SNP TSC0052152
ttttgtttgaaat

SEQ ID NO: 214394 - DNA, 13 bp, Artificial Sequence
  Oligonucleotide for detection of SNP TSC0052152
atttcaaacaaaa

SEQ ID NO: 214395 - DNA, 13 bp, Artificial Sequence
  Oligonucleotide for detection of SNP TSC0052152
attttatgtaagg

SEQ ID NO: 214396 - DNA, 13 bp, Artificial Sequence
  Oligonucleotide for detection of SNP TSC0052152
ccttacataaaat

SEQ ID NO: 214397 - DNA, 13 bp, Artificial Sequence
  Oligonucleotide for detection of SNP TSC0052152
attttaggtaagg

SEQ ID NO: 214398 - DNA, 13 bp, Artificial Sequence
  Oligonucleotide for detection of SNP TSC0052152
ccttacctaaaat

SEQ ID NO: 214399 - DNA, 13 bp, Artificial Sequence
  Oligonucleotide for detection of SNP TSC0052153
aagaataatattt

SEQ ID NO: 214400 - DNA, 13 bp, Artificial Sequence
  Oligonucleotide for detection of SNP TSC0052153
aaatattattctt

SEQ ID NO: 214401 - DNA, 13 bp, Artificial Sequence
  Oligonucleotide for detection of SNP TSC0052153
aagaatgatattt

SEQ ID NO: 214402 - DNA, 13 bp, Artificial Sequence
  Oligonucleotide for detection of SNP TSC0052153
aaatatcattctt

SEQ ID NO: 214403 - DNA, 13 bp, Artificial Sequence
  Oligonucleotide for detection of SNP TSC0052154
agaggaaggggga

SEQ ID NO: 214404 - DNA, 13 bp, Artificial Sequence
  Oligonucleotide for detection of SNP TSC0052154
tcccccttcctct

SEQ ID NO: 214405 - DNA, 13 bp, Artificial Sequence
  Oligonucleotide for detection of SNP TSC0052154
agaggagggggga

SEQ ID NO: 214406 - DNA, 13 bp, Artificial Sequence
  Oligonucleotide for detection of SNP TSC0052154
tcccccctcctct

SEQ ID NO: 214407 - DNA, 13 bp, Artificial Sequence
  Oligonucleotide for detection of SNP TSC0052157
tttagaaaggatt

SEQ ID NO: 214408 - DNA, 13 bp, Artificial Sequence
  Oligonucleotide for detection of SNP TSC0052157
aatcctttctaaa

SEQ ID NO: 214409 - DNA, 13 bp, Artificial Sequence
  Oligonucleotide for detection of SNP TSC0052157
tttagagaggatt

SEQ ID NO: 214410 - DNA, 13 bp, Artificial Sequence
  Oligonucleotide for detection of SNP TSC0052157
aatcctctctaaa

SEQ ID NO: 214411 - DNA, 13 bp, Artificial Sequence
  Oligonucleotide for detection of SNP TSC0052158
tgttatatatggt

SEQ ID NO: 214412 - DNA, 13 bp, Artificial Sequence
  Oligonucleotide for detection of SNP TSC0052158
accatatataaca

SEQ ID NO: 214413 - DNA, 13 bp, Artificial Sequence
  Oligonucleotide for detection of SNP TSC0052158
tgttatgtatggt

SEQ ID NO: 214414 - DNA, 13 bp, Artificial Sequence
  Oligonucleotide for detection of SNP TSC0052158
accatacataaca

SEQ ID NO: 214415 - DNA, 13 bp, Artificial Sequence
  Oligonucleotide for detection of SNP TSC0052159
gaagtggtatagt

SEQ ID NO: 214416 - DNA, 13 bp, Artificial Sequence
  Oligonucleotide for detection of SNP TSC0052159
actataccacttc

SEQ ID NO: 214417 - DNA, 13 bp, Artificial Sequence
  Oligonucleotide for detection of SNP TSC0052159
gaagtgatatagt

SEQ ID NO: 214418 - DNA, 13 bp, Artificial Sequence
  Oligonucleotide for detection of SNP TSC0052159
actatatcacttc

SEQ ID NO: 214419 - DNA, 13 bp, Artificial Sequence
  Oligonucleotide for detection of SNP TSC0052160
ttatattattttg

SEQ ID NO: 214420 - DNA, 13 bp, Artificial Sequence
  Oligonucleotide for detection of SNP TSC0052160
caaaataatataa

SEQ ID NO: 214421 - DNA, 13 bp, Artificial Sequence
  Oligonucleotide for detection of SNP TSC0052160
ttatatgattttg

SEQ ID NO: 214422 - DNA, 13 bp, Artificial Sequence
  Oligonucleotide for detection of SNP TSC0052160
caaaatcatataa

SEQ ID NO: 214423 - DNA, 13 bp, Artificial Sequence
  Oligonucleotide for detection of SNP TSC0052160
ttatattatttcg

SEQ ID NO: 214424 - DNA, 13 bp, Artificial Sequence
  Oligonucleotide for detection of SNP TSC0052160
cgaaataatataa

SEQ ID NO: 214425 - DNA, 13 bp, Artificial Sequence
  Oligonucleotide for detection of SNP TSC0052160
ttatacgattttg

SEQ ID NO: 214426 - DNA, 13 bp, Artificial Sequence
  Oligonucleotide for detection of SNP TSC0052160
caaaatcgtataa

SEQ ID NO: 214427 - DNA, 13 bp, Artificial Sequence
  Oligonucleotide for detection of SNP TSC0052160
ttatatgatttcg

SEQ ID NO: 214428 - DNA, 13 bp, Artificial Sequence
  Oligonucleotide for detection of SNP TSC0052160
cgaaatcatataa

SEQ ID NO: 214429 - DNA, 13 bp, Artificial Sequence
  Oligonucleotide for detection of SNP TSC0052160
ttatacgatttcg

SEQ ID NO: 214430 - DNA, 13 bp, Artificial Sequence
  Oligonucleotide for detection of SNP TSC0052160
cgaaatcgtataa

SEQ ID NO: 214431 - DNA, 13 bp, Artificial Sequence
  Oligonucleotide for detection of SNP TSC0052160
tgaagtggtatag

SEQ ID NO: 214432 - DNA, 13 bp, Artificial Sequence
  Oligonucleotide for detection of SNP TSC0052160
ctataccacttca

SEQ ID NO: 214433 - DNA, 13 bp, Artificial Sequence
  Oligonucleotide for detection of SNP TSC0052160
tgaagttgtatag

SEQ ID NO: 214434 - DNA, 13 bp, Artificial Sequence
  Oligonucleotide for detection of SNP TSC0052160
ctatacaacttca

SEQ ID NO: 214435 - DNA, 13 bp, Artificial Sequence
  Oligonucleotide for detection of SNP TSC0052160
cgaagtggtatag

SEQ ID NO: 214436 - DNA, 13 bp, Artificial Sequence
  Oligonucleotide for detection of SNP TSC0052160
ctataccacttcg

SEQ ID NO: 214437 - DNA, 13 bp, Artificial Sequence
  Oligonucleotide for detection of SNP TSC0052160
cgaagttgtatag

SEQ ID NO: 214438 - DNA, 13 bp, Artificial Sequence
  Oligonucleotide for detection of SNP TSC0052160
ctatacaacttcg

SEQ ID NO: 214439 - DNA, 13 bp, Artificial Sequence
  Oligonucleotide for detection of SNP TSC0052160
tgaagtcgtatag

SEQ ID NO: 214440 - DNA, 13 bp, Artificial Sequence
  Oligonucleotide for detection of SNP TSC0052160
ctatacgacttca

SEQ ID NO: 214441 - DNA, 13 bp, Artificial Sequence
  Oligonucleotide for detection of SNP TSC0052160
cgaagtcgtatag

SEQ ID NO: 214442 - DNA, 13 bp, Artificial Sequence
  Oligonucleotide for detection of SNP TSC0052160
ctatacgacttcg

SEQ ID NO: 214443 - DNA, 13 bp, Artificial Sequence
  Oligonucleotide for detection of SNP TSC0052163
ttagtagtgtaga

SEQ ID NO: 214444 - DNA, 13 bp, Artificial Sequence
  Oligonucleotide for detection of SNP TSC0052163
tctacactactaa

SEQ ID NO: 214445 - DNA, 13 bp, Artificial Sequence
  Oligonucleotide for detection of SNP TSC0052164
aagtaataaaaga

SEQ ID NO: 214446 - DNA, 13 bp, Artificial Sequence
  Oligonucleotide for detection of SNP TSC0052164
tcttttattactt

SEQ ID NO: 214447 - DNA, 13 bp, Artificial Sequence
  Oligonucleotide for detection of SNP TSC0052164
aagtaagaaaaga

SEQ ID NO: 214448 - DNA, 13 bp, Artificial Sequence
  Oligonucleotide for detection of SNP TSC0052164
tcttttcttactt

SEQ ID NO: 214449 - DNA, 13 bp, Artificial Sequence
  Oligonucleotide for detection of SNP TSC0052164
tttttttttgttt

SEQ ID NO: 214450 - DNA, 13 bp, Artificial Sequence
  Oligonucleotide for detection of SNP TSC0052164
aaacaaaaaaaaa

SEQ ID NO: 214451 - DNA, 13 bp, Artificial Sequence
  Oligonucleotide for detection of SNP TSC0052165
tatgatgatatat

SEQ ID NO: 214452 - DNA, 13 bp, Artificial Sequence
  Oligonucleotide for detection of SNP TSC0052165
atatatcatcata

SEQ ID NO: 214453 - DNA, 13 bp, Artificial Sequence
  Oligonucleotide for detection of SNP TSC0052165
tatgacgatatat

SEQ ID NO: 214454 - DNA, 13 bp, Artificial Sequence
  Oligonucleotide for detection of SNP TSC0052165
atatatcgtcata

SEQ ID NO: 214455 - DNA, 13 bp, Artificial Sequence
  Oligonucleotide for detection of SNP TSC0052165
atgtatggttatg

SEQ ID NO: 214456 - DNA, 13 bp, Artificial Sequence
  Oligonucleotide for detection of SNP TSC0052165
cataaccatacat

SEQ ID NO: 214457 - DNA, 13 bp, Artificial Sequence
  Oligonucleotide for detection of SNP TSC0052165
atgtattgttatg

SEQ ID NO: 214458 - DNA, 13 bp, Artificial Sequence
  Oligonucleotide for detection of SNP TSC0052165
cataacaatacat

SEQ ID NO: 214459 - DNA, 13 bp, Artificial Sequence
  Oligonucleotide for detection of SNP TSC0052165
atgtatcgttatg

SEQ ID NO: 214460 - DNA, 13 bp, Artificial Sequence
  Oligonucleotide for detection of SNP TSC0052165
cataacgatacat

SEQ ID NO: 214461 - DNA, 13 bp, Artificial Sequence
  Oligonucleotide for detection of SNP TSC0052167
gtggttatggtta

SEQ ID NO: 214462 - DNA, 13 bp, Artificial Sequence
  Oligonucleotide for detection of SNP TSC0052167
taaccataaccac

SEQ ID NO: 214463 - DNA, 13 bp, Artificial Sequence
  Oligonucleotide for detection of SNP TSC0052167
gtggttgtggtta

SEQ ID NO: 214464 - DNA, 13 bp, Artificial Sequence
  Oligonucleotide for detection of SNP TSC0052167
taaccacaaccac

SEQ ID NO: 214465 - DNA, 13 bp, Artificial Sequence
  Oligonucleotide for detection of SNP TSC0052167
gtggtcgtggtta

SEQ ID NO: 214466 - DNA, 13 bp, Artificial Sequence
  Oligonucleotide for detection of SNP TSC0052167
taaccacgaccac

SEQ ID NO: 214467 - DNA, 13 bp, Artificial Sequence
  Oligonucleotide for detection of SNP TSC0052167
tagttatggttay

SEQ ID NO: 214468 - DNA, 13 bp, Artificial Sequence
  Oligonucleotide for detection of SNP TSC0052167
rtaaccataacta

SEQ ID NO: 214469 - DNA, 13 bp, Artificial Sequence
  Oligonucleotide for detection of SNP TSC0052167
tagttacggttay

SEQ ID NO: 214470 - DNA, 13 bp, Artificial Sequence
  Oligonucleotide for detection of SNP TSC0052167
rtaaccgtaacta

SEQ ID NO: 214471 - DNA, 13 bp, Artificial Sequence
  Oligonucleotide for detection of SNP TSC0052168
tagaaagtatttt

SEQ ID NO: 214472 - DNA, 13 bp, Artificial Sequence
  Oligonucleotide for detection of SNP TSC0052168
aaaatactttcta

SEQ ID NO: 214473 - DNA, 13 bp, Artificial Sequence
  Oligonucleotide for detection of SNP TSC0052169
gttaggagttaay

SEQ ID NO: 214474 - DNA, 13 bp, Artificial Sequence
  Oligonucleotide for detection of SNP TSC0052169
rttaactcctaac

SEQ ID NO: 214475 - DNA, 13 bp, Artificial Sequence
  Oligonucleotide for detection of SNP TSC0052169
gttaggggttaay

SEQ ID NO: 214476 - DNA, 13 bp, Artificial Sequence
  Oligonucleotide for detection of SNP TSC0052169
rttaacccctaac

SEQ ID NO: 214477 - DNA, 13 bp, Artificial Sequence
  Oligonucleotide for detection of SNP TSC0052170
agaataggagtta

SEQ ID NO: 214478 - DNA, 13 bp, Artificial Sequence
  Oligonucleotide for detection of SNP TSC0052170
taactcctattct

SEQ ID NO: 214479 - DNA, 13 bp, Artificial Sequence
  Oligonucleotide for detection of SNP TSC0052170
agaataagagtta

SEQ ID NO: 214480 - DNA, 13 bp, Artificial Sequence
  Oligonucleotide for detection of SNP TSC0052170
taactcttattct

SEQ ID NO: 214481 - DNA, 13 bp, Artificial Sequence
  Oligonucleotide for detection of SNP TSC0052173
atgatgtttattt

SEQ ID NO: 214482 - DNA, 13 bp, Artificial Sequence
  Oligonucleotide for detection of SNP TSC0052173
aaataaacatcat

SEQ ID NO: 214483 - DNA, 13 bp, Artificial Sequence
  Oligonucleotide for detection of SNP TSC0052173
atgatggttattt

SEQ ID NO: 214484 - DNA, 13 bp, Artificial Sequence
  Oligonucleotide for detection of SNP TSC0052173
aaataaccatcat

SEQ ID NO: 214485 - DNA, 13 bp, Artificial Sequence
  Oligonucleotide for detection of SNP TSC0052173
agataaatattat

SEQ ID NO: 214486 - DNA, 13 bp, Artificial Sequence
  Oligonucleotide for detection of SNP TSC0052173
ataatatttatct

SEQ ID NO: 214487 - DNA, 13 bp, Artificial Sequence
  Oligonucleotide for detection of SNP TSC0052173
agataattattat

SEQ ID NO: 214488 - DNA, 13 bp, Artificial Sequence
  Oligonucleotide for detection of SNP TSC0052173
ataataattatct

SEQ ID NO: 214489 - DNA, 13 bp, Artificial Sequence
  Oligonucleotide for detection of SNP TSC0052174
tattaggatttag

SEQ ID NO: 214490 - DNA, 13 bp, Artificial Sequence
  Oligonucleotide for detection of SNP TSC0052174
ctaaatcctaata

SEQ ID NO: 214491 - DNA, 13 bp, Artificial Sequence
  Oligonucleotide for detection of SNP TSC0052174
tattagaatttag

SEQ ID NO: 214492 - DNA, 13 bp, Artificial Sequence
  Oligonucleotide for detection of SNP TSC0052174
ctaaattctaata

SEQ ID NO: 214493 - DNA, 13 bp, Artificial Sequence
  Oligonucleotide for detection of SNP TSC0052177
aaattataaaatt

SEQ ID NO: 214494 - DNA, 13 bp, Artificial Sequence
  Oligonucleotide for detection of SNP TSC0052177
aattttataattt

SEQ ID NO: 214495 - DNA, 13 bp, Artificial Sequence
  Oligonucleotide for detection of SNP TSC0052177
aaattagaaaatt

SEQ ID NO: 214496 - DNA, 13 bp, Artificial Sequence
  Oligonucleotide for detection of SNP TSC0052177
aattttctaattt

SEQ ID NO: 214497 - DNA, 13 bp, Artificial Sequence
  Oligonucleotide for detection of SNP TSC0052177
agttttgtaattt

SEQ ID NO: 214498 - DNA, 13 bp, Artificial Sequence
  Oligonucleotide for detection of SNP TSC0052177
aaattacaaaact

SEQ ID NO: 214499 - DNA, 13 bp, Artificial Sequence
  Oligonucleotide for detection of SNP TSC0052177
agttttttaattt

SEQ ID NO: 214500 - DNA, 13 bp, Artificial Sequence
  Oligonucleotide for detection of SNP TSC0052177
aaattaaaaaact

SEQ ID NO: 214501 - DNA, 13 bp, Artificial Sequence
  Oligonucleotide for detection of SNP TSC0052178
tttgatgtttttt

SEQ ID NO: 214502 - DNA, 13 bp, Artificial Sequence
  Oligonucleotide for detection of SNP TSC0052178
aaaaaacatcaaa

SEQ ID NO: 214503 - DNA, 13 bp, Artificial Sequence
  Oligonucleotide for detection of SNP TSC0052178
tttgatatttttt

SEQ ID NO: 214504 - DNA, 13 bp, Artificial Sequence
  Oligonucleotide for detection of SNP TSC0052178
aaaaaatatcaaa

SEQ ID NO: 214505 - DNA, 13 bp, Artificial Sequence
  Oligonucleotide for detection of SNP TSC0052178
ttcgatgtttttt

SEQ ID NO: 214506 - DNA, 13 bp, Artificial Sequence
  Oligonucleotide for detection of SNP TSC0052178
aaaaaacatcgaa

SEQ ID NO: 214507 - DNA, 13 bp, Artificial Sequence
  Oligonucleotide for detection of SNP TSC0052178
ttcgatatttttt

SEQ ID NO: 214508 - DNA, 13 bp, Artificial Sequence
  Oligonucleotide for detection of SNP TSC0052178
aaaaaatatcgaa

SEQ ID NO: 214509 - DNA, 13 bp, Artificial Sequence
  Oligonucleotide for detection of SNP TSC0052181
tggaaagaattta

SEQ ID NO: 214510 - DNA, 13 bp, Artificial Sequence
  Oligonucleotide for detection of SNP TSC0052181
taaattctttcca

SEQ ID NO: 214511 - DNA, 13 bp, Artificial Sequence
  Oligonucleotide for detection of SNP TSC0052181
tggaaaaaattta

SEQ ID NO: 214512 - DNA, 13 bp, Artificial Sequence
  Oligonucleotide for detection of SNP TSC0052181
taaattttttcca

SEQ ID NO: 214513 - DNA, 13 bp, Artificial Sequence
  Oligonucleotide for detection of SNP TSC0052182
tgtattatgtggt

SEQ ID NO: 214514 - DNA, 13 bp, Artificial Sequence
  Oligonucleotide for detection of SNP TSC0052182
accacataataca

SEQ ID NO: 214515 - DNA, 13 bp, Artificial Sequence
  Oligonucleotide for detection of SNP TSC0052182
tgtattttgtggt

SEQ ID NO: 214516 - DNA, 13 bp, Artificial Sequence
  Oligonucleotide for detection of SNP TSC0052182
accacaaaataca

SEQ ID NO: 214517 - DNA, 13 bp, Artificial Sequence
  Oligonucleotide for detection of SNP TSC0052183
gtattgagattay

SEQ ID NO: 214518 - DNA, 13 bp, Artificial Sequence
  Oligonucleotide for detection of SNP TSC0052183
rtaatctcaatac

SEQ ID NO: 214519 - DNA, 13 bp, Artificial Sequence
  Oligonucleotide for detection of SNP TSC0052183
gtattgggattay

SEQ ID NO: 214520 - DNA, 13 bp, Artificial Sequence
  Oligonucleotide for detection of SNP TSC0052183
rtaatcccaatac

SEQ ID NO: 214521 - DNA, 13 bp, Artificial Sequence
  Oligonucleotide for detection of SNP TSC0052185
attgtaattttcg

SEQ ID NO: 214522 - DNA, 13 bp, Artificial Sequence
  Oligonucleotide for detection of SNP TSC0052185
cgaaaattacaat

SEQ ID NO: 214523 - DNA, 13 bp, Artificial Sequence
  Oligonucleotide for detection of SNP TSC0052185
attgtatttttcg

SEQ ID NO: 214524 - DNA, 13 bp, Artificial Sequence
  Oligonucleotide for detection of SNP TSC0052185
cgaaaaatacaat

SEQ ID NO: 214525 - DNA, 13 bp, Artificial Sequence
  Oligonucleotide for detection of SNP TSC0052188
ttatttggattta

SEQ ID NO: 214526 - DNA, 13 bp, Artificial Sequence
  Oligonucleotide for detection of SNP TSC0052188
taaatccaaataa

SEQ ID NO: 214527 - DNA, 13 bp, Artificial Sequence
  Oligonucleotide for detection of SNP TSC0052188
ttatttagattta

SEQ ID NO: 214528 - DNA, 13 bp, Artificial Sequence
  Oligonucleotide for detection of SNP TSC0052188
taaatctaaataa

SEQ ID NO: 214529 - DNA, 13 bp, Artificial Sequence
  Oligonucleotide for detection of SNP TSC0052189
agaaattagtgtg

SEQ ID NO: 214530 - DNA, 13 bp, Artificial Sequence
  Oligonucleotide for detection of SNP TSC0052189
cacactaatttct

SEQ ID NO: 214531 - DNA, 13 bp, Artificial Sequence
  Oligonucleotide for detection of SNP TSC0052189
agaaatgagtgtg

SEQ ID NO: 214532 - DNA, 13 bp, Artificial Sequence
  Oligonucleotide for detection of SNP TSC0052189
cacactcatttct

SEQ ID NO: 214533 - DNA, 13 bp, Artificial Sequence
  Oligonucleotide for detection of SNP TSC0052190
ggggtatagaatg

SEQ ID NO: 214534 - DNA, 13 bp, Artificial Sequence
  Oligonucleotide for detection of SNP TSC0052190
cattctatacccc

SEQ ID NO: 214535 - DNA, 13 bp, Artificial Sequence
  Oligonucleotide for detection of SNP TSC0052190
ggggtagagaatg

SEQ ID NO: 214536 - DNA, 13 bp, Artificial Sequence
  Oligonucleotide for detection of SNP TSC0052190
cattctctacccc

SEQ ID NO: 214537 - DNA, 13 bp, Artificial Sequence
  Oligonucleotide for detection of SNP TSC0052190
ggggtatagaacg

SEQ ID NO: 214538 - DNA, 13 bp, Artificial Sequence
  Oligonucleotide for detection of SNP TSC0052190
cgttctatacccc

SEQ ID NO: 214539 - DNA, 13 bp, Artificial Sequence
  Oligonucleotide for detection of SNP TSC0052190
ggggtagagaacg

SEQ ID NO: 214540 - DNA, 13 bp, Artificial Sequence
  Oligonucleotide for detection of SNP TSC0052190
cgttctctacccc

SEQ ID NO: 214541 - DNA, 13 bp, Artificial Sequence
  Oligonucleotide for detection of SNP TSC0052190
tgttttgtgttty

SEQ ID NO: 214542 - DNA, 13 bp, Artificial Sequence
  Oligonucleotide for detection of SNP TSC0052190
raaacacaaaaca

SEQ ID NO: 214543 - DNA, 13 bp, Artificial Sequence
  Oligonucleotide for detection of SNP TSC0052190
tgttttttgttty

SEQ ID NO: 214544 - DNA, 13 bp, Artificial Sequence
  Oligonucleotide for detection of SNP TSC0052190
raaacaaaaaaca

SEQ ID NO: 214545 - DNA, 13 bp, Artificial Sequence
  Oligonucleotide for detection of SNP TSC0052190
cgttttgtgttty

SEQ ID NO: 214546 - DNA, 13 bp, Artificial Sequence
  Oligonucleotide for detection of SNP TSC0052190
raaacacaaaacg

SEQ ID NO: 214547 - DNA, 13 bp, Artificial Sequence
  Oligonucleotide for detection of SNP TSC0052190
cgttttttgttty

SEQ ID NO: 214548 - DNA, 13 bp, Artificial Sequence
  Oligonucleotide for detection of SNP TSC0052190
raaacaaaaaacg

SEQ ID NO: 214549 - DNA, 13 bp, Artificial Sequence
  Oligonucleotide for detection of SNP TSC0052195
ttaatagattttt

SEQ ID NO: 214550 - DNA, 13 bp, Artificial Sequence
  Oligonucleotide for detection of SNP TSC0052195
aaaaatctattaa

SEQ ID NO: 214551 - DNA, 13 bp, Artificial Sequence
  Oligonucleotide for detection of SNP TSC0052195
ttaataaattttt

SEQ ID NO: 214552 - DNA, 13 bp, Artificial Sequence
  Oligonucleotide for detection of SNP TSC0052195
aaaaatttattaa

SEQ ID NO: 214553 - DNA, 13 bp, Artificial Sequence
  Oligonucleotide for detection of SNP TSC0052201
gttgatttatggt

SEQ ID NO: 214554 - DNA, 13 bp, Artificial Sequence
  Oligonucleotide for detection of SNP TSC0052201
accataaatcaac

SEQ ID NO: 214555 - DNA, 13 bp, Artificial Sequence
  Oligonucleotide for detection of SNP TSC0052201
gttgatgtatggt

SEQ ID NO: 214556 - DNA, 13 bp, Artificial Sequence
  Oligonucleotide for detection of SNP TSC0052201
accatacatcaac

SEQ ID NO: 214557 - DNA, 13 bp, Artificial Sequence
  Oligonucleotide for detection of SNP TSC0052201
gttgacgtatggt

SEQ ID NO: 214558 - DNA, 13 bp, Artificial Sequence
  Oligonucleotide for detection of SNP TSC0052201
accatacgtcaac

SEQ ID NO: 214559 - DNA, 13 bp, Artificial Sequence
  Oligonucleotide for detection of SNP TSC0052201
attataggttaay

SEQ ID NO: 214560 - DNA, 13 bp, Artificial Sequence
  Oligonucleotide for detection of SNP TSC0052201
rttaacctataat

SEQ ID NO: 214561 - DNA, 13 bp, Artificial Sequence
  Oligonucleotide for detection of SNP TSC0052201
attatatgttaay

SEQ ID NO: 214562 - DNA, 13 bp, Artificial Sequence
  Oligonucleotide for detection of SNP TSC0052201
rttaacatataat

SEQ ID NO: 214563 - DNA, 13 bp, Artificial Sequence
  Oligonucleotide for detection of SNP TSC0052201
attatacgttaay

SEQ ID NO: 214564 - DNA, 13 bp, Artificial Sequence
  Oligonucleotide for detection of SNP TSC0052201
rttaacgtataat

SEQ ID NO: 214565 - DNA, 13 bp, Artificial Sequence
  Oligonucleotide for detection of SNP TSC0052202
ttttggttatttt

SEQ ID NO: 214566 - DNA, 13 bp, Artificial Sequence
  Oligonucleotide for detection of SNP TSC0052202
aaaataaccaaaa

SEQ ID NO: 214567 - DNA, 13 bp, Artificial Sequence
  Oligonucleotide for detection of SNP TSC0052202
aaaatatttaaag

SEQ ID NO: 214568 - DNA, 13 bp, Artificial Sequence
  Oligonucleotide for detection of SNP TSC0052202
ctttaaatatttt

SEQ ID NO: 214569 - DNA, 13 bp, Artificial Sequence
  Oligonucleotide for detection of SNP TSC0052202
aaaataattaaag

SEQ ID NO: 214570 - DNA, 13 bp, Artificial Sequence
  Oligonucleotide for detection of SNP TSC0052202
ctttaattatttt

SEQ ID NO: 214571 - DNA, 13 bp, Artificial Sequence
  Oligonucleotide for detection of SNP TSC0052203
aggtatagtattt

SEQ ID NO: 214572 - DNA, 13 bp, Artificial Sequence
  Oligonucleotide for detection of SNP TSC0052203
aaatactatacct

SEQ ID NO: 214573 - DNA, 13 bp, Artificial Sequence
  Oligonucleotide for detection of SNP TSC0052203
aggtatggtattt

SEQ ID NO: 214574 - DNA, 13 bp, Artificial Sequence
  Oligonucleotide for detection of SNP TSC0052203
aaataccatacct

SEQ ID NO: 214575 - DNA, 13 bp, Artificial Sequence
  Oligonucleotide for detection of SNP TSC0052204
taatttaatttat

SEQ ID NO: 214576 - DNA, 13 bp, Artificial Sequence
  Oligonucleotide for detection of SNP TSC0052204
ataaattaaatta

SEQ ID NO: 214577 - DNA, 13 bp, Artificial Sequence
  Oligonucleotide for detection of SNP TSC0052204
atgaattggattg

SEQ ID NO: 214578 - DNA, 13 bp, Artificial Sequence
  Oligonucleotide for detection of SNP TSC0052204
caatccaattcat

SEQ ID NO: 214579 - DNA, 13 bp, Artificial Sequence
  Oligonucleotide for detection of SNP TSC0052204
atgaatgggattg

SEQ ID NO: 214580 - DNA, 13 bp, Artificial Sequence
  Oligonucleotide for detection of SNP TSC0052204
caatcccattcat

SEQ ID NO: 214581 - DNA, 13 bp, Artificial Sequence
  Oligonucleotide for detection of SNP TSC0052206
ggaataatttaty

SEQ ID NO: 214582 - DNA, 13 bp, Artificial Sequence
  Oligonucleotide for detection of SNP TSC0052206
rataaattattcc

SEQ ID NO: 214583 - DNA, 13 bp, Artificial Sequence
  Oligonucleotide for detection of SNP TSC0052206
ggaatagtttaty

SEQ ID NO: 214584 - DNA, 13 bp, Artificial Sequence
  Oligonucleotide for detection of SNP TSC0052206
rataaactattcc

SEQ ID NO: 214585 - DNA, 13 bp, Artificial Sequence
  Oligonucleotide for detection of SNP TSC0052211
agggggtggtgag

SEQ ID NO: 214586 - DNA, 13 bp, Artificial Sequence
  Oligonucleotide for detection of SNP TSC0052211
ctcaccaccccct

SEQ ID NO: 214587 - DNA, 13 bp, Artificial Sequence
  Oligonucleotide for detection of SNP TSC0052211
aggggggggtgag

SEQ ID NO: 214588 - DNA, 13 bp, Artificial Sequence
  Oligonucleotide for detection of SNP TSC0052211
ctcacccccccct

SEQ ID NO: 214589 - DNA, 13 bp, Artificial Sequence
  Oligonucleotide for detection of SNP TSC0052212
aagaaaatattat

SEQ ID NO: 214590 - DNA, 13 bp, Artificial Sequence
  Oligonucleotide for detection of SNP TSC0052212
ataatattttctt

SEQ ID NO: 214591 - DNA, 13 bp, Artificial Sequence
  Oligonucleotide for detection of SNP TSC0052212
aagaaagtattat

SEQ ID NO: 214592 - DNA, 13 bp, Artificial Sequence
  Oligonucleotide for detection of SNP TSC0052212
ataatactttctt

SEQ ID NO: 214593 - DNA, 13 bp, Artificial Sequence
  Oligonucleotide for detection of SNP TSC0052215
tgggttggggggy

SEQ ID NO: 214594 - DNA, 13 bp, Artificial Sequence
  Oligonucleotide for detection of SNP TSC0052215
rccccccaaccca

SEQ ID NO: 214595 - DNA, 13 bp, Artificial Sequence
  Oligonucleotide for detection of SNP TSC0052215
tgggttagggggy

SEQ ID NO: 214596 - DNA, 13 bp, Artificial Sequence
  Oligonucleotide for detection of SNP TSC0052215
rccccctaaccca

SEQ ID NO: 214597 - DNA, 13 bp, Artificial Sequence
  Oligonucleotide for detection of SNP TSC0052215
tgggtcggggggy

SEQ ID NO: 214598 - DNA, 13 bp, Artificial Sequence
  Oligonucleotide for detection of SNP TSC0052215
rccccccgaccca

SEQ ID NO: 214599 - DNA, 13 bp, Artificial Sequence
  Oligonucleotide for detection of SNP TSC0052216
attatagtaatgt

SEQ ID NO: 214600 - DNA, 13 bp, Artificial Sequence
  Oligonucleotide for detection of SNP TSC0052216
acattactataat

SEQ ID NO: 214601 - DNA, 13 bp, Artificial Sequence
  Oligonucleotide for detection of SNP TSC0052216
attataataatgt

SEQ ID NO: 214602 - DNA, 13 bp, Artificial Sequence
  Oligonucleotide for detection of SNP TSC0052216
acattattataat

SEQ ID NO: 214603 - DNA, 13 bp, Artificial Sequence
  Oligonucleotide for detection of SNP TSC0052217
gttttgtttttaa

SEQ ID NO: 214604 - DNA, 13 bp, Artificial Sequence
  Oligonucleotide for detection of SNP TSC0052217
ttaaaaacaaaac

SEQ ID NO: 214605 - DNA, 13 bp, Artificial Sequence
  Oligonucleotide for detection of SNP TSC0052217
gttttggttttaa

SEQ ID NO: 214606 - DNA, 13 bp, Artificial Sequence
  Oligonucleotide for detection of SNP TSC0052217
ttaaaaccaaaac

SEQ ID NO: 214607 - DNA, 13 bp, Artificial Sequence
  Oligonucleotide for detection of SNP TSC0052217
ttgagaatagagy

SEQ ID NO: 214608 - DNA, 13 bp, Artificial Sequence
  Oligonucleotide for detection of SNP TSC0052217
rctctattctcaa

SEQ ID NO: 214609 - DNA, 13 bp, Artificial Sequence
  Oligonucleotide for detection of SNP TSC0052217
ttgagattagagy

SEQ ID NO: 214610 - DNA, 13 bp, Artificial Sequence
  Oligonucleotide for detection of SNP TSC0052217
rctctaatctcaa

SEQ ID NO: 214611 - DNA, 13 bp, Artificial Sequence
  Oligonucleotide for detection of SNP TSC0052224
ttaggggttggag

SEQ ID NO: 214612 - DNA, 13 bp, Artificial Sequence
  Oligonucleotide for detection of SNP TSC0052224
ctccaacccctaa

SEQ ID NO: 214613 - DNA, 13 bp, Artificial Sequence
  Oligonucleotide for detection of SNP TSC0052224
ttagggattggag

SEQ ID NO: 214614 - DNA, 13 bp, Artificial Sequence
  Oligonucleotide for detection of SNP TSC0052224
ctccaatccctaa

SEQ ID NO: 214615 - DNA, 13 bp, Artificial Sequence
  Oligonucleotide for detection of SNP TSC0052224
ttaggggtcggag

SEQ ID NO: 214616 - DNA, 13 bp, Artificial Sequence
  Oligonucleotide for detection of SNP TSC0052224
ctccgacccctaa

SEQ ID NO: 214617 - DNA, 13 bp, Artificial Sequence
  Oligonucleotide for detection of SNP TSC0052224
ttagggatcggag

SEQ ID NO: 214618 - DNA, 13 bp, Artificial Sequence
  Oligonucleotide for detection of SNP TSC0052224
ctccgatccctaa

SEQ ID NO: 214619 - DNA, 13 bp, Artificial Sequence
  Oligonucleotide for detection of SNP TSC0052227
tgtttgatatttt

SEQ ID NO: 214620 - DNA, 13 bp, Artificial Sequence
  Oligonucleotide for detection of SNP TSC0052227
aaaatatcaaaca

SEQ ID NO: 214621 - DNA, 13 bp, Artificial Sequence
  Oligonucleotide for detection of SNP TSC0052227
tgtttggtatttt

SEQ ID NO: 214622 - DNA, 13 bp, Artificial Sequence
  Oligonucleotide for detection of SNP TSC0052227
aaaataccaaaca

SEQ ID NO: 214623 - DNA, 13 bp, Artificial Sequence
  Oligonucleotide for detection of SNP TSC0052228
ggagtatgaaagy

SEQ ID NO: 214624 - DNA, 13 bp, Artificial Sequence
  Oligonucleotide for detection of SNP TSC0052228
rctttcatactcc

SEQ ID NO: 214625 - DNA, 13 bp, Artificial Sequence
  Oligonucleotide for detection of SNP TSC0052228
ggagtaggaaagy

SEQ ID NO: 214626 - DNA, 13 bp, Artificial Sequence
  Oligonucleotide for detection of SNP TSC0052228
rctttcctactcc

SEQ ID NO: 214627 - DNA, 13 bp, Artificial Sequence
  Oligonucleotide for detection of SNP TSC0052228
ggagtacgaaagy

SEQ ID NO: 214628 - DNA, 13 bp, Artificial Sequence
  Oligonucleotide for detection of SNP TSC0052228
rctttcgtactcc

SEQ ID NO: 214629 - DNA, 13 bp, Artificial Sequence
  Oligonucleotide for detection of SNP TSC0052229
tttttgatgttaa

SEQ ID NO: 214630 - DNA, 13 bp, Artificial Sequence
  Oligonucleotide for detection of SNP TSC0052229
ttaacatcaaaaa

SEQ ID NO: 214631 - DNA, 13 bp, Artificial Sequence
  Oligonucleotide for detection of SNP TSC0052229
tttttggtgttaa

SEQ ID NO: 214632 - DNA, 13 bp, Artificial Sequence
  Oligonucleotide for detection of SNP TSC0052229
ttaacaccaaaaa

SEQ ID NO: 214633 - DNA, 13 bp, Artificial Sequence
  Oligonucleotide for detection of SNP TSC0052230
ttgagtagaaagy

SEQ ID NO: 214634 - DNA, 13 bp, Artificial Sequence
  Oligonucleotide for detection of SNP TSC0052230
rctttctactcaa

SEQ ID NO: 214635 - DNA, 13 bp, Artificial Sequence
  Oligonucleotide for detection of SNP TSC0052230
ttgagtggaaagy

SEQ ID NO: 214636 - DNA, 13 bp, Artificial Sequence
  Oligonucleotide for detection of SNP TSC0052230
rctttccactcaa

SEQ ID NO: 214637 - DNA, 13 bp, Artificial Sequence
  Oligonucleotide for detection of SNP TSC0052230
tcgagtagaaagy

SEQ ID NO: 214638 - DNA, 13 bp, Artificial Sequence
  Oligonucleotide for detection of SNP TSC0052230
rctttctactcga

SEQ ID NO: 214639 - DNA, 13 bp, Artificial Sequence
  Oligonucleotide for detection of SNP TSC0052230
tcgagtggaaagy

SEQ ID NO: 214640 - DNA, 13 bp, Artificial Sequence
  Oligonucleotide for detection of SNP TSC0052230
rctttccactcga

SEQ ID NO: 214641 - DNA, 13 bp, Artificial Sequence
  Oligonucleotide for detection of SNP TSC0052230
ttgagcggaaagy

SEQ ID NO: 214642 - DNA, 13 bp, Artificial Sequence
  Oligonucleotide for detection of SNP TSC0052230
rctttccgctcaa

SEQ ID NO: 214643 - DNA, 13 bp, Artificial Sequence
  Oligonucleotide for detection of SNP TSC0052230
tcgagcggaaagy

SEQ ID NO: 214644 - DNA, 13 bp, Artificial Sequence
  Oligonucleotide for detection of SNP TSC0052230
rctttccgctcga

SEQ ID NO: 214645 - DNA, 13 bp, Artificial Sequence
  Oligonucleotide for detection of SNP TSC0052230
gttttttgttcga

SEQ ID NO: 214646 - DNA, 13 bp, Artificial Sequence
  Oligonucleotide for detection of SNP TSC0052230
tcgaacaaaaaac

SEQ ID NO: 214647 - DNA, 13 bp, Artificial Sequence
  Oligonucleotide for detection of SNP TSC0052230
gtttttcgttcga

SEQ ID NO: 214648 - DNA, 13 bp, Artificial Sequence
  Oligonucleotide for detection of SNP TSC0052230
tcgaacgaaaaac

SEQ ID NO: 214649 - DNA, 13 bp, Artificial Sequence
  Oligonucleotide for detection of SNP TSC0052231
tttgttataagta

SEQ ID NO: 214650 - DNA, 13 bp, Artificial Sequence
  Oligonucleotide for detection of SNP TSC0052231
tacttataacaaa

SEQ ID NO: 214651 - DNA, 13 bp, Artificial Sequence
  Oligonucleotide for detection of SNP TSC0052231
tttgttgtaagta

SEQ ID NO: 214652 - DNA, 13 bp, Artificial Sequence
  Oligonucleotide for detection of SNP TSC0052231
tacttacaacaaa

SEQ ID NO: 214653 - DNA, 13 bp, Artificial Sequence
  Oligonucleotide for detection of SNP TSC0052232
ggtggtataaaay

SEQ ID NO: 214654 - DNA, 13 bp, Artificial Sequence
  Oligonucleotide for detection of SNP TSC0052232
rttttataccacc

SEQ ID NO: 214655 - DNA, 13 bp, Artificial Sequence
  Oligonucleotide for detection of SNP TSC0052232
ggtggtgtaaaay

SEQ ID NO: 214656 - DNA, 13 bp, Artificial Sequence
  Oligonucleotide for detection of SNP TSC0052232
rttttacaccacc

SEQ ID NO: 214657 - DNA, 13 bp, Artificial Sequence
  Oligonucleotide for detection of SNP TSC0052232
ggtggcgtaaaay

SEQ ID NO: 214658 - DNA, 13 bp, Artificial Sequence
  Oligonucleotide for detection of SNP TSC0052232
rttttacgccacc

SEQ ID NO: 214659 - DNA, 13 bp, Artificial Sequence
  Oligonucleotide for detection of SNP TSC0052232
gttttatgttaty

SEQ ID NO: 214660 - DNA, 13 bp, Artificial Sequence
  Oligonucleotide for detection of SNP TSC0052232
rataacataaaac

SEQ ID NO: 214661 - DNA, 13 bp, Artificial Sequence
  Oligonucleotide for detection of SNP TSC0052232
gttttacgttaty

SEQ ID NO: 214662 - DNA, 13 bp, Artificial Sequence
  Oligonucleotide for detection of SNP TSC0052232
rataacgtaaaac

SEQ ID NO: 214663 - DNA, 13 bp, Artificial Sequence
  Oligonucleotide for detection of SNP TSC0052233
attgtagttataa

SEQ ID NO: 214664 - DNA, 13 bp, Artificial Sequence
  Oligonucleotide for detection of SNP TSC0052233
ttataactacaat

SEQ ID NO: 214665 - DNA, 13 bp, Artificial Sequence
  Oligonucleotide for detection of SNP TSC0052233
attgtaattataa

SEQ ID NO: 214666 - DNA, 13 bp, Artificial Sequence
  Oligonucleotide for detection of SNP TSC0052233
ttataattacaat

SEQ ID NO: 214667 - DNA, 13 bp, Artificial Sequence
  Oligonucleotide for detection of SNP TSC0052234
aaaattgtaatat

SEQ ID NO: 214668 - DNA, 13 bp, Artificial Sequence
  Oligonucleotide for detection of SNP TSC0052234
atattacaatttt

SEQ ID NO: 214669 - DNA, 13 bp, Artificial Sequence
  Oligonucleotide for detection of SNP TSC0052235
taaattgtatttg

SEQ ID NO: 214670 - DNA, 13 bp, Artificial Sequence
  Oligonucleotide for detection of SNP TSC0052235
caaatacaattta

SEQ ID NO: 214671 - DNA, 13 bp, Artificial Sequence
  Oligonucleotide for detection of SNP TSC0052235
taaattatatttg

SEQ ID NO: 214672 - DNA, 13 bp, Artificial Sequence
  Oligonucleotide for detection of SNP TSC0052235
caaatataattta

SEQ ID NO: 214673 - DNA, 13 bp, Artificial Sequence
  Oligonucleotide for detection of SNP TSC0052236
tttagattaatgt

SEQ ID NO: 214674 - DNA, 13 bp, Artificial Sequence
  Oligonucleotide for detection of SNP TSC0052236
acattaatctaaa

SEQ ID NO: 214675 - DNA, 13 bp, Artificial Sequence
  Oligonucleotide for detection of SNP TSC0052236
tttagagtaatgt

SEQ ID NO: 214676 - DNA, 13 bp, Artificial Sequence
  Oligonucleotide for detection of SNP TSC0052236
acattactctaaa

SEQ ID NO: 214677 - DNA, 13 bp, Artificial Sequence
  Oligonucleotide for detection of SNP TSC0052237
agaggaggattgy

SEQ ID NO: 214678 - DNA, 13 bp, Artificial Sequence
  Oligonucleotide for detection of SNP TSC0052237
rcaatcctcctct

SEQ ID NO: 214679 - DNA, 13 bp, Artificial Sequence
  Oligonucleotide for detection of SNP TSC0052237
agaggaagattgy

SEQ ID NO: 214680 - DNA, 13 bp, Artificial Sequence
  Oligonucleotide for detection of SNP TSC0052237
rcaatcttcctct

SEQ ID NO: 214681 - DNA, 13 bp, Artificial Sequence
  Oligonucleotide for detection of SNP TSC0052237
agaggaggatcgy

SEQ ID NO: 214682 - DNA, 13 bp, Artificial Sequence
  Oligonucleotide for detection of SNP TSC0052237
rcgatcctcctct

SEQ ID NO: 214683 - DNA, 13 bp, Artificial Sequence
  Oligonucleotide for detection of SNP TSC0052237
agaggaagatcgy

SEQ ID NO: 214684 - DNA, 13 bp, Artificial Sequence
  Oligonucleotide for detection of SNP TSC0052237
rcgatcttcctct

SEQ ID NO: 214685 - DNA, 13 bp, Artificial Sequence
  Oligonucleotide for detection of SNP TSC0052238
ttggtagtgttty

SEQ ID NO: 214686 - DNA, 13 bp, Artificial Sequence
  Oligonucleotide for detection of SNP TSC0052238
raaacactaccaa

SEQ ID NO: 214687 - DNA, 13 bp, Artificial Sequence
  Oligonucleotide for detection of SNP TSC0052238
ttggtaatgttty

SEQ ID NO: 214688 - DNA, 13 bp, Artificial Sequence
  Oligonucleotide for detection of SNP TSC0052238
raaacattaccaa

SEQ ID NO: 214689 - DNA, 13 bp, Artificial Sequence
  Oligonucleotide for detection of SNP TSC0052243
tgtggttgttggy

SEQ ID NO: 214690 - DNA, 13 bp, Artificial Sequence
  Oligonucleotide for detection of SNP TSC0052243
rccaacaaccaca

SEQ ID NO: 214691 - DNA, 13 bp, Artificial Sequence
  Oligonucleotide for detection of SNP TSC0052243
tgtggtcgttggy

SEQ ID NO: 214692 - DNA, 13 bp, Artificial Sequence
  Oligonucleotide for detection of SNP TSC0052243
rccaacgaccaca

SEQ ID NO: 214693 - DNA, 13 bp, Artificial Sequence
  Oligonucleotide for detection of SNP TSC0052243
gttagtggttata

SEQ ID NO: 214694 - DNA, 13 bp, Artificial Sequence
  Oligonucleotide for detection of SNP TSC0052243
tataaccactaac

SEQ ID NO: 214695 - DNA, 13 bp, Artificial Sequence
  Oligonucleotide for detection of SNP TSC0052243
gttagtagttata

SEQ ID NO: 214696 - DNA, 13 bp, Artificial Sequence
  Oligonucleotide for detection of SNP TSC0052243
tataactactaac

SEQ ID NO: 214697 - DNA, 13 bp, Artificial Sequence
  Oligonucleotide for detection of SNP TSC0052243
gttagcggttata

SEQ ID NO: 214698 - DNA, 13 bp, Artificial Sequence
  Oligonucleotide for detection of SNP TSC0052243
tataaccgctaac

SEQ ID NO: 214699 - DNA, 13 bp, Artificial Sequence
  Oligonucleotide for detection of SNP TSC0052244
ttatttatggttg

SEQ ID NO: 214700 - DNA, 13 bp, Artificial Sequence
  Oligonucleotide for detection of SNP TSC0052244
caaccataaataa

SEQ ID NO: 214701 - DNA, 13 bp, Artificial Sequence
  Oligonucleotide for detection of SNP TSC0052245
tgagagggttggt

SEQ ID NO: 214702 - DNA, 13 bp, Artificial Sequence
  Oligonucleotide for detection of SNP TSC0052245
accaaccctctca

SEQ ID NO: 214703 - DNA, 13 bp, Artificial Sequence
  Oligonucleotide for detection of SNP TSC0052245
tgagagagttggt

SEQ ID NO: 214704 - DNA, 13 bp, Artificial Sequence
  Oligonucleotide for detection of SNP TSC0052245
accaactctctca

SEQ ID NO: 214705 - DNA, 13 bp, Artificial Sequence
  Oligonucleotide for detection of SNP TSC0052248
tagttgataagga

SEQ ID NO: 214706 - DNA, 13 bp, Artificial Sequence
  Oligonucleotide for detection of SNP TSC0052248
tccttatcaacta

SEQ ID NO: 214707 - DNA, 13 bp, Artificial Sequence
  Oligonucleotide for detection of SNP TSC0052248
tagttgttaagga

SEQ ID NO: 214708 - DNA, 13 bp, Artificial Sequence
  Oligonucleotide for detection of SNP TSC0052248
tccttaacaacta

SEQ ID NO: 214709 - DNA, 13 bp, Artificial Sequence
  Oligonucleotide for detection of SNP TSC0052249
gtagtaagtagtg

SEQ ID NO: 214710 - DNA, 13 bp, Artificial Sequence
  Oligonucleotide for detection of SNP TSC0052249
cactacttactac

SEQ ID NO: 214711 - DNA, 13 bp, Artificial Sequence
  Oligonucleotide for detection of SNP TSC0052249
gtagtaggtagtg

SEQ ID NO: 214712 - DNA, 13 bp, Artificial Sequence
  Oligonucleotide for detection of SNP TSC0052249
cactacctactac

SEQ ID NO: 214713 - DNA, 13 bp, Artificial Sequence
  Oligonucleotide for detection of SNP TSC0052251
tttgttgagaatg

SEQ ID NO: 214714 - DNA, 13 bp, Artificial Sequence
  Oligonucleotide for detection of SNP TSC0052251
cattctcaacaaa

SEQ ID NO: 214715 - DNA, 13 bp, Artificial Sequence
  Oligonucleotide for detection of SNP TSC0052251
tttgttaagaatg

SEQ ID NO: 214716 - DNA, 13 bp, Artificial Sequence
  Oligonucleotide for detection of SNP TSC0052251
cattcttaacaaa

SEQ ID NO: 214717 - DNA, 13 bp, Artificial Sequence
  Oligonucleotide for detection of SNP TSC0052252
agaagtaaattay

SEQ ID NO: 214718 - DNA, 13 bp, Artificial Sequence
  Oligonucleotide for detection of SNP TSC0052252
rtaatttacttct

SEQ ID NO: 214719 - DNA, 13 bp, Artificial Sequence
  Oligonucleotide for detection of SNP TSC0052252
agaagtgaattay

SEQ ID NO: 214720 - DNA, 13 bp, Artificial Sequence
  Oligonucleotide for detection of SNP TSC0052252
rtaattcacttct

SEQ ID NO: 214721 - DNA, 13 bp, Artificial Sequence
  Oligonucleotide for detection of SNP TSC0052253
tatatattattay

SEQ ID NO: 214722 - DNA, 13 bp, Artificial Sequence
  Oligonucleotide for detection of SNP TSC0052253
rtaataatatata

SEQ ID NO: 214723 - DNA, 13 bp, Artificial Sequence
  Oligonucleotide for detection of SNP TSC0052253
gtggtgttgtatg

SEQ ID NO: 214724 - DNA, 13 bp, Artificial Sequence
  Oligonucleotide for detection of SNP TSC0052253
catacaacaccac

SEQ ID NO: 214725 - DNA, 13 bp, Artificial Sequence
  Oligonucleotide for detection of SNP TSC0052253
gtggtggtgtatg

SEQ ID NO: 214726 - DNA, 13 bp, Artificial Sequence
  Oligonucleotide for detection of SNP TSC0052253
catacaccaccac

SEQ ID NO: 214727 - DNA, 13 bp, Artificial Sequence
  Oligonucleotide for detection of SNP TSC0052255
gtatgaaatttta

SEQ ID NO: 214728 - DNA, 13 bp, Artificial Sequence
  Oligonucleotide for detection of SNP TSC0052255
taaaatttcatac

SEQ ID NO: 214729 - DNA, 13 bp, Artificial Sequence
  Oligonucleotide for detection of SNP TSC0052255
gtatgagatttta

SEQ ID NO: 214730 - DNA, 13 bp, Artificial Sequence
  Oligonucleotide for detection of SNP TSC0052255
taaaatctcatac

SEQ ID NO: 214731 - DNA, 13 bp, Artificial Sequence
  Oligonucleotide for detection of SNP TSC0052256
gtttttatggtag

SEQ ID NO: 214732 - DNA, 13 bp, Artificial Sequence
  Oligonucleotide for detection of SNP TSC0052256
ctaccataaaaac

SEQ ID NO: 214733 - DNA, 13 bp, Artificial Sequence
  Oligonucleotide for detection of SNP TSC0052256
gtttttgtggtag

SEQ ID NO: 214734 - DNA, 13 bp, Artificial Sequence
  Oligonucleotide for detection of SNP TSC0052256
ctaccacaaaaac

SEQ ID NO: 214735 - DNA, 13 bp, Artificial Sequence
  Oligonucleotide for detection of SNP TSC0052256
gttttcgtggtag

SEQ ID NO: 214736 - DNA, 13 bp, Artificial Sequence
  Oligonucleotide for detection of SNP TSC0052256
ctaccacgaaaac

SEQ ID NO: 214737 - DNA, 13 bp, Artificial Sequence
  Oligonucleotide for detection of SNP TSC0052257
tatttttagttgt

SEQ ID NO: 214738 - DNA, 13 bp, Artificial Sequence
  Oligonucleotide for detection of SNP TSC0052257
acaactaaaaata

SEQ ID NO: 214739 - DNA, 13 bp, Artificial Sequence
  Oligonucleotide for detection of SNP TSC0052257
tattttgagttgt

SEQ ID NO: 214740 - DNA, 13 bp, Artificial Sequence
  Oligonucleotide for detection of SNP TSC0052257
acaactcaaaata

SEQ ID NO: 214741 - DNA, 13 bp, Artificial Sequence
  Oligonucleotide for detection of SNP TSC0052257
ataattaaagatg

SEQ ID NO: 214742 - DNA, 13 bp, Artificial Sequence
  Oligonucleotide for detection of SNP TSC0052257
catctttaattat

SEQ ID NO: 214743 - DNA, 13 bp, Artificial Sequence
  Oligonucleotide for detection of SNP TSC0052257
ataatttaagatg

SEQ ID NO: 214744 - DNA, 13 bp, Artificial Sequence
  Oligonucleotide for detection of SNP TSC0052257
catcttaaattat

SEQ ID NO: 214745 - DNA, 13 bp, Artificial Sequence
  Oligonucleotide for detection of SNP TSC0007027
ttgtatatataty

SEQ ID NO: 214746 - DNA, 13 bp, Artificial Sequence
  Oligonucleotide for detection of SNP TSC0007027
ratatatatacaa

SEQ ID NO: 214747 - DNA, 13 bp, Artificial Sequence
  Oligonucleotide for detection of SNP TSC0007027
ttgtatttataty

SEQ ID NO: 214748 - DNA, 13 bp, Artificial Sequence
  Oligonucleotide for detection of SNP TSC0007027
ratataaatacaa

SEQ ID NO: 214749 - DNA, 13 bp, Artificial Sequence
  Oligonucleotide for detection of SNP TSC0007027
gatatatatataa

SEQ ID NO: 214750 - DNA, 13 bp, Artificial Sequence
  Oligonucleotide for detection of SNP TSC0007027
ttatatatatatc

SEQ ID NO: 214751 - DNA, 13 bp, Artificial Sequence
  Oligonucleotide for detection of SNP TSC0007027
gatatagatataa

SEQ ID NO: 214752 - DNA, 13 bp, Artificial Sequence
  Oligonucleotide for detection of SNP TSC0007027
ttatatctatatc

SEQ ID NO: 214753 - DNA, 13 bp, Artificial Sequence
  Oligonucleotide for detection of SNP TSC0052261
atttttagttgga

SEQ ID NO: 214754 - DNA, 13 bp, Artificial Sequence
  Oligonucleotide for detection of SNP TSC0052261
tccaactaaaaat

SEQ ID NO: 214755 - DNA, 13 bp, Artificial Sequence
  Oligonucleotide for detection of SNP TSC0052261
atttttggttgga

SEQ ID NO: 214756 - DNA, 13 bp, Artificial Sequence
  Oligonucleotide for detection of SNP TSC0052261
tccaaccaaaaat

SEQ ID NO: 214757 - DNA, 13 bp, Artificial Sequence
  Oligonucleotide for detection of SNP TSC0052264
gatggtagagaaa

SEQ ID NO: 214758 - DNA, 13 bp, Artificial Sequence
  Oligonucleotide for detection of SNP TSC0052264
tttctctaccatc

SEQ ID NO: 214759 - DNA, 13 bp, Artificial Sequence
  Oligonucleotide for detection of SNP TSC0052264
gatggtggagaaa

SEQ ID NO: 214760 - DNA, 13 bp, Artificial Sequence
  Oligonucleotide for detection of SNP TSC0052264
tttctccaccatc

SEQ ID NO: 214761 - DNA, 13 bp, Artificial Sequence
  Oligonucleotide for detection of SNP TSC0005604
agaaggtagagag

SEQ ID NO: 214762 - DNA, 13 bp, Artificial Sequence
  Oligonucleotide for detection of SNP TSC0005604
ctctctaccttct

SEQ ID NO: 214763 - DNA, 13 bp, Artificial Sequence
  Oligonucleotide for detection of SNP TSC0005604
agaagggagagag

SEQ ID NO: 214764 - DNA, 13 bp, Artificial Sequence
  Oligonucleotide for detection of SNP TSC0005604
ctctctcccttct

SEQ ID NO: 214765 - DNA, 13 bp, Artificial Sequence
  Oligonucleotide for detection of SNP TSC0005605
taggaatgaagga

SEQ ID NO: 214766 - DNA, 13 bp, Artificial Sequence
  Oligonucleotide for detection of SNP TSC0005605
tccttcattccta

SEQ ID NO: 214767 - DNA, 13 bp, Artificial Sequence
  Oligonucleotide for detection of SNP TSC0005605
taggaaggaagga

SEQ ID NO: 214768 - DNA, 13 bp, Artificial Sequence
  Oligonucleotide for detection of SNP TSC0005605
tccttccttccta

SEQ ID NO: 214769 - DNA, 13 bp, Artificial Sequence
  Oligonucleotide for detection of SNP TSC0005605
taggaacgaagga

SEQ ID NO: 214770 - DNA, 13 bp, Artificial Sequence
  Oligonucleotide for detection of SNP TSC0005605
tccttcgttccta

SEQ ID NO: 214771 - DNA, 13 bp, Artificial Sequence
  Oligonucleotide for detection of SNP TSC0052268
gtattgatgagtt

SEQ ID NO: 214772 - DNA, 13 bp, Artificial Sequence
  Oligonucleotide for detection of SNP TSC0052268
aactcatcaatac

SEQ ID NO: 214773 - DNA, 13 bp, Artificial Sequence
  Oligonucleotide for detection of SNP TSC0052268
gtattgttgagtt

SEQ ID NO: 214774 - DNA, 13 bp, Artificial Sequence
  Oligonucleotide for detection of SNP TSC0052268
aactcaacaatac

SEQ ID NO: 214775 - DNA, 13 bp, Artificial Sequence
  Oligonucleotide for detection of SNP TSC0052268
gtatcgatgagtt

SEQ ID NO: 214776 - DNA, 13 bp, Artificial Sequence
  Oligonucleotide for detection of SNP TSC0052268
aactcatcgatac

SEQ ID NO: 214777 - DNA, 13 bp, Artificial Sequence
  Oligonucleotide for detection of SNP TSC0052268
gtatcgttgagtt

SEQ ID NO: 214778 - DNA, 13 bp, Artificial Sequence
  Oligonucleotide for detection of SNP TSC0052268
aactcaacgatac

SEQ ID NO: 214779 - DNA, 13 bp, Artificial Sequence
  Oligonucleotide for detection of SNP TSC0052268
aatttattgatay

SEQ ID NO: 214780 - DNA, 13 bp, Artificial Sequence
  Oligonucleotide for detection of SNP TSC0052268
rtatcaataaatt

SEQ ID NO: 214781 - DNA, 13 bp, Artificial Sequence
  Oligonucleotide for detection of SNP TSC0052268
aatttaatgatay

SEQ ID NO: 214782 - DNA, 13 bp, Artificial Sequence
  Oligonucleotide for detection of SNP TSC0052268
rtatcattaaatt

SEQ ID NO: 214783 - DNA, 13 bp, Artificial Sequence
  Oligonucleotide for detection of SNP TSC0052268
aatttatcgatay

SEQ ID NO: 214784 - DNA, 13 bp, Artificial Sequence
  Oligonucleotide for detection of SNP TSC0052268
rtatcgataaatt

SEQ ID NO: 214785 - DNA, 13 bp, Artificial Sequence
  Oligonucleotide for detection of SNP TSC0052268
aatttaacgatay

SEQ ID NO: 214786 - DNA, 13 bp, Artificial Sequence
  Oligonucleotide for detection of SNP TSC0052268
rtatcgttaaatt

SEQ ID NO: 214787 - DNA, 13 bp, Artificial Sequence
  Oligonucleotide for detection of SNP TSC0052269
ttgggttgagtay

SEQ ID NO: 214788 - DNA, 13 bp, Artificial Sequence
  Oligonucleotide for detection of SNP TSC0052269
rtactcaacccaa

SEQ ID NO: 214789 - DNA, 13 bp, Artificial Sequence
  Oligonucleotide for detection of SNP TSC0052269
ttgggtcgagtay

SEQ ID NO: 214790 - DNA, 13 bp, Artificial Sequence
  Oligonucleotide for detection of SNP TSC0052269
rtactcgacccaa

SEQ ID NO: 214791 - DNA, 13 bp, Artificial Sequence
  Oligonucleotide for detection of SNP TSC0052269
gtgtttagtttag

SEQ ID NO: 214792 - DNA, 13 bp, Artificial Sequence
  Oligonucleotide for detection of SNP TSC0052269
ctaaactaaacac

SEQ ID NO: 214793 - DNA, 13 bp, Artificial Sequence
  Oligonucleotide for detection of SNP TSC0052269
gtgttcggtttag

SEQ ID NO: 214794 - DNA, 13 bp, Artificial Sequence
  Oligonucleotide for detection of SNP TSC0052269
ctaaaccgaacac

SEQ ID NO: 214795 - DNA, 13 bp, Artificial Sequence
  Oligonucleotide for detection of SNP TSC0052270
tagaaaaataggy

SEQ ID NO: 214796 - DNA, 13 bp, Artificial Sequence
  Oligonucleotide for detection of SNP TSC0052270
rcctatttttcta

SEQ ID NO: 214797 - DNA, 13 bp, Artificial Sequence
  Oligonucleotide for detection of SNP TSC0052270
tagaaatataggy

SEQ ID NO: 214798 - DNA, 13 bp, Artificial Sequence
  Oligonucleotide for detection of SNP TSC0052270
rcctatatttcta

SEQ ID NO: 214799 - DNA, 13 bp, Artificial Sequence
  Oligonucleotide for detection of SNP TSC0052270
gtttgtatttttg

SEQ ID NO: 214800 - DNA, 13 bp, Artificial Sequence
  Oligonucleotide for detection of SNP TSC0052270
caaaaatacaaac

SEQ ID NO: 214801 - DNA, 13 bp, Artificial Sequence
  Oligonucleotide for detection of SNP TSC0052273
agtatgattagtg

SEQ ID NO: 214802 - DNA, 13 bp, Artificial Sequence
  Oligonucleotide for detection of SNP TSC0052273
cactaatcatact

SEQ ID NO: 214803 - DNA, 13 bp, Artificial Sequence
  Oligonucleotide for detection of SNP TSC0052273
agtatgtttagtg

SEQ ID NO: 214804 - DNA, 13 bp, Artificial Sequence
  Oligonucleotide for detection of SNP TSC0052273
cactaaacatact

SEQ ID NO: 214805 - DNA, 13 bp, Artificial Sequence
  Oligonucleotide for detection of SNP TSC0052273
tattggttatgtt

SEQ ID NO: 214806 - DNA, 13 bp, Artificial Sequence
  Oligonucleotide for detection of SNP TSC0052273
aacataaccaata

SEQ ID NO: 214807 - DNA, 13 bp, Artificial Sequence
  Oligonucleotide for detection of SNP TSC0052273
tattggatatgtt

SEQ ID NO: 214808 - DNA, 13 bp, Artificial Sequence
  Oligonucleotide for detection of SNP TSC0052273
aacatatccaata

SEQ ID NO: 214809 - DNA, 13 bp, Artificial Sequence
  Oligonucleotide for detection of SNP TSC0052274
tgtttaagtttta

SEQ ID NO: 214810 - DNA, 13 bp, Artificial Sequence
  Oligonucleotide for detection of SNP TSC0052274
taaaacttaaaca

SEQ ID NO: 214811 - DNA, 13 bp, Artificial Sequence
  Oligonucleotide for detection of SNP TSC0052274
tgtttaggtttta

SEQ ID NO: 214812 - DNA, 13 bp, Artificial Sequence
  Oligonucleotide for detection of SNP TSC0052274
taaaacctaaaca

SEQ ID NO: 214813 - DNA, 13 bp, Artificial Sequence
  Oligonucleotide for detection of SNP TSC0052276
aattgtagtgtta

SEQ ID NO: 214814 - DNA, 13 bp, Artificial Sequence
  Oligonucleotide for detection of SNP TSC0052276
taacactacaatt

SEQ ID NO: 214815 - DNA, 13 bp, Artificial Sequence
  Oligonucleotide for detection of SNP TSC0052276
aattgttgtgtta

SEQ ID NO: 214816 - DNA, 13 bp, Artificial Sequence
  Oligonucleotide for detection of SNP TSC0052276
taacacaacaatt

SEQ ID NO: 214817 - DNA, 13 bp, Artificial Sequence
  Oligonucleotide for detection of SNP TSC0052276
aattgtagcgtta

SEQ ID NO: 214818 - DNA, 13 bp, Artificial Sequence
  Oligonucleotide for detection of SNP TSC0052276
taacgctacaatt

SEQ ID NO: 214819 - DNA, 13 bp, Artificial Sequence
  Oligonucleotide for detection of SNP TSC0052276
aattgttgcgtta

SEQ ID NO: 214820 - DNA, 13 bp, Artificial Sequence
  Oligonucleotide for detection of SNP TSC0052276
taacgcaacaatt

SEQ ID NO: 214821 - DNA, 13 bp, Artificial Sequence
  Oligonucleotide for detection of SNP TSC0052276
tggtgttgtagtt

SEQ ID NO: 214822 - DNA, 13 bp, Artificial Sequence
  Oligonucleotide for detection of SNP TSC0052276
aactacaacacca

SEQ ID NO: 214823 - DNA, 13 bp, Artificial Sequence
  Oligonucleotide for detection of SNP TSC0052276
tggtgtagtagtt

SEQ ID NO: 214824 - DNA, 13 bp, Artificial Sequence
  Oligonucleotide for detection of SNP TSC0052276
aactactacacca

SEQ ID NO: 214825 - DNA, 13 bp, Artificial Sequence
  Oligonucleotide for detection of SNP TSC0052276
tggcgttgtagtt

SEQ ID NO: 214826 - DNA, 13 bp, Artificial Sequence
  Oligonucleotide for detection of SNP TSC0052276
aactacaacgcca

SEQ ID NO: 214827 - DNA, 13 bp, Artificial Sequence
  Oligonucleotide for detection of SNP TSC0052276
tggcgtagtagtt

SEQ ID NO: 214828 - DNA, 13 bp, Artificial Sequence
  Oligonucleotide for detection of SNP TSC0052276
aactactacgcca

SEQ ID NO: 214829 - DNA, 13 bp, Artificial Sequence
  Oligonucleotide for detection of SNP TSC0052277
gtatatatgagga

SEQ ID NO: 214830 - DNA, 13 bp, Artificial Sequence
  Oligonucleotide for detection of SNP TSC0052277
tcctcatatatac

SEQ ID NO: 214831 - DNA, 13 bp, Artificial Sequence
  Oligonucleotide for detection of SNP TSC0052277
gtatatgtgagga

SEQ ID NO: 214832 - DNA, 13 bp, Artificial Sequence
  Oligonucleotide for detection of SNP TSC0052277
tcctcacatatac

SEQ ID NO: 214833 - DNA, 13 bp, Artificial Sequence
  Oligonucleotide for detection of SNP TSC0052279
gattataaaggay

SEQ ID NO: 214834 - DNA, 13 bp, Artificial Sequence
  Oligonucleotide for detection of SNP TSC0052279
rtcctttataatc

SEQ ID NO: 214835 - DNA, 13 bp, Artificial Sequence
  Oligonucleotide for detection of SNP TSC0052279
gattattaaggay

SEQ ID NO: 214836 - DNA, 13 bp, Artificial Sequence
  Oligonucleotide for detection of SNP TSC0052279
rtccttaataatc

SEQ ID NO: 214837 - DNA, 13 bp, Artificial Sequence
  Oligonucleotide for detection of SNP TSC0052279
gttttttgtagty

SEQ ID NO: 214838 - DNA, 13 bp, Artificial Sequence
  Oligonucleotide for detection of SNP TSC0052279
ractacaaaaaac

SEQ ID NO: 214839 - DNA, 13 bp, Artificial Sequence
  Oligonucleotide for detection of SNP TSC0052281
aggtttattatat

SEQ ID NO: 214840 - DNA, 13 bp, Artificial Sequence
  Oligonucleotide for detection of SNP TSC0052281
atataataaacct

SEQ ID NO: 214841 - DNA, 13 bp, Artificial Sequence
  Oligonucleotide for detection of SNP TSC0052281
aggtttgttatat

SEQ ID NO: 214842 - DNA, 13 bp, Artificial Sequence
  Oligonucleotide for detection of SNP TSC0052281
atataacaaacct

SEQ ID NO: 214843 - DNA, 13 bp, Artificial Sequence
  Oligonucleotide for detection of SNP TSC0008429
atttgatgaaaag

SEQ ID NO: 214844 - DNA, 13 bp, Artificial Sequence
  Oligonucleotide for detection of SNP TSC0008429
cttttcatcaaat

SEQ ID NO: 214845 - DNA, 13 bp, Artificial Sequence
  Oligonucleotide for detection of SNP TSC0008429
atttgacgaaaag

SEQ ID NO: 214846 - DNA, 13 bp, Artificial Sequence
  Oligonucleotide for detection of SNP TSC0008429
cttttcgtcaaat

SEQ ID NO: 214847 - DNA, 13 bp, Artificial Sequence
  Oligonucleotide for detection of SNP TSC0052285
tatttcgtattat

SEQ ID NO: 214848 - DNA, 13 bp, Artificial Sequence
  Oligonucleotide for detection of SNP TSC0052285
ataatacgaaata

SEQ ID NO: 214849 - DNA, 13 bp, Artificial Sequence
  Oligonucleotide for detection of SNP TSC0052285
ataataggaaata

SEQ ID NO: 214850 - DNA, 13 bp, Artificial Sequence
  Oligonucleotide for detection of SNP TSC0052285
tatttcctattat

SEQ ID NO: 214851 - DNA, 13 bp, Artificial Sequence
  Oligonucleotide for detection of SNP TSC0052285
ataatatgaaata

SEQ ID NO: 214852 - DNA, 13 bp, Artificial Sequence
  Oligonucleotide for detection of SNP TSC0052285
tatttcatattat

SEQ ID NO: 214853 - DNA, 13 bp, Artificial Sequence
  Oligonucleotide for detection of SNP TSC0052286
ttgaggaaaaagy

SEQ ID NO: 214854 - DNA, 13 bp, Artificial Sequence
  Oligonucleotide for detection of SNP TSC0052286
rctttttcctcaa

SEQ ID NO: 214855 - DNA, 13 bp, Artificial Sequence
  Oligonucleotide for detection of SNP TSC0052286
ttgagggaaaagy

SEQ ID NO: 214856 - DNA, 13 bp, Artificial Sequence
  Oligonucleotide for detection of SNP TSC0052286
rcttttccctcaa

SEQ ID NO: 214857 - DNA, 13 bp, Artificial Sequence
  Oligonucleotide for detection of SNP TSC0052287
tgagttgggattg

SEQ ID NO: 214858 - DNA, 13 bp, Artificial Sequence
  Oligonucleotide for detection of SNP TSC0052287
caatcccaactca

SEQ ID NO: 214859 - DNA, 13 bp, Artificial Sequence
  Oligonucleotide for detection of SNP TSC0052287
tgagttaggattg

SEQ ID NO: 214860 - DNA, 13 bp, Artificial Sequence
  Oligonucleotide for detection of SNP TSC0052287
caatcctaactca

SEQ ID NO: 214861 - DNA, 13 bp, Artificial Sequence
  Oligonucleotide for detection of SNP TSC0052287
tgagtcgggattg

SEQ ID NO: 214862 - DNA, 13 bp, Artificial Sequence
  Oligonucleotide for detection of SNP TSC0052287
caatcccgactca

SEQ ID NO: 214863 - DNA, 13 bp, Artificial Sequence
  Oligonucleotide for detection of SNP TSC0008091
tttatatggaatt

SEQ ID NO: 214864 - DNA, 13 bp, Artificial Sequence
  Oligonucleotide for detection of SNP TSC0008091
aattccatataaa

SEQ ID NO: 214865 - DNA, 13 bp, Artificial Sequence
  Oligonucleotide for detection of SNP TSC0008091
tttatacggaatt

SEQ ID NO: 214866 - DNA, 13 bp, Artificial Sequence
  Oligonucleotide for detection of SNP TSC0008091
aattccgtataaa

SEQ ID NO: 214867 - DNA, 13 bp, Artificial Sequence
  Oligonucleotide for detection of SNP TSC0008091
agttttgtatgaa

SEQ ID NO: 214868 - DNA, 13 bp, Artificial Sequence
  Oligonucleotide for detection of SNP TSC0008091
ttcatacaaaact

SEQ ID NO: 214869 - DNA, 13 bp, Artificial Sequence
  Oligonucleotide for detection of SNP TSC0008091
agttttatatgaa

SEQ ID NO: 214870 - DNA, 13 bp, Artificial Sequence
  Oligonucleotide for detection of SNP TSC0008091
ttcatataaaact

SEQ ID NO: 214871 - DNA, 13 bp, Artificial Sequence
  Oligonucleotide for detection of SNP TSC0008091
agtttcgtatgaa

SEQ ID NO: 214872 - DNA, 13 bp, Artificial Sequence
  Oligonucleotide for detection of SNP TSC0008091
ttcatacgaaact

SEQ ID NO: 214873 - DNA, 13 bp, Artificial Sequence
  Oligonucleotide for detection of SNP TSC0052290
aataaattatggt

SEQ ID NO: 214874 - DNA, 13 bp, Artificial Sequence
  Oligonucleotide for detection of SNP TSC0052290
accataatttatt

SEQ ID NO: 214875 - DNA, 13 bp, Artificial Sequence
  Oligonucleotide for detection of SNP TSC0052290
aataaagtatggt

SEQ ID NO: 214876 - DNA, 13 bp, Artificial Sequence
  Oligonucleotide for detection of SNP TSC0052290
accatactttatt

SEQ ID NO: 214877 - DNA, 13 bp, Artificial Sequence
  Oligonucleotide for detection of SNP TSC0052292
ttttgattgtgtt

SEQ ID NO: 214878 - DNA, 13 bp, Artificial Sequence
  Oligonucleotide for detection of SNP TSC0052292
aacacaatcaaaa

SEQ ID NO: 214879 - DNA, 13 bp, Artificial Sequence
  Oligonucleotide for detection of SNP TSC0052292
ttttgagtgtgtt

SEQ ID NO: 214880 - DNA, 13 bp, Artificial Sequence
  Oligonucleotide for detection of SNP TSC0052292
aacacactcaaaa

SEQ ID NO: 214881 - DNA, 13 bp, Artificial Sequence
  Oligonucleotide for detection of SNP TSC0052292
aatatagttaggg

SEQ ID NO: 214882 - DNA, 13 bp, Artificial Sequence
  Oligonucleotide for detection of SNP TSC0052292
ccctaactatatt

SEQ ID NO: 214883 - DNA, 13 bp, Artificial Sequence
  Oligonucleotide for detection of SNP TSC0052292
aatatatttaggg

SEQ ID NO: 214884 - DNA, 13 bp, Artificial Sequence
  Oligonucleotide for detection of SNP TSC0052292
ccctaaatatatt

SEQ ID NO: 214885 - DNA, 13 bp, Artificial Sequence
  Oligonucleotide for detection of SNP TSC0052293
taagattgaggaa

SEQ ID NO: 214886 - DNA, 13 bp, Artificial Sequence
  Oligonucleotide for detection of SNP TSC0052293
ttcctcaatctta

SEQ ID NO: 214887 - DNA, 13 bp, Artificial Sequence
  Oligonucleotide for detection of SNP TSC0052293
taagatagaggaa

SEQ ID NO: 214888 - DNA, 13 bp, Artificial Sequence
  Oligonucleotide for detection of SNP TSC0052293
ttcctctatctta

SEQ ID NO: 214889 - DNA, 13 bp, Artificial Sequence
  Oligonucleotide for detection of SNP TSC0052295
ttttagatgtttt

SEQ ID NO: 214890 - DNA, 13 bp, Artificial Sequence
  Oligonucleotide for detection of SNP TSC0052295
aaaacatctaaaa

SEQ ID NO: 214891 - DNA, 13 bp, Artificial Sequence
  Oligonucleotide for detection of SNP TSC0052295
ttttagttgtttt

SEQ ID NO: 214892 - DNA, 13 bp, Artificial Sequence
  Oligonucleotide for detection of SNP TSC0052295
aaaacaactaaaa

SEQ ID NO: 214893 - DNA, 13 bp, Artificial Sequence
  Oligonucleotide for detection of SNP TSC0052295
aagatatttaaaa

SEQ ID NO: 214894 - DNA, 13 bp, Artificial Sequence
  Oligonucleotide for detection of SNP TSC0052295
ttttaaatatctt

SEQ ID NO: 214895 - DNA, 13 bp, Artificial Sequence
  Oligonucleotide for detection of SNP TSC0052295
aagataattaaaa

SEQ ID NO: 214896 - DNA, 13 bp, Artificial Sequence
  Oligonucleotide for detection of SNP TSC0052295
ttttaattatctt

SEQ ID NO: 214897 - DNA, 13 bp, Artificial Sequence
  Oligonucleotide for detection of SNP TSC0052296
ttattatgggtat

SEQ ID NO: 214898 - DNA, 13 bp, Artificial Sequence
  Oligonucleotide for detection of SNP TSC0052296
atacccataataa

SEQ ID NO: 214899 - DNA, 13 bp, Artificial Sequence
  Oligonucleotide for detection of SNP TSC0052296
ttattacgggtat

SEQ ID NO: 214900 - DNA, 13 bp, Artificial Sequence
  Oligonucleotide for detection of SNP TSC0052296
atacccgtaataa

SEQ ID NO: 214901 - DNA, 13 bp, Artificial Sequence
  Oligonucleotide for detection of SNP TSC0052296
atatttgtggtaa

SEQ ID NO: 214902 - DNA, 13 bp, Artificial Sequence
  Oligonucleotide for detection of SNP TSC0052296
ttaccacaaatat

SEQ ID NO: 214903 - DNA, 13 bp, Artificial Sequence
  Oligonucleotide for detection of SNP TSC0052296
atatttatggtaa

SEQ ID NO: 214904 - DNA, 13 bp, Artificial Sequence
  Oligonucleotide for detection of SNP TSC0052296
ttaccataaatat

SEQ ID NO: 214905 - DNA, 13 bp, Artificial Sequence
  Oligonucleotide for detection of SNP TSC0052296
atattcgtggtaa

SEQ ID NO: 214906 - DNA, 13 bp, Artificial Sequence
  Oligonucleotide for detection of SNP TSC0052296
ttaccacgaatat

SEQ ID NO: 214907 - DNA, 13 bp, Artificial Sequence
  Oligonucleotide for detection of SNP TSC0052298
gttttaatgtatt

SEQ ID NO: 214908 - DNA, 13 bp, Artificial Sequence
  Oligonucleotide for detection of SNP TSC0052298
aatacattaaaac

SEQ ID NO: 214909 - DNA, 13 bp, Artificial Sequence
  Oligonucleotide for detection of SNP TSC0052298
gttttattgtatt

SEQ ID NO: 214910 - DNA, 13 bp, Artificial Sequence
  Oligonucleotide for detection of SNP TSC0052298
aatacaataaaac

SEQ ID NO: 214911 - DNA, 13 bp, Artificial Sequence
  Oligonucleotide for detection of SNP TSC0052298
aatatattgaagy

SEQ ID NO: 214912 - DNA, 13 bp, Artificial Sequence
  Oligonucleotide for detection of SNP TSC0052298
rcttcaatatatt

SEQ ID NO: 214913 - DNA, 13 bp, Artificial Sequence
  Oligonucleotide for detection of SNP TSC0052298
aatatagtgaagy

SEQ ID NO: 214914 - DNA, 13 bp, Artificial Sequence
  Oligonucleotide for detection of SNP TSC0052298
rcttcactatatt

SEQ ID NO: 214915 - DNA, 13 bp, Artificial Sequence
  Oligonucleotide for detection of SNP TSC0052299
atatagattgttt

SEQ ID NO: 214916 - DNA, 13 bp, Artificial Sequence
  Oligonucleotide for detection of SNP TSC0052299
aaacaatctatat

SEQ ID NO: 214917 - DNA, 13 bp, Artificial Sequence
  Oligonucleotide for detection of SNP TSC0052299
atatagtttgttt

SEQ ID NO: 214918 - DNA, 13 bp, Artificial Sequence
  Oligonucleotide for detection of SNP TSC0052299
aaacaaactatat

SEQ ID NO: 214919 - DNA, 13 bp, Artificial Sequence
  Oligonucleotide for detection of SNP TSC0052299
agatagtttatgt

SEQ ID NO: 214920 - DNA, 13 bp, Artificial Sequence
  Oligonucleotide for detection of SNP TSC0052299
acataaactatct

SEQ ID NO: 214921 - DNA, 13 bp, Artificial Sequence
  Oligonucleotide for detection of SNP TSC0052299
agatagattatgt

SEQ ID NO: 214922 - DNA, 13 bp, Artificial Sequence
  Oligonucleotide for detection of SNP TSC0052299
acataatctatct

SEQ ID NO: 214923 - DNA, 13 bp, Artificial Sequence
  Oligonucleotide for detection of SNP TSC0008138
aaatttgaaatta

SEQ ID NO: 214924 - DNA, 13 bp, Artificial Sequence
  Oligonucleotide for detection of SNP TSC0008138
taatttcaaattt

SEQ ID NO: 214925 - DNA, 13 bp, Artificial Sequence
  Oligonucleotide for detection of SNP TSC0008138
tgatttgaaattt

SEQ ID NO: 214926 - DNA, 13 bp, Artificial Sequence
  Oligonucleotide for detection of SNP TSC0008138
aaatttcaaatca

SEQ ID NO: 214927 - DNA, 13 bp, Artificial Sequence
  Oligonucleotide for detection of SNP TSC0008138
tgattttaaattt

SEQ ID NO: 214928 - DNA, 13 bp, Artificial Sequence
  Oligonucleotide for detection of SNP TSC0008138
aaatttaaaatca

SEQ ID NO: 214929 - DNA, 13 bp, Artificial Sequence
  Oligonucleotide for detection of SNP TSC0052300
aattttgtgttta

SEQ ID NO: 214930 - DNA, 13 bp, Artificial Sequence
  Oligonucleotide for detection of SNP TSC0052300
taaacacaaaatt

SEQ ID NO: 214931 - DNA, 13 bp, Artificial Sequence
  Oligonucleotide for detection of SNP TSC0052300
aattttatgttta

SEQ ID NO: 214932 - DNA, 13 bp, Artificial Sequence
  Oligonucleotide for detection of SNP TSC0052300
taaacataaaatt

SEQ ID NO: 214933 - DNA, 13 bp, Artificial Sequence
  Oligonucleotide for detection of SNP TSC0052301
gttgatatggtaa

SEQ ID NO: 214934 - DNA, 13 bp, Artificial Sequence
  Oligonucleotide for detection of SNP TSC0052301
ttaccatatcaac

SEQ ID NO: 214935 - DNA, 13 bp, Artificial Sequence
  Oligonucleotide for detection of SNP TSC0052301
gttgatttggtaa

SEQ ID NO: 214936 - DNA, 13 bp, Artificial Sequence
  Oligonucleotide for detection of SNP TSC0052301
ttaccaaatcaac

SEQ ID NO: 214937 - DNA, 13 bp, Artificial Sequence
  Oligonucleotide for detection of SNP TSC0052301
ttattatgttagy

SEQ ID NO: 214938 - DNA, 13 bp, Artificial Sequence
  Oligonucleotide for detection of SNP TSC0052301
rctaacataataa

SEQ ID NO: 214939 - DNA, 13 bp, Artificial Sequence
  Oligonucleotide for detection of SNP TSC0052301
ttattaagttagy

SEQ ID NO: 214940 - DNA, 13 bp, Artificial Sequence
  Oligonucleotide for detection of SNP TSC0052301
rctaacttaataa

SEQ ID NO: 214941 - DNA, 13 bp, Artificial Sequence
  Oligonucleotide for detection of SNP TSC0052302
tattttgattata

SEQ ID NO: 214942 - DNA, 13 bp, Artificial Sequence
  Oligonucleotide for detection of SNP TSC0052302
tataatcaaaata

SEQ ID NO: 214943 - DNA, 13 bp, Artificial Sequence
  Oligonucleotide for detection of SNP TSC0052302
tattttaattata

SEQ ID NO: 214944 - DNA, 13 bp, Artificial Sequence
  Oligonucleotide for detection of SNP TSC0052302
tataattaaaata

SEQ ID NO: 214945 - DNA, 13 bp, Artificial Sequence
  Oligonucleotide for detection of SNP TSC0052303
agtttaaatatta

SEQ ID NO: 214946 - DNA, 13 bp, Artificial Sequence
  Oligonucleotide for detection of SNP TSC0052303
taatatttaaact

SEQ ID NO: 214947 - DNA, 13 bp, Artificial Sequence
  Oligonucleotide for detection of SNP TSC0052303
agtttagatatta

SEQ ID NO: 214948 - DNA, 13 bp, Artificial Sequence
  Oligonucleotide for detection of SNP TSC0052303
taatatctaaact

SEQ ID NO: 214949 - DNA, 13 bp, Artificial Sequence
  Oligonucleotide for detection of SNP TSC0052304
ttgggatgttatg

SEQ ID NO: 214950 - DNA, 13 bp, Artificial Sequence
  Oligonucleotide for detection of SNP TSC0052304
cataacatcccaa

SEQ ID NO: 214951 - DNA, 13 bp, Artificial Sequence
  Oligonucleotide for detection of SNP TSC0052304
ttgggaggttatg

SEQ ID NO: 214952 - DNA, 13 bp, Artificial Sequence
  Oligonucleotide for detection of SNP TSC0052304
cataacctcccaa

SEQ ID NO: 214953 - DNA, 13 bp, Artificial Sequence
  Oligonucleotide for detection of SNP TSC0052304
tatagttttttaa

SEQ ID NO: 214954 - DNA, 13 bp, Artificial Sequence
  Oligonucleotide for detection of SNP TSC0052304
ttaaaaaactata

SEQ ID NO: 214955 - DNA, 13 bp, Artificial Sequence
  Oligonucleotide for detection of SNP TSC0052305
gtaaggttttttt

SEQ ID NO: 214956 - DNA, 13 bp, Artificial Sequence
  Oligonucleotide for detection of SNP TSC0052305
aaaaaaaccttac

SEQ ID NO: 214957 - DNA, 13 bp, Artificial Sequence
  Oligonucleotide for detection of SNP TSC0052305
gtaagggtttttt

SEQ ID NO: 214958 - DNA, 13 bp, Artificial Sequence
  Oligonucleotide for detection of SNP TSC0052305
aaaaaacccttac

SEQ ID NO: 214959 - DNA, 13 bp, Artificial Sequence
  Oligonucleotide for detection of SNP TSC0052306
ttttatggagaaa

SEQ ID NO: 214960 - DNA, 13 bp, Artificial Sequence
  Oligonucleotide for detection of SNP TSC0052306
tttctccataaaa

SEQ ID NO: 214961 - DNA, 13 bp, Artificial Sequence
  Oligonucleotide for detection of SNP TSC0052306
ttttatagagaaa

SEQ ID NO: 214962 - DNA, 13 bp, Artificial Sequence
  Oligonucleotide for detection of SNP TSC0052306
tttctctataaaa

SEQ ID NO: 214963 - DNA, 13 bp, Artificial Sequence
  Oligonucleotide for detection of SNP TSC0052307
tgtattatggtat

SEQ ID NO: 214964 - DNA, 13 bp, Artificial Sequence
  Oligonucleotide for detection of SNP TSC0052307
ataccataataca

SEQ ID NO: 214965 - DNA, 13 bp, Artificial Sequence
  Oligonucleotide for detection of SNP TSC0052307
tgtattgtggtat

SEQ ID NO: 214966 - DNA, 13 bp, Artificial Sequence
  Oligonucleotide for detection of SNP TSC0052307
ataccacaataca

SEQ ID NO: 214967 - DNA, 13 bp, Artificial Sequence
  Oligonucleotide for detection of SNP TSC0052307
tgtatcgtggtat

SEQ ID NO: 214968 - DNA, 13 bp, Artificial Sequence
  Oligonucleotide for detection of SNP TSC0052307
ataccacgataca

SEQ ID NO: 214969 - DNA, 13 bp, Artificial Sequence
  Oligonucleotide for detection of SNP TSC0052307
atattatggtgta

SEQ ID NO: 214970 - DNA, 13 bp, Artificial Sequence
  Oligonucleotide for detection of SNP TSC0052307
tacaccataatat

SEQ ID NO: 214971 - DNA, 13 bp, Artificial Sequence
  Oligonucleotide for detection of SNP TSC0052307
atattacggtgta

SEQ ID NO: 214972 - DNA, 13 bp, Artificial Sequence
  Oligonucleotide for detection of SNP TSC0052307
tacaccgtaatat

SEQ ID NO: 214973 - DNA, 13 bp, Artificial Sequence
  Oligonucleotide for detection of SNP TSC0052308
attgttatgaagg

SEQ ID NO: 214974 - DNA, 13 bp, Artificial Sequence
  Oligonucleotide for detection of SNP TSC0052308
ccttcataacaat

SEQ ID NO: 214975 - DNA, 13 bp, Artificial Sequence
  Oligonucleotide for detection of SNP TSC0052308
attgttttgaagg

SEQ ID NO: 214976 - DNA, 13 bp, Artificial Sequence
  Oligonucleotide for detection of SNP TSC0052308
ccttcaaaacaat

SEQ ID NO: 214977 - DNA, 13 bp, Artificial Sequence
  Oligonucleotide for detection of SNP TSC0052309
tagagttttttga

SEQ ID NO: 214978 - DNA, 13 bp, Artificial Sequence
  Oligonucleotide for detection of SNP TSC0052309
tcaaaaaactcta

SEQ ID NO: 214979 - DNA, 13 bp, Artificial Sequence
  Oligonucleotide for detection of SNP TSC0052309
tagagtgttttga

SEQ ID NO: 214980 - DNA, 13 bp, Artificial Sequence
  Oligonucleotide for detection of SNP TSC0052309
tcaaaacactcta

SEQ ID NO: 214981 - DNA, 13 bp, Artificial Sequence
  Oligonucleotide for detection of SNP TSC0052310
aatgtattttaay

SEQ ID NO: 214982 - DNA, 13 bp, Artificial Sequence
  Oligonucleotide for detection of SNP TSC0052310
rttaaaatacatt

SEQ ID NO: 214983 - DNA, 13 bp, Artificial Sequence
  Oligonucleotide for detection of SNP TSC0052310
aatgtagtttaay

SEQ ID NO: 214984 - DNA, 13 bp, Artificial Sequence
  Oligonucleotide for detection of SNP TSC0052310
rttaaactacatt

SEQ ID NO: 214985 - DNA, 13 bp, Artificial Sequence
  Oligonucleotide for detection of SNP TSC0052310
gttagaatatatt

SEQ ID NO: 214986 - DNA, 13 bp, Artificial Sequence
  Oligonucleotide for detection of SNP TSC0052310
aatatattctaac

SEQ ID NO: 214987 - DNA, 13 bp, Artificial Sequence
  Oligonucleotide for detection of SNP TSC0052310
gttagattatatt

SEQ ID NO: 214988 - DNA, 13 bp, Artificial Sequence
  Oligonucleotide for detection of SNP TSC0052310
aatataatctaac

SEQ ID NO: 214989 - DNA, 13 bp, Artificial Sequence
  Oligonucleotide for detection of SNP TSC0052311
aggtagaaatttt

SEQ ID NO: 214990 - DNA, 13 bp, Artificial Sequence
  Oligonucleotide for detection of SNP TSC0052311
aaaatttctacct

SEQ ID NO: 214991 - DNA, 13 bp, Artificial Sequence
  Oligonucleotide for detection of SNP TSC0052311
aggtaggaatttt

SEQ ID NO: 214992 - DNA, 13 bp, Artificial Sequence
  Oligonucleotide for detection of SNP TSC0052311
aaaattcctacct

SEQ ID NO: 214993 - DNA, 13 bp, Artificial Sequence
  Oligonucleotide for detection of SNP TSC0052312
ttttgtaatatay

SEQ ID NO: 214994 - DNA, 13 bp, Artificial Sequence
  Oligonucleotide for detection of SNP TSC0052312
rtatattacaaaa

SEQ ID NO: 214995 - DNA, 13 bp, Artificial Sequence
  Oligonucleotide for detection of SNP TSC0052312
ttttgttatatay

SEQ ID NO: 214996 - DNA, 13 bp, Artificial Sequence
  Oligonucleotide for detection of SNP TSC0052312
rtatataacaaaa

SEQ ID NO: 214997 - DNA, 13 bp, Artificial Sequence
  Oligonucleotide for detection of SNP TSC0052312
gtgtgttataggg

SEQ ID NO: 214998 - DNA, 13 bp, Artificial Sequence
  Oligonucleotide for detection of SNP TSC0052312
ccctataacacac

SEQ ID NO: 214999 - DNA, 13 bp, Artificial Sequence
  Oligonucleotide for detection of SNP TSC0052312
gtgtgtgataggg

SEQ ID NO: 215000 - DNA, 13 bp, Artificial Sequence
  Oligonucleotide for detection of SNP TSC0052312
ccctatcacacac

SEQ ID NO: 215001 - DNA, 13 bp, Artificial Sequence
  Oligonucleotide for detection of SNP TSC0052316
atgaaggtttaga

SEQ ID NO: 215002 - DNA, 13 bp, Artificial Sequence
  Oligonucleotide for detection of SNP TSC0052316
tctaaaccttcat

SEQ ID NO: 215003 - DNA, 13 bp, Artificial Sequence
  Oligonucleotide for detection of SNP TSC0052316
atgaagatttaga

SEQ ID NO: 215004 - DNA, 13 bp, Artificial Sequence
  Oligonucleotide for detection of SNP TSC0052316
tctaaatcttcat

SEQ ID NO: 215005 - DNA, 13 bp, Artificial Sequence
  Oligonucleotide for detection of SNP TSC0052317
aagatggagggag

SEQ ID NO: 215006 - DNA, 13 bp, Artificial Sequence
  Oligonucleotide for detection of SNP TSC0052317
ctccctccatctt

SEQ ID NO: 215007 - DNA, 13 bp, Artificial Sequence
  Oligonucleotide for detection of SNP TSC0052317
aagatgtagggag

SEQ ID NO: 215008 - DNA, 13 bp, Artificial Sequence
  Oligonucleotide for detection of SNP TSC0052317
ctccctacatctt

SEQ ID NO: 215009 - DNA, 13 bp, Artificial Sequence
  Oligonucleotide for detection of SNP TSC0052318
agaataagatata

SEQ ID NO: 215010 - DNA, 13 bp, Artificial Sequence
  Oligonucleotide for detection of SNP TSC0052318
tatatcttattct

SEQ ID NO: 215011 - DNA, 13 bp, Artificial Sequence
  Oligonucleotide for detection of SNP TSC0052318
agaataggatata

SEQ ID NO: 215012 - DNA, 13 bp, Artificial Sequence
  Oligonucleotide for detection of SNP TSC0052318
tatatcctattct

SEQ ID NO: 215013 - DNA, 13 bp, Artificial Sequence
  Oligonucleotide for detection of SNP TSC0052319
aaggagtataggt

SEQ ID NO: 215014 - DNA, 13 bp, Artificial Sequence
  Oligonucleotide for detection of SNP TSC0052319
acctatactcctt

SEQ ID NO: 215015 - DNA, 13 bp, Artificial Sequence
  Oligonucleotide for detection of SNP TSC0052319
aaggaggataggt

SEQ ID NO: 215016 - DNA, 13 bp, Artificial Sequence
  Oligonucleotide for detection of SNP TSC0052319
acctatcctcctt

SEQ ID NO: 215017 - DNA, 13 bp, Artificial Sequence
  Oligonucleotide for detection of SNP TSC0052320
tgtataataaggg

SEQ ID NO: 215018 - DNA, 13 bp, Artificial Sequence
  Oligonucleotide for detection of SNP TSC0052320
cccttattataca

SEQ ID NO: 215019 - DNA, 13 bp, Artificial Sequence
  Oligonucleotide for detection of SNP TSC0052320
tgtatagtaaggg

SEQ ID NO: 215020 - DNA, 13 bp, Artificial Sequence
  Oligonucleotide for detection of SNP TSC0052320
cccttactataca

SEQ ID NO: 215021 - DNA, 13 bp, Artificial Sequence
  Oligonucleotide for detection of SNP TSC0052321
attgattgtttty

SEQ ID NO: 215022 - DNA, 13 bp, Artificial Sequence
  Oligonucleotide for detection of SNP TSC0052321
raaaacaatcaat

SEQ ID NO: 215023 - DNA, 13 bp, Artificial Sequence
  Oligonucleotide for detection of SNP TSC0052321
atcgattgtttty

SEQ ID NO: 215024 - DNA, 13 bp, Artificial Sequence
  Oligonucleotide for detection of SNP TSC0052321
raaaacaatcgat

SEQ ID NO: 215025 - DNA, 13 bp, Artificial Sequence
  Oligonucleotide for detection of SNP TSC0052321
attgatcgtttty

SEQ ID NO: 215026 - DNA, 13 bp, Artificial Sequence
  Oligonucleotide for detection of SNP TSC0052321
raaaacgatcaat

SEQ ID NO: 215027 - DNA, 13 bp, Artificial Sequence
  Oligonucleotide for detection of SNP TSC0052321
atcgatcgtttty

SEQ ID NO: 215028 - DNA, 13 bp, Artificial Sequence
  Oligonucleotide for detection of SNP TSC0052321
raaaacgatcgat

SEQ ID NO: 215029 - DNA, 13 bp, Artificial Sequence
  Oligonucleotide for detection of SNP TSC0052321
gaaagtgattgat

SEQ ID NO: 215030 - DNA, 13 bp, Artificial Sequence
  Oligonucleotide for detection of SNP TSC0052321
atcaatcactttc

SEQ ID NO: 215031 - DNA, 13 bp, Artificial Sequence
  Oligonucleotide for detection of SNP TSC0052321
gaaagtaattgat

SEQ ID NO: 215032 - DNA, 13 bp, Artificial Sequence
  Oligonucleotide for detection of SNP TSC0052321
atcaattactttc

SEQ ID NO: 215033 - DNA, 13 bp, Artificial Sequence
  Oligonucleotide for detection of SNP TSC0052321
gaaagcgattgat

SEQ ID NO: 215034 - DNA, 13 bp, Artificial Sequence
  Oligonucleotide for detection of SNP TSC0052321
atcaatcgctttc

SEQ ID NO: 215035 - DNA, 13 bp, Artificial Sequence
  Oligonucleotide for detection of SNP TSC0052321
gaaagtaatcgat

SEQ ID NO: 215036 - DNA, 13 bp, Artificial Sequence
  Oligonucleotide for detection of SNP TSC0052321
atcgattactttc

SEQ ID NO: 215037 - DNA, 13 bp, Artificial Sequence
  Oligonucleotide for detection of SNP TSC0052321
gaaagtgatcgat

SEQ ID NO: 215038 - DNA, 13 bp, Artificial Sequence
  Oligonucleotide for detection of SNP TSC0052321
atcgatcactttc

SEQ ID NO: 215039 - DNA, 13 bp, Artificial Sequence
  Oligonucleotide for detection of SNP TSC0052321
gaaagcgatcgat

SEQ ID NO: 215040 - DNA, 13 bp, Artificial Sequence
  Oligonucleotide for detection of SNP TSC0052321
atcgatcgctttc

SEQ ID NO: 215041 - DNA, 13 bp, Artificial Sequence
  Oligonucleotide for detection of SNP TSC0052324
gtattgtttgtty

SEQ ID NO: 215042 - DNA, 13 bp, Artificial Sequence
  Oligonucleotide for detection of SNP TSC0052324
raacaaacaatac

SEQ ID NO: 215043 - DNA, 13 bp, Artificial Sequence
  Oligonucleotide for detection of SNP TSC0052324
gtattggttgtty

SEQ ID NO: 215044 - DNA, 13 bp, Artificial Sequence
  Oligonucleotide for detection of SNP TSC0052324
raacaaccaatac

SEQ ID NO: 215045 - DNA, 13 bp, Artificial Sequence
  Oligonucleotide for detection of SNP TSC0052324
ggataagtaatgy

SEQ ID NO: 215046 - DNA, 13 bp, Artificial Sequence
  Oligonucleotide for detection of SNP TSC0052324
rcattacttatcc

SEQ ID NO: 215047 - DNA, 13 bp, Artificial Sequence
  Oligonucleotide for detection of SNP TSC0052324
ggataattaatgy

SEQ ID NO: 215048 - DNA, 13 bp, Artificial Sequence
  Oligonucleotide for detection of SNP TSC0052324
rcattaattatcc

SEQ ID NO: 215049 - DNA, 13 bp, Artificial Sequence
  Oligonucleotide for detection of SNP TSC0052325
tatgtaagaattt

SEQ ID NO: 215050 - DNA, 13 bp, Artificial Sequence
  Oligonucleotide for detection of SNP TSC0052325
aaattcttacata

SEQ ID NO: 215051 - DNA, 13 bp, Artificial Sequence
  Oligonucleotide for detection of SNP TSC0052325
tatgtaggaattt

SEQ ID NO: 215052 - DNA, 13 bp, Artificial Sequence
  Oligonucleotide for detection of SNP TSC0052325
aaattcctacata

SEQ ID NO: 215053 - DNA, 13 bp, Artificial Sequence
  Oligonucleotide for detection of SNP TSC0052329
gaaagatgtgtta

SEQ ID NO: 215054 - DNA, 13 bp, Artificial Sequence
  Oligonucleotide for detection of SNP TSC0052329
taacacatctttc

SEQ ID NO: 215055 - DNA, 13 bp, Artificial Sequence
  Oligonucleotide for detection of SNP TSC0052329
gaaagaggtgtta

SEQ ID NO: 215056 - DNA, 13 bp, Artificial Sequence
  Oligonucleotide for detection of SNP TSC0052329
taacacctctttc

SEQ ID NO: 215057 - DNA, 13 bp, Artificial Sequence
  Oligonucleotide for detection of SNP TSC0052330
gggttgatagttg

SEQ ID NO: 215058 - DNA, 13 bp, Artificial Sequence
  Oligonucleotide for detection of SNP TSC0052330
caactatcaaccc

SEQ ID NO: 215059 - DNA, 13 bp, Artificial Sequence
  Oligonucleotide for detection of SNP TSC0052330
gggttgttagttg

SEQ ID NO: 215060 - DNA, 13 bp, Artificial Sequence
  Oligonucleotide for detection of SNP TSC0052330
caactaacaaccc

SEQ ID NO: 215061 - DNA, 13 bp, Artificial Sequence
  Oligonucleotide for detection of SNP TSC0052330
tagttgttagtty

SEQ ID NO: 215062 - DNA, 13 bp, Artificial Sequence
  Oligonucleotide for detection of SNP TSC0052330
raactaacaacta

SEQ ID NO: 215063 - DNA, 13 bp, Artificial Sequence
  Oligonucleotide for detection of SNP TSC0052330
tagttggtagtty

SEQ ID NO: 215064 - DNA, 13 bp, Artificial Sequence
  Oligonucleotide for detection of SNP TSC0052330
raactaccaacta

SEQ ID NO: 215065 - DNA, 13 bp, Artificial Sequence
  Oligonucleotide for detection of SNP TSC0052332
atgtttatagatt

SEQ ID NO: 215066 - DNA, 13 bp, Artificial Sequence
  Oligonucleotide for detection of SNP TSC0052332
aatctataaacat

SEQ ID NO: 215067 - DNA, 13 bp, Artificial Sequence
  Oligonucleotide for detection of SNP TSC0052332
atgtttgtagatt

SEQ ID NO: 215068 - DNA, 13 bp, Artificial Sequence
  Oligonucleotide for detection of SNP TSC0052332
aatctacaaacat

SEQ ID NO: 215069 - DNA, 13 bp, Artificial Sequence
  Oligonucleotide for detection of SNP TSC0007391
tagggaagttttt

SEQ ID NO: 215070 - DNA, 13 bp, Artificial Sequence
  Oligonucleotide for detection of SNP TSC0007391
aaaaacttcccta

SEQ ID NO: 215071 - DNA, 13 bp, Artificial Sequence
  Oligonucleotide for detection of SNP TSC0007391
tagggatgttttt

SEQ ID NO: 215072 - DNA, 13 bp, Artificial Sequence
  Oligonucleotide for detection of SNP TSC0007391
aaaaacatcccta

SEQ ID NO: 215073 - DNA, 13 bp, Artificial Sequence
  Oligonucleotide for detection of SNP TSC0007391
tagggacgttttt

SEQ ID NO: 215074 - DNA, 13 bp, Artificial Sequence
  Oligonucleotide for detection of SNP TSC0007391
aaaaacgtcccta

SEQ ID NO: 215075 - DNA, 13 bp, Artificial Sequence
  Oligonucleotide for detection of SNP TSC0007391
aagaatttttttg

SEQ ID NO: 215076 - DNA, 13 bp, Artificial Sequence
  Oligonucleotide for detection of SNP TSC0007391
caaaaaaattctt

SEQ ID NO: 215077 - DNA, 13 bp, Artificial Sequence
  Oligonucleotide for detection of SNP TSC0007391
aagaacgtttttg

SEQ ID NO: 215078 - DNA, 13 bp, Artificial Sequence
  Oligonucleotide for detection of SNP TSC0007391
caaaaacgttctt

SEQ ID NO: 215079 - DNA, 13 bp, Artificial Sequence
  Oligonucleotide for detection of SNP TSC0052334
tatttttaaaagt

SEQ ID NO: 215080 - DNA, 13 bp, Artificial Sequence
  Oligonucleotide for detection of SNP TSC0052334
acttttaaaaata

SEQ ID NO: 215081 - DNA, 13 bp, Artificial Sequence
  Oligonucleotide for detection of SNP TSC0052334
tattttaaaaagt

SEQ ID NO: 215082 - DNA, 13 bp, Artificial Sequence
  Oligonucleotide for detection of SNP TSC0052334
actttttaaaata

SEQ ID NO: 215083 - DNA, 13 bp, Artificial Sequence
  Oligonucleotide for detection of SNP TSC0052335
ttttatggttgat

SEQ ID NO: 215084 - DNA, 13 bp, Artificial Sequence
  Oligonucleotide for detection of SNP TSC0052335
atcaaccataaaa

SEQ ID NO: 215085 - DNA, 13 bp, Artificial Sequence
  Oligonucleotide for detection of SNP TSC0052335
ttttatagttgat

SEQ ID NO: 215086 - DNA, 13 bp, Artificial Sequence
  Oligonucleotide for detection of SNP TSC0052335
atcaactataaaa

SEQ ID NO: 215087 - DNA, 13 bp, Artificial Sequence
  Oligonucleotide for detection of SNP TSC0052336
gtgtgtagtgttt

SEQ ID NO: 215088 - DNA, 13 bp, Artificial Sequence
  Oligonucleotide for detection of SNP TSC0052336
aaacactacacac

SEQ ID NO: 215089 - DNA, 13 bp, Artificial Sequence
  Oligonucleotide for detection of SNP TSC0052336
gtgtgttgtgttt

SEQ ID NO: 215090 - DNA, 13 bp, Artificial Sequence
  Oligonucleotide for detection of SNP TSC0052336
aaacacaacacac

SEQ ID NO: 215091 - DNA, 13 bp, Artificial Sequence
  Oligonucleotide for detection of SNP TSC0052336
aaatatagtatay

SEQ ID NO: 215092 - DNA, 13 bp, Artificial Sequence
  Oligonucleotide for detection of SNP TSC0052336
rtatactatattt

SEQ ID NO: 215093 - DNA, 13 bp, Artificial Sequence
  Oligonucleotide for detection of SNP TSC0008254
aggtaaggtagag

SEQ ID NO: 215094 - DNA, 13 bp, Artificial Sequence
  Oligonucleotide for detection of SNP TSC0008254
ctctaccttacct

SEQ ID NO: 215095 - DNA, 13 bp, Artificial Sequence
  Oligonucleotide for detection of SNP TSC0052338
gtaaaaaatatat

SEQ ID NO: 215096 - DNA, 13 bp, Artificial Sequence
  Oligonucleotide for detection of SNP TSC0052338
atatattttttac

SEQ ID NO: 215097 - DNA, 13 bp, Artificial Sequence
  Oligonucleotide for detection of SNP TSC0052338
gtaaaatatatat

SEQ ID NO: 215098 - DNA, 13 bp, Artificial Sequence
  Oligonucleotide for detection of SNP TSC0052338
atatatattttac

SEQ ID NO: 215099 - DNA, 13 bp, Artificial Sequence
  Oligonucleotide for detection of SNP TSC0052338
atatattttttay

SEQ ID NO: 215100 - DNA, 13 bp, Artificial Sequence
  Oligonucleotide for detection of SNP TSC0052338
rtaaaaaatatat

SEQ ID NO: 215101 - DNA, 13 bp, Artificial Sequence
  Oligonucleotide for detection of SNP TSC0052346
gaaaatatggaaa

SEQ ID NO: 215102 - DNA, 13 bp, Artificial Sequence
  Oligonucleotide for detection of SNP TSC0052346
tttccatattttc

SEQ ID NO: 215103 - DNA, 13 bp, Artificial Sequence
  Oligonucleotide for detection of SNP TSC0052346
gaaaatgtggaaa

SEQ ID NO: 215104 - DNA, 13 bp, Artificial Sequence
  Oligonucleotide for detection of SNP TSC0052346
tttccacattttc

SEQ ID NO: 215105 - DNA, 13 bp, Artificial Sequence
  Oligonucleotide for detection of SNP TSC0052347
gataatattagtt

SEQ ID NO: 215106 - DNA, 13 bp, Artificial Sequence
  Oligonucleotide for detection of SNP TSC0052347
aactaatattatc

SEQ ID NO: 215107 - DNA, 13 bp, Artificial Sequence
  Oligonucleotide for detection of SNP TSC0052347
gataatgttagtt

SEQ ID NO: 215108 - DNA, 13 bp, Artificial Sequence
  Oligonucleotide for detection of SNP TSC0052347
aactaacattatc

SEQ ID NO: 215109 - DNA, 13 bp, Artificial Sequence
  Oligonucleotide for detection of SNP TSC0052347
gataacgttagtt

SEQ ID NO: 215110 - DNA, 13 bp, Artificial Sequence
  Oligonucleotide for detection of SNP TSC0052347
aactaacgttatc

SEQ ID NO: 215111 - DNA, 13 bp, Artificial Sequence
  Oligonucleotide for detection of SNP TSC0052347
aattaatgttaty

SEQ ID NO: 215112 - DNA, 13 bp, Artificial Sequence
  Oligonucleotide for detection of SNP TSC0052347
rataacattaatt

SEQ ID NO: 215113 - DNA, 13 bp, Artificial Sequence
  Oligonucleotide for detection of SNP TSC0052347
aattaacgttaty

SEQ ID NO: 215114 - DNA, 13 bp, Artificial Sequence
  Oligonucleotide for detection of SNP TSC0052347
rataacgttaatt

SEQ ID NO: 215115 - DNA, 13 bp, Artificial Sequence
  Oligonucleotide for detection of SNP TSC0052348
tttaagtgggtgg

SEQ ID NO: 215116 - DNA, 13 bp, Artificial Sequence
  Oligonucleotide for detection of SNP TSC0052348
ccacccacttaaa

SEQ ID NO: 215117 - DNA, 13 bp, Artificial Sequence
  Oligonucleotide for detection of SNP TSC0052348
tttaagggggtgg

SEQ ID NO: 215118 - DNA, 13 bp, Artificial Sequence
  Oligonucleotide for detection of SNP TSC0052348
ccacccccttaaa

SEQ ID NO: 215119 - DNA, 13 bp, Artificial Sequence
  Oligonucleotide for detection of SNP TSC0052348
tttaagcgggtgg

SEQ ID NO: 215120 - DNA, 13 bp, Artificial Sequence
  Oligonucleotide for detection of SNP TSC0052348
ccacccgcttaaa

SEQ ID NO: 215121 - DNA, 13 bp, Artificial Sequence
  Oligonucleotide for detection of SNP TSC0052348
ttattcgtttgag

SEQ ID NO: 215122 - DNA, 13 bp, Artificial Sequence
  Oligonucleotide for detection of SNP TSC0052348
ctcaaacgaataa

SEQ ID NO: 215123 - DNA, 13 bp, Artificial Sequence
  Oligonucleotide for detection of SNP TSC0052349
gaagattggtttt

SEQ ID NO: 215124 - DNA, 13 bp, Artificial Sequence
  Oligonucleotide for detection of SNP TSC0052349
aaaaccaatcttc

SEQ ID NO: 215125 - DNA, 13 bp, Artificial Sequence
  Oligonucleotide for detection of SNP TSC0052349
gaagatcggtttt

SEQ ID NO: 215126 - DNA, 13 bp, Artificial Sequence
  Oligonucleotide for detection of SNP TSC0052349
aaaaccgatcttc

SEQ ID NO: 215127 - DNA, 13 bp, Artificial Sequence
  Oligonucleotide for detection of SNP TSC0052349
aggattggtttty

SEQ ID NO: 215128 - DNA, 13 bp, Artificial Sequence
  Oligonucleotide for detection of SNP TSC0052349
raaaaccaatcct

SEQ ID NO: 215129 - DNA, 13 bp, Artificial Sequence
  Oligonucleotide for detection of SNP TSC0052349
aggattagtttty

SEQ ID NO: 215130 - DNA, 13 bp, Artificial Sequence
  Oligonucleotide for detection of SNP TSC0052349
raaaactaatcct

SEQ ID NO: 215131 - DNA, 13 bp, Artificial Sequence
  Oligonucleotide for detection of SNP TSC0052349
aggatcggtttty

SEQ ID NO: 215132 - DNA, 13 bp, Artificial Sequence
  Oligonucleotide for detection of SNP TSC0052349
raaaaccgatcct

SEQ ID NO: 215133 - DNA, 13 bp, Artificial Sequence
  Oligonucleotide for detection of SNP TSC0052350
aaggggatatttg

SEQ ID NO: 215134 - DNA, 13 bp, Artificial Sequence
  Oligonucleotide for detection of SNP TSC0052350
caaatatcccctt

SEQ ID NO: 215135 - DNA, 13 bp, Artificial Sequence
  Oligonucleotide for detection of SNP TSC0052350
aaggggttatttg

SEQ ID NO: 215136 - DNA, 13 bp, Artificial Sequence
  Oligonucleotide for detection of SNP TSC0052350
caaataacccctt

SEQ ID NO: 215137 - DNA, 13 bp, Artificial Sequence
  Oligonucleotide for detection of SNP TSC0052350
aaggggatattcg

SEQ ID NO: 215138 - DNA, 13 bp, Artificial Sequence
  Oligonucleotide for detection of SNP TSC0052350
cgaatatcccctt

SEQ ID NO: 215139 - DNA, 13 bp, Artificial Sequence
  Oligonucleotide for detection of SNP TSC0052350
aaggggttattcg

SEQ ID NO: 215140 - DNA, 13 bp, Artificial Sequence
  Oligonucleotide for detection of SNP TSC0052350
cgaataacccctt

SEQ ID NO: 215141 - DNA, 13 bp, Artificial Sequence
  Oligonucleotide for detection of SNP TSC0052350
tgggtgatttttt

SEQ ID NO: 215142 - DNA, 13 bp, Artificial Sequence
  Oligonucleotide for detection of SNP TSC0052350
aaaaaatcaccca

SEQ ID NO: 215143 - DNA, 13 bp, Artificial Sequence
  Oligonucleotide for detection of SNP TSC0052350
cgggtgttttttt

SEQ ID NO: 215144 - DNA, 13 bp, Artificial Sequence
  Oligonucleotide for detection of SNP TSC0052350
aaaaaaacacccg

SEQ ID NO: 215145 - DNA, 13 bp, Artificial Sequence
  Oligonucleotide for detection of SNP TSC0052350
cgggtgatttttt

SEQ ID NO: 215146 - DNA, 13 bp, Artificial Sequence
  Oligonucleotide for detection of SNP TSC0052350
aaaaaatcacccg

SEQ ID NO: 215147 - DNA, 13 bp, Artificial Sequence
  Oligonucleotide for detection of SNP TSC0052351
gttatgtggatay

SEQ ID NO: 215148 - DNA, 13 bp, Artificial Sequence
  Oligonucleotide for detection of SNP TSC0052351
rtatccacataac

SEQ ID NO: 215149 - DNA, 13 bp, Artificial Sequence
  Oligonucleotide for detection of SNP TSC0052351
gttatgcggatay

SEQ ID NO: 215150 - DNA, 13 bp, Artificial Sequence
  Oligonucleotide for detection of SNP TSC0052351
rtatccgcataac

SEQ ID NO: 215151 - DNA, 13 bp, Artificial Sequence
  Oligonucleotide for detection of SNP TSC0052351
gtgtttgtataay

SEQ ID NO: 215152 - DNA, 13 bp, Artificial Sequence
  Oligonucleotide for detection of SNP TSC0052351
rttatacaaacac

SEQ ID NO: 215153 - DNA, 13 bp, Artificial Sequence
  Oligonucleotide for detection of SNP TSC0052351
gtgtttatataay

SEQ ID NO: 215154 - DNA, 13 bp, Artificial Sequence
  Oligonucleotide for detection of SNP TSC0052351
rttatataaacac

SEQ ID NO: 215155 - DNA, 13 bp, Artificial Sequence
  Oligonucleotide for detection of SNP TSC0052351
gtgttcgtataay

SEQ ID NO: 215156 - DNA, 13 bp, Artificial Sequence
  Oligonucleotide for detection of SNP TSC0052351
rttatacgaacac

SEQ ID NO: 215157 - DNA, 13 bp, Artificial Sequence
  Oligonucleotide for detection of SNP TSC0052352
tagagaattagay

SEQ ID NO: 215158 - DNA, 13 bp, Artificial Sequence
  Oligonucleotide for detection of SNP TSC0052352
rtctaattctcta

SEQ ID NO: 215159 - DNA, 13 bp, Artificial Sequence
  Oligonucleotide for detection of SNP TSC0052352
tagagagttagay

SEQ ID NO: 215160 - DNA, 13 bp, Artificial Sequence
  Oligonucleotide for detection of SNP TSC0052352
rtctaactctcta

SEQ ID NO: 215161 - DNA, 13 bp, Artificial Sequence
  Oligonucleotide for detection of SNP TSC0052353
aattattgttagt

SEQ ID NO: 215162 - DNA, 13 bp, Artificial Sequence
  Oligonucleotide for detection of SNP TSC0052353
actaacaataatt

SEQ ID NO: 215163 - DNA, 13 bp, Artificial Sequence
  Oligonucleotide for detection of SNP TSC0052353
aattatcgttagt

SEQ ID NO: 215164 - DNA, 13 bp, Artificial Sequence
  Oligonucleotide for detection of SNP TSC0052353
actaacgataatt

SEQ ID NO: 215165 - DNA, 13 bp, Artificial Sequence
  Oligonucleotide for detection of SNP TSC0052353
attagtgatggtt

SEQ ID NO: 215166 - DNA, 13 bp, Artificial Sequence
  Oligonucleotide for detection of SNP TSC0052353
aaccatcactaat

SEQ ID NO: 215167 - DNA, 13 bp, Artificial Sequence
  Oligonucleotide for detection of SNP TSC0052353
attagtaatggtt

SEQ ID NO: 215168 - DNA, 13 bp, Artificial Sequence
  Oligonucleotide for detection of SNP TSC0052353
aaccattactaat

SEQ ID NO: 215169 - DNA, 13 bp, Artificial Sequence
  Oligonucleotide for detection of SNP TSC0052353
attagcgatggtt

SEQ ID NO: 215170 - DNA, 13 bp, Artificial Sequence
  Oligonucleotide for detection of SNP TSC0052353
aaccatcgctaat

SEQ ID NO: 215171 - DNA, 13 bp, Artificial Sequence
  Oligonucleotide for detection of SNP TSC0052357
taattatgtataa

SEQ ID NO: 215172 - DNA, 13 bp, Artificial Sequence
  Oligonucleotide for detection of SNP TSC0052357
ttatacataatta

SEQ ID NO: 215173 - DNA, 13 bp, Artificial Sequence
  Oligonucleotide for detection of SNP TSC0052357
ttgtatgtagttg

SEQ ID NO: 215174 - DNA, 13 bp, Artificial Sequence
  Oligonucleotide for detection of SNP TSC0052357
caactacatacaa

SEQ ID NO: 215175 - DNA, 13 bp, Artificial Sequence
  Oligonucleotide for detection of SNP TSC0052357
ttgtatatagttg

SEQ ID NO: 215176 - DNA, 13 bp, Artificial Sequence
  Oligonucleotide for detection of SNP TSC0052357
caactatatacaa

SEQ ID NO: 215177 - DNA, 13 bp, Artificial Sequence
  Oligonucleotide for detection of SNP TSC0052357
ttgtacgtagttg

SEQ ID NO: 215178 - DNA, 13 bp, Artificial Sequence
  Oligonucleotide for detection of SNP TSC0052357
caactacgtacaa

SEQ ID NO: 215179 - DNA, 13 bp, Artificial Sequence
  Oligonucleotide for detection of SNP TSC0052358
tttataaaattgt

SEQ ID NO: 215180 - DNA, 13 bp, Artificial Sequence
  Oligonucleotide for detection of SNP TSC0052358
acaattttataaa

SEQ ID NO: 215181 - DNA, 13 bp, Artificial Sequence
  Oligonucleotide for detection of SNP TSC0052358
tttatataattgt

SEQ ID NO: 215182 - DNA, 13 bp, Artificial Sequence
  Oligonucleotide for detection of SNP TSC0052358
acaattatataaa

SEQ ID NO: 215183 - DNA, 13 bp, Artificial Sequence
  Oligonucleotide for detection of SNP TSC0052358
ataattttgtgaa

SEQ ID NO: 215184 - DNA, 13 bp, Artificial Sequence
  Oligonucleotide for detection of SNP TSC0052358
ttcacaaaattat

SEQ ID NO: 215185 - DNA, 13 bp, Artificial Sequence
  Oligonucleotide for detection of SNP TSC0052358
ataattgtgtgaa

SEQ ID NO: 215186 - DNA, 13 bp, Artificial Sequence
  Oligonucleotide for detection of SNP TSC0052358
ttcacacaattat

SEQ ID NO: 215187 - DNA, 13 bp, Artificial Sequence
  Oligonucleotide for detection of SNP TSC0052359
gtaaaaaatatty

SEQ ID NO: 215188 - DNA, 13 bp, Artificial Sequence
  Oligonucleotide for detection of SNP TSC0052359
raatattttttac

SEQ ID NO: 215189 - DNA, 13 bp, Artificial Sequence
  Oligonucleotide for detection of SNP TSC0052359
gtaaaagatatty

SEQ ID NO: 215190 - DNA, 13 bp, Artificial Sequence
  Oligonucleotide for detection of SNP TSC0052359
raatatcttttac

SEQ ID NO: 215191 - DNA, 13 bp, Artificial Sequence
  Oligonucleotide for detection of SNP TSC0052370
attttaatgttaa

SEQ ID NO: 215192 - DNA, 13 bp, Artificial Sequence
  Oligonucleotide for detection of SNP TSC0052370
ttaacattaaaat

SEQ ID NO: 215193 - DNA, 13 bp, Artificial Sequence
  Oligonucleotide for detection of SNP TSC0052370
attttagtgttaa

SEQ ID NO: 215194 - DNA, 13 bp, Artificial Sequence
  Oligonucleotide for detection of SNP TSC0052370
ttaacactaaaat

SEQ ID NO: 215195 - DNA, 13 bp, Artificial Sequence
  Oligonucleotide for detection of SNP TSC0007660
ttttgttagggtt

SEQ ID NO: 215196 - DNA, 13 bp, Artificial Sequence
  Oligonucleotide for detection of SNP TSC0007660
aaccctaacaaaa

SEQ ID NO: 215197 - DNA, 13 bp, Artificial Sequence
  Oligonucleotide for detection of SNP TSC0007660
ttttgtgagggtt

SEQ ID NO: 215198 - DNA, 13 bp, Artificial Sequence
  Oligonucleotide for detection of SNP TSC0007660
aaccctcacaaaa

SEQ ID NO: 215199 - DNA, 13 bp, Artificial Sequence
  Oligonucleotide for detection of SNP TSC0007660
ttttgcgagggtt

SEQ ID NO: 215200 - DNA, 13 bp, Artificial Sequence
  Oligonucleotide for detection of SNP TSC0007660
aaccctcgcaaaa

SEQ ID NO: 215201 - DNA, 13 bp, Artificial Sequence
  Oligonucleotide for detection of SNP TSC0007660
aattttagtaggg

SEQ ID NO: 215202 - DNA, 13 bp, Artificial Sequence
  Oligonucleotide for detection of SNP TSC0007660
ccctactaaaatt

SEQ ID NO: 215203 - DNA, 13 bp, Artificial Sequence
  Oligonucleotide for detection of SNP TSC0007660
aatttttgtaggg

SEQ ID NO: 215204 - DNA, 13 bp, Artificial Sequence
  Oligonucleotide for detection of SNP TSC0007660
ccctacaaaaatt

SEQ ID NO: 215205 - DNA, 13 bp, Artificial Sequence
  Oligonucleotide for detection of SNP TSC0007660
aattttcgtaggg

SEQ ID NO: 215206 - DNA, 13 bp, Artificial Sequence
  Oligonucleotide for detection of SNP TSC0007660
ccctacgaaaatt

SEQ ID NO: 215207 - DNA, 13 bp, Artificial Sequence
  Oligonucleotide for detection of SNP TSC0052373
ttaaggatagggt

SEQ ID NO: 215208 - DNA, 13 bp, Artificial Sequence
  Oligonucleotide for detection of SNP TSC0052373
accctatccttaa

SEQ ID NO: 215209 - DNA, 13 bp, Artificial Sequence
  Oligonucleotide for detection of SNP TSC0052373
ttaaggttagggt

SEQ ID NO: 215210 - DNA, 13 bp, Artificial Sequence
  Oligonucleotide for detection of SNP TSC0052373
accctaaccttaa

SEQ ID NO: 215211 - DNA, 13 bp, Artificial Sequence
  Oligonucleotide for detection of SNP TSC0010511
ttaaagaagggag

SEQ ID NO: 215212 - DNA, 13 bp, Artificial Sequence
  Oligonucleotide for detection of SNP TSC0010511
ctcccttctttaa

SEQ ID NO: 215213 - DNA, 13 bp, Artificial Sequence
  Oligonucleotide for detection of SNP TSC0010511
ttaaagtagggag

SEQ ID NO: 215214 - DNA, 13 bp, Artificial Sequence
  Oligonucleotide for detection of SNP TSC0010511
ctccctactttaa

SEQ ID NO: 215215 - DNA, 13 bp, Artificial Sequence
  Oligonucleotide for detection of SNP TSC0052374
gggttatgtggtg

SEQ ID NO: 215216 - DNA, 13 bp, Artificial Sequence
  Oligonucleotide for detection of SNP TSC0052374
caccacataaccc

SEQ ID NO: 215217 - DNA, 13 bp, Artificial Sequence
  Oligonucleotide for detection of SNP TSC0052374
gggttacgtggtg

SEQ ID NO: 215218 - DNA, 13 bp, Artificial Sequence
  Oligonucleotide for detection of SNP TSC0052374
caccacgtaaccc

SEQ ID NO: 215219 - DNA, 13 bp, Artificial Sequence
  Oligonucleotide for detection of SNP TSC0052374
tattatgtagtty

SEQ ID NO: 215220 - DNA, 13 bp, Artificial Sequence
  Oligonucleotide for detection of SNP TSC0052374
raactacataata

SEQ ID NO: 215221 - DNA, 13 bp, Artificial Sequence
  Oligonucleotide for detection of SNP TSC0052374
tattatatagtty

SEQ ID NO: 215222 - DNA, 13 bp, Artificial Sequence
  Oligonucleotide for detection of SNP TSC0052374
raactatataata

SEQ ID NO: 215223 - DNA, 13 bp, Artificial Sequence
  Oligonucleotide for detection of SNP TSC0052374
tattacgtagtty

SEQ ID NO: 215224 - DNA, 13 bp, Artificial Sequence
  Oligonucleotide for detection of SNP TSC0052374
raactacgtaata

SEQ ID NO: 215225 - DNA, 13 bp, Artificial Sequence
  Oligonucleotide for detection of SNP TSC0052375
tgttaagtttttt

SEQ ID NO: 215226 - DNA, 13 bp, Artificial Sequence
  Oligonucleotide for detection of SNP TSC0052375
aaaaaacttaaca

SEQ ID NO: 215227 - DNA, 13 bp, Artificial Sequence
  Oligonucleotide for detection of SNP TSC0052376
tttgaaggattta

SEQ ID NO: 215228 - DNA, 13 bp, Artificial Sequence
  Oligonucleotide for detection of SNP TSC0052376
taaatccttcaaa

SEQ ID NO: 215229 - DNA, 13 bp, Artificial Sequence
  Oligonucleotide for detection of SNP TSC0052376
tttgaaagattta

SEQ ID NO: 215230 - DNA, 13 bp, Artificial Sequence
  Oligonucleotide for detection of SNP TSC0052376
taaatctttcaaa

SEQ ID NO: 215231 - DNA, 13 bp, Artificial Sequence
  Oligonucleotide for detection of SNP TSC0052379
gattttaaaggga

SEQ ID NO: 215232 - DNA, 13 bp, Artificial Sequence
  Oligonucleotide for detection of SNP TSC0052379
tccctttaaaatc

SEQ ID NO: 215233 - DNA, 13 bp, Artificial Sequence
  Oligonucleotide for detection of SNP TSC0052379
gattttgaaggga

SEQ ID NO: 215234 - DNA, 13 bp, Artificial Sequence
  Oligonucleotide for detection of SNP TSC0052379
tcccttcaaaatc

SEQ ID NO: 215235 - DNA, 13 bp, Artificial Sequence
  Oligonucleotide for detection of SNP TSC0052380
tgttgtgattatt

SEQ ID NO: 215236 - DNA, 13 bp, Artificial Sequence
  Oligonucleotide for detection of SNP TSC0052380
aataatcacaaca

SEQ ID NO: 215237 - DNA, 13 bp, Artificial Sequence
  Oligonucleotide for detection of SNP TSC0052380
tgttgtaattatt

SEQ ID NO: 215238 - DNA, 13 bp, Artificial Sequence
  Oligonucleotide for detection of SNP TSC0052380
aataattacaaca

SEQ ID NO: 215239 - DNA, 13 bp, Artificial Sequence
  Oligonucleotide for detection of SNP TSC0052381
gagaatataaagg

SEQ ID NO: 215240 - DNA, 13 bp, Artificial Sequence
  Oligonucleotide for detection of SNP TSC0052381
cctttatattctc

SEQ ID NO: 215241 - DNA, 13 bp, Artificial Sequence
  Oligonucleotide for detection of SNP TSC0052381
gagaatgtaaagg

SEQ ID NO: 215242 - DNA, 13 bp, Artificial Sequence
  Oligonucleotide for detection of SNP TSC0052381
cctttacattctc

SEQ ID NO: 215243 - DNA, 13 bp, Artificial Sequence
  Oligonucleotide for detection of SNP TSC0052381
gagaacgtaaagg

SEQ ID NO: 215244 - DNA, 13 bp, Artificial Sequence
  Oligonucleotide for detection of SNP TSC0052381
cctttacgttctc

SEQ ID NO: 215245 - DNA, 13 bp, Artificial Sequence
  Oligonucleotide for detection of SNP TSC0052383
agtattgaattta

SEQ ID NO: 215246 - DNA, 13 bp, Artificial Sequence
  Oligonucleotide for detection of SNP TSC0052383
taaattcaatact

SEQ ID NO: 215247 - DNA, 13 bp, Artificial Sequence
  Oligonucleotide for detection of SNP TSC0052383
agtattaaattta

SEQ ID NO: 215248 - DNA, 13 bp, Artificial Sequence
  Oligonucleotide for detection of SNP TSC0052383
taaatttaatact

SEQ ID NO: 215249 - DNA, 13 bp, Artificial Sequence
  Oligonucleotide for detection of SNP TSC0052384
agttggattttaa

SEQ ID NO: 215250 - DNA, 13 bp, Artificial Sequence
  Oligonucleotide for detection of SNP TSC0052384
ttaaaatccaact

SEQ ID NO: 215251 - DNA, 13 bp, Artificial Sequence
  Oligonucleotide for detection of SNP TSC0052384
agttgggttttaa

SEQ ID NO: 215252 - DNA, 13 bp, Artificial Sequence
  Oligonucleotide for detection of SNP TSC0052384
ttaaaacccaact

SEQ ID NO: 215253 - DNA, 13 bp, Artificial Sequence
  Oligonucleotide for detection of SNP TSC0007589
taagaggtgggtt

SEQ ID NO: 215254 - DNA, 13 bp, Artificial Sequence
  Oligonucleotide for detection of SNP TSC0007589
aacccacctctta

SEQ ID NO: 215255 - DNA, 13 bp, Artificial Sequence
  Oligonucleotide for detection of SNP TSC0007589
taagagatgggtt

SEQ ID NO: 215256 - DNA, 13 bp, Artificial Sequence
  Oligonucleotide for detection of SNP TSC0007589
aacccatctctta

SEQ ID NO: 215257 - DNA, 13 bp, Artificial Sequence
  Oligonucleotide for detection of SNP TSC0052386
gaattttaaatay

SEQ ID NO: 215258 - DNA, 13 bp, Artificial Sequence
  Oligonucleotide for detection of SNP TSC0052386
rtatttaaaattc

SEQ ID NO: 215259 - DNA, 13 bp, Artificial Sequence
  Oligonucleotide for detection of SNP TSC0052386
gaatttgaaatay

SEQ ID NO: 215260 - DNA, 13 bp, Artificial Sequence
  Oligonucleotide for detection of SNP TSC0052386
rtatttcaaattc

SEQ ID NO: 215261 - DNA, 13 bp, Artificial Sequence
  Oligonucleotide for detection of SNP TSC0052386
gtatttaagatty

SEQ ID NO: 215262 - DNA, 13 bp, Artificial Sequence
  Oligonucleotide for detection of SNP TSC0052386
raatcttaaatac

SEQ ID NO: 215263 - DNA, 13 bp, Artificial Sequence
  Oligonucleotide for detection of SNP TSC0052386
gtattttagatty

SEQ ID NO: 215264 - DNA, 13 bp, Artificial Sequence
  Oligonucleotide for detection of SNP TSC0052386
raatctaaaatac

SEQ ID NO: 215265 - DNA, 13 bp, Artificial Sequence
  Oligonucleotide for detection of SNP TSC0052389
atagagtgggtay

SEQ ID NO: 215266 - DNA, 13 bp, Artificial Sequence
  Oligonucleotide for detection of SNP TSC0052389
rtacccactctat

SEQ ID NO: 215267 - DNA, 13 bp, Artificial Sequence
  Oligonucleotide for detection of SNP TSC0052389
atagagcgggtay

SEQ ID NO: 215268 - DNA, 13 bp, Artificial Sequence
  Oligonucleotide for detection of SNP TSC0052389
rtacccgctctat

SEQ ID NO: 215269 - DNA, 13 bp, Artificial Sequence
  Oligonucleotide for detection of SNP TSC0052390
tggtagtgttgty

SEQ ID NO: 215270 - DNA, 13 bp, Artificial Sequence
  Oligonucleotide for detection of SNP TSC0052390
racaacactacca

SEQ ID NO: 215271 - DNA, 13 bp, Artificial Sequence
  Oligonucleotide for detection of SNP TSC0052390
tggtagggttgty

SEQ ID NO: 215272 - DNA, 13 bp, Artificial Sequence
  Oligonucleotide for detection of SNP TSC0052390
racaaccctacca

SEQ ID NO: 215273 - DNA, 13 bp, Artificial Sequence
  Oligonucleotide for detection of SNP TSC0052390
cggtagtgttgty

SEQ ID NO: 215274 - DNA, 13 bp, Artificial Sequence
  Oligonucleotide for detection of SNP TSC0052390
racaacactaccg

SEQ ID NO: 215275 - DNA, 13 bp, Artificial Sequence
  Oligonucleotide for detection of SNP TSC0052390
cggtagggttgty

SEQ ID NO: 215276 - DNA, 13 bp, Artificial Sequence
  Oligonucleotide for detection of SNP TSC0052390
racaaccctaccg

SEQ ID NO: 215277 - DNA, 13 bp, Artificial Sequence
  Oligonucleotide for detection of SNP TSC0052390
ggtagtattgttg

SEQ ID NO: 215278 - DNA, 13 bp, Artificial Sequence
  Oligonucleotide for detection of SNP TSC0052390
caacaatactacc

SEQ ID NO: 215279 - DNA, 13 bp, Artificial Sequence
  Oligonucleotide for detection of SNP TSC0052390
ggtagttttgttg

SEQ ID NO: 215280 - DNA, 13 bp, Artificial Sequence
  Oligonucleotide for detection of SNP TSC0052390
caacaaaactacc

SEQ ID NO: 215281 - DNA, 13 bp, Artificial Sequence
  Oligonucleotide for detection of SNP TSC0052390
ggtagtattgtcg

SEQ ID NO: 215282 - DNA, 13 bp, Artificial Sequence
  Oligonucleotide for detection of SNP TSC0052390
cgacaatactacc

SEQ ID NO: 215283 - DNA, 13 bp, Artificial Sequence
  Oligonucleotide for detection of SNP TSC0052390
ggtagttttgtcg

SEQ ID NO: 215284 - DNA, 13 bp, Artificial Sequence
  Oligonucleotide for detection of SNP TSC0052390
cgacaaaactacc

SEQ ID NO: 215285 - DNA, 13 bp, Artificial Sequence
  Oligonucleotide for detection of SNP TSC0009353
ttaagttttaata

SEQ ID NO: 215286 - DNA, 13 bp, Artificial Sequence
  Oligonucleotide for detection of SNP TSC0009353
tattaaaacttaa

SEQ ID NO: 215287 - DNA, 13 bp, Artificial Sequence
  Oligonucleotide for detection of SNP TSC0009353
ttaagtgttaata

SEQ ID NO: 215288 - DNA, 13 bp, Artificial Sequence
  Oligonucleotide for detection of SNP TSC0009353
tattaacacttaa

SEQ ID NO: 215289 - DNA, 13 bp, Artificial Sequence
  Oligonucleotide for detection of SNP TSC0009353
tgttaagatttaa

SEQ ID NO: 215290 - DNA, 13 bp, Artificial Sequence
  Oligonucleotide for detection of SNP TSC0009353
ttaaatcttaaca

SEQ ID NO: 215291 - DNA, 13 bp, Artificial Sequence
  Oligonucleotide for detection of SNP TSC0009353
tgttaatatttaa

SEQ ID NO: 215292 - DNA, 13 bp, Artificial Sequence
  Oligonucleotide for detection of SNP TSC0009353
ttaaatattaaca

SEQ ID NO: 215293 - DNA, 13 bp, Artificial Sequence
  Oligonucleotide for detection of SNP TSC0006400
aatgttgttagtg

SEQ ID NO: 215294 - DNA, 13 bp, Artificial Sequence
  Oligonucleotide for detection of SNP TSC0006400
cactaacaacatt

SEQ ID NO: 215295 - DNA, 13 bp, Artificial Sequence
  Oligonucleotide for detection of SNP TSC0006400
aatgttattagtg

SEQ ID NO: 215296 - DNA, 13 bp, Artificial Sequence
  Oligonucleotide for detection of SNP TSC0006400
cactaataacatt

SEQ ID NO: 215297 - DNA, 13 bp, Artificial Sequence
  Oligonucleotide for detection of SNP TSC0052392
aagattgtgaaag

SEQ ID NO: 215298 - DNA, 13 bp, Artificial Sequence
  Oligonucleotide for detection of SNP TSC0052392
ctttcacaatctt

SEQ ID NO: 215299 - DNA, 13 bp, Artificial Sequence
  Oligonucleotide for detection of SNP TSC0052392
aagattttgaaag

SEQ ID NO: 215300 - DNA, 13 bp, Artificial Sequence
  Oligonucleotide for detection of SNP TSC0052392
ctttcaaaatctt

SEQ ID NO: 215301 - DNA, 13 bp, Artificial Sequence
  Oligonucleotide for detection of SNP TSC0052395
tttttgggaagga

SEQ ID NO: 215302 - DNA, 13 bp, Artificial Sequence
  Oligonucleotide for detection of SNP TSC0052395
tccttcccaaaaa

SEQ ID NO: 215303 - DNA, 13 bp, Artificial Sequence
  Oligonucleotide for detection of SNP TSC0052395
tttttgagaagga

SEQ ID NO: 215304 - DNA, 13 bp, Artificial Sequence
  Oligonucleotide for detection of SNP TSC0052395
tccttctcaaaaa

SEQ ID NO: 215305 - DNA, 13 bp, Artificial Sequence
  Oligonucleotide for detection of SNP TSC0052400
agatttttggtty

SEQ ID NO: 215306 - DNA, 13 bp, Artificial Sequence
  Oligonucleotide for detection of SNP TSC0052400
raaccaaaaatct

SEQ ID NO: 215307 - DNA, 13 bp, Artificial Sequence
  Oligonucleotide for detection of SNP TSC0052400
agatttgtggtty

SEQ ID NO: 215308 - DNA, 13 bp, Artificial Sequence
  Oligonucleotide for detection of SNP TSC0052400
raaccacaaatct

SEQ ID NO: 215309 - DNA, 13 bp, Artificial Sequence
  Oligonucleotide for detection of SNP TSC0052400
agattcgtggtty

SEQ ID NO: 215310 - DNA, 13 bp, Artificial Sequence
  Oligonucleotide for detection of SNP TSC0052400
raaccacgaatct

SEQ ID NO: 215311 - DNA, 13 bp, Artificial Sequence
  Oligonucleotide for detection of SNP TSC0052400
gaattaggggttt

SEQ ID NO: 215312 - DNA, 13 bp, Artificial Sequence
  Oligonucleotide for detection of SNP TSC0052400
aaacccctaattc

SEQ ID NO: 215313 - DNA, 13 bp, Artificial Sequence
  Oligonucleotide for detection of SNP TSC0052400
gaattatgggttt

SEQ ID NO: 215314 - DNA, 13 bp, Artificial Sequence
  Oligonucleotide for detection of SNP TSC0052400
aaacccataattc

SEQ ID NO: 215315 - DNA, 13 bp, Artificial Sequence
  Oligonucleotide for detection of SNP TSC0052400
gaattacgggttt

SEQ ID NO: 215316 - DNA, 13 bp, Artificial Sequence
  Oligonucleotide for detection of SNP TSC0052400
aaacccgtaattc

SEQ ID NO: 215317 - DNA, 13 bp, Artificial Sequence
  Oligonucleotide for detection of SNP TSC0005611
ttatataatttag

SEQ ID NO: 215318 - DNA, 13 bp, Artificial Sequence
  Oligonucleotide for detection of SNP TSC0005611
ctaaattatataa

SEQ ID NO: 215319 - DNA, 13 bp, Artificial Sequence
  Oligonucleotide for detection of SNP TSC0005611
ttatatgatttag

SEQ ID NO: 215320 - DNA, 13 bp, Artificial Sequence
  Oligonucleotide for detection of SNP TSC0005611
ctaaatcatataa

SEQ ID NO: 215321 - DNA, 13 bp, Artificial Sequence
  Oligonucleotide for detection of SNP TSC0005612
ataaagattagty

SEQ ID NO: 215322 - DNA, 13 bp, Artificial Sequence
  Oligonucleotide for detection of SNP TSC0005612
ractaatctttat

SEQ ID NO: 215323 - DNA, 13 bp, Artificial Sequence
  Oligonucleotide for detection of SNP TSC0005612
ataaaggttagty

SEQ ID NO: 215324 - DNA, 13 bp, Artificial Sequence
  Oligonucleotide for detection of SNP TSC0005612
ractaacctttat

SEQ ID NO: 215325 - DNA, 13 bp, Artificial Sequence
  Oligonucleotide for detection of SNP TSC0052403
tggattatataat

SEQ ID NO: 215326 - DNA, 13 bp, Artificial Sequence
  Oligonucleotide for detection of SNP TSC0052403
attatataatcca

SEQ ID NO: 215327 - DNA, 13 bp, Artificial Sequence
  Oligonucleotide for detection of SNP TSC0052403
tggattgtataat

SEQ ID NO: 215328 - DNA, 13 bp, Artificial Sequence
  Oligonucleotide for detection of SNP TSC0052403
attatacaatcca

SEQ ID NO: 215329 - DNA, 13 bp, Artificial Sequence
  Oligonucleotide for detection of SNP TSC0052404
aatgtaatttatt

SEQ ID NO: 215330 - DNA, 13 bp, Artificial Sequence
  Oligonucleotide for detection of SNP TSC0052404
aataaattacatt

SEQ ID NO: 215331 - DNA, 13 bp, Artificial Sequence
  Oligonucleotide for detection of SNP TSC0052404
aatgtagtttatt

SEQ ID NO: 215332 - DNA, 13 bp, Artificial Sequence
  Oligonucleotide for detection of SNP TSC0052404
aataaactacatt

SEQ ID NO: 215333 - DNA, 13 bp, Artificial Sequence
  Oligonucleotide for detection of SNP TSC0052405
atttttattagay

SEQ ID NO: 215334 - DNA, 13 bp, Artificial Sequence
  Oligonucleotide for detection of SNP TSC0052405
rtctaataaaaat

SEQ ID NO: 215335 - DNA, 13 bp, Artificial Sequence
  Oligonucleotide for detection of SNP TSC0052405
atttttgttagay

SEQ ID NO: 215336 - DNA, 13 bp, Artificial Sequence
  Oligonucleotide for detection of SNP TSC0052405
rtctaacaaaaat

SEQ ID NO: 215337 - DNA, 13 bp, Artificial Sequence
  Oligonucleotide for detection of SNP TSC0052406
ggttgaatttatt

SEQ ID NO: 215338 - DNA, 13 bp, Artificial Sequence
  Oligonucleotide for detection of SNP TSC0052406
aataaattcaacc

SEQ ID NO: 215339 - DNA, 13 bp, Artificial Sequence
  Oligonucleotide for detection of SNP TSC0052406
ggttgagtttatt

SEQ ID NO: 215340 - DNA, 13 bp, Artificial Sequence
  Oligonucleotide for detection of SNP TSC0052406
aataaactcaacc

SEQ ID NO: 215341 - DNA, 13 bp, Artificial Sequence
  Oligonucleotide for detection of SNP TSC0052407
gtatttagagagg

SEQ ID NO: 215342 - DNA, 13 bp, Artificial Sequence
  Oligonucleotide for detection of SNP TSC0052407
cctctctaaatac

SEQ ID NO: 215343 - DNA, 13 bp, Artificial Sequence
  Oligonucleotide for detection of SNP TSC0052407
gtatttggagagg

SEQ ID NO: 215344 - DNA, 13 bp, Artificial Sequence
  Oligonucleotide for detection of SNP TSC0052407
cctctccaaatac

SEQ ID NO: 215345 - DNA, 13 bp, Artificial Sequence
  Oligonucleotide for detection of SNP TSC0052407
gtattcggagagg

SEQ ID NO: 215346 - DNA, 13 bp, Artificial Sequence
  Oligonucleotide for detection of SNP TSC0052407
cctctccgaatac

SEQ ID NO: 215347 - DNA, 13 bp, Artificial Sequence
  Oligonucleotide for detection of SNP TSC0052407
tttttttgaatgy

SEQ ID NO: 215348 - DNA, 13 bp, Artificial Sequence
  Oligonucleotide for detection of SNP TSC0052407
rcattcaaaaaaa

SEQ ID NO: 215349 - DNA, 13 bp, Artificial Sequence
  Oligonucleotide for detection of SNP TSC0052407
ttttttcgaatgy

SEQ ID NO: 215350 - DNA, 13 bp, Artificial Sequence
  Oligonucleotide for detection of SNP TSC0052407
rcattcgaaaaaa

SEQ ID NO: 215351 - DNA, 13 bp, Artificial Sequence
  Oligonucleotide for detection of SNP TSC0010639
tgaatagatagta

SEQ ID NO: 215352 - DNA, 13 bp, Artificial Sequence
  Oligonucleotide for detection of SNP TSC0010639
tactatctattca

SEQ ID NO: 215353 - DNA, 13 bp, Artificial Sequence
  Oligonucleotide for detection of SNP TSC0010639
tgaataaatagta

SEQ ID NO: 215354 - DNA, 13 bp, Artificial Sequence
  Oligonucleotide for detection of SNP TSC0010639
tactatttattca

SEQ ID NO: 215355 - DNA, 13 bp, Artificial Sequence
  Oligonucleotide for detection of SNP TSC0052409
agtattataagta

SEQ ID NO: 215356 - DNA, 13 bp, Artificial Sequence
  Oligonucleotide for detection of SNP TSC0052409
tacttataatact

SEQ ID NO: 215357 - DNA, 13 bp, Artificial Sequence
  Oligonucleotide for detection of SNP TSC0052409
agtattgtaagta

SEQ ID NO: 215358 - DNA, 13 bp, Artificial Sequence
  Oligonucleotide for detection of SNP TSC0052409
tacttacaatact

SEQ ID NO: 215359 - DNA, 13 bp, Artificial Sequence
  Oligonucleotide for detection of SNP TSC0052409
agtatcgtaagta

SEQ ID NO: 215360 - DNA, 13 bp, Artificial Sequence
  Oligonucleotide for detection of SNP TSC0052409
tacttacgatact

SEQ ID NO: 215361 - DNA, 13 bp, Artificial Sequence
  Oligonucleotide for detection of SNP TSC0052409
tatttatggtatt

SEQ ID NO: 215362 - DNA, 13 bp, Artificial Sequence
  Oligonucleotide for detection of SNP TSC0052409
aataccataaata

SEQ ID NO: 215363 - DNA, 13 bp, Artificial Sequence
  Oligonucleotide for detection of SNP TSC0052409
tatttacggtatt

SEQ ID NO: 215364 - DNA, 13 bp, Artificial Sequence
  Oligonucleotide for detection of SNP TSC0052409
aataccgtaaata

SEQ ID NO: 215365 - DNA, 13 bp, Artificial Sequence
  Oligonucleotide for detection of SNP TSC0052410
ataaatgtaagay

SEQ ID NO: 215366 - DNA, 13 bp, Artificial Sequence
  Oligonucleotide for detection of SNP TSC0052410
rtcttacatttat

SEQ ID NO: 215367 - DNA, 13 bp, Artificial Sequence
  Oligonucleotide for detection of SNP TSC0052410
ataaatataagay

SEQ ID NO: 215368 - DNA, 13 bp, Artificial Sequence
  Oligonucleotide for detection of SNP TSC0052410
rtcttatatttat

SEQ ID NO: 215369 - DNA, 13 bp, Artificial Sequence
  Oligonucleotide for detection of SNP TSC0052410
ataaacgtaagay

SEQ ID NO: 215370 - DNA, 13 bp, Artificial Sequence
  Oligonucleotide for detection of SNP TSC0052410
rtcttacgtttat

SEQ ID NO: 215371 - DNA, 13 bp, Artificial Sequence
  Oligonucleotide for detection of SNP TSC0052411
agaaatgagaaga

SEQ ID NO: 215372 - DNA, 13 bp, Artificial Sequence
  Oligonucleotide for detection of SNP TSC0052411
tcttctcatttct

SEQ ID NO: 215373 - DNA, 13 bp, Artificial Sequence
  Oligonucleotide for detection of SNP TSC0052411
agaaattagaaga

SEQ ID NO: 215374 - DNA, 13 bp, Artificial Sequence
  Oligonucleotide for detection of SNP TSC0052411
tcttctaatttct

SEQ ID NO: 215375 - DNA, 13 bp, Artificial Sequence
  Oligonucleotide for detection of SNP TSC0005291
ggtagatgttatt

SEQ ID NO: 215376 - DNA, 13 bp, Artificial Sequence
  Oligonucleotide for detection of SNP TSC0005291
aataacatctacc

SEQ ID NO: 215377 - DNA, 13 bp, Artificial Sequence
  Oligonucleotide for detection of SNP TSC0005291
ggtagacgttatt

SEQ ID NO: 215378 - DNA, 13 bp, Artificial Sequence
  Oligonucleotide for detection of SNP TSC0005291
aataacgtctacc

SEQ ID NO: 215379 - DNA, 13 bp, Artificial Sequence
  Oligonucleotide for detection of SNP TSC0005291
aataatgtttgty

SEQ ID NO: 215380 - DNA, 13 bp, Artificial Sequence
  Oligonucleotide for detection of SNP TSC0005291
racaaacattatt

SEQ ID NO: 215381 - DNA, 13 bp, Artificial Sequence
  Oligonucleotide for detection of SNP TSC0005291
aataatatttgty

SEQ ID NO: 215382 - DNA, 13 bp, Artificial Sequence
  Oligonucleotide for detection of SNP TSC0005291
racaaatattatt

SEQ ID NO: 215383 - DNA, 13 bp, Artificial Sequence
  Oligonucleotide for detection of SNP TSC0005291
aataacgtttgty

SEQ ID NO: 215384 - DNA, 13 bp, Artificial Sequence
  Oligonucleotide for detection of SNP TSC0005291
racaaacgttatt

SEQ ID NO: 215385 - DNA, 13 bp, Artificial Sequence
  Oligonucleotide for detection of SNP TSC0005292
ttattaagtaaay

SEQ ID NO: 215386 - DNA, 13 bp, Artificial Sequence
  Oligonucleotide for detection of SNP TSC0005292
rtttacttaataa

SEQ ID NO: 215387 - DNA, 13 bp, Artificial Sequence
  Oligonucleotide for detection of SNP TSC0005292
ttattatgtaaay

SEQ ID NO: 215388 - DNA, 13 bp, Artificial Sequence
  Oligonucleotide for detection of SNP TSC0005292
rtttacataataa

SEQ ID NO: 215389 - DNA, 13 bp, Artificial Sequence
  Oligonucleotide for detection of SNP TSC0005292
gtttgtttaataa

SEQ ID NO: 215390 - DNA, 13 bp, Artificial Sequence
  Oligonucleotide for detection of SNP TSC0005292
ttattaaacaaac

SEQ ID NO: 215391 - DNA, 13 bp, Artificial Sequence
  Oligonucleotide for detection of SNP TSC0005292
gtttgtataataa

SEQ ID NO: 215392 - DNA, 13 bp, Artificial Sequence
  Oligonucleotide for detection of SNP TSC0005292
ttattatacaaac

SEQ ID NO: 215393 - DNA, 13 bp, Artificial Sequence
  Oligonucleotide for detection of SNP TSC0005293
atgaatgaagaga

SEQ ID NO: 215394 - DNA, 13 bp, Artificial Sequence
  Oligonucleotide for detection of SNP TSC0005293
tctcttcattcat

SEQ ID NO: 215395 - DNA, 13 bp, Artificial Sequence
  Oligonucleotide for detection of SNP TSC0005293
atgaataaagaga

SEQ ID NO: 215396 - DNA, 13 bp, Artificial Sequence
  Oligonucleotide for detection of SNP TSC0005293
tctctttattcat

SEQ ID NO: 215397 - DNA, 13 bp, Artificial Sequence
  Oligonucleotide for detection of SNP TSC0005293
atgaacgaagaga

SEQ ID NO: 215398 - DNA, 13 bp, Artificial Sequence
  Oligonucleotide for detection of SNP TSC0005293
tctcttcgttcat

SEQ ID NO: 215399 - DNA, 13 bp, Artificial Sequence
  Oligonucleotide for detection of SNP TSC0052413
attttgttattta

SEQ ID NO: 215400 - DNA, 13 bp, Artificial Sequence
  Oligonucleotide for detection of SNP TSC0052413
taaataacaaaat

SEQ ID NO: 215401 - DNA, 13 bp, Artificial Sequence
  Oligonucleotide for detection of SNP TSC0052413
attttggtattta

SEQ ID NO: 215402 - DNA, 13 bp, Artificial Sequence
  Oligonucleotide for detection of SNP TSC0052413
taaataccaaaat

SEQ ID NO: 215403 - DNA, 13 bp, Artificial Sequence
  Oligonucleotide for detection of SNP TSC0052413
tgaataataaaat

SEQ ID NO: 215404 - DNA, 13 bp, Artificial Sequence
  Oligonucleotide for detection of SNP TSC0052413
attttattattca

SEQ ID NO: 215405 - DNA, 13 bp, Artificial Sequence
  Oligonucleotide for detection of SNP TSC0052413
tgaatattaaaat

SEQ ID NO: 215406 - DNA, 13 bp, Artificial Sequence
  Oligonucleotide for detection of SNP TSC0052413
attttaatattca

SEQ ID NO: 215407 - DNA, 13 bp, Artificial Sequence
  Oligonucleotide for detection of SNP TSC0004841
aaagagtggaatt

SEQ ID NO: 215408 - DNA, 13 bp, Artificial Sequence
  Oligonucleotide for detection of SNP TSC0004841
aattccactcttt

SEQ ID NO: 215409 - DNA, 13 bp, Artificial Sequence
  Oligonucleotide for detection of SNP TSC0004841
aaagagcggaatt

SEQ ID NO: 215410 - DNA, 13 bp, Artificial Sequence
  Oligonucleotide for detection of SNP TSC0004841
aattccgctcttt

SEQ ID NO: 215411 - DNA, 13 bp, Artificial Sequence
  Oligonucleotide for detection of SNP TSC0010161
agttgatgtatty

SEQ ID NO: 215412 - DNA, 13 bp, Artificial Sequence
  Oligonucleotide for detection of SNP TSC0010161
raatacatcaact

SEQ ID NO: 215413 - DNA, 13 bp, Artificial Sequence
  Oligonucleotide for detection of SNP TSC0010161
agttgaggtatty

SEQ ID NO: 215414 - DNA, 13 bp, Artificial Sequence
  Oligonucleotide for detection of SNP TSC0010161
raatacctcaact

SEQ ID NO: 215415 - DNA, 13 bp, Artificial Sequence
  Oligonucleotide for detection of SNP TSC0010161
agttgacgtatty

SEQ ID NO: 215416 - DNA, 13 bp, Artificial Sequence
  Oligonucleotide for detection of SNP TSC0010161
raatacgtcaact

SEQ ID NO: 215417 - DNA, 13 bp, Artificial Sequence
  Oligonucleotide for detection of SNP TSC0010161
gagtgtgttaatt

SEQ ID NO: 215418 - DNA, 13 bp, Artificial Sequence
  Oligonucleotide for detection of SNP TSC0010161
aattaacacactc

SEQ ID NO: 215419 - DNA, 13 bp, Artificial Sequence
  Oligonucleotide for detection of SNP TSC0010161
gagtgttttaatt

SEQ ID NO: 215420 - DNA, 13 bp, Artificial Sequence
  Oligonucleotide for detection of SNP TSC0010161
aattaaaacactc

SEQ ID NO: 215421 - DNA, 13 bp, Artificial Sequence
  Oligonucleotide for detection of SNP TSC0010161
gagtgcgttaatt

SEQ ID NO: 215422 - DNA, 13 bp, Artificial Sequence
  Oligonucleotide for detection of SNP TSC0010161
aattaacgcactc

SEQ ID NO: 215423 - DNA, 13 bp, Artificial Sequence
  Oligonucleotide for detection of SNP TSC0052414
tgtgggattatag

SEQ ID NO: 215424 - DNA, 13 bp, Artificial Sequence
  Oligonucleotide for detection of SNP TSC0052414
ctataatcccaca

SEQ ID NO: 215425 - DNA, 13 bp, Artificial Sequence
  Oligonucleotide for detection of SNP TSC0052414
tgtgggtttatag

SEQ ID NO: 215426 - DNA, 13 bp, Artificial Sequence
  Oligonucleotide for detection of SNP TSC0052414
ctataaacccaca

SEQ ID NO: 215427 - DNA, 13 bp, Artificial Sequence
  Oligonucleotide for detection of SNP TSC0052414
ttgtaattttata

SEQ ID NO: 215428 - DNA, 13 bp, Artificial Sequence
  Oligonucleotide for detection of SNP TSC0052414
tataaaattacaa

SEQ ID NO: 215429 - DNA, 13 bp, Artificial Sequence
  Oligonucleotide for detection of SNP TSC0052414
ttgtaagtttata

SEQ ID NO: 215430 - DNA, 13 bp, Artificial Sequence
  Oligonucleotide for detection of SNP TSC0052414
tataaacttacaa

SEQ ID NO: 215431 - DNA, 13 bp, Artificial Sequence
  Oligonucleotide for detection of SNP TSC0052415
tgaggtattggga

SEQ ID NO: 215432 - DNA, 13 bp, Artificial Sequence
  Oligonucleotide for detection of SNP TSC0052415
tcccaatacctca

SEQ ID NO: 215433 - DNA, 13 bp, Artificial Sequence
  Oligonucleotide for detection of SNP TSC0052415
tgaggttttggga

SEQ ID NO: 215434 - DNA, 13 bp, Artificial Sequence
  Oligonucleotide for detection of SNP TSC0052415
tcccaaaacctca

SEQ ID NO: 215435 - DNA, 13 bp, Artificial Sequence
  Oligonucleotide for detection of SNP TSC0052415
ttttagtatttta

SEQ ID NO: 215436 - DNA, 13 bp, Artificial Sequence
  Oligonucleotide for detection of SNP TSC0052415
taaaatactaaaa

SEQ ID NO: 215437 - DNA, 13 bp, Artificial Sequence
  Oligonucleotide for detection of SNP TSC0052415
ttttaggatttta

SEQ ID NO: 215438 - DNA, 13 bp, Artificial Sequence
  Oligonucleotide for detection of SNP TSC0052415
taaaatcctaaaa

SEQ ID NO: 215439 - DNA, 13 bp, Artificial Sequence
  Oligonucleotide for detection of SNP TSC0052417
aatagtatttagy

SEQ ID NO: 215440 - DNA, 13 bp, Artificial Sequence
  Oligonucleotide for detection of SNP TSC0052417
rctaaatactatt

SEQ ID NO: 215441 - DNA, 13 bp, Artificial Sequence
  Oligonucleotide for detection of SNP TSC0052417
aatagtttttagy

SEQ ID NO: 215442 - DNA, 13 bp, Artificial Sequence
  Oligonucleotide for detection of SNP TSC0052417
rctaaaaactatt

SEQ ID NO: 215443 - DNA, 13 bp, Artificial Sequence
  Oligonucleotide for detection of SNP TSC0052417
gttaaatattgtt

SEQ ID NO: 215444 - DNA, 13 bp, Artificial Sequence
  Oligonucleotide for detection of SNP TSC0052417
aacaatatttaac

SEQ ID NO: 215445 - DNA, 13 bp, Artificial Sequence
  Oligonucleotide for detection of SNP TSC0052417
gttaaaaattgtt

SEQ ID NO: 215446 - DNA, 13 bp, Artificial Sequence
  Oligonucleotide for detection of SNP TSC0052417
aacaatttttaac

SEQ ID NO: 215447 - DNA, 13 bp, Artificial Sequence
  Oligonucleotide for detection of SNP TSC0052418
ttagttattttag

SEQ ID NO: 215448 - DNA, 13 bp, Artificial Sequence
  Oligonucleotide for detection of SNP TSC0052418
ctaaaataactaa

SEQ ID NO: 215449 - DNA, 13 bp, Artificial Sequence
  Oligonucleotide for detection of SNP TSC0052418
ttagttgttttag

SEQ ID NO: 215450 - DNA, 13 bp, Artificial Sequence
  Oligonucleotide for detection of SNP TSC0052418
ctaaaacaactaa

SEQ ID NO: 215451 - DNA, 13 bp, Artificial Sequence
  Oligonucleotide for detection of SNP TSC0052419
atggtgtgtgaaa

SEQ ID NO: 215452 - DNA, 13 bp, Artificial Sequence
  Oligonucleotide for detection of SNP TSC0052419
tttcacacaccat

SEQ ID NO: 215453 - DNA, 13 bp, Artificial Sequence
  Oligonucleotide for detection of SNP TSC0052419
atggtgggtgaaa

SEQ ID NO: 215454 - DNA, 13 bp, Artificial Sequence
  Oligonucleotide for detection of SNP TSC0052419
tttcacccaccat

SEQ ID NO: 215455 - DNA, 13 bp, Artificial Sequence
  Oligonucleotide for detection of SNP TSC0052419
acggtgtgtgaaa

SEQ ID NO: 215456 - DNA, 13 bp, Artificial Sequence
  Oligonucleotide for detection of SNP TSC0052419
tttcacacaccgt

SEQ ID NO: 215457 - DNA, 13 bp, Artificial Sequence
  Oligonucleotide for detection of SNP TSC0052419
acggtgggtgaaa

SEQ ID NO: 215458 - DNA, 13 bp, Artificial Sequence
  Oligonucleotide for detection of SNP TSC0052419
tttcacccaccgt

SEQ ID NO: 215459 - DNA, 13 bp, Artificial Sequence
  Oligonucleotide for detection of SNP TSC0052419
ttttatatatcgt

SEQ ID NO: 215460 - DNA, 13 bp, Artificial Sequence
  Oligonucleotide for detection of SNP TSC0052419
acgatatataaaa

SEQ ID NO: 215461 - DNA, 13 bp, Artificial Sequence
  Oligonucleotide for detection of SNP TSC0052419
ttttatttatcgt

SEQ ID NO: 215462 - DNA, 13 bp, Artificial Sequence
  Oligonucleotide for detection of SNP TSC0052419
acgataaataaaa

SEQ ID NO: 215463 - DNA, 13 bp, Artificial Sequence
  Oligonucleotide for detection of SNP TSC0052420
gtttaattaggta

SEQ ID NO: 215464 - DNA, 13 bp, Artificial Sequence
  Oligonucleotide for detection of SNP TSC0052420
tacctaattaaac

SEQ ID NO: 215465 - DNA, 13 bp, Artificial Sequence
  Oligonucleotide for detection of SNP TSC0052420
gtttaagtaggta

SEQ ID NO: 215466 - DNA, 13 bp, Artificial Sequence
  Oligonucleotide for detection of SNP TSC0052420
tacctacttaaac

SEQ ID NO: 215467 - DNA, 13 bp, Artificial Sequence
  Oligonucleotide for detection of SNP TSC0052420
tatttggttaggy

SEQ ID NO: 215468 - DNA, 13 bp, Artificial Sequence
  Oligonucleotide for detection of SNP TSC0052420
rcctaaccaaata

SEQ ID NO: 215469 - DNA, 13 bp, Artificial Sequence
  Oligonucleotide for detection of SNP TSC0052420
tatttgtttaggy

SEQ ID NO: 215470 - DNA, 13 bp, Artificial Sequence
  Oligonucleotide for detection of SNP TSC0052420
rcctaaacaaata

SEQ ID NO: 215471 - DNA, 13 bp, Artificial Sequence
  Oligonucleotide for detection of SNP TSC0052421
tgaatgtgttata

SEQ ID NO: 215472 - DNA, 13 bp, Artificial Sequence
  Oligonucleotide for detection of SNP TSC0052421
tataacacattca

SEQ ID NO: 215473 - DNA, 13 bp, Artificial Sequence
  Oligonucleotide for detection of SNP TSC0052421
tgaatgggttata

SEQ ID NO: 215474 - DNA, 13 bp, Artificial Sequence
  Oligonucleotide for detection of SNP TSC0052421
tataacccattca

SEQ ID NO: 215475 - DNA, 13 bp, Artificial Sequence
  Oligonucleotide for detection of SNP TSC0052421
tatggtatattta

SEQ ID NO: 215476 - DNA, 13 bp, Artificial Sequence
  Oligonucleotide for detection of SNP TSC0052421
taaatataccata

SEQ ID NO: 215477 - DNA, 13 bp, Artificial Sequence
  Oligonucleotide for detection of SNP TSC0052421
tatggtttattta

SEQ ID NO: 215478 - DNA, 13 bp, Artificial Sequence
  Oligonucleotide for detection of SNP TSC0052421
taaataaaccata

SEQ ID NO: 215479 - DNA, 13 bp, Artificial Sequence
  Oligonucleotide for detection of SNP TSC0052422
gttgatttaagtt

SEQ ID NO: 215480 - DNA, 13 bp, Artificial Sequence
  Oligonucleotide for detection of SNP TSC0052422
aacttaaatcaac

SEQ ID NO: 215481 - DNA, 13 bp, Artificial Sequence
  Oligonucleotide for detection of SNP TSC0052422
gttgatgtaagtt

SEQ ID NO: 215482 - DNA, 13 bp, Artificial Sequence
  Oligonucleotide for detection of SNP TSC0052422
aacttacatcaac

SEQ ID NO: 215483 - DNA, 13 bp, Artificial Sequence
  Oligonucleotide for detection of SNP TSC0052422
gttgacgtaagtt

SEQ ID NO: 215484 - DNA, 13 bp, Artificial Sequence
  Oligonucleotide for detection of SNP TSC0052422
aacttacgtcaac

SEQ ID NO: 215485 - DNA, 13 bp, Artificial Sequence
  Oligonucleotide for detection of SNP TSC0052422
aatttgagttaay

SEQ ID NO: 215486 - DNA, 13 bp, Artificial Sequence
  Oligonucleotide for detection of SNP TSC0052422
rttaactcaaatt

SEQ ID NO: 215487 - DNA, 13 bp, Artificial Sequence
  Oligonucleotide for detection of SNP TSC0052422
aatttgtgttaay

SEQ ID NO: 215488 - DNA, 13 bp, Artificial Sequence
  Oligonucleotide for detection of SNP TSC0052422
rttaacacaaatt

SEQ ID NO: 215489 - DNA, 13 bp, Artificial Sequence
  Oligonucleotide for detection of SNP TSC0052422
aatttgcgttaay

SEQ ID NO: 215490 - DNA, 13 bp, Artificial Sequence
  Oligonucleotide for detection of SNP TSC0052422
rttaacgcaaatt

SEQ ID NO: 215491 - DNA, 13 bp, Artificial Sequence
  Oligonucleotide for detection of SNP TSC0052423
aaatttgtgttaa

SEQ ID NO: 215492 - DNA, 13 bp, Artificial Sequence
  Oligonucleotide for detection of SNP TSC0052423
ttaacacaaattt

SEQ ID NO: 215493 - DNA, 13 bp, Artificial Sequence
  Oligonucleotide for detection of SNP TSC0052423
aaatttatgttaa

SEQ ID NO: 215494 - DNA, 13 bp, Artificial Sequence
  Oligonucleotide for detection of SNP TSC0052423
ttaacataaattt

SEQ ID NO: 215495 - DNA, 13 bp, Artificial Sequence
  Oligonucleotide for detection of SNP TSC0052423
aaatttgcgttaa

SEQ ID NO: 215496 - DNA, 13 bp, Artificial Sequence
  Oligonucleotide for detection of SNP TSC0052423
ttaacgcaaattt

SEQ ID NO: 215497 - DNA, 13 bp, Artificial Sequence
  Oligonucleotide for detection of SNP TSC0052423
aaatttacgttaa

SEQ ID NO: 215498 - DNA, 13 bp, Artificial Sequence
  Oligonucleotide for detection of SNP TSC0052423
ttaacgtaaattt

SEQ ID NO: 215499 - DNA, 13 bp, Artificial Sequence
  Oligonucleotide for detection of SNP TSC0052424
gtattgtgtgttg

SEQ ID NO: 215500 - DNA, 13 bp, Artificial Sequence
  Oligonucleotide for detection of SNP TSC0052424
caacacacaatac

SEQ ID NO: 215501 - DNA, 13 bp, Artificial Sequence
  Oligonucleotide for detection of SNP TSC0052424
gtattgcgtgttg

SEQ ID NO: 215502 - DNA, 13 bp, Artificial Sequence
  Oligonucleotide for detection of SNP TSC0052424
caacacgcaatac

SEQ ID NO: 215503 - DNA, 13 bp, Artificial Sequence
  Oligonucleotide for detection of SNP TSC0052424
tagtatgtaatay

SEQ ID NO: 215504 - DNA, 13 bp, Artificial Sequence
  Oligonucleotide for detection of SNP TSC0052424
rtattacatacta

SEQ ID NO: 215505 - DNA, 13 bp, Artificial Sequence
  Oligonucleotide for detection of SNP TSC0052424
tagtatataatay

SEQ ID NO: 215506 - DNA, 13 bp, Artificial Sequence
  Oligonucleotide for detection of SNP TSC0052424
rtattatatacta

SEQ ID NO: 215507 - DNA, 13 bp, Artificial Sequence
  Oligonucleotide for detection of SNP TSC0052424
tagtacgtaatay

SEQ ID NO: 215508 - DNA, 13 bp, Artificial Sequence
  Oligonucleotide for detection of SNP TSC0052424
rtattacgtacta

SEQ ID NO: 215509 - DNA, 13 bp, Artificial Sequence
  Oligonucleotide for detection of SNP TSC0052425
agttattttttgy

SEQ ID NO: 215510 - DNA, 13 bp, Artificial Sequence
  Oligonucleotide for detection of SNP TSC0052425
rcaaaaaataact

SEQ ID NO: 215511 - DNA, 13 bp, Artificial Sequence
  Oligonucleotide for detection of SNP TSC0052425
agttatgttttgy

SEQ ID NO: 215512 - DNA, 13 bp, Artificial Sequence
  Oligonucleotide for detection of SNP TSC0052425
rcaaaacataact

SEQ ID NO: 215513 - DNA, 13 bp, Artificial Sequence
  Oligonucleotide for detection of SNP TSC0052425
agttatttttcgy

SEQ ID NO: 215514 - DNA, 13 bp, Artificial Sequence
  Oligonucleotide for detection of SNP TSC0052425
rcgaaaaataact

SEQ ID NO: 215515 - DNA, 13 bp, Artificial Sequence
  Oligonucleotide for detection of SNP TSC0052425
agttatgtttcgy

SEQ ID NO: 215516 - DNA, 13 bp, Artificial Sequence
  Oligonucleotide for detection of SNP TSC0052425
rcgaaacataact

SEQ ID NO: 215517 - DNA, 13 bp, Artificial Sequence
  Oligonucleotide for detection of SNP TSC0052425
gtgagagatagtt

SEQ ID NO: 215518 - DNA, 13 bp, Artificial Sequence
  Oligonucleotide for detection of SNP TSC0052425
aactatctctcac

SEQ ID NO: 215519 - DNA, 13 bp, Artificial Sequence
  Oligonucleotide for detection of SNP TSC0052425
gtgagatatagtt

SEQ ID NO: 215520 - DNA, 13 bp, Artificial Sequence
  Oligonucleotide for detection of SNP TSC0052425
aactatatctcac

SEQ ID NO: 215521 - DNA, 13 bp, Artificial Sequence
  Oligonucleotide for detection of SNP TSC0052425
gcgagagatagtt

SEQ ID NO: 215522 - DNA, 13 bp, Artificial Sequence
  Oligonucleotide for detection of SNP TSC0052425
aactatctctcgc

SEQ ID NO: 215523 - DNA, 13 bp, Artificial Sequence
  Oligonucleotide for detection of SNP TSC0052425
gcgagatatagtt

SEQ ID NO: 215524 - DNA, 13 bp, Artificial Sequence
  Oligonucleotide for detection of SNP TSC0052425
aactatatctcgc

SEQ ID NO: 215525 - DNA, 13 bp, Artificial Sequence
  Oligonucleotide for detection of SNP TSC0052426
tttgtatggtata

SEQ ID NO: 215526 - DNA, 13 bp, Artificial Sequence
  Oligonucleotide for detection of SNP TSC0052426
tataccatacaaa

SEQ ID NO: 215527 - DNA, 13 bp, Artificial Sequence
  Oligonucleotide for detection of SNP TSC0052426
tttgtacggtata

SEQ ID NO: 215528 - DNA, 13 bp, Artificial Sequence
  Oligonucleotide for detection of SNP TSC0052426
tataccgtacaaa

SEQ ID NO: 215529 - DNA, 13 bp, Artificial Sequence
  Oligonucleotide for detection of SNP TSC0052426
tatattgtgtaaa

SEQ ID NO: 215530 - DNA, 13 bp, Artificial Sequence
  Oligonucleotide for detection of SNP TSC0052426
tttacacaatata

SEQ ID NO: 215531 - DNA, 13 bp, Artificial Sequence
  Oligonucleotide for detection of SNP TSC0052426
tatattatgtaaa

SEQ ID NO: 215532 - DNA, 13 bp, Artificial Sequence
  Oligonucleotide for detection of SNP TSC0052426
tttacataatata

SEQ ID NO: 215533 - DNA, 13 bp, Artificial Sequence
  Oligonucleotide for detection of SNP TSC0052426
tatatcgtgtaaa

SEQ ID NO: 215534 - DNA, 13 bp, Artificial Sequence
  Oligonucleotide for detection of SNP TSC0052426
tttacacgatata

SEQ ID NO: 215535 - DNA, 13 bp, Artificial Sequence
  Oligonucleotide for detection of SNP TSC0052427
ttagtgttattty

SEQ ID NO: 215536 - DNA, 13 bp, Artificial Sequence
  Oligonucleotide for detection of SNP TSC0052427
raaataacactaa

SEQ ID NO: 215537 - DNA, 13 bp, Artificial Sequence
  Oligonucleotide for detection of SNP TSC0052427
ttagtggtattty

SEQ ID NO: 215538 - DNA, 13 bp, Artificial Sequence
  Oligonucleotide for detection of SNP TSC0052427
raaataccactaa

SEQ ID NO: 215539 - DNA, 13 bp, Artificial Sequence
  Oligonucleotide for detection of SNP TSC0052427
ttagcgttattty

SEQ ID NO: 215540 - DNA, 13 bp, Artificial Sequence
  Oligonucleotide for detection of SNP TSC0052427
raaataacgctaa

SEQ ID NO: 215541 - DNA, 13 bp, Artificial Sequence
  Oligonucleotide for detection of SNP TSC0052427
ttagcggtattty

SEQ ID NO: 215542 - DNA, 13 bp, Artificial Sequence
  Oligonucleotide for detection of SNP TSC0052427
raaataccgctaa

SEQ ID NO: 215543 - DNA, 13 bp, Artificial Sequence
  Oligonucleotide for detection of SNP TSC0052427
ggaatggtgttgg

SEQ ID NO: 215544 - DNA, 13 bp, Artificial Sequence
  Oligonucleotide for detection of SNP TSC0052427
ccaacaccattcc

SEQ ID NO: 215545 - DNA, 13 bp, Artificial Sequence
  Oligonucleotide for detection of SNP TSC0052427
ggaatgttgttgg

SEQ ID NO: 215546 - DNA, 13 bp, Artificial Sequence
  Oligonucleotide for detection of SNP TSC0052427
ccaacaacattcc

SEQ ID NO: 215547 - DNA, 13 bp, Artificial Sequence
  Oligonucleotide for detection of SNP TSC0052427
ggaatggcgttgg

SEQ ID NO: 215548 - DNA, 13 bp, Artificial Sequence
  Oligonucleotide for detection of SNP TSC0052427
ccaacgccattcc

SEQ ID NO: 215549 - DNA, 13 bp, Artificial Sequence
  Oligonucleotide for detection of SNP TSC0052427
ggaatgtcgttgg

SEQ ID NO: 215550 - DNA, 13 bp, Artificial Sequence
  Oligonucleotide for detection of SNP TSC0052427
ccaacgacattcc

SEQ ID NO: 215551 - DNA, 13 bp, Artificial Sequence
  Oligonucleotide for detection of SNP TSC0052428
gaaatgtttttty

SEQ ID NO: 215552 - DNA, 13 bp, Artificial Sequence
  Oligonucleotide for detection of SNP TSC0052428
raaaaaacatttc

SEQ ID NO: 215553 - DNA, 13 bp, Artificial Sequence
  Oligonucleotide for detection of SNP TSC0052428
gaaatggttttty

SEQ ID NO: 215554 - DNA, 13 bp, Artificial Sequence
  Oligonucleotide for detection of SNP TSC0052428
raaaaaccatttc

SEQ ID NO: 215555 - DNA, 13 bp, Artificial Sequence
  Oligonucleotide for detection of SNP TSC0052428
gaaagagtattty

SEQ ID NO: 215556 - DNA, 13 bp, Artificial Sequence
  Oligonucleotide for detection of SNP TSC0052428
raaatactctttc

SEQ ID NO: 215557 - DNA, 13 bp, Artificial Sequence
  Oligonucleotide for detection of SNP TSC0052428
gaaagattattty

SEQ ID NO: 215558 - DNA, 13 bp, Artificial Sequence
  Oligonucleotide for detection of SNP TSC0052428
raaataatctttc

SEQ ID NO: 215559 - DNA, 13 bp, Artificial Sequence
  Oligonucleotide for detection of SNP TSC0052430
tttgataattttg

SEQ ID NO: 215560 - DNA, 13 bp, Artificial Sequence
  Oligonucleotide for detection of SNP TSC0052430
caaaattatcaaa

SEQ ID NO: 215561 - DNA, 13 bp, Artificial Sequence
  Oligonucleotide for detection of SNP TSC0052430
tttgattattttg

SEQ ID NO: 215562 - DNA, 13 bp, Artificial Sequence
  Oligonucleotide for detection of SNP TSC0052430
caaaataatcaaa

SEQ ID NO: 215563 - DNA, 13 bp, Artificial Sequence
  Oligonucleotide for detection of SNP TSC0052430
tagagttattaga

SEQ ID NO: 215564 - DNA, 13 bp, Artificial Sequence
  Oligonucleotide for detection of SNP TSC0052430
tctaataactcta

SEQ ID NO: 215565 - DNA, 13 bp, Artificial Sequence
  Oligonucleotide for detection of SNP TSC0052430
tagagtaattaga

SEQ ID NO: 215566 - DNA, 13 bp, Artificial Sequence
  Oligonucleotide for detection of SNP TSC0052430
tctaattactcta

SEQ ID NO: 215567 - DNA, 13 bp, Artificial Sequence
  Oligonucleotide for detection of SNP TSC0052431
atttatataaaga

SEQ ID NO: 215568 - DNA, 13 bp, Artificial Sequence
  Oligonucleotide for detection of SNP TSC0052431
tctttatataaat

SEQ ID NO: 215569 - DNA, 13 bp, Artificial Sequence
  Oligonucleotide for detection of SNP TSC0052431
atttatgtaaaga

SEQ ID NO: 215570 - DNA, 13 bp, Artificial Sequence
  Oligonucleotide for detection of SNP TSC0052431
tctttacataaat

SEQ ID NO: 215571 - DNA, 13 bp, Artificial Sequence
  Oligonucleotide for detection of SNP TSC0052432
gtgtatatgttta

SEQ ID NO: 215572 - DNA, 13 bp, Artificial Sequence
  Oligonucleotide for detection of SNP TSC0052432
taaacatatacac

SEQ ID NO: 215573 - DNA, 13 bp, Artificial Sequence
  Oligonucleotide for detection of SNP TSC0052432
gtgtatgtgttta

SEQ ID NO: 215574 - DNA, 13 bp, Artificial Sequence
  Oligonucleotide for detection of SNP TSC0052432
taaacacatacac

SEQ ID NO: 215575 - DNA, 13 bp, Artificial Sequence
  Oligonucleotide for detection of SNP TSC0052432
gtgtatacgttta

SEQ ID NO: 215576 - DNA, 13 bp, Artificial Sequence
  Oligonucleotide for detection of SNP TSC0052432
taaacgtatacac

SEQ ID NO: 215577 - DNA, 13 bp, Artificial Sequence
  Oligonucleotide for detection of SNP TSC0052432
gtgtacgtgttta

SEQ ID NO: 215578 - DNA, 13 bp, Artificial Sequence
  Oligonucleotide for detection of SNP TSC0052432
taaacacgtacac

SEQ ID NO: 215579 - DNA, 13 bp, Artificial Sequence
  Oligonucleotide for detection of SNP TSC0052432
gtgtatgcgttta

SEQ ID NO: 215580 - DNA, 13 bp, Artificial Sequence
  Oligonucleotide for detection of SNP TSC0052432
taaacgcatacac

SEQ ID NO: 215581 - DNA, 13 bp, Artificial Sequence
  Oligonucleotide for detection of SNP TSC0052432
gtgtacgcgttta

SEQ ID NO: 215582 - DNA, 13 bp, Artificial Sequence
  Oligonucleotide for detection of SNP TSC0052432
taaacgcgtacac

SEQ ID NO: 215583 - DNA, 13 bp, Artificial Sequence
  Oligonucleotide for detection of SNP TSC0052432
tgggtgtgtatay

SEQ ID NO: 215584 - DNA, 13 bp, Artificial Sequence
  Oligonucleotide for detection of SNP TSC0052432
rtatacacaccca

SEQ ID NO: 215585 - DNA, 13 bp, Artificial Sequence
  Oligonucleotide for detection of SNP TSC0052432
tgggcgtgtatay

SEQ ID NO: 215586 - DNA, 13 bp, Artificial Sequence
  Oligonucleotide for detection of SNP TSC0052432
rtatacacgccca

SEQ ID NO: 215587 - DNA, 13 bp, Artificial Sequence
  Oligonucleotide for detection of SNP TSC0052432
tgggtgcgtatay

SEQ ID NO: 215588 - DNA, 13 bp, Artificial Sequence
  Oligonucleotide for detection of SNP TSC0052432
rtatacgcaccca

SEQ ID NO: 215589 - DNA, 13 bp, Artificial Sequence
  Oligonucleotide for detection of SNP TSC0052432
tgggcgcgtatay

SEQ ID NO: 215590 - DNA, 13 bp, Artificial Sequence
  Oligonucleotide for detection of SNP TSC0052432
rtatacgcgccca

SEQ ID NO: 215591 - DNA, 13 bp, Artificial Sequence
  Oligonucleotide for detection of SNP TSC0052433
taataagtttgga

SEQ ID NO: 215592 - DNA, 13 bp, Artificial Sequence
  Oligonucleotide for detection of SNP TSC0052433
tccaaacttatta

SEQ ID NO: 215593 - DNA, 13 bp, Artificial Sequence
  Oligonucleotide for detection of SNP TSC0052433
taataaatttgga

SEQ ID NO: 215594 - DNA, 13 bp, Artificial Sequence
  Oligonucleotide for detection of SNP TSC0052433
tccaaatttatta

SEQ ID NO: 215595 - DNA, 13 bp, Artificial Sequence
  Oligonucleotide for detection of SNP TSC0052434
tgtaagatattgt

SEQ ID NO: 215596 - DNA, 13 bp, Artificial Sequence
  Oligonucleotide for detection of SNP TSC0052434
acaatatcttaca

SEQ ID NO: 215597 - DNA, 13 bp, Artificial Sequence
  Oligonucleotide for detection of SNP TSC0052434
tgtaaggtattgt

SEQ ID NO: 215598 - DNA, 13 bp, Artificial Sequence
  Oligonucleotide for detection of SNP TSC0052434
acaataccttaca

SEQ ID NO: 215599 - DNA, 13 bp, Artificial Sequence
  Oligonucleotide for detection of SNP TSC0052435
tattttaaaatga

SEQ ID NO: 215600 - DNA, 13 bp, Artificial Sequence
  Oligonucleotide for detection of SNP TSC0052435
tcattttaaaata

SEQ ID NO: 215601 - DNA, 13 bp, Artificial Sequence
  Oligonucleotide for detection of SNP TSC0052435
tattttgaaatga

SEQ ID NO: 215602 - DNA, 13 bp, Artificial Sequence
  Oligonucleotide for detection of SNP TSC0052435
tcatttcaaaata

SEQ ID NO: 215603 - DNA, 13 bp, Artificial Sequence
  Oligonucleotide for detection of SNP TSC0052435
tatttcgaaatga

SEQ ID NO: 215604 - DNA, 13 bp, Artificial Sequence
  Oligonucleotide for detection of SNP TSC0052435
tcatttcgaaata

SEQ ID NO: 215605 - DNA, 13 bp, Artificial Sequence
  Oligonucleotide for detection of SNP TSC0052436
tatatttgttaty

SEQ ID NO: 215606 - DNA, 13 bp, Artificial Sequence
  Oligonucleotide for detection of SNP TSC0052436
rataacaaatata

SEQ ID NO: 215607 - DNA, 13 bp, Artificial Sequence
  Oligonucleotide for detection of SNP TSC0052436
tatattcgttaty

SEQ ID NO: 215608 - DNA, 13 bp, Artificial Sequence
  Oligonucleotide for detection of SNP TSC0052436
rataacgaatata

SEQ ID NO: 215609 - DNA, 13 bp, Artificial Sequence
  Oligonucleotide for detection of SNP TSC0052436
ggtgatggatatg

SEQ ID NO: 215610 - DNA, 13 bp, Artificial Sequence
  Oligonucleotide for detection of SNP TSC0052436
catatccatcacc

SEQ ID NO: 215611 - DNA, 13 bp, Artificial Sequence
  Oligonucleotide for detection of SNP TSC0052436
ggtgatagatatg

SEQ ID NO: 215612 - DNA, 13 bp, Artificial Sequence
  Oligonucleotide for detection of SNP TSC0052436
catatctatcacc

SEQ ID NO: 215613 - DNA, 13 bp, Artificial Sequence
  Oligonucleotide for detection of SNP TSC0052436
ggtgacggatatg

SEQ ID NO: 215614 - DNA, 13 bp, Artificial Sequence
  Oligonucleotide for detection of SNP TSC0052436
catatccgtcacc

SEQ ID NO: 215615 - DNA, 13 bp, Artificial Sequence
  Oligonucleotide for detection of SNP TSC0052439
agaagggatagga

SEQ ID NO: 215616 - DNA, 13 bp, Artificial Sequence
  Oligonucleotide for detection of SNP TSC0052439
tcctatcccttct

SEQ ID NO: 215617 - DNA, 13 bp, Artificial Sequence
  Oligonucleotide for detection of SNP TSC0052439
agaaggaatagga

SEQ ID NO: 215618 - DNA, 13 bp, Artificial Sequence
  Oligonucleotide for detection of SNP TSC0052439
tcctattccttct

SEQ ID NO: 215619 - DNA, 13 bp, Artificial Sequence
  Oligonucleotide for detection of SNP TSC0052441
gtagtaaagtttt

SEQ ID NO: 215620 - DNA, 13 bp, Artificial Sequence
  Oligonucleotide for detection of SNP TSC0052441
aaaactttactac

SEQ ID NO: 215621 - DNA, 13 bp, Artificial Sequence
  Oligonucleotide for detection of SNP TSC0052441
gtagtagagtttt

SEQ ID NO: 215622 - DNA, 13 bp, Artificial Sequence
  Oligonucleotide for detection of SNP TSC0052441
aaaactctactac

SEQ ID NO: 215623 - DNA, 13 bp, Artificial Sequence
  Oligonucleotide for detection of SNP TSC0052442
atttgaatggaaa

SEQ ID NO: 215624 - DNA, 13 bp, Artificial Sequence
  Oligonucleotide for detection of SNP TSC0052442
tttccattcaaat

SEQ ID NO: 215625 - DNA, 13 bp, Artificial Sequence
  Oligonucleotide for detection of SNP TSC0052442
atttgattggaaa

SEQ ID NO: 215626 - DNA, 13 bp, Artificial Sequence
  Oligonucleotide for detection of SNP TSC0052442
tttccaatcaaat

SEQ ID NO: 215627 - DNA, 13 bp, Artificial Sequence
  Oligonucleotide for detection of SNP TSC0052443
gaaaaggtattgg

SEQ ID NO: 215628 - DNA, 13 bp, Artificial Sequence
  Oligonucleotide for detection of SNP TSC0052443
ccaataccttttc

SEQ ID NO: 215629 - DNA, 13 bp, Artificial Sequence
  Oligonucleotide for detection of SNP TSC0052443
gaaaagatattgg

SEQ ID NO: 215630 - DNA, 13 bp, Artificial Sequence
  Oligonucleotide for detection of SNP TSC0052443
ccaatatcttttc

SEQ ID NO: 215631 - DNA, 13 bp, Artificial Sequence
  Oligonucleotide for detection of SNP TSC0052444
gatttaatatggg

SEQ ID NO: 215632 - DNA, 13 bp, Artificial Sequence
  Oligonucleotide for detection of SNP TSC0052444
cccatattaaatc

SEQ ID NO: 215633 - DNA, 13 bp, Artificial Sequence
  Oligonucleotide for detection of SNP TSC0052444
gatttattatggg

SEQ ID NO: 215634 - DNA, 13 bp, Artificial Sequence
  Oligonucleotide for detection of SNP TSC0052444
cccataataaatc

SEQ ID NO: 215635 - DNA, 13 bp, Artificial Sequence
  Oligonucleotide for detection of SNP TSC0052444
tttatattaagty

SEQ ID NO: 215636 - DNA, 13 bp, Artificial Sequence
  Oligonucleotide for detection of SNP TSC0052444
racttaatataaa

SEQ ID NO: 215637 - DNA, 13 bp, Artificial Sequence
  Oligonucleotide for detection of SNP TSC0052444
tttataataagty

SEQ ID NO: 215638 - DNA, 13 bp, Artificial Sequence
  Oligonucleotide for detection of SNP TSC0052444
racttattataaa

SEQ ID NO: 215639 - DNA, 13 bp, Artificial Sequence
  Oligonucleotide for detection of SNP TSC0052445
tattaagtgttgt

SEQ ID NO: 215640 - DNA, 13 bp, Artificial Sequence
  Oligonucleotide for detection of SNP TSC0052445
acaacacttaata

SEQ ID NO: 215641 - DNA, 13 bp, Artificial Sequence
  Oligonucleotide for detection of SNP TSC0052445
tattaaatgttgt

SEQ ID NO: 215642 - DNA, 13 bp, Artificial Sequence
  Oligonucleotide for detection of SNP TSC0052445
acaacatttaata

SEQ ID NO: 215643 - DNA, 13 bp, Artificial Sequence
  Oligonucleotide for detection of SNP TSC0052448
ttattgatataay

SEQ ID NO: 215644 - DNA, 13 bp, Artificial Sequence
  Oligonucleotide for detection of SNP TSC0052448
rttatatcaataa

SEQ ID NO: 215645 - DNA, 13 bp, Artificial Sequence
  Oligonucleotide for detection of SNP TSC0052448
ttattgttataay

SEQ ID NO: 215646 - DNA, 13 bp, Artificial Sequence
  Oligonucleotide for detection of SNP TSC0052448
rttataacaataa

SEQ ID NO: 215647 - DNA, 13 bp, Artificial Sequence
  Oligonucleotide for detection of SNP TSC0052448
gttatgttagtaa

SEQ ID NO: 215648 - DNA, 13 bp, Artificial Sequence
  Oligonucleotide for detection of SNP TSC0052448
ttactaacataac

SEQ ID NO: 215649 - DNA, 13 bp, Artificial Sequence
  Oligonucleotide for detection of SNP TSC0052448
gttatggtagtaa

SEQ ID NO: 215650 - DNA, 13 bp, Artificial Sequence
  Oligonucleotide for detection of SNP TSC0052448
ttactaccataac

SEQ ID NO: 215651 - DNA, 13 bp, Artificial Sequence
  Oligonucleotide for detection of SNP TSC0052449
aggttgtgaggta

SEQ ID NO: 215652 - DNA, 13 bp, Artificial Sequence
  Oligonucleotide for detection of SNP TSC0052449
tacctcacaacct

SEQ ID NO: 215653 - DNA, 13 bp, Artificial Sequence
  Oligonucleotide for detection of SNP TSC0052449
aggttgcgaggta

SEQ ID NO: 215654 - DNA, 13 bp, Artificial Sequence
  Oligonucleotide for detection of SNP TSC0052449
tacctcgcaacct

SEQ ID NO: 215655 - DNA, 13 bp, Artificial Sequence
  Oligonucleotide for detection of SNP TSC0052450
tgtgtgtgtatgy

SEQ ID NO: 215656 - DNA, 13 bp, Artificial Sequence
  Oligonucleotide for detection of SNP TSC0052450
rcatacacacaca

SEQ ID NO: 215657 - DNA, 13 bp, Artificial Sequence
  Oligonucleotide for detection of SNP TSC0052450
tgtgtgcgtatgy

SEQ ID NO: 215658 - DNA, 13 bp, Artificial Sequence
  Oligonucleotide for detection of SNP TSC0052450
rcatacgcacaca

SEQ ID NO: 215659 - DNA, 13 bp, Artificial Sequence
  Oligonucleotide for detection of SNP TSC0052450
gtatgtgtatata

SEQ ID NO: 215660 - DNA, 13 bp, Artificial Sequence
  Oligonucleotide for detection of SNP TSC0052450
tatatacacatac

SEQ ID NO: 215661 - DNA, 13 bp, Artificial Sequence
  Oligonucleotide for detection of SNP TSC0052450
gtatgcgtatata

SEQ ID NO: 215662 - DNA, 13 bp, Artificial Sequence
  Oligonucleotide for detection of SNP TSC0052450
tatatacgcatac

SEQ ID NO: 215663 - DNA, 13 bp, Artificial Sequence
  Oligonucleotide for detection of SNP TSC0052451
ttgataattaagy

SEQ ID NO: 215664 - DNA, 13 bp, Artificial Sequence
  Oligonucleotide for detection of SNP TSC0052451
rcttaattatcaa

SEQ ID NO: 215665 - DNA, 13 bp, Artificial Sequence
  Oligonucleotide for detection of SNP TSC0052451
ttgatagttaagy

SEQ ID NO: 215666 - DNA, 13 bp, Artificial Sequence
  Oligonucleotide for detection of SNP TSC0052451
rcttaactatcaa

SEQ ID NO: 215667 - DNA, 13 bp, Artificial Sequence
  Oligonucleotide for detection of SNP TSC0052453
ttgttttggggta

SEQ ID NO: 215668 - DNA, 13 bp, Artificial Sequence
  Oligonucleotide for detection of SNP TSC0052453
taccccaaaacaa

SEQ ID NO: 215669 - DNA, 13 bp, Artificial Sequence
  Oligonucleotide for detection of SNP TSC0052453
ttgtttcggggta

SEQ ID NO: 215670 - DNA, 13 bp, Artificial Sequence
  Oligonucleotide for detection of SNP TSC0052453
taccccgaaacaa

SEQ ID NO: 215671 - DNA, 13 bp, Artificial Sequence
  Oligonucleotide for detection of SNP TSC0052453
tgttttgaaatag

SEQ ID NO: 215672 - DNA, 13 bp, Artificial Sequence
  Oligonucleotide for detection of SNP TSC0052453
ctatttcaaaaca

SEQ ID NO: 215673 - DNA, 13 bp, Artificial Sequence
  Oligonucleotide for detection of SNP TSC0052453
tgttttaaaatag

SEQ ID NO: 215674 - DNA, 13 bp, Artificial Sequence
  Oligonucleotide for detection of SNP TSC0052453
ctattttaaaaca

SEQ ID NO: 215675 - DNA, 13 bp, Artificial Sequence
  Oligonucleotide for detection of SNP TSC0052453
tgtttcgaaatag

SEQ ID NO: 215676 - DNA, 13 bp, Artificial Sequence
  Oligonucleotide for detection of SNP TSC0052453
ctatttcgaaaca

SEQ ID NO: 215677 - DNA, 13 bp, Artificial Sequence
  Oligonucleotide for detection of SNP TSC0052456
ggaagggtagtty

SEQ ID NO: 215678 - DNA, 13 bp, Artificial Sequence
  Oligonucleotide for detection of SNP TSC0052456
raactacccttcc

SEQ ID NO: 215679 - DNA, 13 bp, Artificial Sequence
  Oligonucleotide for detection of SNP TSC0052456
ggaaggatagtty

SEQ ID NO: 215680 - DNA, 13 bp, Artificial Sequence
  Oligonucleotide for detection of SNP TSC0052456
raactatccttcc

SEQ ID NO: 215681 - DNA, 13 bp, Artificial Sequence
  Oligonucleotide for detection of SNP TSC0052460
tagttagtttttt

SEQ ID NO: 215682 - DNA, 13 bp, Artificial Sequence
  Oligonucleotide for detection of SNP TSC0052460
aaaaaactaacta

SEQ ID NO: 215683 - DNA, 13 bp, Artificial Sequence
  Oligonucleotide for detection of SNP TSC0052462
ggtttagggaatg

SEQ ID NO: 215684 - DNA, 13 bp, Artificial Sequence
  Oligonucleotide for detection of SNP TSC0052462
cattccctaaacc

SEQ ID NO: 215685 - DNA, 13 bp, Artificial Sequence
  Oligonucleotide for detection of SNP TSC0052462
ggtttaaggaatg

SEQ ID NO: 215686 - DNA, 13 bp, Artificial Sequence
  Oligonucleotide for detection of SNP TSC0052462
cattccttaaacc

SEQ ID NO: 215687 - DNA, 13 bp, Artificial Sequence
  Oligonucleotide for detection of SNP TSC0052463
gggaaagaggaga

SEQ ID NO: 215688 - DNA, 13 bp, Artificial Sequence
  Oligonucleotide for detection of SNP TSC0052463
tctcctctttccc

SEQ ID NO: 215689 - DNA, 13 bp, Artificial Sequence
  Oligonucleotide for detection of SNP TSC0052463
gggaaaaaggaga

SEQ ID NO: 215690 - DNA, 13 bp, Artificial Sequence
  Oligonucleotide for detection of SNP TSC0052463
tctcctttttccc

SEQ ID NO: 215691 - DNA, 13 bp, Artificial Sequence
  Oligonucleotide for detection of SNP TSC0052464
gttatggtgttga

SEQ ID NO: 215692 - DNA, 13 bp, Artificial Sequence
  Oligonucleotide for detection of SNP TSC0052464
tcaacaccataac

SEQ ID NO: 215693 - DNA, 13 bp, Artificial Sequence
  Oligonucleotide for detection of SNP TSC0052464
gttatgatgttga

SEQ ID NO: 215694 - DNA, 13 bp, Artificial Sequence
  Oligonucleotide for detection of SNP TSC0052464
tcaacatcataac

SEQ ID NO: 215695 - DNA, 13 bp, Artificial Sequence
  Oligonucleotide for detection of SNP TSC0052466
gagttgtgttaty

SEQ ID NO: 215696 - DNA, 13 bp, Artificial Sequence
  Oligonucleotide for detection of SNP TSC0052466
rataacacaactc

SEQ ID NO: 215697 - DNA, 13 bp, Artificial Sequence
  Oligonucleotide for detection of SNP TSC0052466
gagtcgtgttaty

SEQ ID NO: 215698 - DNA, 13 bp, Artificial Sequence
  Oligonucleotide for detection of SNP TSC0052466
rataacacgactc

SEQ ID NO: 215699 - DNA, 13 bp, Artificial Sequence
  Oligonucleotide for detection of SNP TSC0052466
gagttgcgttaty

SEQ ID NO: 215700 - DNA, 13 bp, Artificial Sequence
  Oligonucleotide for detection of SNP TSC0052466
rataacgcaactc

SEQ ID NO: 215701 - DNA, 13 bp, Artificial Sequence
  Oligonucleotide for detection of SNP TSC0052466
gagtcgcgttaty

SEQ ID NO: 215702 - DNA, 13 bp, Artificial Sequence
  Oligonucleotide for detection of SNP TSC0052466
rataacgcgactc

SEQ ID NO: 215703 - DNA, 13 bp, Artificial Sequence
  Oligonucleotide for detection of SNP TSC0052466
gatggtacggtty

SEQ ID NO: 215704 - DNA, 13 bp, Artificial Sequence
  Oligonucleotide for detection of SNP TSC0052466
raaccgtaccatc

SEQ ID NO: 215705 - DNA, 13 bp, Artificial Sequence
  Oligonucleotide for detection of SNP TSC0052466
gatggtgcggtty

SEQ ID NO: 215706 - DNA, 13 bp, Artificial Sequence
  Oligonucleotide for detection of SNP TSC0052466
raaccgcaccatc

SEQ ID NO: 215707 - DNA, 13 bp, Artificial Sequence
  Oligonucleotide for detection of SNP TSC0052466
gatggcgcggtty

SEQ ID NO: 215708 - DNA, 13 bp, Artificial Sequence
  Oligonucleotide for detection of SNP TSC0052466
raaccgcgccatc

SEQ ID NO: 215709 - DNA, 13 bp, Artificial Sequence
  Oligonucleotide for detection of SNP TSC0052467
tttattatttata

SEQ ID NO: 215710 - DNA, 13 bp, Artificial Sequence
  Oligonucleotide for detection of SNP TSC0052467
tataaataataaa

SEQ ID NO: 215711 - DNA, 13 bp, Artificial Sequence
  Oligonucleotide for detection of SNP TSC0052469
tattattgtatty

SEQ ID NO: 215712 - DNA, 13 bp, Artificial Sequence
  Oligonucleotide for detection of SNP TSC0052469
raatacaataata

SEQ ID NO: 215713 - DNA, 13 bp, Artificial Sequence
  Oligonucleotide for detection of SNP TSC0052469
tattatcgtatty

SEQ ID NO: 215714 - DNA, 13 bp, Artificial Sequence
  Oligonucleotide for detection of SNP TSC0052469
raatacgataata

SEQ ID NO: 215715 - DNA, 13 bp, Artificial Sequence
  Oligonucleotide for detection of SNP TSC0052469
gagtgtgatggtg

SEQ ID NO: 215716 - DNA, 13 bp, Artificial Sequence
  Oligonucleotide for detection of SNP TSC0052469
caccatcacactc

SEQ ID NO: 215717 - DNA, 13 bp, Artificial Sequence
  Oligonucleotide for detection of SNP TSC0052469
gagtgtaatggtg

SEQ ID NO: 215718 - DNA, 13 bp, Artificial Sequence
  Oligonucleotide for detection of SNP TSC0052469
caccattacactc

SEQ ID NO: 215719 - DNA, 13 bp, Artificial Sequence
  Oligonucleotide for detection of SNP TSC0052469
gagtgcgatggtg

SEQ ID NO: 215720 - DNA, 13 bp, Artificial Sequence
  Oligonucleotide for detection of SNP TSC0052469
caccatcgcactc

SEQ ID NO: 215721 - DNA, 13 bp, Artificial Sequence
  Oligonucleotide for detection of SNP TSC0052470
ttggggtgattaa

SEQ ID NO: 215722 - DNA, 13 bp, Artificial Sequence
  Oligonucleotide for detection of SNP TSC0052470
ttaatcaccccaa

SEQ ID NO: 215723 - DNA, 13 bp, Artificial Sequence
  Oligonucleotide for detection of SNP TSC0052470
ttggggcgattaa

SEQ ID NO: 215724 - DNA, 13 bp, Artificial Sequence
  Oligonucleotide for detection of SNP TSC0052470
ttaatcgccccaa

SEQ ID NO: 215725 - DNA, 13 bp, Artificial Sequence
  Oligonucleotide for detection of SNP TSC0052470
ttaattgttttaa

SEQ ID NO: 215726 - DNA, 13 bp, Artificial Sequence
  Oligonucleotide for detection of SNP TSC0052470
ttaaaacaattaa

SEQ ID NO: 215727 - DNA, 13 bp, Artificial Sequence
  Oligonucleotide for detection of SNP TSC0052470
ttaatcgttttaa

SEQ ID NO: 215728 - DNA, 13 bp, Artificial Sequence
  Oligonucleotide for detection of SNP TSC0052470
ttaaaacgattaa

SEQ ID NO: 215729 - DNA, 13 bp, Artificial Sequence
  Oligonucleotide for detection of SNP TSC0052471
tttatggtattta

SEQ ID NO: 215730 - DNA, 13 bp, Artificial Sequence
  Oligonucleotide for detection of SNP TSC0052471
taaataccataaa

SEQ ID NO: 215731 - DNA, 13 bp, Artificial Sequence
  Oligonucleotide for detection of SNP TSC0052471
tttatgatattta

SEQ ID NO: 215732 - DNA, 13 bp, Artificial Sequence
  Oligonucleotide for detection of SNP TSC0052471
taaatatcataaa

SEQ ID NO: 215733 - DNA, 13 bp, Artificial Sequence
  Oligonucleotide for detection of SNP TSC0052472
agattgatgagta

SEQ ID NO: 215734 - DNA, 13 bp, Artificial Sequence
  Oligonucleotide for detection of SNP TSC0052472
tactcatcaatct

SEQ ID NO: 215735 - DNA, 13 bp, Artificial Sequence
  Oligonucleotide for detection of SNP TSC0052472
agattggtgagta

SEQ ID NO: 215736 - DNA, 13 bp, Artificial Sequence
  Oligonucleotide for detection of SNP TSC0052472
tactcaccaatct

SEQ ID NO: 215737 - DNA, 13 bp, Artificial Sequence
  Oligonucleotide for detection of SNP TSC0052473
aatatttagggta

SEQ ID NO: 215738 - DNA, 13 bp, Artificial Sequence
  Oligonucleotide for detection of SNP TSC0052473
taccctaaatatt

SEQ ID NO: 215739 - DNA, 13 bp, Artificial Sequence
  Oligonucleotide for detection of SNP TSC0052473
aatattgagggta

SEQ ID NO: 215740 - DNA, 13 bp, Artificial Sequence
  Oligonucleotide for detection of SNP TSC0052473
taccctcaatatt

SEQ ID NO: 215741 - DNA, 13 bp, Artificial Sequence
  Oligonucleotide for detection of SNP TSC0052473
tgttttaagtatt

SEQ ID NO: 215742 - DNA, 13 bp, Artificial Sequence
  Oligonucleotide for detection of SNP TSC0052473
aatacttaaaaca

SEQ ID NO: 215743 - DNA, 13 bp, Artificial Sequence
  Oligonucleotide for detection of SNP TSC0052473
tgtttttagtatt

SEQ ID NO: 215744 - DNA, 13 bp, Artificial Sequence
  Oligonucleotide for detection of SNP TSC0052473
aatactaaaaaca

SEQ ID NO: 215745 - DNA, 13 bp, Artificial Sequence
  Oligonucleotide for detection of SNP TSC0052474
aaatagggaaata

SEQ ID NO: 215746 - DNA, 13 bp, Artificial Sequence
  Oligonucleotide for detection of SNP TSC0052474
tatttccctattt

SEQ ID NO: 215747 - DNA, 13 bp, Artificial Sequence
  Oligonucleotide for detection of SNP TSC0052475
ataagtgtattaa

SEQ ID NO: 215748 - DNA, 13 bp, Artificial Sequence
  Oligonucleotide for detection of SNP TSC0052475
ttaatacacttat

SEQ ID NO: 215749 - DNA, 13 bp, Artificial Sequence
  Oligonucleotide for detection of SNP TSC0052475
ataagtatattaa

SEQ ID NO: 215750 - DNA, 13 bp, Artificial Sequence
  Oligonucleotide for detection of SNP TSC0052475
ttaatatacttat

SEQ ID NO: 215751 - DNA, 13 bp, Artificial Sequence
  Oligonucleotide for detection of SNP TSC0052476
ttgaaatgaaaat

SEQ ID NO: 215752 - DNA, 13 bp, Artificial Sequence
  Oligonucleotide for detection of SNP TSC0052476
attttcatttcaa

SEQ ID NO: 215753 - DNA, 13 bp, Artificial Sequence
  Oligonucleotide for detection of SNP TSC0052476
ttgaaacgaaaat

SEQ ID NO: 215754 - DNA, 13 bp, Artificial Sequence
  Oligonucleotide for detection of SNP TSC0052476
attttcgtttcaa

SEQ ID NO: 215755 - DNA, 13 bp, Artificial Sequence
  Oligonucleotide for detection of SNP TSC0052476
attttcgttttaa

SEQ ID NO: 215756 - DNA, 13 bp, Artificial Sequence
  Oligonucleotide for detection of SNP TSC0052476
ttaaaacgaaaat

SEQ ID NO: 215757 - DNA, 13 bp, Artificial Sequence
  Oligonucleotide for detection of SNP TSC0052477
ggatttagatgga

SEQ ID NO: 215758 - DNA, 13 bp, Artificial Sequence
  Oligonucleotide for detection of SNP TSC0052477
tccatctaaatcc

SEQ ID NO: 215759 - DNA, 13 bp, Artificial Sequence
  Oligonucleotide for detection of SNP TSC0052477
ggattttgatgga

SEQ ID NO: 215760 - DNA, 13 bp, Artificial Sequence
  Oligonucleotide for detection of SNP TSC0052477
tccatcaaaatcc

SEQ ID NO: 215761 - DNA, 13 bp, Artificial Sequence
  Oligonucleotide for detection of SNP TSC0052477
ggatttcgatgga

SEQ ID NO: 215762 - DNA, 13 bp, Artificial Sequence
  Oligonucleotide for detection of SNP TSC0052477
tccatcgaaatcc

SEQ ID NO: 215763 - DNA, 13 bp, Artificial Sequence
  Oligonucleotide for detection of SNP TSC0052477
tttatttaaatty

SEQ ID NO: 215764 - DNA, 13 bp, Artificial Sequence
  Oligonucleotide for detection of SNP TSC0052477
raatttaaataaa

SEQ ID NO: 215765 - DNA, 13 bp, Artificial Sequence
  Oligonucleotide for detection of SNP TSC0052477
tttattgaaatty

SEQ ID NO: 215766 - DNA, 13 bp, Artificial Sequence
  Oligonucleotide for detection of SNP TSC0052477
raatttcaataaa

SEQ ID NO: 215767 - DNA, 13 bp, Artificial Sequence
  Oligonucleotide for detection of SNP TSC0052477
tttatcgaaatty

SEQ ID NO: 215768 - DNA, 13 bp, Artificial Sequence
  Oligonucleotide for detection of SNP TSC0052477
raatttcgataaa

SEQ ID NO: 215769 - DNA, 13 bp, Artificial Sequence
  Oligonucleotide for detection of SNP TSC0052479
ttaggtatgagtt

SEQ ID NO: 215770 - DNA, 13 bp, Artificial Sequence
  Oligonucleotide for detection of SNP TSC0052479
aactcatacctaa

SEQ ID NO: 215771 - DNA, 13 bp, Artificial Sequence
  Oligonucleotide for detection of SNP TSC0052479
ttaggtttgagtt

SEQ ID NO: 215772 - DNA, 13 bp, Artificial Sequence
  Oligonucleotide for detection of SNP TSC0052479
aactcaaacctaa

SEQ ID NO: 215773 - DNA, 13 bp, Artificial Sequence
  Oligonucleotide for detection of SNP TSC0052479
aatttatgtttaa

SEQ ID NO: 215774 - DNA, 13 bp, Artificial Sequence
  Oligonucleotide for detection of SNP TSC0052479
ttaaacataaatt

SEQ ID NO: 215775 - DNA, 13 bp, Artificial Sequence
  Oligonucleotide for detection of SNP TSC0052479
aatttaggtttaa

SEQ ID NO: 215776 - DNA, 13 bp, Artificial Sequence
  Oligonucleotide for detection of SNP TSC0052479
ttaaacctaaatt

SEQ ID NO: 215777 - DNA, 13 bp, Artificial Sequence
  Oligonucleotide for detection of SNP TSC0052480
aaaaggtggtggg

SEQ ID NO: 215778 - DNA, 13 bp, Artificial Sequence
  Oligonucleotide for detection of SNP TSC0052480
cccaccacctttt

SEQ ID NO: 215779 - DNA, 13 bp, Artificial Sequence
  Oligonucleotide for detection of SNP TSC0052480
aaaaggtggcggg

SEQ ID NO: 215780 - DNA, 13 bp, Artificial Sequence
  Oligonucleotide for detection of SNP TSC0052480
cccgccacctttt

SEQ ID NO: 215781 - DNA, 13 bp, Artificial Sequence
  Oligonucleotide for detection of SNP TSC0052480
aaaaggcggtggg

SEQ ID NO: 215782 - DNA, 13 bp, Artificial Sequence
  Oligonucleotide for detection of SNP TSC0052480
cccaccgcctttt

SEQ ID NO: 215783 - DNA, 13 bp, Artificial Sequence
  Oligonucleotide for detection of SNP TSC0052480
aaaaggcggcggg

SEQ ID NO: 215784 - DNA, 13 bp, Artificial Sequence
  Oligonucleotide for detection of SNP TSC0052480
cccgccgcctttt

SEQ ID NO: 215785 - DNA, 13 bp, Artificial Sequence
  Oligonucleotide for detection of SNP TSC0052481
agttgtagttgtt

SEQ ID NO: 215786 - DNA, 13 bp, Artificial Sequence
  Oligonucleotide for detection of SNP TSC0052481
aacaactacaact

SEQ ID NO: 215787 - DNA, 13 bp, Artificial Sequence
  Oligonucleotide for detection of SNP TSC0052481
agttgttgttgtt

SEQ ID NO: 215788 - DNA, 13 bp, Artificial Sequence
  Oligonucleotide for detection of SNP TSC0052481
aacaacaacaact

SEQ ID NO: 215789 - DNA, 13 bp, Artificial Sequence
  Oligonucleotide for detection of SNP TSC0052481
agtcgtagttgtt

SEQ ID NO: 215790 - DNA, 13 bp, Artificial Sequence
  Oligonucleotide for detection of SNP TSC0052481
aacaactacgact

SEQ ID NO: 215791 - DNA, 13 bp, Artificial Sequence
  Oligonucleotide for detection of SNP TSC0052481
agtcgttgttgtt

SEQ ID NO: 215792 - DNA, 13 bp, Artificial Sequence
  Oligonucleotide for detection of SNP TSC0052481
aacaacaacgact

SEQ ID NO: 215793 - DNA, 13 bp, Artificial Sequence
  Oligonucleotide for detection of SNP TSC0052481
agttgtcgttgtt

SEQ ID NO: 215794 - DNA, 13 bp, Artificial Sequence
  Oligonucleotide for detection of SNP TSC0052481
aacaacgacaact

SEQ ID NO: 215795 - DNA, 13 bp, Artificial Sequence
  Oligonucleotide for detection of SNP TSC0052481
agtcgtcgttgtt

SEQ ID NO: 215796 - DNA, 13 bp, Artificial Sequence
  Oligonucleotide for detection of SNP TSC0052481
aacaacgacgact

SEQ ID NO: 215797 - DNA, 13 bp, Artificial Sequence
  Oligonucleotide for detection of SNP TSC0052481
agtaattgtggtt

SEQ ID NO: 215798 - DNA, 13 bp, Artificial Sequence
  Oligonucleotide for detection of SNP TSC0052481
aaccacaattact

SEQ ID NO: 215799 - DNA, 13 bp, Artificial Sequence
  Oligonucleotide for detection of SNP TSC0052481
agtaatggtggtt

SEQ ID NO: 215800 - DNA, 13 bp, Artificial Sequence
  Oligonucleotide for detection of SNP TSC0052481
aaccaccattact

SEQ ID NO: 215801 - DNA, 13 bp, Artificial Sequence
  Oligonucleotide for detection of SNP TSC0052481
agtaattgcggtt

SEQ ID NO: 215802 - DNA, 13 bp, Artificial Sequence
  Oligonucleotide for detection of SNP TSC0052481
aaccgcaattact

SEQ ID NO: 215803 - DNA, 13 bp, Artificial Sequence
  Oligonucleotide for detection of SNP TSC0052481
agtaacggtggtt

SEQ ID NO: 215804 - DNA, 13 bp, Artificial Sequence
  Oligonucleotide for detection of SNP TSC0052481
aaccaccgttact

SEQ ID NO: 215805 - DNA, 13 bp, Artificial Sequence
  Oligonucleotide for detection of SNP TSC0052481
agtaatggcggtt

SEQ ID NO: 215806 - DNA, 13 bp, Artificial Sequence
  Oligonucleotide for detection of SNP TSC0052481
aaccgccattact

SEQ ID NO: 215807 - DNA, 13 bp, Artificial Sequence
  Oligonucleotide for detection of SNP TSC0052481
agtaacggcggtt

SEQ ID NO: 215808 - DNA, 13 bp, Artificial Sequence
  Oligonucleotide for detection of SNP TSC0052481
aaccgccgttact

SEQ ID NO: 215809 - DNA, 13 bp, Artificial Sequence
  Oligonucleotide for detection of SNP TSC0052482
gggtttagttgay

SEQ ID NO: 215810 - DNA, 13 bp, Artificial Sequence
  Oligonucleotide for detection of SNP TSC0052482
rtcaactaaaccc

SEQ ID NO: 215811 - DNA, 13 bp, Artificial Sequence
  Oligonucleotide for detection of SNP TSC0052482
gggtttggttgay

SEQ ID NO: 215812 - DNA, 13 bp, Artificial Sequence
  Oligonucleotide for detection of SNP TSC0052482
rtcaaccaaaccc

SEQ ID NO: 215813 - DNA, 13 bp, Artificial Sequence
  Oligonucleotide for detection of SNP TSC0052482
gggttcggttgay

SEQ ID NO: 215814 - DNA, 13 bp, Artificial Sequence
  Oligonucleotide for detection of SNP TSC0052482
rtcaaccgaaccc

SEQ ID NO: 215815 - DNA, 13 bp, Artificial Sequence
  Oligonucleotide for detection of SNP TSC0052482
gttagttgagtty

SEQ ID NO: 215816 - DNA, 13 bp, Artificial Sequence
  Oligonucleotide for detection of SNP TSC0052482
raactcaactaac

SEQ ID NO: 215817 - DNA, 13 bp, Artificial Sequence
  Oligonucleotide for detection of SNP TSC0052482
gttagtcgagtty

SEQ ID NO: 215818 - DNA, 13 bp, Artificial Sequence
  Oligonucleotide for detection of SNP TSC0052482
raactcgactaac

SEQ ID NO: 215819 - DNA, 13 bp, Artificial Sequence
  Oligonucleotide for detection of SNP TSC0052483
taaagatatgggg

SEQ ID NO: 215820 - DNA, 13 bp, Artificial Sequence
  Oligonucleotide for detection of SNP TSC0052483
ccccatatcttta

SEQ ID NO: 215821 - DNA, 13 bp, Artificial Sequence
  Oligonucleotide for detection of SNP TSC0052483
taaagagatgggg

SEQ ID NO: 215822 - DNA, 13 bp, Artificial Sequence
  Oligonucleotide for detection of SNP TSC0052483
ccccatctcttta

SEQ ID NO: 215823 - DNA, 13 bp, Artificial Sequence
  Oligonucleotide for detection of SNP TSC0052484
agataaagttttg

SEQ ID NO: 215824 - DNA, 13 bp, Artificial Sequence
  Oligonucleotide for detection of SNP TSC0052484
caaaactttatct

SEQ ID NO: 215825 - DNA, 13 bp, Artificial Sequence
  Oligonucleotide for detection of SNP TSC0052484
agataaggttttg

SEQ ID NO: 215826 - DNA, 13 bp, Artificial Sequence
  Oligonucleotide for detection of SNP TSC0052484
caaaaccttatct

SEQ ID NO: 215827 - DNA, 13 bp, Artificial Sequence
  Oligonucleotide for detection of SNP TSC0052488
tgggagaggtgtt

SEQ ID NO: 215828 - DNA, 13 bp, Artificial Sequence
  Oligonucleotide for detection of SNP TSC0052488
aacacctctccca

SEQ ID NO: 215829 - DNA, 13 bp, Artificial Sequence
  Oligonucleotide for detection of SNP TSC0052488
tgggaggggtgtt

SEQ ID NO: 215830 - DNA, 13 bp, Artificial Sequence
  Oligonucleotide for detection of SNP TSC0052488
aacacccctccca

SEQ ID NO: 215831 - DNA, 13 bp, Artificial Sequence
  Oligonucleotide for detection of SNP TSC0052489
aaattatttaggt

SEQ ID NO: 215832 - DNA, 13 bp, Artificial Sequence
  Oligonucleotide for detection of SNP TSC0052489
acctaaataattt

SEQ ID NO: 215833 - DNA, 13 bp, Artificial Sequence
  Oligonucleotide for detection of SNP TSC0052490
ttgtttagtggty

SEQ ID NO: 215834 - DNA, 13 bp, Artificial Sequence
  Oligonucleotide for detection of SNP TSC0052490
raccactaaacaa

SEQ ID NO: 215835 - DNA, 13 bp, Artificial Sequence
  Oligonucleotide for detection of SNP TSC0052490
ttgtttggtggty

SEQ ID NO: 215836 - DNA, 13 bp, Artificial Sequence
  Oligonucleotide for detection of SNP TSC0052490
raccaccaaacaa

SEQ ID NO: 215837 - DNA, 13 bp, Artificial Sequence
  Oligonucleotide for detection of SNP TSC0052490
ttgttcggtggty

SEQ ID NO: 215838 - DNA, 13 bp, Artificial Sequence
  Oligonucleotide for detection of SNP TSC0052490
raccaccgaacaa

SEQ ID NO: 215839 - DNA, 13 bp, Artificial Sequence
  Oligonucleotide for detection of SNP TSC0052490
gattattgagtag

SEQ ID NO: 215840 - DNA, 13 bp, Artificial Sequence
  Oligonucleotide for detection of SNP TSC0052490
ctactcaataatc

SEQ ID NO: 215841 - DNA, 13 bp, Artificial Sequence
  Oligonucleotide for detection of SNP TSC0052490
gattatcgagtag

SEQ ID NO: 215842 - DNA, 13 bp, Artificial Sequence
  Oligonucleotide for detection of SNP TSC0052490
ctactcgataatc

SEQ ID NO: 215843 - DNA, 13 bp, Artificial Sequence
  Oligonucleotide for detection of SNP TSC0052491
tttaattttaaga

SEQ ID NO: 215844 - DNA, 13 bp, Artificial Sequence
  Oligonucleotide for detection of SNP TSC0052491
tcttaaaattaaa

SEQ ID NO: 215845 - DNA, 13 bp, Artificial Sequence
  Oligonucleotide for detection of SNP TSC0052491
tttaatgttaaga

SEQ ID NO: 215846 - DNA, 13 bp, Artificial Sequence
  Oligonucleotide for detection of SNP TSC0052491
tcttaacattaaa

SEQ ID NO: 215847 - DNA, 13 bp, Artificial Sequence
  Oligonucleotide for detection of SNP TSC0052491
tttaacgttaaga

SEQ ID NO: 215848 - DNA, 13 bp, Artificial Sequence
  Oligonucleotide for detection of SNP TSC0052491
tcttaacgttaaa

SEQ ID NO: 215849 - DNA, 13 bp, Artificial Sequence
  Oligonucleotide for detection of SNP TSC0052491
ttttagagttgaa

SEQ ID NO: 215850 - DNA, 13 bp, Artificial Sequence
  Oligonucleotide for detection of SNP TSC0052491
ttcaactctaaaa

SEQ ID NO: 215851 - DNA, 13 bp, Artificial Sequence
  Oligonucleotide for detection of SNP TSC0052491
ttttagtgttgaa

SEQ ID NO: 215852 - DNA, 13 bp, Artificial Sequence
  Oligonucleotide for detection of SNP TSC0052491
ttcaacactaaaa

SEQ ID NO: 215853 - DNA, 13 bp, Artificial Sequence
  Oligonucleotide for detection of SNP TSC0052491
ttttagcgttgaa

SEQ ID NO: 215854 - DNA, 13 bp, Artificial Sequence
  Oligonucleotide for detection of SNP TSC0052491
ttcaacgctaaaa

SEQ ID NO: 215855 - DNA, 13 bp, Artificial Sequence
  Oligonucleotide for detection of SNP TSC0052492
gttggttgaagtt

SEQ ID NO: 215856 - DNA, 13 bp, Artificial Sequence
  Oligonucleotide for detection of SNP TSC0052492
aacttcaaccaac

SEQ ID NO: 215857 - DNA, 13 bp, Artificial Sequence
  Oligonucleotide for detection of SNP TSC0052492
gttggcggaagtt

SEQ ID NO: 215858 - DNA, 13 bp, Artificial Sequence
  Oligonucleotide for detection of SNP TSC0052492
aacttccgccaac

SEQ ID NO: 215859 - DNA, 13 bp, Artificial Sequence
  Oligonucleotide for detection of SNP TSC0052492
agttttagttagy

SEQ ID NO: 215860 - DNA, 13 bp, Artificial Sequence
  Oligonucleotide for detection of SNP TSC0052492
rctaactaaaact

SEQ ID NO: 215861 - DNA, 13 bp, Artificial Sequence
  Oligonucleotide for detection of SNP TSC0052493
gagagaaaattat

SEQ ID NO: 215862 - DNA, 13 bp, Artificial Sequence
  Oligonucleotide for detection of SNP TSC0052493
ataattttctctc

SEQ ID NO: 215863 - DNA, 13 bp, Artificial Sequence
  Oligonucleotide for detection of SNP TSC0052493
gagagataattat

SEQ ID NO: 215864 - DNA, 13 bp, Artificial Sequence
  Oligonucleotide for detection of SNP TSC0052493
ataattatctctc

SEQ ID NO: 215865 - DNA, 13 bp, Artificial Sequence
  Oligonucleotide for detection of SNP TSC0052494
agatttgagagay

SEQ ID NO: 215866 - DNA, 13 bp, Artificial Sequence
  Oligonucleotide for detection of SNP TSC0052494
rtctctcaaatct

SEQ ID NO: 215867 - DNA, 13 bp, Artificial Sequence
  Oligonucleotide for detection of SNP TSC0052494
agatttaagagay

SEQ ID NO: 215868 - DNA, 13 bp, Artificial Sequence
  Oligonucleotide for detection of SNP TSC0052494
rtctcttaaatct

SEQ ID NO: 215869 - DNA, 13 bp, Artificial Sequence
  Oligonucleotide for detection of SNP TSC0052494
agattcgagagay

SEQ ID NO: 215870 - DNA, 13 bp, Artificial Sequence
  Oligonucleotide for detection of SNP TSC0052494
rtctctcgaatct

SEQ ID NO: 215871 - DNA, 13 bp, Artificial Sequence
  Oligonucleotide for detection of SNP TSC0052495
ttttatatggaaa

SEQ ID NO: 215872 - DNA, 13 bp, Artificial Sequence
  Oligonucleotide for detection of SNP TSC0052495
tttccatataaaa

SEQ ID NO: 215873 - DNA, 13 bp, Artificial Sequence
  Oligonucleotide for detection of SNP TSC0052495
ttttatgtggaaa

SEQ ID NO: 215874 - DNA, 13 bp, Artificial Sequence
  Oligonucleotide for detection of SNP TSC0052495
tttccacataaaa

SEQ ID NO: 215875 - DNA, 13 bp, Artificial Sequence
  Oligonucleotide for detection of SNP TSC0052496
aagttaaaaagtt

SEQ ID NO: 215876 - DNA, 13 bp, Artificial Sequence
  Oligonucleotide for detection of SNP TSC0052496
aactttttaactt

SEQ ID NO: 215877 - DNA, 13 bp, Artificial Sequence
  Oligonucleotide for detection of SNP TSC0052496
aagttataaagtt

SEQ ID NO: 215878 - DNA, 13 bp, Artificial Sequence
  Oligonucleotide for detection of SNP TSC0052496
aactttataactt

SEQ ID NO: 215879 - DNA, 13 bp, Artificial Sequence
  Oligonucleotide for detection of SNP TSC0052496
aattttttggttt

SEQ ID NO: 215880 - DNA, 13 bp, Artificial Sequence
  Oligonucleotide for detection of SNP TSC0052496
aaaccaaaaaatt

SEQ ID NO: 215881 - DNA, 13 bp, Artificial Sequence
  Oligonucleotide for detection of SNP TSC0052497
aataaaattaatt

SEQ ID NO: 215882 - DNA, 13 bp, Artificial Sequence
  Oligonucleotide for detection of SNP TSC0052497
aattaattttatt

SEQ ID NO: 215883 - DNA, 13 bp, Artificial Sequence
  Oligonucleotide for detection of SNP TSC0052497
aataaagttaatt

SEQ ID NO: 215884 - DNA, 13 bp, Artificial Sequence
  Oligonucleotide for detection of SNP TSC0052497
aattaactttatt

SEQ ID NO: 215885 - DNA, 13 bp, Artificial Sequence
  Oligonucleotide for detection of SNP TSC0052499
tttttagttaagt

SEQ ID NO: 215886 - DNA, 13 bp, Artificial Sequence
  Oligonucleotide for detection of SNP TSC0052499
acttaactaaaaa

SEQ ID NO: 215887 - DNA, 13 bp, Artificial Sequence
  Oligonucleotide for detection of SNP TSC0052500
ggtttgagttttt

SEQ ID NO: 215888 - DNA, 13 bp, Artificial Sequence
  Oligonucleotide for detection of SNP TSC0052500
aaaaactcaaacc

SEQ ID NO: 215889 - DNA, 13 bp, Artificial Sequence
  Oligonucleotide for detection of SNP TSC0052500
ggtttgggttttt

SEQ ID NO: 215890 - DNA, 13 bp, Artificial Sequence
  Oligonucleotide for detection of SNP TSC0052500
aaaaacccaaacc

SEQ ID NO: 215891 - DNA, 13 bp, Artificial Sequence
  Oligonucleotide for detection of SNP TSC0052503
tattatgtaagaa

SEQ ID NO: 215892 - DNA, 13 bp, Artificial Sequence
  Oligonucleotide for detection of SNP TSC0052503
ttcttacataata

SEQ ID NO: 215893 - DNA, 13 bp, Artificial Sequence
  Oligonucleotide for detection of SNP TSC0052503
tattatataagaa

SEQ ID NO: 215894 - DNA, 13 bp, Artificial Sequence
  Oligonucleotide for detection of SNP TSC0052503
ttcttatataata

SEQ ID NO: 215895 - DNA, 13 bp, Artificial Sequence
  Oligonucleotide for detection of SNP TSC0052503
tattacgtaagaa

SEQ ID NO: 215896 - DNA, 13 bp, Artificial Sequence
  Oligonucleotide for detection of SNP TSC0052503
ttcttacgtaata

SEQ ID NO: 215897 - DNA, 13 bp, Artificial Sequence
  Oligonucleotide for detection of SNP TSC0052504
ttttgttgatggt

SEQ ID NO: 215898 - DNA, 13 bp, Artificial Sequence
  Oligonucleotide for detection of SNP TSC0052504
accatcaacaaaa

SEQ ID NO: 215899 - DNA, 13 bp, Artificial Sequence
  Oligonucleotide for detection of SNP TSC0052504
ttttgtcgatggt

SEQ ID NO: 215900 - DNA, 13 bp, Artificial Sequence
  Oligonucleotide for detection of SNP TSC0052504
accatcgacaaaa

SEQ ID NO: 215901 - DNA, 13 bp, Artificial Sequence
  Oligonucleotide for detection of SNP TSC0052504
attattggtaaag

SEQ ID NO: 215902 - DNA, 13 bp, Artificial Sequence
  Oligonucleotide for detection of SNP TSC0052504
ctttaccaataat

SEQ ID NO: 215903 - DNA, 13 bp, Artificial Sequence
  Oligonucleotide for detection of SNP TSC0052504
attattagtaaag

SEQ ID NO: 215904 - DNA, 13 bp, Artificial Sequence
  Oligonucleotide for detection of SNP TSC0052504
ctttactaataat

SEQ ID NO: 215905 - DNA, 13 bp, Artificial Sequence
  Oligonucleotide for detection of SNP TSC0052504
attatcggtaaag

SEQ ID NO: 215906 - DNA, 13 bp, Artificial Sequence
  Oligonucleotide for detection of SNP TSC0052504
ctttaccgataat

SEQ ID NO: 215907 - DNA, 13 bp, Artificial Sequence
  Oligonucleotide for detection of SNP TSC0052505
attttgattagga

SEQ ID NO: 215908 - DNA, 13 bp, Artificial Sequence
  Oligonucleotide for detection of SNP TSC0052505
tcctaatcaaaat

SEQ ID NO: 215909 - DNA, 13 bp, Artificial Sequence
  Oligonucleotide for detection of SNP TSC0052505
attttgtttagga

SEQ ID NO: 215910 - DNA, 13 bp, Artificial Sequence
  Oligonucleotide for detection of SNP TSC0052505
tcctaaacaaaat

SEQ ID NO: 215911 - DNA, 13 bp, Artificial Sequence
  Oligonucleotide for detection of SNP TSC0052505
ttttgattagggt

SEQ ID NO: 215912 - DNA, 13 bp, Artificial Sequence
  Oligonucleotide for detection of SNP TSC0052505
accctaatcaaaa

SEQ ID NO: 215913 - DNA, 13 bp, Artificial Sequence
  Oligonucleotide for detection of SNP TSC0052505
ttttgaatagggt

SEQ ID NO: 215914 - DNA, 13 bp, Artificial Sequence
  Oligonucleotide for detection of SNP TSC0052505
accctattcaaaa

SEQ ID NO: 215915 - DNA, 13 bp, Artificial Sequence
  Oligonucleotide for detection of SNP TSC0052507
gagatttgtatga

SEQ ID NO: 215916 - DNA, 13 bp, Artificial Sequence
  Oligonucleotide for detection of SNP TSC0052507
tcatacaaatctc

SEQ ID NO: 215917 - DNA, 13 bp, Artificial Sequence
  Oligonucleotide for detection of SNP TSC0052507
gagattcgtatga

SEQ ID NO: 215918 - DNA, 13 bp, Artificial Sequence
  Oligonucleotide for detection of SNP TSC0052507
tcatacgaatctc

SEQ ID NO: 215919 - DNA, 13 bp, Artificial Sequence
  Oligonucleotide for detection of SNP TSC0052507
ttatgtgaattty

SEQ ID NO: 215920 - DNA, 13 bp, Artificial Sequence
  Oligonucleotide for detection of SNP TSC0052507
raaattcacataa

SEQ ID NO: 215921 - DNA, 13 bp, Artificial Sequence
  Oligonucleotide for detection of SNP TSC0052507
ttatgtaaattty

SEQ ID NO: 215922 - DNA, 13 bp, Artificial Sequence
  Oligonucleotide for detection of SNP TSC0052507
raaatttacataa

SEQ ID NO: 215923 - DNA, 13 bp, Artificial Sequence
  Oligonucleotide for detection of SNP TSC0052507
ttatgcgaattty

SEQ ID NO: 215924 - DNA, 13 bp, Artificial Sequence
  Oligonucleotide for detection of SNP TSC0052507
raaattcgcataa

SEQ ID NO: 215925 - DNA, 13 bp, Artificial Sequence
  Oligonucleotide for detection of SNP TSC0052509
tggtgaagttttt

SEQ ID NO: 215926 - DNA, 13 bp, Artificial Sequence
  Oligonucleotide for detection of SNP TSC0052509
aaaaacttcacca

SEQ ID NO: 215927 - DNA, 13 bp, Artificial Sequence
  Oligonucleotide for detection of SNP TSC0052509
tggtgaggttttt

SEQ ID NO: 215928 - DNA, 13 bp, Artificial Sequence
  Oligonucleotide for detection of SNP TSC0052509
aaaaacctcacca

SEQ ID NO: 215929 - DNA, 13 bp, Artificial Sequence
  Oligonucleotide for detection of SNP TSC0052510
attttaggattty

SEQ ID NO: 215930 - DNA, 13 bp, Artificial Sequence
  Oligonucleotide for detection of SNP TSC0052510
raaatcctaaaat

SEQ ID NO: 215931 - DNA, 13 bp, Artificial Sequence
  Oligonucleotide for detection of SNP TSC0052511
taaaataatagtt

SEQ ID NO: 215932 - DNA, 13 bp, Artificial Sequence
  Oligonucleotide for detection of SNP TSC0052511
aactattatttta

SEQ ID NO: 215933 - DNA, 13 bp, Artificial Sequence
  Oligonucleotide for detection of SNP TSC0052511
taaaatgatagtt

SEQ ID NO: 215934 - DNA, 13 bp, Artificial Sequence
  Oligonucleotide for detection of SNP TSC0052511
aactatcatttta

SEQ ID NO: 215935 - DNA, 13 bp, Artificial Sequence
  Oligonucleotide for detection of SNP TSC0052511
taaaacgatagtt

SEQ ID NO: 215936 - DNA, 13 bp, Artificial Sequence
  Oligonucleotide for detection of SNP TSC0052511
aactatcgtttta

SEQ ID NO: 215937 - DNA, 13 bp, Artificial Sequence
  Oligonucleotide for detection of SNP TSC0052511
agttgttgttttg

SEQ ID NO: 215938 - DNA, 13 bp, Artificial Sequence
  Oligonucleotide for detection of SNP TSC0052511
caaaacaacaact

SEQ ID NO: 215939 - DNA, 13 bp, Artificial Sequence
  Oligonucleotide for detection of SNP TSC0052511
agttgtcgttttg

SEQ ID NO: 215940 - DNA, 13 bp, Artificial Sequence
  Oligonucleotide for detection of SNP TSC0052511
caaaacgacaact

SEQ ID NO: 215941 - DNA, 13 bp, Artificial Sequence
  Oligonucleotide for detection of SNP TSC0052512
attatatgggaga

SEQ ID NO: 215942 - DNA, 13 bp, Artificial Sequence
  Oligonucleotide for detection of SNP TSC0052512
tctcccatataat

SEQ ID NO: 215943 - DNA, 13 bp, Artificial Sequence
  Oligonucleotide for detection of SNP TSC0052512
attatacgggaga

SEQ ID NO: 215944 - DNA, 13 bp, Artificial Sequence
  Oligonucleotide for detection of SNP TSC0052512
tctcccgtataat

SEQ ID NO: 215945 - DNA, 13 bp, Artificial Sequence
  Oligonucleotide for detection of SNP TSC0052513
gtttgttgtttga

SEQ ID NO: 215946 - DNA, 13 bp, Artificial Sequence
  Oligonucleotide for detection of SNP TSC0052513
tcaaacaacaaac

SEQ ID NO: 215947 - DNA, 13 bp, Artificial Sequence
  Oligonucleotide for detection of SNP TSC0052513
gtttgtcgtttga

SEQ ID NO: 215948 - DNA, 13 bp, Artificial Sequence
  Oligonucleotide for detection of SNP TSC0052513
tcaaacgacaaac

SEQ ID NO: 215949 - DNA, 13 bp, Artificial Sequence
  Oligonucleotide for detection of SNP TSC0052513
ttagatggtaaay

SEQ ID NO: 215950 - DNA, 13 bp, Artificial Sequence
  Oligonucleotide for detection of SNP TSC0052513
rtttaccatctaa

SEQ ID NO: 215951 - DNA, 13 bp, Artificial Sequence
  Oligonucleotide for detection of SNP TSC0052513
ttagatagtaaay

SEQ ID NO: 215952 - DNA, 13 bp, Artificial Sequence
  Oligonucleotide for detection of SNP TSC0052513
rtttactatctaa

SEQ ID NO: 215953 - DNA, 13 bp, Artificial Sequence
  Oligonucleotide for detection of SNP TSC0052513
ttagacggtaaay

SEQ ID NO: 215954 - DNA, 13 bp, Artificial Sequence
  Oligonucleotide for detection of SNP TSC0052513
rtttaccgtctaa

SEQ ID NO: 215955 - DNA, 13 bp, Artificial Sequence
  Oligonucleotide for detection of SNP TSC0052514
gttagtagtggtt

SEQ ID NO: 215956 - DNA, 13 bp, Artificial Sequence
  Oligonucleotide for detection of SNP TSC0052514
aaccactactaac

SEQ ID NO: 215957 - DNA, 13 bp, Artificial Sequence
  Oligonucleotide for detection of SNP TSC0052514
gttagtggtggtt

SEQ ID NO: 215958 - DNA, 13 bp, Artificial Sequence
  Oligonucleotide for detection of SNP TSC0052514
aaccaccactaac

SEQ ID NO: 215959 - DNA, 13 bp, Artificial Sequence
  Oligonucleotide for detection of SNP TSC0052514
gttagtagcggtt

SEQ ID NO: 215960 - DNA, 13 bp, Artificial Sequence
  Oligonucleotide for detection of SNP TSC0052514
aaccgctactaac

SEQ ID NO: 215961 - DNA, 13 bp, Artificial Sequence
  Oligonucleotide for detection of SNP TSC0052514
gttagcggtggtt

SEQ ID NO: 215962 - DNA, 13 bp, Artificial Sequence
  Oligonucleotide for detection of SNP TSC0052514
aaccaccgctaac

SEQ ID NO: 215963 - DNA, 13 bp, Artificial Sequence
  Oligonucleotide for detection of SNP TSC0052514
gttagtggcggtt

SEQ ID NO: 215964 - DNA, 13 bp, Artificial Sequence
  Oligonucleotide for detection of SNP TSC0052514
aaccgccactaac

SEQ ID NO: 215965 - DNA, 13 bp, Artificial Sequence
  Oligonucleotide for detection of SNP TSC0052514
gttagcggcggtt

SEQ ID NO: 215966 - DNA, 13 bp, Artificial Sequence
  Oligonucleotide for detection of SNP TSC0052514
aaccgccgctaac

SEQ ID NO: 215967 - DNA, 13 bp, Artificial Sequence
  Oligonucleotide for detection of SNP TSC0052514
agttgttgttggy

SEQ ID NO: 215968 - DNA, 13 bp, Artificial Sequence
  Oligonucleotide for detection of SNP TSC0052514
rccaacaacaact

SEQ ID NO: 215969 - DNA, 13 bp, Artificial Sequence
  Oligonucleotide for detection of SNP TSC0052514
agtcgttgttggy

SEQ ID NO: 215970 - DNA, 13 bp, Artificial Sequence
  Oligonucleotide for detection of SNP TSC0052514
rccaacaacgact

SEQ ID NO: 215971 - DNA, 13 bp, Artificial Sequence
  Oligonucleotide for detection of SNP TSC0052514
agttgtcgttggy

SEQ ID NO: 215972 - DNA, 13 bp, Artificial Sequence
  Oligonucleotide for detection of SNP TSC0052514
rccaacgacaact

SEQ ID NO: 215973 - DNA, 13 bp, Artificial Sequence
  Oligonucleotide for detection of SNP TSC0052514
agtcgtcgttggy

SEQ ID NO: 215974 - DNA, 13 bp, Artificial Sequence
  Oligonucleotide for detection of SNP TSC0052514
rccaacgacgact

SEQ ID NO: 215975 - DNA, 13 bp, Artificial Sequence
  Oligonucleotide for detection of SNP TSC0052515
gtgttttgtagtt

SEQ ID NO: 215976 - DNA, 13 bp, Artificial Sequence
  Oligonucleotide for detection of SNP TSC0052515
aactacaaaacac

SEQ ID NO: 215977 - DNA, 13 bp, Artificial Sequence
  Oligonucleotide for detection of SNP TSC0052515
gtgtttcgtagtt

SEQ ID NO: 215978 - DNA, 13 bp, Artificial Sequence
  Oligonucleotide for detection of SNP TSC0052515
aactacgaaacac

SEQ ID NO: 215979 - DNA, 13 bp, Artificial Sequence
  Oligonucleotide for detection of SNP TSC0052515
agttgtggggtay

SEQ ID NO: 215980 - DNA, 13 bp, Artificial Sequence
  Oligonucleotide for detection of SNP TSC0052515
rtaccccacaact

SEQ ID NO: 215981 - DNA, 13 bp, Artificial Sequence
  Oligonucleotide for detection of SNP TSC0052515
agttgtagggtay

SEQ ID NO: 215982 - DNA, 13 bp, Artificial Sequence
  Oligonucleotide for detection of SNP TSC0052515
rtaccctacaact

SEQ ID NO: 215983 - DNA, 13 bp, Artificial Sequence
  Oligonucleotide for detection of SNP TSC0052515
agttgcggggtay

SEQ ID NO: 215984 - DNA, 13 bp, Artificial Sequence
  Oligonucleotide for detection of SNP TSC0052515
rtaccccgcaact

SEQ ID NO: 215985 - DNA, 13 bp, Artificial Sequence
  Oligonucleotide for detection of SNP TSC0052516
agattttggtttt

SEQ ID NO: 215986 - DNA, 13 bp, Artificial Sequence
  Oligonucleotide for detection of SNP TSC0052516
aaaaccaaaatct

SEQ ID NO: 215987 - DNA, 13 bp, Artificial Sequence
  Oligonucleotide for detection of SNP TSC0052516
agatttgggtttt

SEQ ID NO: 215988 - DNA, 13 bp, Artificial Sequence
  Oligonucleotide for detection of SNP TSC0052516
aaaacccaaatct

SEQ ID NO: 215989 - DNA, 13 bp, Artificial Sequence
  Oligonucleotide for detection of SNP TSC0052516
agattcgggtttt

SEQ ID NO: 215990 - DNA, 13 bp, Artificial Sequence
  Oligonucleotide for detection of SNP TSC0052516
aaaacccgaatct

SEQ ID NO: 215991 - DNA, 13 bp, Artificial Sequence
  Oligonucleotide for detection of SNP TSC0052516
aaaattagggttt

SEQ ID NO: 215992 - DNA, 13 bp, Artificial Sequence
  Oligonucleotide for detection of SNP TSC0052516
aaaccctaatttt

SEQ ID NO: 215993 - DNA, 13 bp, Artificial Sequence
  Oligonucleotide for detection of SNP TSC0052516
aaaatttgggttt

SEQ ID NO: 215994 - DNA, 13 bp, Artificial Sequence
  Oligonucleotide for detection of SNP TSC0052516
aaacccaaatttt

SEQ ID NO: 215995 - DNA, 13 bp, Artificial Sequence
  Oligonucleotide for detection of SNP TSC0052516
aaaattcgggttt

SEQ ID NO: 215996 - DNA, 13 bp, Artificial Sequence
  Oligonucleotide for detection of SNP TSC0052516
aaacccgaatttt

SEQ ID NO: 215997 - DNA, 13 bp, Artificial Sequence
  Oligonucleotide for detection of SNP TSC0052522
attggtataatta

SEQ ID NO: 215998 - DNA, 13 bp, Artificial Sequence
  Oligonucleotide for detection of SNP TSC0052522
taattataccaat

SEQ ID NO: 215999 - DNA, 13 bp, Artificial Sequence
  Oligonucleotide for detection of SNP TSC0052522
attggtttaatta

SEQ ID NO: 216000 - DNA, 13 bp, Artificial Sequence
  Oligonucleotide for detection of SNP TSC0052522
taattaaaccaat

SEQ ID NO: 216001 - DNA, 13 bp, Artificial Sequence
  Oligonucleotide for detection of SNP TSC0052522
tgattatgttagt

SEQ ID NO: 216002 - DNA, 13 bp, Artificial Sequence
  Oligonucleotide for detection of SNP TSC0052522
actaacataatca

SEQ ID NO: 216003 - DNA, 13 bp, Artificial Sequence
  Oligonucleotide for detection of SNP TSC0052522
tgattaagttagt

SEQ ID NO: 216004 - DNA, 13 bp, Artificial Sequence
  Oligonucleotide for detection of SNP TSC0052522
actaacttaatca

SEQ ID NO: 216005 - DNA, 13 bp, Artificial Sequence
  Oligonucleotide for detection of SNP TSC0052527
tgattatggtagg

SEQ ID NO: 216006 - DNA, 13 bp, Artificial Sequence
  Oligonucleotide for detection of SNP TSC0052527
cctaccataatca

SEQ ID NO: 216007 - DNA, 13 bp, Artificial Sequence
  Oligonucleotide for detection of SNP TSC0052527
tgattacggtagg

SEQ ID NO: 216008 - DNA, 13 bp, Artificial Sequence
  Oligonucleotide for detection of SNP TSC0052527
cctaccgtaatca

SEQ ID NO: 216009 - DNA, 13 bp, Artificial Sequence
  Oligonucleotide for detection of SNP TSC0052528
ttagatgttatga

SEQ ID NO: 216010 - DNA, 13 bp, Artificial Sequence
  Oligonucleotide for detection of SNP TSC0052528
tcataacatctaa

SEQ ID NO: 216011 - DNA, 13 bp, Artificial Sequence
  Oligonucleotide for detection of SNP TSC0052528
ttagatattatga

SEQ ID NO: 216012 - DNA, 13 bp, Artificial Sequence
  Oligonucleotide for detection of SNP TSC0052528
tcataatatctaa

SEQ ID NO: 216013 - DNA, 13 bp, Artificial Sequence
  Oligonucleotide for detection of SNP TSC0052529
atgttaggtagtg

SEQ ID NO: 216014 - DNA, 13 bp, Artificial Sequence
  Oligonucleotide for detection of SNP TSC0052529
cactacctaacat

SEQ ID NO: 216015 - DNA, 13 bp, Artificial Sequence
  Oligonucleotide for detection of SNP TSC0052529
atgttaagtagtg

SEQ ID NO: 216016 - DNA, 13 bp, Artificial Sequence
  Oligonucleotide for detection of SNP TSC0052529
cactacttaacat

SEQ ID NO: 216017 - DNA, 13 bp, Artificial Sequence
  Oligonucleotide for detection of SNP TSC0052530
aaggtagtattag

SEQ ID NO: 216018 - DNA, 13 bp, Artificial Sequence
  Oligonucleotide for detection of SNP TSC0052530
ctaatactacctt

SEQ ID NO: 216019 - DNA, 13 bp, Artificial Sequence
  Oligonucleotide for detection of SNP TSC0052530
aaggtaatattag

SEQ ID NO: 216020 - DNA, 13 bp, Artificial Sequence
  Oligonucleotide for detection of SNP TSC0052530
ctaatattacctt

SEQ ID NO: 216021 - DNA, 13 bp, Artificial Sequence
  Oligonucleotide for detection of SNP TSC0052531
ttgtgtgttttty

SEQ ID NO: 216022 - DNA, 13 bp, Artificial Sequence
  Oligonucleotide for detection of SNP TSC0052531
raaaaacacacaa

SEQ ID NO: 216023 - DNA, 13 bp, Artificial Sequence
  Oligonucleotide for detection of SNP TSC0052531
ttgtgtattttty

SEQ ID NO: 216024 - DNA, 13 bp, Artificial Sequence
  Oligonucleotide for detection of SNP TSC0052531
raaaaatacacaa

SEQ ID NO: 216025 - DNA, 13 bp, Artificial Sequence
  Oligonucleotide for detection of SNP TSC0052532
taataaagttttg

SEQ ID NO: 216026 - DNA, 13 bp, Artificial Sequence
  Oligonucleotide for detection of SNP TSC0052532
caaaactttatta

SEQ ID NO: 216027 - DNA, 13 bp, Artificial Sequence
  Oligonucleotide for detection of SNP TSC0052532
taataaggttttg

SEQ ID NO: 216028 - DNA, 13 bp, Artificial Sequence
  Oligonucleotide for detection of SNP TSC0052532
caaaaccttatta

SEQ ID NO: 216029 - DNA, 13 bp, Artificial Sequence
  Oligonucleotide for detection of SNP TSC0052534
gttgttaatttgg

SEQ ID NO: 216030 - DNA, 13 bp, Artificial Sequence
  Oligonucleotide for detection of SNP TSC0052534
ccaaattaacaac

SEQ ID NO: 216031 - DNA, 13 bp, Artificial Sequence
  Oligonucleotide for detection of SNP TSC0052534
gttgttgatttgg

SEQ ID NO: 216032 - DNA, 13 bp, Artificial Sequence
  Oligonucleotide for detection of SNP TSC0052534
ccaaatcaacaac

SEQ ID NO: 216033 - DNA, 13 bp, Artificial Sequence
  Oligonucleotide for detection of SNP TSC0052540
gtttatgagtggt

SEQ ID NO: 216034 - DNA, 13 bp, Artificial Sequence
  Oligonucleotide for detection of SNP TSC0052540
accactcataaac

SEQ ID NO: 216035 - DNA, 13 bp, Artificial Sequence
  Oligonucleotide for detection of SNP TSC0052540
gtttataagtggt

SEQ ID NO: 216036 - DNA, 13 bp, Artificial Sequence
  Oligonucleotide for detection of SNP TSC0052540
accacttataaac

SEQ ID NO: 216037 - DNA, 13 bp, Artificial Sequence
  Oligonucleotide for detection of SNP TSC0052541
taatgaaatttta

SEQ ID NO: 216038 - DNA, 13 bp, Artificial Sequence
  Oligonucleotide for detection of SNP TSC0052541
taaaatttcatta

SEQ ID NO: 216039 - DNA, 13 bp, Artificial Sequence
  Oligonucleotide for detection of SNP TSC0052541
taatgagatttta

SEQ ID NO: 216040 - DNA, 13 bp, Artificial Sequence
  Oligonucleotide for detection of SNP TSC0052541
taaaatctcatta

SEQ ID NO: 216041 - DNA, 13 bp, Artificial Sequence
  Oligonucleotide for detection of SNP TSC0052542
ttgtgggttttgg

SEQ ID NO: 216042 - DNA, 13 bp, Artificial Sequence
  Oligonucleotide for detection of SNP TSC0052542
ccaaaacccacaa

SEQ ID NO: 216043 - DNA, 13 bp, Artificial Sequence
  Oligonucleotide for detection of SNP TSC0052542
ttaaaggttataa

SEQ ID NO: 216044 - DNA, 13 bp, Artificial Sequence
  Oligonucleotide for detection of SNP TSC0052542
ttataacctttaa

SEQ ID NO: 216045 - DNA, 13 bp, Artificial Sequence
  Oligonucleotide for detection of SNP TSC0052542
ttaaagtttataa

SEQ ID NO: 216046 - DNA, 13 bp, Artificial Sequence
  Oligonucleotide for detection of SNP TSC0052542
ttataaactttaa

SEQ ID NO: 216047 - DNA, 13 bp, Artificial Sequence
  Oligonucleotide for detection of SNP TSC0052543
tgttggaagaaaa

SEQ ID NO: 216048 - DNA, 13 bp, Artificial Sequence
  Oligonucleotide for detection of SNP TSC0052543
ttttcttccaaca

SEQ ID NO: 216049 - DNA, 13 bp, Artificial Sequence
  Oligonucleotide for detection of SNP TSC0052543
tgttgggagaaaa

SEQ ID NO: 216050 - DNA, 13 bp, Artificial Sequence
  Oligonucleotide for detection of SNP TSC0052543
ttttctcccaaca

SEQ ID NO: 216051 - DNA, 13 bp, Artificial Sequence
  Oligonucleotide for detection of SNP TSC0052544
agttatgaagggt

SEQ ID NO: 216052 - DNA, 13 bp, Artificial Sequence
  Oligonucleotide for detection of SNP TSC0052544
acccttcataact

SEQ ID NO: 216053 - DNA, 13 bp, Artificial Sequence
  Oligonucleotide for detection of SNP TSC0052544
agttataaagggt

SEQ ID NO: 216054 - DNA, 13 bp, Artificial Sequence
  Oligonucleotide for detection of SNP TSC0052544
accctttataact

SEQ ID NO: 216055 - DNA, 13 bp, Artificial Sequence
  Oligonucleotide for detection of SNP TSC0052544
agttacgaagggt

SEQ ID NO: 216056 - DNA, 13 bp, Artificial Sequence
  Oligonucleotide for detection of SNP TSC0052544
acccttcgtaact

SEQ ID NO: 216057 - DNA, 13 bp, Artificial Sequence
  Oligonucleotide for detection of SNP TSC0052545
tattttgagtttt

SEQ ID NO: 216058 - DNA, 13 bp, Artificial Sequence
  Oligonucleotide for detection of SNP TSC0052545
aaaactcaaaata

SEQ ID NO: 216059 - DNA, 13 bp, Artificial Sequence
  Oligonucleotide for detection of SNP TSC0052545
tattttaagtttt

SEQ ID NO: 216060 - DNA, 13 bp, Artificial Sequence
  Oligonucleotide for detection of SNP TSC0052545
aaaacttaaaata

SEQ ID NO: 216061 - DNA, 13 bp, Artificial Sequence
  Oligonucleotide for detection of SNP TSC0052546
taagtagttatgt

SEQ ID NO: 216062 - DNA, 13 bp, Artificial Sequence
  Oligonucleotide for detection of SNP TSC0052546
acataactactta

SEQ ID NO: 216063 - DNA, 13 bp, Artificial Sequence
  Oligonucleotide for detection of SNP TSC0052546
taagtaattatgt

SEQ ID NO: 216064 - DNA, 13 bp, Artificial Sequence
  Oligonucleotide for detection of SNP TSC0052546
acataattactta

SEQ ID NO: 216065 - DNA, 13 bp, Artificial Sequence
  Oligonucleotide for detection of SNP TSC0052547
agtttatgaggta

SEQ ID NO: 216066 - DNA, 13 bp, Artificial Sequence
  Oligonucleotide for detection of SNP TSC0052547
tacctcataaact

SEQ ID NO: 216067 - DNA, 13 bp, Artificial Sequence
  Oligonucleotide for detection of SNP TSC0052547
agtttacgaggta

SEQ ID NO: 216068 - DNA, 13 bp, Artificial Sequence
  Oligonucleotide for detection of SNP TSC0052547
tacctcgtaaact

SEQ ID NO: 216069 - DNA, 13 bp, Artificial Sequence
  Oligonucleotide for detection of SNP TSC0052547
tattttgtaaatt

SEQ ID NO: 216070 - DNA, 13 bp, Artificial Sequence
  Oligonucleotide for detection of SNP TSC0052547
aatttacaaaata

SEQ ID NO: 216071 - DNA, 13 bp, Artificial Sequence
  Oligonucleotide for detection of SNP TSC0052547
tattttataaatt

SEQ ID NO: 216072 - DNA, 13 bp, Artificial Sequence
  Oligonucleotide for detection of SNP TSC0052547
aatttataaaata

SEQ ID NO: 216073 - DNA, 13 bp, Artificial Sequence
  Oligonucleotide for detection of SNP TSC0052553
tagttttggggag

SEQ ID NO: 216074 - DNA, 13 bp, Artificial Sequence
  Oligonucleotide for detection of SNP TSC0052553
ctccccaaaacta

SEQ ID NO: 216075 - DNA, 13 bp, Artificial Sequence
  Oligonucleotide for detection of SNP TSC0052553
tagtttcggggag

SEQ ID NO: 216076 - DNA, 13 bp, Artificial Sequence
  Oligonucleotide for detection of SNP TSC0052553
ctccccgaaacta

SEQ ID NO: 216077 - DNA, 13 bp, Artificial Sequence
  Oligonucleotide for detection of SNP TSC0052553
ttttttgaaattg

SEQ ID NO: 216078 - DNA, 13 bp, Artificial Sequence
  Oligonucleotide for detection of SNP TSC0052553
caatttcaaaaaa

SEQ ID NO: 216079 - DNA, 13 bp, Artificial Sequence
  Oligonucleotide for detection of SNP TSC0052553
ttttttaaaattg

SEQ ID NO: 216080 - DNA, 13 bp, Artificial Sequence
  Oligonucleotide for detection of SNP TSC0052553
caattttaaaaaa

SEQ ID NO: 216081 - DNA, 13 bp, Artificial Sequence
  Oligonucleotide for detection of SNP TSC0052553
tttttcgaaattg

SEQ ID NO: 216082 - DNA, 13 bp, Artificial Sequence
  Oligonucleotide for detection of SNP TSC0052553
caatttcgaaaaa

SEQ ID NO: 216083 - DNA, 13 bp, Artificial Sequence
  Oligonucleotide for detection of SNP TSC0052554
tatgtgggtgagt

SEQ ID NO: 216084 - DNA, 13 bp, Artificial Sequence
  Oligonucleotide for detection of SNP TSC0052554
actcacccacata

SEQ ID NO: 216085 - DNA, 13 bp, Artificial Sequence
  Oligonucleotide for detection of SNP TSC0052554
tatgtgagtgagt

SEQ ID NO: 216086 - DNA, 13 bp, Artificial Sequence
  Oligonucleotide for detection of SNP TSC0052554
actcactcacata

SEQ ID NO: 216087 - DNA, 13 bp, Artificial Sequence
  Oligonucleotide for detection of SNP TSC0052554
tacgtgggtgagt

SEQ ID NO: 216088 - DNA, 13 bp, Artificial Sequence
  Oligonucleotide for detection of SNP TSC0052554
actcacccacgta

SEQ ID NO: 216089 - DNA, 13 bp, Artificial Sequence
  Oligonucleotide for detection of SNP TSC0052554
tacgtgagtgagt

SEQ ID NO: 216090 - DNA, 13 bp, Artificial Sequence
  Oligonucleotide for detection of SNP TSC0052554
actcactcacgta

SEQ ID NO: 216091 - DNA, 13 bp, Artificial Sequence
  Oligonucleotide for detection of SNP TSC0052555
tttaataagttay

SEQ ID NO: 216092 - DNA, 13 bp, Artificial Sequence
  Oligonucleotide for detection of SNP TSC0052555
rtaacttattaaa

SEQ ID NO: 216093 - DNA, 13 bp, Artificial Sequence
  Oligonucleotide for detection of SNP TSC0052555
tttaattagttay

SEQ ID NO: 216094 - DNA, 13 bp, Artificial Sequence
  Oligonucleotide for detection of SNP TSC0052555
rtaactaattaaa

SEQ ID NO: 216095 - DNA, 13 bp, Artificial Sequence
  Oligonucleotide for detection of SNP TSC0052555
gtaatttgttgga

SEQ ID NO: 216096 - DNA, 13 bp, Artificial Sequence
  Oligonucleotide for detection of SNP TSC0052555
tccaacaaattac

SEQ ID NO: 216097 - DNA, 13 bp, Artificial Sequence
  Oligonucleotide for detection of SNP TSC0052555
gtaattggttgga

SEQ ID NO: 216098 - DNA, 13 bp, Artificial Sequence
  Oligonucleotide for detection of SNP TSC0052555
tccaaccaattac

SEQ ID NO: 216099 - DNA, 13 bp, Artificial Sequence
  Oligonucleotide for detection of SNP TSC0052556
gtattaatgagag

SEQ ID NO: 216100 - DNA, 13 bp, Artificial Sequence
  Oligonucleotide for detection of SNP TSC0052556
ctctcattaatac

SEQ ID NO: 216101 - DNA, 13 bp, Artificial Sequence
  Oligonucleotide for detection of SNP TSC0052556
gtattagtgagag

SEQ ID NO: 216102 - DNA, 13 bp, Artificial Sequence
  Oligonucleotide for detection of SNP TSC0052556
ctctcactaatac

SEQ ID NO: 216103 - DNA, 13 bp, Artificial Sequence
  Oligonucleotide for detection of SNP TSC0052558
aatagtagaatag

SEQ ID NO: 216104 - DNA, 13 bp, Artificial Sequence
  Oligonucleotide for detection of SNP TSC0052558
ctattctactatt

SEQ ID NO: 216105 - DNA, 13 bp, Artificial Sequence
  Oligonucleotide for detection of SNP TSC0052558
aatagttgaatag

SEQ ID NO: 216106 - DNA, 13 bp, Artificial Sequence
  Oligonucleotide for detection of SNP TSC0052558
ctattcaactatt

SEQ ID NO: 216107 - DNA, 13 bp, Artificial Sequence
  Oligonucleotide for detection of SNP TSC0052558
aatagtcgaatag

SEQ ID NO: 216108 - DNA, 13 bp, Artificial Sequence
  Oligonucleotide for detection of SNP TSC0052558
ctattcgactatt

SEQ ID NO: 216109 - DNA, 13 bp, Artificial Sequence
  Oligonucleotide for detection of SNP TSC0052558
ttattttgttgtt

SEQ ID NO: 216110 - DNA, 13 bp, Artificial Sequence
  Oligonucleotide for detection of SNP TSC0052558
aacaacaaaataa

SEQ ID NO: 216111 - DNA, 13 bp, Artificial Sequence
  Oligonucleotide for detection of SNP TSC0052559
ttattatgtaggg

SEQ ID NO: 216112 - DNA, 13 bp, Artificial Sequence
  Oligonucleotide for detection of SNP TSC0052559
ccctacataataa

SEQ ID NO: 216113 - DNA, 13 bp, Artificial Sequence
  Oligonucleotide for detection of SNP TSC0052559
ttattacgtaggg

SEQ ID NO: 216114 - DNA, 13 bp, Artificial Sequence
  Oligonucleotide for detection of SNP TSC0052559
ccctacgtaataa

SEQ ID NO: 216115 - DNA, 13 bp, Artificial Sequence
  Oligonucleotide for detection of SNP TSC0052560
ttgtgattttgta

SEQ ID NO: 216116 - DNA, 13 bp, Artificial Sequence
  Oligonucleotide for detection of SNP TSC0052560
tacaaaatcacaa

SEQ ID NO: 216117 - DNA, 13 bp, Artificial Sequence
  Oligonucleotide for detection of SNP TSC0052560
ttgtgagtttgta

SEQ ID NO: 216118 - DNA, 13 bp, Artificial Sequence
  Oligonucleotide for detection of SNP TSC0052560
tacaaactcacaa

SEQ ID NO: 216119 - DNA, 13 bp, Artificial Sequence
  Oligonucleotide for detection of SNP TSC0052560
tgtaagattatag

SEQ ID NO: 216120 - DNA, 13 bp, Artificial Sequence
  Oligonucleotide for detection of SNP TSC0052560
ctataatcttaca

SEQ ID NO: 216121 - DNA, 13 bp, Artificial Sequence
  Oligonucleotide for detection of SNP TSC0052560
tgtaagtttatag

SEQ ID NO: 216122 - DNA, 13 bp, Artificial Sequence
  Oligonucleotide for detection of SNP TSC0052560
ctataaacttaca

SEQ ID NO: 216123 - DNA, 13 bp, Artificial Sequence
  Oligonucleotide for detection of SNP TSC0052561
taatattgttata

SEQ ID NO: 216124 - DNA, 13 bp, Artificial Sequence
  Oligonucleotide for detection of SNP TSC0052561
tataacaatatta

SEQ ID NO: 216125 - DNA, 13 bp, Artificial Sequence
  Oligonucleotide for detection of SNP TSC0052561
taatatggttata

SEQ ID NO: 216126 - DNA, 13 bp, Artificial Sequence
  Oligonucleotide for detection of SNP TSC0052561
tataaccatatta

SEQ ID NO: 216127 - DNA, 13 bp, Artificial Sequence
  Oligonucleotide for detection of SNP TSC0052561
tgtaataatgttg

SEQ ID NO: 216128 - DNA, 13 bp, Artificial Sequence
  Oligonucleotide for detection of SNP TSC0052561
caacattattaca

SEQ ID NO: 216129 - DNA, 13 bp, Artificial Sequence
  Oligonucleotide for detection of SNP TSC0052561
tgtaattatgttg

SEQ ID NO: 216130 - DNA, 13 bp, Artificial Sequence
  Oligonucleotide for detection of SNP TSC0052561
caacataattaca

SEQ ID NO: 216131 - DNA, 13 bp, Artificial Sequence
  Oligonucleotide for detection of SNP TSC0052564
ggaaagtttttta

SEQ ID NO: 216132 - DNA, 13 bp, Artificial Sequence
  Oligonucleotide for detection of SNP TSC0052564
taaaaaactttcc

SEQ ID NO: 216133 - DNA, 13 bp, Artificial Sequence
  Oligonucleotide for detection of SNP TSC0052564
ggaaaggttttta

SEQ ID NO: 216134 - DNA, 13 bp, Artificial Sequence
  Oligonucleotide for detection of SNP TSC0052564
taaaaacctttcc

SEQ ID NO: 216135 - DNA, 13 bp, Artificial Sequence
  Oligonucleotide for detection of SNP TSC0052564
taaagggttttty

SEQ ID NO: 216136 - DNA, 13 bp, Artificial Sequence
  Oligonucleotide for detection of SNP TSC0052564
raaaaacccttta

SEQ ID NO: 216137 - DNA, 13 bp, Artificial Sequence
  Oligonucleotide for detection of SNP TSC0052564
taaaggtttttty

SEQ ID NO: 216138 - DNA, 13 bp, Artificial Sequence
  Oligonucleotide for detection of SNP TSC0052564
raaaaaaccttta

SEQ ID NO: 216139 - DNA, 13 bp, Artificial Sequence
  Oligonucleotide for detection of SNP TSC0052565
tgatagtggtaty

SEQ ID NO: 216140 - DNA, 13 bp, Artificial Sequence
  Oligonucleotide for detection of SNP TSC0052565
rataccactatca

SEQ ID NO: 216141 - DNA, 13 bp, Artificial Sequence
  Oligonucleotide for detection of SNP TSC0052565
tgatagaggtaty

SEQ ID NO: 216142 - DNA, 13 bp, Artificial Sequence
  Oligonucleotide for detection of SNP TSC0052565
ratacctctatca

SEQ ID NO: 216143 - DNA, 13 bp, Artificial Sequence
  Oligonucleotide for detection of SNP TSC0052566
ttttatatggtgg

SEQ ID NO: 216144 - DNA, 13 bp, Artificial Sequence
  Oligonucleotide for detection of SNP TSC0052566
ccaccatataaaa

SEQ ID NO: 216145 - DNA, 13 bp, Artificial Sequence
  Oligonucleotide for detection of SNP TSC0052566
ttttatttggtgg

SEQ ID NO: 216146 - DNA, 13 bp, Artificial Sequence
  Oligonucleotide for detection of SNP TSC0052566
ccaccaaataaaa

SEQ ID NO: 216147 - DNA, 13 bp, Artificial Sequence
  Oligonucleotide for detection of SNP TSC0052566
ttttatacggtgg

SEQ ID NO: 216148 - DNA, 13 bp, Artificial Sequence
  Oligonucleotide for detection of SNP TSC0052566
ccaccgtataaaa

SEQ ID NO: 216149 - DNA, 13 bp, Artificial Sequence
  Oligonucleotide for detection of SNP TSC0052566
ttttattcggtgg

SEQ ID NO: 216150 - DNA, 13 bp, Artificial Sequence
  Oligonucleotide for detection of SNP TSC0052566
ccaccgaataaaa

SEQ ID NO: 216151 - DNA, 13 bp, Artificial Sequence
  Oligonucleotide for detection of SNP TSC0052566
ttattgtgtaaag

SEQ ID NO: 216152 - DNA, 13 bp, Artificial Sequence
  Oligonucleotide for detection of SNP TSC0052566
ctttacacaataa

SEQ ID NO: 216153 - DNA, 13 bp, Artificial Sequence
  Oligonucleotide for detection of SNP TSC0052566
ttattgagtaaag

SEQ ID NO: 216154 - DNA, 13 bp, Artificial Sequence
  Oligonucleotide for detection of SNP TSC0052566
ctttactcaataa

SEQ ID NO: 216155 - DNA, 13 bp, Artificial Sequence
  Oligonucleotide for detection of SNP TSC0052566
ttatcgtgtaaag

SEQ ID NO: 216156 - DNA, 13 bp, Artificial Sequence
  Oligonucleotide for detection of SNP TSC0052566
ctttacacgataa

SEQ ID NO: 216157 - DNA, 13 bp, Artificial Sequence
  Oligonucleotide for detection of SNP TSC0052566
ttatcgagtaaag

SEQ ID NO: 216158 - DNA, 13 bp, Artificial Sequence
  Oligonucleotide for detection of SNP TSC0052566
ctttactcgataa

SEQ ID NO: 216159 - DNA, 13 bp, Artificial Sequence
  Oligonucleotide for detection of SNP TSC0052568
tttttggataagg

SEQ ID NO: 216160 - DNA, 13 bp, Artificial Sequence
  Oligonucleotide for detection of SNP TSC0052568
ccttatccaaaaa

SEQ ID NO: 216161 - DNA, 13 bp, Artificial Sequence
  Oligonucleotide for detection of SNP TSC0052570
tttatagttatag

SEQ ID NO: 216162 - DNA, 13 bp, Artificial Sequence
  Oligonucleotide for detection of SNP TSC0052570
ctataactataaa

SEQ ID NO: 216163 - DNA, 13 bp, Artificial Sequence
  Oligonucleotide for detection of SNP TSC0052570
tttataattatag

SEQ ID NO: 216164 - DNA, 13 bp, Artificial Sequence
  Oligonucleotide for detection of SNP TSC0052570
ctataattataaa

SEQ ID NO: 216165 - DNA, 13 bp, Artificial Sequence
  Oligonucleotide for detection of SNP TSC0052571
agttatggtagta

SEQ ID NO: 216166 - DNA, 13 bp, Artificial Sequence
  Oligonucleotide for detection of SNP TSC0052571
tactaccataact

SEQ ID NO: 216167 - DNA, 13 bp, Artificial Sequence
  Oligonucleotide for detection of SNP TSC0052571
agttatagtagta

SEQ ID NO: 216168 - DNA, 13 bp, Artificial Sequence
  Oligonucleotide for detection of SNP TSC0052571
tactactataact

SEQ ID NO: 216169 - DNA, 13 bp, Artificial Sequence
  Oligonucleotide for detection of SNP TSC0052572
tgagattgagttt

SEQ ID NO: 216170 - DNA, 13 bp, Artificial Sequence
  Oligonucleotide for detection of SNP TSC0052572
aaactcaatctca

SEQ ID NO: 216171 - DNA, 13 bp, Artificial Sequence
  Oligonucleotide for detection of SNP TSC0052572
agatttagtttta

SEQ ID NO: 216172 - DNA, 13 bp, Artificial Sequence
  Oligonucleotide for detection of SNP TSC0052572
taaaactaaatct

SEQ ID NO: 216173 - DNA, 13 bp, Artificial Sequence
  Oligonucleotide for detection of SNP TSC0052573
taaatttattttg

SEQ ID NO: 216174 - DNA, 13 bp, Artificial Sequence
  Oligonucleotide for detection of SNP TSC0052573
caaaataaattta

SEQ ID NO: 216175 - DNA, 13 bp, Artificial Sequence
  Oligonucleotide for detection of SNP TSC0052573
taaattgattttg

SEQ ID NO: 216176 - DNA, 13 bp, Artificial Sequence
  Oligonucleotide for detection of SNP TSC0052573
caaaatcaattta

SEQ ID NO: 216177 - DNA, 13 bp, Artificial Sequence
  Oligonucleotide for detection of SNP TSC0052573
taaagtgaatttg

SEQ ID NO: 216178 - DNA, 13 bp, Artificial Sequence
  Oligonucleotide for detection of SNP TSC0052573
caaattcacttta

SEQ ID NO: 216179 - DNA, 13 bp, Artificial Sequence
  Oligonucleotide for detection of SNP TSC0052573
taaagttaatttg

SEQ ID NO: 216180 - DNA, 13 bp, Artificial Sequence
  Oligonucleotide for detection of SNP TSC0052573
caaattaacttta

SEQ ID NO: 216181 - DNA, 13 bp, Artificial Sequence
  Oligonucleotide for detection of SNP TSC0052574
gaataatgattty

SEQ ID NO: 216182 - DNA, 13 bp, Artificial Sequence
  Oligonucleotide for detection of SNP TSC0052574
raaatcattattc

SEQ ID NO: 216183 - DNA, 13 bp, Artificial Sequence
  Oligonucleotide for detection of SNP TSC0052574
gaataacgattty

SEQ ID NO: 216184 - DNA, 13 bp, Artificial Sequence
  Oligonucleotide for detection of SNP TSC0052574
raaatcgttattc

SEQ ID NO: 216185 - DNA, 13 bp, Artificial Sequence
  Oligonucleotide for detection of SNP TSC0052574
gggattgttatty

SEQ ID NO: 216186 - DNA, 13 bp, Artificial Sequence
  Oligonucleotide for detection of SNP TSC0052574
raataacaatccc

SEQ ID NO: 216187 - DNA, 13 bp, Artificial Sequence
  Oligonucleotide for detection of SNP TSC0052574
gggattattatty

SEQ ID NO: 216188 - DNA, 13 bp, Artificial Sequence
  Oligonucleotide for detection of SNP TSC0052574
raataataatccc

SEQ ID NO: 216189 - DNA, 13 bp, Artificial Sequence
  Oligonucleotide for detection of SNP TSC0052574
gggatcgttatty

SEQ ID NO: 216190 - DNA, 13 bp, Artificial Sequence
  Oligonucleotide for detection of SNP TSC0052574
raataacgatccc

SEQ ID NO: 216191 - DNA, 13 bp, Artificial Sequence
  Oligonucleotide for detection of SNP TSC0052576
agatttgtgttty

SEQ ID NO: 216192 - DNA, 13 bp, Artificial Sequence
  Oligonucleotide for detection of SNP TSC0052576
raaacacaaatct

SEQ ID NO: 216193 - DNA, 13 bp, Artificial Sequence
  Oligonucleotide for detection of SNP TSC0052576
agatttatgttty

SEQ ID NO: 216194 - DNA, 13 bp, Artificial Sequence
  Oligonucleotide for detection of SNP TSC0052576
raaacataaatct

SEQ ID NO: 216195 - DNA, 13 bp, Artificial Sequence
  Oligonucleotide for detection of SNP TSC0052577
aaaatagaaagaa

SEQ ID NO: 216196 - DNA, 13 bp, Artificial Sequence
  Oligonucleotide for detection of SNP TSC0052577
ttctttctatttt

SEQ ID NO: 216197 - DNA, 13 bp, Artificial Sequence
  Oligonucleotide for detection of SNP TSC0052577
aaaataaaaagaa

SEQ ID NO: 216198 - DNA, 13 bp, Artificial Sequence
  Oligonucleotide for detection of SNP TSC0052577
ttctttttatttt

SEQ ID NO: 216199 - DNA, 13 bp, Artificial Sequence
  Oligonucleotide for detection of SNP TSC0052578
gtgagttgggaty

SEQ ID NO: 216200 - DNA, 13 bp, Artificial Sequence
  Oligonucleotide for detection of SNP TSC0052578
ratcccaactcac

SEQ ID NO: 216201 - DNA, 13 bp, Artificial Sequence
  Oligonucleotide for detection of SNP TSC0052578
gtgagtcgggaty

SEQ ID NO: 216202 - DNA, 13 bp, Artificial Sequence
  Oligonucleotide for detection of SNP TSC0052578
ratcccgactcac

SEQ ID NO: 216203 - DNA, 13 bp, Artificial Sequence
  Oligonucleotide for detection of SNP TSC0007331
aatatagatatty

SEQ ID NO: 216204 - DNA, 13 bp, Artificial Sequence
  Oligonucleotide for detection of SNP TSC0007331
raatatctatatt

SEQ ID NO: 216205 - DNA, 13 bp, Artificial Sequence
  Oligonucleotide for detection of SNP TSC0007331
aatataaatatty

SEQ ID NO: 216206 - DNA, 13 bp, Artificial Sequence
  Oligonucleotide for detection of SNP TSC0007331
raatatttatatt

SEQ ID NO: 216207 - DNA, 13 bp, Artificial Sequence
  Oligonucleotide for detection of SNP TSC0007332
tagaatgattgtt

SEQ ID NO: 216208 - DNA, 13 bp, Artificial Sequence
  Oligonucleotide for detection of SNP TSC0007332
aacaatcattcta

SEQ ID NO: 216209 - DNA, 13 bp, Artificial Sequence
  Oligonucleotide for detection of SNP TSC0007332
tagaataattgtt

SEQ ID NO: 216210 - DNA, 13 bp, Artificial Sequence
  Oligonucleotide for detection of SNP TSC0007332
aacaattattcta

SEQ ID NO: 216211 - DNA, 13 bp, Artificial Sequence
  Oligonucleotide for detection of SNP TSC0052582
atgtgatggttaa

SEQ ID NO: 216212 - DNA, 13 bp, Artificial Sequence
  Oligonucleotide for detection of SNP TSC0052582
ttaaccatcacat

SEQ ID NO: 216213 - DNA, 13 bp, Artificial Sequence
  Oligonucleotide for detection of SNP TSC0052582
atgtgacggttaa

SEQ ID NO: 216214 - DNA, 13 bp, Artificial Sequence
  Oligonucleotide for detection of SNP TSC0052582
ttaaccgtcacat

SEQ ID NO: 216215 - DNA, 13 bp, Artificial Sequence
  Oligonucleotide for detection of SNP TSC0052582
ttgattgttatat

SEQ ID NO: 216216 - DNA, 13 bp, Artificial Sequence
  Oligonucleotide for detection of SNP TSC0052582
atataacaatcaa

SEQ ID NO: 216217 - DNA, 13 bp, Artificial Sequence
  Oligonucleotide for detection of SNP TSC0052582
ttgattattatat

SEQ ID NO: 216218 - DNA, 13 bp, Artificial Sequence
  Oligonucleotide for detection of SNP TSC0052582
atataataatcaa

SEQ ID NO: 216219 - DNA, 13 bp, Artificial Sequence
  Oligonucleotide for detection of SNP TSC0052582
ttgatcgttatat

SEQ ID NO: 216220 - DNA, 13 bp, Artificial Sequence
  Oligonucleotide for detection of SNP TSC0052582
atataacgatcaa

SEQ ID NO: 216221 - DNA, 13 bp, Artificial Sequence
  Oligonucleotide for detection of SNP TSC0052583
gtttaaattgtat

SEQ ID NO: 216222 - DNA, 13 bp, Artificial Sequence
  Oligonucleotide for detection of SNP TSC0052583
atacaatttaaac

SEQ ID NO: 216223 - DNA, 13 bp, Artificial Sequence
  Oligonucleotide for detection of SNP TSC0052583
gtttaagttgtat

SEQ ID NO: 216224 - DNA, 13 bp, Artificial Sequence
  Oligonucleotide for detection of SNP TSC0052583
atacaacttaaac

SEQ ID NO: 216225 - DNA, 13 bp, Artificial Sequence
  Oligonucleotide for detection of SNP TSC0052584
tttattatgtaat

SEQ ID NO: 216226 - DNA, 13 bp, Artificial Sequence
  Oligonucleotide for detection of SNP TSC0052584
attacataataaa

SEQ ID NO: 216227 - DNA, 13 bp, Artificial Sequence
  Oligonucleotide for detection of SNP TSC0052584
tttattgtgtaat

SEQ ID NO: 216228 - DNA, 13 bp, Artificial Sequence
  Oligonucleotide for detection of SNP TSC0052584
attacacaataaa

SEQ ID NO: 216229 - DNA, 13 bp, Artificial Sequence
  Oligonucleotide for detection of SNP TSC0052585
tatttaataaggt

SEQ ID NO: 216230 - DNA, 13 bp, Artificial Sequence
  Oligonucleotide for detection of SNP TSC0052585
accttattaaata

SEQ ID NO: 216231 - DNA, 13 bp, Artificial Sequence
  Oligonucleotide for detection of SNP TSC0052585
tatttagtaaggt

SEQ ID NO: 216232 - DNA, 13 bp, Artificial Sequence
  Oligonucleotide for detection of SNP TSC0052585
accttactaaata

SEQ ID NO: 216233 - DNA, 13 bp, Artificial Sequence
  Oligonucleotide for detection of SNP TSC0052586
aaattggtaatga

SEQ ID NO: 216234 - DNA, 13 bp, Artificial Sequence
  Oligonucleotide for detection of SNP TSC0052586
tcattaccaattt

SEQ ID NO: 216235 - DNA, 13 bp, Artificial Sequence
  Oligonucleotide for detection of SNP TSC0052586
aaattgataatga

SEQ ID NO: 216236 - DNA, 13 bp, Artificial Sequence
  Oligonucleotide for detection of SNP TSC0052586
tcattatcaattt

SEQ ID NO: 216237 - DNA, 13 bp, Artificial Sequence
  Oligonucleotide for detection of SNP TSC0052593
ataataaattaga

SEQ ID NO: 216238 - DNA, 13 bp, Artificial Sequence
  Oligonucleotide for detection of SNP TSC0052593
tctaatttattat

SEQ ID NO: 216239 - DNA, 13 bp, Artificial Sequence
  Oligonucleotide for detection of SNP TSC0052593
ataatagattaga

SEQ ID NO: 216240 - DNA, 13 bp, Artificial Sequence
  Oligonucleotide for detection of SNP TSC0052593
tctaatctattat

SEQ ID NO: 216241 - DNA, 13 bp, Artificial Sequence
  Oligonucleotide for detection of SNP TSC0052598
tggtatatagtgy

SEQ ID NO: 216242 - DNA, 13 bp, Artificial Sequence
  Oligonucleotide for detection of SNP TSC0052598
rcactatatacca

SEQ ID NO: 216243 - DNA, 13 bp, Artificial Sequence
  Oligonucleotide for detection of SNP TSC0052598
tggtatgtagtgy

SEQ ID NO: 216244 - DNA, 13 bp, Artificial Sequence
  Oligonucleotide for detection of SNP TSC0052598
rcactacatacca

SEQ ID NO: 216245 - DNA, 13 bp, Artificial Sequence
  Oligonucleotide for detection of SNP TSC0052598
tggtacgtagtgy

SEQ ID NO: 216246 - DNA, 13 bp, Artificial Sequence
  Oligonucleotide for detection of SNP TSC0052598
rcactacgtacca

SEQ ID NO: 216247 - DNA, 13 bp, Artificial Sequence
  Oligonucleotide for detection of SNP TSC0052598
gtattgtgtgtta

SEQ ID NO: 216248 - DNA, 13 bp, Artificial Sequence
  Oligonucleotide for detection of SNP TSC0052598
taacacacaatac

SEQ ID NO: 216249 - DNA, 13 bp, Artificial Sequence
  Oligonucleotide for detection of SNP TSC0052598
gtattgcgtgtta

SEQ ID NO: 216250 - DNA, 13 bp, Artificial Sequence
  Oligonucleotide for detection of SNP TSC0052598
taacacgcaatac

SEQ ID NO: 216251 - DNA, 13 bp, Artificial Sequence
  Oligonucleotide for detection of SNP TSC0052599
gttttagtaaaaa

SEQ ID NO: 216252 - DNA, 13 bp, Artificial Sequence
  Oligonucleotide for detection of SNP TSC0052599
tttttactaaaac

SEQ ID NO: 216253 - DNA, 13 bp, Artificial Sequence
  Oligonucleotide for detection of SNP TSC0052599
tttttgatggaay

SEQ ID NO: 216254 - DNA, 13 bp, Artificial Sequence
  Oligonucleotide for detection of SNP TSC0052599
rttccatcaaaaa

SEQ ID NO: 216255 - DNA, 13 bp, Artificial Sequence
  Oligonucleotide for detection of SNP TSC0052599
tttttgttggaay

SEQ ID NO: 216256 - DNA, 13 bp, Artificial Sequence
  Oligonucleotide for detection of SNP TSC0052599
rttccaacaaaaa

SEQ ID NO: 216257 - DNA, 13 bp, Artificial Sequence
  Oligonucleotide for detection of SNP TSC0052600
ttgattttatttt

SEQ ID NO: 216258 - DNA, 13 bp, Artificial Sequence
  Oligonucleotide for detection of SNP TSC0052600
aaaataaaatcaa

SEQ ID NO: 216259 - DNA, 13 bp, Artificial Sequence
  Oligonucleotide for detection of SNP TSC0052601
gtagagattttta

SEQ ID NO: 216260 - DNA, 13 bp, Artificial Sequence
  Oligonucleotide for detection of SNP TSC0052601
taaaaatctctac

SEQ ID NO: 216261 - DNA, 13 bp, Artificial Sequence
  Oligonucleotide for detection of SNP TSC0052601
gtagagtttttta

SEQ ID NO: 216262 - DNA, 13 bp, Artificial Sequence
  Oligonucleotide for detection of SNP TSC0052601
taaaaaactctac

SEQ ID NO: 216263 - DNA, 13 bp, Artificial Sequence
  Oligonucleotide for detection of SNP TSC0052601
tgaaagtttttgy

SEQ ID NO: 216264 - DNA, 13 bp, Artificial Sequence
  Oligonucleotide for detection of SNP TSC0052601
rcaaaaactttca

SEQ ID NO: 216265 - DNA, 13 bp, Artificial Sequence
  Oligonucleotide for detection of SNP TSC0052601
tgaaaggttttgy

SEQ ID NO: 216266 - DNA, 13 bp, Artificial Sequence
  Oligonucleotide for detection of SNP TSC0052601
rcaaaacctttca

SEQ ID NO: 216267 - DNA, 13 bp, Artificial Sequence
  Oligonucleotide for detection of SNP TSC0052602
gggtttagtggtt

SEQ ID NO: 216268 - DNA, 13 bp, Artificial Sequence
  Oligonucleotide for detection of SNP TSC0052602
aaccactaaaccc

SEQ ID NO: 216269 - DNA, 13 bp, Artificial Sequence
  Oligonucleotide for detection of SNP TSC0052602
gggtttggtggtt

SEQ ID NO: 216270 - DNA, 13 bp, Artificial Sequence
  Oligonucleotide for detection of SNP TSC0052602
aaccaccaaaccc

SEQ ID NO: 216271 - DNA, 13 bp, Artificial Sequence
  Oligonucleotide for detection of SNP TSC0052602
gggttcggtggtt

SEQ ID NO: 216272 - DNA, 13 bp, Artificial Sequence
  Oligonucleotide for detection of SNP TSC0052602
aaccaccgaaccc

SEQ ID NO: 216273 - DNA, 13 bp, Artificial Sequence
  Oligonucleotide for detection of SNP TSC0052603
gagttaaaagtty

SEQ ID NO: 216274 - DNA, 13 bp, Artificial Sequence
  Oligonucleotide for detection of SNP TSC0052603
raacttttaactc

SEQ ID NO: 216275 - DNA, 13 bp, Artificial Sequence
  Oligonucleotide for detection of SNP TSC0052603
gagttagaagtty

SEQ ID NO: 216276 - DNA, 13 bp, Artificial Sequence
  Oligonucleotide for detection of SNP TSC0052603
raacttctaactc

SEQ ID NO: 216277 - DNA, 13 bp, Artificial Sequence
  Oligonucleotide for detection of SNP TSC0052604
aaaattattaaat

SEQ ID NO: 216278 - DNA, 13 bp, Artificial Sequence
  Oligonucleotide for detection of SNP TSC0052604
atttaataatttt

SEQ ID NO: 216279 - DNA, 13 bp, Artificial Sequence
  Oligonucleotide for detection of SNP TSC0052604
aaaattgttaaat

SEQ ID NO: 216280 - DNA, 13 bp, Artificial Sequence
  Oligonucleotide for detection of SNP TSC0052604
atttaacaatttt

SEQ ID NO: 216281 - DNA, 13 bp, Artificial Sequence
  Oligonucleotide for detection of SNP TSC0052604
atttgatggtttt

SEQ ID NO: 216282 - DNA, 13 bp, Artificial Sequence
  Oligonucleotide for detection of SNP TSC0052604
aaaaccatcaaat

SEQ ID NO: 216283 - DNA, 13 bp, Artificial Sequence
  Oligonucleotide for detection of SNP TSC0052604
atttgacggtttt

SEQ ID NO: 216284 - DNA, 13 bp, Artificial Sequence
  Oligonucleotide for detection of SNP TSC0052604
aaaaccgtcaaat

SEQ ID NO: 216285 - DNA, 13 bp, Artificial Sequence
  Oligonucleotide for detection of SNP TSC0052605
tagagtataattt

SEQ ID NO: 216286 - DNA, 13 bp, Artificial Sequence
  Oligonucleotide for detection of SNP TSC0052605
aaattatactcta

SEQ ID NO: 216287 - DNA, 13 bp, Artificial Sequence
  Oligonucleotide for detection of SNP TSC0052605
tagagtgtaattt

SEQ ID NO: 216288 - DNA, 13 bp, Artificial Sequence
  Oligonucleotide for detection of SNP TSC0052605
aaattacactcta

SEQ ID NO: 216289 - DNA, 13 bp, Artificial Sequence
  Oligonucleotide for detection of SNP TSC0052606
tttttaagggtty

SEQ ID NO: 216290 - DNA, 13 bp, Artificial Sequence
  Oligonucleotide for detection of SNP TSC0052606
raacccttaaaaa

SEQ ID NO: 216291 - DNA, 13 bp, Artificial Sequence
  Oligonucleotide for detection of SNP TSC0052607
ttattagaatatg

SEQ ID NO: 216292 - DNA, 13 bp, Artificial Sequence
  Oligonucleotide for detection of SNP TSC0052607
catattctaataa

SEQ ID NO: 216293 - DNA, 13 bp, Artificial Sequence
  Oligonucleotide for detection of SNP TSC0052607
ttattaaaatatg

SEQ ID NO: 216294 - DNA, 13 bp, Artificial Sequence
  Oligonucleotide for detection of SNP TSC0052607
catattttaataa

SEQ ID NO: 216295 - DNA, 13 bp, Artificial Sequence
  Oligonucleotide for detection of SNP TSC0008844
aatatatgggaat

SEQ ID NO: 216296 - DNA, 13 bp, Artificial Sequence
  Oligonucleotide for detection of SNP TSC0008844
attcccatatatt

SEQ ID NO: 216297 - DNA, 13 bp, Artificial Sequence
  Oligonucleotide for detection of SNP TSC0008844
aatatacgggaat

SEQ ID NO: 216298 - DNA, 13 bp, Artificial Sequence
  Oligonucleotide for detection of SNP TSC0008844
attcccgtatatt

SEQ ID NO: 216299 - DNA, 13 bp, Artificial Sequence
  Oligonucleotide for detection of SNP TSC0008844
atttttgtgtgtt

SEQ ID NO: 216300 - DNA, 13 bp, Artificial Sequence
  Oligonucleotide for detection of SNP TSC0008844
aacacacaaaaat

SEQ ID NO: 216301 - DNA, 13 bp, Artificial Sequence
  Oligonucleotide for detection of SNP TSC0008844
atttttatgtgtt

SEQ ID NO: 216302 - DNA, 13 bp, Artificial Sequence
  Oligonucleotide for detection of SNP TSC0008844
aacacataaaaat

SEQ ID NO: 216303 - DNA, 13 bp, Artificial Sequence
  Oligonucleotide for detection of SNP TSC0008844
attttcgtgtgtt

SEQ ID NO: 216304 - DNA, 13 bp, Artificial Sequence
  Oligonucleotide for detection of SNP TSC0008844
aacacacgaaaat

SEQ ID NO: 216305 - DNA, 13 bp, Artificial Sequence
  Oligonucleotide for detection of SNP TSC0052609
tgtattgtagaay

SEQ ID NO: 216306 - DNA, 13 bp, Artificial Sequence
  Oligonucleotide for detection of SNP TSC0052609
rttctacaataca

SEQ ID NO: 216307 - DNA, 13 bp, Artificial Sequence
  Oligonucleotide for detection of SNP TSC0052609
tgtattatagaay

SEQ ID NO: 216308 - DNA, 13 bp, Artificial Sequence
  Oligonucleotide for detection of SNP TSC0052609
rttctataataca

SEQ ID NO: 216309 - DNA, 13 bp, Artificial Sequence
  Oligonucleotide for detection of SNP TSC0010529
tttttttggtaaa

SEQ ID NO: 216310 - DNA, 13 bp, Artificial Sequence
  Oligonucleotide for detection of SNP TSC0010529
tttaccaaaaaaa

SEQ ID NO: 216311 - DNA, 13 bp, Artificial Sequence
  Oligonucleotide for detection of SNP TSC0010529
ttttttcggtaaa

SEQ ID NO: 216312 - DNA, 13 bp, Artificial Sequence
  Oligonucleotide for detection of SNP TSC0010529
tttaccgaaaaaa

SEQ ID NO: 216313 - DNA, 13 bp, Artificial Sequence
  Oligonucleotide for detection of SNP TSC0052611
agagtgaaaatay

SEQ ID NO: 216314 - DNA, 13 bp, Artificial Sequence
  Oligonucleotide for detection of SNP TSC0052611
rtattttcactct

SEQ ID NO: 216315 - DNA, 13 bp, Artificial Sequence
  Oligonucleotide for detection of SNP TSC0052611
agagtggaaatay

SEQ ID NO: 216316 - DNA, 13 bp, Artificial Sequence
  Oligonucleotide for detection of SNP TSC0052611
rtatttccactct

SEQ ID NO: 216317 - DNA, 13 bp, Artificial Sequence
  Oligonucleotide for detection of SNP TSC0052613
aaagtgatgagat

SEQ ID NO: 216318 - DNA, 13 bp, Artificial Sequence
  Oligonucleotide for detection of SNP TSC0052613
atctcatcacttt

SEQ ID NO: 216319 - DNA, 13 bp, Artificial Sequence
  Oligonucleotide for detection of SNP TSC0052613
aaagtgttgagat

SEQ ID NO: 216320 - DNA, 13 bp, Artificial Sequence
  Oligonucleotide for detection of SNP TSC0052613
atctcaacacttt

SEQ ID NO: 216321 - DNA, 13 bp, Artificial Sequence
  Oligonucleotide for detection of SNP TSC0052614
ttgtaaaaataat

SEQ ID NO: 216322 - DNA, 13 bp, Artificial Sequence
  Oligonucleotide for detection of SNP TSC0052614
attatttttacaa

SEQ ID NO: 216323 - DNA, 13 bp, Artificial Sequence
  Oligonucleotide for detection of SNP TSC0052614
ttgtaataataat

SEQ ID NO: 216324 - DNA, 13 bp, Artificial Sequence
  Oligonucleotide for detection of SNP TSC0052614
attattattacaa

SEQ ID NO: 216325 - DNA, 13 bp, Artificial Sequence
  Oligonucleotide for detection of SNP TSC0052614
attatttttataa

SEQ ID NO: 216326 - DNA, 13 bp, Artificial Sequence
  Oligonucleotide for detection of SNP TSC0052614
ttataaaaataat

SEQ ID NO: 216327 - DNA, 13 bp, Artificial Sequence
  Oligonucleotide for detection of SNP TSC0052614
attattattataa

SEQ ID NO: 216328 - DNA, 13 bp, Artificial Sequence
  Oligonucleotide for detection of SNP TSC0052614
ttataataataat

SEQ ID NO: 216329 - DNA, 13 bp, Artificial Sequence
  Oligonucleotide for detection of SNP TSC0052615
tatgttgtttaag

SEQ ID NO: 216330 - DNA, 13 bp, Artificial Sequence
  Oligonucleotide for detection of SNP TSC0052615
cttaaacaacata

SEQ ID NO: 216331 - DNA, 13 bp, Artificial Sequence
  Oligonucleotide for detection of SNP TSC0052615
tatgttatttaag

SEQ ID NO: 216332 - DNA, 13 bp, Artificial Sequence
  Oligonucleotide for detection of SNP TSC0052615
cttaaataacata

SEQ ID NO: 216333 - DNA, 13 bp, Artificial Sequence
  Oligonucleotide for detection of SNP TSC0052616
atgagaggtatgg

SEQ ID NO: 216334 - DNA, 13 bp, Artificial Sequence
  Oligonucleotide for detection of SNP TSC0052616
ccatacctctcat

SEQ ID NO: 216335 - DNA, 13 bp, Artificial Sequence
  Oligonucleotide for detection of SNP TSC0052616
atgagatgtatgg

SEQ ID NO: 216336 - DNA, 13 bp, Artificial Sequence
  Oligonucleotide for detection of SNP TSC0052616
ccatacatctcat

SEQ ID NO: 216337 - DNA, 13 bp, Artificial Sequence
  Oligonucleotide for detection of SNP TSC0052616
atgagacgtatgg

SEQ ID NO: 216338 - DNA, 13 bp, Artificial Sequence
  Oligonucleotide for detection of SNP TSC0052616
ccatacgtctcat

SEQ ID NO: 216339 - DNA, 13 bp, Artificial Sequence
  Oligonucleotide for detection of SNP TSC0052617
gtaggatgattay

SEQ ID NO: 216340 - DNA, 13 bp, Artificial Sequence
  Oligonucleotide for detection of SNP TSC0052617
rtaatcatcctac

SEQ ID NO: 216341 - DNA, 13 bp, Artificial Sequence
  Oligonucleotide for detection of SNP TSC0052617
gtaggaggattay

SEQ ID NO: 216342 - DNA, 13 bp, Artificial Sequence
  Oligonucleotide for detection of SNP TSC0052617
rtaatcctcctac

SEQ ID NO: 216343 - DNA, 13 bp, Artificial Sequence
  Oligonucleotide for detection of SNP TSC0052617
gtaggacgattay

SEQ ID NO: 216344 - DNA, 13 bp, Artificial Sequence
  Oligonucleotide for detection of SNP TSC0052617
rtaatcgtcctac

SEQ ID NO: 216345 - DNA, 13 bp, Artificial Sequence
  Oligonucleotide for detection of SNP TSC0052617
gtaattgttttgy

SEQ ID NO: 216346 - DNA, 13 bp, Artificial Sequence
  Oligonucleotide for detection of SNP TSC0052617
rcaaaacaattac

SEQ ID NO: 216347 - DNA, 13 bp, Artificial Sequence
  Oligonucleotide for detection of SNP TSC0052617
gtaatttttttgy

SEQ ID NO: 216348 - DNA, 13 bp, Artificial Sequence
  Oligonucleotide for detection of SNP TSC0052617
rcaaaaaaattac

SEQ ID NO: 216349 - DNA, 13 bp, Artificial Sequence
  Oligonucleotide for detection of SNP TSC0052617
gtaatcgttttgy

SEQ ID NO: 216350 - DNA, 13 bp, Artificial Sequence
  Oligonucleotide for detection of SNP TSC0052617
rcaaaacgattac

SEQ ID NO: 216351 - DNA, 13 bp, Artificial Sequence
  Oligonucleotide for detection of SNP TSC0052618
gtttgattttatg

SEQ ID NO: 216352 - DNA, 13 bp, Artificial Sequence
  Oligonucleotide for detection of SNP TSC0052618
cataaaatcaaac

SEQ ID NO: 216353 - DNA, 13 bp, Artificial Sequence
  Oligonucleotide for detection of SNP TSC0052618
gtttgagtttatg

SEQ ID NO: 216354 - DNA, 13 bp, Artificial Sequence
  Oligonucleotide for detection of SNP TSC0052618
cataaactcaaac

SEQ ID NO: 216355 - DNA, 13 bp, Artificial Sequence
  Oligonucleotide for detection of SNP TSC0052618
tatgggattaggy

SEQ ID NO: 216356 - DNA, 13 bp, Artificial Sequence
  Oligonucleotide for detection of SNP TSC0052618
rcctaatcccata

SEQ ID NO: 216357 - DNA, 13 bp, Artificial Sequence
  Oligonucleotide for detection of SNP TSC0052618
tatgggtttaggy

SEQ ID NO: 216358 - DNA, 13 bp, Artificial Sequence
  Oligonucleotide for detection of SNP TSC0052618
rcctaaacccata

SEQ ID NO: 216359 - DNA, 13 bp, Artificial Sequence
  Oligonucleotide for detection of SNP TSC0052619
aaaataggtaggt

SEQ ID NO: 216360 - DNA, 13 bp, Artificial Sequence
  Oligonucleotide for detection of SNP TSC0052619
acctacctatttt

SEQ ID NO: 216361 - DNA, 13 bp, Artificial Sequence
  Oligonucleotide for detection of SNP TSC0052619
aaaataagtaggt

SEQ ID NO: 216362 - DNA, 13 bp, Artificial Sequence
  Oligonucleotide for detection of SNP TSC0052619
acctacttatttt

SEQ ID NO: 216363 - DNA, 13 bp, Artificial Sequence
  Oligonucleotide for detection of SNP TSC0052620
aatatataaattt

SEQ ID NO: 216364 - DNA, 13 bp, Artificial Sequence
  Oligonucleotide for detection of SNP TSC0052620
aaatttatatatt

SEQ ID NO: 216365 - DNA, 13 bp, Artificial Sequence
  Oligonucleotide for detection of SNP TSC0052620
aagtttgtgtatt

SEQ ID NO: 216366 - DNA, 13 bp, Artificial Sequence
  Oligonucleotide for detection of SNP TSC0052620
aatacacaaactt

SEQ ID NO: 216367 - DNA, 13 bp, Artificial Sequence
  Oligonucleotide for detection of SNP TSC0052620
aagtttttgtatt

SEQ ID NO: 216368 - DNA, 13 bp, Artificial Sequence
  Oligonucleotide for detection of SNP TSC0052620
aatacaaaaactt

SEQ ID NO: 216369 - DNA, 13 bp, Artificial Sequence
  Oligonucleotide for detection of SNP TSC0052622
aagataattttat

SEQ ID NO: 216370 - DNA, 13 bp, Artificial Sequence
  Oligonucleotide for detection of SNP TSC0052622
ataaaattatctt

SEQ ID NO: 216371 - DNA, 13 bp, Artificial Sequence
  Oligonucleotide for detection of SNP TSC0052622
aagatagttttat

SEQ ID NO: 216372 - DNA, 13 bp, Artificial Sequence
  Oligonucleotide for detection of SNP TSC0052622
ataaaactatctt

SEQ ID NO: 216373 - DNA, 13 bp, Artificial Sequence
  Oligonucleotide for detection of SNP TSC0052623
ttttatggagtty

SEQ ID NO: 216374 - DNA, 13 bp, Artificial Sequence
  Oligonucleotide for detection of SNP TSC0052623
raactccataaaa

SEQ ID NO: 216375 - DNA, 13 bp, Artificial Sequence
  Oligonucleotide for detection of SNP TSC0052623
ttttatagagtty

SEQ ID NO: 216376 - DNA, 13 bp, Artificial Sequence
  Oligonucleotide for detection of SNP TSC0052623
raactctataaaa

SEQ ID NO: 216377 - DNA, 13 bp, Artificial Sequence
  Oligonucleotide for detection of SNP TSC0052625
gaatttatagtgt

SEQ ID NO: 216378 - DNA, 13 bp, Artificial Sequence
  Oligonucleotide for detection of SNP TSC0052625
acactataaattc

SEQ ID NO: 216379 - DNA, 13 bp, Artificial Sequence
  Oligonucleotide for detection of SNP TSC0052625
gaatttgtagtgt

SEQ ID NO: 216380 - DNA, 13 bp, Artificial Sequence
  Oligonucleotide for detection of SNP TSC0052625
acactacaaattc

SEQ ID NO: 216381 - DNA, 13 bp, Artificial Sequence
  Oligonucleotide for detection of SNP TSC0052625
gaattcgtagtgt

SEQ ID NO: 216382 - DNA, 13 bp, Artificial Sequence
  Oligonucleotide for detection of SNP TSC0052625
acactacgaattc

SEQ ID NO: 216383 - DNA, 13 bp, Artificial Sequence
  Oligonucleotide for detection of SNP TSC0052627
taattgtgtttat

SEQ ID NO: 216384 - DNA, 13 bp, Artificial Sequence
  Oligonucleotide for detection of SNP TSC0052627
ataaacacaatta

SEQ ID NO: 216385 - DNA, 13 bp, Artificial Sequence
  Oligonucleotide for detection of SNP TSC0052627
taattgggtttat

SEQ ID NO: 216386 - DNA, 13 bp, Artificial Sequence
  Oligonucleotide for detection of SNP TSC0052627
ataaacccaatta

SEQ ID NO: 216387 - DNA, 13 bp, Artificial Sequence
  Oligonucleotide for detection of SNP TSC0052627
ataagtataattg

SEQ ID NO: 216388 - DNA, 13 bp, Artificial Sequence
  Oligonucleotide for detection of SNP TSC0052627
caattatacttat

SEQ ID NO: 216389 - DNA, 13 bp, Artificial Sequence
  Oligonucleotide for detection of SNP TSC0052627
ataagtttaattg

SEQ ID NO: 216390 - DNA, 13 bp, Artificial Sequence
  Oligonucleotide for detection of SNP TSC0052627
caattaaacttat

SEQ ID NO: 216391 - DNA, 13 bp, Artificial Sequence
  Oligonucleotide for detection of SNP TSC0010489
gaagttgggagag

SEQ ID NO: 216392 - DNA, 13 bp, Artificial Sequence
  Oligonucleotide for detection of SNP TSC0010489
ctctcccaacttc

SEQ ID NO: 216393 - DNA, 13 bp, Artificial Sequence
  Oligonucleotide for detection of SNP TSC0010489
gaagttaggagag

SEQ ID NO: 216394 - DNA, 13 bp, Artificial Sequence
  Oligonucleotide for detection of SNP TSC0010489
ctctcctaacttc

SEQ ID NO: 216395 - DNA, 13 bp, Artificial Sequence
  Oligonucleotide for detection of SNP TSC0010489
gaagtcgggagag

SEQ ID NO: 216396 - DNA, 13 bp, Artificial Sequence
  Oligonucleotide for detection of SNP TSC0010489
ctctcccgacttc

SEQ ID NO: 216397 - DNA, 13 bp, Artificial Sequence
  Oligonucleotide for detection of SNP TSC0008078
ttgggaaatagay

SEQ ID NO: 216398 - DNA, 13 bp, Artificial Sequence
  Oligonucleotide for detection of SNP TSC0008078
rtctatttcccaa

SEQ ID NO: 216399 - DNA, 13 bp, Artificial Sequence
  Oligonucleotide for detection of SNP TSC0008078
ttgggatatagay

SEQ ID NO: 216400 - DNA, 13 bp, Artificial Sequence
  Oligonucleotide for detection of SNP TSC0008078
rtctatatcccaa

SEQ ID NO: 216401 - DNA, 13 bp, Artificial Sequence
  Oligonucleotide for detection of SNP TSC0008078
gtttattttttag

SEQ ID NO: 216402 - DNA, 13 bp, Artificial Sequence
  Oligonucleotide for detection of SNP TSC0008078
ctaaaaaataaac

SEQ ID NO: 216403 - DNA, 13 bp, Artificial Sequence
  Oligonucleotide for detection of SNP TSC0052628
tgagttgagttgg

SEQ ID NO: 216404 - DNA, 13 bp, Artificial Sequence
  Oligonucleotide for detection of SNP TSC0052628
ccaactcaactca

SEQ ID NO: 216405 - DNA, 13 bp, Artificial Sequence
  Oligonucleotide for detection of SNP TSC0052628
tgagttaagttgg

SEQ ID NO: 216406 - DNA, 13 bp, Artificial Sequence
  Oligonucleotide for detection of SNP TSC0052628
ccaacttaactca

SEQ ID NO: 216407 - DNA, 13 bp, Artificial Sequence
  Oligonucleotide for detection of SNP TSC0052629
taggaagagggta

SEQ ID NO: 216408 - DNA, 13 bp, Artificial Sequence
  Oligonucleotide for detection of SNP TSC0052629
taccctcttccta

SEQ ID NO: 216409 - DNA, 13 bp, Artificial Sequence
  Oligonucleotide for detection of SNP TSC0052629
taggaaaagggta

SEQ ID NO: 216410 - DNA, 13 bp, Artificial Sequence
  Oligonucleotide for detection of SNP TSC0052629
tacccttttccta

SEQ ID NO: 216411 - DNA, 13 bp, Artificial Sequence
  Oligonucleotide for detection of SNP TSC0052630
attgtgattatty

SEQ ID NO: 216412 - DNA, 13 bp, Artificial Sequence
  Oligonucleotide for detection of SNP TSC0052630
raataatcacaat

SEQ ID NO: 216413 - DNA, 13 bp, Artificial Sequence
  Oligonucleotide for detection of SNP TSC0052630
attgtgtttatty

SEQ ID NO: 216414 - DNA, 13 bp, Artificial Sequence
  Oligonucleotide for detection of SNP TSC0052630
raataaacacaat

SEQ ID NO: 216415 - DNA, 13 bp, Artificial Sequence
  Oligonucleotide for detection of SNP TSC0052630
gaatagttatagt

SEQ ID NO: 216416 - DNA, 13 bp, Artificial Sequence
  Oligonucleotide for detection of SNP TSC0052630
actataactattc

SEQ ID NO: 216417 - DNA, 13 bp, Artificial Sequence
  Oligonucleotide for detection of SNP TSC0052630
gaatagatatagt

SEQ ID NO: 216418 - DNA, 13 bp, Artificial Sequence
  Oligonucleotide for detection of SNP TSC0052630
actatatctattc

SEQ ID NO: 216419 - DNA, 13 bp, Artificial Sequence
  Oligonucleotide for detection of SNP TSC0052631
tttaaagaaaaat

SEQ ID NO: 216420 - DNA, 13 bp, Artificial Sequence
  Oligonucleotide for detection of SNP TSC0052631
atttttctttaaa

SEQ ID NO: 216421 - DNA, 13 bp, Artificial Sequence
  Oligonucleotide for detection of SNP TSC0052633
aggaaatttggta

SEQ ID NO: 216422 - DNA, 13 bp, Artificial Sequence
  Oligonucleotide for detection of SNP TSC0052633
taccaaatttcct

SEQ ID NO: 216423 - DNA, 13 bp, Artificial Sequence
  Oligonucleotide for detection of SNP TSC0052633
aggaaagttggta

SEQ ID NO: 216424 - DNA, 13 bp, Artificial Sequence
  Oligonucleotide for detection of SNP TSC0052633
taccaactttcct

SEQ ID NO: 216425 - DNA, 13 bp, Artificial Sequence
  Oligonucleotide for detection of SNP TSC0052635
agtggaataagty

SEQ ID NO: 216426 - DNA, 13 bp, Artificial Sequence
  Oligonucleotide for detection of SNP TSC0052635
racttattccact

SEQ ID NO: 216427 - DNA, 13 bp, Artificial Sequence
  Oligonucleotide for detection of SNP TSC0052635
agtggagtaagty

SEQ ID NO: 216428 - DNA, 13 bp, Artificial Sequence
  Oligonucleotide for detection of SNP TSC0052635
racttactccact

SEQ ID NO: 216429 - DNA, 13 bp, Artificial Sequence
  Oligonucleotide for detection of SNP TSC0052637
tgagtataaataa

SEQ ID NO: 216430 - DNA, 13 bp, Artificial Sequence
  Oligonucleotide for detection of SNP TSC0052637
ttatttatactca

SEQ ID NO: 216431 - DNA, 13 bp, Artificial Sequence
  Oligonucleotide for detection of SNP TSC0052637
tgagtagaaataa

SEQ ID NO: 216432 - DNA, 13 bp, Artificial Sequence
  Oligonucleotide for detection of SNP TSC0052637
ttatttctactca

SEQ ID NO: 216433 - DNA, 13 bp, Artificial Sequence
  Oligonucleotide for detection of SNP TSC0052637
ttgtttgtgttta

SEQ ID NO: 216434 - DNA, 13 bp, Artificial Sequence
  Oligonucleotide for detection of SNP TSC0052637
taaacacaaacaa

SEQ ID NO: 216435 - DNA, 13 bp, Artificial Sequence
  Oligonucleotide for detection of SNP TSC0052637
ttgtttttgttta

SEQ ID NO: 216436 - DNA, 13 bp, Artificial Sequence
  Oligonucleotide for detection of SNP TSC0052637
taaacaaaaacaa

SEQ ID NO: 216437 - DNA, 13 bp, Artificial Sequence
  Oligonucleotide for detection of SNP TSC0052638
atggggtgtatgy

SEQ ID NO: 216438 - DNA, 13 bp, Artificial Sequence
  Oligonucleotide for detection of SNP TSC0052638
rcatacaccccat

SEQ ID NO: 216439 - DNA, 13 bp, Artificial Sequence
  Oligonucleotide for detection of SNP TSC0052638
acggggtgtatgy

SEQ ID NO: 216440 - DNA, 13 bp, Artificial Sequence
  Oligonucleotide for detection of SNP TSC0052638
rcatacaccccgt

SEQ ID NO: 216441 - DNA, 13 bp, Artificial Sequence
  Oligonucleotide for detection of SNP TSC0052638
atggggcgtatgy

SEQ ID NO: 216442 - DNA, 13 bp, Artificial Sequence
  Oligonucleotide for detection of SNP TSC0052638
rcatacgccccat

SEQ ID NO: 216443 - DNA, 13 bp, Artificial Sequence
  Oligonucleotide for detection of SNP TSC0052638
acggggcgtatgy

SEQ ID NO: 216444 - DNA, 13 bp, Artificial Sequence
  Oligonucleotide for detection of SNP TSC0052638
rcatacgccccgt

SEQ ID NO: 216445 - DNA, 13 bp, Artificial Sequence
  Oligonucleotide for detection of SNP TSC0052638
gtatatgttttgt

SEQ ID NO: 216446 - DNA, 13 bp, Artificial Sequence
  Oligonucleotide for detection of SNP TSC0052638
acaaaacatatac

SEQ ID NO: 216447 - DNA, 13 bp, Artificial Sequence
  Oligonucleotide for detection of SNP TSC0052638
gtatatattttgt

SEQ ID NO: 216448 - DNA, 13 bp, Artificial Sequence
  Oligonucleotide for detection of SNP TSC0052638
acaaaatatatac

SEQ ID NO: 216449 - DNA, 13 bp, Artificial Sequence
  Oligonucleotide for detection of SNP TSC0052638
gtatacgttttgt

SEQ ID NO: 216450 - DNA, 13 bp, Artificial Sequence
  Oligonucleotide for detection of SNP TSC0052638
acaaaacgtatac

SEQ ID NO: 216451 - DNA, 13 bp, Artificial Sequence
  Oligonucleotide for detection of SNP TSC0052638
gtatatatttcgt

SEQ ID NO: 216452 - DNA, 13 bp, Artificial Sequence
  Oligonucleotide for detection of SNP TSC0052638
acgaaatatatac

SEQ ID NO: 216453 - DNA, 13 bp, Artificial Sequence
  Oligonucleotide for detection of SNP TSC0052638
gtatatgtttcgt

SEQ ID NO: 216454 - DNA, 13 bp, Artificial Sequence
  Oligonucleotide for detection of SNP TSC0052638
acgaaacatatac

SEQ ID NO: 216455 - DNA, 13 bp, Artificial Sequence
  Oligonucleotide for detection of SNP TSC0052638
gtatacgtttcgt

SEQ ID NO: 216456 - DNA, 13 bp, Artificial Sequence
  Oligonucleotide for detection of SNP TSC0052638
acgaaacgtatac

SEQ ID NO: 216457 - DNA, 13 bp, Artificial Sequence
  Oligonucleotide for detection of SNP TSC0052639
attatggaaagag

SEQ ID NO: 216458 - DNA, 13 bp, Artificial Sequence
  Oligonucleotide for detection of SNP TSC0052639
ctctttccataat

SEQ ID NO: 216459 - DNA, 13 bp, Artificial Sequence
  Oligonucleotide for detection of SNP TSC0052639
attatgaaaagag

SEQ ID NO: 216460 - DNA, 13 bp, Artificial Sequence
  Oligonucleotide for detection of SNP TSC0052639
ctcttttcataat

SEQ ID NO: 216461 - DNA, 13 bp, Artificial Sequence
  Oligonucleotide for detection of SNP TSC0052640
taaagaattatag

SEQ ID NO: 216462 - DNA, 13 bp, Artificial Sequence
  Oligonucleotide for detection of SNP TSC0052640
ctataattcttta

SEQ ID NO: 216463 - DNA, 13 bp, Artificial Sequence
  Oligonucleotide for detection of SNP TSC0052640
taaagagttatag

SEQ ID NO: 216464 - DNA, 13 bp, Artificial Sequence
  Oligonucleotide for detection of SNP TSC0052640
ctataactcttta

SEQ ID NO: 216465 - DNA, 13 bp, Artificial Sequence
  Oligonucleotide for detection of SNP TSC0052641
gaataatttattt

SEQ ID NO: 216466 - DNA, 13 bp, Artificial Sequence
  Oligonucleotide for detection of SNP TSC0052641
aaataaattattc

SEQ ID NO: 216467 - DNA, 13 bp, Artificial Sequence
  Oligonucleotide for detection of SNP TSC0052641
gaataagttattt

SEQ ID NO: 216468 - DNA, 13 bp, Artificial Sequence
  Oligonucleotide for detection of SNP TSC0052641
aaataacttattc

SEQ ID NO: 216469 - DNA, 13 bp, Artificial Sequence
  Oligonucleotide for detection of SNP TSC0052641
aagtaaattatty

SEQ ID NO: 216470 - DNA, 13 bp, Artificial Sequence
  Oligonucleotide for detection of SNP TSC0052641
raataatttactt

SEQ ID NO: 216471 - DNA, 13 bp, Artificial Sequence
  Oligonucleotide for detection of SNP TSC0052641
aagtaatttatty

SEQ ID NO: 216472 - DNA, 13 bp, Artificial Sequence
  Oligonucleotide for detection of SNP TSC0052641
raataaattactt

SEQ ID NO: 216473 - DNA, 13 bp, Artificial Sequence
  Oligonucleotide for detection of SNP TSC0052642
aaaaaagaaaagt

SEQ ID NO: 216474 - DNA, 13 bp, Artificial Sequence
  Oligonucleotide for detection of SNP TSC0052642
acttttctttttt

SEQ ID NO: 216475 - DNA, 13 bp, Artificial Sequence
  Oligonucleotide for detection of SNP TSC0052642
aaaaaaaaaaagt

SEQ ID NO: 216476 - DNA, 13 bp, Artificial Sequence
  Oligonucleotide for detection of SNP TSC0052642
acttttttttttt

SEQ ID NO: 216477 - DNA, 13 bp, Artificial Sequence
  Oligonucleotide for detection of SNP TSC0052643
gatagtgaaaatg

SEQ ID NO: 216478 - DNA, 13 bp, Artificial Sequence
  Oligonucleotide for detection of SNP TSC0052643
cattttcactatc

SEQ ID NO: 216479 - DNA, 13 bp, Artificial Sequence
  Oligonucleotide for detection of SNP TSC0052643
gatagtaaaaatg

SEQ ID NO: 216480 - DNA, 13 bp, Artificial Sequence
  Oligonucleotide for detection of SNP TSC0052643
catttttactatc

SEQ ID NO: 216481 - DNA, 13 bp, Artificial Sequence
  Oligonucleotide for detection of SNP TSC0052644
ggagtgtttttta

SEQ ID NO: 216482 - DNA, 13 bp, Artificial Sequence
  Oligonucleotide for detection of SNP TSC0052644
taaaaaacactcc

SEQ ID NO: 216483 - DNA, 13 bp, Artificial Sequence
  Oligonucleotide for detection of SNP TSC0052644
ggagtggttttta

SEQ ID NO: 216484 - DNA, 13 bp, Artificial Sequence
  Oligonucleotide for detection of SNP TSC0052644
taaaaaccactcc

SEQ ID NO: 216485 - DNA, 13 bp, Artificial Sequence
  Oligonucleotide for detection of SNP TSC0052644
taaaaagtattty

SEQ ID NO: 216486 - DNA, 13 bp, Artificial Sequence
  Oligonucleotide for detection of SNP TSC0052644
raaatacttttta

SEQ ID NO: 216487 - DNA, 13 bp, Artificial Sequence
  Oligonucleotide for detection of SNP TSC0052644
taaaaattattty

SEQ ID NO: 216488 - DNA, 13 bp, Artificial Sequence
  Oligonucleotide for detection of SNP TSC0052644
raaataattttta

SEQ ID NO: 216489 - DNA, 13 bp, Artificial Sequence
  Oligonucleotide for detection of SNP TSC0052645
gtgaataattgtt

SEQ ID NO: 216490 - DNA, 13 bp, Artificial Sequence
  Oligonucleotide for detection of SNP TSC0052645
aacaattattcac

SEQ ID NO: 216491 - DNA, 13 bp, Artificial Sequence
  Oligonucleotide for detection of SNP TSC0052645
gtgaattattgtt

SEQ ID NO: 216492 - DNA, 13 bp, Artificial Sequence
  Oligonucleotide for detection of SNP TSC0052645
aacaataattcac

SEQ ID NO: 216493 - DNA, 13 bp, Artificial Sequence
  Oligonucleotide for detection of SNP TSC0052645
agtaattatttay

SEQ ID NO: 216494 - DNA, 13 bp, Artificial Sequence
  Oligonucleotide for detection of SNP TSC0052645
rtaaataattact

SEQ ID NO: 216495 - DNA, 13 bp, Artificial Sequence
  Oligonucleotide for detection of SNP TSC0052645
agtaataatttay

SEQ ID NO: 216496 - DNA, 13 bp, Artificial Sequence
  Oligonucleotide for detection of SNP TSC0052645
rtaaattattact

SEQ ID NO: 216497 - DNA, 13 bp, Artificial Sequence
  Oligonucleotide for detection of SNP TSC0008079
tttaatagaagtt

SEQ ID NO: 216498 - DNA, 13 bp, Artificial Sequence
  Oligonucleotide for detection of SNP TSC0008079
aacttctattaaa

SEQ ID NO: 216499 - DNA, 13 bp, Artificial Sequence
  Oligonucleotide for detection of SNP TSC0008079
tttaatggaagtt

SEQ ID NO: 216500 - DNA, 13 bp, Artificial Sequence
  Oligonucleotide for detection of SNP TSC0008079
aacttccattaaa

SEQ ID NO: 216501 - DNA, 13 bp, Artificial Sequence
  Oligonucleotide for detection of SNP TSC0052646
atgaagatttatt

SEQ ID NO: 216502 - DNA, 13 bp, Artificial Sequence
  Oligonucleotide for detection of SNP TSC0052646
aataaatcttcat

SEQ ID NO: 216503 - DNA, 13 bp, Artificial Sequence
  Oligonucleotide for detection of SNP TSC0052646
atgaagttttatt

SEQ ID NO: 216504 - DNA, 13 bp, Artificial Sequence
  Oligonucleotide for detection of SNP TSC0052646
aataaaacttcat

SEQ ID NO: 216505 - DNA, 13 bp, Artificial Sequence
  Oligonucleotide for detection of SNP TSC0052646
aataagtttttat

SEQ ID NO: 216506 - DNA, 13 bp, Artificial Sequence
  Oligonucleotide for detection of SNP TSC0052646
ataaaaacttatt

SEQ ID NO: 216507 - DNA, 13 bp, Artificial Sequence
  Oligonucleotide for detection of SNP TSC0052646
aataaggttttat

SEQ ID NO: 216508 - DNA, 13 bp, Artificial Sequence
  Oligonucleotide for detection of SNP TSC0052646
ataaaaccttatt

SEQ ID NO: 216509 - DNA, 13 bp, Artificial Sequence
  Oligonucleotide for detection of SNP TSC0052646
aataagattttat

SEQ ID NO: 216510 - DNA, 13 bp, Artificial Sequence
  Oligonucleotide for detection of SNP TSC0052646
ataaaatcttatt

SEQ ID NO: 216511 - DNA, 13 bp, Artificial Sequence
  Oligonucleotide for detection of SNP TSC0005625
gatagtaaaatag

SEQ ID NO: 216512 - DNA, 13 bp, Artificial Sequence
  Oligonucleotide for detection of SNP TSC0005625
ctattttactatc

SEQ ID NO: 216513 - DNA, 13 bp, Artificial Sequence
  Oligonucleotide for detection of SNP TSC0005625
gatagtgaaatag

SEQ ID NO: 216514 - DNA, 13 bp, Artificial Sequence
  Oligonucleotide for detection of SNP TSC0005625
ctatttcactatc

SEQ ID NO: 216515 - DNA, 13 bp, Artificial Sequence
  Oligonucleotide for detection of SNP TSC0005625
gatagcgaaatag

SEQ ID NO: 216516 - DNA, 13 bp, Artificial Sequence
  Oligonucleotide for detection of SNP TSC0005625
ctatttcgctatc

SEQ ID NO: 216517 - DNA, 13 bp, Artificial Sequence
  Oligonucleotide for detection of SNP TSC0005625
ttattttgttaty

SEQ ID NO: 216518 - DNA, 13 bp, Artificial Sequence
  Oligonucleotide for detection of SNP TSC0005625
rataacaaaataa

SEQ ID NO: 216519 - DNA, 13 bp, Artificial Sequence
  Oligonucleotide for detection of SNP TSC0005625
ttatttcgttaty

SEQ ID NO: 216520 - DNA, 13 bp, Artificial Sequence
  Oligonucleotide for detection of SNP TSC0005625
rataacgaaataa

SEQ ID NO: 216521 - DNA, 13 bp, Artificial Sequence
  Oligonucleotide for detection of SNP TSC0052647
attgagtggatty

SEQ ID NO: 216522 - DNA, 13 bp, Artificial Sequence
  Oligonucleotide for detection of SNP TSC0052647
raatccactcaat

SEQ ID NO: 216523 - DNA, 13 bp, Artificial Sequence
  Oligonucleotide for detection of SNP TSC0052647
attgaggggatty

SEQ ID NO: 216524 - DNA, 13 bp, Artificial Sequence
  Oligonucleotide for detection of SNP TSC0052647
raatcccctcaat

SEQ ID NO: 216525 - DNA, 13 bp, Artificial Sequence
  Oligonucleotide for detection of SNP TSC0052647
gaatttatttagt

SEQ ID NO: 216526 - DNA, 13 bp, Artificial Sequence
  Oligonucleotide for detection of SNP TSC0052647
actaaataaattc

SEQ ID NO: 216527 - DNA, 13 bp, Artificial Sequence
  Oligonucleotide for detection of SNP TSC0052647
gaatttttttagt

SEQ ID NO: 216528 - DNA, 13 bp, Artificial Sequence
  Oligonucleotide for detection of SNP TSC0052647
actaaaaaaattc

SEQ ID NO: 216529 - DNA, 13 bp, Artificial Sequence
  Oligonucleotide for detection of SNP TSC0052648
aaaatatgtttgg

SEQ ID NO: 216530 - DNA, 13 bp, Artificial Sequence
  Oligonucleotide for detection of SNP TSC0052648
ccaaacatatttt

SEQ ID NO: 216531 - DNA, 13 bp, Artificial Sequence
  Oligonucleotide for detection of SNP TSC0052648
aaaataggtttgg

SEQ ID NO: 216532 - DNA, 13 bp, Artificial Sequence
  Oligonucleotide for detection of SNP TSC0052648
ccaaacctatttt

SEQ ID NO: 216533 - DNA, 13 bp, Artificial Sequence
  Oligonucleotide for detection of SNP TSC0052648
aaaatacgtttgg

SEQ ID NO: 216534 - DNA, 13 bp, Artificial Sequence
  Oligonucleotide for detection of SNP TSC0052648
ccaaacgtatttt

SEQ ID NO: 216535 - DNA, 13 bp, Artificial Sequence
  Oligonucleotide for detection of SNP TSC0052648
ttaaatttatttt

SEQ ID NO: 216536 - DNA, 13 bp, Artificial Sequence
  Oligonucleotide for detection of SNP TSC0052648
aaaataaatttaa

SEQ ID NO: 216537 - DNA, 13 bp, Artificial Sequence
  Oligonucleotide for detection of SNP TSC0000370
agtatgatattgg

SEQ ID NO: 216538 - DNA, 13 bp, Artificial Sequence
  Oligonucleotide for detection of SNP TSC0000370
ccaatatcatact

SEQ ID NO: 216539 - DNA, 13 bp, Artificial Sequence
  Oligonucleotide for detection of SNP TSC0000370
agtatggtattgg

SEQ ID NO: 216540 - DNA, 13 bp, Artificial Sequence
  Oligonucleotide for detection of SNP TSC0000370
ccaataccatact

SEQ ID NO: 216541 - DNA, 13 bp, Artificial Sequence
  Oligonucleotide for detection of SNP TSC0052649
taattttggaatg

SEQ ID NO: 216542 - DNA, 13 bp, Artificial Sequence
  Oligonucleotide for detection of SNP TSC0052649
cattccaaaatta

SEQ ID NO: 216543 - DNA, 13 bp, Artificial Sequence
  Oligonucleotide for detection of SNP TSC0052649
taatttcggaatg

SEQ ID NO: 216544 - DNA, 13 bp, Artificial Sequence
  Oligonucleotide for detection of SNP TSC0052649
cattccgaaatta

SEQ ID NO: 216545 - DNA, 13 bp, Artificial Sequence
  Oligonucleotide for detection of SNP TSC0052649
tattttagagtta

SEQ ID NO: 216546 - DNA, 13 bp, Artificial Sequence
  Oligonucleotide for detection of SNP TSC0052649
taactctaaaata

SEQ ID NO: 216547 - DNA, 13 bp, Artificial Sequence
  Oligonucleotide for detection of SNP TSC0052649
tatttcggagtta

SEQ ID NO: 216548 - DNA, 13 bp, Artificial Sequence
  Oligonucleotide for detection of SNP TSC0052649
taactccgaaata

SEQ ID NO: 216549 - DNA, 13 bp, Artificial Sequence
  Oligonucleotide for detection of SNP TSC0052650
atttatgtatttg

SEQ ID NO: 216550 - DNA, 13 bp, Artificial Sequence
  Oligonucleotide for detection of SNP TSC0052650
caaatacataaat

SEQ ID NO: 216551 - DNA, 13 bp, Artificial Sequence
  Oligonucleotide for detection of SNP TSC0052650
atttatatatttg

SEQ ID NO: 216552 - DNA, 13 bp, Artificial Sequence
  Oligonucleotide for detection of SNP TSC0052650
caaatatataaat

SEQ ID NO: 216553 - DNA, 13 bp, Artificial Sequence
  Oligonucleotide for detection of SNP TSC0052651
gatttaaatgtta

SEQ ID NO: 216554 - DNA, 13 bp, Artificial Sequence
  Oligonucleotide for detection of SNP TSC0052651
taacatttaaatc

SEQ ID NO: 216555 - DNA, 13 bp, Artificial Sequence
  Oligonucleotide for detection of SNP TSC0052651
gatttatatgtta

SEQ ID NO: 216556 - DNA, 13 bp, Artificial Sequence
  Oligonucleotide for detection of SNP TSC0052651
taacatataaatc

SEQ ID NO: 216557 - DNA, 13 bp, Artificial Sequence
  Oligonucleotide for detection of SNP TSC0052651
taatatttaagty

SEQ ID NO: 216558 - DNA, 13 bp, Artificial Sequence
  Oligonucleotide for detection of SNP TSC0052651
racttaaatatta

SEQ ID NO: 216559 - DNA, 13 bp, Artificial Sequence
  Oligonucleotide for detection of SNP TSC0052651
taatatgtaagty

SEQ ID NO: 216560 - DNA, 13 bp, Artificial Sequence
  Oligonucleotide for detection of SNP TSC0052651
racttacatatta

SEQ ID NO: 216561 - DNA, 13 bp, Artificial Sequence
  Oligonucleotide for detection of SNP TSC0052652
tgtttaggtttty

SEQ ID NO: 216562 - DNA, 13 bp, Artificial Sequence
  Oligonucleotide for detection of SNP TSC0052652
raaaacctaaaca

SEQ ID NO: 216563 - DNA, 13 bp, Artificial Sequence
  Oligonucleotide for detection of SNP TSC0052652
tgtttaagtttty

SEQ ID NO: 216564 - DNA, 13 bp, Artificial Sequence
  Oligonucleotide for detection of SNP TSC0052652
raaaacttaaaca

SEQ ID NO: 216565 - DNA, 13 bp, Artificial Sequence
  Oligonucleotide for detection of SNP TSC0052654
tttttaagatatg

SEQ ID NO: 216566 - DNA, 13 bp, Artificial Sequence
  Oligonucleotide for detection of SNP TSC0052654
catatcttaaaaa

SEQ ID NO: 216567 - DNA, 13 bp, Artificial Sequence
  Oligonucleotide for detection of SNP TSC0052654
tttttaggatatg

SEQ ID NO: 216568 - DNA, 13 bp, Artificial Sequence
  Oligonucleotide for detection of SNP TSC0052654
catatcctaaaaa

SEQ ID NO: 216569 - DNA, 13 bp, Artificial Sequence
  Oligonucleotide for detection of SNP TSC0052658
tgtgtggtggttt

SEQ ID NO: 216570 - DNA, 13 bp, Artificial Sequence
  Oligonucleotide for detection of SNP TSC0052658
aaaccaccacaca

SEQ ID NO: 216571 - DNA, 13 bp, Artificial Sequence
  Oligonucleotide for detection of SNP TSC0052658
tgtgtgatggttt

SEQ ID NO: 216572 - DNA, 13 bp, Artificial Sequence
  Oligonucleotide for detection of SNP TSC0052658
aaaccatcacaca

SEQ ID NO: 216573 - DNA, 13 bp, Artificial Sequence
  Oligonucleotide for detection of SNP TSC0052659
aatagtatgttat

SEQ ID NO: 216574 - DNA, 13 bp, Artificial Sequence
  Oligonucleotide for detection of SNP TSC0052659
ataacatactatt

SEQ ID NO: 216575 - DNA, 13 bp, Artificial Sequence
  Oligonucleotide for detection of SNP TSC0052659
aatagtgtgttat

SEQ ID NO: 216576 - DNA, 13 bp, Artificial Sequence
  Oligonucleotide for detection of SNP TSC0052659
ataacacactatt

SEQ ID NO: 216577 - DNA, 13 bp, Artificial Sequence
  Oligonucleotide for detection of SNP TSC0052659
aatagcgtgttat

SEQ ID NO: 216578 - DNA, 13 bp, Artificial Sequence
  Oligonucleotide for detection of SNP TSC0052659
ataacacgctatt

SEQ ID NO: 216579 - DNA, 13 bp, Artificial Sequence
  Oligonucleotide for detection of SNP TSC0052659
atgatatgttgtt

SEQ ID NO: 216580 - DNA, 13 bp, Artificial Sequence
  Oligonucleotide for detection of SNP TSC0052659
aacaacatatcat

SEQ ID NO: 216581 - DNA, 13 bp, Artificial Sequence
  Oligonucleotide for detection of SNP TSC0052659
atgatacgttgtt

SEQ ID NO: 216582 - DNA, 13 bp, Artificial Sequence
  Oligonucleotide for detection of SNP TSC0052659
aacaacgtatcat

SEQ ID NO: 216583 - DNA, 13 bp, Artificial Sequence
  Oligonucleotide for detection of SNP TSC0052660
tattatttaatty

SEQ ID NO: 216584 - DNA, 13 bp, Artificial Sequence
  Oligonucleotide for detection of SNP TSC0052660
raattaaataata

SEQ ID NO: 216585 - DNA, 13 bp, Artificial Sequence
  Oligonucleotide for detection of SNP TSC0052660
tattatgtaatty

SEQ ID NO: 216586 - DNA, 13 bp, Artificial Sequence
  Oligonucleotide for detection of SNP TSC0052660
raattacataata

SEQ ID NO: 216587 - DNA, 13 bp, Artificial Sequence
  Oligonucleotide for detection of SNP TSC0052660
ggattggatgatg

SEQ ID NO: 216588 - DNA, 13 bp, Artificial Sequence
  Oligonucleotide for detection of SNP TSC0052660
catcatccaatcc

SEQ ID NO: 216589 - DNA, 13 bp, Artificial Sequence
  Oligonucleotide for detection of SNP TSC0052660
ggattgtatgatg

SEQ ID NO: 216590 - DNA, 13 bp, Artificial Sequence
  Oligonucleotide for detection of SNP TSC0052660
catcatacaatcc

SEQ ID NO: 216591 - DNA, 13 bp, Artificial Sequence
  Oligonucleotide for detection of SNP TSC0005491
atgtttgtagtty

SEQ ID NO: 216592 - DNA, 13 bp, Artificial Sequence
  Oligonucleotide for detection of SNP TSC0005491
raactacaaacat

SEQ ID NO: 216593 - DNA, 13 bp, Artificial Sequence
  Oligonucleotide for detection of SNP TSC0005491
atgtttatagtty

SEQ ID NO: 216594 - DNA, 13 bp, Artificial Sequence
  Oligonucleotide for detection of SNP TSC0005491
raactataaacat

SEQ ID NO: 216595 - DNA, 13 bp, Artificial Sequence
  Oligonucleotide for detection of SNP TSC0005491
acgtttgtagtty

SEQ ID NO: 216596 - DNA, 13 bp, Artificial Sequence
  Oligonucleotide for detection of SNP TSC0005491
raactacaaacgt

SEQ ID NO: 216597 - DNA, 13 bp, Artificial Sequence
  Oligonucleotide for detection of SNP TSC0005491
acgtttatagtty

SEQ ID NO: 216598 - DNA, 13 bp, Artificial Sequence
  Oligonucleotide for detection of SNP TSC0005491
raactataaacgt

SEQ ID NO: 216599 - DNA, 13 bp, Artificial Sequence
  Oligonucleotide for detection of SNP TSC0001239
tggttgtgttgtt

SEQ ID NO: 216600 - DNA, 13 bp, Artificial Sequence
  Oligonucleotide for detection of SNP TSC0001239
aacaacacaacca

SEQ ID NO: 216601 - DNA, 13 bp, Artificial Sequence
  Oligonucleotide for detection of SNP TSC0001239
tggttgggttgtt

SEQ ID NO: 216602 - DNA, 13 bp, Artificial Sequence
  Oligonucleotide for detection of SNP TSC0001239
aacaacccaacca

SEQ ID NO: 216603 - DNA, 13 bp, Artificial Sequence
  Oligonucleotide for detection of SNP TSC0001239
aataatatagtta

SEQ ID NO: 216604 - DNA, 13 bp, Artificial Sequence
  Oligonucleotide for detection of SNP TSC0001239
taactatattatt

SEQ ID NO: 216605 - DNA, 13 bp, Artificial Sequence
  Oligonucleotide for detection of SNP TSC0001239
aataatttagtta

SEQ ID NO: 216606 - DNA, 13 bp, Artificial Sequence
  Oligonucleotide for detection of SNP TSC0001239
taactaaattatt

SEQ ID NO: 216607 - DNA, 13 bp, Artificial Sequence
  Oligonucleotide for detection of SNP TSC0000779
tagtaaataatat

SEQ ID NO: 216608 - DNA, 13 bp, Artificial Sequence
  Oligonucleotide for detection of SNP TSC0000779
atattatttacta

SEQ ID NO: 216609 - DNA, 13 bp, Artificial Sequence
  Oligonucleotide for detection of SNP TSC0000779
tagtaagtaatat

SEQ ID NO: 216610 - DNA, 13 bp, Artificial Sequence
  Oligonucleotide for detection of SNP TSC0000779
atattacttacta

SEQ ID NO: 216611 - DNA, 13 bp, Artificial Sequence
  Oligonucleotide for detection of SNP TSC0052663
ttaattatgtagt

SEQ ID NO: 216612 - DNA, 13 bp, Artificial Sequence
  Oligonucleotide for detection of SNP TSC0052663
actacataattaa

SEQ ID NO: 216613 - DNA, 13 bp, Artificial Sequence
  Oligonucleotide for detection of SNP TSC0052663
ttaattttgtagt

SEQ ID NO: 216614 - DNA, 13 bp, Artificial Sequence
  Oligonucleotide for detection of SNP TSC0052663
actacaaaattaa

SEQ ID NO: 216615 - DNA, 13 bp, Artificial Sequence
  Oligonucleotide for detection of SNP TSC0052663
attgtatgattaa

SEQ ID NO: 216616 - DNA, 13 bp, Artificial Sequence
  Oligonucleotide for detection of SNP TSC0052663
ttaatcatacaat

SEQ ID NO: 216617 - DNA, 13 bp, Artificial Sequence
  Oligonucleotide for detection of SNP TSC0052663
attgtaggattaa

SEQ ID NO: 216618 - DNA, 13 bp, Artificial Sequence
  Oligonucleotide for detection of SNP TSC0052663
ttaatcctacaat

SEQ ID NO: 216619 - DNA, 13 bp, Artificial Sequence
  Oligonucleotide for detection of SNP TSC0052664
atgtaagttttat

SEQ ID NO: 216620 - DNA, 13 bp, Artificial Sequence
  Oligonucleotide for detection of SNP TSC0052664
ataaaacttacat

SEQ ID NO: 216621 - DNA, 13 bp, Artificial Sequence
  Oligonucleotide for detection of SNP TSC0052664
atgtaaattttat

SEQ ID NO: 216622 - DNA, 13 bp, Artificial Sequence
  Oligonucleotide for detection of SNP TSC0052664
ataaaatttacat

SEQ ID NO: 216623 - DNA, 13 bp, Artificial Sequence
  Oligonucleotide for detection of SNP TSC0052665
tttttgtaaaaaa

SEQ ID NO: 216624 - DNA, 13 bp, Artificial Sequence
  Oligonucleotide for detection of SNP TSC0052665
ttttttacaaaaa

SEQ ID NO: 216625 - DNA, 13 bp, Artificial Sequence
  Oligonucleotide for detection of SNP TSC0052665
ttttttttaggga

SEQ ID NO: 216626 - DNA, 13 bp, Artificial Sequence
  Oligonucleotide for detection of SNP TSC0052665
tccctaaaaaaaa

SEQ ID NO: 216627 - DNA, 13 bp, Artificial Sequence
  Oligonucleotide for detection of SNP TSC0052665
ttttttgtaggga

SEQ ID NO: 216628 - DNA, 13 bp, Artificial Sequence
  Oligonucleotide for detection of SNP TSC0052665
tccctacaaaaaa

SEQ ID NO: 216629 - DNA, 13 bp, Artificial Sequence
  Oligonucleotide for detection of SNP TSC0052666
attattagtgaaa

SEQ ID NO: 216630 - DNA, 13 bp, Artificial Sequence
  Oligonucleotide for detection of SNP TSC0052666
tttcactaataat

SEQ ID NO: 216631 - DNA, 13 bp, Artificial Sequence
  Oligonucleotide for detection of SNP TSC0052666
attattggtgaaa

SEQ ID NO: 216632 - DNA, 13 bp, Artificial Sequence
  Oligonucleotide for detection of SNP TSC0052666
tttcaccaataat

SEQ ID NO: 216633 - DNA, 13 bp, Artificial Sequence
  Oligonucleotide for detection of SNP TSC0052666
attatcggtgaaa

SEQ ID NO: 216634 - DNA, 13 bp, Artificial Sequence
  Oligonucleotide for detection of SNP TSC0052666
tttcaccgataat

SEQ ID NO: 216635 - DNA, 13 bp, Artificial Sequence
  Oligonucleotide for detection of SNP TSC0052666
ttttattggtaat

SEQ ID NO: 216636 - DNA, 13 bp, Artificial Sequence
  Oligonucleotide for detection of SNP TSC0052666
attaccaataaaa

SEQ ID NO: 216637 - DNA, 13 bp, Artificial Sequence
  Oligonucleotide for detection of SNP TSC0052666
ttttatcggtaat

SEQ ID NO: 216638 - DNA, 13 bp, Artificial Sequence
  Oligonucleotide for detection of SNP TSC0052666
attaccgataaaa

SEQ ID NO: 216639 - DNA, 13 bp, Artificial Sequence
  Oligonucleotide for detection of SNP TSC0052667
aggaaagagaggy

SEQ ID NO: 216640 - DNA, 13 bp, Artificial Sequence
  Oligonucleotide for detection of SNP TSC0052667
rcctctctttcct

SEQ ID NO: 216641 - DNA, 13 bp, Artificial Sequence
  Oligonucleotide for detection of SNP TSC0052667
aggaaatagaggy

SEQ ID NO: 216642 - DNA, 13 bp, Artificial Sequence
  Oligonucleotide for detection of SNP TSC0052667
rcctctatttcct

SEQ ID NO: 216643 - DNA, 13 bp, Artificial Sequence
  Oligonucleotide for detection of SNP TSC0052668
gtgtgcgtgtatg

SEQ ID NO: 216644 - DNA, 13 bp, Artificial Sequence
  Oligonucleotide for detection of SNP TSC0052668
catacacgcacac

SEQ ID NO: 216645 - DNA, 13 bp, Artificial Sequence
  Oligonucleotide for detection of SNP TSC0052671
aaaaatattatat

SEQ ID NO: 216646 - DNA, 13 bp, Artificial Sequence
  Oligonucleotide for detection of SNP TSC0052671
atataatattttt

SEQ ID NO: 216647 - DNA, 13 bp, Artificial Sequence
  Oligonucleotide for detection of SNP TSC0052671
aaaaatgttatat

SEQ ID NO: 216648 - DNA, 13 bp, Artificial Sequence
  Oligonucleotide for detection of SNP TSC0052671
atataacattttt

SEQ ID NO: 216649 - DNA, 13 bp, Artificial Sequence
  Oligonucleotide for detection of SNP TSC0052671
aaaaacgttatat

SEQ ID NO: 216650 - DNA, 13 bp, Artificial Sequence
  Oligonucleotide for detection of SNP TSC0052671
atataacgttttt

SEQ ID NO: 216651 - DNA, 13 bp, Artificial Sequence
  Oligonucleotide for detection of SNP TSC0052671
atataatgttttt

SEQ ID NO: 216652 - DNA, 13 bp, Artificial Sequence
  Oligonucleotide for detection of SNP TSC0052671
aaaaacattatat

SEQ ID NO: 216653 - DNA, 13 bp, Artificial Sequence
  Oligonucleotide for detection of SNP TSC0052672
gtatggattttat

SEQ ID NO: 216654 - DNA, 13 bp, Artificial Sequence
  Oligonucleotide for detection of SNP TSC0052672
ataaaatccatac

SEQ ID NO: 216655 - DNA, 13 bp, Artificial Sequence
  Oligonucleotide for detection of SNP TSC0052672
gtatgggttttat

SEQ ID NO: 216656 - DNA, 13 bp, Artificial Sequence
  Oligonucleotide for detection of SNP TSC0052672
ataaaacccatac

SEQ ID NO: 216657 - DNA, 13 bp, Artificial Sequence
  Oligonucleotide for detection of SNP TSC0009004
tggagtaaaagay

SEQ ID NO: 216658 - DNA, 13 bp, Artificial Sequence
  Oligonucleotide for detection of SNP TSC0009004
rtcttttactcca

SEQ ID NO: 216659 - DNA, 13 bp, Artificial Sequence
  Oligonucleotide for detection of SNP TSC0009004
tggagtgaaagay

SEQ ID NO: 216660 - DNA, 13 bp, Artificial Sequence
  Oligonucleotide for detection of SNP TSC0009004
rtctttcactcca

SEQ ID NO: 216661 - DNA, 13 bp, Artificial Sequence
  Oligonucleotide for detection of SNP TSC0052677
atagtaaagtaat

SEQ ID NO: 216662 - DNA, 13 bp, Artificial Sequence
  Oligonucleotide for detection of SNP TSC0052677
attactttactat

SEQ ID NO: 216663 - DNA, 13 bp, Artificial Sequence
  Oligonucleotide for detection of SNP TSC0052677
atagtatagtaat

SEQ ID NO: 216664 - DNA, 13 bp, Artificial Sequence
  Oligonucleotide for detection of SNP TSC0052677
attactatactat

SEQ ID NO: 216665 - DNA, 13 bp, Artificial Sequence
  Oligonucleotide for detection of SNP TSC0052677
attattttattgt

SEQ ID NO: 216666 - DNA, 13 bp, Artificial Sequence
  Oligonucleotide for detection of SNP TSC0052677
acaataaaataat

SEQ ID NO: 216667 - DNA, 13 bp, Artificial Sequence
  Oligonucleotide for detection of SNP TSC0052677
attattatattgt

SEQ ID NO: 216668 - DNA, 13 bp, Artificial Sequence
  Oligonucleotide for detection of SNP TSC0052677
acaatataataat

SEQ ID NO: 216669 - DNA, 13 bp, Artificial Sequence
  Oligonucleotide for detection of SNP TSC0052678
atatgtttgtata

SEQ ID NO: 216670 - DNA, 13 bp, Artificial Sequence
  Oligonucleotide for detection of SNP TSC0052678
tatacaaacatat

SEQ ID NO: 216671 - DNA, 13 bp, Artificial Sequence
  Oligonucleotide for detection of SNP TSC0052678
atatgtgtgtata

SEQ ID NO: 216672 - DNA, 13 bp, Artificial Sequence
  Oligonucleotide for detection of SNP TSC0052678
tatacacacatat

SEQ ID NO: 216673 - DNA, 13 bp, Artificial Sequence
  Oligonucleotide for detection of SNP TSC0052678
atacgtttgtata

SEQ ID NO: 216674 - DNA, 13 bp, Artificial Sequence
  Oligonucleotide for detection of SNP TSC0052678
tatacaaacgtat

SEQ ID NO: 216675 - DNA, 13 bp, Artificial Sequence
  Oligonucleotide for detection of SNP TSC0052678
atacgtgtgtata

SEQ ID NO: 216676 - DNA, 13 bp, Artificial Sequence
  Oligonucleotide for detection of SNP TSC0052678
tatacacacgtat

SEQ ID NO: 216677 - DNA, 13 bp, Artificial Sequence
  Oligonucleotide for detection of SNP TSC0052678
atatgcgtgtata

SEQ ID NO: 216678 - DNA, 13 bp, Artificial Sequence
  Oligonucleotide for detection of SNP TSC0052678
tatacacgcatat

SEQ ID NO: 216679 - DNA, 13 bp, Artificial Sequence
  Oligonucleotide for detection of SNP TSC0052678
atacgcgtgtata

SEQ ID NO: 216680 - DNA, 13 bp, Artificial Sequence
  Oligonucleotide for detection of SNP TSC0052678
tatacacgcgtat

SEQ ID NO: 216681 - DNA, 13 bp, Artificial Sequence
  Oligonucleotide for detection of SNP TSC0052678
tatgtaggtgtat

SEQ ID NO: 216682 - DNA, 13 bp, Artificial Sequence
  Oligonucleotide for detection of SNP TSC0052678
atacacctacata

SEQ ID NO: 216683 - DNA, 13 bp, Artificial Sequence
  Oligonucleotide for detection of SNP TSC0052678
tatgtaggcgtat

SEQ ID NO: 216684 - DNA, 13 bp, Artificial Sequence
  Oligonucleotide for detection of SNP TSC0052678
atacgcctacata

SEQ ID NO: 216685 - DNA, 13 bp, Artificial Sequence
  Oligonucleotide for detection of SNP TSC0052678
tatgtatgcgtat

SEQ ID NO: 216686 - DNA, 13 bp, Artificial Sequence
  Oligonucleotide for detection of SNP TSC0052678
atacgcatacata

SEQ ID NO: 216687 - DNA, 13 bp, Artificial Sequence
  Oligonucleotide for detection of SNP TSC0052678
tatgtacgcgtat

SEQ ID NO: 216688 - DNA, 13 bp, Artificial Sequence
  Oligonucleotide for detection of SNP TSC0052678
atacgcgtacata

SEQ ID NO: 216689 - DNA, 13 bp, Artificial Sequence
  Oligonucleotide for detection of SNP TSC0052679
tttatgaagaaaa

SEQ ID NO: 216690 - DNA, 13 bp, Artificial Sequence
  Oligonucleotide for detection of SNP TSC0052679
ttttcttcataaa

SEQ ID NO: 216691 - DNA, 13 bp, Artificial Sequence
  Oligonucleotide for detection of SNP TSC0052679
tttatgtagaaaa

SEQ ID NO: 216692 - DNA, 13 bp, Artificial Sequence
  Oligonucleotide for detection of SNP TSC0052679
ttttctacataaa

SEQ ID NO: 216693 - DNA, 13 bp, Artificial Sequence
  Oligonucleotide for detection of SNP TSC0052679
ttttttgtataaa

SEQ ID NO: 216694 - DNA, 13 bp, Artificial Sequence
  Oligonucleotide for detection of SNP TSC0052679
tttatacaaaaaa

SEQ ID NO: 216695 - DNA, 13 bp, Artificial Sequence
  Oligonucleotide for detection of SNP TSC0052680
gggagggaggaag

SEQ ID NO: 216696 - DNA, 13 bp, Artificial Sequence
  Oligonucleotide for detection of SNP TSC0052680
cttcctccctccc

SEQ ID NO: 216697 - DNA, 13 bp, Artificial Sequence
  Oligonucleotide for detection of SNP TSC0052680
gggaggaaggaag

SEQ ID NO: 216698 - DNA, 13 bp, Artificial Sequence
  Oligonucleotide for detection of SNP TSC0052680
cttccttcctccc

SEQ ID NO: 216699 - DNA, 13 bp, Artificial Sequence
  Oligonucleotide for detection of SNP TSC0052681
tgttatttttttt

SEQ ID NO: 216700 - DNA, 13 bp, Artificial Sequence
  Oligonucleotide for detection of SNP TSC0052681
aaaaaaaataaca

SEQ ID NO: 216701 - DNA, 13 bp, Artificial Sequence
  Oligonucleotide for detection of SNP TSC0052681
aagaagtgtagta

SEQ ID NO: 216702 - DNA, 13 bp, Artificial Sequence
  Oligonucleotide for detection of SNP TSC0052681
tactacacttctt

SEQ ID NO: 216703 - DNA, 13 bp, Artificial Sequence
  Oligonucleotide for detection of SNP TSC0052681
aagaagagtagta

SEQ ID NO: 216704 - DNA, 13 bp, Artificial Sequence
  Oligonucleotide for detection of SNP TSC0052681
tactactcttctt

SEQ ID NO: 216705 - DNA, 13 bp, Artificial Sequence
  Oligonucleotide for detection of SNP TSC0000344
ttgtaattatttt

SEQ ID NO: 216706 - DNA, 13 bp, Artificial Sequence
  Oligonucleotide for detection of SNP TSC0000344
aaaataattacaa

SEQ ID NO: 216707 - DNA, 13 bp, Artificial Sequence
  Oligonucleotide for detection of SNP TSC0000344
ttgtaagtatttt

SEQ ID NO: 216708 - DNA, 13 bp, Artificial Sequence
  Oligonucleotide for detection of SNP TSC0000344
aaaatacttacaa

SEQ ID NO: 216709 - DNA, 13 bp, Artificial Sequence
  Oligonucleotide for detection of SNP TSC0000344
tcgtaattatttt

SEQ ID NO: 216710 - DNA, 13 bp, Artificial Sequence
  Oligonucleotide for detection of SNP TSC0000344
aaaataattacga

SEQ ID NO: 216711 - DNA, 13 bp, Artificial Sequence
  Oligonucleotide for detection of SNP TSC0000344
tcgtaagtatttt

SEQ ID NO: 216712 - DNA, 13 bp, Artificial Sequence
  Oligonucleotide for detection of SNP TSC0000344
aaaatacttacga

SEQ ID NO: 216713 - DNA, 13 bp, Artificial Sequence
  Oligonucleotide for detection of SNP TSC0000344
aaagtagttgtgg

SEQ ID NO: 216714 - DNA, 13 bp, Artificial Sequence
  Oligonucleotide for detection of SNP TSC0000344
ccacaactacttt

SEQ ID NO: 216715 - DNA, 13 bp, Artificial Sequence
  Oligonucleotide for detection of SNP TSC0000344
aaagtatttgtgg

SEQ ID NO: 216716 - DNA, 13 bp, Artificial Sequence
  Oligonucleotide for detection of SNP TSC0000344
ccacaaatacttt

SEQ ID NO: 216717 - DNA, 13 bp, Artificial Sequence
  Oligonucleotide for detection of SNP TSC0000344
aaagtagttgcgg

SEQ ID NO: 216718 - DNA, 13 bp, Artificial Sequence
  Oligonucleotide for detection of SNP TSC0000344
ccgcaactacttt

SEQ ID NO: 216719 - DNA, 13 bp, Artificial Sequence
  Oligonucleotide for detection of SNP TSC0000344
aaagtatttgcgg

SEQ ID NO: 216720 - DNA, 13 bp, Artificial Sequence
  Oligonucleotide for detection of SNP TSC0000344
ccgcaaatacttt

SEQ ID NO: 216721 - DNA, 13 bp, Artificial Sequence
  Oligonucleotide for detection of SNP TSC0000345
gagatagttgtta

SEQ ID NO: 216722 - DNA, 13 bp, Artificial Sequence
  Oligonucleotide for detection of SNP TSC0000345
taacaactatctc

SEQ ID NO: 216723 - DNA, 13 bp, Artificial Sequence
  Oligonucleotide for detection of SNP TSC0000345
gagataattgtta

SEQ ID NO: 216724 - DNA, 13 bp, Artificial Sequence
  Oligonucleotide for detection of SNP TSC0000345
taacaattatctc

SEQ ID NO: 216725 - DNA, 13 bp, Artificial Sequence
  Oligonucleotide for detection of SNP TSC0000346
gggttatgtaatg

SEQ ID NO: 216726 - DNA, 13 bp, Artificial Sequence
  Oligonucleotide for detection of SNP TSC0000346
cattacataaccc

SEQ ID NO: 216727 - DNA, 13 bp, Artificial Sequence
  Oligonucleotide for detection of SNP TSC0000346
gggttaggtaatg

SEQ ID NO: 216728 - DNA, 13 bp, Artificial Sequence
  Oligonucleotide for detection of SNP TSC0000346
cattacctaaccc

SEQ ID NO: 216729 - DNA, 13 bp, Artificial Sequence
  Oligonucleotide for detection of SNP TSC0000346
tattatatggtty

SEQ ID NO: 216730 - DNA, 13 bp, Artificial Sequence
  Oligonucleotide for detection of SNP TSC0000346
raaccatataata

SEQ ID NO: 216731 - DNA, 13 bp, Artificial Sequence
  Oligonucleotide for detection of SNP TSC0052683
ggtagagtgttta

SEQ ID NO: 216732 - DNA, 13 bp, Artificial Sequence
  Oligonucleotide for detection of SNP TSC0052683
taaacactctacc

SEQ ID NO: 216733 - DNA, 13 bp, Artificial Sequence
  Oligonucleotide for detection of SNP TSC0052683
ggtagaatgttta

SEQ ID NO: 216734 - DNA, 13 bp, Artificial Sequence
  Oligonucleotide for detection of SNP TSC0052683
taaacattctacc

SEQ ID NO: 216735 - DNA, 13 bp, Artificial Sequence
  Oligonucleotide for detection of SNP TSC0052684
ttggttatgtaty

SEQ ID NO: 216736 - DNA, 13 bp, Artificial Sequence
  Oligonucleotide for detection of SNP TSC0052684
ratacataaccaa

SEQ ID NO: 216737 - DNA, 13 bp, Artificial Sequence
  Oligonucleotide for detection of SNP TSC0052684
ttggttttgtaty

SEQ ID NO: 216738 - DNA, 13 bp, Artificial Sequence
  Oligonucleotide for detection of SNP TSC0052684
ratacaaaaccaa

SEQ ID NO: 216739 - DNA, 13 bp, Artificial Sequence
  Oligonucleotide for detection of SNP TSC0052684
gatatatggttag

SEQ ID NO: 216740 - DNA, 13 bp, Artificial Sequence
  Oligonucleotide for detection of SNP TSC0052684
ctaaccatatatc

SEQ ID NO: 216741 - DNA, 13 bp, Artificial Sequence
  Oligonucleotide for detection of SNP TSC0052684
gatataaggttag

SEQ ID NO: 216742 - DNA, 13 bp, Artificial Sequence
  Oligonucleotide for detection of SNP TSC0052684
ctaaccttatatc

SEQ ID NO: 216743 - DNA, 13 bp, Artificial Sequence
  Oligonucleotide for detection of SNP TSC0009240
ataattttagtat

SEQ ID NO: 216744 - DNA, 13 bp, Artificial Sequence
  Oligonucleotide for detection of SNP TSC0009240
atactaaaattat

SEQ ID NO: 216745 - DNA, 13 bp, Artificial Sequence
  Oligonucleotide for detection of SNP TSC0009240
ataattgtagtat

SEQ ID NO: 216746 - DNA, 13 bp, Artificial Sequence
  Oligonucleotide for detection of SNP TSC0009240
atactacaattat

SEQ ID NO: 216747 - DNA, 13 bp, Artificial Sequence
  Oligonucleotide for detection of SNP TSC0009240
atattgaaattat

SEQ ID NO: 216748 - DNA, 13 bp, Artificial Sequence
  Oligonucleotide for detection of SNP TSC0009240
ataatttcaatat

SEQ ID NO: 216749 - DNA, 13 bp, Artificial Sequence
  Oligonucleotide for detection of SNP TSC0009240
atattgtaattat

SEQ ID NO: 216750 - DNA, 13 bp, Artificial Sequence
  Oligonucleotide for detection of SNP TSC0009240
ataattacaatat

SEQ ID NO: 216751 - DNA, 13 bp, Artificial Sequence
  Oligonucleotide for detection of SNP TSC0052685
agttgggattgga

SEQ ID NO: 216752 - DNA, 13 bp, Artificial Sequence
  Oligonucleotide for detection of SNP TSC0052685
tccaatcccaact

SEQ ID NO: 216753 - DNA, 13 bp, Artificial Sequence
  Oligonucleotide for detection of SNP TSC0052685
agttggaattgga

SEQ ID NO: 216754 - DNA, 13 bp, Artificial Sequence
  Oligonucleotide for detection of SNP TSC0052685
tccaattccaact

SEQ ID NO: 216755 - DNA, 13 bp, Artificial Sequence
  Oligonucleotide for detection of SNP TSC0052686
gagattgtagttt

SEQ ID NO: 216756 - DNA, 13 bp, Artificial Sequence
  Oligonucleotide for detection of SNP TSC0052686
aaactacaatctc

SEQ ID NO: 216757 - DNA, 13 bp, Artificial Sequence
  Oligonucleotide for detection of SNP TSC0052686
gagattatagttt

SEQ ID NO: 216758 - DNA, 13 bp, Artificial Sequence
  Oligonucleotide for detection of SNP TSC0052686
aaactataatctc

SEQ ID NO: 216759 - DNA, 13 bp, Artificial Sequence
  Oligonucleotide for detection of SNP TSC0052687
agggaggttatag

SEQ ID NO: 216760 - DNA, 13 bp, Artificial Sequence
  Oligonucleotide for detection of SNP TSC0052687
ctataacctccct

SEQ ID NO: 216761 - DNA, 13 bp, Artificial Sequence
  Oligonucleotide for detection of SNP TSC0052687
agggagattatag

SEQ ID NO: 216762 - DNA, 13 bp, Artificial Sequence
  Oligonucleotide for detection of SNP TSC0052687
ctataatctccct

SEQ ID NO: 216763 - DNA, 13 bp, Artificial Sequence
  Oligonucleotide for detection of SNP TSC0052688
ggttggggattay

SEQ ID NO: 216764 - DNA, 13 bp, Artificial Sequence
  Oligonucleotide for detection of SNP TSC0052688
rtaatccccaacc

SEQ ID NO: 216765 - DNA, 13 bp, Artificial Sequence
  Oligonucleotide for detection of SNP TSC0052688
ggttggagattay

SEQ ID NO: 216766 - DNA, 13 bp, Artificial Sequence
  Oligonucleotide for detection of SNP TSC0052688
rtaatctccaacc

SEQ ID NO: 216767 - DNA, 13 bp, Artificial Sequence
  Oligonucleotide for detection of SNP TSC0052691
gggaaaggaaaga

SEQ ID NO: 216768 - DNA, 13 bp, Artificial Sequence
  Oligonucleotide for detection of SNP TSC0052691
tctttcctttccc

SEQ ID NO: 216769 - DNA, 13 bp, Artificial Sequence
  Oligonucleotide for detection of SNP TSC0052691
gggaaaagaaaga

SEQ ID NO: 216770 - DNA, 13 bp, Artificial Sequence
  Oligonucleotide for detection of SNP TSC0052691
tctttcttttccc

SEQ ID NO: 216771 - DNA, 13 bp, Artificial Sequence
  Oligonucleotide for detection of SNP TSC0052692
gtttatattattt

SEQ ID NO: 216772 - DNA, 13 bp, Artificial Sequence
  Oligonucleotide for detection of SNP TSC0052692
aaataatataaac

SEQ ID NO: 216773 - DNA, 13 bp, Artificial Sequence
  Oligonucleotide for detection of SNP TSC0052692
gtttatgttattt

SEQ ID NO: 216774 - DNA, 13 bp, Artificial Sequence
  Oligonucleotide for detection of SNP TSC0052692
aaataacataaac

SEQ ID NO: 216775 - DNA, 13 bp, Artificial Sequence
  Oligonucleotide for detection of SNP TSC0052693
tgatagattgttg

SEQ ID NO: 216776 - DNA, 13 bp, Artificial Sequence
  Oligonucleotide for detection of SNP TSC0052693
caacaatctatca

SEQ ID NO: 216777 - DNA, 13 bp, Artificial Sequence
  Oligonucleotide for detection of SNP TSC0052693
tgatagtttgttg

SEQ ID NO: 216778 - DNA, 13 bp, Artificial Sequence
  Oligonucleotide for detection of SNP TSC0052693
caacaaactatca

SEQ ID NO: 216779 - DNA, 13 bp, Artificial Sequence
  Oligonucleotide for detection of SNP TSC0052693
cgatagattgttg

SEQ ID NO: 216780 - DNA, 13 bp, Artificial Sequence
  Oligonucleotide for detection of SNP TSC0052693
caacaatctatcg

SEQ ID NO: 216781 - DNA, 13 bp, Artificial Sequence
  Oligonucleotide for detection of SNP TSC0052693
cgatagtttgttg

SEQ ID NO: 216782 - DNA, 13 bp, Artificial Sequence
  Oligonucleotide for detection of SNP TSC0052693
caacaaactatcg

SEQ ID NO: 216783 - DNA, 13 bp, Artificial Sequence
  Oligonucleotide for detection of SNP TSC0052693
tagtaatttattg

SEQ ID NO: 216784 - DNA, 13 bp, Artificial Sequence
  Oligonucleotide for detection of SNP TSC0052693
caataaattacta

SEQ ID NO: 216785 - DNA, 13 bp, Artificial Sequence
  Oligonucleotide for detection of SNP TSC0052693
tagtaaattattg

SEQ ID NO: 216786 - DNA, 13 bp, Artificial Sequence
  Oligonucleotide for detection of SNP TSC0052693
caataatttacta

SEQ ID NO: 216787 - DNA, 13 bp, Artificial Sequence
  Oligonucleotide for detection of SNP TSC0052693
tagtaatttatcg

SEQ ID NO: 216788 - DNA, 13 bp, Artificial Sequence
  Oligonucleotide for detection of SNP TSC0052693
cgataaattacta

SEQ ID NO: 216789 - DNA, 13 bp, Artificial Sequence
  Oligonucleotide for detection of SNP TSC0052693
tagtaaattatcg

SEQ ID NO: 216790 - DNA, 13 bp, Artificial Sequence
  Oligonucleotide for detection of SNP TSC0052693
cgataatttacta

SEQ ID NO: 216791 - DNA, 13 bp, Artificial Sequence
  Oligonucleotide for detection of SNP TSC0052694
gtgtatatttgtg

SEQ ID NO: 216792 - DNA, 13 bp, Artificial Sequence
  Oligonucleotide for detection of SNP TSC0052694
cacaaatatacac

SEQ ID NO: 216793 - DNA, 13 bp, Artificial Sequence
  Oligonucleotide for detection of SNP TSC0052694
gtgtatgtttgtg

SEQ ID NO: 216794 - DNA, 13 bp, Artificial Sequence
  Oligonucleotide for detection of SNP TSC0052694
cacaaacatacac

SEQ ID NO: 216795 - DNA, 13 bp, Artificial Sequence
  Oligonucleotide for detection of SNP TSC0052694
gcgtatatttgtg

SEQ ID NO: 216796 - DNA, 13 bp, Artificial Sequence
  Oligonucleotide for detection of SNP TSC0052694
cacaaatatacgc

SEQ ID NO: 216797 - DNA, 13 bp, Artificial Sequence
  Oligonucleotide for detection of SNP TSC0052694
gcgtatgtttgtg

SEQ ID NO: 216798 - DNA, 13 bp, Artificial Sequence
  Oligonucleotide for detection of SNP TSC0052694
cacaaacatacgc

SEQ ID NO: 216799 - DNA, 13 bp, Artificial Sequence
  Oligonucleotide for detection of SNP TSC0052694
gtgtacgtttgtg

SEQ ID NO: 216800 - DNA, 13 bp, Artificial Sequence
  Oligonucleotide for detection of SNP TSC0052694
cacaaacgtacac

SEQ ID NO: 216801 - DNA, 13 bp, Artificial Sequence
  Oligonucleotide for detection of SNP TSC0052694
gcgtacgtttgtg

SEQ ID NO: 216802 - DNA, 13 bp, Artificial Sequence
  Oligonucleotide for detection of SNP TSC0052694
cacaaacgtacgc

SEQ ID NO: 216803 - DNA, 13 bp, Artificial Sequence
  Oligonucleotide for detection of SNP TSC0052694
tataggtgtgcgy

SEQ ID NO: 216804 - DNA, 13 bp, Artificial Sequence
  Oligonucleotide for detection of SNP TSC0052694
rcgcacacctata

SEQ ID NO: 216805 - DNA, 13 bp, Artificial Sequence
  Oligonucleotide for detection of SNP TSC0052694
tataggcgtgcgy

SEQ ID NO: 216806 - DNA, 13 bp, Artificial Sequence
  Oligonucleotide for detection of SNP TSC0052694
rcgcacgcctata

SEQ ID NO: 216807 - DNA, 13 bp, Artificial Sequence
  Oligonucleotide for detection of SNP TSC0052696
gggtgttgttatg

SEQ ID NO: 216808 - DNA, 13 bp, Artificial Sequence
  Oligonucleotide for detection of SNP TSC0052696
cataacaacaccc

SEQ ID NO: 216809 - DNA, 13 bp, Artificial Sequence
  Oligonucleotide for detection of SNP TSC0052696
gggtgtcgttatg

SEQ ID NO: 216810 - DNA, 13 bp, Artificial Sequence
  Oligonucleotide for detection of SNP TSC0052696
cataacgacaccc

SEQ ID NO: 216811 - DNA, 13 bp, Artificial Sequence
  Oligonucleotide for detection of SNP TSC0052696
tatggtggtatty

SEQ ID NO: 216812 - DNA, 13 bp, Artificial Sequence
  Oligonucleotide for detection of SNP TSC0052696
raataccaccata

SEQ ID NO: 216813 - DNA, 13 bp, Artificial Sequence
  Oligonucleotide for detection of SNP TSC0052696
tatggtagtatty

SEQ ID NO: 216814 - DNA, 13 bp, Artificial Sequence
  Oligonucleotide for detection of SNP TSC0052696
raatactaccata

SEQ ID NO: 216815 - DNA, 13 bp, Artificial Sequence
  Oligonucleotide for detection of SNP TSC0052696
tatggcggtatty

SEQ ID NO: 216816 - DNA, 13 bp, Artificial Sequence
  Oligonucleotide for detection of SNP TSC0052696
raataccgccata

SEQ ID NO: 216817 - DNA, 13 bp, Artificial Sequence
  Oligonucleotide for detection of SNP TSC0052697
taaaggattatga

SEQ ID NO: 216818 - DNA, 13 bp, Artificial Sequence
  Oligonucleotide for detection of SNP TSC0052697
tcataatccttta

SEQ ID NO: 216819 - DNA, 13 bp, Artificial Sequence
  Oligonucleotide for detection of SNP TSC0052697
taaagggttatga

SEQ ID NO: 216820 - DNA, 13 bp, Artificial Sequence
  Oligonucleotide for detection of SNP TSC0052697
tcataacccttta

SEQ ID NO: 216821 - DNA, 13 bp, Artificial Sequence
  Oligonucleotide for detection of SNP TSC0052698
ttaagagtatagy

SEQ ID NO: 216822 - DNA, 13 bp, Artificial Sequence
  Oligonucleotide for detection of SNP TSC0052698
rctatactcttaa

SEQ ID NO: 216823 - DNA, 13 bp, Artificial Sequence
  Oligonucleotide for detection of SNP TSC0052698
ttaagaatatagy

SEQ ID NO: 216824 - DNA, 13 bp, Artificial Sequence
  Oligonucleotide for detection of SNP TSC0052698
rctatattcttaa

SEQ ID NO: 216825 - DNA, 13 bp, Artificial Sequence
  Oligonucleotide for detection of SNP TSC0005897
tgagagttagggy

SEQ ID NO: 216826 - DNA, 13 bp, Artificial Sequence
  Oligonucleotide for detection of SNP TSC0005897
rccctaactctca

SEQ ID NO: 216827 - DNA, 13 bp, Artificial Sequence
  Oligonucleotide for detection of SNP TSC0005897
tgagaggtagggy

SEQ ID NO: 216828 - DNA, 13 bp, Artificial Sequence
  Oligonucleotide for detection of SNP TSC0005897
rccctacctctca

SEQ ID NO: 216829 - DNA, 13 bp, Artificial Sequence
  Oligonucleotide for detection of SNP TSC0009037
ggtataggagatg

SEQ ID NO: 216830 - DNA, 13 bp, Artificial Sequence
  Oligonucleotide for detection of SNP TSC0009037
catctcctatacc

SEQ ID NO: 216831 - DNA, 13 bp, Artificial Sequence
  Oligonucleotide for detection of SNP TSC0009037
ggtataagagatg

SEQ ID NO: 216832 - DNA, 13 bp, Artificial Sequence
  Oligonucleotide for detection of SNP TSC0009037
catctcttatacc

SEQ ID NO: 216833 - DNA, 13 bp, Artificial Sequence
  Oligonucleotide for detection of SNP TSC0052699
gaaaaaaatgaaa

SEQ ID NO: 216834 - DNA, 13 bp, Artificial Sequence
  Oligonucleotide for detection of SNP TSC0052699
tttcatttttttc

SEQ ID NO: 216835 - DNA, 13 bp, Artificial Sequence
  Oligonucleotide for detection of SNP TSC0052699
gaaaaagatgaaa

SEQ ID NO: 216836 - DNA, 13 bp, Artificial Sequence
  Oligonucleotide for detection of SNP TSC0052699
tttcatctttttc

SEQ ID NO: 216837 - DNA, 13 bp, Artificial Sequence
  Oligonucleotide for detection of SNP TSC0052700
gtagaaggaagtt

SEQ ID NO: 216838 - DNA, 13 bp, Artificial Sequence
  Oligonucleotide for detection of SNP TSC0052700
aacttccttctac

SEQ ID NO: 216839 - DNA, 13 bp, Artificial Sequence
  Oligonucleotide for detection of SNP TSC0052700
gtagaaagaagtt

SEQ ID NO: 216840 - DNA, 13 bp, Artificial Sequence
  Oligonucleotide for detection of SNP TSC0052700
aacttctttctac

SEQ ID NO: 216841 - DNA, 13 bp, Artificial Sequence
  Oligonucleotide for detection of SNP TSC0052701
tttattgtaatga

SEQ ID NO: 216842 - DNA, 13 bp, Artificial Sequence
  Oligonucleotide for detection of SNP TSC0052701
tcattacaataaa

SEQ ID NO: 216843 - DNA, 13 bp, Artificial Sequence
  Oligonucleotide for detection of SNP TSC0052701
tttattataatga

SEQ ID NO: 216844 - DNA, 13 bp, Artificial Sequence
  Oligonucleotide for detection of SNP TSC0052701
tcattataataaa

SEQ ID NO: 216845 - DNA, 13 bp, Artificial Sequence
  Oligonucleotide for detection of SNP TSC0052701
tttatcgtaatga

SEQ ID NO: 216846 - DNA, 13 bp, Artificial Sequence
  Oligonucleotide for detection of SNP TSC0052701
tcattacgataaa

SEQ ID NO: 216847 - DNA, 13 bp, Artificial Sequence
  Oligonucleotide for detection of SNP TSC0052702
tattatgttttga

SEQ ID NO: 216848 - DNA, 13 bp, Artificial Sequence
  Oligonucleotide for detection of SNP TSC0052702
tcaaaacataata

SEQ ID NO: 216849 - DNA, 13 bp, Artificial Sequence
  Oligonucleotide for detection of SNP TSC0052703
tttattaatgatg

SEQ ID NO: 216850 - DNA, 13 bp, Artificial Sequence
  Oligonucleotide for detection of SNP TSC0052703
catcattaataaa

SEQ ID NO: 216851 - DNA, 13 bp, Artificial Sequence
  Oligonucleotide for detection of SNP TSC0052703
tttattgatgatg

SEQ ID NO: 216852 - DNA, 13 bp, Artificial Sequence
  Oligonucleotide for detection of SNP TSC0052703
catcatcaataaa

SEQ ID NO: 216853 - DNA, 13 bp, Artificial Sequence
  Oligonucleotide for detection of SNP TSC0052708
tttagaggttttg

SEQ ID NO: 216854 - DNA, 13 bp, Artificial Sequence
  Oligonucleotide for detection of SNP TSC0052708
caaaacctctaaa

SEQ ID NO: 216855 - DNA, 13 bp, Artificial Sequence
  Oligonucleotide for detection of SNP TSC0052708
tttagaagttttg

SEQ ID NO: 216856 - DNA, 13 bp, Artificial Sequence
  Oligonucleotide for detection of SNP TSC0052708
caaaacttctaaa

SEQ ID NO: 216857 - DNA, 13 bp, Artificial Sequence
  Oligonucleotide for detection of SNP TSC0052709
tgaaattgtgttt

SEQ ID NO: 216858 - DNA, 13 bp, Artificial Sequence
  Oligonucleotide for detection of SNP TSC0052709
aaacacaatttca

SEQ ID NO: 216859 - DNA, 13 bp, Artificial Sequence
  Oligonucleotide for detection of SNP TSC0052709
tgaaatggtgttt

SEQ ID NO: 216860 - DNA, 13 bp, Artificial Sequence
  Oligonucleotide for detection of SNP TSC0052709
aaacaccatttca

SEQ ID NO: 216861 - DNA, 13 bp, Artificial Sequence
  Oligonucleotide for detection of SNP TSC0052709
tgaaatcgtgttt

SEQ ID NO: 216862 - DNA, 13 bp, Artificial Sequence
  Oligonucleotide for detection of SNP TSC0052709
aaacacgatttca

SEQ ID NO: 216863 - DNA, 13 bp, Artificial Sequence
  Oligonucleotide for detection of SNP TSC0052709
tgaaacggtgttt

SEQ ID NO: 216864 - DNA, 13 bp, Artificial Sequence
  Oligonucleotide for detection of SNP TSC0052709
aaacaccgtttca

SEQ ID NO: 216865 - DNA, 13 bp, Artificial Sequence
  Oligonucleotide for detection of SNP TSC0052709
agatatggtttta

SEQ ID NO: 216866 - DNA, 13 bp, Artificial Sequence
  Oligonucleotide for detection of SNP TSC0052709
taaaaccatatct

SEQ ID NO: 216867 - DNA, 13 bp, Artificial Sequence
  Oligonucleotide for detection of SNP TSC0052709
agatattgtttta

SEQ ID NO: 216868 - DNA, 13 bp, Artificial Sequence
  Oligonucleotide for detection of SNP TSC0052709
taaaacaatatct

SEQ ID NO: 216869 - DNA, 13 bp, Artificial Sequence
  Oligonucleotide for detection of SNP TSC0052709
agatacggtttta

SEQ ID NO: 216870 - DNA, 13 bp, Artificial Sequence
  Oligonucleotide for detection of SNP TSC0052709
taaaaccgtatct

SEQ ID NO: 216871 - DNA, 13 bp, Artificial Sequence
  Oligonucleotide for detection of SNP TSC0052709
agatatcgtttta

SEQ ID NO: 216872 - DNA, 13 bp, Artificial Sequence
  Oligonucleotide for detection of SNP TSC0052709
taaaacgatatct

SEQ ID NO: 216873 - DNA, 13 bp, Artificial Sequence
  Oligonucleotide for detection of SNP TSC0052710
ttaagtgtatgta

SEQ ID NO: 216874 - DNA, 13 bp, Artificial Sequence
  Oligonucleotide for detection of SNP TSC0052710
tacatacacttaa

SEQ ID NO: 216875 - DNA, 13 bp, Artificial Sequence
  Oligonucleotide for detection of SNP TSC0052710
ttaagtatatgta

SEQ ID NO: 216876 - DNA, 13 bp, Artificial Sequence
  Oligonucleotide for detection of SNP TSC0052710
tacatatacttaa

SEQ ID NO: 216877 - DNA, 13 bp, Artificial Sequence
  Oligonucleotide for detection of SNP TSC0008736
tatagatgagaag

SEQ ID NO: 216878 - DNA, 13 bp, Artificial Sequence
  Oligonucleotide for detection of SNP TSC0008736
cttctcatctata

SEQ ID NO: 216879 - DNA, 13 bp, Artificial Sequence
  Oligonucleotide for detection of SNP TSC0008736
tatagacgagaag

SEQ ID NO: 216880 - DNA, 13 bp, Artificial Sequence
  Oligonucleotide for detection of SNP TSC0008736
cttctcgtctata

SEQ ID NO: 216881 - DNA, 13 bp, Artificial Sequence
  Oligonucleotide for detection of SNP TSC0052711
aaaaatagaagaa

SEQ ID NO: 216882 - DNA, 13 bp, Artificial Sequence
  Oligonucleotide for detection of SNP TSC0052711
ttcttctattttt

SEQ ID NO: 216883 - DNA, 13 bp, Artificial Sequence
  Oligonucleotide for detection of SNP TSC0052711
aaaaattgaagaa

SEQ ID NO: 216884 - DNA, 13 bp, Artificial Sequence
  Oligonucleotide for detection of SNP TSC0052711
ttcttcaattttt

SEQ ID NO: 216885 - DNA, 13 bp, Artificial Sequence
  Oligonucleotide for detection of SNP TSC0052711
aaaaatggaagaa

SEQ ID NO: 216886 - DNA, 13 bp, Artificial Sequence
  Oligonucleotide for detection of SNP TSC0052711
ttcttccattttt

SEQ ID NO: 216887 - DNA, 13 bp, Artificial Sequence
  Oligonucleotide for detection of SNP TSC0052711
aaaaatcgaagaa

SEQ ID NO: 216888 - DNA, 13 bp, Artificial Sequence
  Oligonucleotide for detection of SNP TSC0052711
ttcttcgattttt

SEQ ID NO: 216889 - DNA, 13 bp, Artificial Sequence
  Oligonucleotide for detection of SNP TSC0052716
tttgttattttga

SEQ ID NO: 216890 - DNA, 13 bp, Artificial Sequence
  Oligonucleotide for detection of SNP TSC0052716
tcaaaataacaaa

SEQ ID NO: 216891 - DNA, 13 bp, Artificial Sequence
  Oligonucleotide for detection of SNP TSC0052716
tttgtcgttttga

SEQ ID NO: 216892 - DNA, 13 bp, Artificial Sequence
  Oligonucleotide for detection of SNP TSC0052716
tcaaaacgacaaa

SEQ ID NO: 216893 - DNA, 13 bp, Artificial Sequence
  Oligonucleotide for detection of SNP TSC0052716
ttaaagtggtaaa

SEQ ID NO: 216894 - DNA, 13 bp, Artificial Sequence
  Oligonucleotide for detection of SNP TSC0052716
tttaccactttaa

SEQ ID NO: 216895 - DNA, 13 bp, Artificial Sequence
  Oligonucleotide for detection of SNP TSC0052716
ttaaagcggtaaa

SEQ ID NO: 216896 - DNA, 13 bp, Artificial Sequence
  Oligonucleotide for detection of SNP TSC0052716
tttaccgctttaa

SEQ ID NO: 216897 - DNA, 13 bp, Artificial Sequence
  Oligonucleotide for detection of SNP TSC0004928
agagtagttttta

SEQ ID NO: 216898 - DNA, 13 bp, Artificial Sequence
  Oligonucleotide for detection of SNP TSC0004928
taaaaactactct

SEQ ID NO: 216899 - DNA, 13 bp, Artificial Sequence
  Oligonucleotide for detection of SNP TSC0052717
aggtgttttattg

SEQ ID NO: 216900 - DNA, 13 bp, Artificial Sequence
  Oligonucleotide for detection of SNP TSC0052717
caataaaacacct

SEQ ID NO: 216901 - DNA, 13 bp, Artificial Sequence
  Oligonucleotide for detection of SNP TSC0052717
aggtgtgttattg

SEQ ID NO: 216902 - DNA, 13 bp, Artificial Sequence
  Oligonucleotide for detection of SNP TSC0052717
caataacacacct

SEQ ID NO: 216903 - DNA, 13 bp, Artificial Sequence
  Oligonucleotide for detection of SNP TSC0052717
taataagatattt

SEQ ID NO: 216904 - DNA, 13 bp, Artificial Sequence
  Oligonucleotide for detection of SNP TSC0052717
aaatatcttatta

SEQ ID NO: 216905 - DNA, 13 bp, Artificial Sequence
  Oligonucleotide for detection of SNP TSC0052717
taataaaatattt

SEQ ID NO: 216906 - DNA, 13 bp, Artificial Sequence
  Oligonucleotide for detection of SNP TSC0052717
aaatattttatta

SEQ ID NO: 216907 - DNA, 13 bp, Artificial Sequence
  Oligonucleotide for detection of SNP TSC0052717
taataatatattt

SEQ ID NO: 216908 - DNA, 13 bp, Artificial Sequence
  Oligonucleotide for detection of SNP TSC0052717
aaatatattatta

SEQ ID NO: 216909 - DNA, 13 bp, Artificial Sequence
  Oligonucleotide for detection of SNP TSC0052718
ttttttcggttag

SEQ ID NO: 216910 - DNA, 13 bp, Artificial Sequence
  Oligonucleotide for detection of SNP TSC0052718
ctaaccgaaaaaa

SEQ ID NO: 216911 - DNA, 13 bp, Artificial Sequence
  Oligonucleotide for detection of SNP TSC0052718
ttggttgagaggg

SEQ ID NO: 216912 - DNA, 13 bp, Artificial Sequence
  Oligonucleotide for detection of SNP TSC0052718
ccctctcaaccaa

SEQ ID NO: 216913 - DNA, 13 bp, Artificial Sequence
  Oligonucleotide for detection of SNP TSC0052718
ttggttaagaggg

SEQ ID NO: 216914 - DNA, 13 bp, Artificial Sequence
  Oligonucleotide for detection of SNP TSC0052718
ccctcttaaccaa

SEQ ID NO: 216915 - DNA, 13 bp, Artificial Sequence
  Oligonucleotide for detection of SNP TSC0052718
ttggtcgagaggg

SEQ ID NO: 216916 - DNA, 13 bp, Artificial Sequence
  Oligonucleotide for detection of SNP TSC0052718
ccctctcgaccaa

SEQ ID NO: 216917 - DNA, 13 bp, Artificial Sequence
  Oligonucleotide for detection of SNP TSC0052719
gataaaattttty

SEQ ID NO: 216918 - DNA, 13 bp, Artificial Sequence
  Oligonucleotide for detection of SNP TSC0052719
raaaaattttatc

SEQ ID NO: 216919 - DNA, 13 bp, Artificial Sequence
  Oligonucleotide for detection of SNP TSC0052719
gataaagttttty

SEQ ID NO: 216920 - DNA, 13 bp, Artificial Sequence
  Oligonucleotide for detection of SNP TSC0052719
raaaaactttatc

SEQ ID NO: 216921 - DNA, 13 bp, Artificial Sequence
  Oligonucleotide for detection of SNP TSC0052720
ggtggggggaata

SEQ ID NO: 216922 - DNA, 13 bp, Artificial Sequence
  Oligonucleotide for detection of SNP TSC0052720
tattccccccacc

SEQ ID NO: 216923 - DNA, 13 bp, Artificial Sequence
  Oligonucleotide for detection of SNP TSC0052720
ggtgggaggaata

SEQ ID NO: 216924 - DNA, 13 bp, Artificial Sequence
  Oligonucleotide for detection of SNP TSC0052720
tattcctcccacc

SEQ ID NO: 216925 - DNA, 13 bp, Artificial Sequence
  Oligonucleotide for detection of SNP TSC0052720
ggcggggggaata

SEQ ID NO: 216926 - DNA, 13 bp, Artificial Sequence
  Oligonucleotide for detection of SNP TSC0052720
tattccccccgcc

SEQ ID NO: 216927 - DNA, 13 bp, Artificial Sequence
  Oligonucleotide for detection of SNP TSC0052720
ggcgggaggaata

SEQ ID NO: 216928 - DNA, 13 bp, Artificial Sequence
  Oligonucleotide for detection of SNP TSC0052720
tattcctcccgcc

SEQ ID NO: 216929 - DNA, 13 bp, Artificial Sequence
  Oligonucleotide for detection of SNP TSC0052722
taattaggattgg

SEQ ID NO: 216930 - DNA, 13 bp, Artificial Sequence
  Oligonucleotide for detection of SNP TSC0052722
ccaatcctaatta

SEQ ID NO: 216931 - DNA, 13 bp, Artificial Sequence
  Oligonucleotide for detection of SNP TSC0052722
taattaagattgg

SEQ ID NO: 216932 - DNA, 13 bp, Artificial Sequence
  Oligonucleotide for detection of SNP TSC0052722
ccaatcttaatta

SEQ ID NO: 216933 - DNA, 13 bp, Artificial Sequence
  Oligonucleotide for detection of SNP TSC0052723
tttaaaaatttga

SEQ ID NO: 216934 - DNA, 13 bp, Artificial Sequence
  Oligonucleotide for detection of SNP TSC0052723
tcaaatttttaaa

SEQ ID NO: 216935 - DNA, 13 bp, Artificial Sequence
  Oligonucleotide for detection of SNP TSC0052723
tttaaagatttga

SEQ ID NO: 216936 - DNA, 13 bp, Artificial Sequence
  Oligonucleotide for detection of SNP TSC0052723
tcaaatctttaaa

SEQ ID NO: 216937 - DNA, 13 bp, Artificial Sequence
  Oligonucleotide for detection of SNP TSC0052724
aaaggtatgagty

SEQ ID NO: 216938 - DNA, 13 bp, Artificial Sequence
  Oligonucleotide for detection of SNP TSC0052724
ractcataccttt

SEQ ID NO: 216939 - DNA, 13 bp, Artificial Sequence
  Oligonucleotide for detection of SNP TSC0052724
aaaggtgtgagty

SEQ ID NO: 216940 - DNA, 13 bp, Artificial Sequence
  Oligonucleotide for detection of SNP TSC0052724
ractcacaccttt

SEQ ID NO: 216941 - DNA, 13 bp, Artificial Sequence
  Oligonucleotide for detection of SNP TSC0052724
aaaggcgtgagty

SEQ ID NO: 216942 - DNA, 13 bp, Artificial Sequence
  Oligonucleotide for detection of SNP TSC0052724
ractcacgccttt

SEQ ID NO: 216943 - DNA, 13 bp, Artificial Sequence
  Oligonucleotide for detection of SNP TSC0052725
tttaattgagtaa

SEQ ID NO: 216944 - DNA, 13 bp, Artificial Sequence
  Oligonucleotide for detection of SNP TSC0052725
ttactcaattaaa

SEQ ID NO: 216945 - DNA, 13 bp, Artificial Sequence
  Oligonucleotide for detection of SNP TSC0052725
tttaatggagtaa

SEQ ID NO: 216946 - DNA, 13 bp, Artificial Sequence
  Oligonucleotide for detection of SNP TSC0052725
ttactccattaaa

SEQ ID NO: 216947 - DNA, 13 bp, Artificial Sequence
  Oligonucleotide for detection of SNP TSC0007701
tttagtattaggg

SEQ ID NO: 216948 - DNA, 13 bp, Artificial Sequence
  Oligonucleotide for detection of SNP TSC0007701
ccctaatactaaa

SEQ ID NO: 216949 - DNA, 13 bp, Artificial Sequence
  Oligonucleotide for detection of SNP TSC0007701
tttagttttaggg

SEQ ID NO: 216950 - DNA, 13 bp, Artificial Sequence
  Oligonucleotide for detection of SNP TSC0007701
ccctaaaactaaa

SEQ ID NO: 216951 - DNA, 13 bp, Artificial Sequence
  Oligonucleotide for detection of SNP TSC0007701
ttttggtgttaaa

SEQ ID NO: 216952 - DNA, 13 bp, Artificial Sequence
  Oligonucleotide for detection of SNP TSC0007701
tttaacaccaaaa

SEQ ID NO: 216953 - DNA, 13 bp, Artificial Sequence
  Oligonucleotide for detection of SNP TSC0007701
ttttggggttaaa

SEQ ID NO: 216954 - DNA, 13 bp, Artificial Sequence
  Oligonucleotide for detection of SNP TSC0007701
tttaaccccaaaa

SEQ ID NO: 216955 - DNA, 13 bp, Artificial Sequence
  Oligonucleotide for detection of SNP TSC0052728
taaagtgttggty

SEQ ID NO: 216956 - DNA, 13 bp, Artificial Sequence
  Oligonucleotide for detection of SNP TSC0052728
raccaacacttta

SEQ ID NO: 216957 - DNA, 13 bp, Artificial Sequence
  Oligonucleotide for detection of SNP TSC0052728
taaagtattggty

SEQ ID NO: 216958 - DNA, 13 bp, Artificial Sequence
  Oligonucleotide for detection of SNP TSC0052728
raccaatacttta

SEQ ID NO: 216959 - DNA, 13 bp, Artificial Sequence
  Oligonucleotide for detection of SNP TSC0052729
agtttattatttt

SEQ ID NO: 216960 - DNA, 13 bp, Artificial Sequence
  Oligonucleotide for detection of SNP TSC0052729
aaaataataaact

SEQ ID NO: 216961 - DNA, 13 bp, Artificial Sequence
  Oligonucleotide for detection of SNP TSC0052729
agagtggtaggtt

SEQ ID NO: 216962 - DNA, 13 bp, Artificial Sequence
  Oligonucleotide for detection of SNP TSC0052729
aacctaccactct

SEQ ID NO: 216963 - DNA, 13 bp, Artificial Sequence
  Oligonucleotide for detection of SNP TSC0052729
agagtgttaggtt

SEQ ID NO: 216964 - DNA, 13 bp, Artificial Sequence
  Oligonucleotide for detection of SNP TSC0052729
aacctaacactct

SEQ ID NO: 216965 - DNA, 13 bp, Artificial Sequence
  Oligonucleotide for detection of SNP TSC0052730
tagtttcggtgay

SEQ ID NO: 216966 - DNA, 13 bp, Artificial Sequence
  Oligonucleotide for detection of SNP TSC0052730
rtcaccgaaacta

SEQ ID NO: 216967 - DNA, 13 bp, Artificial Sequence
  Oligonucleotide for detection of SNP TSC0052730
gttattgaggttg

SEQ ID NO: 216968 - DNA, 13 bp, Artificial Sequence
  Oligonucleotide for detection of SNP TSC0052730
caacctcaataac

SEQ ID NO: 216969 - DNA, 13 bp, Artificial Sequence
  Oligonucleotide for detection of SNP TSC0052730
gttatcgaggttg

SEQ ID NO: 216970 - DNA, 13 bp, Artificial Sequence
  Oligonucleotide for detection of SNP TSC0052730
caacctcgataac

SEQ ID NO: 216971 - DNA, 13 bp, Artificial Sequence
  Oligonucleotide for detection of SNP TSC0052731
tttagttggagtt

SEQ ID NO: 216972 - DNA, 13 bp, Artificial Sequence
  Oligonucleotide for detection of SNP TSC0052731
aactccaactaaa

SEQ ID NO: 216973 - DNA, 13 bp, Artificial Sequence
  Oligonucleotide for detection of SNP TSC0052731
tttagtcggagtt

SEQ ID NO: 216974 - DNA, 13 bp, Artificial Sequence
  Oligonucleotide for detection of SNP TSC0052731
aactccgactaaa

SEQ ID NO: 216975 - DNA, 13 bp, Artificial Sequence
  Oligonucleotide for detection of SNP TSC0052731
agttttggttgga

SEQ ID NO: 216976 - DNA, 13 bp, Artificial Sequence
  Oligonucleotide for detection of SNP TSC0052731
tccaaccaaaact

SEQ ID NO: 216977 - DNA, 13 bp, Artificial Sequence
  Oligonucleotide for detection of SNP TSC0052731
agttttagttgga

SEQ ID NO: 216978 - DNA, 13 bp, Artificial Sequence
  Oligonucleotide for detection of SNP TSC0052731
tccaactaaaact

SEQ ID NO: 216979 - DNA, 13 bp, Artificial Sequence
  Oligonucleotide for detection of SNP TSC0052731
agtttcggttgga

SEQ ID NO: 216980 - DNA, 13 bp, Artificial Sequence
  Oligonucleotide for detection of SNP TSC0052731
tccaaccgaaact

SEQ ID NO: 216981 - DNA, 13 bp, Artificial Sequence
  Oligonucleotide for detection of SNP TSC0052732
ttgttgagaggtg

SEQ ID NO: 216982 - DNA, 13 bp, Artificial Sequence
  Oligonucleotide for detection of SNP TSC0052732
cacctctcaacaa

SEQ ID NO: 216983 - DNA, 13 bp, Artificial Sequence
  Oligonucleotide for detection of SNP TSC0052732
ttgttgggaggtg

SEQ ID NO: 216984 - DNA, 13 bp, Artificial Sequence
  Oligonucleotide for detection of SNP TSC0052732
cacctcccaacaa

SEQ ID NO: 216985 - DNA, 13 bp, Artificial Sequence
  Oligonucleotide for detection of SNP TSC0052734
aagagaatttaaa

SEQ ID NO: 216986 - DNA, 13 bp, Artificial Sequence
  Oligonucleotide for detection of SNP TSC0052734
tttaaattctctt

SEQ ID NO: 216987 - DNA, 13 bp, Artificial Sequence
  Oligonucleotide for detection of SNP TSC0052734
aagagattttaaa

SEQ ID NO: 216988 - DNA, 13 bp, Artificial Sequence
  Oligonucleotide for detection of SNP TSC0052734
tttaaaatctctt

SEQ ID NO: 216989 - DNA, 13 bp, Artificial Sequence
  Oligonucleotide for detection of SNP TSC0052735
tagatgttgtgga

SEQ ID NO: 216990 - DNA, 13 bp, Artificial Sequence
  Oligonucleotide for detection of SNP TSC0052735
tccacaacatcta

SEQ ID NO: 216991 - DNA, 13 bp, Artificial Sequence
  Oligonucleotide for detection of SNP TSC0052735
tagatgatgtgga

SEQ ID NO: 216992 - DNA, 13 bp, Artificial Sequence
  Oligonucleotide for detection of SNP TSC0052735
tccacatcatcta

SEQ ID NO: 216993 - DNA, 13 bp, Artificial Sequence
  Oligonucleotide for detection of SNP TSC0052736
ttaaggagtaaat

SEQ ID NO: 216994 - DNA, 13 bp, Artificial Sequence
  Oligonucleotide for detection of SNP TSC0052736
atttactccttaa

SEQ ID NO: 216995 - DNA, 13 bp, Artificial Sequence
  Oligonucleotide for detection of SNP TSC0052736
ttaaggggtaaat

SEQ ID NO: 216996 - DNA, 13 bp, Artificial Sequence
  Oligonucleotide for detection of SNP TSC0052736
atttaccccttaa

SEQ ID NO: 216997 - DNA, 13 bp, Artificial Sequence
  Oligonucleotide for detection of SNP TSC0052741
gttaatattttty

SEQ ID NO: 216998 - DNA, 13 bp, Artificial Sequence
  Oligonucleotide for detection of SNP TSC0052741
raaaaatattaac

SEQ ID NO: 216999 - DNA, 13 bp, Artificial Sequence
  Oligonucleotide for detection of SNP TSC0052741
gttaattttttty

SEQ ID NO: 217000 - DNA, 13 bp, Artificial Sequence
  Oligonucleotide for detection of SNP TSC0052741
raaaaaaattaac

SEQ ID NO: 217001 - DNA, 13 bp, Artificial Sequence
  Oligonucleotide for detection of SNP TSC0052741
gaaaaatattgay

SEQ ID NO: 217002 - DNA, 13 bp, Artificial Sequence
  Oligonucleotide for detection of SNP TSC0052741
rtcaatatttttc

SEQ ID NO: 217003 - DNA, 13 bp, Artificial Sequence
  Oligonucleotide for detection of SNP TSC0052741
gaaaaagattgay

SEQ ID NO: 217004 - DNA, 13 bp, Artificial Sequence
  Oligonucleotide for detection of SNP TSC0052741
rtcaatctttttc

SEQ ID NO: 217005 - DNA, 13 bp, Artificial Sequence
  Oligonucleotide for detection of SNP TSC0052742
tatggaatagata

SEQ ID NO: 217006 - DNA, 13 bp, Artificial Sequence
  Oligonucleotide for detection of SNP TSC0052742
tatctattccata

SEQ ID NO: 217007 - DNA, 13 bp, Artificial Sequence
  Oligonucleotide for detection of SNP TSC0052742
tatggagtagata

SEQ ID NO: 217008 - DNA, 13 bp, Artificial Sequence
  Oligonucleotide for detection of SNP TSC0052742
tatctactccata

SEQ ID NO: 217009 - DNA, 13 bp, Artificial Sequence
  Oligonucleotide for detection of SNP TSC0052743
ttaattgaattty

SEQ ID NO: 217010 - DNA, 13 bp, Artificial Sequence
  Oligonucleotide for detection of SNP TSC0052743
raaattcaattaa

SEQ ID NO: 217011 - DNA, 13 bp, Artificial Sequence
  Oligonucleotide for detection of SNP TSC0052743
ttaattaaattty

SEQ ID NO: 217012 - DNA, 13 bp, Artificial Sequence
  Oligonucleotide for detection of SNP TSC0052743
raaatttaattaa

SEQ ID NO: 217013 - DNA, 13 bp, Artificial Sequence
  Oligonucleotide for detection of SNP TSC0052744
ttataaaatagag

SEQ ID NO: 217014 - DNA, 13 bp, Artificial Sequence
  Oligonucleotide for detection of SNP TSC0052744
ctctattttataa

SEQ ID NO: 217015 - DNA, 13 bp, Artificial Sequence
  Oligonucleotide for detection of SNP TSC0052744
ttataagatagag

SEQ ID NO: 217016 - DNA, 13 bp, Artificial Sequence
  Oligonucleotide for detection of SNP TSC0052744
ctctatcttataa

SEQ ID NO: 217017 - DNA, 13 bp, Artificial Sequence
  Oligonucleotide for detection of SNP TSC0052745
tattatattttaa

SEQ ID NO: 217018 - DNA, 13 bp, Artificial Sequence
  Oligonucleotide for detection of SNP TSC0052745
ttaaaatataata

SEQ ID NO: 217019 - DNA, 13 bp, Artificial Sequence
  Oligonucleotide for detection of SNP TSC0052745
tattatgttttaa

SEQ ID NO: 217020 - DNA, 13 bp, Artificial Sequence
  Oligonucleotide for detection of SNP TSC0052745
ttaaaacataata

SEQ ID NO: 217021 - DNA, 13 bp, Artificial Sequence
  Oligonucleotide for detection of SNP TSC0052748
ttgtttggtttty

SEQ ID NO: 217022 - DNA, 13 bp, Artificial Sequence
  Oligonucleotide for detection of SNP TSC0052748
raaaaccaaacaa

SEQ ID NO: 217023 - DNA, 13 bp, Artificial Sequence
  Oligonucleotide for detection of SNP TSC0052748
ttgttcggtttty

SEQ ID NO: 217024 - DNA, 13 bp, Artificial Sequence
  Oligonucleotide for detection of SNP TSC0052748
raaaaccgaacaa

SEQ ID NO: 217025 - DNA, 13 bp, Artificial Sequence
  Oligonucleotide for detection of SNP TSC0052748
gggagttgggtaa

SEQ ID NO: 217026 - DNA, 13 bp, Artificial Sequence
  Oligonucleotide for detection of SNP TSC0052748
ttacccaactccc

SEQ ID NO: 217027 - DNA, 13 bp, Artificial Sequence
  Oligonucleotide for detection of SNP TSC0052748
gggagtcgggtaa

SEQ ID NO: 217028 - DNA, 13 bp, Artificial Sequence
  Oligonucleotide for detection of SNP TSC0052748
ttacccgactccc

SEQ ID NO: 217029 - DNA, 13 bp, Artificial Sequence
  Oligonucleotide for detection of SNP TSC0052749
aaaattatatgaa

SEQ ID NO: 217030 - DNA, 13 bp, Artificial Sequence
  Oligonucleotide for detection of SNP TSC0052749
ttcatataatttt

SEQ ID NO: 217031 - DNA, 13 bp, Artificial Sequence
  Oligonucleotide for detection of SNP TSC0052749
aaaattttatgaa

SEQ ID NO: 217032 - DNA, 13 bp, Artificial Sequence
  Oligonucleotide for detection of SNP TSC0052749
ttcataaaatttt

SEQ ID NO: 217033 - DNA, 13 bp, Artificial Sequence
  Oligonucleotide for detection of SNP TSC0052753
ttaggagtataga

SEQ ID NO: 217034 - DNA, 13 bp, Artificial Sequence
  Oligonucleotide for detection of SNP TSC0052753
tctatactcctaa

SEQ ID NO: 217035 - DNA, 13 bp, Artificial Sequence
  Oligonucleotide for detection of SNP TSC0052753
ttaggaatataga

SEQ ID NO: 217036 - DNA, 13 bp, Artificial Sequence
  Oligonucleotide for detection of SNP TSC0052753
tctatattcctaa

SEQ ID NO: 217037 - DNA, 13 bp, Artificial Sequence
  Oligonucleotide for detection of SNP TSC0052754
ggggttttaggta

SEQ ID NO: 217038 - DNA, 13 bp, Artificial Sequence
  Oligonucleotide for detection of SNP TSC0052754
tacctaaaacccc

SEQ ID NO: 217039 - DNA, 13 bp, Artificial Sequence
  Oligonucleotide for detection of SNP TSC0052754
tatttgtagttty

SEQ ID NO: 217040 - DNA, 13 bp, Artificial Sequence
  Oligonucleotide for detection of SNP TSC0052754
raaactacaaata

SEQ ID NO: 217041 - DNA, 13 bp, Artificial Sequence
  Oligonucleotide for detection of SNP TSC0052756
tagattaaggttg

SEQ ID NO: 217042 - DNA, 13 bp, Artificial Sequence
  Oligonucleotide for detection of SNP TSC0052756
caaccttaatcta

SEQ ID NO: 217043 - DNA, 13 bp, Artificial Sequence
  Oligonucleotide for detection of SNP TSC0052756
tagattgaggttg

SEQ ID NO: 217044 - DNA, 13 bp, Artificial Sequence
  Oligonucleotide for detection of SNP TSC0052756
caacctcaatcta

SEQ ID NO: 217045 - DNA, 13 bp, Artificial Sequence
  Oligonucleotide for detection of SNP TSC0052756
tagatcgaggttg

SEQ ID NO: 217046 - DNA, 13 bp, Artificial Sequence
  Oligonucleotide for detection of SNP TSC0052756
caacctcgatcta

SEQ ID NO: 217047 - DNA, 13 bp, Artificial Sequence
  Oligonucleotide for detection of SNP TSC0052756
tagttttggtttg

SEQ ID NO: 217048 - DNA, 13 bp, Artificial Sequence
  Oligonucleotide for detection of SNP TSC0052756
caaaccaaaacta

SEQ ID NO: 217049 - DNA, 13 bp, Artificial Sequence
  Oligonucleotide for detection of SNP TSC0052756
tagtttcggtttg

SEQ ID NO: 217050 - DNA, 13 bp, Artificial Sequence
  Oligonucleotide for detection of SNP TSC0052756
caaaccgaaacta

SEQ ID NO: 217051 - DNA, 13 bp, Artificial Sequence
  Oligonucleotide for detection of SNP TSC0052759
tttgtatagagag

SEQ ID NO: 217052 - DNA, 13 bp, Artificial Sequence
  Oligonucleotide for detection of SNP TSC0052759
ctctctatacaaa

SEQ ID NO: 217053 - DNA, 13 bp, Artificial Sequence
  Oligonucleotide for detection of SNP TSC0052759
tttgtagagagag

SEQ ID NO: 217054 - DNA, 13 bp, Artificial Sequence
  Oligonucleotide for detection of SNP TSC0052759
ctctctctacaaa

SEQ ID NO: 217055 - DNA, 13 bp, Artificial Sequence
  Oligonucleotide for detection of SNP TSC0052759
ttttttatgtagg

SEQ ID NO: 217056 - DNA, 13 bp, Artificial Sequence
  Oligonucleotide for detection of SNP TSC0052759
cctacataaaaaa

SEQ ID NO: 217057 - DNA, 13 bp, Artificial Sequence
  Oligonucleotide for detection of SNP TSC0052759
ttttttttgtagg

SEQ ID NO: 217058 - DNA, 13 bp, Artificial Sequence
  Oligonucleotide for detection of SNP TSC0052759
cctacaaaaaaaa

SEQ ID NO: 217059 - DNA, 13 bp, Artificial Sequence
  Oligonucleotide for detection of SNP TSC0052760
taattattattay

SEQ ID NO: 217060 - DNA, 13 bp, Artificial Sequence
  Oligonucleotide for detection of SNP TSC0052760
rtaataataatta

SEQ ID NO: 217061 - DNA, 13 bp, Artificial Sequence
  Oligonucleotide for detection of SNP TSC0052760
taattagtattay

SEQ ID NO: 217062 - DNA, 13 bp, Artificial Sequence
  Oligonucleotide for detection of SNP TSC0052760
rtaatactaatta

SEQ ID NO: 217063 - DNA, 13 bp, Artificial Sequence
  Oligonucleotide for detection of SNP TSC0052760
gtagtagtaatta

SEQ ID NO: 217064 - DNA, 13 bp, Artificial Sequence
  Oligonucleotide for detection of SNP TSC0052760
taattactactac

SEQ ID NO: 217065 - DNA, 13 bp, Artificial Sequence
  Oligonucleotide for detection of SNP TSC0052760
gtagtattaatta

SEQ ID NO: 217066 - DNA, 13 bp, Artificial Sequence
  Oligonucleotide for detection of SNP TSC0052760
taattaatactac

SEQ ID NO: 217067 - DNA, 13 bp, Artificial Sequence
  Oligonucleotide for detection of SNP TSC0052761
aaagaatggtata

SEQ ID NO: 217068 - DNA, 13 bp, Artificial Sequence
  Oligonucleotide for detection of SNP TSC0052761
tataccattcttt

SEQ ID NO: 217069 - DNA, 13 bp, Artificial Sequence
  Oligonucleotide for detection of SNP TSC0052761
aaagaagggtata

SEQ ID NO: 217070 - DNA, 13 bp, Artificial Sequence
  Oligonucleotide for detection of SNP TSC0052761
tatacccttcttt

SEQ ID NO: 217071 - DNA, 13 bp, Artificial Sequence
  Oligonucleotide for detection of SNP TSC0052761
aaagaacggtata

SEQ ID NO: 217072 - DNA, 13 bp, Artificial Sequence
  Oligonucleotide for detection of SNP TSC0052761
tataccgttcttt

SEQ ID NO: 217073 - DNA, 13 bp, Artificial Sequence
  Oligonucleotide for detection of SNP TSC0052761
tgtattttttttt

SEQ ID NO: 217074 - DNA, 13 bp, Artificial Sequence
  Oligonucleotide for detection of SNP TSC0052761
aaaaaaaaataca

SEQ ID NO: 217075 - DNA, 13 bp, Artificial Sequence
  Oligonucleotide for detection of SNP TSC0052761
tgtatcgtttttt

SEQ ID NO: 217076 - DNA, 13 bp, Artificial Sequence
  Oligonucleotide for detection of SNP TSC0052761
aaaaaacgataca

SEQ ID NO: 217077 - DNA, 13 bp, Artificial Sequence
  Oligonucleotide for detection of SNP TSC0052767
atatggagttaat

SEQ ID NO: 217078 - DNA, 13 bp, Artificial Sequence
  Oligonucleotide for detection of SNP TSC0052767
attaactccatat

SEQ ID NO: 217079 - DNA, 13 bp, Artificial Sequence
  Oligonucleotide for detection of SNP TSC0052767
atatggtgttaat

SEQ ID NO: 217080 - DNA, 13 bp, Artificial Sequence
  Oligonucleotide for detection of SNP TSC0052767
attaacaccatat

SEQ ID NO: 217081 - DNA, 13 bp, Artificial Sequence
  Oligonucleotide for detection of SNP TSC0052767
attaattttatat

SEQ ID NO: 217082 - DNA, 13 bp, Artificial Sequence
  Oligonucleotide for detection of SNP TSC0052767
atataaaattaat

SEQ ID NO: 217083 - DNA, 13 bp, Artificial Sequence
  Oligonucleotide for detection of SNP TSC0052767
attaatattatat

SEQ ID NO: 217084 - DNA, 13 bp, Artificial Sequence
  Oligonucleotide for detection of SNP TSC0052767
atataatattaat

SEQ ID NO: 217085 - DNA, 13 bp, Artificial Sequence
  Oligonucleotide for detection of SNP TSC0052768
atttaaaattgtt

SEQ ID NO: 217086 - DNA, 13 bp, Artificial Sequence
  Oligonucleotide for detection of SNP TSC0052768
aacaattttaaat

SEQ ID NO: 217087 - DNA, 13 bp, Artificial Sequence
  Oligonucleotide for detection of SNP TSC0052768
atttaagattgtt

SEQ ID NO: 217088 - DNA, 13 bp, Artificial Sequence
  Oligonucleotide for detection of SNP TSC0052768
aacaatcttaaat

SEQ ID NO: 217089 - DNA, 13 bp, Artificial Sequence
  Oligonucleotide for detection of SNP TSC0052769
gagtatatagtat

SEQ ID NO: 217090 - DNA, 13 bp, Artificial Sequence
  Oligonucleotide for detection of SNP TSC0052769
atactatatactc

SEQ ID NO: 217091 - DNA, 13 bp, Artificial Sequence
  Oligonucleotide for detection of SNP TSC0052769
gagtatgtagtat

SEQ ID NO: 217092 - DNA, 13 bp, Artificial Sequence
  Oligonucleotide for detection of SNP TSC0052769
atactacatactc

SEQ ID NO: 217093 - DNA, 13 bp, Artificial Sequence
  Oligonucleotide for detection of SNP TSC0052769
gagtacgtagtat

SEQ ID NO: 217094 - DNA, 13 bp, Artificial Sequence
  Oligonucleotide for detection of SNP TSC0052769
atactacgtactc

SEQ ID NO: 217095 - DNA, 13 bp, Artificial Sequence
  Oligonucleotide for detection of SNP TSC0052769
atgttatgtatty

SEQ ID NO: 217096 - DNA, 13 bp, Artificial Sequence
  Oligonucleotide for detection of SNP TSC0052769
raatacataacat

SEQ ID NO: 217097 - DNA, 13 bp, Artificial Sequence
  Oligonucleotide for detection of SNP TSC0052769
atgttacgtatty

SEQ ID NO: 217098 - DNA, 13 bp, Artificial Sequence
  Oligonucleotide for detection of SNP TSC0052769
raatacgtaacat

SEQ ID NO: 217099 - DNA, 13 bp, Artificial Sequence
  Oligonucleotide for detection of SNP TSC0052770
aagtttatgttty

SEQ ID NO: 217100 - DNA, 13 bp, Artificial Sequence
  Oligonucleotide for detection of SNP TSC0052770
raaacataaactt

SEQ ID NO: 217101 - DNA, 13 bp, Artificial Sequence
  Oligonucleotide for detection of SNP TSC0052770
aagtttgtgttty

SEQ ID NO: 217102 - DNA, 13 bp, Artificial Sequence
  Oligonucleotide for detection of SNP TSC0052770
raaacacaaactt

SEQ ID NO: 217103 - DNA, 13 bp, Artificial Sequence
  Oligonucleotide for detection of SNP TSC0052771
tagggaatgtatt

SEQ ID NO: 217104 - DNA, 13 bp, Artificial Sequence
  Oligonucleotide for detection of SNP TSC0052771
aatacattcccta

SEQ ID NO: 217105 - DNA, 13 bp, Artificial Sequence
  Oligonucleotide for detection of SNP TSC0052771
tagggagtgtatt

SEQ ID NO: 217106 - DNA, 13 bp, Artificial Sequence
  Oligonucleotide for detection of SNP TSC0052771
aatacactcccta

SEQ ID NO: 217107 - DNA, 13 bp, Artificial Sequence
  Oligonucleotide for detection of SNP TSC0052771
tagggaacgtatt

SEQ ID NO: 217108 - DNA, 13 bp, Artificial Sequence
  Oligonucleotide for detection of SNP TSC0052771
aatacgttcccta

SEQ ID NO: 217109 - DNA, 13 bp, Artificial Sequence
  Oligonucleotide for detection of SNP TSC0052771
tagggagcgtatt

SEQ ID NO: 217110 - DNA, 13 bp, Artificial Sequence
  Oligonucleotide for detection of SNP TSC0052771
aatacgctcccta

SEQ ID NO: 217111 - DNA, 13 bp, Artificial Sequence
  Oligonucleotide for detection of SNP TSC0052772
aaaatagtggtgt

SEQ ID NO: 217112 - DNA, 13 bp, Artificial Sequence
  Oligonucleotide for detection of SNP TSC0052772
acaccactatttt

SEQ ID NO: 217113 - DNA, 13 bp, Artificial Sequence
  Oligonucleotide for detection of SNP TSC0052772
aaaataatggtgt

SEQ ID NO: 217114 - DNA, 13 bp, Artificial Sequence
  Oligonucleotide for detection of SNP TSC0052772
acaccattatttt

SEQ ID NO: 217115 - DNA, 13 bp, Artificial Sequence
  Oligonucleotide for detection of SNP TSC0052773
attagatgaaatg

SEQ ID NO: 217116 - DNA, 13 bp, Artificial Sequence
  Oligonucleotide for detection of SNP TSC0052773
catttcatctaat

SEQ ID NO: 217117 - DNA, 13 bp, Artificial Sequence
  Oligonucleotide for detection of SNP TSC0052773
attagacgaaatg

SEQ ID NO: 217118 - DNA, 13 bp, Artificial Sequence
  Oligonucleotide for detection of SNP TSC0052773
catttcgtctaat

SEQ ID NO: 217119 - DNA, 13 bp, Artificial Sequence
  Oligonucleotide for detection of SNP TSC0052775
aaataagtttaga

SEQ ID NO: 217120 - DNA, 13 bp, Artificial Sequence
  Oligonucleotide for detection of SNP TSC0052775
tctaaacttattt

SEQ ID NO: 217121 - DNA, 13 bp, Artificial Sequence
  Oligonucleotide for detection of SNP TSC0052777
gaattattattty

SEQ ID NO: 217122 - DNA, 13 bp, Artificial Sequence
  Oligonucleotide for detection of SNP TSC0052777
raaataataattc

SEQ ID NO: 217123 - DNA, 13 bp, Artificial Sequence
  Oligonucleotide for detection of SNP TSC0052777
gaattagtattty

SEQ ID NO: 217124 - DNA, 13 bp, Artificial Sequence
  Oligonucleotide for detection of SNP TSC0052777
raaatactaattc

SEQ ID NO: 217125 - DNA, 13 bp, Artificial Sequence
  Oligonucleotide for detection of SNP TSC0052777
gaaatgatagtty

SEQ ID NO: 217126 - DNA, 13 bp, Artificial Sequence
  Oligonucleotide for detection of SNP TSC0052777
raactatcatttc

SEQ ID NO: 217127 - DNA, 13 bp, Artificial Sequence
  Oligonucleotide for detection of SNP TSC0052778
gttttgtttaagg

SEQ ID NO: 217128 - DNA, 13 bp, Artificial Sequence
  Oligonucleotide for detection of SNP TSC0052778
ccttaaacaaaac

SEQ ID NO: 217129 - DNA, 13 bp, Artificial Sequence
  Oligonucleotide for detection of SNP TSC0052778
gttttggttaagg

SEQ ID NO: 217130 - DNA, 13 bp, Artificial Sequence
  Oligonucleotide for detection of SNP TSC0052778
ccttaaccaaaac

SEQ ID NO: 217131 - DNA, 13 bp, Artificial Sequence
  Oligonucleotide for detection of SNP TSC0052780
gtttagtgaagty

SEQ ID NO: 217132 - DNA, 13 bp, Artificial Sequence
  Oligonucleotide for detection of SNP TSC0052780
racttcactaaac

SEQ ID NO: 217133 - DNA, 13 bp, Artificial Sequence
  Oligonucleotide for detection of SNP TSC0052780
gtttagcgaagty

SEQ ID NO: 217134 - DNA, 13 bp, Artificial Sequence
  Oligonucleotide for detection of SNP TSC0052780
racttcgctaaac

SEQ ID NO: 217135 - DNA, 13 bp, Artificial Sequence
  Oligonucleotide for detection of SNP TSC0052780
ggttttgttaagy

SEQ ID NO: 217136 - DNA, 13 bp, Artificial Sequence
  Oligonucleotide for detection of SNP TSC0052780
rcttaacaaaacc

SEQ ID NO: 217137 - DNA, 13 bp, Artificial Sequence
  Oligonucleotide for detection of SNP TSC0052780
ggttttattaagy

SEQ ID NO: 217138 - DNA, 13 bp, Artificial Sequence
  Oligonucleotide for detection of SNP TSC0052780
rcttaataaaacc

SEQ ID NO: 217139 - DNA, 13 bp, Artificial Sequence
  Oligonucleotide for detection of SNP TSC0052780
ggtttcgttaagy

SEQ ID NO: 217140 - DNA, 13 bp, Artificial Sequence
  Oligonucleotide for detection of SNP TSC0052780
rcttaacgaaacc

SEQ ID NO: 217141 - DNA, 13 bp, Artificial Sequence
  Oligonucleotide for detection of SNP TSC0052781
ggttttagagtga

SEQ ID NO: 217142 - DNA, 13 bp, Artificial Sequence
  Oligonucleotide for detection of SNP TSC0052781
tcactctaaaacc

SEQ ID NO: 217143 - DNA, 13 bp, Artificial Sequence
  Oligonucleotide for detection of SNP TSC0052781
ggttttggagtga

SEQ ID NO: 217144 - DNA, 13 bp, Artificial Sequence
  Oligonucleotide for detection of SNP TSC0052781
tcactccaaaacc

SEQ ID NO: 217145 - DNA, 13 bp, Artificial Sequence
  Oligonucleotide for detection of SNP TSC0052781
ggtttcggagtga

SEQ ID NO: 217146 - DNA, 13 bp, Artificial Sequence
  Oligonucleotide for detection of SNP TSC0052781
tcactccgaaacc

SEQ ID NO: 217147 - DNA, 13 bp, Artificial Sequence
  Oligonucleotide for detection of SNP TSC0052781
ttattttggagty

SEQ ID NO: 217148 - DNA, 13 bp, Artificial Sequence
  Oligonucleotide for detection of SNP TSC0052781
ractccaaaataa

SEQ ID NO: 217149 - DNA, 13 bp, Artificial Sequence
  Oligonucleotide for detection of SNP TSC0052781
ttatttcggagty

SEQ ID NO: 217150 - DNA, 13 bp, Artificial Sequence
  Oligonucleotide for detection of SNP TSC0052781
ractccgaaataa

SEQ ID NO: 217151 - DNA, 13 bp, Artificial Sequence
  Oligonucleotide for detection of SNP TSC0052782
atttatatatgga

SEQ ID NO: 217152 - DNA, 13 bp, Artificial Sequence
  Oligonucleotide for detection of SNP TSC0052782
tccatatataaat

SEQ ID NO: 217153 - DNA, 13 bp, Artificial Sequence
  Oligonucleotide for detection of SNP TSC0052782
atttatttatgga

SEQ ID NO: 217154 - DNA, 13 bp, Artificial Sequence
  Oligonucleotide for detection of SNP TSC0052782
tccataaataaat

SEQ ID NO: 217155 - DNA, 13 bp, Artificial Sequence
  Oligonucleotide for detection of SNP TSC0052782
tttatgtataaat

SEQ ID NO: 217156 - DNA, 13 bp, Artificial Sequence
  Oligonucleotide for detection of SNP TSC0052782
atttatacataaa

SEQ ID NO: 217157 - DNA, 13 bp, Artificial Sequence
  Oligonucleotide for detection of SNP TSC0052782
tttatggataaat

SEQ ID NO: 217158 - DNA, 13 bp, Artificial Sequence
  Oligonucleotide for detection of SNP TSC0052782
atttatccataaa

SEQ ID NO: 217159 - DNA, 13 bp, Artificial Sequence
  Oligonucleotide for detection of SNP TSC0052784
ttaggaattgagt

SEQ ID NO: 217160 - DNA, 13 bp, Artificial Sequence
  Oligonucleotide for detection of SNP TSC0052784
actcaattcctaa

SEQ ID NO: 217161 - DNA, 13 bp, Artificial Sequence
  Oligonucleotide for detection of SNP TSC0052784
ttaggatttgagt

SEQ ID NO: 217162 - DNA, 13 bp, Artificial Sequence
  Oligonucleotide for detection of SNP TSC0052784
actcaaatcctaa

SEQ ID NO: 217163 - DNA, 13 bp, Artificial Sequence
  Oligonucleotide for detection of SNP TSC0052784
atttagtttttaa

SEQ ID NO: 217164 - DNA, 13 bp, Artificial Sequence
  Oligonucleotide for detection of SNP TSC0052784
ttaaaaactaaat

SEQ ID NO: 217165 - DNA, 13 bp, Artificial Sequence
  Oligonucleotide for detection of SNP TSC0052784
atttaggttttaa

SEQ ID NO: 217166 - DNA, 13 bp, Artificial Sequence
  Oligonucleotide for detection of SNP TSC0052784
ttaaaacctaaat

SEQ ID NO: 217167 - DNA, 13 bp, Artificial Sequence
  Oligonucleotide for detection of SNP TSC0052785
gaggttaaatttt

SEQ ID NO: 217168 - DNA, 13 bp, Artificial Sequence
  Oligonucleotide for detection of SNP TSC0052785
aaaatttaacctc

SEQ ID NO: 217169 - DNA, 13 bp, Artificial Sequence
  Oligonucleotide for detection of SNP TSC0052785
gaggttgaatttt

SEQ ID NO: 217170 - DNA, 13 bp, Artificial Sequence
  Oligonucleotide for detection of SNP TSC0052785
aaaattcaacctc

SEQ ID NO: 217171 - DNA, 13 bp, Artificial Sequence
  Oligonucleotide for detection of SNP TSC0052785
gaggtcgaatttt

SEQ ID NO: 217172 - DNA, 13 bp, Artificial Sequence
  Oligonucleotide for detection of SNP TSC0052785
aaaattcgacctc

SEQ ID NO: 217173 - DNA, 13 bp, Artificial Sequence
  Oligonucleotide for detection of SNP TSC0052785
aagatttgattty

SEQ ID NO: 217174 - DNA, 13 bp, Artificial Sequence
  Oligonucleotide for detection of SNP TSC0052785
raaatcaaatctt

SEQ ID NO: 217175 - DNA, 13 bp, Artificial Sequence
  Oligonucleotide for detection of SNP TSC0052785
aagattcgattty

SEQ ID NO: 217176 - DNA, 13 bp, Artificial Sequence
  Oligonucleotide for detection of SNP TSC0052785
raaatcgaatctt

SEQ ID NO: 217177 - DNA, 13 bp, Artificial Sequence
  Oligonucleotide for detection of SNP TSC0052786
agaaagttggaaa

SEQ ID NO: 217178 - DNA, 13 bp, Artificial Sequence
  Oligonucleotide for detection of SNP TSC0052786
tttccaactttct

SEQ ID NO: 217179 - DNA, 13 bp, Artificial Sequence
  Oligonucleotide for detection of SNP TSC0052786
agaaagatggaaa

SEQ ID NO: 217180 - DNA, 13 bp, Artificial Sequence
  Oligonucleotide for detection of SNP TSC0052786
tttccatctttct

SEQ ID NO: 217181 - DNA, 13 bp, Artificial Sequence
  Oligonucleotide for detection of SNP TSC0052789
gtttaaaaaattt

SEQ ID NO: 217182 - DNA, 13 bp, Artificial Sequence
  Oligonucleotide for detection of SNP TSC0052789
aaattttttaaac

SEQ ID NO: 217183 - DNA, 13 bp, Artificial Sequence
  Oligonucleotide for detection of SNP TSC0052789
gtttaataaattt

SEQ ID NO: 217184 - DNA, 13 bp, Artificial Sequence
  Oligonucleotide for detection of SNP TSC0052789
aaatttattaaac

SEQ ID NO: 217185 - DNA, 13 bp, Artificial Sequence
  Oligonucleotide for detection of SNP TSC0052789
aagttttttggay

SEQ ID NO: 217186 - DNA, 13 bp, Artificial Sequence
  Oligonucleotide for detection of SNP TSC0052789
rtccaaaaaactt

SEQ ID NO: 217187 - DNA, 13 bp, Artificial Sequence
  Oligonucleotide for detection of SNP TSC0052789
aagtttgttggay

SEQ ID NO: 217188 - DNA, 13 bp, Artificial Sequence
  Oligonucleotide for detection of SNP TSC0052789
rtccaacaaactt

SEQ ID NO: 217189 - DNA, 13 bp, Artificial Sequence
  Oligonucleotide for detection of SNP TSC0052790
atatttgatgttg

SEQ ID NO: 217190 - DNA, 13 bp, Artificial Sequence
  Oligonucleotide for detection of SNP TSC0052790
caacatcaaatat

SEQ ID NO: 217191 - DNA, 13 bp, Artificial Sequence
  Oligonucleotide for detection of SNP TSC0052790
atatttaatgttg

SEQ ID NO: 217192 - DNA, 13 bp, Artificial Sequence
  Oligonucleotide for detection of SNP TSC0052790
caacattaaatat

SEQ ID NO: 217193 - DNA, 13 bp, Artificial Sequence
  Oligonucleotide for detection of SNP TSC0052790
atatttgatgtcg

SEQ ID NO: 217194 - DNA, 13 bp, Artificial Sequence
  Oligonucleotide for detection of SNP TSC0052790
cgacatcaaatat

SEQ ID NO: 217195 - DNA, 13 bp, Artificial Sequence
  Oligonucleotide for detection of SNP TSC0052790
atatttaatgtcg

SEQ ID NO: 217196 - DNA, 13 bp, Artificial Sequence
  Oligonucleotide for detection of SNP TSC0052790
cgacattaaatat

SEQ ID NO: 217197 - DNA, 13 bp, Artificial Sequence
  Oligonucleotide for detection of SNP TSC0052791
tttgaaaaggtgy

SEQ ID NO: 217198 - DNA, 13 bp, Artificial Sequence
  Oligonucleotide for detection of SNP TSC0052791
rcaccttttcaaa

SEQ ID NO: 217199 - DNA, 13 bp, Artificial Sequence
  Oligonucleotide for detection of SNP TSC0052791
tttgaagaggtgy

SEQ ID NO: 217200 - DNA, 13 bp, Artificial Sequence
  Oligonucleotide for detection of SNP TSC0052791
rcacctcttcaaa

SEQ ID NO: 217201 - DNA, 13 bp, Artificial Sequence
  Oligonucleotide for detection of SNP TSC0052794
ggttttatgtaga

SEQ ID NO: 217202 - DNA, 13 bp, Artificial Sequence
  Oligonucleotide for detection of SNP TSC0052794
tctacataaaacc

SEQ ID NO: 217203 - DNA, 13 bp, Artificial Sequence
  Oligonucleotide for detection of SNP TSC0052794
ggttttgtgtaga

SEQ ID NO: 217204 - DNA, 13 bp, Artificial Sequence
  Oligonucleotide for detection of SNP TSC0052794
tctacacaaaacc

SEQ ID NO: 217205 - DNA, 13 bp, Artificial Sequence
  Oligonucleotide for detection of SNP TSC0052794
ggtttcgtgtaga

SEQ ID NO: 217206 - DNA, 13 bp, Artificial Sequence
  Oligonucleotide for detection of SNP TSC0052794
tctacacgaaacc

SEQ ID NO: 217207 - DNA, 13 bp, Artificial Sequence
  Oligonucleotide for detection of SNP TSC0052794
tttgtatggagty

SEQ ID NO: 217208 - DNA, 13 bp, Artificial Sequence
  Oligonucleotide for detection of SNP TSC0052794
ractccatacaaa

SEQ ID NO: 217209 - DNA, 13 bp, Artificial Sequence
  Oligonucleotide for detection of SNP TSC0052794
tttgtacggagty

SEQ ID NO: 217210 - DNA, 13 bp, Artificial Sequence
  Oligonucleotide for detection of SNP TSC0052794
ractccgtacaaa

SEQ ID NO: 217211 - DNA, 13 bp, Artificial Sequence
  Oligonucleotide for detection of SNP TSC0052795
atagttatatggy

SEQ ID NO: 217212 - DNA, 13 bp, Artificial Sequence
  Oligonucleotide for detection of SNP TSC0052795
rccatataactat

SEQ ID NO: 217213 - DNA, 13 bp, Artificial Sequence
  Oligonucleotide for detection of SNP TSC0052795
atagttgtatggy

SEQ ID NO: 217214 - DNA, 13 bp, Artificial Sequence
  Oligonucleotide for detection of SNP TSC0052795
rccatacaactat

SEQ ID NO: 217215 - DNA, 13 bp, Artificial Sequence
  Oligonucleotide for detection of SNP TSC0052795
atagtcgtatggy

SEQ ID NO: 217216 - DNA, 13 bp, Artificial Sequence
  Oligonucleotide for detection of SNP TSC0052795
rccatacgactat

SEQ ID NO: 217217 - DNA, 13 bp, Artificial Sequence
  Oligonucleotide for detection of SNP TSC0052795
gttatatgattgt

SEQ ID NO: 217218 - DNA, 13 bp, Artificial Sequence
  Oligonucleotide for detection of SNP TSC0052795
acaatcatataac

SEQ ID NO: 217219 - DNA, 13 bp, Artificial Sequence
  Oligonucleotide for detection of SNP TSC0052795
gttatacgattgt

SEQ ID NO: 217220 - DNA, 13 bp, Artificial Sequence
  Oligonucleotide for detection of SNP TSC0052795
acaatcgtataac

SEQ ID NO: 217221 - DNA, 13 bp, Artificial Sequence
  Oligonucleotide for detection of SNP TSC0052796
gttaataagttat

SEQ ID NO: 217222 - DNA, 13 bp, Artificial Sequence
  Oligonucleotide for detection of SNP TSC0052796
ataacttattaac

SEQ ID NO: 217223 - DNA, 13 bp, Artificial Sequence
  Oligonucleotide for detection of SNP TSC0052796
gttaattagttat

SEQ ID NO: 217224 - DNA, 13 bp, Artificial Sequence
  Oligonucleotide for detection of SNP TSC0052796
ataactaattaac

SEQ ID NO: 217225 - DNA, 13 bp, Artificial Sequence
  Oligonucleotide for detection of SNP TSC0052796
atagtttattggy

SEQ ID NO: 217226 - DNA, 13 bp, Artificial Sequence
  Oligonucleotide for detection of SNP TSC0052796
rccaataaactat

SEQ ID NO: 217227 - DNA, 13 bp, Artificial Sequence
  Oligonucleotide for detection of SNP TSC0052796
atagttaattggy

SEQ ID NO: 217228 - DNA, 13 bp, Artificial Sequence
  Oligonucleotide for detection of SNP TSC0052796
rccaattaactat

SEQ ID NO: 217229 - DNA, 13 bp, Artificial Sequence
  Oligonucleotide for detection of SNP TSC0052797
agtgtgaatatta

SEQ ID NO: 217230 - DNA, 13 bp, Artificial Sequence
  Oligonucleotide for detection of SNP TSC0052797
taatattcacact

SEQ ID NO: 217231 - DNA, 13 bp, Artificial Sequence
  Oligonucleotide for detection of SNP TSC0052797
agtgtgtatatta

SEQ ID NO: 217232 - DNA, 13 bp, Artificial Sequence
  Oligonucleotide for detection of SNP TSC0052797
taatatacacact

SEQ ID NO: 217233 - DNA, 13 bp, Artificial Sequence
  Oligonucleotide for detection of SNP TSC0052797
tggtatttatatt

SEQ ID NO: 217234 - DNA, 13 bp, Artificial Sequence
  Oligonucleotide for detection of SNP TSC0052797
aatataaatacca

SEQ ID NO: 217235 - DNA, 13 bp, Artificial Sequence
  Oligonucleotide for detection of SNP TSC0052797
tggtatatatatt

SEQ ID NO: 217236 - DNA, 13 bp, Artificial Sequence
  Oligonucleotide for detection of SNP TSC0052797
aatatatatacca

SEQ ID NO: 217237 - DNA, 13 bp, Artificial Sequence
  Oligonucleotide for detection of SNP TSC0052802
agtataaaagttg

SEQ ID NO: 217238 - DNA, 13 bp, Artificial Sequence
  Oligonucleotide for detection of SNP TSC0052802
caacttttatact

SEQ ID NO: 217239 - DNA, 13 bp, Artificial Sequence
  Oligonucleotide for detection of SNP TSC0052802
agtatagaagttg

SEQ ID NO: 217240 - DNA, 13 bp, Artificial Sequence
  Oligonucleotide for detection of SNP TSC0052802
caacttctatact

SEQ ID NO: 217241 - DNA, 13 bp, Artificial Sequence
  Oligonucleotide for detection of SNP TSC0052803
tttaggatgtatt

SEQ ID NO: 217242 - DNA, 13 bp, Artificial Sequence
  Oligonucleotide for detection of SNP TSC0052803
aatacatcctaaa

SEQ ID NO: 217243 - DNA, 13 bp, Artificial Sequence
  Oligonucleotide for detection of SNP TSC0052803
tttaggttgtatt

SEQ ID NO: 217244 - DNA, 13 bp, Artificial Sequence
  Oligonucleotide for detection of SNP TSC0052803
aatacaacctaaa

SEQ ID NO: 217245 - DNA, 13 bp, Artificial Sequence
  Oligonucleotide for detection of SNP TSC0052803
agtatattttgag

SEQ ID NO: 217246 - DNA, 13 bp, Artificial Sequence
  Oligonucleotide for detection of SNP TSC0052803
ctcaaaatatact

SEQ ID NO: 217247 - DNA, 13 bp, Artificial Sequence
  Oligonucleotide for detection of SNP TSC0052803
agtatagtttgag

SEQ ID NO: 217248 - DNA, 13 bp, Artificial Sequence
  Oligonucleotide for detection of SNP TSC0052803
ctcaaactatact

SEQ ID NO: 217249 - DNA, 13 bp, Artificial Sequence
  Oligonucleotide for detection of SNP TSC0052804
tgtatatgtaatt

SEQ ID NO: 217250 - DNA, 13 bp, Artificial Sequence
  Oligonucleotide for detection of SNP TSC0052804
aattacatataca

SEQ ID NO: 217251 - DNA, 13 bp, Artificial Sequence
  Oligonucleotide for detection of SNP TSC0052804
tgtatacgtaatt

SEQ ID NO: 217252 - DNA, 13 bp, Artificial Sequence
  Oligonucleotide for detection of SNP TSC0052804
aattacgtataca

SEQ ID NO: 217253 - DNA, 13 bp, Artificial Sequence
  Oligonucleotide for detection of SNP TSC0052804
agttatgtatata

SEQ ID NO: 217254 - DNA, 13 bp, Artificial Sequence
  Oligonucleotide for detection of SNP TSC0052804
tatatacataact

SEQ ID NO: 217255 - DNA, 13 bp, Artificial Sequence
  Oligonucleotide for detection of SNP TSC0052804
agttatatatata

SEQ ID NO: 217256 - DNA, 13 bp, Artificial Sequence
  Oligonucleotide for detection of SNP TSC0052804
tatatatataact

SEQ ID NO: 217257 - DNA, 13 bp, Artificial Sequence
  Oligonucleotide for detection of SNP TSC0052804
agttacgtatata

SEQ ID NO: 217258 - DNA, 13 bp, Artificial Sequence
  Oligonucleotide for detection of SNP TSC0052804
tatatacgtaact

SEQ ID NO: 217259 - DNA, 13 bp, Artificial Sequence
  Oligonucleotide for detection of SNP TSC0052805
ttttttggtttat

SEQ ID NO: 217260 - DNA, 13 bp, Artificial Sequence
  Oligonucleotide for detection of SNP TSC0052805
ataaaccaaaaaa

SEQ ID NO: 217261 - DNA, 13 bp, Artificial Sequence
  Oligonucleotide for detection of SNP TSC0052807
tattatgtattay

SEQ ID NO: 217262 - DNA, 13 bp, Artificial Sequence
  Oligonucleotide for detection of SNP TSC0052807
rtaatacataata

SEQ ID NO: 217263 - DNA, 13 bp, Artificial Sequence
  Oligonucleotide for detection of SNP TSC0052808
agtgttttgagta

SEQ ID NO: 217264 - DNA, 13 bp, Artificial Sequence
  Oligonucleotide for detection of SNP TSC0052808
tactcaaaacact

SEQ ID NO: 217265 - DNA, 13 bp, Artificial Sequence
  Oligonucleotide for detection of SNP TSC0052808
agtgttgtgagta

SEQ ID NO: 217266 - DNA, 13 bp, Artificial Sequence
  Oligonucleotide for detection of SNP TSC0052808
tactcacaacact

SEQ ID NO: 217267 - DNA, 13 bp, Artificial Sequence
  Oligonucleotide for detection of SNP TSC0052809
tttatagttaaat

SEQ ID NO: 217268 - DNA, 13 bp, Artificial Sequence
  Oligonucleotide for detection of SNP TSC0052809
atttaactataaa

SEQ ID NO: 217269 - DNA, 13 bp, Artificial Sequence
  Oligonucleotide for detection of SNP TSC0052809
tttataattaaat

SEQ ID NO: 217270 - DNA, 13 bp, Artificial Sequence
  Oligonucleotide for detection of SNP TSC0052809
atttaattataaa

SEQ ID NO: 217271 - DNA, 13 bp, Artificial Sequence
  Oligonucleotide for detection of SNP TSC0052811
taagaaatatatg

SEQ ID NO: 217272 - DNA, 13 bp, Artificial Sequence
  Oligonucleotide for detection of SNP TSC0052811
catatatttctta

SEQ ID NO: 217273 - DNA, 13 bp, Artificial Sequence
  Oligonucleotide for detection of SNP TSC0052811
taagaattatatg

SEQ ID NO: 217274 - DNA, 13 bp, Artificial Sequence
  Oligonucleotide for detection of SNP TSC0052811
catataattctta

SEQ ID NO: 217275 - DNA, 13 bp, Artificial Sequence
  Oligonucleotide for detection of SNP TSC0052811
tatgtgttttttg

SEQ ID NO: 217276 - DNA, 13 bp, Artificial Sequence
  Oligonucleotide for detection of SNP TSC0052811
caaaaaacacata

SEQ ID NO: 217277 - DNA, 13 bp, Artificial Sequence
  Oligonucleotide for detection of SNP TSC0052811
tatgtggtttttg

SEQ ID NO: 217278 - DNA, 13 bp, Artificial Sequence
  Oligonucleotide for detection of SNP TSC0052811
caaaaaccacata

SEQ ID NO: 217279 - DNA, 13 bp, Artificial Sequence
  Oligonucleotide for detection of SNP TSC0052812
tgataagttattg

SEQ ID NO: 217280 - DNA, 13 bp, Artificial Sequence
  Oligonucleotide for detection of SNP TSC0052812
caataacttatca

SEQ ID NO: 217281 - DNA, 13 bp, Artificial Sequence
  Oligonucleotide for detection of SNP TSC0052812
tgataaattattg

SEQ ID NO: 217282 - DNA, 13 bp, Artificial Sequence
  Oligonucleotide for detection of SNP TSC0052812
caataatttatca

SEQ ID NO: 217283 - DNA, 13 bp, Artificial Sequence
  Oligonucleotide for detection of SNP TSC0052816
taaatggatattt

SEQ ID NO: 217284 - DNA, 13 bp, Artificial Sequence
  Oligonucleotide for detection of SNP TSC0052816
aaatatccattta

SEQ ID NO: 217285 - DNA, 13 bp, Artificial Sequence
  Oligonucleotide for detection of SNP TSC0052824
tggaatgagataa

SEQ ID NO: 217286 - DNA, 13 bp, Artificial Sequence
  Oligonucleotide for detection of SNP TSC0052824
ttatctcattcca

SEQ ID NO: 217287 - DNA, 13 bp, Artificial Sequence
  Oligonucleotide for detection of SNP TSC0052824
tggaattagataa

SEQ ID NO: 217288 - DNA, 13 bp, Artificial Sequence
  Oligonucleotide for detection of SNP TSC0052824
ttatctaattcca

SEQ ID NO: 217289 - DNA, 13 bp, Artificial Sequence
  Oligonucleotide for detection of SNP TSC0052824
tggaacgagataa

SEQ ID NO: 217290 - DNA, 13 bp, Artificial Sequence
  Oligonucleotide for detection of SNP TSC0052824
ttatctcgttcca

SEQ ID NO: 217291 - DNA, 13 bp, Artificial Sequence
  Oligonucleotide for detection of SNP TSC0052826
gggagattgttty

SEQ ID NO: 217292 - DNA, 13 bp, Artificial Sequence
  Oligonucleotide for detection of SNP TSC0052826
raaacaatctccc

SEQ ID NO: 217293 - DNA, 13 bp, Artificial Sequence
  Oligonucleotide for detection of SNP TSC0052826
gggagagtgttty

SEQ ID NO: 217294 - DNA, 13 bp, Artificial Sequence
  Oligonucleotide for detection of SNP TSC0052826
raaacactctccc

SEQ ID NO: 217295 - DNA, 13 bp, Artificial Sequence
  Oligonucleotide for detection of SNP TSC0052826
ggaatagttttty

SEQ ID NO: 217296 - DNA, 13 bp, Artificial Sequence
  Oligonucleotide for detection of SNP TSC0052826
raaaaactattcc

SEQ ID NO: 217297 - DNA, 13 bp, Artificial Sequence
  Oligonucleotide for detection of SNP TSC0052826
ggaatatttttty

SEQ ID NO: 217298 - DNA, 13 bp, Artificial Sequence
  Oligonucleotide for detection of SNP TSC0052826
raaaaaatattcc

SEQ ID NO: 217299 - DNA, 13 bp, Artificial Sequence
  Oligonucleotide for detection of SNP TSC0052830
tttttttgtttaa

SEQ ID NO: 217300 - DNA, 13 bp, Artificial Sequence
  Oligonucleotide for detection of SNP TSC0052830
ttaaacaaaaaaa

SEQ ID NO: 217301 - DNA, 13 bp, Artificial Sequence
  Oligonucleotide for detection of SNP TSC0052830
ttagattagaaaa

SEQ ID NO: 217302 - DNA, 13 bp, Artificial Sequence
  Oligonucleotide for detection of SNP TSC0052830
ttttctaatctaa

SEQ ID NO: 217303 - DNA, 13 bp, Artificial Sequence
  Oligonucleotide for detection of SNP TSC0052830
ttagataagaaaa

SEQ ID NO: 217304 - DNA, 13 bp, Artificial Sequence
  Oligonucleotide for detection of SNP TSC0052830
ttttcttatctaa

SEQ ID NO: 217305 - DNA, 13 bp, Artificial Sequence
  Oligonucleotide for detection of SNP TSC0052831
ttttgaattttag

SEQ ID NO: 217306 - DNA, 13 bp, Artificial Sequence
  Oligonucleotide for detection of SNP TSC0052831
ctaaaattcaaaa

SEQ ID NO: 217307 - DNA, 13 bp, Artificial Sequence
  Oligonucleotide for detection of SNP TSC0052831
ttttgagttttag

SEQ ID NO: 217308 - DNA, 13 bp, Artificial Sequence
  Oligonucleotide for detection of SNP TSC0052831
ctaaaactcaaaa

SEQ ID NO: 217309 - DNA, 13 bp, Artificial Sequence
  Oligonucleotide for detection of SNP TSC0052832
tttaaggtatatt

SEQ ID NO: 217310 - DNA, 13 bp, Artificial Sequence
  Oligonucleotide for detection of SNP TSC0052832
aatataccttaaa

SEQ ID NO: 217311 - DNA, 13 bp, Artificial Sequence
  Oligonucleotide for detection of SNP TSC0052832
tttaagatatatt

SEQ ID NO: 217312 - DNA, 13 bp, Artificial Sequence
  Oligonucleotide for detection of SNP TSC0052832
aatatatcttaaa

SEQ ID NO: 217313 - DNA, 13 bp, Artificial Sequence
  Oligonucleotide for detection of SNP TSC0052833
ttagttagaaatg

SEQ ID NO: 217314 - DNA, 13 bp, Artificial Sequence
  Oligonucleotide for detection of SNP TSC0052833
catttctaactaa

SEQ ID NO: 217315 - DNA, 13 bp, Artificial Sequence
  Oligonucleotide for detection of SNP TSC0052833
ttagttggaaatg

SEQ ID NO: 217316 - DNA, 13 bp, Artificial Sequence
  Oligonucleotide for detection of SNP TSC0052833
catttccaactaa

SEQ ID NO: 217317 - DNA, 13 bp, Artificial Sequence
  Oligonucleotide for detection of SNP TSC0052834
gtttttaagatta

SEQ ID NO: 217318 - DNA, 13 bp, Artificial Sequence
  Oligonucleotide for detection of SNP TSC0052834
taatcttaaaaac

SEQ ID NO: 217319 - DNA, 13 bp, Artificial Sequence
  Oligonucleotide for detection of SNP TSC0052834
gttttttagatta

SEQ ID NO: 217320 - DNA, 13 bp, Artificial Sequence
  Oligonucleotide for detection of SNP TSC0052834
taatctaaaaaac

SEQ ID NO: 217321 - DNA, 13 bp, Artificial Sequence
  Oligonucleotide for detection of SNP TSC0052834
tggtttggggggy

SEQ ID NO: 217322 - DNA, 13 bp, Artificial Sequence
  Oligonucleotide for detection of SNP TSC0052834
rccccccaaacca

SEQ ID NO: 217323 - DNA, 13 bp, Artificial Sequence
  Oligonucleotide for detection of SNP TSC0052836
gaatgataaaata

SEQ ID NO: 217324 - DNA, 13 bp, Artificial Sequence
  Oligonucleotide for detection of SNP TSC0052836
tattttatcattc

SEQ ID NO: 217325 - DNA, 13 bp, Artificial Sequence
  Oligonucleotide for detection of SNP TSC0052836
gaatgagaaaata

SEQ ID NO: 217326 - DNA, 13 bp, Artificial Sequence
  Oligonucleotide for detection of SNP TSC0052836
tattttctcattc

SEQ ID NO: 217327 - DNA, 13 bp, Artificial Sequence
  Oligonucleotide for detection of SNP TSC0052837
ttattttggatga

SEQ ID NO: 217328 - DNA, 13 bp, Artificial Sequence
  Oligonucleotide for detection of SNP TSC0052837
tcatccaaaataa

SEQ ID NO: 217329 - DNA, 13 bp, Artificial Sequence
  Oligonucleotide for detection of SNP TSC0052837
ttatttcggatga

SEQ ID NO: 217330 - DNA, 13 bp, Artificial Sequence
  Oligonucleotide for detection of SNP TSC0052837
tcatccgaaataa

SEQ ID NO: 217331 - DNA, 13 bp, Artificial Sequence
  Oligonucleotide for detection of SNP TSC0052837
ttatttgagatga

SEQ ID NO: 217332 - DNA, 13 bp, Artificial Sequence
  Oligonucleotide for detection of SNP TSC0052837
tcatctcaaataa

SEQ ID NO: 217333 - DNA, 13 bp, Artificial Sequence
  Oligonucleotide for detection of SNP TSC0052837
ttatttaagatga

SEQ ID NO: 217334 - DNA, 13 bp, Artificial Sequence
  Oligonucleotide for detection of SNP TSC0052837
tcatcttaaataa

SEQ ID NO: 217335 - DNA, 13 bp, Artificial Sequence
  Oligonucleotide for detection of SNP TSC0052837
ttattcgagatga

SEQ ID NO: 217336 - DNA, 13 bp, Artificial Sequence
  Oligonucleotide for detection of SNP TSC0052837
tcatctcgaataa

SEQ ID NO: 217337 - DNA, 13 bp, Artificial Sequence
  Oligonucleotide for detection of SNP TSC0052840
ttttaaagttgtg

SEQ ID NO: 217338 - DNA, 13 bp, Artificial Sequence
  Oligonucleotide for detection of SNP TSC0052840
cacaactttaaaa

SEQ ID NO: 217339 - DNA, 13 bp, Artificial Sequence
  Oligonucleotide for detection of SNP TSC0052840
ttttaaggttgtg

SEQ ID NO: 217340 - DNA, 13 bp, Artificial Sequence
  Oligonucleotide for detection of SNP TSC0052840
cacaaccttaaaa

SEQ ID NO: 217341 - DNA, 13 bp, Artificial Sequence
  Oligonucleotide for detection of SNP TSC0052841
tgggggggaaaaa

SEQ ID NO: 217342 - DNA, 13 bp, Artificial Sequence
  Oligonucleotide for detection of SNP TSC0052841
tttttccccccca

SEQ ID NO: 217343 - DNA, 13 bp, Artificial Sequence
  Oligonucleotide for detection of SNP TSC0052841
tgggggagaaaaa

SEQ ID NO: 217344 - DNA, 13 bp, Artificial Sequence
  Oligonucleotide for detection of SNP TSC0052841
tttttctccccca

SEQ ID NO: 217345 - DNA, 13 bp, Artificial Sequence
  Oligonucleotide for detection of SNP TSC0052842
attttgtgataag

SEQ ID NO: 217346 - DNA, 13 bp, Artificial Sequence
  Oligonucleotide for detection of SNP TSC0052842
cttatcacaaaat

SEQ ID NO: 217347 - DNA, 13 bp, Artificial Sequence
  Oligonucleotide for detection of SNP TSC0052842
attttgcgataag

SEQ ID NO: 217348 - DNA, 13 bp, Artificial Sequence
  Oligonucleotide for detection of SNP TSC0052842
cttatcgcaaaat

SEQ ID NO: 217349 - DNA, 13 bp, Artificial Sequence
  Oligonucleotide for detection of SNP TSC0052842
tttattgtaaaat

SEQ ID NO: 217350 - DNA, 13 bp, Artificial Sequence
  Oligonucleotide for detection of SNP TSC0052842
attttacaataaa

SEQ ID NO: 217351 - DNA, 13 bp, Artificial Sequence
  Oligonucleotide for detection of SNP TSC0052842
tttattataaaat

SEQ ID NO: 217352 - DNA, 13 bp, Artificial Sequence
  Oligonucleotide for detection of SNP TSC0052842
attttataataaa

SEQ ID NO: 217353 - DNA, 13 bp, Artificial Sequence
  Oligonucleotide for detection of SNP TSC0052843
agtttattatttg

SEQ ID NO: 217354 - DNA, 13 bp, Artificial Sequence
  Oligonucleotide for detection of SNP TSC0052843
caaataataaact

SEQ ID NO: 217355 - DNA, 13 bp, Artificial Sequence
  Oligonucleotide for detection of SNP TSC0052843
agtttagtatttg

SEQ ID NO: 217356 - DNA, 13 bp, Artificial Sequence
  Oligonucleotide for detection of SNP TSC0052843
caaatactaaact

SEQ ID NO: 217357 - DNA, 13 bp, Artificial Sequence
  Oligonucleotide for detection of SNP TSC0052843
tagatgataagtt

SEQ ID NO: 217358 - DNA, 13 bp, Artificial Sequence
  Oligonucleotide for detection of SNP TSC0052843
aacttatcatcta

SEQ ID NO: 217359 - DNA, 13 bp, Artificial Sequence
  Oligonucleotide for detection of SNP TSC0052843
tagatgttaagtt

SEQ ID NO: 217360 - DNA, 13 bp, Artificial Sequence
  Oligonucleotide for detection of SNP TSC0052843
aacttaacatcta

SEQ ID NO: 217361 - DNA, 13 bp, Artificial Sequence
  Oligonucleotide for detection of SNP TSC0052844
tagttagtgaatt

SEQ ID NO: 217362 - DNA, 13 bp, Artificial Sequence
  Oligonucleotide for detection of SNP TSC0052844
aattcactaacta

SEQ ID NO: 217363 - DNA, 13 bp, Artificial Sequence
  Oligonucleotide for detection of SNP TSC0052844
tagttaatgaatt

SEQ ID NO: 217364 - DNA, 13 bp, Artificial Sequence
  Oligonucleotide for detection of SNP TSC0052844
aattcattaacta

SEQ ID NO: 217365 - DNA, 13 bp, Artificial Sequence
  Oligonucleotide for detection of SNP TSC0052848
tggttaattattt

SEQ ID NO: 217366 - DNA, 13 bp, Artificial Sequence
  Oligonucleotide for detection of SNP TSC0052848
aaataattaacca

SEQ ID NO: 217367 - DNA, 13 bp, Artificial Sequence
  Oligonucleotide for detection of SNP TSC0052848
tggttagttattt

SEQ ID NO: 217368 - DNA, 13 bp, Artificial Sequence
  Oligonucleotide for detection of SNP TSC0052848
aaataactaacca

SEQ ID NO: 217369 - DNA, 13 bp, Artificial Sequence
  Oligonucleotide for detection of SNP TSC0052849
gtaatttttatty

SEQ ID NO: 217370 - DNA, 13 bp, Artificial Sequence
  Oligonucleotide for detection of SNP TSC0052849
raataaaaattac

SEQ ID NO: 217371 - DNA, 13 bp, Artificial Sequence
  Oligonucleotide for detection of SNP TSC0052849
gtaattgttatty

SEQ ID NO: 217372 - DNA, 13 bp, Artificial Sequence
  Oligonucleotide for detection of SNP TSC0052849
raataacaattac

SEQ ID NO: 217373 - DNA, 13 bp, Artificial Sequence
  Oligonucleotide for detection of SNP TSC0052849
gaatgagagttgy

SEQ ID NO: 217374 - DNA, 13 bp, Artificial Sequence
  Oligonucleotide for detection of SNP TSC0052849
rcaactctcattc

SEQ ID NO: 217375 - DNA, 13 bp, Artificial Sequence
  Oligonucleotide for detection of SNP TSC0052849
gaatgatagttgy

SEQ ID NO: 217376 - DNA, 13 bp, Artificial Sequence
  Oligonucleotide for detection of SNP TSC0052849
rcaactatcattc

SEQ ID NO: 217377 - DNA, 13 bp, Artificial Sequence
  Oligonucleotide for detection of SNP TSC0052852
agagtggttttta

SEQ ID NO: 217378 - DNA, 13 bp, Artificial Sequence
  Oligonucleotide for detection of SNP TSC0052852
taaaaaccactct

SEQ ID NO: 217379 - DNA, 13 bp, Artificial Sequence
  Oligonucleotide for detection of SNP TSC0052861
tgagtagttttaa

SEQ ID NO: 217380 - DNA, 13 bp, Artificial Sequence
  Oligonucleotide for detection of SNP TSC0052861
ttaaaactactca

SEQ ID NO: 217381 - DNA, 13 bp, Artificial Sequence
  Oligonucleotide for detection of SNP TSC0052861
ttaaaaatgttta

SEQ ID NO: 217382 - DNA, 13 bp, Artificial Sequence
  Oligonucleotide for detection of SNP TSC0052861
taaacatttttaa

SEQ ID NO: 217383 - DNA, 13 bp, Artificial Sequence
  Oligonucleotide for detection of SNP TSC0052861
ttaaaattgttta

SEQ ID NO: 217384 - DNA, 13 bp, Artificial Sequence
  Oligonucleotide for detection of SNP TSC0052861
taaacaattttaa

SEQ ID NO: 217385 - DNA, 13 bp, Artificial Sequence
  Oligonucleotide for detection of SNP TSC0052863
tttgatagtgtty

SEQ ID NO: 217386 - DNA, 13 bp, Artificial Sequence
  Oligonucleotide for detection of SNP TSC0052863
raacactatcaaa

SEQ ID NO: 217387 - DNA, 13 bp, Artificial Sequence
  Oligonucleotide for detection of SNP TSC0052863
tttgatggtgtty

SEQ ID NO: 217388 - DNA, 13 bp, Artificial Sequence
  Oligonucleotide for detection of SNP TSC0052863
raacaccatcaaa

SEQ ID NO: 217389 - DNA, 13 bp, Artificial Sequence
  Oligonucleotide for detection of SNP TSC0052863
tttgacggtgtty

SEQ ID NO: 217390 - DNA, 13 bp, Artificial Sequence
  Oligonucleotide for detection of SNP TSC0052863
raacaccgtcaaa

SEQ ID NO: 217391 - DNA, 13 bp, Artificial Sequence
  Oligonucleotide for detection of SNP TSC0052863
ggatattgttaag

SEQ ID NO: 217392 - DNA, 13 bp, Artificial Sequence
  Oligonucleotide for detection of SNP TSC0052863
cttaacaatatcc

SEQ ID NO: 217393 - DNA, 13 bp, Artificial Sequence
  Oligonucleotide for detection of SNP TSC0052863
ggatatcgttaag

SEQ ID NO: 217394 - DNA, 13 bp, Artificial Sequence
  Oligonucleotide for detection of SNP TSC0052863
cttaacgatatcc

SEQ ID NO: 217395 - DNA, 13 bp, Artificial Sequence
  Oligonucleotide for detection of SNP TSC0052868
gggttaaataaay

SEQ ID NO: 217396 - DNA, 13 bp, Artificial Sequence
  Oligonucleotide for detection of SNP TSC0052868
rtttatttaaccc

SEQ ID NO: 217397 - DNA, 13 bp, Artificial Sequence
  Oligonucleotide for detection of SNP TSC0052868
gggttagataaay

SEQ ID NO: 217398 - DNA, 13 bp, Artificial Sequence
  Oligonucleotide for detection of SNP TSC0052868
rtttatctaaccc

SEQ ID NO: 217399 - DNA, 13 bp, Artificial Sequence
  Oligonucleotide for detection of SNP TSC0052869
atagtgataatta

SEQ ID NO: 217400 - DNA, 13 bp, Artificial Sequence
  Oligonucleotide for detection of SNP TSC0052869
taattatcactat

SEQ ID NO: 217401 - DNA, 13 bp, Artificial Sequence
  Oligonucleotide for detection of SNP TSC0052869
atagtggtaatta

SEQ ID NO: 217402 - DNA, 13 bp, Artificial Sequence
  Oligonucleotide for detection of SNP TSC0052869
taattaccactat

SEQ ID NO: 217403 - DNA, 13 bp, Artificial Sequence
  Oligonucleotide for detection of SNP TSC0052870
tgatgtggaagag

SEQ ID NO: 217404 - DNA, 13 bp, Artificial Sequence
  Oligonucleotide for detection of SNP TSC0052870
ctcttccacatca

SEQ ID NO: 217405 - DNA, 13 bp, Artificial Sequence
  Oligonucleotide for detection of SNP TSC0052870
tgatgtagaagag

SEQ ID NO: 217406 - DNA, 13 bp, Artificial Sequence
  Oligonucleotide for detection of SNP TSC0052870
ctcttctacatca

SEQ ID NO: 217407 - DNA, 13 bp, Artificial Sequence
  Oligonucleotide for detection of SNP TSC0052870
tgatgcggaagag

SEQ ID NO: 217408 - DNA, 13 bp, Artificial Sequence
  Oligonucleotide for detection of SNP TSC0052870
ctcttccgcatca

SEQ ID NO: 217409 - DNA, 13 bp, Artificial Sequence
  Oligonucleotide for detection of SNP TSC0052871
attttagaagtgy

SEQ ID NO: 217410 - DNA, 13 bp, Artificial Sequence
  Oligonucleotide for detection of SNP TSC0052871
rcacttctaaaat

SEQ ID NO: 217411 - DNA, 13 bp, Artificial Sequence
  Oligonucleotide for detection of SNP TSC0052871
attttaaaagtgy

SEQ ID NO: 217412 - DNA, 13 bp, Artificial Sequence
  Oligonucleotide for detection of SNP TSC0052871
rcacttttaaaat

SEQ ID NO: 217413 - DNA, 13 bp, Artificial Sequence
  Oligonucleotide for detection of SNP TSC0052872
gagttgtgattta

SEQ ID NO: 217414 - DNA, 13 bp, Artificial Sequence
  Oligonucleotide for detection of SNP TSC0052872
taaatcacaactc

SEQ ID NO: 217415 - DNA, 13 bp, Artificial Sequence
  Oligonucleotide for detection of SNP TSC0052872
gagttgcgattta

SEQ ID NO: 217416 - DNA, 13 bp, Artificial Sequence
  Oligonucleotide for detection of SNP TSC0052872
taaatcgcaactc

SEQ ID NO: 217417 - DNA, 13 bp, Artificial Sequence
  Oligonucleotide for detection of SNP TSC0052872
tgagttgtagtty

SEQ ID NO: 217418 - DNA, 13 bp, Artificial Sequence
  Oligonucleotide for detection of SNP TSC0052872
raactacaactca

SEQ ID NO: 217419 - DNA, 13 bp, Artificial Sequence
  Oligonucleotide for detection of SNP TSC0052872
tgagttatagtty

SEQ ID NO: 217420 - DNA, 13 bp, Artificial Sequence
  Oligonucleotide for detection of SNP TSC0052872
raactataactca

SEQ ID NO: 217421 - DNA, 13 bp, Artificial Sequence
  Oligonucleotide for detection of SNP TSC0052872
tgagtcgtagtty

SEQ ID NO: 217422 - DNA, 13 bp, Artificial Sequence
  Oligonucleotide for detection of SNP TSC0052872
raactacgactca

SEQ ID NO: 217423 - DNA, 13 bp, Artificial Sequence
  Oligonucleotide for detection of SNP TSC0052874
tttggggtatttg

SEQ ID NO: 217424 - DNA, 13 bp, Artificial Sequence
  Oligonucleotide for detection of SNP TSC0052874
caaataccccaaa

SEQ ID NO: 217425 - DNA, 13 bp, Artificial Sequence
  Oligonucleotide for detection of SNP TSC0052874
tttgggatatttg

SEQ ID NO: 217426 - DNA, 13 bp, Artificial Sequence
  Oligonucleotide for detection of SNP TSC0052874
caaatatcccaaa

SEQ ID NO: 217427 - DNA, 13 bp, Artificial Sequence
  Oligonucleotide for detection of SNP TSC0052875
agtataagttgay

SEQ ID NO: 217428 - DNA, 13 bp, Artificial Sequence
  Oligonucleotide for detection of SNP TSC0052875
rtcaacttatact

SEQ ID NO: 217429 - DNA, 13 bp, Artificial Sequence
  Oligonucleotide for detection of SNP TSC0052875
agtataggttgay

SEQ ID NO: 217430 - DNA, 13 bp, Artificial Sequence
  Oligonucleotide for detection of SNP TSC0052875
rtcaacctatact

SEQ ID NO: 217431 - DNA, 13 bp, Artificial Sequence
  Oligonucleotide for detection of SNP TSC0052877
tttaaaatttgat

SEQ ID NO: 217432 - DNA, 13 bp, Artificial Sequence
  Oligonucleotide for detection of SNP TSC0052877
atcaaattttaaa

SEQ ID NO: 217433 - DNA, 13 bp, Artificial Sequence
  Oligonucleotide for detection of SNP TSC0052877
tttaaattttgat

SEQ ID NO: 217434 - DNA, 13 bp, Artificial Sequence
  Oligonucleotide for detection of SNP TSC0052877
atcaaaatttaaa

SEQ ID NO: 217435 - DNA, 13 bp, Artificial Sequence
  Oligonucleotide for detection of SNP TSC0052877
attaaattttgga

SEQ ID NO: 217436 - DNA, 13 bp, Artificial Sequence
  Oligonucleotide for detection of SNP TSC0052877
tccaaaatttaat

SEQ ID NO: 217437 - DNA, 13 bp, Artificial Sequence
  Oligonucleotide for detection of SNP TSC0052877
attaaagtttgga

SEQ ID NO: 217438 - DNA, 13 bp, Artificial Sequence
  Oligonucleotide for detection of SNP TSC0052877
tccaaactttaat

SEQ ID NO: 217439 - DNA, 13 bp, Artificial Sequence
  Oligonucleotide for detection of SNP TSC0052885
attgtaaatttgt

SEQ ID NO: 217440 - DNA, 13 bp, Artificial Sequence
  Oligonucleotide for detection of SNP TSC0052885
acaaatttacaat

SEQ ID NO: 217441 - DNA, 13 bp, Artificial Sequence
  Oligonucleotide for detection of SNP TSC0052885
attgtagatttgt

SEQ ID NO: 217442 - DNA, 13 bp, Artificial Sequence
  Oligonucleotide for detection of SNP TSC0052885
acaaatctacaat

SEQ ID NO: 217443 - DNA, 13 bp, Artificial Sequence
  Oligonucleotide for detection of SNP TSC0052885
atcgtaaatttgt

SEQ ID NO: 217444 - DNA, 13 bp, Artificial Sequence
  Oligonucleotide for detection of SNP TSC0052885
acaaatttacgat

SEQ ID NO: 217445 - DNA, 13 bp, Artificial Sequence
  Oligonucleotide for detection of SNP TSC0052885
atcgtagatttgt

SEQ ID NO: 217446 - DNA, 13 bp, Artificial Sequence
  Oligonucleotide for detection of SNP TSC0052885
acaaatctacgat

SEQ ID NO: 217447 - DNA, 13 bp, Artificial Sequence
  Oligonucleotide for detection of SNP TSC0052887
tatttatgtgttg

SEQ ID NO: 217448 - DNA, 13 bp, Artificial Sequence
  Oligonucleotide for detection of SNP TSC0052887
caacacataaata

SEQ ID NO: 217449 - DNA, 13 bp, Artificial Sequence
  Oligonucleotide for detection of SNP TSC0052887
tatttacgtgttg

SEQ ID NO: 217450 - DNA, 13 bp, Artificial Sequence
  Oligonucleotide for detection of SNP TSC0052887
caacacgtaaata

SEQ ID NO: 217451 - DNA, 13 bp, Artificial Sequence
  Oligonucleotide for detection of SNP TSC0052887
tatttatgcgttg

SEQ ID NO: 217452 - DNA, 13 bp, Artificial Sequence
  Oligonucleotide for detection of SNP TSC0052887
caacgcataaata

SEQ ID NO: 217453 - DNA, 13 bp, Artificial Sequence
  Oligonucleotide for detection of SNP TSC0052887
tatttacgcgttg

SEQ ID NO: 217454 - DNA, 13 bp, Artificial Sequence
  Oligonucleotide for detection of SNP TSC0052887
caacgcgtaaata

SEQ ID NO: 217455 - DNA, 13 bp, Artificial Sequence
  Oligonucleotide for detection of SNP TSC0052887
tagtgtgtagata

SEQ ID NO: 217456 - DNA, 13 bp, Artificial Sequence
  Oligonucleotide for detection of SNP TSC0052887
tatctacacacta

SEQ ID NO: 217457 - DNA, 13 bp, Artificial Sequence
  Oligonucleotide for detection of SNP TSC0052887
tagtgtatagata

SEQ ID NO: 217458 - DNA, 13 bp, Artificial Sequence
  Oligonucleotide for detection of SNP TSC0052887
tatctatacacta

SEQ ID NO: 217459 - DNA, 13 bp, Artificial Sequence
  Oligonucleotide for detection of SNP TSC0052887
tagcgtgtagata

SEQ ID NO: 217460 - DNA, 13 bp, Artificial Sequence
  Oligonucleotide for detection of SNP TSC0052887
tatctacacgcta

SEQ ID NO: 217461 - DNA, 13 bp, Artificial Sequence
  Oligonucleotide for detection of SNP TSC0052887
tagcgtatagata

SEQ ID NO: 217462 - DNA, 13 bp, Artificial Sequence
  Oligonucleotide for detection of SNP TSC0052887
tatctatacgcta

SEQ ID NO: 217463 - DNA, 13 bp, Artificial Sequence
  Oligonucleotide for detection of SNP TSC0052887
tagtgcgtagata

SEQ ID NO: 217464 - DNA, 13 bp, Artificial Sequence
  Oligonucleotide for detection of SNP TSC0052887
tatctacgcacta

SEQ ID NO: 217465 - DNA, 13 bp, Artificial Sequence
  Oligonucleotide for detection of SNP TSC0052887
tagcgcgtagata

SEQ ID NO: 217466 - DNA, 13 bp, Artificial Sequence
  Oligonucleotide for detection of SNP TSC0052887
tatctacgcgcta

SEQ ID NO: 217467 - DNA, 13 bp, Artificial Sequence
  Oligonucleotide for detection of SNP TSC0052888
ttgatttgtagtg

SEQ ID NO: 217468 - DNA, 13 bp, Artificial Sequence
  Oligonucleotide for detection of SNP TSC0052888
cactacaaatcaa

SEQ ID NO: 217469 - DNA, 13 bp, Artificial Sequence
  Oligonucleotide for detection of SNP TSC0052888
ttgattcgtagtg

SEQ ID NO: 217470 - DNA, 13 bp, Artificial Sequence
  Oligonucleotide for detection of SNP TSC0052888
cactacgaatcaa

SEQ ID NO: 217471 - DNA, 13 bp, Artificial Sequence
  Oligonucleotide for detection of SNP TSC0052888
tattatgaattag

SEQ ID NO: 217472 - DNA, 13 bp, Artificial Sequence
  Oligonucleotide for detection of SNP TSC0052888
ctaattcataata

SEQ ID NO: 217473 - DNA, 13 bp, Artificial Sequence
  Oligonucleotide for detection of SNP TSC0052888
tattataaattag

SEQ ID NO: 217474 - DNA, 13 bp, Artificial Sequence
  Oligonucleotide for detection of SNP TSC0052888
ctaatttataata

SEQ ID NO: 217475 - DNA, 13 bp, Artificial Sequence
  Oligonucleotide for detection of SNP TSC0052888
tattacgaattag

SEQ ID NO: 217476 - DNA, 13 bp, Artificial Sequence
  Oligonucleotide for detection of SNP TSC0052888
ctaattcgtaata

SEQ ID NO: 217477 - DNA, 13 bp, Artificial Sequence
  Oligonucleotide for detection of SNP TSC0052889
ttttgatggatgt

SEQ ID NO: 217478 - DNA, 13 bp, Artificial Sequence
  Oligonucleotide for detection of SNP TSC0052889
acatccatcaaaa

SEQ ID NO: 217479 - DNA, 13 bp, Artificial Sequence
  Oligonucleotide for detection of SNP TSC0052889
ttttgacggatgt

SEQ ID NO: 217480 - DNA, 13 bp, Artificial Sequence
  Oligonucleotide for detection of SNP TSC0052889
acatccgtcaaaa

SEQ ID NO: 217481 - DNA, 13 bp, Artificial Sequence
  Oligonucleotide for detection of SNP TSC0052889
atatttgttagag

SEQ ID NO: 217482 - DNA, 13 bp, Artificial Sequence
  Oligonucleotide for detection of SNP TSC0052889
ctctaacaaatat

SEQ ID NO: 217483 - DNA, 13 bp, Artificial Sequence
  Oligonucleotide for detection of SNP TSC0052889
atatttattagag

SEQ ID NO: 217484 - DNA, 13 bp, Artificial Sequence
  Oligonucleotide for detection of SNP TSC0052889
ctctaataaatat

SEQ ID NO: 217485 - DNA, 13 bp, Artificial Sequence
  Oligonucleotide for detection of SNP TSC0052889
atattcgttagag

SEQ ID NO: 217486 - DNA, 13 bp, Artificial Sequence
  Oligonucleotide for detection of SNP TSC0052889
ctctaacgaatat

SEQ ID NO: 217487 - DNA, 13 bp, Artificial Sequence
  Oligonucleotide for detection of SNP TSC0052891
aagttttggggat

SEQ ID NO: 217488 - DNA, 13 bp, Artificial Sequence
  Oligonucleotide for detection of SNP TSC0052891
atccccaaaactt

SEQ ID NO: 217489 - DNA, 13 bp, Artificial Sequence
  Oligonucleotide for detection of SNP TSC0052891
aagtttcggggat

SEQ ID NO: 217490 - DNA, 13 bp, Artificial Sequence
  Oligonucleotide for detection of SNP TSC0052891
atccccgaaactt

SEQ ID NO: 217491 - DNA, 13 bp, Artificial Sequence
  Oligonucleotide for detection of SNP TSC0052892
atttatatgaaga

SEQ ID NO: 217492 - DNA, 13 bp, Artificial Sequence
  Oligonucleotide for detection of SNP TSC0052892
tcttcatataaat

SEQ ID NO: 217493 - DNA, 13 bp, Artificial Sequence
  Oligonucleotide for detection of SNP TSC0052892
atttatttgaaga

SEQ ID NO: 217494 - DNA, 13 bp, Artificial Sequence
  Oligonucleotide for detection of SNP TSC0052892
tcttcaaataaat

SEQ ID NO: 217495 - DNA, 13 bp, Artificial Sequence
  Oligonucleotide for detection of SNP TSC0052892
tttttatgtgaat

SEQ ID NO: 217496 - DNA, 13 bp, Artificial Sequence
  Oligonucleotide for detection of SNP TSC0052892
attcacataaaaa

SEQ ID NO: 217497 - DNA, 13 bp, Artificial Sequence
  Oligonucleotide for detection of SNP TSC0052892
tttttaagtgaat

SEQ ID NO: 217498 - DNA, 13 bp, Artificial Sequence
  Oligonucleotide for detection of SNP TSC0052892
attcacttaaaaa

SEQ ID NO: 217499 - DNA, 13 bp, Artificial Sequence
  Oligonucleotide for detection of SNP TSC0052893
gaaagatgttgta

SEQ ID NO: 217500 - DNA, 13 bp, Artificial Sequence
  Oligonucleotide for detection of SNP TSC0052893
tacaacatctttc

SEQ ID NO: 217501 - DNA, 13 bp, Artificial Sequence
  Oligonucleotide for detection of SNP TSC0052893
gaaagacgttgta

SEQ ID NO: 217502 - DNA, 13 bp, Artificial Sequence
  Oligonucleotide for detection of SNP TSC0052893
tacaacgtctttc

SEQ ID NO: 217503 - DNA, 13 bp, Artificial Sequence
  Oligonucleotide for detection of SNP TSC0052893
tgtaatgttttty

SEQ ID NO: 217504 - DNA, 13 bp, Artificial Sequence
  Oligonucleotide for detection of SNP TSC0052893
raaaaacattaca

SEQ ID NO: 217505 - DNA, 13 bp, Artificial Sequence
  Oligonucleotide for detection of SNP TSC0052893
tgtaatattttty

SEQ ID NO: 217506 - DNA, 13 bp, Artificial Sequence
  Oligonucleotide for detection of SNP TSC0052893
raaaaatattaca

SEQ ID NO: 217507 - DNA, 13 bp, Artificial Sequence
  Oligonucleotide for detection of SNP TSC0052893
tgtaacgttttty

SEQ ID NO: 217508 - DNA, 13 bp, Artificial Sequence
  Oligonucleotide for detection of SNP TSC0052893
raaaaacgttaca

SEQ ID NO: 217509 - DNA, 13 bp, Artificial Sequence
  Oligonucleotide for detection of SNP TSC0052894
aatataataagta

SEQ ID NO: 217510 - DNA, 13 bp, Artificial Sequence
  Oligonucleotide for detection of SNP TSC0052894
tacttattatatt

SEQ ID NO: 217511 - DNA, 13 bp, Artificial Sequence
  Oligonucleotide for detection of SNP TSC0052894
aatatagtaagta

SEQ ID NO: 217512 - DNA, 13 bp, Artificial Sequence
  Oligonucleotide for detection of SNP TSC0052894
tacttactatatt

SEQ ID NO: 217513 - DNA, 13 bp, Artificial Sequence
  Oligonucleotide for detection of SNP TSC0052899
aattaaagtttaa

SEQ ID NO: 217514 - DNA, 13 bp, Artificial Sequence
  Oligonucleotide for detection of SNP TSC0052899
ttaaactttaatt

SEQ ID NO: 217515 - DNA, 13 bp, Artificial Sequence
  Oligonucleotide for detection of SNP TSC0052899
aattaaggtttaa

SEQ ID NO: 217516 - DNA, 13 bp, Artificial Sequence
  Oligonucleotide for detection of SNP TSC0052899
ttaaaccttaatt

SEQ ID NO: 217517 - DNA, 13 bp, Artificial Sequence
  Oligonucleotide for detection of SNP TSC0052905
ttttggaaagttt

SEQ ID NO: 217518 - DNA, 13 bp, Artificial Sequence
  Oligonucleotide for detection of SNP TSC0052905
aaactttccaaaa

SEQ ID NO: 217519 - DNA, 13 bp, Artificial Sequence
  Oligonucleotide for detection of SNP TSC0052905
ttttgggaagttt

SEQ ID NO: 217520 - DNA, 13 bp, Artificial Sequence
  Oligonucleotide for detection of SNP TSC0052905
aaacttcccaaaa

SEQ ID NO: 217521 - DNA, 13 bp, Artificial Sequence
  Oligonucleotide for detection of SNP TSC0052905
tttcggaaagttt

SEQ ID NO: 217522 - DNA, 13 bp, Artificial Sequence
  Oligonucleotide for detection of SNP TSC0052905
aaactttccgaaa

SEQ ID NO: 217523 - DNA, 13 bp, Artificial Sequence
  Oligonucleotide for detection of SNP TSC0052905
tttcgggaagttt

SEQ ID NO: 217524 - DNA, 13 bp, Artificial Sequence
  Oligonucleotide for detection of SNP TSC0052905
aaacttcccgaaa

SEQ ID NO: 217525 - DNA, 13 bp, Artificial Sequence
  Oligonucleotide for detection of SNP TSC0052906
taatatatataaa

SEQ ID NO: 217526 - DNA, 13 bp, Artificial Sequence
  Oligonucleotide for detection of SNP TSC0052906
tttatatatatta

SEQ ID NO: 217527 - DNA, 13 bp, Artificial Sequence
  Oligonucleotide for detection of SNP TSC0052908
tgttttgattatt

SEQ ID NO: 217528 - DNA, 13 bp, Artificial Sequence
  Oligonucleotide for detection of SNP TSC0052908
aataatcaaaaca

SEQ ID NO: 217529 - DNA, 13 bp, Artificial Sequence
  Oligonucleotide for detection of SNP TSC0052909
agatggtttttta

SEQ ID NO: 217530 - DNA, 13 bp, Artificial Sequence
  Oligonucleotide for detection of SNP TSC0052909
taaaaaaccatct

SEQ ID NO: 217531 - DNA, 13 bp, Artificial Sequence
  Oligonucleotide for detection of SNP TSC0052909
agatgggttttta

SEQ ID NO: 217532 - DNA, 13 bp, Artificial Sequence
  Oligonucleotide for detection of SNP TSC0052909
taaaaacccatct

SEQ ID NO: 217533 - DNA, 13 bp, Artificial Sequence
  Oligonucleotide for detection of SNP TSC0052909
tagaaaattattt

SEQ ID NO: 217534 - DNA, 13 bp, Artificial Sequence
  Oligonucleotide for detection of SNP TSC0052909
aaataattttcta

SEQ ID NO: 217535 - DNA, 13 bp, Artificial Sequence
  Oligonucleotide for detection of SNP TSC0052909
tagaaatttattt

SEQ ID NO: 217536 - DNA, 13 bp, Artificial Sequence
  Oligonucleotide for detection of SNP TSC0052909
aaataaatttcta

SEQ ID NO: 217537 - DNA, 13 bp, Artificial Sequence
  Oligonucleotide for detection of SNP TSC0052910
aagtataagtgty

SEQ ID NO: 217538 - DNA, 13 bp, Artificial Sequence
  Oligonucleotide for detection of SNP TSC0052910
racacttatactt

SEQ ID NO: 217539 - DNA, 13 bp, Artificial Sequence
  Oligonucleotide for detection of SNP TSC0052910
aagtatgagtgty

SEQ ID NO: 217540 - DNA, 13 bp, Artificial Sequence
  Oligonucleotide for detection of SNP TSC0052910
racactcatactt

SEQ ID NO: 217541 - DNA, 13 bp, Artificial Sequence
  Oligonucleotide for detection of SNP TSC0052910
aagtacgagtgty

SEQ ID NO: 217542 - DNA, 13 bp, Artificial Sequence
  Oligonucleotide for detection of SNP TSC0052910
racactcgtactt

SEQ ID NO: 217543 - DNA, 13 bp, Artificial Sequence
  Oligonucleotide for detection of SNP TSC0052910
gatatttgtattt

SEQ ID NO: 217544 - DNA, 13 bp, Artificial Sequence
  Oligonucleotide for detection of SNP TSC0052910
aaatacaaatatc

SEQ ID NO: 217545 - DNA, 13 bp, Artificial Sequence
  Oligonucleotide for detection of SNP TSC0052910
gatattcgtattt

SEQ ID NO: 217546 - DNA, 13 bp, Artificial Sequence
  Oligonucleotide for detection of SNP TSC0052910
aaatacgaatatc

SEQ ID NO: 217547 - DNA, 13 bp, Artificial Sequence
  Oligonucleotide for detection of SNP TSC0052911
gttattgtataat

SEQ ID NO: 217548 - DNA, 13 bp, Artificial Sequence
  Oligonucleotide for detection of SNP TSC0052911
attatacaataac

SEQ ID NO: 217549 - DNA, 13 bp, Artificial Sequence
  Oligonucleotide for detection of SNP TSC0052911
gttattatataat

SEQ ID NO: 217550 - DNA, 13 bp, Artificial Sequence
  Oligonucleotide for detection of SNP TSC0052911
attatataataac

SEQ ID NO: 217551 - DNA, 13 bp, Artificial Sequence
  Oligonucleotide for detection of SNP TSC0052912
tgtttatggtatt

SEQ ID NO: 217552 - DNA, 13 bp, Artificial Sequence
  Oligonucleotide for detection of SNP TSC0052912
aataccataaaca

SEQ ID NO: 217553 - DNA, 13 bp, Artificial Sequence
  Oligonucleotide for detection of SNP TSC0052912
tgtttacggtatt

SEQ ID NO: 217554 - DNA, 13 bp, Artificial Sequence
  Oligonucleotide for detection of SNP TSC0052912
aataccgtaaaca

SEQ ID NO: 217555 - DNA, 13 bp, Artificial Sequence
  Oligonucleotide for detection of SNP TSC0052912
aatgttgtaaata

SEQ ID NO: 217556 - DNA, 13 bp, Artificial Sequence
  Oligonucleotide for detection of SNP TSC0052912
tatttacaacatt

SEQ ID NO: 217557 - DNA, 13 bp, Artificial Sequence
  Oligonucleotide for detection of SNP TSC0052912
aatgttataaata

SEQ ID NO: 217558 - DNA, 13 bp, Artificial Sequence
  Oligonucleotide for detection of SNP TSC0052912
tatttataacatt

SEQ ID NO: 217559 - DNA, 13 bp, Artificial Sequence
  Oligonucleotide for detection of SNP TSC0052912
aatgtcgtaaata

SEQ ID NO: 217560 - DNA, 13 bp, Artificial Sequence
  Oligonucleotide for detection of SNP TSC0052912
tatttacgacatt

SEQ ID NO: 217561 - DNA, 13 bp, Artificial Sequence
  Oligonucleotide for detection of SNP TSC0052913
tgagttgaattaa

SEQ ID NO: 217562 - DNA, 13 bp, Artificial Sequence
  Oligonucleotide for detection of SNP TSC0052913
ttaattcaactca

SEQ ID NO: 217563 - DNA, 13 bp, Artificial Sequence
  Oligonucleotide for detection of SNP TSC0052913
tgagttaaattaa

SEQ ID NO: 217564 - DNA, 13 bp, Artificial Sequence
  Oligonucleotide for detection of SNP TSC0052913
ttaatttaactca

SEQ ID NO: 217565 - DNA, 13 bp, Artificial Sequence
  Oligonucleotide for detection of SNP TSC0010883
taatatgttttaa

SEQ ID NO: 217566 - DNA, 13 bp, Artificial Sequence
  Oligonucleotide for detection of SNP TSC0010883
ttaaaacatatta

SEQ ID NO: 217567 - DNA, 13 bp, Artificial Sequence
  Oligonucleotide for detection of SNP TSC0052918
aggtatggagttg

SEQ ID NO: 217568 - DNA, 13 bp, Artificial Sequence
  Oligonucleotide for detection of SNP TSC0052918
caactccatacct

SEQ ID NO: 217569 - DNA, 13 bp, Artificial Sequence
  Oligonucleotide for detection of SNP TSC0052918
aggtatagagttg

SEQ ID NO: 217570 - DNA, 13 bp, Artificial Sequence
  Oligonucleotide for detection of SNP TSC0052918
caactctatacct

SEQ ID NO: 217571 - DNA, 13 bp, Artificial Sequence
  Oligonucleotide for detection of SNP TSC0052919
gtaagtgttttga

SEQ ID NO: 217572 - DNA, 13 bp, Artificial Sequence
  Oligonucleotide for detection of SNP TSC0052919
tcaaaacacttac

SEQ ID NO: 217573 - DNA, 13 bp, Artificial Sequence
  Oligonucleotide for detection of SNP TSC0052919
gtaagtattttga

SEQ ID NO: 217574 - DNA, 13 bp, Artificial Sequence
  Oligonucleotide for detection of SNP TSC0052919
tcaaaatacttac

SEQ ID NO: 217575 - DNA, 13 bp, Artificial Sequence
  Oligonucleotide for detection of SNP TSC0052919
gtaagcgttttga

SEQ ID NO: 217576 - DNA, 13 bp, Artificial Sequence
  Oligonucleotide for detection of SNP TSC0052919
tcaaaacgcttac

SEQ ID NO: 217577 - DNA, 13 bp, Artificial Sequence
  Oligonucleotide for detection of SNP TSC0052929
tttttggggaggy

SEQ ID NO: 217578 - DNA, 13 bp, Artificial Sequence
  Oligonucleotide for detection of SNP TSC0052929
rcctccccaaaaa

SEQ ID NO: 217579 - DNA, 13 bp, Artificial Sequence
  Oligonucleotide for detection of SNP TSC0052929
tttttgaggaggy

SEQ ID NO: 217580 - DNA, 13 bp, Artificial Sequence
  Oligonucleotide for detection of SNP TSC0052929
rcctcctcaaaaa

SEQ ID NO: 217581 - DNA, 13 bp, Artificial Sequence
  Oligonucleotide for detection of SNP TSC0052932
ttttgattttgty

SEQ ID NO: 217582 - DNA, 13 bp, Artificial Sequence
  Oligonucleotide for detection of SNP TSC0052932
racaaaatcaaaa

SEQ ID NO: 217583 - DNA, 13 bp, Artificial Sequence
  Oligonucleotide for detection of SNP TSC0052932
ttttgagtttgty

SEQ ID NO: 217584 - DNA, 13 bp, Artificial Sequence
  Oligonucleotide for detection of SNP TSC0052932
racaaactcaaaa

SEQ ID NO: 217585 - DNA, 13 bp, Artificial Sequence
  Oligonucleotide for detection of SNP TSC0052932
ggtagagttagaa

SEQ ID NO: 217586 - DNA, 13 bp, Artificial Sequence
  Oligonucleotide for detection of SNP TSC0052932
ttctaactctacc

SEQ ID NO: 217587 - DNA, 13 bp, Artificial Sequence
  Oligonucleotide for detection of SNP TSC0052932
ggtagatttagaa

SEQ ID NO: 217588 - DNA, 13 bp, Artificial Sequence
  Oligonucleotide for detection of SNP TSC0052932
ttctaaatctacc

SEQ ID NO: 217589 - DNA, 13 bp, Artificial Sequence
  Oligonucleotide for detection of SNP TSC0052934
attatgaaagtat

SEQ ID NO: 217590 - DNA, 13 bp, Artificial Sequence
  Oligonucleotide for detection of SNP TSC0052934
atactttcataat

SEQ ID NO: 217591 - DNA, 13 bp, Artificial Sequence
  Oligonucleotide for detection of SNP TSC0052934
attatgtaagtat

SEQ ID NO: 217592 - DNA, 13 bp, Artificial Sequence
  Oligonucleotide for detection of SNP TSC0052934
atacttacataat

SEQ ID NO: 217593 - DNA, 13 bp, Artificial Sequence
  Oligonucleotide for detection of SNP TSC0052934
atatttttatagt

SEQ ID NO: 217594 - DNA, 13 bp, Artificial Sequence
  Oligonucleotide for detection of SNP TSC0052934
actataaaaatat

SEQ ID NO: 217595 - DNA, 13 bp, Artificial Sequence
  Oligonucleotide for detection of SNP TSC0052934
atatttgtatagt

SEQ ID NO: 217596 - DNA, 13 bp, Artificial Sequence
  Oligonucleotide for detection of SNP TSC0052934
actatacaaatat

SEQ ID NO: 217597 - DNA, 13 bp, Artificial Sequence
  Oligonucleotide for detection of SNP TSC0052935
gttttagttaatt

SEQ ID NO: 217598 - DNA, 13 bp, Artificial Sequence
  Oligonucleotide for detection of SNP TSC0052935
aattaactaaaac

SEQ ID NO: 217599 - DNA, 13 bp, Artificial Sequence
  Oligonucleotide for detection of SNP TSC0052935
gttttaattaatt

SEQ ID NO: 217600 - DNA, 13 bp, Artificial Sequence
  Oligonucleotide for detection of SNP TSC0052935
aattaattaaaac

SEQ ID NO: 217601 - DNA, 13 bp, Artificial Sequence
  Oligonucleotide for detection of SNP TSC0052937
ataattttttttt

SEQ ID NO: 217602 - DNA, 13 bp, Artificial Sequence
  Oligonucleotide for detection of SNP TSC0052937
aaaaaaaaattat

SEQ ID NO: 217603 - DNA, 13 bp, Artificial Sequence
  Oligonucleotide for detection of SNP TSC0052937
agggggtgattgt

SEQ ID NO: 217604 - DNA, 13 bp, Artificial Sequence
  Oligonucleotide for detection of SNP TSC0052937
acaatcaccccct

SEQ ID NO: 217605 - DNA, 13 bp, Artificial Sequence
  Oligonucleotide for detection of SNP TSC0052937
agggggagattgt

SEQ ID NO: 217606 - DNA, 13 bp, Artificial Sequence
  Oligonucleotide for detection of SNP TSC0052937
acaatctccccct

SEQ ID NO: 217607 - DNA, 13 bp, Artificial Sequence
  Oligonucleotide for detection of SNP TSC0052940
ttggtgatttgaa

SEQ ID NO: 217608 - DNA, 13 bp, Artificial Sequence
  Oligonucleotide for detection of SNP TSC0052940
ttcaaatcaccaa

SEQ ID NO: 217609 - DNA, 13 bp, Artificial Sequence
  Oligonucleotide for detection of SNP TSC0052940
ttggtggtttgaa

SEQ ID NO: 217610 - DNA, 13 bp, Artificial Sequence
  Oligonucleotide for detection of SNP TSC0052940
ttcaaaccaccaa

SEQ ID NO: 217611 - DNA, 13 bp, Artificial Sequence
  Oligonucleotide for detection of SNP TSC0052943
gtgaaaattatat

SEQ ID NO: 217612 - DNA, 13 bp, Artificial Sequence
  Oligonucleotide for detection of SNP TSC0052943
atataattttcac

SEQ ID NO: 217613 - DNA, 13 bp, Artificial Sequence
  Oligonucleotide for detection of SNP TSC0052944
ttaattatgatty

SEQ ID NO: 217614 - DNA, 13 bp, Artificial Sequence
  Oligonucleotide for detection of SNP TSC0052944
raatcataattaa

SEQ ID NO: 217615 - DNA, 13 bp, Artificial Sequence
  Oligonucleotide for detection of SNP TSC0052944
ttaattttgatty

SEQ ID NO: 217616 - DNA, 13 bp, Artificial Sequence
  Oligonucleotide for detection of SNP TSC0052944
raatcaaaattaa

SEQ ID NO: 217617 - DNA, 13 bp, Artificial Sequence
  Oligonucleotide for detection of SNP TSC0052944
gaattatgattaa

SEQ ID NO: 217618 - DNA, 13 bp, Artificial Sequence
  Oligonucleotide for detection of SNP TSC0052944
ttaatcataattc

SEQ ID NO: 217619 - DNA, 13 bp, Artificial Sequence
  Oligonucleotide for detection of SNP TSC0052944
gaattaggattaa

SEQ ID NO: 217620 - DNA, 13 bp, Artificial Sequence
  Oligonucleotide for detection of SNP TSC0052944
ttaatcctaattc

SEQ ID NO: 217621 - DNA, 13 bp, Artificial Sequence
  Oligonucleotide for detection of SNP TSC0052945
atgtatattgggt

SEQ ID NO: 217622 - DNA, 13 bp, Artificial Sequence
  Oligonucleotide for detection of SNP TSC0052945
acccaatatacat

SEQ ID NO: 217623 - DNA, 13 bp, Artificial Sequence
  Oligonucleotide for detection of SNP TSC0052945
atgtatgttgggt

SEQ ID NO: 217624 - DNA, 13 bp, Artificial Sequence
  Oligonucleotide for detection of SNP TSC0052945
acccaacatacat

SEQ ID NO: 217625 - DNA, 13 bp, Artificial Sequence
  Oligonucleotide for detection of SNP TSC0052945
atgtacgttgggt

SEQ ID NO: 217626 - DNA, 13 bp, Artificial Sequence
  Oligonucleotide for detection of SNP TSC0052945
acccaacgtacat

SEQ ID NO: 217627 - DNA, 13 bp, Artificial Sequence
  Oligonucleotide for detection of SNP TSC0052945
atttagtgtatat

SEQ ID NO: 217628 - DNA, 13 bp, Artificial Sequence
  Oligonucleotide for detection of SNP TSC0052945
atatacactaaat

SEQ ID NO: 217629 - DNA, 13 bp, Artificial Sequence
  Oligonucleotide for detection of SNP TSC0052945
atttagcgtatat

SEQ ID NO: 217630 - DNA, 13 bp, Artificial Sequence
  Oligonucleotide for detection of SNP TSC0052945
atatacgctaaat

SEQ ID NO: 217631 - DNA, 13 bp, Artificial Sequence
  Oligonucleotide for detection of SNP TSC0052946
tgaaggtgtagty

SEQ ID NO: 217632 - DNA, 13 bp, Artificial Sequence
  Oligonucleotide for detection of SNP TSC0052946
ractacaccttca

SEQ ID NO: 217633 - DNA, 13 bp, Artificial Sequence
  Oligonucleotide for detection of SNP TSC0052946
tgaaggcgtagty

SEQ ID NO: 217634 - DNA, 13 bp, Artificial Sequence
  Oligonucleotide for detection of SNP TSC0052946
ractacgccttca

SEQ ID NO: 217635 - DNA, 13 bp, Artificial Sequence
  Oligonucleotide for detection of SNP TSC0052946
ggttatgttttta

SEQ ID NO: 217636 - DNA, 13 bp, Artificial Sequence
  Oligonucleotide for detection of SNP TSC0052946
taaaaacataacc

SEQ ID NO: 217637 - DNA, 13 bp, Artificial Sequence
  Oligonucleotide for detection of SNP TSC0052946
ggttatattttta

SEQ ID NO: 217638 - DNA, 13 bp, Artificial Sequence
  Oligonucleotide for detection of SNP TSC0052946
taaaaatataacc

SEQ ID NO: 217639 - DNA, 13 bp, Artificial Sequence
  Oligonucleotide for detection of SNP TSC0052946
ggttacgttttta

SEQ ID NO: 217640 - DNA, 13 bp, Artificial Sequence
  Oligonucleotide for detection of SNP TSC0052946
taaaaacgtaacc

SEQ ID NO: 217641 - DNA, 13 bp, Artificial Sequence
  Oligonucleotide for detection of SNP TSC0052947
taattttgtgaty

SEQ ID NO: 217642 - DNA, 13 bp, Artificial Sequence
  Oligonucleotide for detection of SNP TSC0052947
ratcacaaaatta

SEQ ID NO: 217643 - DNA, 13 bp, Artificial Sequence
  Oligonucleotide for detection of SNP TSC0052947
taatttcgtgaty

SEQ ID NO: 217644 - DNA, 13 bp, Artificial Sequence
  Oligonucleotide for detection of SNP TSC0052947
ratcacgaaatta

SEQ ID NO: 217645 - DNA, 13 bp, Artificial Sequence
  Oligonucleotide for detection of SNP TSC0052947
ggttatggaatta

SEQ ID NO: 217646 - DNA, 13 bp, Artificial Sequence
  Oligonucleotide for detection of SNP TSC0052947
taattccataacc

SEQ ID NO: 217647 - DNA, 13 bp, Artificial Sequence
  Oligonucleotide for detection of SNP TSC0052947
ggttatagaatta

SEQ ID NO: 217648 - DNA, 13 bp, Artificial Sequence
  Oligonucleotide for detection of SNP TSC0052947
taattctataacc

SEQ ID NO: 217649 - DNA, 13 bp, Artificial Sequence
  Oligonucleotide for detection of SNP TSC0052947
ggttacggaatta

SEQ ID NO: 217650 - DNA, 13 bp, Artificial Sequence
  Oligonucleotide for detection of SNP TSC0052947
taattccgtaacc

SEQ ID NO: 217651 - DNA, 13 bp, Artificial Sequence
  Oligonucleotide for detection of SNP TSC0052949
attgacgttttty

SEQ ID NO: 217652 - DNA, 13 bp, Artificial Sequence
  Oligonucleotide for detection of SNP TSC0052949
raaaaacgtcaat

SEQ ID NO: 217653 - DNA, 13 bp, Artificial Sequence
  Oligonucleotide for detection of SNP TSC0052949
gagaagtgttagt

SEQ ID NO: 217654 - DNA, 13 bp, Artificial Sequence
  Oligonucleotide for detection of SNP TSC0052949
actaacacttctc

SEQ ID NO: 217655 - DNA, 13 bp, Artificial Sequence
  Oligonucleotide for detection of SNP TSC0052949
gagaagcgttagt

SEQ ID NO: 217656 - DNA, 13 bp, Artificial Sequence
  Oligonucleotide for detection of SNP TSC0052949
actaacgcttctc

SEQ ID NO: 217657 - DNA, 13 bp, Artificial Sequence
  Oligonucleotide for detection of SNP TSC0052951
ataaattttggta

SEQ ID NO: 217658 - DNA, 13 bp, Artificial Sequence
  Oligonucleotide for detection of SNP TSC0052951
taccaaaatttat

SEQ ID NO: 217659 - DNA, 13 bp, Artificial Sequence
  Oligonucleotide for detection of SNP TSC0052951
ataaatgttggta

SEQ ID NO: 217660 - DNA, 13 bp, Artificial Sequence
  Oligonucleotide for detection of SNP TSC0052951
taccaacatttat

SEQ ID NO: 217661 - DNA, 13 bp, Artificial Sequence
  Oligonucleotide for detection of SNP TSC0052951
tgttaagatttgt

SEQ ID NO: 217662 - DNA, 13 bp, Artificial Sequence
  Oligonucleotide for detection of SNP TSC0052951
acaaatcttaaca

SEQ ID NO: 217663 - DNA, 13 bp, Artificial Sequence
  Oligonucleotide for detection of SNP TSC0052951
tgttaatatttgt

SEQ ID NO: 217664 - DNA, 13 bp, Artificial Sequence
  Oligonucleotide for detection of SNP TSC0052951
acaaatattaaca

SEQ ID NO: 217665 - DNA, 13 bp, Artificial Sequence
  Oligonucleotide for detection of SNP TSC0052952
aatttaatttgtg

SEQ ID NO: 217666 - DNA, 13 bp, Artificial Sequence
  Oligonucleotide for detection of SNP TSC0052952
cacaaattaaatt

SEQ ID NO: 217667 - DNA, 13 bp, Artificial Sequence
  Oligonucleotide for detection of SNP TSC0052952
aatttagtttgtg

SEQ ID NO: 217668 - DNA, 13 bp, Artificial Sequence
  Oligonucleotide for detection of SNP TSC0052952
cacaaactaaatt

SEQ ID NO: 217669 - DNA, 13 bp, Artificial Sequence
  Oligonucleotide for detection of SNP TSC0052952
aatttaatttgcg

SEQ ID NO: 217670 - DNA, 13 bp, Artificial Sequence
  Oligonucleotide for detection of SNP TSC0052952
cgcaaattaaatt

SEQ ID NO: 217671 - DNA, 13 bp, Artificial Sequence
  Oligonucleotide for detection of SNP TSC0052952
aatttagtttgcg

SEQ ID NO: 217672 - DNA, 13 bp, Artificial Sequence
  Oligonucleotide for detection of SNP TSC0052952
cgcaaactaaatt

SEQ ID NO: 217673 - DNA, 13 bp, Artificial Sequence
  Oligonucleotide for detection of SNP TSC0052953
gaaataaattttt

SEQ ID NO: 217674 - DNA, 13 bp, Artificial Sequence
  Oligonucleotide for detection of SNP TSC0052953
aaaaatttatttc

SEQ ID NO: 217675 - DNA, 13 bp, Artificial Sequence
  Oligonucleotide for detection of SNP TSC0052953
gaaatatattttt

SEQ ID NO: 217676 - DNA, 13 bp, Artificial Sequence
  Oligonucleotide for detection of SNP TSC0052953
aaaaatatatttc

SEQ ID NO: 217677 - DNA, 13 bp, Artificial Sequence
  Oligonucleotide for detection of SNP TSC0052953
agaaatttattty

SEQ ID NO: 217678 - DNA, 13 bp, Artificial Sequence
  Oligonucleotide for detection of SNP TSC0052953
raaataaatttct

SEQ ID NO: 217679 - DNA, 13 bp, Artificial Sequence
  Oligonucleotide for detection of SNP TSC0052953
agaaatatattty

SEQ ID NO: 217680 - DNA, 13 bp, Artificial Sequence
  Oligonucleotide for detection of SNP TSC0052953
raaatatatttct

SEQ ID NO: 217681 - DNA, 13 bp, Artificial Sequence
  Oligonucleotide for detection of SNP TSC0052956
aagttttggagtt

SEQ ID NO: 217682 - DNA, 13 bp, Artificial Sequence
  Oligonucleotide for detection of SNP TSC0052956
aactccaaaactt

SEQ ID NO: 217683 - DNA, 13 bp, Artificial Sequence
  Oligonucleotide for detection of SNP TSC0052956
aagtttcggagtt

SEQ ID NO: 217684 - DNA, 13 bp, Artificial Sequence
  Oligonucleotide for detection of SNP TSC0052956
aactccgaaactt

SEQ ID NO: 217685 - DNA, 13 bp, Artificial Sequence
  Oligonucleotide for detection of SNP TSC0052956
aattttggagttt

SEQ ID NO: 217686 - DNA, 13 bp, Artificial Sequence
  Oligonucleotide for detection of SNP TSC0052956
aaactccaaaatt

SEQ ID NO: 217687 - DNA, 13 bp, Artificial Sequence
  Oligonucleotide for detection of SNP TSC0052956
aattttagagttt

SEQ ID NO: 217688 - DNA, 13 bp, Artificial Sequence
  Oligonucleotide for detection of SNP TSC0052956
aaactctaaaatt

SEQ ID NO: 217689 - DNA, 13 bp, Artificial Sequence
  Oligonucleotide for detection of SNP TSC0052956
aatttcggagttt

SEQ ID NO: 217690 - DNA, 13 bp, Artificial Sequence
  Oligonucleotide for detection of SNP TSC0052956
aaactccgaaatt

SEQ ID NO: 217691 - DNA, 13 bp, Artificial Sequence
  Oligonucleotide for detection of SNP TSC0052957
atattaattagga

SEQ ID NO: 217692 - DNA, 13 bp, Artificial Sequence
  Oligonucleotide for detection of SNP TSC0052957
tcctaattaatat

SEQ ID NO: 217693 - DNA, 13 bp, Artificial Sequence
  Oligonucleotide for detection of SNP TSC0052957
atattagttagga

SEQ ID NO: 217694 - DNA, 13 bp, Artificial Sequence
  Oligonucleotide for detection of SNP TSC0052957
tcctaactaatat

SEQ ID NO: 217695 - DNA, 13 bp, Artificial Sequence
  Oligonucleotide for detection of SNP TSC0052958
ttattgtaataaa

SEQ ID NO: 217696 - DNA, 13 bp, Artificial Sequence
  Oligonucleotide for detection of SNP TSC0052958
tttattacaataa

SEQ ID NO: 217697 - DNA, 13 bp, Artificial Sequence
  Oligonucleotide for detection of SNP TSC0052958
ttattggaataaa

SEQ ID NO: 217698 - DNA, 13 bp, Artificial Sequence
  Oligonucleotide for detection of SNP TSC0052958
tttattccaataa

SEQ ID NO: 217699 - DNA, 13 bp, Artificial Sequence
  Oligonucleotide for detection of SNP TSC0052958
tttgttgtagtga

SEQ ID NO: 217700 - DNA, 13 bp, Artificial Sequence
  Oligonucleotide for detection of SNP TSC0052958
tcactacaacaaa

SEQ ID NO: 217701 - DNA, 13 bp, Artificial Sequence
  Oligonucleotide for detection of SNP TSC0052958
tttgttttagtga

SEQ ID NO: 217702 - DNA, 13 bp, Artificial Sequence
  Oligonucleotide for detection of SNP TSC0052958
tcactaaaacaaa

SEQ ID NO: 217703 - DNA, 13 bp, Artificial Sequence
  Oligonucleotide for detection of SNP TSC0052959
tatttttttgtty

SEQ ID NO: 217704 - DNA, 13 bp, Artificial Sequence
  Oligonucleotide for detection of SNP TSC0052959
raacaaaaaaata

SEQ ID NO: 217705 - DNA, 13 bp, Artificial Sequence
  Oligonucleotide for detection of SNP TSC0052959
gggtagtggggtg

SEQ ID NO: 217706 - DNA, 13 bp, Artificial Sequence
  Oligonucleotide for detection of SNP TSC0052959
caccccactaccc

SEQ ID NO: 217707 - DNA, 13 bp, Artificial Sequence
  Oligonucleotide for detection of SNP TSC0052959
gggtaggggggtg

SEQ ID NO: 217708 - DNA, 13 bp, Artificial Sequence
  Oligonucleotide for detection of SNP TSC0052959
cacccccctaccc

SEQ ID NO: 217709 - DNA, 13 bp, Artificial Sequence
  Oligonucleotide for detection of SNP TSC0052960
tttgtaaattaty

SEQ ID NO: 217710 - DNA, 13 bp, Artificial Sequence
  Oligonucleotide for detection of SNP TSC0052960
rataatttacaaa

SEQ ID NO: 217711 - DNA, 13 bp, Artificial Sequence
  Oligonucleotide for detection of SNP TSC0052961
ttaaaagatgtta

SEQ ID NO: 217712 - DNA, 13 bp, Artificial Sequence
  Oligonucleotide for detection of SNP TSC0052961
taacatcttttaa

SEQ ID NO: 217713 - DNA, 13 bp, Artificial Sequence
  Oligonucleotide for detection of SNP TSC0052961
ttaaaaaatgtta

SEQ ID NO: 217714 - DNA, 13 bp, Artificial Sequence
  Oligonucleotide for detection of SNP TSC0052961
taacattttttaa

SEQ ID NO: 217715 - DNA, 13 bp, Artificial Sequence
  Oligonucleotide for detection of SNP TSC0052963
tagttagaaaatg

SEQ ID NO: 217716 - DNA, 13 bp, Artificial Sequence
  Oligonucleotide for detection of SNP TSC0052963
cattttctaacta

SEQ ID NO: 217717 - DNA, 13 bp, Artificial Sequence
  Oligonucleotide for detection of SNP TSC0052963
tagttaaaaaatg

SEQ ID NO: 217718 - DNA, 13 bp, Artificial Sequence
  Oligonucleotide for detection of SNP TSC0052963
cattttttaacta

SEQ ID NO: 217719 - DNA, 13 bp, Artificial Sequence
  Oligonucleotide for detection of SNP TSC0052964
gtagtattgttty

SEQ ID NO: 217720 - DNA, 13 bp, Artificial Sequence
  Oligonucleotide for detection of SNP TSC0052964
raaacaatactac

SEQ ID NO: 217721 - DNA, 13 bp, Artificial Sequence
  Oligonucleotide for detection of SNP TSC0052964
gaaatattgttgy

SEQ ID NO: 217722 - DNA, 13 bp, Artificial Sequence
  Oligonucleotide for detection of SNP TSC0052964
rcaacaatatttc

SEQ ID NO: 217723 - DNA, 13 bp, Artificial Sequence
  Oligonucleotide for detection of SNP TSC0052964
gaaataatgttgy

SEQ ID NO: 217724 - DNA, 13 bp, Artificial Sequence
  Oligonucleotide for detection of SNP TSC0052964
rcaacattatttc

SEQ ID NO: 217725 - DNA, 13 bp, Artificial Sequence
  Oligonucleotide for detection of SNP TSC0052969
atttaaaatgaaa

SEQ ID NO: 217726 - DNA, 13 bp, Artificial Sequence
  Oligonucleotide for detection of SNP TSC0052969
tttcattttaaat

SEQ ID NO: 217727 - DNA, 13 bp, Artificial Sequence
  Oligonucleotide for detection of SNP TSC0052969
atttaatatgaaa

SEQ ID NO: 217728 - DNA, 13 bp, Artificial Sequence
  Oligonucleotide for detection of SNP TSC0052969
tttcatattaaat

SEQ ID NO: 217729 - DNA, 13 bp, Artificial Sequence
  Oligonucleotide for detection of SNP TSC0052969
ttttattttggat

SEQ ID NO: 217730 - DNA, 13 bp, Artificial Sequence
  Oligonucleotide for detection of SNP TSC0052969
atccaaaataaaa

SEQ ID NO: 217731 - DNA, 13 bp, Artificial Sequence
  Oligonucleotide for detection of SNP TSC0052969
ttttatgttggat

SEQ ID NO: 217732 - DNA, 13 bp, Artificial Sequence
  Oligonucleotide for detection of SNP TSC0052969
atccaacataaaa

SEQ ID NO: 217733 - DNA, 13 bp, Artificial Sequence
  Oligonucleotide for detection of SNP TSC0052970
gggaatgagtgag

SEQ ID NO: 217734 - DNA, 13 bp, Artificial Sequence
  Oligonucleotide for detection of SNP TSC0052970
ctcactcattccc

SEQ ID NO: 217735 - DNA, 13 bp, Artificial Sequence
  Oligonucleotide for detection of SNP TSC0052970
gggaataagtgag

SEQ ID NO: 217736 - DNA, 13 bp, Artificial Sequence
  Oligonucleotide for detection of SNP TSC0052970
ctcacttattccc

SEQ ID NO: 217737 - DNA, 13 bp, Artificial Sequence
  Oligonucleotide for detection of SNP TSC0052970
gggaatgagcgag

SEQ ID NO: 217738 - DNA, 13 bp, Artificial Sequence
  Oligonucleotide for detection of SNP TSC0052970
ctcgctcattccc

SEQ ID NO: 217739 - DNA, 13 bp, Artificial Sequence
  Oligonucleotide for detection of SNP TSC0052970
gggaataagcgag

SEQ ID NO: 217740 - DNA, 13 bp, Artificial Sequence
  Oligonucleotide for detection of SNP TSC0052970
ctcgcttattccc

SEQ ID NO: 217741 - DNA, 13 bp, Artificial Sequence
  Oligonucleotide for detection of SNP TSC0052971
gaataaatgattg

SEQ ID NO: 217742 - DNA, 13 bp, Artificial Sequence
  Oligonucleotide for detection of SNP TSC0052971
caatcatttattc

SEQ ID NO: 217743 - DNA, 13 bp, Artificial Sequence
  Oligonucleotide for detection of SNP TSC0052971
gaataagtgattg

SEQ ID NO: 217744 - DNA, 13 bp, Artificial Sequence
  Oligonucleotide for detection of SNP TSC0052971
caatcacttattc

SEQ ID NO: 217745 - DNA, 13 bp, Artificial Sequence
  Oligonucleotide for detection of SNP TSC0052972
gaaaatttggagt

SEQ ID NO: 217746 - DNA, 13 bp, Artificial Sequence
  Oligonucleotide for detection of SNP TSC0052972
actccaaattttc

SEQ ID NO: 217747 - DNA, 13 bp, Artificial Sequence
  Oligonucleotide for detection of SNP TSC0052972
gaaaatgtggagt

SEQ ID NO: 217748 - DNA, 13 bp, Artificial Sequence
  Oligonucleotide for detection of SNP TSC0052972
actccacattttc

SEQ ID NO: 217749 - DNA, 13 bp, Artificial Sequence
  Oligonucleotide for detection of SNP TSC0052973
ggtggggtggggg

SEQ ID NO: 217750 - DNA, 13 bp, Artificial Sequence
  Oligonucleotide for detection of SNP TSC0052973
cccccaccccacc

SEQ ID NO: 217751 - DNA, 13 bp, Artificial Sequence
  Oligonucleotide for detection of SNP TSC0052973
ggtgggatggggg

SEQ ID NO: 217752 - DNA, 13 bp, Artificial Sequence
  Oligonucleotide for detection of SNP TSC0052973
cccccatcccacc

SEQ ID NO: 217753 - DNA, 13 bp, Artificial Sequence
  Oligonucleotide for detection of SNP TSC0052974
aaggtggttgtty

SEQ ID NO: 217754 - DNA, 13 bp, Artificial Sequence
  Oligonucleotide for detection of SNP TSC0052974
raacaaccacctt

SEQ ID NO: 217755 - DNA, 13 bp, Artificial Sequence
  Oligonucleotide for detection of SNP TSC0052974
aaggtgattgtty

SEQ ID NO: 217756 - DNA, 13 bp, Artificial Sequence
  Oligonucleotide for detection of SNP TSC0052974
raacaatcacctt

SEQ ID NO: 217757 - DNA, 13 bp, Artificial Sequence
  Oligonucleotide for detection of SNP TSC0052975
tgtgagaagttta

SEQ ID NO: 217758 - DNA, 13 bp, Artificial Sequence
  Oligonucleotide for detection of SNP TSC0052975
taaacttctcaca

SEQ ID NO: 217759 - DNA, 13 bp, Artificial Sequence
  Oligonucleotide for detection of SNP TSC0052975
tgtgaggagttta

SEQ ID NO: 217760 - DNA, 13 bp, Artificial Sequence
  Oligonucleotide for detection of SNP TSC0052975
taaactcctcaca

SEQ ID NO: 217761 - DNA, 13 bp, Artificial Sequence
  Oligonucleotide for detection of SNP TSC0052976
ggaatttaggtgy

SEQ ID NO: 217762 - DNA, 13 bp, Artificial Sequence
  Oligonucleotide for detection of SNP TSC0052976
rcacctaaattcc

SEQ ID NO: 217763 - DNA, 13 bp, Artificial Sequence
  Oligonucleotide for detection of SNP TSC0052976
ggaattgaggtgy

SEQ ID NO: 217764 - DNA, 13 bp, Artificial Sequence
  Oligonucleotide for detection of SNP TSC0052976
rcacctcaattcc

SEQ ID NO: 217765 - DNA, 13 bp, Artificial Sequence
  Oligonucleotide for detection of SNP TSC0052976
gtattttagttty

SEQ ID NO: 217766 - DNA, 13 bp, Artificial Sequence
  Oligonucleotide for detection of SNP TSC0052976
raaactaaaatac

SEQ ID NO: 217767 - DNA, 13 bp, Artificial Sequence
  Oligonucleotide for detection of SNP TSC0001296
gatttgtgatatt

SEQ ID NO: 217768 - DNA, 13 bp, Artificial Sequence
  Oligonucleotide for detection of SNP TSC0001296
aatatcacaaatc

SEQ ID NO: 217769 - DNA, 13 bp, Artificial Sequence
  Oligonucleotide for detection of SNP TSC0001296
gatttgcgatatt

SEQ ID NO: 217770 - DNA, 13 bp, Artificial Sequence
  Oligonucleotide for detection of SNP TSC0001296
aatatcgcaaatc

SEQ ID NO: 217771 - DNA, 13 bp, Artificial Sequence
  Oligonucleotide for detection of SNP TSC0001296
aatattgtaaaty

SEQ ID NO: 217772 - DNA, 13 bp, Artificial Sequence
  Oligonucleotide for detection of SNP TSC0001296
ratttacaatatt

SEQ ID NO: 217773 - DNA, 13 bp, Artificial Sequence
  Oligonucleotide for detection of SNP TSC0001296
aatattataaaty

SEQ ID NO: 217774 - DNA, 13 bp, Artificial Sequence
  Oligonucleotide for detection of SNP TSC0001296
ratttataatatt

SEQ ID NO: 217775 - DNA, 13 bp, Artificial Sequence
  Oligonucleotide for detection of SNP TSC0001296
aatatcgtaaaty

SEQ ID NO: 217776 - DNA, 13 bp, Artificial Sequence
  Oligonucleotide for detection of SNP TSC0001296
ratttacgatatt

SEQ ID NO: 217777 - DNA, 13 bp, Artificial Sequence
  Oligonucleotide for detection of SNP TSC0052978
tattgtttaagtg

SEQ ID NO: 217778 - DNA, 13 bp, Artificial Sequence
  Oligonucleotide for detection of SNP TSC0052978
cacttaaacaata

SEQ ID NO: 217779 - DNA, 13 bp, Artificial Sequence
  Oligonucleotide for detection of SNP TSC0052978
tattgtgtaagtg

SEQ ID NO: 217780 - DNA, 13 bp, Artificial Sequence
  Oligonucleotide for detection of SNP TSC0052978
cacttacacaata

SEQ ID NO: 217781 - DNA, 13 bp, Artificial Sequence
  Oligonucleotide for detection of SNP TSC0052978
tattgtttaagcg

SEQ ID NO: 217782 - DNA, 13 bp, Artificial Sequence
  Oligonucleotide for detection of SNP TSC0052978
cgcttaaacaata

SEQ ID NO: 217783 - DNA, 13 bp, Artificial Sequence
  Oligonucleotide for detection of SNP TSC0052978
tattgtgtaagcg

SEQ ID NO: 217784 - DNA, 13 bp, Artificial Sequence
  Oligonucleotide for detection of SNP TSC0052978
cgcttacacaata

SEQ ID NO: 217785 - DNA, 13 bp, Artificial Sequence
  Oligonucleotide for detection of SNP TSC0052978
tgtttggataatg

SEQ ID NO: 217786 - DNA, 13 bp, Artificial Sequence
  Oligonucleotide for detection of SNP TSC0052978
cattatccaaaca

SEQ ID NO: 217787 - DNA, 13 bp, Artificial Sequence
  Oligonucleotide for detection of SNP TSC0052978
tgtttgtataatg

SEQ ID NO: 217788 - DNA, 13 bp, Artificial Sequence
  Oligonucleotide for detection of SNP TSC0052978
cattatacaaaca

SEQ ID NO: 217789 - DNA, 13 bp, Artificial Sequence
  Oligonucleotide for detection of SNP TSC0052978
cgtttggataatg

SEQ ID NO: 217790 - DNA, 13 bp, Artificial Sequence
  Oligonucleotide for detection of SNP TSC0052978
cattatccaaacg

SEQ ID NO: 217791 - DNA, 13 bp, Artificial Sequence
  Oligonucleotide for detection of SNP TSC0052978
cgtttgtataatg

SEQ ID NO: 217792 - DNA, 13 bp, Artificial Sequence
  Oligonucleotide for detection of SNP TSC0052978
cattatacaaacg

SEQ ID NO: 217793 - DNA, 13 bp, Artificial Sequence
  Oligonucleotide for detection of SNP TSC0052980
agtataatattty

SEQ ID NO: 217794 - DNA, 13 bp, Artificial Sequence
  Oligonucleotide for detection of SNP TSC0052980
raaatattatact

SEQ ID NO: 217795 - DNA, 13 bp, Artificial Sequence
  Oligonucleotide for detection of SNP TSC0052980
agtatagtattty

SEQ ID NO: 217796 - DNA, 13 bp, Artificial Sequence
  Oligonucleotide for detection of SNP TSC0052980
raaatactatact

SEQ ID NO: 217797 - DNA, 13 bp, Artificial Sequence
  Oligonucleotide for detection of SNP TSC0052985
ttttgggtaagtg

SEQ ID NO: 217798 - DNA, 13 bp, Artificial Sequence
  Oligonucleotide for detection of SNP TSC0052985
cacttacccaaaa

SEQ ID NO: 217799 - DNA, 13 bp, Artificial Sequence
  Oligonucleotide for detection of SNP TSC0052985
ttttggataagtg

SEQ ID NO: 217800 - DNA, 13 bp, Artificial Sequence
  Oligonucleotide for detection of SNP TSC0052985
cacttatccaaaa

SEQ ID NO: 217801 - DNA, 13 bp, Artificial Sequence
  Oligonucleotide for detection of SNP TSC0009523
gattggtaaatga

SEQ ID NO: 217802 - DNA, 13 bp, Artificial Sequence
  Oligonucleotide for detection of SNP TSC0009523
tcatttaccaatc

SEQ ID NO: 217803 - DNA, 13 bp, Artificial Sequence
  Oligonucleotide for detection of SNP TSC0009523
gattgggaaatga

SEQ ID NO: 217804 - DNA, 13 bp, Artificial Sequence
  Oligonucleotide for detection of SNP TSC0009523
tcatttcccaatc

SEQ ID NO: 217805 - DNA, 13 bp, Artificial Sequence
  Oligonucleotide for detection of SNP TSC0009523
ttattttttaaty

SEQ ID NO: 217806 - DNA, 13 bp, Artificial Sequence
  Oligonucleotide for detection of SNP TSC0009523
rattaaaaaataa

SEQ ID NO: 217807 - DNA, 13 bp, Artificial Sequence
  Oligonucleotide for detection of SNP TSC0052990
tgttattggattt

SEQ ID NO: 217808 - DNA, 13 bp, Artificial Sequence
  Oligonucleotide for detection of SNP TSC0052990
aaatccaataaca

SEQ ID NO: 217809 - DNA, 13 bp, Artificial Sequence
  Oligonucleotide for detection of SNP TSC0052990
cgttattggattt

SEQ ID NO: 217810 - DNA, 13 bp, Artificial Sequence
  Oligonucleotide for detection of SNP TSC0052990
aaatccaataacg

SEQ ID NO: 217811 - DNA, 13 bp, Artificial Sequence
  Oligonucleotide for detection of SNP TSC0052990
tgttatcggattt

SEQ ID NO: 217812 - DNA, 13 bp, Artificial Sequence
  Oligonucleotide for detection of SNP TSC0052990
aaatccgataaca

SEQ ID NO: 217813 - DNA, 13 bp, Artificial Sequence
  Oligonucleotide for detection of SNP TSC0052990
cgttatcggattt

SEQ ID NO: 217814 - DNA, 13 bp, Artificial Sequence
  Oligonucleotide for detection of SNP TSC0052990
aaatccgataacg

SEQ ID NO: 217815 - DNA, 13 bp, Artificial Sequence
  Oligonucleotide for detection of SNP TSC0052990
aggtttggtgatg

SEQ ID NO: 217816 - DNA, 13 bp, Artificial Sequence
  Oligonucleotide for detection of SNP TSC0052990
catcaccaaacct

SEQ ID NO: 217817 - DNA, 13 bp, Artificial Sequence
  Oligonucleotide for detection of SNP TSC0052990
aggtttagtgatg

SEQ ID NO: 217818 - DNA, 13 bp, Artificial Sequence
  Oligonucleotide for detection of SNP TSC0052990
catcactaaacct

SEQ ID NO: 217819 - DNA, 13 bp, Artificial Sequence
  Oligonucleotide for detection of SNP TSC0052990
aggttcggtgatg

SEQ ID NO: 217820 - DNA, 13 bp, Artificial Sequence
  Oligonucleotide for detection of SNP TSC0052990
catcaccgaacct

SEQ ID NO: 217821 - DNA, 13 bp, Artificial Sequence
  Oligonucleotide for detection of SNP TSC0052990
aggtttagtgacg

SEQ ID NO: 217822 - DNA, 13 bp, Artificial Sequence
  Oligonucleotide for detection of SNP TSC0052990
cgtcactaaacct

SEQ ID NO: 217823 - DNA, 13 bp, Artificial Sequence
  Oligonucleotide for detection of SNP TSC0052990
aggtttggtgacg

SEQ ID NO: 217824 - DNA, 13 bp, Artificial Sequence
  Oligonucleotide for detection of SNP TSC0052990
cgtcaccaaacct

SEQ ID NO: 217825 - DNA, 13 bp, Artificial Sequence
  Oligonucleotide for detection of SNP TSC0052990
aggttcggtgacg

SEQ ID NO: 217826 - DNA, 13 bp, Artificial Sequence
  Oligonucleotide for detection of SNP TSC0052990
cgtcaccgaacct

SEQ ID NO: 217827 - DNA, 13 bp, Artificial Sequence
  Oligonucleotide for detection of SNP TSC0052992
tataaagaattag

SEQ ID NO: 217828 - DNA, 13 bp, Artificial Sequence
  Oligonucleotide for detection of SNP TSC0052992
ctaattctttata

SEQ ID NO: 217829 - DNA, 13 bp, Artificial Sequence
  Oligonucleotide for detection of SNP TSC0052992
tataaaaaattag

SEQ ID NO: 217830 - DNA, 13 bp, Artificial Sequence
  Oligonucleotide for detection of SNP TSC0052992
ctaattttttata

SEQ ID NO: 217831 - DNA, 13 bp, Artificial Sequence
  Oligonucleotide for detection of SNP TSC0052994
aaataaaaatttt

SEQ ID NO: 217832 - DNA, 13 bp, Artificial Sequence
  Oligonucleotide for detection of SNP TSC0052994
aaaatttttattt

SEQ ID NO: 217833 - DNA, 13 bp, Artificial Sequence
  Oligonucleotide for detection of SNP TSC0052994
aaaatttttgttt

SEQ ID NO: 217834 - DNA, 13 bp, Artificial Sequence
  Oligonucleotide for detection of SNP TSC0052994
aaacaaaaatttt

SEQ ID NO: 217835 - DNA, 13 bp, Artificial Sequence
  Oligonucleotide for detection of SNP TSC0052994
aaaattgttgttt

SEQ ID NO: 217836 - DNA, 13 bp, Artificial Sequence
  Oligonucleotide for detection of SNP TSC0052994
aaacaacaatttt

SEQ ID NO: 217837 - DNA, 13 bp, Artificial Sequence
  Oligonucleotide for detection of SNP TSC0000082
gtgtttagaatat

SEQ ID NO: 217838 - DNA, 13 bp, Artificial Sequence
  Oligonucleotide for detection of SNP TSC0000082
atattctaaacac

SEQ ID NO: 217839 - DNA, 13 bp, Artificial Sequence
  Oligonucleotide for detection of SNP TSC0000082
gtgtttggaatat

SEQ ID NO: 217840 - DNA, 13 bp, Artificial Sequence
  Oligonucleotide for detection of SNP TSC0000082
atattccaaacac

SEQ ID NO: 217841 - DNA, 13 bp, Artificial Sequence
  Oligonucleotide for detection of SNP TSC0000082
gcgtttagaatat

SEQ ID NO: 217842 - DNA, 13 bp, Artificial Sequence
  Oligonucleotide for detection of SNP TSC0000082
atattctaaacgc

SEQ ID NO: 217843 - DNA, 13 bp, Artificial Sequence
  Oligonucleotide for detection of SNP TSC0000082
gcgtttggaatat

SEQ ID NO: 217844 - DNA, 13 bp, Artificial Sequence
  Oligonucleotide for detection of SNP TSC0000082
atattccaaacgc

SEQ ID NO: 217845 - DNA, 13 bp, Artificial Sequence
  Oligonucleotide for detection of SNP TSC0052995
agagagataatat

SEQ ID NO: 217846 - DNA, 13 bp, Artificial Sequence
  Oligonucleotide for detection of SNP TSC0052995
atattatctctct

SEQ ID NO: 217847 - DNA, 13 bp, Artificial Sequence
  Oligonucleotide for detection of SNP TSC0052995
agagaggtaatat

SEQ ID NO: 217848 - DNA, 13 bp, Artificial Sequence
  Oligonucleotide for detection of SNP TSC0052995
atattacctctct

SEQ ID NO: 217849 - DNA, 13 bp, Artificial Sequence
  Oligonucleotide for detection of SNP TSC0052996
ttcgttgtgttgy

SEQ ID NO: 217850 - DNA, 13 bp, Artificial Sequence
  Oligonucleotide for detection of SNP TSC0052996
rcaacacaacgaa

SEQ ID NO: 217851 - DNA, 13 bp, Artificial Sequence
  Oligonucleotide for detection of SNP TSC0052996
ttcgttatgttgy

SEQ ID NO: 217852 - DNA, 13 bp, Artificial Sequence
  Oligonucleotide for detection of SNP TSC0052996
rcaacataacgaa

SEQ ID NO: 217853 - DNA, 13 bp, Artificial Sequence
  Oligonucleotide for detection of SNP TSC0052997
tatttggattaag

SEQ ID NO: 217854 - DNA, 13 bp, Artificial Sequence
  Oligonucleotide for detection of SNP TSC0052997
cttaatccaaata

SEQ ID NO: 217855 - DNA, 13 bp, Artificial Sequence
  Oligonucleotide for detection of SNP TSC0052997
tatttgaattaag

SEQ ID NO: 217856 - DNA, 13 bp, Artificial Sequence
  Oligonucleotide for detection of SNP TSC0052997
cttaattcaaata

SEQ ID NO: 217857 - DNA, 13 bp, Artificial Sequence
  Oligonucleotide for detection of SNP TSC0052999
aggttgtagagty

SEQ ID NO: 217858 - DNA, 13 bp, Artificial Sequence
  Oligonucleotide for detection of SNP TSC0052999
ractctacaacct

SEQ ID NO: 217859 - DNA, 13 bp, Artificial Sequence
  Oligonucleotide for detection of SNP TSC0052999
aggttggagagty

SEQ ID NO: 217860 - DNA, 13 bp, Artificial Sequence
  Oligonucleotide for detection of SNP TSC0052999
ractctccaacct

SEQ ID NO: 217861 - DNA, 13 bp, Artificial Sequence
  Oligonucleotide for detection of SNP TSC0052999
aggtcgtagagty

SEQ ID NO: 217862 - DNA, 13 bp, Artificial Sequence
  Oligonucleotide for detection of SNP TSC0052999
ractctacgacct

SEQ ID NO: 217863 - DNA, 13 bp, Artificial Sequence
  Oligonucleotide for detection of SNP TSC0052999
aggtcggagagty

SEQ ID NO: 217864 - DNA, 13 bp, Artificial Sequence
  Oligonucleotide for detection of SNP TSC0052999
ractctccgacct

SEQ ID NO: 217865 - DNA, 13 bp, Artificial Sequence
  Oligonucleotide for detection of SNP TSC0052999
ggttttgtggttt

SEQ ID NO: 217866 - DNA, 13 bp, Artificial Sequence
  Oligonucleotide for detection of SNP TSC0052999
aaaccacaaaacc

SEQ ID NO: 217867 - DNA, 13 bp, Artificial Sequence
  Oligonucleotide for detection of SNP TSC0052999
ggttttgcggttt

SEQ ID NO: 217868 - DNA, 13 bp, Artificial Sequence
  Oligonucleotide for detection of SNP TSC0052999
aaaccgcaaaacc

SEQ ID NO: 217869 - DNA, 13 bp, Artificial Sequence
  Oligonucleotide for detection of SNP TSC0052999
ggtttttcggttt

SEQ ID NO: 217870 - DNA, 13 bp, Artificial Sequence
  Oligonucleotide for detection of SNP TSC0052999
aaaccgaaaaacc

SEQ ID NO: 217871 - DNA, 13 bp, Artificial Sequence
  Oligonucleotide for detection of SNP TSC0053001
aattttttttaaa

SEQ ID NO: 217872 - DNA, 13 bp, Artificial Sequence
  Oligonucleotide for detection of SNP TSC0053001
tttaaaaaaaatt

SEQ ID NO: 217873 - DNA, 13 bp, Artificial Sequence
  Oligonucleotide for detection of SNP TSC0053001
aattttgtttaaa

SEQ ID NO: 217874 - DNA, 13 bp, Artificial Sequence
  Oligonucleotide for detection of SNP TSC0053001
tttaaacaaaatt

SEQ ID NO: 217875 - DNA, 13 bp, Artificial Sequence
  Oligonucleotide for detection of SNP TSC0053001
aatttcgtttaaa

SEQ ID NO: 217876 - DNA, 13 bp, Artificial Sequence
  Oligonucleotide for detection of SNP TSC0053001
tttaaacgaaatt

SEQ ID NO: 217877 - DNA, 13 bp, Artificial Sequence
  Oligonucleotide for detection of SNP TSC0053001
tttgaagggagtt

SEQ ID NO: 217878 - DNA, 13 bp, Artificial Sequence
  Oligonucleotide for detection of SNP TSC0053001
aactcccttcaaa

SEQ ID NO: 217879 - DNA, 13 bp, Artificial Sequence
  Oligonucleotide for detection of SNP TSC0053001
tttgaatggagtt

SEQ ID NO: 217880 - DNA, 13 bp, Artificial Sequence
  Oligonucleotide for detection of SNP TSC0053001
aactccattcaaa

SEQ ID NO: 217881 - DNA, 13 bp, Artificial Sequence
  Oligonucleotide for detection of SNP TSC0053001
tttgaacggagtt

SEQ ID NO: 217882 - DNA, 13 bp, Artificial Sequence
  Oligonucleotide for detection of SNP TSC0053001
aactccgttcaaa

SEQ ID NO: 217883 - DNA, 13 bp, Artificial Sequence
  Oligonucleotide for detection of SNP TSC0053002
ttatgtataattt

SEQ ID NO: 217884 - DNA, 13 bp, Artificial Sequence
  Oligonucleotide for detection of SNP TSC0053002
aaattatacataa

SEQ ID NO: 217885 - DNA, 13 bp, Artificial Sequence
  Oligonucleotide for detection of SNP TSC0053002
ttatgtttaattt

SEQ ID NO: 217886 - DNA, 13 bp, Artificial Sequence
  Oligonucleotide for detection of SNP TSC0053002
aaattaaacataa

SEQ ID NO: 217887 - DNA, 13 bp, Artificial Sequence
  Oligonucleotide for detection of SNP TSC0053002
agattgtatataa

SEQ ID NO: 217888 - DNA, 13 bp, Artificial Sequence
  Oligonucleotide for detection of SNP TSC0053002
ttatatacaatct

SEQ ID NO: 217889 - DNA, 13 bp, Artificial Sequence
  Oligonucleotide for detection of SNP TSC0053002
agattgaatataa

SEQ ID NO: 217890 - DNA, 13 bp, Artificial Sequence
  Oligonucleotide for detection of SNP TSC0053002
ttatattcaatct

SEQ ID NO: 217891 - DNA, 13 bp, Artificial Sequence
  Oligonucleotide for detection of SNP TSC0000565
tgttttgtattat

SEQ ID NO: 217892 - DNA, 13 bp, Artificial Sequence
  Oligonucleotide for detection of SNP TSC0000565
ataatacaaaaca

SEQ ID NO: 217893 - DNA, 13 bp, Artificial Sequence
  Oligonucleotide for detection of SNP TSC0000565
atgatggaaagta

SEQ ID NO: 217894 - DNA, 13 bp, Artificial Sequence
  Oligonucleotide for detection of SNP TSC0000565
tactttccatcat

SEQ ID NO: 217895 - DNA, 13 bp, Artificial Sequence
  Oligonucleotide for detection of SNP TSC0000565
atgatgtaaagta

SEQ ID NO: 217896 - DNA, 13 bp, Artificial Sequence
  Oligonucleotide for detection of SNP TSC0000565
tactttacatcat

SEQ ID NO: 217897 - DNA, 13 bp, Artificial Sequence
  Oligonucleotide for detection of SNP TSC0005598
ttgaatgagtgag

SEQ ID NO: 217898 - DNA, 13 bp, Artificial Sequence
  Oligonucleotide for detection of SNP TSC0005598
ctcactcattcaa

SEQ ID NO: 217899 - DNA, 13 bp, Artificial Sequence
  Oligonucleotide for detection of SNP TSC0005598
ttgaataagtgag

SEQ ID NO: 217900 - DNA, 13 bp, Artificial Sequence
  Oligonucleotide for detection of SNP TSC0005598
ctcacttattcaa

SEQ ID NO: 217901 - DNA, 13 bp, Artificial Sequence
  Oligonucleotide for detection of SNP TSC0053003
tttttgagagtgy

SEQ ID NO: 217902 - DNA, 13 bp, Artificial Sequence
  Oligonucleotide for detection of SNP TSC0053003
rcactctcaaaaa

SEQ ID NO: 217903 - DNA, 13 bp, Artificial Sequence
  Oligonucleotide for detection of SNP TSC0053003
tttttgtgagtgy

SEQ ID NO: 217904 - DNA, 13 bp, Artificial Sequence
  Oligonucleotide for detection of SNP TSC0053003
rcactcacaaaaa

SEQ ID NO: 217905 - DNA, 13 bp, Artificial Sequence
  Oligonucleotide for detection of SNP TSC0053003
gtatttttaggag

SEQ ID NO: 217906 - DNA, 13 bp, Artificial Sequence
  Oligonucleotide for detection of SNP TSC0053003
ctcctaaaaatac

SEQ ID NO: 217907 - DNA, 13 bp, Artificial Sequence
  Oligonucleotide for detection of SNP TSC0053003
gtatttataggag

SEQ ID NO: 217908 - DNA, 13 bp, Artificial Sequence
  Oligonucleotide for detection of SNP TSC0053003
ctcctataaatac

SEQ ID NO: 217909 - DNA, 13 bp, Artificial Sequence
  Oligonucleotide for detection of SNP TSC0005378
gaaaagagtaggt

SEQ ID NO: 217910 - DNA, 13 bp, Artificial Sequence
  Oligonucleotide for detection of SNP TSC0005378
acctactcttttc

SEQ ID NO: 217911 - DNA, 13 bp, Artificial Sequence
  Oligonucleotide for detection of SNP TSC0005378
gaaaagggtaggt

SEQ ID NO: 217912 - DNA, 13 bp, Artificial Sequence
  Oligonucleotide for detection of SNP TSC0005378
acctacccttttc

SEQ ID NO: 217913 - DNA, 13 bp, Artificial Sequence
  Oligonucleotide for detection of SNP TSC0005379
tttatttatatay

SEQ ID NO: 217914 - DNA, 13 bp, Artificial Sequence
  Oligonucleotide for detection of SNP TSC0005379
rtatataaataaa

SEQ ID NO: 217915 - DNA, 13 bp, Artificial Sequence
  Oligonucleotide for detection of SNP TSC0005379
gtgtatgagtaag

SEQ ID NO: 217916 - DNA, 13 bp, Artificial Sequence
  Oligonucleotide for detection of SNP TSC0005379
cttactcatacac

SEQ ID NO: 217917 - DNA, 13 bp, Artificial Sequence
  Oligonucleotide for detection of SNP TSC0005379
gtgtattagtaag

SEQ ID NO: 217918 - DNA, 13 bp, Artificial Sequence
  Oligonucleotide for detection of SNP TSC0005379
cttactaatacac

SEQ ID NO: 217919 - DNA, 13 bp, Artificial Sequence
  Oligonucleotide for detection of SNP TSC0005380
gaatgtgtaagty

SEQ ID NO: 217920 - DNA, 13 bp, Artificial Sequence
  Oligonucleotide for detection of SNP TSC0005380
racttacacattc

SEQ ID NO: 217921 - DNA, 13 bp, Artificial Sequence
  Oligonucleotide for detection of SNP TSC0005380
gaatgtataagty

SEQ ID NO: 217922 - DNA, 13 bp, Artificial Sequence
  Oligonucleotide for detection of SNP TSC0005380
racttatacattc

SEQ ID NO: 217923 - DNA, 13 bp, Artificial Sequence
  Oligonucleotide for detection of SNP TSC0005381
gtgttttttttay

SEQ ID NO: 217924 - DNA, 13 bp, Artificial Sequence
  Oligonucleotide for detection of SNP TSC0005381
rtaaaaaaaacac

SEQ ID NO: 217925 - DNA, 13 bp, Artificial Sequence
  Oligonucleotide for detection of SNP TSC0005381
gtgtttgttttay

SEQ ID NO: 217926 - DNA, 13 bp, Artificial Sequence
  Oligonucleotide for detection of SNP TSC0005381
rtaaaacaaacac

SEQ ID NO: 217927 - DNA, 13 bp, Artificial Sequence
  Oligonucleotide for detection of SNP TSC0005381
gtgagggagatay

SEQ ID NO: 217928 - DNA, 13 bp, Artificial Sequence
  Oligonucleotide for detection of SNP TSC0005381
rtatctccctcac

SEQ ID NO: 217929 - DNA, 13 bp, Artificial Sequence
  Oligonucleotide for detection of SNP TSC0005381
gtgaggtagatay

SEQ ID NO: 217930 - DNA, 13 bp, Artificial Sequence
  Oligonucleotide for detection of SNP TSC0005381
rtatctacctcac

SEQ ID NO: 217931 - DNA, 13 bp, Artificial Sequence
  Oligonucleotide for detection of SNP TSC0053004
tttagtagtttgg

SEQ ID NO: 217932 - DNA, 13 bp, Artificial Sequence
  Oligonucleotide for detection of SNP TSC0053004
ccaaactactaaa

SEQ ID NO: 217933 - DNA, 13 bp, Artificial Sequence
  Oligonucleotide for detection of SNP TSC0053004
tttagtggtttgg

SEQ ID NO: 217934 - DNA, 13 bp, Artificial Sequence
  Oligonucleotide for detection of SNP TSC0053004
ccaaaccactaaa

SEQ ID NO: 217935 - DNA, 13 bp, Artificial Sequence
  Oligonucleotide for detection of SNP TSC0053004
tttagcggtttgg

SEQ ID NO: 217936 - DNA, 13 bp, Artificial Sequence
  Oligonucleotide for detection of SNP TSC0053004
ccaaaccgctaaa

SEQ ID NO: 217937 - DNA, 13 bp, Artificial Sequence
  Oligonucleotide for detection of SNP TSC0053004
ttaaattgttggg

SEQ ID NO: 217938 - DNA, 13 bp, Artificial Sequence
  Oligonucleotide for detection of SNP TSC0053004
cccaacaatttaa

SEQ ID NO: 217939 - DNA, 13 bp, Artificial Sequence
  Oligonucleotide for detection of SNP TSC0053004
ttaaatcgttggg

SEQ ID NO: 217940 - DNA, 13 bp, Artificial Sequence
  Oligonucleotide for detection of SNP TSC0053004
cccaacgatttaa

SEQ ID NO: 217941 - DNA, 13 bp, Artificial Sequence
  Oligonucleotide for detection of SNP TSC0053005
tagttacgtgtgg

SEQ ID NO: 217942 - DNA, 13 bp, Artificial Sequence
  Oligonucleotide for detection of SNP TSC0053005
ccacacgtaacta

SEQ ID NO: 217943 - DNA, 13 bp, Artificial Sequence
  Oligonucleotide for detection of SNP TSC0053005
tagttaggcgtgg

SEQ ID NO: 217944 - DNA, 13 bp, Artificial Sequence
  Oligonucleotide for detection of SNP TSC0053005
ccacgcctaacta

SEQ ID NO: 217945 - DNA, 13 bp, Artificial Sequence
  Oligonucleotide for detection of SNP TSC0053005
tagttatgcgtgg

SEQ ID NO: 217946 - DNA, 13 bp, Artificial Sequence
  Oligonucleotide for detection of SNP TSC0053005
ccacgcataacta

SEQ ID NO: 217947 - DNA, 13 bp, Artificial Sequence
  Oligonucleotide for detection of SNP TSC0053005
tagttacgcgtgg

SEQ ID NO: 217948 - DNA, 13 bp, Artificial Sequence
  Oligonucleotide for detection of SNP TSC0053005
ccacgcgtaacta

SEQ ID NO: 217949 - DNA, 13 bp, Artificial Sequence
  Oligonucleotide for detection of SNP TSC0053005
ttatgtgtgatta

SEQ ID NO: 217950 - DNA, 13 bp, Artificial Sequence
  Oligonucleotide for detection of SNP TSC0053005
taatcacacataa

SEQ ID NO: 217951 - DNA, 13 bp, Artificial Sequence
  Oligonucleotide for detection of SNP TSC0053005
ttatgtttgatta

SEQ ID NO: 217952 - DNA, 13 bp, Artificial Sequence
  Oligonucleotide for detection of SNP TSC0053005
taatcaaacataa

SEQ ID NO: 217953 - DNA, 13 bp, Artificial Sequence
  Oligonucleotide for detection of SNP TSC0053005
ttacgtgtgatta

SEQ ID NO: 217954 - DNA, 13 bp, Artificial Sequence
  Oligonucleotide for detection of SNP TSC0053005
taatcacacgtaa

SEQ ID NO: 217955 - DNA, 13 bp, Artificial Sequence
  Oligonucleotide for detection of SNP TSC0053005
ttacgtttgatta

SEQ ID NO: 217956 - DNA, 13 bp, Artificial Sequence
  Oligonucleotide for detection of SNP TSC0053005
taatcaaacgtaa

SEQ ID NO: 217957 - DNA, 13 bp, Artificial Sequence
  Oligonucleotide for detection of SNP TSC0053005
ttatgcgtgatta

SEQ ID NO: 217958 - DNA, 13 bp, Artificial Sequence
  Oligonucleotide for detection of SNP TSC0053005
taatcacgcataa

SEQ ID NO: 217959 - DNA, 13 bp, Artificial Sequence
  Oligonucleotide for detection of SNP TSC0053005
ttacgcgtgatta

SEQ ID NO: 217960 - DNA, 13 bp, Artificial Sequence
  Oligonucleotide for detection of SNP TSC0053005
taatcacgcgtaa

SEQ ID NO: 217961 - DNA, 13 bp, Artificial Sequence
  Oligonucleotide for detection of SNP TSC0053007
gaataaataggta

SEQ ID NO: 217962 - DNA, 13 bp, Artificial Sequence
  Oligonucleotide for detection of SNP TSC0053007
tacctatttattc

SEQ ID NO: 217963 - DNA, 13 bp, Artificial Sequence
  Oligonucleotide for detection of SNP TSC0053007
gaataattaggta

SEQ ID NO: 217964 - DNA, 13 bp, Artificial Sequence
  Oligonucleotide for detection of SNP TSC0053007
tacctaattattc

SEQ ID NO: 217965 - DNA, 13 bp, Artificial Sequence
  Oligonucleotide for detection of SNP TSC0053007
tgtttatttatty

SEQ ID NO: 217966 - DNA, 13 bp, Artificial Sequence
  Oligonucleotide for detection of SNP TSC0053007
raataaataaaca

SEQ ID NO: 217967 - DNA, 13 bp, Artificial Sequence
  Oligonucleotide for detection of SNP TSC0053007
tgtttaattatty

SEQ ID NO: 217968 - DNA, 13 bp, Artificial Sequence
  Oligonucleotide for detection of SNP TSC0053007
raataattaaaca

SEQ ID NO: 217969 - DNA, 13 bp, Artificial Sequence
  Oligonucleotide for detection of SNP TSC0000390
tgtttgtgtgtag

SEQ ID NO: 217970 - DNA, 13 bp, Artificial Sequence
  Oligonucleotide for detection of SNP TSC0000390
ctacacacaaaca

SEQ ID NO: 217971 - DNA, 13 bp, Artificial Sequence
  Oligonucleotide for detection of SNP TSC0000390
tgtttgcgtgtag

SEQ ID NO: 217972 - DNA, 13 bp, Artificial Sequence
  Oligonucleotide for detection of SNP TSC0000390
ctacacgcaaaca

SEQ ID NO: 217973 - DNA, 13 bp, Artificial Sequence
  Oligonucleotide for detection of SNP TSC0000390
ttatatgtagata

SEQ ID NO: 217974 - DNA, 13 bp, Artificial Sequence
  Oligonucleotide for detection of SNP TSC0000390
tatctacatataa

SEQ ID NO: 217975 - DNA, 13 bp, Artificial Sequence
  Oligonucleotide for detection of SNP TSC0000390
ttatatatagata

SEQ ID NO: 217976 - DNA, 13 bp, Artificial Sequence
  Oligonucleotide for detection of SNP TSC0000390
tatctatatataa

SEQ ID NO: 217977 - DNA, 13 bp, Artificial Sequence
  Oligonucleotide for detection of SNP TSC0000390
ttatacgtagata

SEQ ID NO: 217978 - DNA, 13 bp, Artificial Sequence
  Oligonucleotide for detection of SNP TSC0000390
tatctacgtataa

SEQ ID NO: 217979 - DNA, 13 bp, Artificial Sequence
  Oligonucleotide for detection of SNP TSC0000391
tatttatgtatgy

SEQ ID NO: 217980 - DNA, 13 bp, Artificial Sequence
  Oligonucleotide for detection of SNP TSC0000391
rcatacataaata

SEQ ID NO: 217981 - DNA, 13 bp, Artificial Sequence
  Oligonucleotide for detection of SNP TSC0000391
tatttacgtatgy

SEQ ID NO: 217982 - DNA, 13 bp, Artificial Sequence
  Oligonucleotide for detection of SNP TSC0000391
rcatacgtaaata

SEQ ID NO: 217983 - DNA, 13 bp, Artificial Sequence
  Oligonucleotide for detection of SNP TSC0000391
gtatgtgtaagtg

SEQ ID NO: 217984 - DNA, 13 bp, Artificial Sequence
  Oligonucleotide for detection of SNP TSC0000391
cacttacacatac

SEQ ID NO: 217985 - DNA, 13 bp, Artificial Sequence
  Oligonucleotide for detection of SNP TSC0000391
gtatgtataagtg

SEQ ID NO: 217986 - DNA, 13 bp, Artificial Sequence
  Oligonucleotide for detection of SNP TSC0000391
cacttatacatac

SEQ ID NO: 217987 - DNA, 13 bp, Artificial Sequence
  Oligonucleotide for detection of SNP TSC0000391
gtatgcgtaagtg

SEQ ID NO: 217988 - DNA, 13 bp, Artificial Sequence
  Oligonucleotide for detection of SNP TSC0000391
cacttacgcatac

SEQ ID NO: 217989 - DNA, 13 bp, Artificial Sequence
  Oligonucleotide for detection of SNP TSC0053010
aaaaaattagtag

SEQ ID NO: 217990 - DNA, 13 bp, Artificial Sequence
  Oligonucleotide for detection of SNP TSC0053010
ctactaatttttt

SEQ ID NO: 217991 - DNA, 13 bp, Artificial Sequence
  Oligonucleotide for detection of SNP TSC0053011
taattatagttta

SEQ ID NO: 217992 - DNA, 13 bp, Artificial Sequence
  Oligonucleotide for detection of SNP TSC0053011
taaactataatta

SEQ ID NO: 217993 - DNA, 13 bp, Artificial Sequence
  Oligonucleotide for detection of SNP TSC0053011
taattagagttta

SEQ ID NO: 217994 - DNA, 13 bp, Artificial Sequence
  Oligonucleotide for detection of SNP TSC0053011
taaactctaatta

SEQ ID NO: 217995 - DNA, 13 bp, Artificial Sequence
  Oligonucleotide for detection of SNP TSC0053011
tgagttttgatta

SEQ ID NO: 217996 - DNA, 13 bp, Artificial Sequence
  Oligonucleotide for detection of SNP TSC0053011
taatcaaaactca

SEQ ID NO: 217997 - DNA, 13 bp, Artificial Sequence
  Oligonucleotide for detection of SNP TSC0053012
ggtttaaaattag

SEQ ID NO: 217998 - DNA, 13 bp, Artificial Sequence
  Oligonucleotide for detection of SNP TSC0053012
ctaattttaaacc

SEQ ID NO: 217999 - DNA, 13 bp, Artificial Sequence
  Oligonucleotide for detection of SNP TSC0053012
ggtttagaattag

SEQ ID NO: 218000 - DNA, 13 bp, Artificial Sequence
  Oligonucleotide for detection of SNP TSC0053012
ctaattctaaacc

SEQ ID NO: 218001 - DNA, 13 bp, Artificial Sequence
  Oligonucleotide for detection of SNP TSC0053013
gaaggagattttg

SEQ ID NO: 218002 - DNA, 13 bp, Artificial Sequence
  Oligonucleotide for detection of SNP TSC0053013
caaaatctccttc

SEQ ID NO: 218003 - DNA, 13 bp, Artificial Sequence
  Oligonucleotide for detection of SNP TSC0053013
gaaggaaattttg

SEQ ID NO: 218004 - DNA, 13 bp, Artificial Sequence
  Oligonucleotide for detection of SNP TSC0053013
caaaatttccttc

SEQ ID NO: 218005 - DNA, 13 bp, Artificial Sequence
  Oligonucleotide for detection of SNP TSC0053013
gaaggagatttcg

SEQ ID NO: 218006 - DNA, 13 bp, Artificial Sequence
  Oligonucleotide for detection of SNP TSC0053013
cgaaatctccttc

SEQ ID NO: 218007 - DNA, 13 bp, Artificial Sequence
  Oligonucleotide for detection of SNP TSC0053013
gaaggaaatttcg

SEQ ID NO: 218008 - DNA, 13 bp, Artificial Sequence
  Oligonucleotide for detection of SNP TSC0053013
cgaaatttccttc

SEQ ID NO: 218009 - DNA, 13 bp, Artificial Sequence
  Oligonucleotide for detection of SNP TSC0004844
ttaggtttattay

SEQ ID NO: 218010 - DNA, 13 bp, Artificial Sequence
  Oligonucleotide for detection of SNP TSC0004844
rtaataaacctaa

SEQ ID NO: 218011 - DNA, 13 bp, Artificial Sequence
  Oligonucleotide for detection of SNP TSC0004844
ttaggtgtattay

SEQ ID NO: 218012 - DNA, 13 bp, Artificial Sequence
  Oligonucleotide for detection of SNP TSC0004844
rtaatacacctaa

SEQ ID NO: 218013 - DNA, 13 bp, Artificial Sequence
  Oligonucleotide for detection of SNP TSC0004844
gtaatgaatttaa

SEQ ID NO: 218014 - DNA, 13 bp, Artificial Sequence
  Oligonucleotide for detection of SNP TSC0004844
ttaaattcattac

SEQ ID NO: 218015 - DNA, 13 bp, Artificial Sequence
  Oligonucleotide for detection of SNP TSC0004844
gtaatgtatttaa

SEQ ID NO: 218016 - DNA, 13 bp, Artificial Sequence
  Oligonucleotide for detection of SNP TSC0004844
ttaaatacattac

SEQ ID NO: 218017 - DNA, 13 bp, Artificial Sequence
  Oligonucleotide for detection of SNP TSC0053014
tgtgtatggataa

SEQ ID NO: 218018 - DNA, 13 bp, Artificial Sequence
  Oligonucleotide for detection of SNP TSC0053014
ttatccatacaca

SEQ ID NO: 218019 - DNA, 13 bp, Artificial Sequence
  Oligonucleotide for detection of SNP TSC0053014
tgtgtacggataa

SEQ ID NO: 218020 - DNA, 13 bp, Artificial Sequence
  Oligonucleotide for detection of SNP TSC0053014
ttatccgtacaca

SEQ ID NO: 218021 - DNA, 13 bp, Artificial Sequence
  Oligonucleotide for detection of SNP TSC0053015
gtgtatggataaa

SEQ ID NO: 218022 - DNA, 13 bp, Artificial Sequence
  Oligonucleotide for detection of SNP TSC0053015
tttatccatacac

SEQ ID NO: 218023 - DNA, 13 bp, Artificial Sequence
  Oligonucleotide for detection of SNP TSC0053015
gtgtatagataaa

SEQ ID NO: 218024 - DNA, 13 bp, Artificial Sequence
  Oligonucleotide for detection of SNP TSC0053015
tttatctatacac

SEQ ID NO: 218025 - DNA, 13 bp, Artificial Sequence
  Oligonucleotide for detection of SNP TSC0053016
gtagggaagattg

SEQ ID NO: 218026 - DNA, 13 bp, Artificial Sequence
  Oligonucleotide for detection of SNP TSC0053016
caatcttccctac

SEQ ID NO: 218027 - DNA, 13 bp, Artificial Sequence
  Oligonucleotide for detection of SNP TSC0053016
gtagggtagattg

SEQ ID NO: 218028 - DNA, 13 bp, Artificial Sequence
  Oligonucleotide for detection of SNP TSC0053016
caatctaccctac

SEQ ID NO: 218029 - DNA, 13 bp, Artificial Sequence
  Oligonucleotide for detection of SNP TSC0053016
taattttttttay

SEQ ID NO: 218030 - DNA, 13 bp, Artificial Sequence
  Oligonucleotide for detection of SNP TSC0053016
rtaaaaaaaatta

SEQ ID NO: 218031 - DNA, 13 bp, Artificial Sequence
  Oligonucleotide for detection of SNP TSC0053017
attgaaatttttt

SEQ ID NO: 218032 - DNA, 13 bp, Artificial Sequence
  Oligonucleotide for detection of SNP TSC0053017
aaaaaatttcaat

SEQ ID NO: 218033 - DNA, 13 bp, Artificial Sequence
  Oligonucleotide for detection of SNP TSC0053017
attgaattttttt

SEQ ID NO: 218034 - DNA, 13 bp, Artificial Sequence
  Oligonucleotide for detection of SNP TSC0053017
aaaaaaattcaat

SEQ ID NO: 218035 - DNA, 13 bp, Artificial Sequence
  Oligonucleotide for detection of SNP TSC0053017
atcgaaatttttt

SEQ ID NO: 218036 - DNA, 13 bp, Artificial Sequence
  Oligonucleotide for detection of SNP TSC0053017
aaaaaatttcgat

SEQ ID NO: 218037 - DNA, 13 bp, Artificial Sequence
  Oligonucleotide for detection of SNP TSC0053017
atcgaattttttt

SEQ ID NO: 218038 - DNA, 13 bp, Artificial Sequence
  Oligonucleotide for detection of SNP TSC0053017
aaaaaaattcgat

SEQ ID NO: 218039 - DNA, 13 bp, Artificial Sequence
  Oligonucleotide for detection of SNP TSC0053017
aaaaaattttggt

SEQ ID NO: 218040 - DNA, 13 bp, Artificial Sequence
  Oligonucleotide for detection of SNP TSC0053017
accaaaatttttt

SEQ ID NO: 218041 - DNA, 13 bp, Artificial Sequence
  Oligonucleotide for detection of SNP TSC0053017
aaaaaaatttggt

SEQ ID NO: 218042 - DNA, 13 bp, Artificial Sequence
  Oligonucleotide for detection of SNP TSC0053017
accaaattttttt

SEQ ID NO: 218043 - DNA, 13 bp, Artificial Sequence
  Oligonucleotide for detection of SNP TSC0053017
aaaaaatttcggt

SEQ ID NO: 218044 - DNA, 13 bp, Artificial Sequence
  Oligonucleotide for detection of SNP TSC0053017
accgaaatttttt

SEQ ID NO: 218045 - DNA, 13 bp, Artificial Sequence
  Oligonucleotide for detection of SNP TSC0053017
aaaaaaattcggt

SEQ ID NO: 218046 - DNA, 13 bp, Artificial Sequence
  Oligonucleotide for detection of SNP TSC0053017
accgaattttttt

SEQ ID NO: 218047 - DNA, 13 bp, Artificial Sequence
  Oligonucleotide for detection of SNP TSC0053018
aaggaaattagag

SEQ ID NO: 218048 - DNA, 13 bp, Artificial Sequence
  Oligonucleotide for detection of SNP TSC0053018
ctctaatttcctt

SEQ ID NO: 218049 - DNA, 13 bp, Artificial Sequence
  Oligonucleotide for detection of SNP TSC0053018
aaggaagttagag

SEQ ID NO: 218050 - DNA, 13 bp, Artificial Sequence
  Oligonucleotide for detection of SNP TSC0053018
ctctaacttcctt

SEQ ID NO: 218051 - DNA, 13 bp, Artificial Sequence
  Oligonucleotide for detection of SNP TSC0053019
cgttttgagtttt

SEQ ID NO: 218052 - DNA, 13 bp, Artificial Sequence
  Oligonucleotide for detection of SNP TSC0053019
aaaactcaaaacg

SEQ ID NO: 218053 - DNA, 13 bp, Artificial Sequence
  Oligonucleotide for detection of SNP TSC0053019
cgttttaagtttt

SEQ ID NO: 218054 - DNA, 13 bp, Artificial Sequence
  Oligonucleotide for detection of SNP TSC0053019
aaaacttaaaacg

SEQ ID NO: 218055 - DNA, 13 bp, Artificial Sequence
  Oligonucleotide for detection of SNP TSC0053020
ttgagttttttgt

SEQ ID NO: 218056 - DNA, 13 bp, Artificial Sequence
  Oligonucleotide for detection of SNP TSC0053020
acaaaaaactcaa

SEQ ID NO: 218057 - DNA, 13 bp, Artificial Sequence
  Oligonucleotide for detection of SNP TSC0053020
ataaagtatttag

SEQ ID NO: 218058 - DNA, 13 bp, Artificial Sequence
  Oligonucleotide for detection of SNP TSC0053020
ctaaatactttat

SEQ ID NO: 218059 - DNA, 13 bp, Artificial Sequence
  Oligonucleotide for detection of SNP TSC0053020
ataaagaatttag

SEQ ID NO: 218060 - DNA, 13 bp, Artificial Sequence
  Oligonucleotide for detection of SNP TSC0053020
ctaaattctttat

SEQ ID NO: 218061 - DNA, 13 bp, Artificial Sequence
  Oligonucleotide for detection of SNP TSC0053021
gtaataattatta

SEQ ID NO: 218062 - DNA, 13 bp, Artificial Sequence
  Oligonucleotide for detection of SNP TSC0053021
taataattattac

SEQ ID NO: 218063 - DNA, 13 bp, Artificial Sequence
  Oligonucleotide for detection of SNP TSC0053021
gtaatatttatta

SEQ ID NO: 218064 - DNA, 13 bp, Artificial Sequence
  Oligonucleotide for detection of SNP TSC0053021
taataaatattac

SEQ ID NO: 218065 - DNA, 13 bp, Artificial Sequence
  Oligonucleotide for detection of SNP TSC0053021
tggtagttgttay

SEQ ID NO: 218066 - DNA, 13 bp, Artificial Sequence
  Oligonucleotide for detection of SNP TSC0053021
rtaacaactacca

SEQ ID NO: 218067 - DNA, 13 bp, Artificial Sequence
  Oligonucleotide for detection of SNP TSC0053021
tggtaggtgttay

SEQ ID NO: 218068 - DNA, 13 bp, Artificial Sequence
  Oligonucleotide for detection of SNP TSC0053021
rtaacacctacca

SEQ ID NO: 218069 - DNA, 13 bp, Artificial Sequence
  Oligonucleotide for detection of SNP TSC0053022
tttggagtgtagt

SEQ ID NO: 218070 - DNA, 13 bp, Artificial Sequence
  Oligonucleotide for detection of SNP TSC0053022
actacactccaaa

SEQ ID NO: 218071 - DNA, 13 bp, Artificial Sequence
  Oligonucleotide for detection of SNP TSC0053022
tttggaatgtagt

SEQ ID NO: 218072 - DNA, 13 bp, Artificial Sequence
  Oligonucleotide for detection of SNP TSC0053022
actacattccaaa

SEQ ID NO: 218073 - DNA, 13 bp, Artificial Sequence
  Oligonucleotide for detection of SNP TSC0053025
tataggtgagtgt

SEQ ID NO: 218074 - DNA, 13 bp, Artificial Sequence
  Oligonucleotide for detection of SNP TSC0053025
acactcacctata

SEQ ID NO: 218075 - DNA, 13 bp, Artificial Sequence
  Oligonucleotide for detection of SNP TSC0053025
tataggcgagtgt

SEQ ID NO: 218076 - DNA, 13 bp, Artificial Sequence
  Oligonucleotide for detection of SNP TSC0053025
acactcgcctata

SEQ ID NO: 218077 - DNA, 13 bp, Artificial Sequence
  Oligonucleotide for detection of SNP TSC0053026
atggaggtttagg

SEQ ID NO: 218078 - DNA, 13 bp, Artificial Sequence
  Oligonucleotide for detection of SNP TSC0053026
cctaaacctccat

SEQ ID NO: 218079 - DNA, 13 bp, Artificial Sequence
  Oligonucleotide for detection of SNP TSC0053026
atggagatttagg

SEQ ID NO: 218080 - DNA, 13 bp, Artificial Sequence
  Oligonucleotide for detection of SNP TSC0053026
cctaaatctccat

SEQ ID NO: 218081 - DNA, 13 bp, Artificial Sequence
  Oligonucleotide for detection of SNP TSC0005390
attgaggggaaaa

SEQ ID NO: 218082 - DNA, 13 bp, Artificial Sequence
  Oligonucleotide for detection of SNP TSC0005390
ttttcccctcaat

SEQ ID NO: 218083 - DNA, 13 bp, Artificial Sequence
  Oligonucleotide for detection of SNP TSC0005390
attgagaggaaaa

SEQ ID NO: 218084 - DNA, 13 bp, Artificial Sequence
  Oligonucleotide for detection of SNP TSC0005390
ttttcctctcaat

SEQ ID NO: 218085 - DNA, 13 bp, Artificial Sequence
  Oligonucleotide for detection of SNP TSC0005391
gttattgttttay

SEQ ID NO: 218086 - DNA, 13 bp, Artificial Sequence
  Oligonucleotide for detection of SNP TSC0005391
rtaaaacaataac

SEQ ID NO: 218087 - DNA, 13 bp, Artificial Sequence
  Oligonucleotide for detection of SNP TSC0005391
gttattattttay

SEQ ID NO: 218088 - DNA, 13 bp, Artificial Sequence
  Oligonucleotide for detection of SNP TSC0005391
rtaaaataataac

SEQ ID NO: 218089 - DNA, 13 bp, Artificial Sequence
  Oligonucleotide for detection of SNP TSC0053029
atattgtggggty

SEQ ID NO: 218090 - DNA, 13 bp, Artificial Sequence
  Oligonucleotide for detection of SNP TSC0053029
raccccacaatat

SEQ ID NO: 218091 - DNA, 13 bp, Artificial Sequence
  Oligonucleotide for detection of SNP TSC0053029
atatcgtggggty

SEQ ID NO: 218092 - DNA, 13 bp, Artificial Sequence
  Oligonucleotide for detection of SNP TSC0053029
raccccacgatat

SEQ ID NO: 218093 - DNA, 13 bp, Artificial Sequence
  Oligonucleotide for detection of SNP TSC0053029
atattgcggggty

SEQ ID NO: 218094 - DNA, 13 bp, Artificial Sequence
  Oligonucleotide for detection of SNP TSC0053029
raccccgcaatat

SEQ ID NO: 218095 - DNA, 13 bp, Artificial Sequence
  Oligonucleotide for detection of SNP TSC0053029
atatcgcggggty

SEQ ID NO: 218096 - DNA, 13 bp, Artificial Sequence
  Oligonucleotide for detection of SNP TSC0053029
raccccgcgatat

SEQ ID NO: 218097 - DNA, 13 bp, Artificial Sequence
  Oligonucleotide for detection of SNP TSC0053029
gattttgtggtat

SEQ ID NO: 218098 - DNA, 13 bp, Artificial Sequence
  Oligonucleotide for detection of SNP TSC0053029
ataccacaaaatc

SEQ ID NO: 218099 - DNA, 13 bp, Artificial Sequence
  Oligonucleotide for detection of SNP TSC0053029
gattttatggtat

SEQ ID NO: 218100 - DNA, 13 bp, Artificial Sequence
  Oligonucleotide for detection of SNP TSC0053029
ataccataaaatc

SEQ ID NO: 218101 - DNA, 13 bp, Artificial Sequence
  Oligonucleotide for detection of SNP TSC0053029
gatttcgtggtat

SEQ ID NO: 218102 - DNA, 13 bp, Artificial Sequence
  Oligonucleotide for detection of SNP TSC0053029
ataccacgaaatc

SEQ ID NO: 218103 - DNA, 13 bp, Artificial Sequence
  Oligonucleotide for detection of SNP TSC0053029
gattttacggtat

SEQ ID NO: 218104 - DNA, 13 bp, Artificial Sequence
  Oligonucleotide for detection of SNP TSC0053029
ataccgtaaaatc

SEQ ID NO: 218105 - DNA, 13 bp, Artificial Sequence
  Oligonucleotide for detection of SNP TSC0053029
gattttgcggtat

SEQ ID NO: 218106 - DNA, 13 bp, Artificial Sequence
  Oligonucleotide for detection of SNP TSC0053029
ataccgcaaaatc

SEQ ID NO: 218107 - DNA, 13 bp, Artificial Sequence
  Oligonucleotide for detection of SNP TSC0053029
gatttcgcggtat

SEQ ID NO: 218108 - DNA, 13 bp, Artificial Sequence
  Oligonucleotide for detection of SNP TSC0053029
ataccgcgaaatc

SEQ ID NO: 218109 - DNA, 13 bp, Artificial Sequence
  Oligonucleotide for detection of SNP TSC0053030
ttatattgaggaa

SEQ ID NO: 218110 - DNA, 13 bp, Artificial Sequence
  Oligonucleotide for detection of SNP TSC0053030
ttcctcaatataa

SEQ ID NO: 218111 - DNA, 13 bp, Artificial Sequence
  Oligonucleotide for detection of SNP TSC0053030
ttatatcgaggaa

SEQ ID NO: 218112 - DNA, 13 bp, Artificial Sequence
  Oligonucleotide for detection of SNP TSC0053030
ttcctcgatataa

SEQ ID NO: 218113 - DNA, 13 bp, Artificial Sequence
  Oligonucleotide for detection of SNP TSC0053030
ttttttgatataa

SEQ ID NO: 218114 - DNA, 13 bp, Artificial Sequence
  Oligonucleotide for detection of SNP TSC0053030
ttatatcaaaaaa

SEQ ID NO: 218115 - DNA, 13 bp, Artificial Sequence
  Oligonucleotide for detection of SNP TSC0053030
tttttcgatataa

SEQ ID NO: 218116 - DNA, 13 bp, Artificial Sequence
  Oligonucleotide for detection of SNP TSC0053030
ttatatcgaaaaa

SEQ ID NO: 218117 - DNA, 13 bp, Artificial Sequence
  Oligonucleotide for detection of SNP TSC0053031
gaaagtgattaag

SEQ ID NO: 218118 - DNA, 13 bp, Artificial Sequence
  Oligonucleotide for detection of SNP TSC0053031
cttaatcactttc

SEQ ID NO: 218119 - DNA, 13 bp, Artificial Sequence
  Oligonucleotide for detection of SNP TSC0053031
gaaagtaattaag

SEQ ID NO: 218120 - DNA, 13 bp, Artificial Sequence
  Oligonucleotide for detection of SNP TSC0053031
cttaattactttc

SEQ ID NO: 218121 - DNA, 13 bp, Artificial Sequence
  Oligonucleotide for detection of SNP TSC0053032
gagaggaatagtt

SEQ ID NO: 218122 - DNA, 13 bp, Artificial Sequence
  Oligonucleotide for detection of SNP TSC0053032
aactattcctctc

SEQ ID NO: 218123 - DNA, 13 bp, Artificial Sequence
  Oligonucleotide for detection of SNP TSC0053032
gagagggatagtt

SEQ ID NO: 218124 - DNA, 13 bp, Artificial Sequence
  Oligonucleotide for detection of SNP TSC0053032
aactatccctctc

SEQ ID NO: 218125 - DNA, 13 bp, Artificial Sequence
  Oligonucleotide for detection of SNP TSC0053034
aatttagaggtgt

SEQ ID NO: 218126 - DNA, 13 bp, Artificial Sequence
  Oligonucleotide for detection of SNP TSC0053034
acacctctaaatt

SEQ ID NO: 218127 - DNA, 13 bp, Artificial Sequence
  Oligonucleotide for detection of SNP TSC0053034
aatttaaaggtgt

SEQ ID NO: 218128 - DNA, 13 bp, Artificial Sequence
  Oligonucleotide for detection of SNP TSC0053034
acacctttaaatt

SEQ ID NO: 218129 - DNA, 13 bp, Artificial Sequence
  Oligonucleotide for detection of SNP TSC0053034
aatttagaggcgt

SEQ ID NO: 218130 - DNA, 13 bp, Artificial Sequence
  Oligonucleotide for detection of SNP TSC0053034
acgcctctaaatt

SEQ ID NO: 218131 - DNA, 13 bp, Artificial Sequence
  Oligonucleotide for detection of SNP TSC0053034
aatttaaaggcgt

SEQ ID NO: 218132 - DNA, 13 bp, Artificial Sequence
  Oligonucleotide for detection of SNP TSC0053034
acgcctttaaatt

SEQ ID NO: 218133 - DNA, 13 bp, Artificial Sequence
  Oligonucleotide for detection of SNP TSC0053035
gtagaaaatatta

SEQ ID NO: 218134 - DNA, 13 bp, Artificial Sequence
  Oligonucleotide for detection of SNP TSC0053035
taatattttctac

SEQ ID NO: 218135 - DNA, 13 bp, Artificial Sequence
  Oligonucleotide for detection of SNP TSC0053035
gtagaatatatta

SEQ ID NO: 218136 - DNA, 13 bp, Artificial Sequence
  Oligonucleotide for detection of SNP TSC0053035
taatatattctac

SEQ ID NO: 218137 - DNA, 13 bp, Artificial Sequence
  Oligonucleotide for detection of SNP TSC0053035
tggtgttttttgy

SEQ ID NO: 218138 - DNA, 13 bp, Artificial Sequence
  Oligonucleotide for detection of SNP TSC0053035
rcaaaaaacacca

SEQ ID NO: 218139 - DNA, 13 bp, Artificial Sequence
  Oligonucleotide for detection of SNP TSC0053035
tggtgtgttttgy

SEQ ID NO: 218140 - DNA, 13 bp, Artificial Sequence
  Oligonucleotide for detection of SNP TSC0053035
rcaaaacacacca

SEQ ID NO: 218141 - DNA, 13 bp, Artificial Sequence
  Oligonucleotide for detection of SNP TSC0053036
aaatgtttttagt

SEQ ID NO: 218142 - DNA, 13 bp, Artificial Sequence
  Oligonucleotide for detection of SNP TSC0053036
actaaaaacattt

SEQ ID NO: 218143 - DNA, 13 bp, Artificial Sequence
  Oligonucleotide for detection of SNP TSC0053036
aaatgtgtttagt

SEQ ID NO: 218144 - DNA, 13 bp, Artificial Sequence
  Oligonucleotide for detection of SNP TSC0053036
actaaacacattt

SEQ ID NO: 218145 - DNA, 13 bp, Artificial Sequence
  Oligonucleotide for detection of SNP TSC0053036
aaacgtttttagt

SEQ ID NO: 218146 - DNA, 13 bp, Artificial Sequence
  Oligonucleotide for detection of SNP TSC0053036
actaaaaacgttt

SEQ ID NO: 218147 - DNA, 13 bp, Artificial Sequence
  Oligonucleotide for detection of SNP TSC0053036
aaacgtgtttagt

SEQ ID NO: 218148 - DNA, 13 bp, Artificial Sequence
  Oligonucleotide for detection of SNP TSC0053036
actaaacacgttt

SEQ ID NO: 218149 - DNA, 13 bp, Artificial Sequence
  Oligonucleotide for detection of SNP TSC0053036
attgagaatgttt

SEQ ID NO: 218150 - DNA, 13 bp, Artificial Sequence
  Oligonucleotide for detection of SNP TSC0053036
aaacattctcaat

SEQ ID NO: 218151 - DNA, 13 bp, Artificial Sequence
  Oligonucleotide for detection of SNP TSC0053036
attgagtatgttt

SEQ ID NO: 218152 - DNA, 13 bp, Artificial Sequence
  Oligonucleotide for detection of SNP TSC0053036
aaacatactcaat

SEQ ID NO: 218153 - DNA, 13 bp, Artificial Sequence
  Oligonucleotide for detection of SNP TSC0053036
attgagaacgttt

SEQ ID NO: 218154 - DNA, 13 bp, Artificial Sequence
  Oligonucleotide for detection of SNP TSC0053036
aaacgttctcaat

SEQ ID NO: 218155 - DNA, 13 bp, Artificial Sequence
  Oligonucleotide for detection of SNP TSC0053036
attgagtacgttt

SEQ ID NO: 218156 - DNA, 13 bp, Artificial Sequence
  Oligonucleotide for detection of SNP TSC0053036
aaacgtactcaat

SEQ ID NO: 218157 - DNA, 13 bp, Artificial Sequence
  Oligonucleotide for detection of SNP TSC0000196
ttatgttggtttg

SEQ ID NO: 218158 - DNA, 13 bp, Artificial Sequence
  Oligonucleotide for detection of SNP TSC0000196
caaaccaacataa

SEQ ID NO: 218159 - DNA, 13 bp, Artificial Sequence
  Oligonucleotide for detection of SNP TSC0000196
ttatgtcggtttg

SEQ ID NO: 218160 - DNA, 13 bp, Artificial Sequence
  Oligonucleotide for detection of SNP TSC0000196
caaaccgacataa

SEQ ID NO: 218161 - DNA, 13 bp, Artificial Sequence
  Oligonucleotide for detection of SNP TSC0000196
taagttgatatgg

SEQ ID NO: 218162 - DNA, 13 bp, Artificial Sequence
  Oligonucleotide for detection of SNP TSC0000196
ccatatcaactta

SEQ ID NO: 218163 - DNA, 13 bp, Artificial Sequence
  Oligonucleotide for detection of SNP TSC0000196
taagttaatatgg

SEQ ID NO: 218164 - DNA, 13 bp, Artificial Sequence
  Oligonucleotide for detection of SNP TSC0000196
ccatattaactta

SEQ ID NO: 218165 - DNA, 13 bp, Artificial Sequence
  Oligonucleotide for detection of SNP TSC0000196
taagtcgatatgg

SEQ ID NO: 218166 - DNA, 13 bp, Artificial Sequence
  Oligonucleotide for detection of SNP TSC0000196
ccatatcgactta

SEQ ID NO: 218167 - DNA, 13 bp, Artificial Sequence
  Oligonucleotide for detection of SNP TSC0053037
atttggttgggga

SEQ ID NO: 218168 - DNA, 13 bp, Artificial Sequence
  Oligonucleotide for detection of SNP TSC0053037
tccccaaccaaat

SEQ ID NO: 218169 - DNA, 13 bp, Artificial Sequence
  Oligonucleotide for detection of SNP TSC0053037
atttgggtgggga

SEQ ID NO: 218170 - DNA, 13 bp, Artificial Sequence
  Oligonucleotide for detection of SNP TSC0053037
tccccacccaaat

SEQ ID NO: 218171 - DNA, 13 bp, Artificial Sequence
  Oligonucleotide for detection of SNP TSC0053037
tttttaattaaat

SEQ ID NO: 218172 - DNA, 13 bp, Artificial Sequence
  Oligonucleotide for detection of SNP TSC0053037
atttaattaaaaa

SEQ ID NO: 218173 - DNA, 13 bp, Artificial Sequence
  Oligonucleotide for detection of SNP TSC0053038
gtaatatggttga

SEQ ID NO: 218174 - DNA, 13 bp, Artificial Sequence
  Oligonucleotide for detection of SNP TSC0053038
tcaaccatattac

SEQ ID NO: 218175 - DNA, 13 bp, Artificial Sequence
  Oligonucleotide for detection of SNP TSC0053038
gtaatacggttga

SEQ ID NO: 218176 - DNA, 13 bp, Artificial Sequence
  Oligonucleotide for detection of SNP TSC0053038
tcaaccgtattac

SEQ ID NO: 218177 - DNA, 13 bp, Artificial Sequence
  Oligonucleotide for detection of SNP TSC0053038
ttagttgtattay

SEQ ID NO: 218178 - DNA, 13 bp, Artificial Sequence
  Oligonucleotide for detection of SNP TSC0053038
rtaatacaactaa

SEQ ID NO: 218179 - DNA, 13 bp, Artificial Sequence
  Oligonucleotide for detection of SNP TSC0053038
ttagttatattay

SEQ ID NO: 218180 - DNA, 13 bp, Artificial Sequence
  Oligonucleotide for detection of SNP TSC0053038
rtaatataactaa

SEQ ID NO: 218181 - DNA, 13 bp, Artificial Sequence
  Oligonucleotide for detection of SNP TSC0053038
ttagtcgtattay

SEQ ID NO: 218182 - DNA, 13 bp, Artificial Sequence
  Oligonucleotide for detection of SNP TSC0053038
rtaatacgactaa

SEQ ID NO: 218183 - DNA, 13 bp, Artificial Sequence
  Oligonucleotide for detection of SNP TSC0053039
ggagagtataagy

SEQ ID NO: 218184 - DNA, 13 bp, Artificial Sequence
  Oligonucleotide for detection of SNP TSC0053039
rcttatactctcc

SEQ ID NO: 218185 - DNA, 13 bp, Artificial Sequence
  Oligonucleotide for detection of SNP TSC0053039
ggagagaataagy

SEQ ID NO: 218186 - DNA, 13 bp, Artificial Sequence
  Oligonucleotide for detection of SNP TSC0053039
rcttattctctcc

SEQ ID NO: 218187 - DNA, 13 bp, Artificial Sequence
  Oligonucleotide for detection of SNP TSC0053040
ttatgatgtaaaa

SEQ ID NO: 218188 - DNA, 13 bp, Artificial Sequence
  Oligonucleotide for detection of SNP TSC0053040
ttttacatcataa

SEQ ID NO: 218189 - DNA, 13 bp, Artificial Sequence
  Oligonucleotide for detection of SNP TSC0053040
ttatgacgtaaaa

SEQ ID NO: 218190 - DNA, 13 bp, Artificial Sequence
  Oligonucleotide for detection of SNP TSC0053040
ttttacgtcataa

SEQ ID NO: 218191 - DNA, 13 bp, Artificial Sequence
  Oligonucleotide for detection of SNP TSC0053040
ttttatgttatgg

SEQ ID NO: 218192 - DNA, 13 bp, Artificial Sequence
  Oligonucleotide for detection of SNP TSC0053040
ccataacataaaa

SEQ ID NO: 218193 - DNA, 13 bp, Artificial Sequence
  Oligonucleotide for detection of SNP TSC0053040
ttttatattatgg

SEQ ID NO: 218194 - DNA, 13 bp, Artificial Sequence
  Oligonucleotide for detection of SNP TSC0053040
ccataatataaaa

SEQ ID NO: 218195 - DNA, 13 bp, Artificial Sequence
  Oligonucleotide for detection of SNP TSC0053040
ttttacgttatgg

SEQ ID NO: 218196 - DNA, 13 bp, Artificial Sequence
  Oligonucleotide for detection of SNP TSC0053040
ccataacgtaaaa

SEQ ID NO: 218197 - DNA, 13 bp, Artificial Sequence
  Oligonucleotide for detection of SNP TSC0053042
agtaaagtggaaa

SEQ ID NO: 218198 - DNA, 13 bp, Artificial Sequence
  Oligonucleotide for detection of SNP TSC0053042
tttccactttact

SEQ ID NO: 218199 - DNA, 13 bp, Artificial Sequence
  Oligonucleotide for detection of SNP TSC0053042
agtaaaatggaaa

SEQ ID NO: 218200 - DNA, 13 bp, Artificial Sequence
  Oligonucleotide for detection of SNP TSC0053042
tttccattttact

SEQ ID NO: 218201 - DNA, 13 bp, Artificial Sequence
  Oligonucleotide for detection of SNP TSC0053043
ggaaatgagttaa

SEQ ID NO: 218202 - DNA, 13 bp, Artificial Sequence
  Oligonucleotide for detection of SNP TSC0053043
ttaactcatttcc

SEQ ID NO: 218203 - DNA, 13 bp, Artificial Sequence
  Oligonucleotide for detection of SNP TSC0053043
ggaaataagttaa

SEQ ID NO: 218204 - DNA, 13 bp, Artificial Sequence
  Oligonucleotide for detection of SNP TSC0053043
ttaacttatttcc

SEQ ID NO: 218205 - DNA, 13 bp, Artificial Sequence
  Oligonucleotide for detection of SNP TSC0053046
ttttgtaagggga

SEQ ID NO: 218206 - DNA, 13 bp, Artificial Sequence
  Oligonucleotide for detection of SNP TSC0053046
tccccttacaaaa

SEQ ID NO: 218207 - DNA, 13 bp, Artificial Sequence
  Oligonucleotide for detection of SNP TSC0053046
ttttgttagggga

SEQ ID NO: 218208 - DNA, 13 bp, Artificial Sequence
  Oligonucleotide for detection of SNP TSC0053046
tcccctaacaaaa

SEQ ID NO: 218209 - DNA, 13 bp, Artificial Sequence
  Oligonucleotide for detection of SNP TSC0053046
tttttttataagg

SEQ ID NO: 218210 - DNA, 13 bp, Artificial Sequence
  Oligonucleotide for detection of SNP TSC0053046
ccttataaaaaaa

SEQ ID NO: 218211 - DNA, 13 bp, Artificial Sequence
  Oligonucleotide for detection of SNP TSC0053046
ttttttgataagg

SEQ ID NO: 218212 - DNA, 13 bp, Artificial Sequence
  Oligonucleotide for detection of SNP TSC0053046
ccttatcaaaaaa

SEQ ID NO: 218213 - DNA, 13 bp, Artificial Sequence
  Oligonucleotide for detection of SNP TSC0053047
gaaggatttgaty

SEQ ID NO: 218214 - DNA, 13 bp, Artificial Sequence
  Oligonucleotide for detection of SNP TSC0053047
ratcaaatccttc

SEQ ID NO: 218215 - DNA, 13 bp, Artificial Sequence
  Oligonucleotide for detection of SNP TSC0053047
gaaggagttgaty

SEQ ID NO: 218216 - DNA, 13 bp, Artificial Sequence
  Oligonucleotide for detection of SNP TSC0053047
ratcaactccttc

SEQ ID NO: 218217 - DNA, 13 bp, Artificial Sequence
  Oligonucleotide for detection of SNP TSC0053047
ggttagattttty

SEQ ID NO: 218218 - DNA, 13 bp, Artificial Sequence
  Oligonucleotide for detection of SNP TSC0053047
raaaaatctaacc

SEQ ID NO: 218219 - DNA, 13 bp, Artificial Sequence
  Oligonucleotide for detection of SNP TSC0053047
ggttagtttttty

SEQ ID NO: 218220 - DNA, 13 bp, Artificial Sequence
  Oligonucleotide for detection of SNP TSC0053047
raaaaaactaacc

SEQ ID NO: 218221 - DNA, 13 bp, Artificial Sequence
  Oligonucleotide for detection of SNP TSC0000639
tggaattgtttty

SEQ ID NO: 218222 - DNA, 13 bp, Artificial Sequence
  Oligonucleotide for detection of SNP TSC0000639
raaaacaattcca

SEQ ID NO: 218223 - DNA, 13 bp, Artificial Sequence
  Oligonucleotide for detection of SNP TSC0000639
tggaatcgtttty

SEQ ID NO: 218224 - DNA, 13 bp, Artificial Sequence
  Oligonucleotide for detection of SNP TSC0000639
raaaacgattcca

SEQ ID NO: 218225 - DNA, 13 bp, Artificial Sequence
  Oligonucleotide for detection of SNP TSC0000639
ggaggtgatttta

SEQ ID NO: 218226 - DNA, 13 bp, Artificial Sequence
  Oligonucleotide for detection of SNP TSC0000639
taaaatcacctcc

SEQ ID NO: 218227 - DNA, 13 bp, Artificial Sequence
  Oligonucleotide for detection of SNP TSC0000639
ggaggtaatttta

SEQ ID NO: 218228 - DNA, 13 bp, Artificial Sequence
  Oligonucleotide for detection of SNP TSC0000639
taaaattacctcc

SEQ ID NO: 218229 - DNA, 13 bp, Artificial Sequence
  Oligonucleotide for detection of SNP TSC0000639
ggaggcgatttta

SEQ ID NO: 218230 - DNA, 13 bp, Artificial Sequence
  Oligonucleotide for detection of SNP TSC0000639
taaaatcgcctcc

SEQ ID NO: 218231 - DNA, 13 bp, Artificial Sequence
  Oligonucleotide for detection of SNP TSC0053048
taaggggttgttt

SEQ ID NO: 218232 - DNA, 13 bp, Artificial Sequence
  Oligonucleotide for detection of SNP TSC0053048
aaacaacccctta

SEQ ID NO: 218233 - DNA, 13 bp, Artificial Sequence
  Oligonucleotide for detection of SNP TSC0053048
taagggattgttt

SEQ ID NO: 218234 - DNA, 13 bp, Artificial Sequence
  Oligonucleotide for detection of SNP TSC0053048
aaacaatccctta

SEQ ID NO: 218235 - DNA, 13 bp, Artificial Sequence
  Oligonucleotide for detection of SNP TSC0000691
ttaagtatagtgy

SEQ ID NO: 218236 - DNA, 13 bp, Artificial Sequence
  Oligonucleotide for detection of SNP TSC0000691
rcactatacttaa

SEQ ID NO: 218237 - DNA, 13 bp, Artificial Sequence
  Oligonucleotide for detection of SNP TSC0000691
ttaagtgtagtgy

SEQ ID NO: 218238 - DNA, 13 bp, Artificial Sequence
  Oligonucleotide for detection of SNP TSC0000691
rcactacacttaa

SEQ ID NO: 218239 - DNA, 13 bp, Artificial Sequence
  Oligonucleotide for detection of SNP TSC0000691
ttaagcgtagtgy

SEQ ID NO: 218240 - DNA, 13 bp, Artificial Sequence
  Oligonucleotide for detection of SNP TSC0000691
rcactacgcttaa

SEQ ID NO: 218241 - DNA, 13 bp, Artificial Sequence
  Oligonucleotide for detection of SNP TSC0000691
gtattgtgtttaa

SEQ ID NO: 218242 - DNA, 13 bp, Artificial Sequence
  Oligonucleotide for detection of SNP TSC0000691
ttaaacacaatac

SEQ ID NO: 218243 - DNA, 13 bp, Artificial Sequence
  Oligonucleotide for detection of SNP TSC0000691
gtattgcgtttaa

SEQ ID NO: 218244 - DNA, 13 bp, Artificial Sequence
  Oligonucleotide for detection of SNP TSC0000691
ttaaacgcaatac

SEQ ID NO: 218245 - DNA, 13 bp, Artificial Sequence
  Oligonucleotide for detection of SNP TSC0053049
atagtaatttgtt

SEQ ID NO: 218246 - DNA, 13 bp, Artificial Sequence
  Oligonucleotide for detection of SNP TSC0053049
aacaaattactat

SEQ ID NO: 218247 - DNA, 13 bp, Artificial Sequence
  Oligonucleotide for detection of SNP TSC0053049
atagtagtttgtt

SEQ ID NO: 218248 - DNA, 13 bp, Artificial Sequence
  Oligonucleotide for detection of SNP TSC0053049
aacaaactactat

SEQ ID NO: 218249 - DNA, 13 bp, Artificial Sequence
  Oligonucleotide for detection of SNP TSC0053051
ttttataagaaga

SEQ ID NO: 218250 - DNA, 13 bp, Artificial Sequence
  Oligonucleotide for detection of SNP TSC0053051
tcttcttataaaa

SEQ ID NO: 218251 - DNA, 13 bp, Artificial Sequence
  Oligonucleotide for detection of SNP TSC0053051
ttttattagaaga

SEQ ID NO: 218252 - DNA, 13 bp, Artificial Sequence
  Oligonucleotide for detection of SNP TSC0053051
tcttctaataaaa

SEQ ID NO: 218253 - DNA, 13 bp, Artificial Sequence
  Oligonucleotide for detection of SNP TSC0053051
tttttttatgaaa

SEQ ID NO: 218254 - DNA, 13 bp, Artificial Sequence
  Oligonucleotide for detection of SNP TSC0053051
tttcataaaaaaa

SEQ ID NO: 218255 - DNA, 13 bp, Artificial Sequence
  Oligonucleotide for detection of SNP TSC0053051
ttttttaatgaaa

SEQ ID NO: 218256 - DNA, 13 bp, Artificial Sequence
  Oligonucleotide for detection of SNP TSC0053051
tttcattaaaaaa

SEQ ID NO: 218257 - DNA, 13 bp, Artificial Sequence
  Oligonucleotide for detection of SNP TSC0053052
aatttggtatttg

SEQ ID NO: 218258 - DNA, 13 bp, Artificial Sequence
  Oligonucleotide for detection of SNP TSC0053052
caaataccaaatt

SEQ ID NO: 218259 - DNA, 13 bp, Artificial Sequence
  Oligonucleotide for detection of SNP TSC0053052
aatttgatatttg

SEQ ID NO: 218260 - DNA, 13 bp, Artificial Sequence
  Oligonucleotide for detection of SNP TSC0053052
caaatatcaaatt

SEQ ID NO: 218261 - DNA, 13 bp, Artificial Sequence
  Oligonucleotide for detection of SNP TSC0053053
gagagggaaggta

SEQ ID NO: 218262 - DNA, 13 bp, Artificial Sequence
  Oligonucleotide for detection of SNP TSC0053053
taccttccctctc

SEQ ID NO: 218263 - DNA, 13 bp, Artificial Sequence
  Oligonucleotide for detection of SNP TSC0053053
gagaggaaaggta

SEQ ID NO: 218264 - DNA, 13 bp, Artificial Sequence
  Oligonucleotide for detection of SNP TSC0053053
tacctttcctctc

SEQ ID NO: 218265 - DNA, 13 bp, Artificial Sequence
  Oligonucleotide for detection of SNP TSC0053054
gttgttggattta

SEQ ID NO: 218266 - DNA, 13 bp, Artificial Sequence
  Oligonucleotide for detection of SNP TSC0053054
taaatccaacaac

SEQ ID NO: 218267 - DNA, 13 bp, Artificial Sequence
  Oligonucleotide for detection of SNP TSC0053054
gttgttagattta

SEQ ID NO: 218268 - DNA, 13 bp, Artificial Sequence
  Oligonucleotide for detection of SNP TSC0053054
taaatctaacaac

SEQ ID NO: 218269 - DNA, 13 bp, Artificial Sequence
  Oligonucleotide for detection of SNP TSC0053055
tttgtttttaaga

SEQ ID NO: 218270 - DNA, 13 bp, Artificial Sequence
  Oligonucleotide for detection of SNP TSC0053055
tcttaaaaacaaa

SEQ ID NO: 218271 - DNA, 13 bp, Artificial Sequence
  Oligonucleotide for detection of SNP TSC0053055
ttttgatgataaa

SEQ ID NO: 218272 - DNA, 13 bp, Artificial Sequence
  Oligonucleotide for detection of SNP TSC0053055
tttatcatcaaaa

SEQ ID NO: 218273 - DNA, 13 bp, Artificial Sequence
  Oligonucleotide for detection of SNP TSC0053055
ttttgaggataaa

SEQ ID NO: 218274 - DNA, 13 bp, Artificial Sequence
  Oligonucleotide for detection of SNP TSC0053055
tttatcctcaaaa

SEQ ID NO: 218275 - DNA, 13 bp, Artificial Sequence
  Oligonucleotide for detection of SNP TSC0053060
gaagggatataaa

SEQ ID NO: 218276 - DNA, 13 bp, Artificial Sequence
  Oligonucleotide for detection of SNP TSC0053060
tttatatcccttc

SEQ ID NO: 218277 - DNA, 13 bp, Artificial Sequence
  Oligonucleotide for detection of SNP TSC0053060
gaaggggtataaa

SEQ ID NO: 218278 - DNA, 13 bp, Artificial Sequence
  Oligonucleotide for detection of SNP TSC0053060
tttataccccttc

SEQ ID NO: 218279 - DNA, 13 bp, Artificial Sequence
  Oligonucleotide for detection of SNP TSC0053061
gtaaaggaaatgg

SEQ ID NO: 218280 - DNA, 13 bp, Artificial Sequence
  Oligonucleotide for detection of SNP TSC0053061
ccatttcctttac

SEQ ID NO: 218281 - DNA, 13 bp, Artificial Sequence
  Oligonucleotide for detection of SNP TSC0053061
gtaaagaaaatgg

SEQ ID NO: 218282 - DNA, 13 bp, Artificial Sequence
  Oligonucleotide for detection of SNP TSC0053061
ccattttctttac

SEQ ID NO: 218283 - DNA, 13 bp, Artificial Sequence
  Oligonucleotide for detection of SNP TSC0053065
gttatagaaaagt

SEQ ID NO: 218284 - DNA, 13 bp, Artificial Sequence
  Oligonucleotide for detection of SNP TSC0053065
acttttctataac

SEQ ID NO: 218285 - DNA, 13 bp, Artificial Sequence
  Oligonucleotide for detection of SNP TSC0053065
gttataaaaaagt

SEQ ID NO: 218286 - DNA, 13 bp, Artificial Sequence
  Oligonucleotide for detection of SNP TSC0053065
acttttttataac

SEQ ID NO: 218287 - DNA, 13 bp, Artificial Sequence
  Oligonucleotide for detection of SNP TSC0053071
tgaaagttgatga

SEQ ID NO: 218288 - DNA, 13 bp, Artificial Sequence
  Oligonucleotide for detection of SNP TSC0053071
tcatcaactttca

SEQ ID NO: 218289 - DNA, 13 bp, Artificial Sequence
  Oligonucleotide for detection of SNP TSC0053071
tgaaagatgatga

SEQ ID NO: 218290 - DNA, 13 bp, Artificial Sequence
  Oligonucleotide for detection of SNP TSC0053071
tcatcatctttca

SEQ ID NO: 218291 - DNA, 13 bp, Artificial Sequence
  Oligonucleotide for detection of SNP TSC0053073
tagaaaagaagaa

SEQ ID NO: 218292 - DNA, 13 bp, Artificial Sequence
  Oligonucleotide for detection of SNP TSC0053073
ttcttcttttcta

SEQ ID NO: 218293 - DNA, 13 bp, Artificial Sequence
  Oligonucleotide for detection of SNP TSC0053073
tagaaaggaagaa

SEQ ID NO: 218294 - DNA, 13 bp, Artificial Sequence
  Oligonucleotide for detection of SNP TSC0053073
ttcttcctttcta

SEQ ID NO: 218295 - DNA, 13 bp, Artificial Sequence
  Oligonucleotide for detection of SNP TSC0053076
ttatatattagtg

SEQ ID NO: 218296 - DNA, 13 bp, Artificial Sequence
  Oligonucleotide for detection of SNP TSC0053076
cactaatatataa

SEQ ID NO: 218297 - DNA, 13 bp, Artificial Sequence
  Oligonucleotide for detection of SNP TSC0053076
ttatatgttagtg

SEQ ID NO: 218298 - DNA, 13 bp, Artificial Sequence
  Oligonucleotide for detection of SNP TSC0053076
cactaacatataa

SEQ ID NO: 218299 - DNA, 13 bp, Artificial Sequence
  Oligonucleotide for detection of SNP TSC0053078
ttaaataagttta

SEQ ID NO: 218300 - DNA, 13 bp, Artificial Sequence
  Oligonucleotide for detection of SNP TSC0053078
taaacttatttaa

SEQ ID NO: 218301 - DNA, 13 bp, Artificial Sequence
  Oligonucleotide for detection of SNP TSC0053078
ttaaattagttta

SEQ ID NO: 218302 - DNA, 13 bp, Artificial Sequence
  Oligonucleotide for detection of SNP TSC0053078
taaactaatttaa

SEQ ID NO: 218303 - DNA, 13 bp, Artificial Sequence
  Oligonucleotide for detection of SNP TSC0053078
taggtttgtttag

SEQ ID NO: 218304 - DNA, 13 bp, Artificial Sequence
  Oligonucleotide for detection of SNP TSC0053078
ctaaacaaaccta

SEQ ID NO: 218305 - DNA, 13 bp, Artificial Sequence
  Oligonucleotide for detection of SNP TSC0053078
taggttggtttag

SEQ ID NO: 218306 - DNA, 13 bp, Artificial Sequence
  Oligonucleotide for detection of SNP TSC0053078
ctaaaccaaccta

SEQ ID NO: 218307 - DNA, 13 bp, Artificial Sequence
  Oligonucleotide for detection of SNP TSC0053079
ttttgtttggtgy

SEQ ID NO: 218308 - DNA, 13 bp, Artificial Sequence
  Oligonucleotide for detection of SNP TSC0053079
rcaccaaacaaaa

SEQ ID NO: 218309 - DNA, 13 bp, Artificial Sequence
  Oligonucleotide for detection of SNP TSC0053079
ttttgtgtggtgy

SEQ ID NO: 218310 - DNA, 13 bp, Artificial Sequence
  Oligonucleotide for detection of SNP TSC0053079
rcaccacacaaaa

SEQ ID NO: 218311 - DNA, 13 bp, Artificial Sequence
  Oligonucleotide for detection of SNP TSC0053079
ttttgcgtggtgy

SEQ ID NO: 218312 - DNA, 13 bp, Artificial Sequence
  Oligonucleotide for detection of SNP TSC0053079
rcaccacgcaaaa

SEQ ID NO: 218313 - DNA, 13 bp, Artificial Sequence
  Oligonucleotide for detection of SNP TSC0053079
gtattaggtaagg

SEQ ID NO: 218314 - DNA, 13 bp, Artificial Sequence
  Oligonucleotide for detection of SNP TSC0053079
ccttacctaatac

SEQ ID NO: 218315 - DNA, 13 bp, Artificial Sequence
  Oligonucleotide for detection of SNP TSC0053079
gtattatgtaagg

SEQ ID NO: 218316 - DNA, 13 bp, Artificial Sequence
  Oligonucleotide for detection of SNP TSC0053079
ccttacataatac

SEQ ID NO: 218317 - DNA, 13 bp, Artificial Sequence
  Oligonucleotide for detection of SNP TSC0053079
gtattacgtaagg

SEQ ID NO: 218318 - DNA, 13 bp, Artificial Sequence
  Oligonucleotide for detection of SNP TSC0053079
ccttacgtaatac

SEQ ID NO: 218319 - DNA, 13 bp, Artificial Sequence
  Oligonucleotide for detection of SNP TSC0053080
tgtttaattttat

SEQ ID NO: 218320 - DNA, 13 bp, Artificial Sequence
  Oligonucleotide for detection of SNP TSC0053080
ataaaattaaaca

SEQ ID NO: 218321 - DNA, 13 bp, Artificial Sequence
  Oligonucleotide for detection of SNP TSC0053080
tgtttagttttat

SEQ ID NO: 218322 - DNA, 13 bp, Artificial Sequence
  Oligonucleotide for detection of SNP TSC0053080
ataaaactaaaca

SEQ ID NO: 218323 - DNA, 13 bp, Artificial Sequence
  Oligonucleotide for detection of SNP TSC0053081
tcgggtgattttt

SEQ ID NO: 218324 - DNA, 13 bp, Artificial Sequence
  Oligonucleotide for detection of SNP TSC0053081
aaaaatcacccga

SEQ ID NO: 218325 - DNA, 13 bp, Artificial Sequence
  Oligonucleotide for detection of SNP TSC0053081
tcgggtaattttt

SEQ ID NO: 218326 - DNA, 13 bp, Artificial Sequence
  Oligonucleotide for detection of SNP TSC0053081
aaaaattacccga

SEQ ID NO: 218327 - DNA, 13 bp, Artificial Sequence
  Oligonucleotide for detection of SNP TSC0053083
aagttaattggat

SEQ ID NO: 218328 - DNA, 13 bp, Artificial Sequence
  Oligonucleotide for detection of SNP TSC0053083
atccaattaactt

SEQ ID NO: 218329 - DNA, 13 bp, Artificial Sequence
  Oligonucleotide for detection of SNP TSC0053083
aagttagttggat

SEQ ID NO: 218330 - DNA, 13 bp, Artificial Sequence
  Oligonucleotide for detection of SNP TSC0053083
atccaactaactt

SEQ ID NO: 218331 - DNA, 13 bp, Artificial Sequence
  Oligonucleotide for detection of SNP TSC0053084
gtaggtagattat

SEQ ID NO: 218332 - DNA, 13 bp, Artificial Sequence
  Oligonucleotide for detection of SNP TSC0053084
ataatctacctac

SEQ ID NO: 218333 - DNA, 13 bp, Artificial Sequence
  Oligonucleotide for detection of SNP TSC0053084
gtaggtggattat

SEQ ID NO: 218334 - DNA, 13 bp, Artificial Sequence
  Oligonucleotide for detection of SNP TSC0053084
ataatccacctac

SEQ ID NO: 218335 - DNA, 13 bp, Artificial Sequence
  Oligonucleotide for detection of SNP TSC0053085
ttgagagagattt

SEQ ID NO: 218336 - DNA, 13 bp, Artificial Sequence
  Oligonucleotide for detection of SNP TSC0053085
aaatctctctcaa

SEQ ID NO: 218337 - DNA, 13 bp, Artificial Sequence
  Oligonucleotide for detection of SNP TSC0053085
ttgagaaagattt

SEQ ID NO: 218338 - DNA, 13 bp, Artificial Sequence
  Oligonucleotide for detection of SNP TSC0053085
aaatctttctcaa

SEQ ID NO: 218339 - DNA, 13 bp, Artificial Sequence
  Oligonucleotide for detection of SNP TSC0053086
tttagtatgatgt

SEQ ID NO: 218340 - DNA, 13 bp, Artificial Sequence
  Oligonucleotide for detection of SNP TSC0053086
acatcatactaaa

SEQ ID NO: 218341 - DNA, 13 bp, Artificial Sequence
  Oligonucleotide for detection of SNP TSC0053086
tttagtttgatgt

SEQ ID NO: 218342 - DNA, 13 bp, Artificial Sequence
  Oligonucleotide for detection of SNP TSC0053086
acatcaaactaaa

SEQ ID NO: 218343 - DNA, 13 bp, Artificial Sequence
  Oligonucleotide for detection of SNP TSC0053086
tttagtgtgatgt

SEQ ID NO: 218344 - DNA, 13 bp, Artificial Sequence
  Oligonucleotide for detection of SNP TSC0053086
acatcacactaaa

SEQ ID NO: 218345 - DNA, 13 bp, Artificial Sequence
  Oligonucleotide for detection of SNP TSC0053086
tttagcgtgatgt

SEQ ID NO: 218346 - DNA, 13 bp, Artificial Sequence
  Oligonucleotide for detection of SNP TSC0053086
acatcacgctaaa

SEQ ID NO: 218347 - DNA, 13 bp, Artificial Sequence
  Oligonucleotide for detection of SNP TSC0053086
atattatgttgga

SEQ ID NO: 218348 - DNA, 13 bp, Artificial Sequence
  Oligonucleotide for detection of SNP TSC0053086
tccaacataatat

SEQ ID NO: 218349 - DNA, 13 bp, Artificial Sequence
  Oligonucleotide for detection of SNP TSC0053086
atattaagttgga

SEQ ID NO: 218350 - DNA, 13 bp, Artificial Sequence
  Oligonucleotide for detection of SNP TSC0053086
tccaacttaatat

SEQ ID NO: 218351 - DNA, 13 bp, Artificial Sequence
  Oligonucleotide for detection of SNP TSC0053086
atattacgttgga

SEQ ID NO: 218352 - DNA, 13 bp, Artificial Sequence
  Oligonucleotide for detection of SNP TSC0053086
tccaacgtaatat

SEQ ID NO: 218353 - DNA, 13 bp, Artificial Sequence
  Oligonucleotide for detection of SNP TSC0053087
gttggggttatag

SEQ ID NO: 218354 - DNA, 13 bp, Artificial Sequence
  Oligonucleotide for detection of SNP TSC0053087
ctataaccccaac

SEQ ID NO: 218355 - DNA, 13 bp, Artificial Sequence
  Oligonucleotide for detection of SNP TSC0053088
ttgagtaaaatty

SEQ ID NO: 218356 - DNA, 13 bp, Artificial Sequence
  Oligonucleotide for detection of SNP TSC0053088
raattttactcaa

SEQ ID NO: 218357 - DNA, 13 bp, Artificial Sequence
  Oligonucleotide for detection of SNP TSC0053088
ttgagttaaatty

SEQ ID NO: 218358 - DNA, 13 bp, Artificial Sequence
  Oligonucleotide for detection of SNP TSC0053088
raatttaactcaa

SEQ ID NO: 218359 - DNA, 13 bp, Artificial Sequence
  Oligonucleotide for detection of SNP TSC0053088
ggattttgtttag

SEQ ID NO: 218360 - DNA, 13 bp, Artificial Sequence
  Oligonucleotide for detection of SNP TSC0053088
ctaaacaaaatcc

SEQ ID NO: 218361 - DNA, 13 bp, Artificial Sequence
  Oligonucleotide for detection of SNP TSC0053088
ggatttagtttag

SEQ ID NO: 218362 - DNA, 13 bp, Artificial Sequence
  Oligonucleotide for detection of SNP TSC0053088
ctaaactaaatcc

SEQ ID NO: 218363 - DNA, 13 bp, Artificial Sequence
  Oligonucleotide for detection of SNP TSC0053089
tgtttaaattaty

SEQ ID NO: 218364 - DNA, 13 bp, Artificial Sequence
  Oligonucleotide for detection of SNP TSC0053089
rataatttaaaca

SEQ ID NO: 218365 - DNA, 13 bp, Artificial Sequence
  Oligonucleotide for detection of SNP TSC0053089
tgtttagattaty

SEQ ID NO: 218366 - DNA, 13 bp, Artificial Sequence
  Oligonucleotide for detection of SNP TSC0053089
rataatctaaaca

SEQ ID NO: 218367 - DNA, 13 bp, Artificial Sequence
  Oligonucleotide for detection of SNP TSC0053090
tattgagattttt

SEQ ID NO: 218368 - DNA, 13 bp, Artificial Sequence
  Oligonucleotide for detection of SNP TSC0053090
aaaaatctcaata

SEQ ID NO: 218369 - DNA, 13 bp, Artificial Sequence
  Oligonucleotide for detection of SNP TSC0053090
tatcgaaattttt

SEQ ID NO: 218370 - DNA, 13 bp, Artificial Sequence
  Oligonucleotide for detection of SNP TSC0053090
aaaaatttcgata

SEQ ID NO: 218371 - DNA, 13 bp, Artificial Sequence
  Oligonucleotide for detection of SNP TSC0053090
tatcgagattttt

SEQ ID NO: 218372 - DNA, 13 bp, Artificial Sequence
  Oligonucleotide for detection of SNP TSC0053090
aaaaatctcgata

SEQ ID NO: 218373 - DNA, 13 bp, Artificial Sequence
  Oligonucleotide for detection of SNP TSC0053091
gaaattggtagga

SEQ ID NO: 218374 - DNA, 13 bp, Artificial Sequence
  Oligonucleotide for detection of SNP TSC0053091
tcctaccaatttc

SEQ ID NO: 218375 - DNA, 13 bp, Artificial Sequence
  Oligonucleotide for detection of SNP TSC0053091
gaaattagtagga

SEQ ID NO: 218376 - DNA, 13 bp, Artificial Sequence
  Oligonucleotide for detection of SNP TSC0053091
tcctactaatttc

SEQ ID NO: 218377 - DNA, 13 bp, Artificial Sequence
  Oligonucleotide for detection of SNP TSC0053091
gaaatcggtagga

SEQ ID NO: 218378 - DNA, 13 bp, Artificial Sequence
  Oligonucleotide for detection of SNP TSC0053091
tcctaccgatttc

SEQ ID NO: 218379 - DNA, 13 bp, Artificial Sequence
  Oligonucleotide for detection of SNP TSC0053092
taagggatggaga

SEQ ID NO: 218380 - DNA, 13 bp, Artificial Sequence
  Oligonucleotide for detection of SNP TSC0053092
tctccatccctta

SEQ ID NO: 218381 - DNA, 13 bp, Artificial Sequence
  Oligonucleotide for detection of SNP TSC0053092
taagggttggaga

SEQ ID NO: 218382 - DNA, 13 bp, Artificial Sequence
  Oligonucleotide for detection of SNP TSC0053092
tctccaaccctta

SEQ ID NO: 218383 - DNA, 13 bp, Artificial Sequence
  Oligonucleotide for detection of SNP TSC0053094
tatgattatttta

SEQ ID NO: 218384 - DNA, 13 bp, Artificial Sequence
  Oligonucleotide for detection of SNP TSC0053094
taaaataatcata

SEQ ID NO: 218385 - DNA, 13 bp, Artificial Sequence
  Oligonucleotide for detection of SNP TSC0053094
tatgatgatttta

SEQ ID NO: 218386 - DNA, 13 bp, Artificial Sequence
  Oligonucleotide for detection of SNP TSC0053094
taaaatcatcata

SEQ ID NO: 218387 - DNA, 13 bp, Artificial Sequence
  Oligonucleotide for detection of SNP TSC0053094
taagataattatg

SEQ ID NO: 218388 - DNA, 13 bp, Artificial Sequence
  Oligonucleotide for detection of SNP TSC0053094
cataattatctta

SEQ ID NO: 218389 - DNA, 13 bp, Artificial Sequence
  Oligonucleotide for detection of SNP TSC0053094
taagattattatg

SEQ ID NO: 218390 - DNA, 13 bp, Artificial Sequence
  Oligonucleotide for detection of SNP TSC0053094
cataataatctta

SEQ ID NO: 218391 - DNA, 13 bp, Artificial Sequence
  Oligonucleotide for detection of SNP TSC0053095
tattaagtttaaa

SEQ ID NO: 218392 - DNA, 13 bp, Artificial Sequence
  Oligonucleotide for detection of SNP TSC0053095
tttaaacttaata

SEQ ID NO: 218393 - DNA, 13 bp, Artificial Sequence
  Oligonucleotide for detection of SNP TSC0053095
tattaaatttaaa

SEQ ID NO: 218394 - DNA, 13 bp, Artificial Sequence
  Oligonucleotide for detection of SNP TSC0053095
tttaaatttaata

SEQ ID NO: 218395 - DNA, 13 bp, Artificial Sequence
  Oligonucleotide for detection of SNP TSC0053096
aatttaattttgt

SEQ ID NO: 218396 - DNA, 13 bp, Artificial Sequence
  Oligonucleotide for detection of SNP TSC0053096
acaaaattaaatt

SEQ ID NO: 218397 - DNA, 13 bp, Artificial Sequence
  Oligonucleotide for detection of SNP TSC0053096
aatttagttttgt

SEQ ID NO: 218398 - DNA, 13 bp, Artificial Sequence
  Oligonucleotide for detection of SNP TSC0053096
acaaaactaaatt

SEQ ID NO: 218399 - DNA, 13 bp, Artificial Sequence
  Oligonucleotide for detection of SNP TSC0053098
gatttaagtttaa

SEQ ID NO: 218400 - DNA, 13 bp, Artificial Sequence
  Oligonucleotide for detection of SNP TSC0053098
ttaaacttaaatc

SEQ ID NO: 218401 - DNA, 13 bp, Artificial Sequence
  Oligonucleotide for detection of SNP TSC0053098
gatttaggtttaa

SEQ ID NO: 218402 - DNA, 13 bp, Artificial Sequence
  Oligonucleotide for detection of SNP TSC0053098
ttaaacctaaatc

SEQ ID NO: 218403 - DNA, 13 bp, Artificial Sequence
  Oligonucleotide for detection of SNP TSC0053099
gttgtagtagata

SEQ ID NO: 218404 - DNA, 13 bp, Artificial Sequence
  Oligonucleotide for detection of SNP TSC0053099
tatctactacaac

SEQ ID NO: 218405 - DNA, 13 bp, Artificial Sequence
  Oligonucleotide for detection of SNP TSC0053099
gttgtaatagata

SEQ ID NO: 218406 - DNA, 13 bp, Artificial Sequence
  Oligonucleotide for detection of SNP TSC0053099
tatctattacaac

SEQ ID NO: 218407 - DNA, 13 bp, Artificial Sequence
  Oligonucleotide for detection of SNP TSC0053100
ttatattgtggtt

SEQ ID NO: 218408 - DNA, 13 bp, Artificial Sequence
  Oligonucleotide for detection of SNP TSC0053100
aaccacaatataa

SEQ ID NO: 218409 - DNA, 13 bp, Artificial Sequence
  Oligonucleotide for detection of SNP TSC0053100
ttatatcgtggtt

SEQ ID NO: 218410 - DNA, 13 bp, Artificial Sequence
  Oligonucleotide for detection of SNP TSC0053100
aaccacgatataa

SEQ ID NO: 218411 - DNA, 13 bp, Artificial Sequence
  Oligonucleotide for detection of SNP TSC0053100
aattatggtatga

SEQ ID NO: 218412 - DNA, 13 bp, Artificial Sequence
  Oligonucleotide for detection of SNP TSC0053100
tcataccataatt

SEQ ID NO: 218413 - DNA, 13 bp, Artificial Sequence
  Oligonucleotide for detection of SNP TSC0053100
aattatagtatga

SEQ ID NO: 218414 - DNA, 13 bp, Artificial Sequence
  Oligonucleotide for detection of SNP TSC0053100
tcatactataatt

SEQ ID NO: 218415 - DNA, 13 bp, Artificial Sequence
  Oligonucleotide for detection of SNP TSC0053100
aattacggtatga

SEQ ID NO: 218416 - DNA, 13 bp, Artificial Sequence
  Oligonucleotide for detection of SNP TSC0053100
tcataccgtaatt

SEQ ID NO: 218417 - DNA, 13 bp, Artificial Sequence
  Oligonucleotide for detection of SNP TSC0053101
tatgtgtaatatt

SEQ ID NO: 218418 - DNA, 13 bp, Artificial Sequence
  Oligonucleotide for detection of SNP TSC0053101
aatattacacata

SEQ ID NO: 218419 - DNA, 13 bp, Artificial Sequence
  Oligonucleotide for detection of SNP TSC0053101
tatgtggaatatt

SEQ ID NO: 218420 - DNA, 13 bp, Artificial Sequence
  Oligonucleotide for detection of SNP TSC0053101
aatattccacata

SEQ ID NO: 218421 - DNA, 13 bp, Artificial Sequence
  Oligonucleotide for detection of SNP TSC0053101
tatgcgtaatatt

SEQ ID NO: 218422 - DNA, 13 bp, Artificial Sequence
  Oligonucleotide for detection of SNP TSC0053101
aatattacgcata

SEQ ID NO: 218423 - DNA, 13 bp, Artificial Sequence
  Oligonucleotide for detection of SNP TSC0053101
tatgcggaatatt

SEQ ID NO: 218424 - DNA, 13 bp, Artificial Sequence
  Oligonucleotide for detection of SNP TSC0053101
aatattccgcata

SEQ ID NO: 218425 - DNA, 13 bp, Artificial Sequence
  Oligonucleotide for detection of SNP TSC0053101
agtgttatgtatg

SEQ ID NO: 218426 - DNA, 13 bp, Artificial Sequence
  Oligonucleotide for detection of SNP TSC0053101
catacataacact

SEQ ID NO: 218427 - DNA, 13 bp, Artificial Sequence
  Oligonucleotide for detection of SNP TSC0053101
agtgttttgtatg

SEQ ID NO: 218428 - DNA, 13 bp, Artificial Sequence
  Oligonucleotide for detection of SNP TSC0053101
catacaaaacact

SEQ ID NO: 218429 - DNA, 13 bp, Artificial Sequence
  Oligonucleotide for detection of SNP TSC0053101
agtgttacgtatg

SEQ ID NO: 218430 - DNA, 13 bp, Artificial Sequence
  Oligonucleotide for detection of SNP TSC0053101
catacgtaacact

SEQ ID NO: 218431 - DNA, 13 bp, Artificial Sequence
  Oligonucleotide for detection of SNP TSC0053101
agtgtttcgtatg

SEQ ID NO: 218432 - DNA, 13 bp, Artificial Sequence
  Oligonucleotide for detection of SNP TSC0053101
catacgaaacact

SEQ ID NO: 218433 - DNA, 13 bp, Artificial Sequence
  Oligonucleotide for detection of SNP TSC0053102
taaaaaatggtaa

SEQ ID NO: 218434 - DNA, 13 bp, Artificial Sequence
  Oligonucleotide for detection of SNP TSC0053102
ttaccatttttta

SEQ ID NO: 218435 - DNA, 13 bp, Artificial Sequence
  Oligonucleotide for detection of SNP TSC0053102
taaaaagtggtaa

SEQ ID NO: 218436 - DNA, 13 bp, Artificial Sequence
  Oligonucleotide for detection of SNP TSC0053102
ttaccacttttta

SEQ ID NO: 218437 - DNA, 13 bp, Artificial Sequence
  Oligonucleotide for detection of SNP TSC0053103
tattgtgtattat

SEQ ID NO: 218438 - DNA, 13 bp, Artificial Sequence
  Oligonucleotide for detection of SNP TSC0053103
ataatacacaata

SEQ ID NO: 218439 - DNA, 13 bp, Artificial Sequence
  Oligonucleotide for detection of SNP TSC0053103
tattgtatattat

SEQ ID NO: 218440 - DNA, 13 bp, Artificial Sequence
  Oligonucleotide for detection of SNP TSC0053103
ataatatacaata

SEQ ID NO: 218441 - DNA, 13 bp, Artificial Sequence
  Oligonucleotide for detection of SNP TSC0053104
attttaatttgta

SEQ ID NO: 218442 - DNA, 13 bp, Artificial Sequence
  Oligonucleotide for detection of SNP TSC0053104
tacaaattaaaat

SEQ ID NO: 218443 - DNA, 13 bp, Artificial Sequence
  Oligonucleotide for detection of SNP TSC0053105
tttaggggtaaag

SEQ ID NO: 218444 - DNA, 13 bp, Artificial Sequence
  Oligonucleotide for detection of SNP TSC0053105
ctttacccctaaa

SEQ ID NO: 218445 - DNA, 13 bp, Artificial Sequence
  Oligonucleotide for detection of SNP TSC0053105
tttaggagtaaag

SEQ ID NO: 218446 - DNA, 13 bp, Artificial Sequence
  Oligonucleotide for detection of SNP TSC0053105
ctttactcctaaa

SEQ ID NO: 218447 - DNA, 13 bp, Artificial Sequence
  Oligonucleotide for detection of SNP TSC0053106
gtttggaaaattg

SEQ ID NO: 218448 - DNA, 13 bp, Artificial Sequence
  Oligonucleotide for detection of SNP TSC0053106
caattttccaaac

SEQ ID NO: 218449 - DNA, 13 bp, Artificial Sequence
  Oligonucleotide for detection of SNP TSC0053106
gtttgggaaattg

SEQ ID NO: 218450 - DNA, 13 bp, Artificial Sequence
  Oligonucleotide for detection of SNP TSC0053106
caatttcccaaac

SEQ ID NO: 218451 - DNA, 13 bp, Artificial Sequence
  Oligonucleotide for detection of SNP TSC0053108
aatgaggatttay

SEQ ID NO: 218452 - DNA, 13 bp, Artificial Sequence
  Oligonucleotide for detection of SNP TSC0053108
rtaaatcctcatt

SEQ ID NO: 218453 - DNA, 13 bp, Artificial Sequence
  Oligonucleotide for detection of SNP TSC0053108
aatgagaatttay

SEQ ID NO: 218454 - DNA, 13 bp, Artificial Sequence
  Oligonucleotide for detection of SNP TSC0053108
rtaaattctcatt

SEQ ID NO: 218455 - DNA, 13 bp, Artificial Sequence
  Oligonucleotide for detection of SNP TSC0053114
ttttgagtttaag

SEQ ID NO: 218456 - DNA, 13 bp, Artificial Sequence
  Oligonucleotide for detection of SNP TSC0053114
cttaaactcaaaa

SEQ ID NO: 218457 - DNA, 13 bp, Artificial Sequence
  Oligonucleotide for detection of SNP TSC0053115
ttttatattaaay

SEQ ID NO: 218458 - DNA, 13 bp, Artificial Sequence
  Oligonucleotide for detection of SNP TSC0053115
rtttaatataaaa

SEQ ID NO: 218459 - DNA, 13 bp, Artificial Sequence
  Oligonucleotide for detection of SNP TSC0053115
ttttatgttaaay

SEQ ID NO: 218460 - DNA, 13 bp, Artificial Sequence
  Oligonucleotide for detection of SNP TSC0053115
rtttaacataaaa

SEQ ID NO: 218461 - DNA, 13 bp, Artificial Sequence
  Oligonucleotide for detection of SNP TSC0053115
ttttacgttaaay

SEQ ID NO: 218462 - DNA, 13 bp, Artificial Sequence
  Oligonucleotide for detection of SNP TSC0053115
rtttaacgtaaaa

SEQ ID NO: 218463 - DNA, 13 bp, Artificial Sequence
  Oligonucleotide for detection of SNP TSC0053115
gtttgatgtaaaa

SEQ ID NO: 218464 - DNA, 13 bp, Artificial Sequence
  Oligonucleotide for detection of SNP TSC0053115
ttttacatcaaac

SEQ ID NO: 218465 - DNA, 13 bp, Artificial Sequence
  Oligonucleotide for detection of SNP TSC0053115
gtttgacgtaaaa

SEQ ID NO: 218466 - DNA, 13 bp, Artificial Sequence
  Oligonucleotide for detection of SNP TSC0053115
ttttacgtcaaac

SEQ ID NO: 218467 - DNA, 13 bp, Artificial Sequence
  Oligonucleotide for detection of SNP TSC0053116
ttttatttatgta

SEQ ID NO: 218468 - DNA, 13 bp, Artificial Sequence
  Oligonucleotide for detection of SNP TSC0053116
tacataaataaaa

SEQ ID NO: 218469 - DNA, 13 bp, Artificial Sequence
  Oligonucleotide for detection of SNP TSC0053116
ttttatttacgta

SEQ ID NO: 218470 - DNA, 13 bp, Artificial Sequence
  Oligonucleotide for detection of SNP TSC0053116
tacgtaaataaaa

SEQ ID NO: 218471 - DNA, 13 bp, Artificial Sequence
  Oligonucleotide for detection of SNP TSC0053116
tatgtatgtagga

SEQ ID NO: 218472 - DNA, 13 bp, Artificial Sequence
  Oligonucleotide for detection of SNP TSC0053116
tcctacatacata

SEQ ID NO: 218473 - DNA, 13 bp, Artificial Sequence
  Oligonucleotide for detection of SNP TSC0053116
tatgtaggtagga

SEQ ID NO: 218474 - DNA, 13 bp, Artificial Sequence
  Oligonucleotide for detection of SNP TSC0053116
tcctacctacata

SEQ ID NO: 218475 - DNA, 13 bp, Artificial Sequence
  Oligonucleotide for detection of SNP TSC0053116
tacgtatgtagga

SEQ ID NO: 218476 - DNA, 13 bp, Artificial Sequence
  Oligonucleotide for detection of SNP TSC0053116
tcctacatacgta

SEQ ID NO: 218477 - DNA, 13 bp, Artificial Sequence
  Oligonucleotide for detection of SNP TSC0053116
tacgtaggtagga

SEQ ID NO: 218478 - DNA, 13 bp, Artificial Sequence
  Oligonucleotide for detection of SNP TSC0053116
tcctacctacgta

SEQ ID NO: 218479 - DNA, 13 bp, Artificial Sequence
  Oligonucleotide for detection of SNP TSC0053117
ggttagagattta

SEQ ID NO: 218480 - DNA, 13 bp, Artificial Sequence
  Oligonucleotide for detection of SNP TSC0053117
taaatctctaacc

SEQ ID NO: 218481 - DNA, 13 bp, Artificial Sequence
  Oligonucleotide for detection of SNP TSC0053117
ggttagggattta

SEQ ID NO: 218482 - DNA, 13 bp, Artificial Sequence
  Oligonucleotide for detection of SNP TSC0053117
taaatccctaacc

SEQ ID NO: 218483 - DNA, 13 bp, Artificial Sequence
  Oligonucleotide for detection of SNP TSC0053118
ttattagtttaty

SEQ ID NO: 218484 - DNA, 13 bp, Artificial Sequence
  Oligonucleotide for detection of SNP TSC0053118
rataaactaataa

SEQ ID NO: 218485 - DNA, 13 bp, Artificial Sequence
  Oligonucleotide for detection of SNP TSC0053118
ttattaatttaty

SEQ ID NO: 218486 - DNA, 13 bp, Artificial Sequence
  Oligonucleotide for detection of SNP TSC0053118
rataaattaataa

SEQ ID NO: 218487 - DNA, 13 bp, Artificial Sequence
  Oligonucleotide for detection of SNP TSC0053119
ataaaagtattay

SEQ ID NO: 218488 - DNA, 13 bp, Artificial Sequence
  Oligonucleotide for detection of SNP TSC0053119
rtaatacttttat

SEQ ID NO: 218489 - DNA, 13 bp, Artificial Sequence
  Oligonucleotide for detection of SNP TSC0053119
ataaaaatattay

SEQ ID NO: 218490 - DNA, 13 bp, Artificial Sequence
  Oligonucleotide for detection of SNP TSC0053119
rtaatatttttat

SEQ ID NO: 218491 - DNA, 13 bp, Artificial Sequence
  Oligonucleotide for detection of SNP TSC0053120
agtgaaagaagga

SEQ ID NO: 218492 - DNA, 13 bp, Artificial Sequence
  Oligonucleotide for detection of SNP TSC0053120
tccttctttcact

SEQ ID NO: 218493 - DNA, 13 bp, Artificial Sequence
  Oligonucleotide for detection of SNP TSC0053120
agtgaaggaagga

SEQ ID NO: 218494 - DNA, 13 bp, Artificial Sequence
  Oligonucleotide for detection of SNP TSC0053120
tccttccttcact

SEQ ID NO: 218495 - DNA, 13 bp, Artificial Sequence
  Oligonucleotide for detection of SNP TSC0053129
attatcgtaagtt

SEQ ID NO: 218496 - DNA, 13 bp, Artificial Sequence
  Oligonucleotide for detection of SNP TSC0053129
aacttacgataat

SEQ ID NO: 218497 - DNA, 13 bp, Artificial Sequence
  Oligonucleotide for detection of SNP TSC0053129
agtttgtgatagt

SEQ ID NO: 218498 - DNA, 13 bp, Artificial Sequence
  Oligonucleotide for detection of SNP TSC0053129
actatcacaaact

SEQ ID NO: 218499 - DNA, 13 bp, Artificial Sequence
  Oligonucleotide for detection of SNP TSC0053129
agtttgcgatagt

SEQ ID NO: 218500 - DNA, 13 bp, Artificial Sequence
  Oligonucleotide for detection of SNP TSC0053129
actatcgcaaact

SEQ ID NO: 218501 - DNA, 13 bp, Artificial Sequence
  Oligonucleotide for detection of SNP TSC0053130
agttatataagga

SEQ ID NO: 218502 - DNA, 13 bp, Artificial Sequence
  Oligonucleotide for detection of SNP TSC0053130
tccttatataact

SEQ ID NO: 218503 - DNA, 13 bp, Artificial Sequence
  Oligonucleotide for detection of SNP TSC0053130
agttatgtaagga

SEQ ID NO: 218504 - DNA, 13 bp, Artificial Sequence
  Oligonucleotide for detection of SNP TSC0053130
tccttacataact

SEQ ID NO: 218505 - DNA, 13 bp, Artificial Sequence
  Oligonucleotide for detection of SNP TSC0053130
agttacgtaagga

SEQ ID NO: 218506 - DNA, 13 bp, Artificial Sequence
  Oligonucleotide for detection of SNP TSC0053130
tccttacgtaact

SEQ ID NO: 218507 - DNA, 13 bp, Artificial Sequence
  Oligonucleotide for detection of SNP TSC0053132
ttagttattggga

SEQ ID NO: 218508 - DNA, 13 bp, Artificial Sequence
  Oligonucleotide for detection of SNP TSC0053132
tcccaataactaa

SEQ ID NO: 218509 - DNA, 13 bp, Artificial Sequence
  Oligonucleotide for detection of SNP TSC0053132
ttagtttttggga

SEQ ID NO: 218510 - DNA, 13 bp, Artificial Sequence
  Oligonucleotide for detection of SNP TSC0053132
tcccaaaaactaa

SEQ ID NO: 218511 - DNA, 13 bp, Artificial Sequence
  Oligonucleotide for detection of SNP TSC0053132
ttttaatagttaa

SEQ ID NO: 218512 - DNA, 13 bp, Artificial Sequence
  Oligonucleotide for detection of SNP TSC0053132
ttaactattaaaa

SEQ ID NO: 218513 - DNA, 13 bp, Artificial Sequence
  Oligonucleotide for detection of SNP TSC0053132
ttttaaaagttaa

SEQ ID NO: 218514 - DNA, 13 bp, Artificial Sequence
  Oligonucleotide for detection of SNP TSC0053132
ttaacttttaaaa

SEQ ID NO: 218515 - DNA, 13 bp, Artificial Sequence
  Oligonucleotide for detection of SNP TSC0053135
tgtgtttttaatt

SEQ ID NO: 218516 - DNA, 13 bp, Artificial Sequence
  Oligonucleotide for detection of SNP TSC0053135
aattaaaaacaca

SEQ ID NO: 218517 - DNA, 13 bp, Artificial Sequence
  Oligonucleotide for detection of SNP TSC0053135
tgtgttgttaatt

SEQ ID NO: 218518 - DNA, 13 bp, Artificial Sequence
  Oligonucleotide for detection of SNP TSC0053135
aattaacaacaca

SEQ ID NO: 218519 - DNA, 13 bp, Artificial Sequence
  Oligonucleotide for detection of SNP TSC0053135
agttgggagtata

SEQ ID NO: 218520 - DNA, 13 bp, Artificial Sequence
  Oligonucleotide for detection of SNP TSC0053135
tatactcccaact

SEQ ID NO: 218521 - DNA, 13 bp, Artificial Sequence
  Oligonucleotide for detection of SNP TSC0053135
agttggtagtata

SEQ ID NO: 218522 - DNA, 13 bp, Artificial Sequence
  Oligonucleotide for detection of SNP TSC0053135
tatactaccaact

SEQ ID NO: 218523 - DNA, 13 bp, Artificial Sequence
  Oligonucleotide for detection of SNP TSC0053140
agatgaagatatt

SEQ ID NO: 218524 - DNA, 13 bp, Artificial Sequence
  Oligonucleotide for detection of SNP TSC0053140
aatatcttcatct

SEQ ID NO: 218525 - DNA, 13 bp, Artificial Sequence
  Oligonucleotide for detection of SNP TSC0053140
agatgaggatatt

SEQ ID NO: 218526 - DNA, 13 bp, Artificial Sequence
  Oligonucleotide for detection of SNP TSC0053140
aatatcctcatct

SEQ ID NO: 218527 - DNA, 13 bp, Artificial Sequence
  Oligonucleotide for detection of SNP TSC0053141
taaaaatgtataa

SEQ ID NO: 218528 - DNA, 13 bp, Artificial Sequence
  Oligonucleotide for detection of SNP TSC0053141
ttatacattttta

SEQ ID NO: 218529 - DNA, 13 bp, Artificial Sequence
  Oligonucleotide for detection of SNP TSC0053141
taaaaaggtataa

SEQ ID NO: 218530 - DNA, 13 bp, Artificial Sequence
  Oligonucleotide for detection of SNP TSC0053141
ttataccttttta

SEQ ID NO: 218531 - DNA, 13 bp, Artificial Sequence
  Oligonucleotide for detection of SNP TSC0053141
ttgtatattttta

SEQ ID NO: 218532 - DNA, 13 bp, Artificial Sequence
  Oligonucleotide for detection of SNP TSC0053141
taaaaatatacaa

SEQ ID NO: 218533 - DNA, 13 bp, Artificial Sequence
  Oligonucleotide for detection of SNP TSC0053144
aaaaagtaattgy

SEQ ID NO: 218534 - DNA, 13 bp, Artificial Sequence
  Oligonucleotide for detection of SNP TSC0053144
rcaattacttttt

SEQ ID NO: 218535 - DNA, 13 bp, Artificial Sequence
  Oligonucleotide for detection of SNP TSC0053144
aaaaaggaattgy

SEQ ID NO: 218536 - DNA, 13 bp, Artificial Sequence
  Oligonucleotide for detection of SNP TSC0053144
rcaattccttttt

SEQ ID NO: 218537 - DNA, 13 bp, Artificial Sequence
  Oligonucleotide for detection of SNP TSC0053146
aaaagaaagatgg

SEQ ID NO: 218538 - DNA, 13 bp, Artificial Sequence
  Oligonucleotide for detection of SNP TSC0053146
ccatctttctttt

SEQ ID NO: 218539 - DNA, 13 bp, Artificial Sequence
  Oligonucleotide for detection of SNP TSC0053146
aaaagatagatgg

SEQ ID NO: 218540 - DNA, 13 bp, Artificial Sequence
  Oligonucleotide for detection of SNP TSC0053146
ccatctatctttt

SEQ ID NO: 218541 - DNA, 13 bp, Artificial Sequence
  Oligonucleotide for detection of SNP TSC0053148
ataagaagataat

SEQ ID NO: 218542 - DNA, 13 bp, Artificial Sequence
  Oligonucleotide for detection of SNP TSC0053148
attatcttcttat

SEQ ID NO: 218543 - DNA, 13 bp, Artificial Sequence
  Oligonucleotide for detection of SNP TSC0053148
ataagaggataat

SEQ ID NO: 218544 - DNA, 13 bp, Artificial Sequence
  Oligonucleotide for detection of SNP TSC0053148
attatcctcttat

SEQ ID NO: 218545 - DNA, 13 bp, Artificial Sequence
  Oligonucleotide for detection of SNP TSC0053151
gtagttaattagt

SEQ ID NO: 218546 - DNA, 13 bp, Artificial Sequence
  Oligonucleotide for detection of SNP TSC0053151
actaattaactac

SEQ ID NO: 218547 - DNA, 13 bp, Artificial Sequence
  Oligonucleotide for detection of SNP TSC0053151
gtagtttattagt

SEQ ID NO: 218548 - DNA, 13 bp, Artificial Sequence
  Oligonucleotide for detection of SNP TSC0053151
actaataaactac

SEQ ID NO: 218549 - DNA, 13 bp, Artificial Sequence
  Oligonucleotide for detection of SNP TSC0053151
attgattaattay

SEQ ID NO: 218550 - DNA, 13 bp, Artificial Sequence
  Oligonucleotide for detection of SNP TSC0053151
rtaattaatcaat

SEQ ID NO: 218551 - DNA, 13 bp, Artificial Sequence
  Oligonucleotide for detection of SNP TSC0053151
attgataaattay

SEQ ID NO: 218552 - DNA, 13 bp, Artificial Sequence
  Oligonucleotide for detection of SNP TSC0053151
rtaatttatcaat

SEQ ID NO: 218553 - DNA, 13 bp, Artificial Sequence
  Oligonucleotide for detection of SNP TSC0053152
tggtagttttaat

SEQ ID NO: 218554 - DNA, 13 bp, Artificial Sequence
  Oligonucleotide for detection of SNP TSC0053152
attaaaactacca

SEQ ID NO: 218555 - DNA, 13 bp, Artificial Sequence
  Oligonucleotide for detection of SNP TSC0053152
tggtaggtttaat

SEQ ID NO: 218556 - DNA, 13 bp, Artificial Sequence
  Oligonucleotide for detection of SNP TSC0053152
attaaacctacca

SEQ ID NO: 218557 - DNA, 13 bp, Artificial Sequence
  Oligonucleotide for detection of SNP TSC0053152
attgaaattatta

SEQ ID NO: 218558 - DNA, 13 bp, Artificial Sequence
  Oligonucleotide for detection of SNP TSC0053152
taataatttcaat

SEQ ID NO: 218559 - DNA, 13 bp, Artificial Sequence
  Oligonucleotide for detection of SNP TSC0053152
attgaatttatta

SEQ ID NO: 218560 - DNA, 13 bp, Artificial Sequence
  Oligonucleotide for detection of SNP TSC0053152
taataaattcaat

SEQ ID NO: 218561 - DNA, 13 bp, Artificial Sequence
  Oligonucleotide for detection of SNP TSC0053155
tatggtatatgta

SEQ ID NO: 218562 - DNA, 13 bp, Artificial Sequence
  Oligonucleotide for detection of SNP TSC0053155
tacatataccata

SEQ ID NO: 218563 - DNA, 13 bp, Artificial Sequence
  Oligonucleotide for detection of SNP TSC0053155
tatggtgtatgta

SEQ ID NO: 218564 - DNA, 13 bp, Artificial Sequence
  Oligonucleotide for detection of SNP TSC0053155
tacatacaccata

SEQ ID NO: 218565 - DNA, 13 bp, Artificial Sequence
  Oligonucleotide for detection of SNP TSC0053155
tatggcgtatgta

SEQ ID NO: 218566 - DNA, 13 bp, Artificial Sequence
  Oligonucleotide for detection of SNP TSC0053155
tacatacgccata

SEQ ID NO: 218567 - DNA, 13 bp, Artificial Sequence
  Oligonucleotide for detection of SNP TSC0053156
ttatagaggtatg

SEQ ID NO: 218568 - DNA, 13 bp, Artificial Sequence
  Oligonucleotide for detection of SNP TSC0053156
catacctctataa

SEQ ID NO: 218569 - DNA, 13 bp, Artificial Sequence
  Oligonucleotide for detection of SNP TSC0053156
ttatagtggtatg

SEQ ID NO: 218570 - DNA, 13 bp, Artificial Sequence
  Oligonucleotide for detection of SNP TSC0053156
cataccactataa

SEQ ID NO: 218571 - DNA, 13 bp, Artificial Sequence
  Oligonucleotide for detection of SNP TSC0053156
ttatagaggtacg

SEQ ID NO: 218572 - DNA, 13 bp, Artificial Sequence
  Oligonucleotide for detection of SNP TSC0053156
cgtacctctataa

SEQ ID NO: 218573 - DNA, 13 bp, Artificial Sequence
  Oligonucleotide for detection of SNP TSC0053156
ttatagtggtacg

SEQ ID NO: 218574 - DNA, 13 bp, Artificial Sequence
  Oligonucleotide for detection of SNP TSC0053156
cgtaccactataa

SEQ ID NO: 218575 - DNA, 13 bp, Artificial Sequence
  Oligonucleotide for detection of SNP TSC0053156
tgtgtttttgtgg

SEQ ID NO: 218576 - DNA, 13 bp, Artificial Sequence
  Oligonucleotide for detection of SNP TSC0053156
ccacaaaaacaca

SEQ ID NO: 218577 - DNA, 13 bp, Artificial Sequence
  Oligonucleotide for detection of SNP TSC0053156
tgtgttattgtgg

SEQ ID NO: 218578 - DNA, 13 bp, Artificial Sequence
  Oligonucleotide for detection of SNP TSC0053156
ccacaataacaca

SEQ ID NO: 218579 - DNA, 13 bp, Artificial Sequence
  Oligonucleotide for detection of SNP TSC0053156
cgtgtttttgtgg

SEQ ID NO: 218580 - DNA, 13 bp, Artificial Sequence
  Oligonucleotide for detection of SNP TSC0053156
ccacaaaaacacg

SEQ ID NO: 218581 - DNA, 13 bp, Artificial Sequence
  Oligonucleotide for detection of SNP TSC0053156
cgtgttattgtgg

SEQ ID NO: 218582 - DNA, 13 bp, Artificial Sequence
  Oligonucleotide for detection of SNP TSC0053156
ccacaataacacg

SEQ ID NO: 218583 - DNA, 13 bp, Artificial Sequence
  Oligonucleotide for detection of SNP TSC0053157
tgtataggtatta

SEQ ID NO: 218584 - DNA, 13 bp, Artificial Sequence
  Oligonucleotide for detection of SNP TSC0053157
taatacctataca

SEQ ID NO: 218585 - DNA, 13 bp, Artificial Sequence
  Oligonucleotide for detection of SNP TSC0053157
tgtataagtatta

SEQ ID NO: 218586 - DNA, 13 bp, Artificial Sequence
  Oligonucleotide for detection of SNP TSC0053157
taatacttataca

SEQ ID NO: 218587 - DNA, 13 bp, Artificial Sequence
  Oligonucleotide for detection of SNP TSC0053159
ttaagtaataatt

SEQ ID NO: 218588 - DNA, 13 bp, Artificial Sequence
  Oligonucleotide for detection of SNP TSC0053159
aattattacttaa

SEQ ID NO: 218589 - DNA, 13 bp, Artificial Sequence
  Oligonucleotide for detection of SNP TSC0053159
ttaagttataatt

SEQ ID NO: 218590 - DNA, 13 bp, Artificial Sequence
  Oligonucleotide for detection of SNP TSC0053159
aattataacttaa

SEQ ID NO: 218591 - DNA, 13 bp, Artificial Sequence
  Oligonucleotide for detection of SNP TSC0053159
agttattatttaa

SEQ ID NO: 218592 - DNA, 13 bp, Artificial Sequence
  Oligonucleotide for detection of SNP TSC0053159
ttaaataataact

SEQ ID NO: 218593 - DNA, 13 bp, Artificial Sequence
  Oligonucleotide for detection of SNP TSC0053159
agttatgatttaa

SEQ ID NO: 218594 - DNA, 13 bp, Artificial Sequence
  Oligonucleotide for detection of SNP TSC0053159
ttaaatcataact

SEQ ID NO: 218595 - DNA, 13 bp, Artificial Sequence
  Oligonucleotide for detection of SNP TSC0053160
tatagaatttttg

SEQ ID NO: 218596 - DNA, 13 bp, Artificial Sequence
  Oligonucleotide for detection of SNP TSC0053160
caaaaattctata

SEQ ID NO: 218597 - DNA, 13 bp, Artificial Sequence
  Oligonucleotide for detection of SNP TSC0053160
tatagagtttttg

SEQ ID NO: 218598 - DNA, 13 bp, Artificial Sequence
  Oligonucleotide for detection of SNP TSC0053160
caaaaactctata

SEQ ID NO: 218599 - DNA, 13 bp, Artificial Sequence
  Oligonucleotide for detection of SNP TSC0053161
tgaattttatatt

SEQ ID NO: 218600 - DNA, 13 bp, Artificial Sequence
  Oligonucleotide for detection of SNP TSC0053161
aatataaaattca

SEQ ID NO: 218601 - DNA, 13 bp, Artificial Sequence
  Oligonucleotide for detection of SNP TSC0053161
tgaattgtatatt

SEQ ID NO: 218602 - DNA, 13 bp, Artificial Sequence
  Oligonucleotide for detection of SNP TSC0053161
aatatacaattca

SEQ ID NO: 218603 - DNA, 13 bp, Artificial Sequence
  Oligonucleotide for detection of SNP TSC0053161
tgaatcgtatatt

SEQ ID NO: 218604 - DNA, 13 bp, Artificial Sequence
  Oligonucleotide for detection of SNP TSC0053161
aatatacgattca

SEQ ID NO: 218605 - DNA, 13 bp, Artificial Sequence
  Oligonucleotide for detection of SNP TSC0053161
agtataggattta

SEQ ID NO: 218606 - DNA, 13 bp, Artificial Sequence
  Oligonucleotide for detection of SNP TSC0053161
taaatcctatact

SEQ ID NO: 218607 - DNA, 13 bp, Artificial Sequence
  Oligonucleotide for detection of SNP TSC0053161
agtatatgattta

SEQ ID NO: 218608 - DNA, 13 bp, Artificial Sequence
  Oligonucleotide for detection of SNP TSC0053161
taaatcatatact

SEQ ID NO: 218609 - DNA, 13 bp, Artificial Sequence
  Oligonucleotide for detection of SNP TSC0053161
agtatacgattta

SEQ ID NO: 218610 - DNA, 13 bp, Artificial Sequence
  Oligonucleotide for detection of SNP TSC0053161
taaatcgtatact

SEQ ID NO: 218611 - DNA, 13 bp, Artificial Sequence
  Oligonucleotide for detection of SNP TSC0053164
attattgtaaaaa

SEQ ID NO: 218612 - DNA, 13 bp, Artificial Sequence
  Oligonucleotide for detection of SNP TSC0053164
tttttacaataat

SEQ ID NO: 218613 - DNA, 13 bp, Artificial Sequence
  Oligonucleotide for detection of SNP TSC0053164
attattataaaaa

SEQ ID NO: 218614 - DNA, 13 bp, Artificial Sequence
  Oligonucleotide for detection of SNP TSC0053164
tttttataataat

SEQ ID NO: 218615 - DNA, 13 bp, Artificial Sequence
  Oligonucleotide for detection of SNP TSC0053165
attaagttgtaag

SEQ ID NO: 218616 - DNA, 13 bp, Artificial Sequence
  Oligonucleotide for detection of SNP TSC0053165
cttacaacttaat

SEQ ID NO: 218617 - DNA, 13 bp, Artificial Sequence
  Oligonucleotide for detection of SNP TSC0053165
attaagatgtaag

SEQ ID NO: 218618 - DNA, 13 bp, Artificial Sequence
  Oligonucleotide for detection of SNP TSC0053165
cttacatcttaat

SEQ ID NO: 218619 - DNA, 13 bp, Artificial Sequence
  Oligonucleotide for detection of SNP TSC0053169
aaatgatttggga

SEQ ID NO: 218620 - DNA, 13 bp, Artificial Sequence
  Oligonucleotide for detection of SNP TSC0053169
tcccaaatcattt

SEQ ID NO: 218621 - DNA, 13 bp, Artificial Sequence
  Oligonucleotide for detection of SNP TSC0053169
aaatgagttggga

SEQ ID NO: 218622 - DNA, 13 bp, Artificial Sequence
  Oligonucleotide for detection of SNP TSC0053169
tcccaactcattt

SEQ ID NO: 218623 - DNA, 13 bp, Artificial Sequence
  Oligonucleotide for detection of SNP TSC0053175
taggaaagtgatg

SEQ ID NO: 218624 - DNA, 13 bp, Artificial Sequence
  Oligonucleotide for detection of SNP TSC0053175
catcactttccta

SEQ ID NO: 218625 - DNA, 13 bp, Artificial Sequence
  Oligonucleotide for detection of SNP TSC0053175
taggaatgtgatg

SEQ ID NO: 218626 - DNA, 13 bp, Artificial Sequence
  Oligonucleotide for detection of SNP TSC0053175
catcacattccta

SEQ ID NO: 218627 - DNA, 13 bp, Artificial Sequence
  Oligonucleotide for detection of SNP TSC0053175
taggaacgtgatg

SEQ ID NO: 218628 - DNA, 13 bp, Artificial Sequence
  Oligonucleotide for detection of SNP TSC0053175
catcacgttccta

SEQ ID NO: 218629 - DNA, 13 bp, Artificial Sequence
  Oligonucleotide for detection of SNP TSC0053176
atgttttgaaaty

SEQ ID NO: 218630 - DNA, 13 bp, Artificial Sequence
  Oligonucleotide for detection of SNP TSC0053176
ratttcaaaacat

SEQ ID NO: 218631 - DNA, 13 bp, Artificial Sequence
  Oligonucleotide for detection of SNP TSC0053176
atgtttcgaaaty

SEQ ID NO: 218632 - DNA, 13 bp, Artificial Sequence
  Oligonucleotide for detection of SNP TSC0053176
ratttcgaaacat

SEQ ID NO: 218633 - DNA, 13 bp, Artificial Sequence
  Oligonucleotide for detection of SNP TSC0053176
ggttttgaaatat

SEQ ID NO: 218634 - DNA, 13 bp, Artificial Sequence
  Oligonucleotide for detection of SNP TSC0053176
atatttcaaaacc

SEQ ID NO: 218635 - DNA, 13 bp, Artificial Sequence
  Oligonucleotide for detection of SNP TSC0053176
ggttttaaaatat

SEQ ID NO: 218636 - DNA, 13 bp, Artificial Sequence
  Oligonucleotide for detection of SNP TSC0053176
atattttaaaacc

SEQ ID NO: 218637 - DNA, 13 bp, Artificial Sequence
  Oligonucleotide for detection of SNP TSC0053176
ggtttcgaaatat

SEQ ID NO: 218638 - DNA, 13 bp, Artificial Sequence
  Oligonucleotide for detection of SNP TSC0053176
atatttcgaaacc

SEQ ID NO: 218639 - DNA, 13 bp, Artificial Sequence
  Oligonucleotide for detection of SNP TSC0053177
ataattggaatty

SEQ ID NO: 218640 - DNA, 13 bp, Artificial Sequence
  Oligonucleotide for detection of SNP TSC0053177
raattccaattat

SEQ ID NO: 218641 - DNA, 13 bp, Artificial Sequence
  Oligonucleotide for detection of SNP TSC0053177
ataattagaatty

SEQ ID NO: 218642 - DNA, 13 bp, Artificial Sequence
  Oligonucleotide for detection of SNP TSC0053177
raattctaattat

SEQ ID NO: 218643 - DNA, 13 bp, Artificial Sequence
  Oligonucleotide for detection of SNP TSC0053178
atattaattaata

SEQ ID NO: 218644 - DNA, 13 bp, Artificial Sequence
  Oligonucleotide for detection of SNP TSC0053178
tattaattaatat

SEQ ID NO: 218645 - DNA, 13 bp, Artificial Sequence
  Oligonucleotide for detection of SNP TSC0053178
atattagttaata

SEQ ID NO: 218646 - DNA, 13 bp, Artificial Sequence
  Oligonucleotide for detection of SNP TSC0053178
tattaactaatat

SEQ ID NO: 218647 - DNA, 13 bp, Artificial Sequence
  Oligonucleotide for detection of SNP TSC0053181
ttggtaaaataga

SEQ ID NO: 218648 - DNA, 13 bp, Artificial Sequence
  Oligonucleotide for detection of SNP TSC0053181
tctattttaccaa

SEQ ID NO: 218649 - DNA, 13 bp, Artificial Sequence
  Oligonucleotide for detection of SNP TSC0053181
ttggtagaataga

SEQ ID NO: 218650 - DNA, 13 bp, Artificial Sequence
  Oligonucleotide for detection of SNP TSC0053181
tctattctaccaa

SEQ ID NO: 218651 - DNA, 13 bp, Artificial Sequence
  Oligonucleotide for detection of SNP TSC0053184
attggagttagaa

SEQ ID NO: 218652 - DNA, 13 bp, Artificial Sequence
  Oligonucleotide for detection of SNP TSC0053184
ttctaactccaat

SEQ ID NO: 218653 - DNA, 13 bp, Artificial Sequence
  Oligonucleotide for detection of SNP TSC0053184
attggaattagaa

SEQ ID NO: 218654 - DNA, 13 bp, Artificial Sequence
  Oligonucleotide for detection of SNP TSC0053184
ttctaattccaat

SEQ ID NO: 218655 - DNA, 13 bp, Artificial Sequence
  Oligonucleotide for detection of SNP TSC0053185
tttgatatattaa

SEQ ID NO: 218656 - DNA, 13 bp, Artificial Sequence
  Oligonucleotide for detection of SNP TSC0053185
ttaatatatcaaa

SEQ ID NO: 218657 - DNA, 13 bp, Artificial Sequence
  Oligonucleotide for detection of SNP TSC0053185
tttgatgtattaa

SEQ ID NO: 218658 - DNA, 13 bp, Artificial Sequence
  Oligonucleotide for detection of SNP TSC0053185
ttaatacatcaaa

SEQ ID NO: 218659 - DNA, 13 bp, Artificial Sequence
  Oligonucleotide for detection of SNP TSC0053186
ggggatatgagty

SEQ ID NO: 218660 - DNA, 13 bp, Artificial Sequence
  Oligonucleotide for detection of SNP TSC0053186
ractcatatcccc

SEQ ID NO: 218661 - DNA, 13 bp, Artificial Sequence
  Oligonucleotide for detection of SNP TSC0053186
ggggatgtgagty

SEQ ID NO: 218662 - DNA, 13 bp, Artificial Sequence
  Oligonucleotide for detection of SNP TSC0053186
ractcacatcccc

SEQ ID NO: 218663 - DNA, 13 bp, Artificial Sequence
  Oligonucleotide for detection of SNP TSC0053186
ggggacgtgagty

SEQ ID NO: 218664 - DNA, 13 bp, Artificial Sequence
  Oligonucleotide for detection of SNP TSC0053186
ractcacgtcccc

SEQ ID NO: 218665 - DNA, 13 bp, Artificial Sequence
  Oligonucleotide for detection of SNP TSC0053186
gatttatgtttty

SEQ ID NO: 218666 - DNA, 13 bp, Artificial Sequence
  Oligonucleotide for detection of SNP TSC0053186
raaaacataaatc

SEQ ID NO: 218667 - DNA, 13 bp, Artificial Sequence
  Oligonucleotide for detection of SNP TSC0053186
gatttacgtttty

SEQ ID NO: 218668 - DNA, 13 bp, Artificial Sequence
  Oligonucleotide for detection of SNP TSC0053186
raaaacgtaaatc

SEQ ID NO: 218669 - DNA, 13 bp, Artificial Sequence
  Oligonucleotide for detection of SNP TSC0053187
ttttatatttacg

SEQ ID NO: 218670 - DNA, 13 bp, Artificial Sequence
  Oligonucleotide for detection of SNP TSC0053187
cgtaaatataaaa

SEQ ID NO: 218671 - DNA, 13 bp, Artificial Sequence
  Oligonucleotide for detection of SNP TSC0053187
ttttatgtttacg

SEQ ID NO: 218672 - DNA, 13 bp, Artificial Sequence
  Oligonucleotide for detection of SNP TSC0053187
cgtaaacataaaa

SEQ ID NO: 218673 - DNA, 13 bp, Artificial Sequence
  Oligonucleotide for detection of SNP TSC0053187
ttttacgtttacg

SEQ ID NO: 218674 - DNA, 13 bp, Artificial Sequence
  Oligonucleotide for detection of SNP TSC0053187
cgtaaacgtaaaa

SEQ ID NO: 218675 - DNA, 13 bp, Artificial Sequence
  Oligonucleotide for detection of SNP TSC0053187
tgtgggtgtgggg

SEQ ID NO: 218676 - DNA, 13 bp, Artificial Sequence
  Oligonucleotide for detection of SNP TSC0053187
ccccacacccaca

SEQ ID NO: 218677 - DNA, 13 bp, Artificial Sequence
  Oligonucleotide for detection of SNP TSC0053187
cgtgggtgtgggg

SEQ ID NO: 218678 - DNA, 13 bp, Artificial Sequence
  Oligonucleotide for detection of SNP TSC0053187
ccccacacccacg

SEQ ID NO: 218679 - DNA, 13 bp, Artificial Sequence
  Oligonucleotide for detection of SNP TSC0053187
tgtgggcgtgggg

SEQ ID NO: 218680 - DNA, 13 bp, Artificial Sequence
  Oligonucleotide for detection of SNP TSC0053187
ccccacgcccaca

SEQ ID NO: 218681 - DNA, 13 bp, Artificial Sequence
  Oligonucleotide for detection of SNP TSC0053187
cgtgggcgtgggg

SEQ ID NO: 218682 - DNA, 13 bp, Artificial Sequence
  Oligonucleotide for detection of SNP TSC0053187
ccccacgcccacg

SEQ ID NO: 218683 - DNA, 13 bp, Artificial Sequence
  Oligonucleotide for detection of SNP TSC0053188
ggatgaggagtag

SEQ ID NO: 218684 - DNA, 13 bp, Artificial Sequence
  Oligonucleotide for detection of SNP TSC0053188
ctactcctcatcc

SEQ ID NO: 218685 - DNA, 13 bp, Artificial Sequence
  Oligonucleotide for detection of SNP TSC0053188
ggatgaagagtag

SEQ ID NO: 218686 - DNA, 13 bp, Artificial Sequence
  Oligonucleotide for detection of SNP TSC0053188
ctactcttcatcc

SEQ ID NO: 218687 - DNA, 13 bp, Artificial Sequence
  Oligonucleotide for detection of SNP TSC0053189
agtttaaggtttt

SEQ ID NO: 218688 - DNA, 13 bp, Artificial Sequence
  Oligonucleotide for detection of SNP TSC0053189
aaaaccttaaact

SEQ ID NO: 218689 - DNA, 13 bp, Artificial Sequence
  Oligonucleotide for detection of SNP TSC0053189
agtttagggtttt

SEQ ID NO: 218690 - DNA, 13 bp, Artificial Sequence
  Oligonucleotide for detection of SNP TSC0053189
aaaaccctaaact

SEQ ID NO: 218691 - DNA, 13 bp, Artificial Sequence
  Oligonucleotide for detection of SNP TSC0053190
agtttggtttatt

SEQ ID NO: 218692 - DNA, 13 bp, Artificial Sequence
  Oligonucleotide for detection of SNP TSC0053190
aataaaccaaact

SEQ ID NO: 218693 - DNA, 13 bp, Artificial Sequence
  Oligonucleotide for detection of SNP TSC0053190
agtttgatttatt

SEQ ID NO: 218694 - DNA, 13 bp, Artificial Sequence
  Oligonucleotide for detection of SNP TSC0053190
aataaatcaaact

SEQ ID NO: 218695 - DNA, 13 bp, Artificial Sequence
  Oligonucleotide for detection of SNP TSC0053194
tttttatagattt

SEQ ID NO: 218696 - DNA, 13 bp, Artificial Sequence
  Oligonucleotide for detection of SNP TSC0053194
aaatctataaaaa

SEQ ID NO: 218697 - DNA, 13 bp, Artificial Sequence
  Oligonucleotide for detection of SNP TSC0053194
aaatttataaagg

SEQ ID NO: 218698 - DNA, 13 bp, Artificial Sequence
  Oligonucleotide for detection of SNP TSC0053194
cctttataaattt

SEQ ID NO: 218699 - DNA, 13 bp, Artificial Sequence
  Oligonucleotide for detection of SNP TSC0053194
aaatttttaaagg

SEQ ID NO: 218700 - DNA, 13 bp, Artificial Sequence
  Oligonucleotide for detection of SNP TSC0053194
cctttaaaaattt

SEQ ID NO: 218701 - DNA, 13 bp, Artificial Sequence
  Oligonucleotide for detection of SNP TSC0053195
aagtaatggatag

SEQ ID NO: 218702 - DNA, 13 bp, Artificial Sequence
  Oligonucleotide for detection of SNP TSC0053195
ctatccattactt

SEQ ID NO: 218703 - DNA, 13 bp, Artificial Sequence
  Oligonucleotide for detection of SNP TSC0053195
aagtaagggatag

SEQ ID NO: 218704 - DNA, 13 bp, Artificial Sequence
  Oligonucleotide for detection of SNP TSC0053195
ctatcccttactt

SEQ ID NO: 218705 - DNA, 13 bp, Artificial Sequence
  Oligonucleotide for detection of SNP TSC0053196
atggatgagatty

SEQ ID NO: 218706 - DNA, 13 bp, Artificial Sequence
  Oligonucleotide for detection of SNP TSC0053196
raatctcatccat

SEQ ID NO: 218707 - DNA, 13 bp, Artificial Sequence
  Oligonucleotide for detection of SNP TSC0053196
atggataagatty

SEQ ID NO: 218708 - DNA, 13 bp, Artificial Sequence
  Oligonucleotide for detection of SNP TSC0053196
raatcttatccat

SEQ ID NO: 218709 - DNA, 13 bp, Artificial Sequence
  Oligonucleotide for detection of SNP TSC0053197
ttttagagtttag

SEQ ID NO: 218710 - DNA, 13 bp, Artificial Sequence
  Oligonucleotide for detection of SNP TSC0053197
ctaaactctaaaa

SEQ ID NO: 218711 - DNA, 13 bp, Artificial Sequence
  Oligonucleotide for detection of SNP TSC0053197
ttttagtgtttag

SEQ ID NO: 218712 - DNA, 13 bp, Artificial Sequence
  Oligonucleotide for detection of SNP TSC0053197
ctaaacactaaaa

SEQ ID NO: 218713 - DNA, 13 bp, Artificial Sequence
  Oligonucleotide for detection of SNP TSC0053197
ttgagttttaaaa

SEQ ID NO: 218714 - DNA, 13 bp, Artificial Sequence
  Oligonucleotide for detection of SNP TSC0053197
ttttaaaactcaa

SEQ ID NO: 218715 - DNA, 13 bp, Artificial Sequence
  Oligonucleotide for detection of SNP TSC0053197
ttgagtattaaaa

SEQ ID NO: 218716 - DNA, 13 bp, Artificial Sequence
  Oligonucleotide for detection of SNP TSC0053197
ttttaatactcaa

SEQ ID NO: 218717 - DNA, 13 bp, Artificial Sequence
  Oligonucleotide for detection of SNP TSC0053198
attaggaaagttg

SEQ ID NO: 218718 - DNA, 13 bp, Artificial Sequence
  Oligonucleotide for detection of SNP TSC0053198
caactttcctaat

SEQ ID NO: 218719 - DNA, 13 bp, Artificial Sequence
  Oligonucleotide for detection of SNP TSC0053198
attagggaagttg

SEQ ID NO: 218720 - DNA, 13 bp, Artificial Sequence
  Oligonucleotide for detection of SNP TSC0053198
caacttccctaat

SEQ ID NO: 218721 - DNA, 13 bp, Artificial Sequence
  Oligonucleotide for detection of SNP TSC0053202
ttttattgtgaaa

SEQ ID NO: 218722 - DNA, 13 bp, Artificial Sequence
  Oligonucleotide for detection of SNP TSC0053202
tttcacaataaaa

SEQ ID NO: 218723 - DNA, 13 bp, Artificial Sequence
  Oligonucleotide for detection of SNP TSC0053202
ttttatcgtgaaa

SEQ ID NO: 218724 - DNA, 13 bp, Artificial Sequence
  Oligonucleotide for detection of SNP TSC0053202
tttcacgataaaa

SEQ ID NO: 218725 - DNA, 13 bp, Artificial Sequence
  Oligonucleotide for detection of SNP TSC0053202
ttttatgatgaaa

SEQ ID NO: 218726 - DNA, 13 bp, Artificial Sequence
  Oligonucleotide for detection of SNP TSC0053202
tttcatcataaaa

SEQ ID NO: 218727 - DNA, 13 bp, Artificial Sequence
  Oligonucleotide for detection of SNP TSC0053202
ttttattatgaaa

SEQ ID NO: 218728 - DNA, 13 bp, Artificial Sequence
  Oligonucleotide for detection of SNP TSC0053202
tttcataataaaa

SEQ ID NO: 218729 - DNA, 13 bp, Artificial Sequence
  Oligonucleotide for detection of SNP TSC0053202
ttttacgatgaaa

SEQ ID NO: 218730 - DNA, 13 bp, Artificial Sequence
  Oligonucleotide for detection of SNP TSC0053202
tttcatcgtaaaa

SEQ ID NO: 218731 - DNA, 13 bp, Artificial Sequence
  Oligonucleotide for detection of SNP TSC0053203
ttttttgaaaagy

SEQ ID NO: 218732 - DNA, 13 bp, Artificial Sequence
  Oligonucleotide for detection of SNP TSC0053203
rcttttcaaaaaa

SEQ ID NO: 218733 - DNA, 13 bp, Artificial Sequence
  Oligonucleotide for detection of SNP TSC0053203
tttttcgaaaagy

SEQ ID NO: 218734 - DNA, 13 bp, Artificial Sequence
  Oligonucleotide for detection of SNP TSC0053203
rcttttcgaaaaa

SEQ ID NO: 218735 - DNA, 13 bp, Artificial Sequence
  Oligonucleotide for detection of SNP TSC0053203
gttttttgaaaaa

SEQ ID NO: 218736 - DNA, 13 bp, Artificial Sequence
  Oligonucleotide for detection of SNP TSC0053203
tttttcaaaaaac

SEQ ID NO: 218737 - DNA, 13 bp, Artificial Sequence
  Oligonucleotide for detection of SNP TSC0053203
gtttttcgaaaaa

SEQ ID NO: 218738 - DNA, 13 bp, Artificial Sequence
  Oligonucleotide for detection of SNP TSC0053203
tttttcgaaaaac

SEQ ID NO: 218739 - DNA, 13 bp, Artificial Sequence
  Oligonucleotide for detection of SNP TSC0053204
tttatgttgaaag

SEQ ID NO: 218740 - DNA, 13 bp, Artificial Sequence
  Oligonucleotide for detection of SNP TSC0053204
ctttcaacataaa

SEQ ID NO: 218741 - DNA, 13 bp, Artificial Sequence
  Oligonucleotide for detection of SNP TSC0053204
tttatggtgaaag

SEQ ID NO: 218742 - DNA, 13 bp, Artificial Sequence
  Oligonucleotide for detection of SNP TSC0053204
ctttcaccataaa

SEQ ID NO: 218743 - DNA, 13 bp, Artificial Sequence
  Oligonucleotide for detection of SNP TSC0053204
tttttagtatgaa

SEQ ID NO: 218744 - DNA, 13 bp, Artificial Sequence
  Oligonucleotide for detection of SNP TSC0053204
ttcatactaaaaa

SEQ ID NO: 218745 - DNA, 13 bp, Artificial Sequence
  Oligonucleotide for detection of SNP TSC0053204
tttttattatgaa

SEQ ID NO: 218746 - DNA, 13 bp, Artificial Sequence
  Oligonucleotide for detection of SNP TSC0053204
ttcataataaaaa

SEQ ID NO: 218747 - DNA, 13 bp, Artificial Sequence
  Oligonucleotide for detection of SNP TSC0053205
aatttattttagg

SEQ ID NO: 218748 - DNA, 13 bp, Artificial Sequence
  Oligonucleotide for detection of SNP TSC0053205
cctaaaataaatt

SEQ ID NO: 218749 - DNA, 13 bp, Artificial Sequence
  Oligonucleotide for detection of SNP TSC0053205
tttggaatagatt

SEQ ID NO: 218750 - DNA, 13 bp, Artificial Sequence
  Oligonucleotide for detection of SNP TSC0053205
aatctattccaaa

SEQ ID NO: 218751 - DNA, 13 bp, Artificial Sequence
  Oligonucleotide for detection of SNP TSC0053205
tttggattagatt

SEQ ID NO: 218752 - DNA, 13 bp, Artificial Sequence
  Oligonucleotide for detection of SNP TSC0053205
aatctaatccaaa

SEQ ID NO: 218753 - DNA, 13 bp, Artificial Sequence
  Oligonucleotide for detection of SNP TSC0053206
gattaatggaata

SEQ ID NO: 218754 - DNA, 13 bp, Artificial Sequence
  Oligonucleotide for detection of SNP TSC0053206
tattccattaatc

SEQ ID NO: 218755 - DNA, 13 bp, Artificial Sequence
  Oligonucleotide for detection of SNP TSC0053206
gattaacggaata

SEQ ID NO: 218756 - DNA, 13 bp, Artificial Sequence
  Oligonucleotide for detection of SNP TSC0053206
tattccgttaatc

SEQ ID NO: 218757 - DNA, 13 bp, Artificial Sequence
  Oligonucleotide for detection of SNP TSC0053206
tgttttgttggty

SEQ ID NO: 218758 - DNA, 13 bp, Artificial Sequence
  Oligonucleotide for detection of SNP TSC0053206
raccaacaaaaca

SEQ ID NO: 218759 - DNA, 13 bp, Artificial Sequence
  Oligonucleotide for detection of SNP TSC0053206
tgtttcgttggty

SEQ ID NO: 218760 - DNA, 13 bp, Artificial Sequence
  Oligonucleotide for detection of SNP TSC0053206
raccaacgaaaca

SEQ ID NO: 218761 - DNA, 13 bp, Artificial Sequence
  Oligonucleotide for detection of SNP TSC0053208
ttttgtatttgga

SEQ ID NO: 218762 - DNA, 13 bp, Artificial Sequence
  Oligonucleotide for detection of SNP TSC0053208
tccaaatacaaaa

SEQ ID NO: 218763 - DNA, 13 bp, Artificial Sequence
  Oligonucleotide for detection of SNP TSC0053208
ttttgtgtttgga

SEQ ID NO: 218764 - DNA, 13 bp, Artificial Sequence
  Oligonucleotide for detection of SNP TSC0053208
tccaaacacaaaa

SEQ ID NO: 218765 - DNA, 13 bp, Artificial Sequence
  Oligonucleotide for detection of SNP TSC0053208
ttttgcgtttgga

SEQ ID NO: 218766 - DNA, 13 bp, Artificial Sequence
  Oligonucleotide for detection of SNP TSC0053208
tccaaacgcaaaa

SEQ ID NO: 218767 - DNA, 13 bp, Artificial Sequence
  Oligonucleotide for detection of SNP TSC0053208
tttaaatgtaggg

SEQ ID NO: 218768 - DNA, 13 bp, Artificial Sequence
  Oligonucleotide for detection of SNP TSC0053208
ccctacatttaaa

SEQ ID NO: 218769 - DNA, 13 bp, Artificial Sequence
  Oligonucleotide for detection of SNP TSC0053208
tttaaacgtaggg

SEQ ID NO: 218770 - DNA, 13 bp, Artificial Sequence
  Oligonucleotide for detection of SNP TSC0053208
ccctacgtttaaa

SEQ ID NO: 218771 - DNA, 13 bp, Artificial Sequence
  Oligonucleotide for detection of SNP TSC0053209
aagtttaagtgay

SEQ ID NO: 218772 - DNA, 13 bp, Artificial Sequence
  Oligonucleotide for detection of SNP TSC0053209
rtcacttaaactt

SEQ ID NO: 218773 - DNA, 13 bp, Artificial Sequence
  Oligonucleotide for detection of SNP TSC0053209
aagtttgagtgay

SEQ ID NO: 218774 - DNA, 13 bp, Artificial Sequence
  Oligonucleotide for detection of SNP TSC0053209
rtcactcaaactt

SEQ ID NO: 218775 - DNA, 13 bp, Artificial Sequence
  Oligonucleotide for detection of SNP TSC0053212
ggtttaagattaa

SEQ ID NO: 218776 - DNA, 13 bp, Artificial Sequence
  Oligonucleotide for detection of SNP TSC0053212
ttaatcttaaacc

SEQ ID NO: 218777 - DNA, 13 bp, Artificial Sequence
  Oligonucleotide for detection of SNP TSC0053212
ggtttaggattaa

SEQ ID NO: 218778 - DNA, 13 bp, Artificial Sequence
  Oligonucleotide for detection of SNP TSC0053212
ttaatcctaaacc

SEQ ID NO: 218779 - DNA, 13 bp, Artificial Sequence
  Oligonucleotide for detection of SNP TSC0053213
agtttaaaaatag

SEQ ID NO: 218780 - DNA, 13 bp, Artificial Sequence
  Oligonucleotide for detection of SNP TSC0053213
ctatttttaaact

SEQ ID NO: 218781 - DNA, 13 bp, Artificial Sequence
  Oligonucleotide for detection of SNP TSC0053213
agtttagaaatag

SEQ ID NO: 218782 - DNA, 13 bp, Artificial Sequence
  Oligonucleotide for detection of SNP TSC0053213
ctatttctaaact

SEQ ID NO: 218783 - DNA, 13 bp, Artificial Sequence
  Oligonucleotide for detection of SNP TSC0053214
taagttttaagty

SEQ ID NO: 218784 - DNA, 13 bp, Artificial Sequence
  Oligonucleotide for detection of SNP TSC0053214
racttaaaactta

SEQ ID NO: 218785 - DNA, 13 bp, Artificial Sequence
  Oligonucleotide for detection of SNP TSC0053214
taagttgtaagty

SEQ ID NO: 218786 - DNA, 13 bp, Artificial Sequence
  Oligonucleotide for detection of SNP TSC0053214
racttacaactta

SEQ ID NO: 218787 - DNA, 13 bp, Artificial Sequence
  Oligonucleotide for detection of SNP TSC0053214
gatttagaattta

SEQ ID NO: 218788 - DNA, 13 bp, Artificial Sequence
  Oligonucleotide for detection of SNP TSC0053214
taaattctaaatc

SEQ ID NO: 218789 - DNA, 13 bp, Artificial Sequence
  Oligonucleotide for detection of SNP TSC0053214
gatttataattta

SEQ ID NO: 218790 - DNA, 13 bp, Artificial Sequence
  Oligonucleotide for detection of SNP TSC0053214
taaattataaatc

SEQ ID NO: 218791 - DNA, 13 bp, Artificial Sequence
  Oligonucleotide for detection of SNP TSC0053215
tagaattataggg

SEQ ID NO: 218792 - DNA, 13 bp, Artificial Sequence
  Oligonucleotide for detection of SNP TSC0053215
ccctataattcta

SEQ ID NO: 218793 - DNA, 13 bp, Artificial Sequence
  Oligonucleotide for detection of SNP TSC0053215
tagaatgataggg

SEQ ID NO: 218794 - DNA, 13 bp, Artificial Sequence
  Oligonucleotide for detection of SNP TSC0053215
ccctatcattcta

SEQ ID NO: 218795 - DNA, 13 bp, Artificial Sequence
  Oligonucleotide for detection of SNP TSC0053215
ttttataattttg

SEQ ID NO: 218796 - DNA, 13 bp, Artificial Sequence
  Oligonucleotide for detection of SNP TSC0053215
caaaattataaaa

SEQ ID NO: 218797 - DNA, 13 bp, Artificial Sequence
  Oligonucleotide for detection of SNP TSC0053217
gggtgtagtttta

SEQ ID NO: 218798 - DNA, 13 bp, Artificial Sequence
  Oligonucleotide for detection of SNP TSC0053217
taaaactacaccc

SEQ ID NO: 218799 - DNA, 13 bp, Artificial Sequence
  Oligonucleotide for detection of SNP TSC0053217
gggtgtggtttta

SEQ ID NO: 218800 - DNA, 13 bp, Artificial Sequence
  Oligonucleotide for detection of SNP TSC0053217
taaaaccacaccc

SEQ ID NO: 218801 - DNA, 13 bp, Artificial Sequence
  Oligonucleotide for detection of SNP TSC0053217
gggcgtagtttta

SEQ ID NO: 218802 - DNA, 13 bp, Artificial Sequence
  Oligonucleotide for detection of SNP TSC0053217
taaaactacgccc

SEQ ID NO: 218803 - DNA, 13 bp, Artificial Sequence
  Oligonucleotide for detection of SNP TSC0053217
gggcgtggtttta

SEQ ID NO: 218804 - DNA, 13 bp, Artificial Sequence
  Oligonucleotide for detection of SNP TSC0053217
taaaaccacgccc

SEQ ID NO: 218805 - DNA, 13 bp, Artificial Sequence
  Oligonucleotide for detection of SNP TSC0053217
gggtgcggtttta

SEQ ID NO: 218806 - DNA, 13 bp, Artificial Sequence
  Oligonucleotide for detection of SNP TSC0053217
taaaaccgcaccc

SEQ ID NO: 218807 - DNA, 13 bp, Artificial Sequence
  Oligonucleotide for detection of SNP TSC0053217
gggcgcggtttta

SEQ ID NO: 218808 - DNA, 13 bp, Artificial Sequence
  Oligonucleotide for detection of SNP TSC0053217
taaaaccgcgccc

SEQ ID NO: 218809 - DNA, 13 bp, Artificial Sequence
  Oligonucleotide for detection of SNP TSC0053217
tgaaattgtgtty

SEQ ID NO: 218810 - DNA, 13 bp, Artificial Sequence
  Oligonucleotide for detection of SNP TSC0053217
raacacaatttca

SEQ ID NO: 218811 - DNA, 13 bp, Artificial Sequence
  Oligonucleotide for detection of SNP TSC0053217
tgaaattgcgtty

SEQ ID NO: 218812 - DNA, 13 bp, Artificial Sequence
  Oligonucleotide for detection of SNP TSC0053217
raacgcaatttca

SEQ ID NO: 218813 - DNA, 13 bp, Artificial Sequence
  Oligonucleotide for detection of SNP TSC0053217
tgaaatcgtgtty

SEQ ID NO: 218814 - DNA, 13 bp, Artificial Sequence
  Oligonucleotide for detection of SNP TSC0053217
raacacgatttca

SEQ ID NO: 218815 - DNA, 13 bp, Artificial Sequence
  Oligonucleotide for detection of SNP TSC0053217
tgaaatcgcgtty

SEQ ID NO: 218816 - DNA, 13 bp, Artificial Sequence
  Oligonucleotide for detection of SNP TSC0053217
raacgcgatttca

SEQ ID NO: 218817 - DNA, 13 bp, Artificial Sequence
  Oligonucleotide for detection of SNP TSC0053218
agtaaaagttaga

SEQ ID NO: 218818 - DNA, 13 bp, Artificial Sequence
  Oligonucleotide for detection of SNP TSC0053218
tctaacttttact

SEQ ID NO: 218819 - DNA, 13 bp, Artificial Sequence
  Oligonucleotide for detection of SNP TSC0053218
agtaaaggttaga

SEQ ID NO: 218820 - DNA, 13 bp, Artificial Sequence
  Oligonucleotide for detection of SNP TSC0053218
tctaacctttact

SEQ ID NO: 218821 - DNA, 13 bp, Artificial Sequence
  Oligonucleotide for detection of SNP TSC0053219
aaaaaaagtaaga

SEQ ID NO: 218822 - DNA, 13 bp, Artificial Sequence
  Oligonucleotide for detection of SNP TSC0053219
tcttacttttttt

SEQ ID NO: 218823 - DNA, 13 bp, Artificial Sequence
  Oligonucleotide for detection of SNP TSC0053219
aaaaaaggtaaga

SEQ ID NO: 218824 - DNA, 13 bp, Artificial Sequence
  Oligonucleotide for detection of SNP TSC0053219
tcttacctttttt

SEQ ID NO: 218825 - DNA, 13 bp, Artificial Sequence
  Oligonucleotide for detection of SNP TSC0053221
gtgattggtatga

SEQ ID NO: 218826 - DNA, 13 bp, Artificial Sequence
  Oligonucleotide for detection of SNP TSC0053221
tcataccaatcac

SEQ ID NO: 218827 - DNA, 13 bp, Artificial Sequence
  Oligonucleotide for detection of SNP TSC0053221
gtgattagtatga

SEQ ID NO: 218828 - DNA, 13 bp, Artificial Sequence
  Oligonucleotide for detection of SNP TSC0053221
tcatactaatcac

SEQ ID NO: 218829 - DNA, 13 bp, Artificial Sequence
  Oligonucleotide for detection of SNP TSC0053222
tttttaagaagay

SEQ ID NO: 218830 - DNA, 13 bp, Artificial Sequence
  Oligonucleotide for detection of SNP TSC0053222
rtcttcttaaaaa

SEQ ID NO: 218831 - DNA, 13 bp, Artificial Sequence
  Oligonucleotide for detection of SNP TSC0053222
tttttaggaagay

SEQ ID NO: 218832 - DNA, 13 bp, Artificial Sequence
  Oligonucleotide for detection of SNP TSC0053222
rtcttcctaaaaa

SEQ ID NO: 218833 - DNA, 13 bp, Artificial Sequence
  Oligonucleotide for detection of SNP TSC0053224
gtatttgtgataa

SEQ ID NO: 218834 - DNA, 13 bp, Artificial Sequence
  Oligonucleotide for detection of SNP TSC0053224
ttatcacaaatac

SEQ ID NO: 218835 - DNA, 13 bp, Artificial Sequence
  Oligonucleotide for detection of SNP TSC0053224
gtatttatgataa

SEQ ID NO: 218836 - DNA, 13 bp, Artificial Sequence
  Oligonucleotide for detection of SNP TSC0053224
ttatcataaatac

SEQ ID NO: 218837 - DNA, 13 bp, Artificial Sequence
  Oligonucleotide for detection of SNP TSC0053225
attttagattatt

SEQ ID NO: 218838 - DNA, 13 bp, Artificial Sequence
  Oligonucleotide for detection of SNP TSC0053225
aataatctaaaat

SEQ ID NO: 218839 - DNA, 13 bp, Artificial Sequence
  Oligonucleotide for detection of SNP TSC0053225
attttaaattatt

SEQ ID NO: 218840 - DNA, 13 bp, Artificial Sequence
  Oligonucleotide for detection of SNP TSC0053225
aataatttaaaat

SEQ ID NO: 218841 - DNA, 13 bp, Artificial Sequence
  Oligonucleotide for detection of SNP TSC0053226
tttgttaggatag

SEQ ID NO: 218842 - DNA, 13 bp, Artificial Sequence
  Oligonucleotide for detection of SNP TSC0053226
ctatcctaacaaa

SEQ ID NO: 218843 - DNA, 13 bp, Artificial Sequence
  Oligonucleotide for detection of SNP TSC0053226
tttgtttggatag

SEQ ID NO: 218844 - DNA, 13 bp, Artificial Sequence
  Oligonucleotide for detection of SNP TSC0053226
ctatccaaacaaa

SEQ ID NO: 218845 - DNA, 13 bp, Artificial Sequence
  Oligonucleotide for detection of SNP TSC0053226
ttattttgataga

SEQ ID NO: 218846 - DNA, 13 bp, Artificial Sequence
  Oligonucleotide for detection of SNP TSC0053226
tctatcaaaataa

SEQ ID NO: 218847 - DNA, 13 bp, Artificial Sequence
  Oligonucleotide for detection of SNP TSC0053226
ttatttagataga

SEQ ID NO: 218848 - DNA, 13 bp, Artificial Sequence
  Oligonucleotide for detection of SNP TSC0053226
tctatctaaataa

SEQ ID NO: 218849 - DNA, 13 bp, Artificial Sequence
  Oligonucleotide for detection of SNP TSC0053227
agtttaagaaaga

SEQ ID NO: 218850 - DNA, 13 bp, Artificial Sequence
  Oligonucleotide for detection of SNP TSC0053227
tctttcttaaact

SEQ ID NO: 218851 - DNA, 13 bp, Artificial Sequence
  Oligonucleotide for detection of SNP TSC0053227
agtttaggaaaga

SEQ ID NO: 218852 - DNA, 13 bp, Artificial Sequence
  Oligonucleotide for detection of SNP TSC0053227
tctttcctaaact

SEQ ID NO: 218853 - DNA, 13 bp, Artificial Sequence
  Oligonucleotide for detection of SNP TSC0053230
agtagaagtagty

SEQ ID NO: 218854 - DNA, 13 bp, Artificial Sequence
  Oligonucleotide for detection of SNP TSC0053230
ractacttctact

SEQ ID NO: 218855 - DNA, 13 bp, Artificial Sequence
  Oligonucleotide for detection of SNP TSC0053230
agtagaggtagty

SEQ ID NO: 218856 - DNA, 13 bp, Artificial Sequence
  Oligonucleotide for detection of SNP TSC0053230
ractacctctact

SEQ ID NO: 218857 - DNA, 13 bp, Artificial Sequence
  Oligonucleotide for detection of SNP TSC0053231
gtggtggatgagg

SEQ ID NO: 218858 - DNA, 13 bp, Artificial Sequence
  Oligonucleotide for detection of SNP TSC0053231
cctcatccaccac

SEQ ID NO: 218859 - DNA, 13 bp, Artificial Sequence
  Oligonucleotide for detection of SNP TSC0053231
gtggtgaatgagg

SEQ ID NO: 218860 - DNA, 13 bp, Artificial Sequence
  Oligonucleotide for detection of SNP TSC0053231
cctcattcaccac

SEQ ID NO: 218861 - DNA, 13 bp, Artificial Sequence
  Oligonucleotide for detection of SNP TSC0053232
ttttaggtagtta

SEQ ID NO: 218862 - DNA, 13 bp, Artificial Sequence
  Oligonucleotide for detection of SNP TSC0053232
taactacctaaaa

SEQ ID NO: 218863 - DNA, 13 bp, Artificial Sequence
  Oligonucleotide for detection of SNP TSC0053233
taggtgattttaa

SEQ ID NO: 218864 - DNA, 13 bp, Artificial Sequence
  Oligonucleotide for detection of SNP TSC0053233
ttaaaatcaccta

SEQ ID NO: 218865 - DNA, 13 bp, Artificial Sequence
  Oligonucleotide for detection of SNP TSC0053233
taggtggttttaa

SEQ ID NO: 218866 - DNA, 13 bp, Artificial Sequence
  Oligonucleotide for detection of SNP TSC0053233
ttaaaaccaccta

SEQ ID NO: 218867 - DNA, 13 bp, Artificial Sequence
  Oligonucleotide for detection of SNP TSC0053234
tttaaaattttgy

SEQ ID NO: 218868 - DNA, 13 bp, Artificial Sequence
  Oligonucleotide for detection of SNP TSC0053234
rcaaaattttaaa

SEQ ID NO: 218869 - DNA, 13 bp, Artificial Sequence
  Oligonucleotide for detection of SNP TSC0053234
tttaaagttttgy

SEQ ID NO: 218870 - DNA, 13 bp, Artificial Sequence
  Oligonucleotide for detection of SNP TSC0053234
rcaaaactttaaa

SEQ ID NO: 218871 - DNA, 13 bp, Artificial Sequence
  Oligonucleotide for detection of SNP TSC0053235
tggtgtaaatgty

SEQ ID NO: 218872 - DNA, 13 bp, Artificial Sequence
  Oligonucleotide for detection of SNP TSC0053235
racatttacacca

SEQ ID NO: 218873 - DNA, 13 bp, Artificial Sequence
  Oligonucleotide for detection of SNP TSC0053235
tggtgtgaatgty

SEQ ID NO: 218874 - DNA, 13 bp, Artificial Sequence
  Oligonucleotide for detection of SNP TSC0053235
racattcacacca

SEQ ID NO: 218875 - DNA, 13 bp, Artificial Sequence
  Oligonucleotide for detection of SNP TSC0053235
cggtgtaaatgty

SEQ ID NO: 218876 - DNA, 13 bp, Artificial Sequence
  Oligonucleotide for detection of SNP TSC0053235
racatttacaccg

SEQ ID NO: 218877 - DNA, 13 bp, Artificial Sequence
  Oligonucleotide for detection of SNP TSC0053235
cggtgtgaatgty

SEQ ID NO: 218878 - DNA, 13 bp, Artificial Sequence
  Oligonucleotide for detection of SNP TSC0053235
racattcacaccg

SEQ ID NO: 218879 - DNA, 13 bp, Artificial Sequence
  Oligonucleotide for detection of SNP TSC0053236
gtatttatgggga

SEQ ID NO: 218880 - DNA, 13 bp, Artificial Sequence
  Oligonucleotide for detection of SNP TSC0053236
tccccataaatac

SEQ ID NO: 218881 - DNA, 13 bp, Artificial Sequence
  Oligonucleotide for detection of SNP TSC0053236
gtatttgtgggga

SEQ ID NO: 218882 - DNA, 13 bp, Artificial Sequence
  Oligonucleotide for detection of SNP TSC0053236
tccccacaaatac

SEQ ID NO: 218883 - DNA, 13 bp, Artificial Sequence
  Oligonucleotide for detection of SNP TSC0053237
tttttagtagtta

SEQ ID NO: 218884 - DNA, 13 bp, Artificial Sequence
  Oligonucleotide for detection of SNP TSC0053237
taactactaaaaa

SEQ ID NO: 218885 - DNA, 13 bp, Artificial Sequence
  Oligonucleotide for detection of SNP TSC0053238
ataattagtttga

SEQ ID NO: 218886 - DNA, 13 bp, Artificial Sequence
  Oligonucleotide for detection of SNP TSC0053238
tcaaactaattat

SEQ ID NO: 218887 - DNA, 13 bp, Artificial Sequence
  Oligonucleotide for detection of SNP TSC0053238
ataattggtttga

SEQ ID NO: 218888 - DNA, 13 bp, Artificial Sequence
  Oligonucleotide for detection of SNP TSC0053238
tcaaaccaattat

SEQ ID NO: 218889 - DNA, 13 bp, Artificial Sequence
  Oligonucleotide for detection of SNP TSC0053238
ataatcggtttga

SEQ ID NO: 218890 - DNA, 13 bp, Artificial Sequence
  Oligonucleotide for detection of SNP TSC0053238
tcaaaccgattat

SEQ ID NO: 218891 - DNA, 13 bp, Artificial Sequence
  Oligonucleotide for detection of SNP TSC0053238
ttagattgattat

SEQ ID NO: 218892 - DNA, 13 bp, Artificial Sequence
  Oligonucleotide for detection of SNP TSC0053238
ataatcaatctaa

SEQ ID NO: 218893 - DNA, 13 bp, Artificial Sequence
  Oligonucleotide for detection of SNP TSC0053238
ttagatcgattat

SEQ ID NO: 218894 - DNA, 13 bp, Artificial Sequence
  Oligonucleotide for detection of SNP TSC0053238
ataatcgatctaa

SEQ ID NO: 218895 - DNA, 13 bp, Artificial Sequence
  Oligonucleotide for detection of SNP TSC0053239
tgttttattgtgy

SEQ ID NO: 218896 - DNA, 13 bp, Artificial Sequence
  Oligonucleotide for detection of SNP TSC0053239
rcacaataaaaca

SEQ ID NO: 218897 - DNA, 13 bp, Artificial Sequence
  Oligonucleotide for detection of SNP TSC0053239
gtataatgggata

SEQ ID NO: 218898 - DNA, 13 bp, Artificial Sequence
  Oligonucleotide for detection of SNP TSC0053239
tatcccattatac

SEQ ID NO: 218899 - DNA, 13 bp, Artificial Sequence
  Oligonucleotide for detection of SNP TSC0053239
gtataacgggata

SEQ ID NO: 218900 - DNA, 13 bp, Artificial Sequence
  Oligonucleotide for detection of SNP TSC0053239
tatcccgttatac

SEQ ID NO: 218901 - DNA, 13 bp, Artificial Sequence
  Oligonucleotide for detection of SNP TSC0053241
gattagtatgtgg

SEQ ID NO: 218902 - DNA, 13 bp, Artificial Sequence
  Oligonucleotide for detection of SNP TSC0053241
ccacatactaatc

SEQ ID NO: 218903 - DNA, 13 bp, Artificial Sequence
  Oligonucleotide for detection of SNP TSC0053241
gattaggatgtgg

SEQ ID NO: 218904 - DNA, 13 bp, Artificial Sequence
  Oligonucleotide for detection of SNP TSC0053241
ccacatcctaatc

SEQ ID NO: 218905 - DNA, 13 bp, Artificial Sequence
  Oligonucleotide for detection of SNP TSC0053241
ttatattttaaty

SEQ ID NO: 218906 - DNA, 13 bp, Artificial Sequence
  Oligonucleotide for detection of SNP TSC0053241
rattaaaatataa

SEQ ID NO: 218907 - DNA, 13 bp, Artificial Sequence
  Oligonucleotide for detection of SNP TSC0053246
tttaggggtatag

SEQ ID NO: 218908 - DNA, 13 bp, Artificial Sequence
  Oligonucleotide for detection of SNP TSC0053246
ctatacccctaaa

SEQ ID NO: 218909 - DNA, 13 bp, Artificial Sequence
  Oligonucleotide for detection of SNP TSC0053246
tttaggagtatag

SEQ ID NO: 218910 - DNA, 13 bp, Artificial Sequence
  Oligonucleotide for detection of SNP TSC0053246
ctatactcctaaa

SEQ ID NO: 218911 - DNA, 13 bp, Artificial Sequence
  Oligonucleotide for detection of SNP TSC0053247
taaagaagaaatg

SEQ ID NO: 218912 - DNA, 13 bp, Artificial Sequence
  Oligonucleotide for detection of SNP TSC0053247
catttcttcttta

SEQ ID NO: 218913 - DNA, 13 bp, Artificial Sequence
  Oligonucleotide for detection of SNP TSC0053247
taaagaggaaatg

SEQ ID NO: 218914 - DNA, 13 bp, Artificial Sequence
  Oligonucleotide for detection of SNP TSC0053247
catttcctcttta

SEQ ID NO: 218915 - DNA, 13 bp, Artificial Sequence
  Oligonucleotide for detection of SNP TSC0053248
tagtatatagaat

SEQ ID NO: 218916 - DNA, 13 bp, Artificial Sequence
  Oligonucleotide for detection of SNP TSC0053248
attctatatacta

SEQ ID NO: 218917 - DNA, 13 bp, Artificial Sequence
  Oligonucleotide for detection of SNP TSC0053248
tagtatgtagaat

SEQ ID NO: 218918 - DNA, 13 bp, Artificial Sequence
  Oligonucleotide for detection of SNP TSC0053248
attctacatacta

SEQ ID NO: 218919 - DNA, 13 bp, Artificial Sequence
  Oligonucleotide for detection of SNP TSC0053252
ggatttttttatg

SEQ ID NO: 218920 - DNA, 13 bp, Artificial Sequence
  Oligonucleotide for detection of SNP TSC0053252
cataaaaaaatcc

SEQ ID NO: 218921 - DNA, 13 bp, Artificial Sequence
  Oligonucleotide for detection of SNP TSC0053252
ggatttgtttatg

SEQ ID NO: 218922 - DNA, 13 bp, Artificial Sequence
  Oligonucleotide for detection of SNP TSC0053252
cataaacaaatcc

SEQ ID NO: 218923 - DNA, 13 bp, Artificial Sequence
  Oligonucleotide for detection of SNP TSC0053252
tatgaggagatty

SEQ ID NO: 218924 - DNA, 13 bp, Artificial Sequence
  Oligonucleotide for detection of SNP TSC0053252
raatctcctcata

SEQ ID NO: 218925 - DNA, 13 bp, Artificial Sequence
  Oligonucleotide for detection of SNP TSC0053252
tatgagtagatty

SEQ ID NO: 218926 - DNA, 13 bp, Artificial Sequence
  Oligonucleotide for detection of SNP TSC0053252
raatctactcata

SEQ ID NO: 218927 - DNA, 13 bp, Artificial Sequence
  Oligonucleotide for detection of SNP TSC0053253
tagataaggtatg

SEQ ID NO: 218928 - DNA, 13 bp, Artificial Sequence
  Oligonucleotide for detection of SNP TSC0053253
cataccttatcta

SEQ ID NO: 218929 - DNA, 13 bp, Artificial Sequence
  Oligonucleotide for detection of SNP TSC0053253
tagatagggtatg

SEQ ID NO: 218930 - DNA, 13 bp, Artificial Sequence
  Oligonucleotide for detection of SNP TSC0053253
cataccctatcta

SEQ ID NO: 218931 - DNA, 13 bp, Artificial Sequence
  Oligonucleotide for detection of SNP TSC0053254
atttgtgtaaaaa

SEQ ID NO: 218932 - DNA, 13 bp, Artificial Sequence
  Oligonucleotide for detection of SNP TSC0053254
tttttacacaaat

SEQ ID NO: 218933 - DNA, 13 bp, Artificial Sequence
  Oligonucleotide for detection of SNP TSC0053254
atttgtataaaaa

SEQ ID NO: 218934 - DNA, 13 bp, Artificial Sequence
  Oligonucleotide for detection of SNP TSC0053254
tttttatacaaat

SEQ ID NO: 218935 - DNA, 13 bp, Artificial Sequence
  Oligonucleotide for detection of SNP TSC0053255
aggagggagaagg

SEQ ID NO: 218936 - DNA, 13 bp, Artificial Sequence
  Oligonucleotide for detection of SNP TSC0053255
ccttctccctcct

SEQ ID NO: 218937 - DNA, 13 bp, Artificial Sequence
  Oligonucleotide for detection of SNP TSC0053255
aggaggtagaagg

SEQ ID NO: 218938 - DNA, 13 bp, Artificial Sequence
  Oligonucleotide for detection of SNP TSC0053255
ccttctacctcct

SEQ ID NO: 218939 - DNA, 13 bp, Artificial Sequence
  Oligonucleotide for detection of SNP TSC0053257
tgttttatatttg

SEQ ID NO: 218940 - DNA, 13 bp, Artificial Sequence
  Oligonucleotide for detection of SNP TSC0053257
caaatataaaaca

SEQ ID NO: 218941 - DNA, 13 bp, Artificial Sequence
  Oligonucleotide for detection of SNP TSC0053257
tgttttgtatttg

SEQ ID NO: 218942 - DNA, 13 bp, Artificial Sequence
  Oligonucleotide for detection of SNP TSC0053257
caaatacaaaaca

SEQ ID NO: 218943 - DNA, 13 bp, Artificial Sequence
  Oligonucleotide for detection of SNP TSC0053257
cgttttatatttg

SEQ ID NO: 218944 - DNA, 13 bp, Artificial Sequence
  Oligonucleotide for detection of SNP TSC0053257
caaatataaaacg

SEQ ID NO: 218945 - DNA, 13 bp, Artificial Sequence
  Oligonucleotide for detection of SNP TSC0053257
cgttttgtatttg

SEQ ID NO: 218946 - DNA, 13 bp, Artificial Sequence
  Oligonucleotide for detection of SNP TSC0053257
caaatacaaaacg

SEQ ID NO: 218947 - DNA, 13 bp, Artificial Sequence
  Oligonucleotide for detection of SNP TSC0053257
tgtttcgtatttg

SEQ ID NO: 218948 - DNA, 13 bp, Artificial Sequence
  Oligonucleotide for detection of SNP TSC0053257
caaatacgaaaca

SEQ ID NO: 218949 - DNA, 13 bp, Artificial Sequence
  Oligonucleotide for detection of SNP TSC0053257
cgtttcgtatttg

SEQ ID NO: 218950 - DNA, 13 bp, Artificial Sequence
  Oligonucleotide for detection of SNP TSC0053257
caaatacgaaacg

SEQ ID NO: 218951 - DNA, 13 bp, Artificial Sequence
  Oligonucleotide for detection of SNP TSC0053257
tagatatgaggtg

SEQ ID NO: 218952 - DNA, 13 bp, Artificial Sequence
  Oligonucleotide for detection of SNP TSC0053257
cacctcatatcta

SEQ ID NO: 218953 - DNA, 13 bp, Artificial Sequence
  Oligonucleotide for detection of SNP TSC0053257
tagatatgaggcg

SEQ ID NO: 218954 - DNA, 13 bp, Artificial Sequence
  Oligonucleotide for detection of SNP TSC0053257
cgcctcatatcta

SEQ ID NO: 218955 - DNA, 13 bp, Artificial Sequence
  Oligonucleotide for detection of SNP TSC0053257
tagatacgaggtg

SEQ ID NO: 218956 - DNA, 13 bp, Artificial Sequence
  Oligonucleotide for detection of SNP TSC0053257
cacctcgtatcta

SEQ ID NO: 218957 - DNA, 13 bp, Artificial Sequence
  Oligonucleotide for detection of SNP TSC0053257
tagatacgaggcg

SEQ ID NO: 218958 - DNA, 13 bp, Artificial Sequence
  Oligonucleotide for detection of SNP TSC0053257
cgcctcgtatcta

SEQ ID NO: 218959 - DNA, 13 bp, Artificial Sequence
  Oligonucleotide for detection of SNP TSC0053258
attattttgaggg

SEQ ID NO: 218960 - DNA, 13 bp, Artificial Sequence
  Oligonucleotide for detection of SNP TSC0053258
ccctcaaaataat

SEQ ID NO: 218961 - DNA, 13 bp, Artificial Sequence
  Oligonucleotide for detection of SNP TSC0053258
attattgtgaggg

SEQ ID NO: 218962 - DNA, 13 bp, Artificial Sequence
  Oligonucleotide for detection of SNP TSC0053258
ccctcacaataat

SEQ ID NO: 218963 - DNA, 13 bp, Artificial Sequence
  Oligonucleotide for detection of SNP TSC0053258
attatttcgaggg

SEQ ID NO: 218964 - DNA, 13 bp, Artificial Sequence
  Oligonucleotide for detection of SNP TSC0053258
ccctcgaaataat

SEQ ID NO: 218965 - DNA, 13 bp, Artificial Sequence
  Oligonucleotide for detection of SNP TSC0053258
attattgcgaggg

SEQ ID NO: 218966 - DNA, 13 bp, Artificial Sequence
  Oligonucleotide for detection of SNP TSC0053258
ccctcgcaataat

SEQ ID NO: 218967 - DNA, 13 bp, Artificial Sequence
  Oligonucleotide for detection of SNP TSC0053258
tttttggaatggt

SEQ ID NO: 218968 - DNA, 13 bp, Artificial Sequence
  Oligonucleotide for detection of SNP TSC0053258
accattccaaaaa

SEQ ID NO: 218969 - DNA, 13 bp, Artificial Sequence
  Oligonucleotide for detection of SNP TSC0053258
tttttgtaatggt

SEQ ID NO: 218970 - DNA, 13 bp, Artificial Sequence
  Oligonucleotide for detection of SNP TSC0053258
accattacaaaaa

SEQ ID NO: 218971 - DNA, 13 bp, Artificial Sequence
  Oligonucleotide for detection of SNP TSC0053258
ttttcggaatggt

SEQ ID NO: 218972 - DNA, 13 bp, Artificial Sequence
  Oligonucleotide for detection of SNP TSC0053258
accattccgaaaa

SEQ ID NO: 218973 - DNA, 13 bp, Artificial Sequence
  Oligonucleotide for detection of SNP TSC0053258
ttttcgtaatggt

SEQ ID NO: 218974 - DNA, 13 bp, Artificial Sequence
  Oligonucleotide for detection of SNP TSC0053258
accattacgaaaa

SEQ ID NO: 218975 - DNA, 13 bp, Artificial Sequence
  Oligonucleotide for detection of SNP TSC0053259
ttgtttggagata

SEQ ID NO: 218976 - DNA, 13 bp, Artificial Sequence
  Oligonucleotide for detection of SNP TSC0053259
tatctccaaacaa

SEQ ID NO: 218977 - DNA, 13 bp, Artificial Sequence
  Oligonucleotide for detection of SNP TSC0053259
ttgtttagagata

SEQ ID NO: 218978 - DNA, 13 bp, Artificial Sequence
  Oligonucleotide for detection of SNP TSC0053259
tatctctaaacaa

SEQ ID NO: 218979 - DNA, 13 bp, Artificial Sequence
  Oligonucleotide for detection of SNP TSC0053259
ttgttcggagata

SEQ ID NO: 218980 - DNA, 13 bp, Artificial Sequence
  Oligonucleotide for detection of SNP TSC0053259
tatctccgaacaa

SEQ ID NO: 218981 - DNA, 13 bp, Artificial Sequence
  Oligonucleotide for detection of SNP TSC0053260
agtttatgtgaty

SEQ ID NO: 218982 - DNA, 13 bp, Artificial Sequence
  Oligonucleotide for detection of SNP TSC0053260
ratcacataaact

SEQ ID NO: 218983 - DNA, 13 bp, Artificial Sequence
  Oligonucleotide for detection of SNP TSC0053260
agtttacgtgaty

SEQ ID NO: 218984 - DNA, 13 bp, Artificial Sequence
  Oligonucleotide for detection of SNP TSC0053260
ratcacgtaaact

SEQ ID NO: 218985 - DNA, 13 bp, Artificial Sequence
  Oligonucleotide for detection of SNP TSC0053260
gattatgtgggtt

SEQ ID NO: 218986 - DNA, 13 bp, Artificial Sequence
  Oligonucleotide for detection of SNP TSC0053260
aacccacataatc

SEQ ID NO: 218987 - DNA, 13 bp, Artificial Sequence
  Oligonucleotide for detection of SNP TSC0053260
gattatatgggtt

SEQ ID NO: 218988 - DNA, 13 bp, Artificial Sequence
  Oligonucleotide for detection of SNP TSC0053260
aacccatataatc

SEQ ID NO: 218989 - DNA, 13 bp, Artificial Sequence
  Oligonucleotide for detection of SNP TSC0053260
gattacgtgggtt

SEQ ID NO: 218990 - DNA, 13 bp, Artificial Sequence
  Oligonucleotide for detection of SNP TSC0053260
aacccacgtaatc

SEQ ID NO: 218991 - DNA, 13 bp, Artificial Sequence
  Oligonucleotide for detection of SNP TSC0053261
taatattgtatta

SEQ ID NO: 218992 - DNA, 13 bp, Artificial Sequence
  Oligonucleotide for detection of SNP TSC0053261
taatacaatatta

SEQ ID NO: 218993 - DNA, 13 bp, Artificial Sequence
  Oligonucleotide for detection of SNP TSC0053261
taatatggtatta

SEQ ID NO: 218994 - DNA, 13 bp, Artificial Sequence
  Oligonucleotide for detection of SNP TSC0053261
taataccatatta

SEQ ID NO: 218995 - DNA, 13 bp, Artificial Sequence
  Oligonucleotide for detection of SNP TSC0053261
taatacggtatta

SEQ ID NO: 218996 - DNA, 13 bp, Artificial Sequence
  Oligonucleotide for detection of SNP TSC0053261
taataccgtatta

SEQ ID NO: 218997 - DNA, 13 bp, Artificial Sequence
  Oligonucleotide for detection of SNP TSC0053261
tggtgtagtatta

SEQ ID NO: 218998 - DNA, 13 bp, Artificial Sequence
  Oligonucleotide for detection of SNP TSC0053261
taatactacacca

SEQ ID NO: 218999 - DNA, 13 bp, Artificial Sequence
  Oligonucleotide for detection of SNP TSC0053261
tggtgttgtatta

SEQ ID NO: 219000 - DNA, 13 bp, Artificial Sequence
  Oligonucleotide for detection of SNP TSC0053261
taatacaacacca

SEQ ID NO: 219001 - DNA, 13 bp, Artificial Sequence
  Oligonucleotide for detection of SNP TSC0053261
tggtgtcgtatta

SEQ ID NO: 219002 - DNA, 13 bp, Artificial Sequence
  Oligonucleotide for detection of SNP TSC0053261
taatacgacacca

SEQ ID NO: 219003 - DNA, 13 bp, Artificial Sequence
  Oligonucleotide for detection of SNP TSC0053262
tattatattattt

SEQ ID NO: 219004 - DNA, 13 bp, Artificial Sequence
  Oligonucleotide for detection of SNP TSC0053262
aaataatataata

SEQ ID NO: 219005 - DNA, 13 bp, Artificial Sequence
  Oligonucleotide for detection of SNP TSC0053262
tattatgttattt

SEQ ID NO: 219006 - DNA, 13 bp, Artificial Sequence
  Oligonucleotide for detection of SNP TSC0053262
aaataacataata

SEQ ID NO: 219007 - DNA, 13 bp, Artificial Sequence
  Oligonucleotide for detection of SNP TSC0053263
gagaagatgaaty

SEQ ID NO: 219008 - DNA, 13 bp, Artificial Sequence
  Oligonucleotide for detection of SNP TSC0053263
rattcatcttctc

SEQ ID NO: 219009 - DNA, 13 bp, Artificial Sequence
  Oligonucleotide for detection of SNP TSC0053263
gagaagttgaaty

SEQ ID NO: 219010 - DNA, 13 bp, Artificial Sequence
  Oligonucleotide for detection of SNP TSC0053263
rattcaacttctc

SEQ ID NO: 219011 - DNA, 13 bp, Artificial Sequence
  Oligonucleotide for detection of SNP TSC0053263
gatttaattttty

SEQ ID NO: 219012 - DNA, 13 bp, Artificial Sequence
  Oligonucleotide for detection of SNP TSC0053263
raaaaattaaatc

SEQ ID NO: 219013 - DNA, 13 bp, Artificial Sequence
  Oligonucleotide for detection of SNP TSC0053264
atttttttttgtg

SEQ ID NO: 219014 - DNA, 13 bp, Artificial Sequence
  Oligonucleotide for detection of SNP TSC0053264
cacaaaaaaaaat

SEQ ID NO: 219015 - DNA, 13 bp, Artificial Sequence
  Oligonucleotide for detection of SNP TSC0053264
atttttgtttgtg

SEQ ID NO: 219016 - DNA, 13 bp, Artificial Sequence
  Oligonucleotide for detection of SNP TSC0053264
cacaaacaaaaat

SEQ ID NO: 219017 - DNA, 13 bp, Artificial Sequence
  Oligonucleotide for detection of SNP TSC0053264
tataaagagaagt

SEQ ID NO: 219018 - DNA, 13 bp, Artificial Sequence
  Oligonucleotide for detection of SNP TSC0053264
acttctctttata

SEQ ID NO: 219019 - DNA, 13 bp, Artificial Sequence
  Oligonucleotide for detection of SNP TSC0053264
tataaatagaagt

SEQ ID NO: 219020 - DNA, 13 bp, Artificial Sequence
  Oligonucleotide for detection of SNP TSC0053264
acttctatttata

SEQ ID NO: 219021 - DNA, 13 bp, Artificial Sequence
  Oligonucleotide for detection of SNP TSC0006608
atatttttaggty

SEQ ID NO: 219022 - DNA, 13 bp, Artificial Sequence
  Oligonucleotide for detection of SNP TSC0006608
racctaaaaatat

SEQ ID NO: 219023 - DNA, 13 bp, Artificial Sequence
  Oligonucleotide for detection of SNP TSC0006608
atatttgtaggty

SEQ ID NO: 219024 - DNA, 13 bp, Artificial Sequence
  Oligonucleotide for detection of SNP TSC0006608
racctacaaatat

SEQ ID NO: 219025 - DNA, 13 bp, Artificial Sequence
  Oligonucleotide for detection of SNP TSC0006608
ggtttagaaatat

SEQ ID NO: 219026 - DNA, 13 bp, Artificial Sequence
  Oligonucleotide for detection of SNP TSC0006608
atatttctaaacc

SEQ ID NO: 219027 - DNA, 13 bp, Artificial Sequence
  Oligonucleotide for detection of SNP TSC0006608
ggtttataaatat

SEQ ID NO: 219028 - DNA, 13 bp, Artificial Sequence
  Oligonucleotide for detection of SNP TSC0006608
atatttataaacc

SEQ ID NO: 219029 - DNA, 13 bp, Artificial Sequence
  Oligonucleotide for detection of SNP TSC0053265
gtttgaataatgy

SEQ ID NO: 219030 - DNA, 13 bp, Artificial Sequence
  Oligonucleotide for detection of SNP TSC0053265
rcattattcaaac

SEQ ID NO: 219031 - DNA, 13 bp, Artificial Sequence
  Oligonucleotide for detection of SNP TSC0053265
gtttgattaatgy

SEQ ID NO: 219032 - DNA, 13 bp, Artificial Sequence
  Oligonucleotide for detection of SNP TSC0053265
rcattaatcaaac

SEQ ID NO: 219033 - DNA, 13 bp, Artificial Sequence
  Oligonucleotide for detection of SNP TSC0053265
gtattgtttaaay

SEQ ID NO: 219034 - DNA, 13 bp, Artificial Sequence
  Oligonucleotide for detection of SNP TSC0053265
rtttaaacaatac

SEQ ID NO: 219035 - DNA, 13 bp, Artificial Sequence
  Oligonucleotide for detection of SNP TSC0053265
gtattgattaaay

SEQ ID NO: 219036 - DNA, 13 bp, Artificial Sequence
  Oligonucleotide for detection of SNP TSC0053265
rtttaatcaatac

SEQ ID NO: 219037 - DNA, 13 bp, Artificial Sequence
  Oligonucleotide for detection of SNP TSC0053271
gtgtttatatggg

SEQ ID NO: 219038 - DNA, 13 bp, Artificial Sequence
  Oligonucleotide for detection of SNP TSC0053271
cccatataaacac

SEQ ID NO: 219039 - DNA, 13 bp, Artificial Sequence
  Oligonucleotide for detection of SNP TSC0053271
gtgtttgtatggg

SEQ ID NO: 219040 - DNA, 13 bp, Artificial Sequence
  Oligonucleotide for detection of SNP TSC0053271
cccatacaaacac

SEQ ID NO: 219041 - DNA, 13 bp, Artificial Sequence
  Oligonucleotide for detection of SNP TSC0053272
gtagttttgaatt

SEQ ID NO: 219042 - DNA, 13 bp, Artificial Sequence
  Oligonucleotide for detection of SNP TSC0053272
aattcaaaactac

SEQ ID NO: 219043 - DNA, 13 bp, Artificial Sequence
  Oligonucleotide for detection of SNP TSC0053272
gtagttgtgaatt

SEQ ID NO: 219044 - DNA, 13 bp, Artificial Sequence
  Oligonucleotide for detection of SNP TSC0053272
aattcacaactac

SEQ ID NO: 219045 - DNA, 13 bp, Artificial Sequence
  Oligonucleotide for detection of SNP TSC0053272
gtagtttcgaatt

SEQ ID NO: 219046 - DNA, 13 bp, Artificial Sequence
  Oligonucleotide for detection of SNP TSC0053272
aattcgaaactac

SEQ ID NO: 219047 - DNA, 13 bp, Artificial Sequence
  Oligonucleotide for detection of SNP TSC0053272
gtagtcgtgaatt

SEQ ID NO: 219048 - DNA, 13 bp, Artificial Sequence
  Oligonucleotide for detection of SNP TSC0053272
aattcacgactac

SEQ ID NO: 219049 - DNA, 13 bp, Artificial Sequence
  Oligonucleotide for detection of SNP TSC0053272
gtagttgcgaatt

SEQ ID NO: 219050 - DNA, 13 bp, Artificial Sequence
  Oligonucleotide for detection of SNP TSC0053272
aattcgcaactac

SEQ ID NO: 219051 - DNA, 13 bp, Artificial Sequence
  Oligonucleotide for detection of SNP TSC0053272
gtagtcgcgaatt

SEQ ID NO: 219052 - DNA, 13 bp, Artificial Sequence
  Oligonucleotide for detection of SNP TSC0053272
aattcgcgactac

SEQ ID NO: 219053 - DNA, 13 bp, Artificial Sequence
  Oligonucleotide for detection of SNP TSC0053272
agttcgaggttgy

SEQ ID NO: 219054 - DNA, 13 bp, Artificial Sequence
  Oligonucleotide for detection of SNP TSC0053272
rcaacctcgaact

SEQ ID NO: 219055 - DNA, 13 bp, Artificial Sequence
  Oligonucleotide for detection of SNP TSC0053272
agttcgtggttgy

SEQ ID NO: 219056 - DNA, 13 bp, Artificial Sequence
  Oligonucleotide for detection of SNP TSC0053272
rcaaccacgaact

SEQ ID NO: 219057 - DNA, 13 bp, Artificial Sequence
  Oligonucleotide for detection of SNP TSC0053272
agtttgcggttgy

SEQ ID NO: 219058 - DNA, 13 bp, Artificial Sequence
  Oligonucleotide for detection of SNP TSC0053272
rcaaccgcaaact

SEQ ID NO: 219059 - DNA, 13 bp, Artificial Sequence
  Oligonucleotide for detection of SNP TSC0053272
agttcgcggttgy

SEQ ID NO: 219060 - DNA, 13 bp, Artificial Sequence
  Oligonucleotide for detection of SNP TSC0053272
rcaaccgcgaact

SEQ ID NO: 219061 - DNA, 13 bp, Artificial Sequence
  Oligonucleotide for detection of SNP TSC0053273
tttattatgtttg

SEQ ID NO: 219062 - DNA, 13 bp, Artificial Sequence
  Oligonucleotide for detection of SNP TSC0053273
caaacataataaa

SEQ ID NO: 219063 - DNA, 13 bp, Artificial Sequence
  Oligonucleotide for detection of SNP TSC0053273
tttattgtgtttg

SEQ ID NO: 219064 - DNA, 13 bp, Artificial Sequence
  Oligonucleotide for detection of SNP TSC0053273
caaacacaataaa

SEQ ID NO: 219065 - DNA, 13 bp, Artificial Sequence
  Oligonucleotide for detection of SNP TSC0053273
tttatcgtgtttg

SEQ ID NO: 219066 - DNA, 13 bp, Artificial Sequence
  Oligonucleotide for detection of SNP TSC0053273
caaacacgataaa

SEQ ID NO: 219067 - DNA, 13 bp, Artificial Sequence
  Oligonucleotide for detection of SNP TSC0053273
taaatatgataaa

SEQ ID NO: 219068 - DNA, 13 bp, Artificial Sequence
  Oligonucleotide for detection of SNP TSC0053273
tttatcatattta

SEQ ID NO: 219069 - DNA, 13 bp, Artificial Sequence
  Oligonucleotide for detection of SNP TSC0053274
tagggaggtttty

SEQ ID NO: 219070 - DNA, 13 bp, Artificial Sequence
  Oligonucleotide for detection of SNP TSC0053274
raaaacctcccta

SEQ ID NO: 219071 - DNA, 13 bp, Artificial Sequence
  Oligonucleotide for detection of SNP TSC0053274
tagggaagtttty

SEQ ID NO: 219072 - DNA, 13 bp, Artificial Sequence
  Oligonucleotide for detection of SNP TSC0053274
raaaacttcccta

SEQ ID NO: 219073 - DNA, 13 bp, Artificial Sequence
  Oligonucleotide for detection of SNP TSC0053275
ggatggatttggt

SEQ ID NO: 219074 - DNA, 13 bp, Artificial Sequence
  Oligonucleotide for detection of SNP TSC0053275
accaaatccatcc

SEQ ID NO: 219075 - DNA, 13 bp, Artificial Sequence
  Oligonucleotide for detection of SNP TSC0053275
ggatggttttggt

SEQ ID NO: 219076 - DNA, 13 bp, Artificial Sequence
  Oligonucleotide for detection of SNP TSC0053275
accaaaaccatcc

SEQ ID NO: 219077 - DNA, 13 bp, Artificial Sequence
  Oligonucleotide for detection of SNP TSC0053275
ggatggattcggt

SEQ ID NO: 219078 - DNA, 13 bp, Artificial Sequence
  Oligonucleotide for detection of SNP TSC0053275
accgaatccatcc

SEQ ID NO: 219079 - DNA, 13 bp, Artificial Sequence
  Oligonucleotide for detection of SNP TSC0053275
ggatggtttcggt

SEQ ID NO: 219080 - DNA, 13 bp, Artificial Sequence
  Oligonucleotide for detection of SNP TSC0053275
accgaaaccatcc

SEQ ID NO: 219081 - DNA, 13 bp, Artificial Sequence
  Oligonucleotide for detection of SNP TSC0053275
attgaatttatty

SEQ ID NO: 219082 - DNA, 13 bp, Artificial Sequence
  Oligonucleotide for detection of SNP TSC0053275
raataaattcaat

SEQ ID NO: 219083 - DNA, 13 bp, Artificial Sequence
  Oligonucleotide for detection of SNP TSC0053275
attgaagttatty

SEQ ID NO: 219084 - DNA, 13 bp, Artificial Sequence
  Oligonucleotide for detection of SNP TSC0053275
raataacttcaat

SEQ ID NO: 219085 - DNA, 13 bp, Artificial Sequence
  Oligonucleotide for detection of SNP TSC0053275
atcgaatttatty

SEQ ID NO: 219086 - DNA, 13 bp, Artificial Sequence
  Oligonucleotide for detection of SNP TSC0053275
raataaattcgat

SEQ ID NO: 219087 - DNA, 13 bp, Artificial Sequence
  Oligonucleotide for detection of SNP TSC0053275
atcgaagttatty

SEQ ID NO: 219088 - DNA, 13 bp, Artificial Sequence
  Oligonucleotide for detection of SNP TSC0053275
raataacttcgat

SEQ ID NO: 219089 - DNA, 13 bp, Artificial Sequence
  Oligonucleotide for detection of SNP TSC0053276
attgggaaaagga

SEQ ID NO: 219090 - DNA, 13 bp, Artificial Sequence
  Oligonucleotide for detection of SNP TSC0053276
tccttttcccaat

SEQ ID NO: 219091 - DNA, 13 bp, Artificial Sequence
  Oligonucleotide for detection of SNP TSC0053276
attggggaaagga

SEQ ID NO: 219092 - DNA, 13 bp, Artificial Sequence
  Oligonucleotide for detection of SNP TSC0053276
tcctttccccaat

SEQ ID NO: 219093 - DNA, 13 bp, Artificial Sequence
  Oligonucleotide for detection of SNP TSC0053277
tttttgaagttat

SEQ ID NO: 219094 - DNA, 13 bp, Artificial Sequence
  Oligonucleotide for detection of SNP TSC0053277
ataacttcaaaaa

SEQ ID NO: 219095 - DNA, 13 bp, Artificial Sequence
  Oligonucleotide for detection of SNP TSC0053277
tttttggagttat

SEQ ID NO: 219096 - DNA, 13 bp, Artificial Sequence
  Oligonucleotide for detection of SNP TSC0053277
ataactccaaaaa

SEQ ID NO: 219097 - DNA, 13 bp, Artificial Sequence
  Oligonucleotide for detection of SNP TSC0053278
gaaaataatatta

SEQ ID NO: 219098 - DNA, 13 bp, Artificial Sequence
  Oligonucleotide for detection of SNP TSC0053278
taatattattttc

SEQ ID NO: 219099 - DNA, 13 bp, Artificial Sequence
  Oligonucleotide for detection of SNP TSC0053278
gaaaatgatatta

SEQ ID NO: 219100 - DNA, 13 bp, Artificial Sequence
  Oligonucleotide for detection of SNP TSC0053278
taatatcattttc

SEQ ID NO: 219101 - DNA, 13 bp, Artificial Sequence
  Oligonucleotide for detection of SNP TSC0053279
tttaggtgtttta

SEQ ID NO: 219102 - DNA, 13 bp, Artificial Sequence
  Oligonucleotide for detection of SNP TSC0053279
taaaacacctaaa

SEQ ID NO: 219103 - DNA, 13 bp, Artificial Sequence
  Oligonucleotide for detection of SNP TSC0053279
tttaggcgtttta

SEQ ID NO: 219104 - DNA, 13 bp, Artificial Sequence
  Oligonucleotide for detection of SNP TSC0053279
taaaacgcctaaa

SEQ ID NO: 219105 - DNA, 13 bp, Artificial Sequence
  Oligonucleotide for detection of SNP TSC0053279
tgagatgtttaag

SEQ ID NO: 219106 - DNA, 13 bp, Artificial Sequence
  Oligonucleotide for detection of SNP TSC0053279
cttaaacatctca

SEQ ID NO: 219107 - DNA, 13 bp, Artificial Sequence
  Oligonucleotide for detection of SNP TSC0053279
tgagatatttaag

SEQ ID NO: 219108 - DNA, 13 bp, Artificial Sequence
  Oligonucleotide for detection of SNP TSC0053279
cttaaatatctca

SEQ ID NO: 219109 - DNA, 13 bp, Artificial Sequence
  Oligonucleotide for detection of SNP TSC0053279
tgagacgtttaag

SEQ ID NO: 219110 - DNA, 13 bp, Artificial Sequence
  Oligonucleotide for detection of SNP TSC0053279
cttaaacgtctca

SEQ ID NO: 219111 - DNA, 13 bp, Artificial Sequence
  Oligonucleotide for detection of SNP TSC0053280
gtgttagattttt

SEQ ID NO: 219112 - DNA, 13 bp, Artificial Sequence
  Oligonucleotide for detection of SNP TSC0053280
aaaaatctaacac

SEQ ID NO: 219113 - DNA, 13 bp, Artificial Sequence
  Oligonucleotide for detection of SNP TSC0053280
gtgttaaattttt

SEQ ID NO: 219114 - DNA, 13 bp, Artificial Sequence
  Oligonucleotide for detection of SNP TSC0053280
aaaaatttaacac

SEQ ID NO: 219115 - DNA, 13 bp, Artificial Sequence
  Oligonucleotide for detection of SNP TSC0053281
agtagggaattga

SEQ ID NO: 219116 - DNA, 13 bp, Artificial Sequence
  Oligonucleotide for detection of SNP TSC0053281
tcaattccctact

SEQ ID NO: 219117 - DNA, 13 bp, Artificial Sequence
  Oligonucleotide for detection of SNP TSC0053281
agtaggaaattga

SEQ ID NO: 219118 - DNA, 13 bp, Artificial Sequence
  Oligonucleotide for detection of SNP TSC0053281
tcaatttcctact

SEQ ID NO: 219119 - DNA, 13 bp, Artificial Sequence
  Oligonucleotide for detection of SNP TSC0053283
ttagtaaataaat

SEQ ID NO: 219120 - DNA, 13 bp, Artificial Sequence
  Oligonucleotide for detection of SNP TSC0053283
atttatttactaa

SEQ ID NO: 219121 - DNA, 13 bp, Artificial Sequence
  Oligonucleotide for detection of SNP TSC0053283
ttagtagataaat

SEQ ID NO: 219122 - DNA, 13 bp, Artificial Sequence
  Oligonucleotide for detection of SNP TSC0053283
atttatctactaa

SEQ ID NO: 219123 - DNA, 13 bp, Artificial Sequence
  Oligonucleotide for detection of SNP TSC0053284
tagaataggttay

SEQ ID NO: 219124 - DNA, 13 bp, Artificial Sequence
  Oligonucleotide for detection of SNP TSC0053284
rtaacctattcta

SEQ ID NO: 219125 - DNA, 13 bp, Artificial Sequence
  Oligonucleotide for detection of SNP TSC0053284
tagaatgggttay

SEQ ID NO: 219126 - DNA, 13 bp, Artificial Sequence
  Oligonucleotide for detection of SNP TSC0053284
rtaacccattcta

SEQ ID NO: 219127 - DNA, 13 bp, Artificial Sequence
  Oligonucleotide for detection of SNP TSC0053285
gtagaatgttttg

SEQ ID NO: 219128 - DNA, 13 bp, Artificial Sequence
  Oligonucleotide for detection of SNP TSC0053285
caaaacattctac

SEQ ID NO: 219129 - DNA, 13 bp, Artificial Sequence
  Oligonucleotide for detection of SNP TSC0053285
gtagaacgttttg

SEQ ID NO: 219130 - DNA, 13 bp, Artificial Sequence
  Oligonucleotide for detection of SNP TSC0053285
caaaacgttctac

SEQ ID NO: 219131 - DNA, 13 bp, Artificial Sequence
  Oligonucleotide for detection of SNP TSC0053285
taggatgttttay

SEQ ID NO: 219132 - DNA, 13 bp, Artificial Sequence
  Oligonucleotide for detection of SNP TSC0053285
rtaaaacatccta

SEQ ID NO: 219133 - DNA, 13 bp, Artificial Sequence
  Oligonucleotide for detection of SNP TSC0053285
taggatattttay

SEQ ID NO: 219134 - DNA, 13 bp, Artificial Sequence
  Oligonucleotide for detection of SNP TSC0053285
rtaaaatatccta

SEQ ID NO: 219135 - DNA, 13 bp, Artificial Sequence
  Oligonucleotide for detection of SNP TSC0053285
taggacgttttay

SEQ ID NO: 219136 - DNA, 13 bp, Artificial Sequence
  Oligonucleotide for detection of SNP TSC0053285
rtaaaacgtccta

SEQ ID NO: 219137 - DNA, 13 bp, Artificial Sequence
  Oligonucleotide for detection of SNP TSC0053287
aaaagtagttaag

SEQ ID NO: 219138 - DNA, 13 bp, Artificial Sequence
  Oligonucleotide for detection of SNP TSC0053287
cttaactactttt

SEQ ID NO: 219139 - DNA, 13 bp, Artificial Sequence
  Oligonucleotide for detection of SNP TSC0053287
aaaagttgttaag

SEQ ID NO: 219140 - DNA, 13 bp, Artificial Sequence
  Oligonucleotide for detection of SNP TSC0053287
cttaacaactttt

SEQ ID NO: 219141 - DNA, 13 bp, Artificial Sequence
  Oligonucleotide for detection of SNP TSC0053288
aataaaataaatg

SEQ ID NO: 219142 - DNA, 13 bp, Artificial Sequence
  Oligonucleotide for detection of SNP TSC0053288
catttattttatt

SEQ ID NO: 219143 - DNA, 13 bp, Artificial Sequence
  Oligonucleotide for detection of SNP TSC0053288
aataaattaaatg

SEQ ID NO: 219144 - DNA, 13 bp, Artificial Sequence
  Oligonucleotide for detection of SNP TSC0053288
catttaatttatt

SEQ ID NO: 219145 - DNA, 13 bp, Artificial Sequence
  Oligonucleotide for detection of SNP TSC0053288
aataaaataaacg

SEQ ID NO: 219146 - DNA, 13 bp, Artificial Sequence
  Oligonucleotide for detection of SNP TSC0053288
cgtttattttatt

SEQ ID NO: 219147 - DNA, 13 bp, Artificial Sequence
  Oligonucleotide for detection of SNP TSC0053288
aataaattaaacg

SEQ ID NO: 219148 - DNA, 13 bp, Artificial Sequence
  Oligonucleotide for detection of SNP TSC0053288
cgtttaatttatt

SEQ ID NO: 219149 - DNA, 13 bp, Artificial Sequence
  Oligonucleotide for detection of SNP TSC0053288
tgtttgttttatt

SEQ ID NO: 219150 - DNA, 13 bp, Artificial Sequence
  Oligonucleotide for detection of SNP TSC0053288
aataaaacaaaca

SEQ ID NO: 219151 - DNA, 13 bp, Artificial Sequence
  Oligonucleotide for detection of SNP TSC0053288
cgtttgttttatt

SEQ ID NO: 219152 - DNA, 13 bp, Artificial Sequence
  Oligonucleotide for detection of SNP TSC0053288
aataaaacaaacg

SEQ ID NO: 219153 - DNA, 13 bp, Artificial Sequence
  Oligonucleotide for detection of SNP TSC0053289
ttaaatggtaaat

SEQ ID NO: 219154 - DNA, 13 bp, Artificial Sequence
  Oligonucleotide for detection of SNP TSC0053289
atttaccatttaa

SEQ ID NO: 219155 - DNA, 13 bp, Artificial Sequence
  Oligonucleotide for detection of SNP TSC0053289
ttaaatagtaaat

SEQ ID NO: 219156 - DNA, 13 bp, Artificial Sequence
  Oligonucleotide for detection of SNP TSC0053289
atttactatttaa

SEQ ID NO: 219157 - DNA, 13 bp, Artificial Sequence
  Oligonucleotide for detection of SNP TSC0053290
atatttattttay

SEQ ID NO: 219158 - DNA, 13 bp, Artificial Sequence
  Oligonucleotide for detection of SNP TSC0053290
rtaaaataaatat

SEQ ID NO: 219159 - DNA, 13 bp, Artificial Sequence
  Oligonucleotide for detection of SNP TSC0053290
atatttgttttay

SEQ ID NO: 219160 - DNA, 13 bp, Artificial Sequence
  Oligonucleotide for detection of SNP TSC0053290
rtaaaacaaatat

SEQ ID NO: 219161 - DNA, 13 bp, Artificial Sequence
  Oligonucleotide for detection of SNP TSC0053291
taagataatagag

SEQ ID NO: 219162 - DNA, 13 bp, Artificial Sequence
  Oligonucleotide for detection of SNP TSC0053291
ctctattatctta

SEQ ID NO: 219163 - DNA, 13 bp, Artificial Sequence
  Oligonucleotide for detection of SNP TSC0053291
taagatgatagag

SEQ ID NO: 219164 - DNA, 13 bp, Artificial Sequence
  Oligonucleotide for detection of SNP TSC0053291
ctctatcatctta

SEQ ID NO: 219165 - DNA, 13 bp, Artificial Sequence
  Oligonucleotide for detection of SNP TSC0053291
taagacgatagag

SEQ ID NO: 219166 - DNA, 13 bp, Artificial Sequence
  Oligonucleotide for detection of SNP TSC0053291
ctctatcgtctta

SEQ ID NO: 219167 - DNA, 13 bp, Artificial Sequence
  Oligonucleotide for detection of SNP TSC0053291
ttttgtcgttttg

SEQ ID NO: 219168 - DNA, 13 bp, Artificial Sequence
  Oligonucleotide for detection of SNP TSC0053291
caaaacgacaaaa

SEQ ID NO: 219169 - DNA, 13 bp, Artificial Sequence
  Oligonucleotide for detection of SNP TSC0005642
aggtgtgtgtagg

SEQ ID NO: 219170 - DNA, 13 bp, Artificial Sequence
  Oligonucleotide for detection of SNP TSC0005642
cctacacacacct

SEQ ID NO: 219171 - DNA, 13 bp, Artificial Sequence
  Oligonucleotide for detection of SNP TSC0005642
aggtgtatgtagg

SEQ ID NO: 219172 - DNA, 13 bp, Artificial Sequence
  Oligonucleotide for detection of SNP TSC0005642
cctacatacacct

SEQ ID NO: 219173 - DNA, 13 bp, Artificial Sequence
  Oligonucleotide for detection of SNP TSC0005502
gtgagggggggag

SEQ ID NO: 219174 - DNA, 13 bp, Artificial Sequence
  Oligonucleotide for detection of SNP TSC0005502
ctccccccctcac

SEQ ID NO: 219175 - DNA, 13 bp, Artificial Sequence
  Oligonucleotide for detection of SNP TSC0005502
gtgaggtggggag

SEQ ID NO: 219176 - DNA, 13 bp, Artificial Sequence
  Oligonucleotide for detection of SNP TSC0005502
ctccccacctcac

SEQ ID NO: 219177 - DNA, 13 bp, Artificial Sequence
  Oligonucleotide for detection of SNP TSC0005502
gtgaggcggggag

SEQ ID NO: 219178 - DNA, 13 bp, Artificial Sequence
  Oligonucleotide for detection of SNP TSC0005502
ctccccgcctcac

SEQ ID NO: 219179 - DNA, 13 bp, Artificial Sequence
  Oligonucleotide for detection of SNP TSC0005465
agaatatgaaagg

SEQ ID NO: 219180 - DNA, 13 bp, Artificial Sequence
  Oligonucleotide for detection of SNP TSC0005465
cctttcatattct

SEQ ID NO: 219181 - DNA, 13 bp, Artificial Sequence
  Oligonucleotide for detection of SNP TSC0005465
agaatacgaaagg

SEQ ID NO: 219182 - DNA, 13 bp, Artificial Sequence
  Oligonucleotide for detection of SNP TSC0005465
cctttcgtattct

SEQ ID NO: 219183 - DNA, 13 bp, Artificial Sequence
  Oligonucleotide for detection of SNP TSC0005466
atttgaatttaat

SEQ ID NO: 219184 - DNA, 13 bp, Artificial Sequence
  Oligonucleotide for detection of SNP TSC0005466
attaaattcaaat

SEQ ID NO: 219185 - DNA, 13 bp, Artificial Sequence
  Oligonucleotide for detection of SNP TSC0005467
gaataatgggttg

SEQ ID NO: 219186 - DNA, 13 bp, Artificial Sequence
  Oligonucleotide for detection of SNP TSC0005467
caacccattattc

SEQ ID NO: 219187 - DNA, 13 bp, Artificial Sequence
  Oligonucleotide for detection of SNP TSC0005467
gaataacgggttg

SEQ ID NO: 219188 - DNA, 13 bp, Artificial Sequence
  Oligonucleotide for detection of SNP TSC0005467
caacccgttattc

SEQ ID NO: 219189 - DNA, 13 bp, Artificial Sequence
  Oligonucleotide for detection of SNP TSC0005467
taatttgttgtty

SEQ ID NO: 219190 - DNA, 13 bp, Artificial Sequence
  Oligonucleotide for detection of SNP TSC0005467
raacaacaaatta

SEQ ID NO: 219191 - DNA, 13 bp, Artificial Sequence
  Oligonucleotide for detection of SNP TSC0005467
taatttattgtty

SEQ ID NO: 219192 - DNA, 13 bp, Artificial Sequence
  Oligonucleotide for detection of SNP TSC0005467
raacaataaatta

SEQ ID NO: 219193 - DNA, 13 bp, Artificial Sequence
  Oligonucleotide for detection of SNP TSC0005467
taattcgttgtty

SEQ ID NO: 219194 - DNA, 13 bp, Artificial Sequence
  Oligonucleotide for detection of SNP TSC0005467
raacaacgaatta

SEQ ID NO: 219195 - DNA, 13 bp, Artificial Sequence
  Oligonucleotide for detection of SNP TSC0053293
gtagtgagtttty

SEQ ID NO: 219196 - DNA, 13 bp, Artificial Sequence
  Oligonucleotide for detection of SNP TSC0053293
raaaactcactac

SEQ ID NO: 219197 - DNA, 13 bp, Artificial Sequence
  Oligonucleotide for detection of SNP TSC0053293
gtagtgggtttty

SEQ ID NO: 219198 - DNA, 13 bp, Artificial Sequence
  Oligonucleotide for detection of SNP TSC0053293
raaaacccactac

SEQ ID NO: 219199 - DNA, 13 bp, Artificial Sequence
  Oligonucleotide for detection of SNP TSC0053297
attatatgtagta

SEQ ID NO: 219200 - DNA, 13 bp, Artificial Sequence
  Oligonucleotide for detection of SNP TSC0053297
tactacatataat

SEQ ID NO: 219201 - DNA, 13 bp, Artificial Sequence
  Oligonucleotide for detection of SNP TSC0053297
attataggtagta

SEQ ID NO: 219202 - DNA, 13 bp, Artificial Sequence
  Oligonucleotide for detection of SNP TSC0053297
tactacctataat

SEQ ID NO: 219203 - DNA, 13 bp, Artificial Sequence
  Oligonucleotide for detection of SNP TSC0053297
tattgtatgtggt

SEQ ID NO: 219204 - DNA, 13 bp, Artificial Sequence
  Oligonucleotide for detection of SNP TSC0053297
accacatacaata

SEQ ID NO: 219205 - DNA, 13 bp, Artificial Sequence
  Oligonucleotide for detection of SNP TSC0053297
tattgtttgtggt

SEQ ID NO: 219206 - DNA, 13 bp, Artificial Sequence
  Oligonucleotide for detection of SNP TSC0053297
accacaaacaata

SEQ ID NO: 219207 - DNA, 13 bp, Artificial Sequence
  Oligonucleotide for detection of SNP TSC0053298
gattttaaataat

SEQ ID NO: 219208 - DNA, 13 bp, Artificial Sequence
  Oligonucleotide for detection of SNP TSC0053298
attatttaaaatc

SEQ ID NO: 219209 - DNA, 13 bp, Artificial Sequence
  Oligonucleotide for detection of SNP TSC0053298
gatttttaataat

SEQ ID NO: 219210 - DNA, 13 bp, Artificial Sequence
  Oligonucleotide for detection of SNP TSC0053298
attattaaaaatc

SEQ ID NO: 219211 - DNA, 13 bp, Artificial Sequence
  Oligonucleotide for detection of SNP TSC0053298
attatttggagty

SEQ ID NO: 219212 - DNA, 13 bp, Artificial Sequence
  Oligonucleotide for detection of SNP TSC0053298
ractccaaataat

SEQ ID NO: 219213 - DNA, 13 bp, Artificial Sequence
  Oligonucleotide for detection of SNP TSC0053298
attattgggagty

SEQ ID NO: 219214 - DNA, 13 bp, Artificial Sequence
  Oligonucleotide for detection of SNP TSC0053298
ractcccaataat

SEQ ID NO: 219215 - DNA, 13 bp, Artificial Sequence
  Oligonucleotide for detection of SNP TSC0053299
gtttttagtaaaa

SEQ ID NO: 219216 - DNA, 13 bp, Artificial Sequence
  Oligonucleotide for detection of SNP TSC0053299
ttttactaaaaac

SEQ ID NO: 219217 - DNA, 13 bp, Artificial Sequence
  Oligonucleotide for detection of SNP TSC0053299
gtttttggtaaaa

SEQ ID NO: 219218 - DNA, 13 bp, Artificial Sequence
  Oligonucleotide for detection of SNP TSC0053299
ttttaccaaaaac

SEQ ID NO: 219219 - DNA, 13 bp, Artificial Sequence
  Oligonucleotide for detection of SNP TSC0053300
tgtatagtttaaa

SEQ ID NO: 219220 - DNA, 13 bp, Artificial Sequence
  Oligonucleotide for detection of SNP TSC0053300
tttaaactataca

SEQ ID NO: 219221 - DNA, 13 bp, Artificial Sequence
  Oligonucleotide for detection of SNP TSC0053300
tgtataatttaaa

SEQ ID NO: 219222 - DNA, 13 bp, Artificial Sequence
  Oligonucleotide for detection of SNP TSC0053300
tttaaattataca

SEQ ID NO: 219223 - DNA, 13 bp, Artificial Sequence
  Oligonucleotide for detection of SNP TSC0053301
tgagtatggagag

SEQ ID NO: 219224 - DNA, 13 bp, Artificial Sequence
  Oligonucleotide for detection of SNP TSC0053301
ctctccatactca

SEQ ID NO: 219225 - DNA, 13 bp, Artificial Sequence
  Oligonucleotide for detection of SNP TSC0053301
tgagtagggagag

SEQ ID NO: 219226 - DNA, 13 bp, Artificial Sequence
  Oligonucleotide for detection of SNP TSC0053301
ctctccctactca

SEQ ID NO: 219227 - DNA, 13 bp, Artificial Sequence
  Oligonucleotide for detection of SNP TSC0053301
tgagtacggagag

SEQ ID NO: 219228 - DNA, 13 bp, Artificial Sequence
  Oligonucleotide for detection of SNP TSC0053301
ctctccgtactca

SEQ ID NO: 219229 - DNA, 13 bp, Artificial Sequence
  Oligonucleotide for detection of SNP TSC0053302
tatagtatatata

SEQ ID NO: 219230 - DNA, 13 bp, Artificial Sequence
  Oligonucleotide for detection of SNP TSC0053302
tatatatactata

SEQ ID NO: 219231 - DNA, 13 bp, Artificial Sequence
  Oligonucleotide for detection of SNP TSC0053302
tatagtttatata

SEQ ID NO: 219232 - DNA, 13 bp, Artificial Sequence
  Oligonucleotide for detection of SNP TSC0053302
tatataaactata

SEQ ID NO: 219233 - DNA, 13 bp, Artificial Sequence
  Oligonucleotide for detection of SNP TSC0053302
tgtatatgttgtg

SEQ ID NO: 219234 - DNA, 13 bp, Artificial Sequence
  Oligonucleotide for detection of SNP TSC0053302
cacaacatataca

SEQ ID NO: 219235 - DNA, 13 bp, Artificial Sequence
  Oligonucleotide for detection of SNP TSC0053302
tgtataagttgtg

SEQ ID NO: 219236 - DNA, 13 bp, Artificial Sequence
  Oligonucleotide for detection of SNP TSC0053302
cacaacttataca

SEQ ID NO: 219237 - DNA, 13 bp, Artificial Sequence
  Oligonucleotide for detection of SNP TSC0053303
aaataggtaaaaa

SEQ ID NO: 219238 - DNA, 13 bp, Artificial Sequence
  Oligonucleotide for detection of SNP TSC0053303
tttttacctattt

SEQ ID NO: 219239 - DNA, 13 bp, Artificial Sequence
  Oligonucleotide for detection of SNP TSC0053303
aaatagataaaaa

SEQ ID NO: 219240 - DNA, 13 bp, Artificial Sequence
  Oligonucleotide for detection of SNP TSC0053303
tttttatctattt

SEQ ID NO: 219241 - DNA, 13 bp, Artificial Sequence
  Oligonucleotide for detection of SNP TSC0053308
agggttttgttat

SEQ ID NO: 219242 - DNA, 13 bp, Artificial Sequence
  Oligonucleotide for detection of SNP TSC0053308
ataacaaaaccct

SEQ ID NO: 219243 - DNA, 13 bp, Artificial Sequence
  Oligonucleotide for detection of SNP TSC0053308
agggttgtgttat

SEQ ID NO: 219244 - DNA, 13 bp, Artificial Sequence
  Oligonucleotide for detection of SNP TSC0053308
ataacacaaccct

SEQ ID NO: 219245 - DNA, 13 bp, Artificial Sequence
  Oligonucleotide for detection of SNP TSC0053308
atggtaaaatttt

SEQ ID NO: 219246 - DNA, 13 bp, Artificial Sequence
  Oligonucleotide for detection of SNP TSC0053308
aaaattttaccat

SEQ ID NO: 219247 - DNA, 13 bp, Artificial Sequence
  Oligonucleotide for detection of SNP TSC0053308
atggtataatttt

SEQ ID NO: 219248 - DNA, 13 bp, Artificial Sequence
  Oligonucleotide for detection of SNP TSC0053308
aaaattataccat

SEQ ID NO: 219249 - DNA, 13 bp, Artificial Sequence
  Oligonucleotide for detection of SNP TSC0053310
gatgaaagaatga

SEQ ID NO: 219250 - DNA, 13 bp, Artificial Sequence
  Oligonucleotide for detection of SNP TSC0053310
tcattctttcatc

SEQ ID NO: 219251 - DNA, 13 bp, Artificial Sequence
  Oligonucleotide for detection of SNP TSC0053310
gatgaaggaatga

SEQ ID NO: 219252 - DNA, 13 bp, Artificial Sequence
  Oligonucleotide for detection of SNP TSC0053310
tcattccttcatc

SEQ ID NO: 219253 - DNA, 13 bp, Artificial Sequence
  Oligonucleotide for detection of SNP TSC0053312
tgtatatgtttgy

SEQ ID NO: 219254 - DNA, 13 bp, Artificial Sequence
  Oligonucleotide for detection of SNP TSC0053312
rcaaacatataca

SEQ ID NO: 219255 - DNA, 13 bp, Artificial Sequence
  Oligonucleotide for detection of SNP TSC0053312
tgtatacgtttgy

SEQ ID NO: 219256 - DNA, 13 bp, Artificial Sequence
  Oligonucleotide for detection of SNP TSC0053312
rcaaacgtataca

SEQ ID NO: 219257 - DNA, 13 bp, Artificial Sequence
  Oligonucleotide for detection of SNP TSC0053312
gtagatatgtata

SEQ ID NO: 219258 - DNA, 13 bp, Artificial Sequence
  Oligonucleotide for detection of SNP TSC0053312
tatacatatctac

SEQ ID NO: 219259 - DNA, 13 bp, Artificial Sequence
  Oligonucleotide for detection of SNP TSC0053312
gtagacgtgtata

SEQ ID NO: 219260 - DNA, 13 bp, Artificial Sequence
  Oligonucleotide for detection of SNP TSC0053312
tatacacgtctac

SEQ ID NO: 219261 - DNA, 13 bp, Artificial Sequence
  Oligonucleotide for detection of SNP TSC0053320
tagttatggtaga

SEQ ID NO: 219262 - DNA, 13 bp, Artificial Sequence
  Oligonucleotide for detection of SNP TSC0053320
tctaccataacta

SEQ ID NO: 219263 - DNA, 13 bp, Artificial Sequence
  Oligonucleotide for detection of SNP TSC0053320
tagttacggtaga

SEQ ID NO: 219264 - DNA, 13 bp, Artificial Sequence
  Oligonucleotide for detection of SNP TSC0053320
tctaccgtaacta

SEQ ID NO: 219265 - DNA, 13 bp, Artificial Sequence
  Oligonucleotide for detection of SNP TSC0053321
aaaatgtaattty

SEQ ID NO: 219266 - DNA, 13 bp, Artificial Sequence
  Oligonucleotide for detection of SNP TSC0053321
raaattacatttt

SEQ ID NO: 219267 - DNA, 13 bp, Artificial Sequence
  Oligonucleotide for detection of SNP TSC0053321
aaaatggaattty

SEQ ID NO: 219268 - DNA, 13 bp, Artificial Sequence
  Oligonucleotide for detection of SNP TSC0053321
raaattccatttt

SEQ ID NO: 219269 - DNA, 13 bp, Artificial Sequence
  Oligonucleotide for detection of SNP TSC0053321
gaaattgtatttt

SEQ ID NO: 219270 - DNA, 13 bp, Artificial Sequence
  Oligonucleotide for detection of SNP TSC0053321
aaaatacaatttc

SEQ ID NO: 219271 - DNA, 13 bp, Artificial Sequence
  Oligonucleotide for detection of SNP TSC0053321
gaaattttatttt

SEQ ID NO: 219272 - DNA, 13 bp, Artificial Sequence
  Oligonucleotide for detection of SNP TSC0053321
aaaataaaatttc

SEQ ID NO: 219273 - DNA, 13 bp, Artificial Sequence
  Oligonucleotide for detection of SNP TSC0053323
tttaatatattgt

SEQ ID NO: 219274 - DNA, 13 bp, Artificial Sequence
  Oligonucleotide for detection of SNP TSC0053323
acaatatattaaa

SEQ ID NO: 219275 - DNA, 13 bp, Artificial Sequence
  Oligonucleotide for detection of SNP TSC0053323
tttaatgtattgt

SEQ ID NO: 219276 - DNA, 13 bp, Artificial Sequence
  Oligonucleotide for detection of SNP TSC0053323
acaatacattaaa

SEQ ID NO: 219277 - DNA, 13 bp, Artificial Sequence
  Oligonucleotide for detection of SNP TSC0053324
ttattaatttagg

SEQ ID NO: 219278 - DNA, 13 bp, Artificial Sequence
  Oligonucleotide for detection of SNP TSC0053324
cctaaattaataa

SEQ ID NO: 219279 - DNA, 13 bp, Artificial Sequence
  Oligonucleotide for detection of SNP TSC0053324
ttattagtttagg

SEQ ID NO: 219280 - DNA, 13 bp, Artificial Sequence
  Oligonucleotide for detection of SNP TSC0053324
cctaaactaataa

SEQ ID NO: 219281 - DNA, 13 bp, Artificial Sequence
  Oligonucleotide for detection of SNP TSC0053325
agaattattttag

SEQ ID NO: 219282 - DNA, 13 bp, Artificial Sequence
  Oligonucleotide for detection of SNP TSC0053325
ctaaaataattct

SEQ ID NO: 219283 - DNA, 13 bp, Artificial Sequence
  Oligonucleotide for detection of SNP TSC0053325
agaattgttttag

SEQ ID NO: 219284 - DNA, 13 bp, Artificial Sequence
  Oligonucleotide for detection of SNP TSC0053325
ctaaaacaattct

SEQ ID NO: 219285 - DNA, 13 bp, Artificial Sequence
  Oligonucleotide for detection of SNP TSC0053325
agaatcgttttag

SEQ ID NO: 219286 - DNA, 13 bp, Artificial Sequence
  Oligonucleotide for detection of SNP TSC0053325
ctaaaacgattct

SEQ ID NO: 219287 - DNA, 13 bp, Artificial Sequence
  Oligonucleotide for detection of SNP TSC0053325
ttgaaatgatttt

SEQ ID NO: 219288 - DNA, 13 bp, Artificial Sequence
  Oligonucleotide for detection of SNP TSC0053325
aaaatcatttcaa

SEQ ID NO: 219289 - DNA, 13 bp, Artificial Sequence
  Oligonucleotide for detection of SNP TSC0053325
ttgaaacgatttt

SEQ ID NO: 219290 - DNA, 13 bp, Artificial Sequence
  Oligonucleotide for detection of SNP TSC0053325
aaaatcgtttcaa

SEQ ID NO: 219291 - DNA, 13 bp, Artificial Sequence
  Oligonucleotide for detection of SNP TSC0053326
attatgatatata

SEQ ID NO: 219292 - DNA, 13 bp, Artificial Sequence
  Oligonucleotide for detection of SNP TSC0053326
tatatatcataat

SEQ ID NO: 219293 - DNA, 13 bp, Artificial Sequence
  Oligonucleotide for detection of SNP TSC0053326
attatggtatata

SEQ ID NO: 219294 - DNA, 13 bp, Artificial Sequence
  Oligonucleotide for detection of SNP TSC0053326
tatataccataat

SEQ ID NO: 219295 - DNA, 13 bp, Artificial Sequence
  Oligonucleotide for detection of SNP TSC0053327
atatgtattttag

SEQ ID NO: 219296 - DNA, 13 bp, Artificial Sequence
  Oligonucleotide for detection of SNP TSC0053327
ctaaaatacatat

SEQ ID NO: 219297 - DNA, 13 bp, Artificial Sequence
  Oligonucleotide for detection of SNP TSC0053327
atatgtgttttag

SEQ ID NO: 219298 - DNA, 13 bp, Artificial Sequence
  Oligonucleotide for detection of SNP TSC0053327
ctaaaacacatat

SEQ ID NO: 219299 - DNA, 13 bp, Artificial Sequence
  Oligonucleotide for detection of SNP TSC0053328
gagagtgattttt

SEQ ID NO: 219300 - DNA, 13 bp, Artificial Sequence
  Oligonucleotide for detection of SNP TSC0053328
aaaaatcactctc

SEQ ID NO: 219301 - DNA, 13 bp, Artificial Sequence
  Oligonucleotide for detection of SNP TSC0053328
gagagtaattttt

SEQ ID NO: 219302 - DNA, 13 bp, Artificial Sequence
  Oligonucleotide for detection of SNP TSC0053328
aaaaattactctc

SEQ ID NO: 219303 - DNA, 13 bp, Artificial Sequence
  Oligonucleotide for detection of SNP TSC0053329
agtaggtgtttta

SEQ ID NO: 219304 - DNA, 13 bp, Artificial Sequence
  Oligonucleotide for detection of SNP TSC0053329
taaaacacctact

SEQ ID NO: 219305 - DNA, 13 bp, Artificial Sequence
  Oligonucleotide for detection of SNP TSC0053329
agtaggcgtttta

SEQ ID NO: 219306 - DNA, 13 bp, Artificial Sequence
  Oligonucleotide for detection of SNP TSC0053329
taaaacgcctact

SEQ ID NO: 219307 - DNA, 13 bp, Artificial Sequence
  Oligonucleotide for detection of SNP TSC0053329
tgagatgtttgtt

SEQ ID NO: 219308 - DNA, 13 bp, Artificial Sequence
  Oligonucleotide for detection of SNP TSC0053329
aacaaacatctca

SEQ ID NO: 219309 - DNA, 13 bp, Artificial Sequence
  Oligonucleotide for detection of SNP TSC0053329
tgagatatttgtt

SEQ ID NO: 219310 - DNA, 13 bp, Artificial Sequence
  Oligonucleotide for detection of SNP TSC0053329
aacaaatatctca

SEQ ID NO: 219311 - DNA, 13 bp, Artificial Sequence
  Oligonucleotide for detection of SNP TSC0053329
tgagacgtttgtt

SEQ ID NO: 219312 - DNA, 13 bp, Artificial Sequence
  Oligonucleotide for detection of SNP TSC0053329
aacaaacgtctca

SEQ ID NO: 219313 - DNA, 13 bp, Artificial Sequence
  Oligonucleotide for detection of SNP TSC0053330
aggtttaaagtat

SEQ ID NO: 219314 - DNA, 13 bp, Artificial Sequence
  Oligonucleotide for detection of SNP TSC0053330
atactttaaacct

SEQ ID NO: 219315 - DNA, 13 bp, Artificial Sequence
  Oligonucleotide for detection of SNP TSC0053330
aggtttgaagtat

SEQ ID NO: 219316 - DNA, 13 bp, Artificial Sequence
  Oligonucleotide for detection of SNP TSC0053330
atacttcaaacct

SEQ ID NO: 219317 - DNA, 13 bp, Artificial Sequence
  Oligonucleotide for detection of SNP TSC0053330
aggttcgaagtat

SEQ ID NO: 219318 - DNA, 13 bp, Artificial Sequence
  Oligonucleotide for detection of SNP TSC0053330
atacttcgaacct

SEQ ID NO: 219319 - DNA, 13 bp, Artificial Sequence
  Oligonucleotide for detection of SNP TSC0053330
atattttgggttt

SEQ ID NO: 219320 - DNA, 13 bp, Artificial Sequence
  Oligonucleotide for detection of SNP TSC0053330
aaacccaaaatat

SEQ ID NO: 219321 - DNA, 13 bp, Artificial Sequence
  Oligonucleotide for detection of SNP TSC0053330
atatttcgggttt

SEQ ID NO: 219322 - DNA, 13 bp, Artificial Sequence
  Oligonucleotide for detection of SNP TSC0053330
aaacccgaaatat

SEQ ID NO: 219323 - DNA, 13 bp, Artificial Sequence
  Oligonucleotide for detection of SNP TSC0053331
ttttgagtgaaty

SEQ ID NO: 219324 - DNA, 13 bp, Artificial Sequence
  Oligonucleotide for detection of SNP TSC0053331
rattcactcaaaa

SEQ ID NO: 219325 - DNA, 13 bp, Artificial Sequence
  Oligonucleotide for detection of SNP TSC0053331
ttttgaatgaaty

SEQ ID NO: 219326 - DNA, 13 bp, Artificial Sequence
  Oligonucleotide for detection of SNP TSC0053331
rattcattcaaaa

SEQ ID NO: 219327 - DNA, 13 bp, Artificial Sequence
  Oligonucleotide for detection of SNP TSC0053332
tgatgtaattttt

SEQ ID NO: 219328 - DNA, 13 bp, Artificial Sequence
  Oligonucleotide for detection of SNP TSC0053332
aaaaattacatca

SEQ ID NO: 219329 - DNA, 13 bp, Artificial Sequence
  Oligonucleotide for detection of SNP TSC0053332
tgatgtgattttt

SEQ ID NO: 219330 - DNA, 13 bp, Artificial Sequence
  Oligonucleotide for detection of SNP TSC0053332
aaaaatcacatca

SEQ ID NO: 219331 - DNA, 13 bp, Artificial Sequence
  Oligonucleotide for detection of SNP TSC0053334
ggagaggtggttt

SEQ ID NO: 219332 - DNA, 13 bp, Artificial Sequence
  Oligonucleotide for detection of SNP TSC0053334
aaaccacctctcc

SEQ ID NO: 219333 - DNA, 13 bp, Artificial Sequence
  Oligonucleotide for detection of SNP TSC0053334
ggagagttggttt

SEQ ID NO: 219334 - DNA, 13 bp, Artificial Sequence
  Oligonucleotide for detection of SNP TSC0053334
aaaccaactctcc

SEQ ID NO: 219335 - DNA, 13 bp, Artificial Sequence
  Oligonucleotide for detection of SNP TSC0008663
aattaaagttgay

SEQ ID NO: 219336 - DNA, 13 bp, Artificial Sequence
  Oligonucleotide for detection of SNP TSC0008663
rtcaactttaatt

SEQ ID NO: 219337 - DNA, 13 bp, Artificial Sequence
  Oligonucleotide for detection of SNP TSC0008663
aattaaggttgay

SEQ ID NO: 219338 - DNA, 13 bp, Artificial Sequence
  Oligonucleotide for detection of SNP TSC0008663
rtcaaccttaatt

SEQ ID NO: 219339 - DNA, 13 bp, Artificial Sequence
  Oligonucleotide for detection of SNP TSC0053337
tttgttatgatgt

SEQ ID NO: 219340 - DNA, 13 bp, Artificial Sequence
  Oligonucleotide for detection of SNP TSC0053337
acatcataacaaa

SEQ ID NO: 219341 - DNA, 13 bp, Artificial Sequence
  Oligonucleotide for detection of SNP TSC0053337
tttgttgtgatgt

SEQ ID NO: 219342 - DNA, 13 bp, Artificial Sequence
  Oligonucleotide for detection of SNP TSC0053337
acatcacaacaaa

SEQ ID NO: 219343 - DNA, 13 bp, Artificial Sequence
  Oligonucleotide for detection of SNP TSC0053337
tttgtcgtgatgt

SEQ ID NO: 219344 - DNA, 13 bp, Artificial Sequence
  Oligonucleotide for detection of SNP TSC0053337
acatcacgacaaa

SEQ ID NO: 219345 - DNA, 13 bp, Artificial Sequence
  Oligonucleotide for detection of SNP TSC0053337
atattatgataaa

SEQ ID NO: 219346 - DNA, 13 bp, Artificial Sequence
  Oligonucleotide for detection of SNP TSC0053337
tttatcataatat

SEQ ID NO: 219347 - DNA, 13 bp, Artificial Sequence
  Oligonucleotide for detection of SNP TSC0053337
atattacgataaa

SEQ ID NO: 219348 - DNA, 13 bp, Artificial Sequence
  Oligonucleotide for detection of SNP TSC0053337
tttatcgtaatat

SEQ ID NO: 219349 - DNA, 13 bp, Artificial Sequence
  Oligonucleotide for detection of SNP TSC0053339
agatatggaaaag

SEQ ID NO: 219350 - DNA, 13 bp, Artificial Sequence
  Oligonucleotide for detection of SNP TSC0053339
cttttccatatct

SEQ ID NO: 219351 - DNA, 13 bp, Artificial Sequence
  Oligonucleotide for detection of SNP TSC0053339
agatatagaaaag

SEQ ID NO: 219352 - DNA, 13 bp, Artificial Sequence
  Oligonucleotide for detection of SNP TSC0053339
cttttctatatct

SEQ ID NO: 219353 - DNA, 13 bp, Artificial Sequence
  Oligonucleotide for detection of SNP TSC0053340
agatgagtttgtt

SEQ ID NO: 219354 - DNA, 13 bp, Artificial Sequence
  Oligonucleotide for detection of SNP TSC0053340
aacaaactcatct

SEQ ID NO: 219355 - DNA, 13 bp, Artificial Sequence
  Oligonucleotide for detection of SNP TSC0053340
agatgaatttgtt

SEQ ID NO: 219356 - DNA, 13 bp, Artificial Sequence
  Oligonucleotide for detection of SNP TSC0053340
aacaaattcatct

SEQ ID NO: 219357 - DNA, 13 bp, Artificial Sequence
  Oligonucleotide for detection of SNP TSC0053340
agacgagtttgtt

SEQ ID NO: 219358 - DNA, 13 bp, Artificial Sequence
  Oligonucleotide for detection of SNP TSC0053340
aacaaactcgtct

SEQ ID NO: 219359 - DNA, 13 bp, Artificial Sequence
  Oligonucleotide for detection of SNP TSC0053340
agacgaatttgtt

SEQ ID NO: 219360 - DNA, 13 bp, Artificial Sequence
  Oligonucleotide for detection of SNP TSC0053340
aacaaattcgtct

SEQ ID NO: 219361 - DNA, 13 bp, Artificial Sequence
  Oligonucleotide for detection of SNP TSC0053341
ttttaaagttttg

SEQ ID NO: 219362 - DNA, 13 bp, Artificial Sequence
  Oligonucleotide for detection of SNP TSC0053341
caaaactttaaaa

SEQ ID NO: 219363 - DNA, 13 bp, Artificial Sequence
  Oligonucleotide for detection of SNP TSC0053341
ttttaaggttttg

SEQ ID NO: 219364 - DNA, 13 bp, Artificial Sequence
  Oligonucleotide for detection of SNP TSC0053341
caaaaccttaaaa

SEQ ID NO: 219365 - DNA, 13 bp, Artificial Sequence
  Oligonucleotide for detection of SNP TSC0053341
ttttaaagtttcg

SEQ ID NO: 219366 - DNA, 13 bp, Artificial Sequence
  Oligonucleotide for detection of SNP TSC0053341
cgaaactttaaaa

SEQ ID NO: 219367 - DNA, 13 bp, Artificial Sequence
  Oligonucleotide for detection of SNP TSC0053341
ttttaaggtttcg

SEQ ID NO: 219368 - DNA, 13 bp, Artificial Sequence
  Oligonucleotide for detection of SNP TSC0053341
cgaaaccttaaaa

SEQ ID NO: 219369 - DNA, 13 bp, Artificial Sequence
  Oligonucleotide for detection of SNP TSC0053342
aagtaaattgtay

SEQ ID NO: 219370 - DNA, 13 bp, Artificial Sequence
  Oligonucleotide for detection of SNP TSC0053342
rtacaatttactt

SEQ ID NO: 219371 - DNA, 13 bp, Artificial Sequence
  Oligonucleotide for detection of SNP TSC0053342
aagtaagttgtay

SEQ ID NO: 219372 - DNA, 13 bp, Artificial Sequence
  Oligonucleotide for detection of SNP TSC0053342
rtacaacttactt

SEQ ID NO: 219373 - DNA, 13 bp, Artificial Sequence
  Oligonucleotide for detection of SNP TSC0053343
ttattaatagaty

SEQ ID NO: 219374 - DNA, 13 bp, Artificial Sequence
  Oligonucleotide for detection of SNP TSC0053343
ratctattaataa

SEQ ID NO: 219375 - DNA, 13 bp, Artificial Sequence
  Oligonucleotide for detection of SNP TSC0053343
ttattattagaty

SEQ ID NO: 219376 - DNA, 13 bp, Artificial Sequence
  Oligonucleotide for detection of SNP TSC0053343
ratctaataataa

SEQ ID NO: 219377 - DNA, 13 bp, Artificial Sequence
  Oligonucleotide for detection of SNP TSC0053343
ggtttgttagtgg

SEQ ID NO: 219378 - DNA, 13 bp, Artificial Sequence
  Oligonucleotide for detection of SNP TSC0053343
ccactaacaaacc

SEQ ID NO: 219379 - DNA, 13 bp, Artificial Sequence
  Oligonucleotide for detection of SNP TSC0053343
ggtttggtagtgg

SEQ ID NO: 219380 - DNA, 13 bp, Artificial Sequence
  Oligonucleotide for detection of SNP TSC0053343
ccactaccaaacc

SEQ ID NO: 219381 - DNA, 13 bp, Artificial Sequence
  Oligonucleotide for detection of SNP TSC0008134
ggttttatgttta

SEQ ID NO: 219382 - DNA, 13 bp, Artificial Sequence
  Oligonucleotide for detection of SNP TSC0008134
taaacataaaacc

SEQ ID NO: 219383 - DNA, 13 bp, Artificial Sequence
  Oligonucleotide for detection of SNP TSC0008134
ggttttgtgttta

SEQ ID NO: 219384 - DNA, 13 bp, Artificial Sequence
  Oligonucleotide for detection of SNP TSC0008134
taaacacaaaacc

SEQ ID NO: 219385 - DNA, 13 bp, Artificial Sequence
  Oligonucleotide for detection of SNP TSC0053345
ggaagatgttggt

SEQ ID NO: 219386 - DNA, 13 bp, Artificial Sequence
  Oligonucleotide for detection of SNP TSC0053345
accaacatcttcc

SEQ ID NO: 219387 - DNA, 13 bp, Artificial Sequence
  Oligonucleotide for detection of SNP TSC0053345
ggaagacgttggt

SEQ ID NO: 219388 - DNA, 13 bp, Artificial Sequence
  Oligonucleotide for detection of SNP TSC0053345
accaacgtcttcc

SEQ ID NO: 219389 - DNA, 13 bp, Artificial Sequence
  Oligonucleotide for detection of SNP TSC0053346
tttaacgtatagy

SEQ ID NO: 219390 - DNA, 13 bp, Artificial Sequence
  Oligonucleotide for detection of SNP TSC0053346
rctatacgttaaa

SEQ ID NO: 219391 - DNA, 13 bp, Artificial Sequence
  Oligonucleotide for detection of SNP TSC0053346
gttgtatgttaga

SEQ ID NO: 219392 - DNA, 13 bp, Artificial Sequence
  Oligonucleotide for detection of SNP TSC0053346
tctaacatacaac

SEQ ID NO: 219393 - DNA, 13 bp, Artificial Sequence
  Oligonucleotide for detection of SNP TSC0053346
gttgtacgttaga

SEQ ID NO: 219394 - DNA, 13 bp, Artificial Sequence
  Oligonucleotide for detection of SNP TSC0053346
tctaacgtacaac

SEQ ID NO: 219395 - DNA, 13 bp, Artificial Sequence
  Oligonucleotide for detection of SNP TSC0053347
atggtagtagtgy

SEQ ID NO: 219396 - DNA, 13 bp, Artificial Sequence
  Oligonucleotide for detection of SNP TSC0053347
rcactactaccat

SEQ ID NO: 219397 - DNA, 13 bp, Artificial Sequence
  Oligonucleotide for detection of SNP TSC0053347
atggtaatagtgy

SEQ ID NO: 219398 - DNA, 13 bp, Artificial Sequence
  Oligonucleotide for detection of SNP TSC0053347
rcactattaccat

SEQ ID NO: 219399 - DNA, 13 bp, Artificial Sequence
  Oligonucleotide for detection of SNP TSC0053348
ttgtattggttag

SEQ ID NO: 219400 - DNA, 13 bp, Artificial Sequence
  Oligonucleotide for detection of SNP TSC0053348
ctaaccaatacaa

SEQ ID NO: 219401 - DNA, 13 bp, Artificial Sequence
  Oligonucleotide for detection of SNP TSC0053348
ttgtatcggttag

SEQ ID NO: 219402 - DNA, 13 bp, Artificial Sequence
  Oligonucleotide for detection of SNP TSC0053348
ctaaccgatacaa

SEQ ID NO: 219403 - DNA, 13 bp, Artificial Sequence
  Oligonucleotide for detection of SNP TSC0053348
ttgattgatatag

SEQ ID NO: 219404 - DNA, 13 bp, Artificial Sequence
  Oligonucleotide for detection of SNP TSC0053348
ctatatcaatcaa

SEQ ID NO: 219405 - DNA, 13 bp, Artificial Sequence
  Oligonucleotide for detection of SNP TSC0053348
ttgattaatatag

SEQ ID NO: 219406 - DNA, 13 bp, Artificial Sequence
  Oligonucleotide for detection of SNP TSC0053348
ctatattaatcaa

SEQ ID NO: 219407 - DNA, 13 bp, Artificial Sequence
  Oligonucleotide for detection of SNP TSC0053348
ttgatcgatatag

SEQ ID NO: 219408 - DNA, 13 bp, Artificial Sequence
  Oligonucleotide for detection of SNP TSC0053348
ctatatcgatcaa

SEQ ID NO: 219409 - DNA, 13 bp, Artificial Sequence
  Oligonucleotide for detection of SNP TSC0053350
ttgaggagatatt

SEQ ID NO: 219410 - DNA, 13 bp, Artificial Sequence
  Oligonucleotide for detection of SNP TSC0053350
aatatctcctcaa

SEQ ID NO: 219411 - DNA, 13 bp, Artificial Sequence
  Oligonucleotide for detection of SNP TSC0053350
ttgaggggatatt

SEQ ID NO: 219412 - DNA, 13 bp, Artificial Sequence
  Oligonucleotide for detection of SNP TSC0053350
aatatcccctcaa

SEQ ID NO: 219413 - DNA, 13 bp, Artificial Sequence
  Oligonucleotide for detection of SNP TSC0053351
aggtgaatagtag

SEQ ID NO: 219414 - DNA, 13 bp, Artificial Sequence
  Oligonucleotide for detection of SNP TSC0053351
ctactattcacct

SEQ ID NO: 219415 - DNA, 13 bp, Artificial Sequence
  Oligonucleotide for detection of SNP TSC0053351
aggtgagtagtag

SEQ ID NO: 219416 - DNA, 13 bp, Artificial Sequence
  Oligonucleotide for detection of SNP TSC0053351
ctactactcacct

SEQ ID NO: 219417 - DNA, 13 bp, Artificial Sequence
  Oligonucleotide for detection of SNP TSC0053352
gttgatggttttt

SEQ ID NO: 219418 - DNA, 13 bp, Artificial Sequence
  Oligonucleotide for detection of SNP TSC0053352
aaaaaccatcaac

SEQ ID NO: 219419 - DNA, 13 bp, Artificial Sequence
  Oligonucleotide for detection of SNP TSC0053352
gttgatagttttt

SEQ ID NO: 219420 - DNA, 13 bp, Artificial Sequence
  Oligonucleotide for detection of SNP TSC0053352
aaaaactatcaac

SEQ ID NO: 219421 - DNA, 13 bp, Artificial Sequence
  Oligonucleotide for detection of SNP TSC0053353
aggaggtgataat

SEQ ID NO: 219422 - DNA, 13 bp, Artificial Sequence
  Oligonucleotide for detection of SNP TSC0053353
attatcacctcct

SEQ ID NO: 219423 - DNA, 13 bp, Artificial Sequence
  Oligonucleotide for detection of SNP TSC0053353
aggaggcgataat

SEQ ID NO: 219424 - DNA, 13 bp, Artificial Sequence
  Oligonucleotide for detection of SNP TSC0053353
attatcgcctcct

SEQ ID NO: 219425 - DNA, 13 bp, Artificial Sequence
  Oligonucleotide for detection of SNP TSC0053353
attgtcgtttttt

SEQ ID NO: 219426 - DNA, 13 bp, Artificial Sequence
  Oligonucleotide for detection of SNP TSC0053353
aaaaaacgacaat

SEQ ID NO: 219427 - DNA, 13 bp, Artificial Sequence
  Oligonucleotide for detection of SNP TSC0053354
agatgtatttatt

SEQ ID NO: 219428 - DNA, 13 bp, Artificial Sequence
  Oligonucleotide for detection of SNP TSC0053354
aataaatacatct

SEQ ID NO: 219429 - DNA, 13 bp, Artificial Sequence
  Oligonucleotide for detection of SNP TSC0053354
agatgtgtttatt

SEQ ID NO: 219430 - DNA, 13 bp, Artificial Sequence
  Oligonucleotide for detection of SNP TSC0053354
aataaacacatct

SEQ ID NO: 219431 - DNA, 13 bp, Artificial Sequence
  Oligonucleotide for detection of SNP TSC0053354
agatgcgtttatt

SEQ ID NO: 219432 - DNA, 13 bp, Artificial Sequence
  Oligonucleotide for detection of SNP TSC0053354
aataaacgcatct

SEQ ID NO: 219433 - DNA, 13 bp, Artificial Sequence
  Oligonucleotide for detection of SNP TSC0053354
aataaatgtattt

SEQ ID NO: 219434 - DNA, 13 bp, Artificial Sequence
  Oligonucleotide for detection of SNP TSC0053354
aaatacatttatt

SEQ ID NO: 219435 - DNA, 13 bp, Artificial Sequence
  Oligonucleotide for detection of SNP TSC0053354
aataaacgtattt

SEQ ID NO: 219436 - DNA, 13 bp, Artificial Sequence
  Oligonucleotide for detection of SNP TSC0053354
aaatacgtttatt

SEQ ID NO: 219437 - DNA, 13 bp, Artificial Sequence
  Oligonucleotide for detection of SNP TSC0053355
ttatttttaattt

SEQ ID NO: 219438 - DNA, 13 bp, Artificial Sequence
  Oligonucleotide for detection of SNP TSC0053355
aaattaaaaataa

SEQ ID NO: 219439 - DNA, 13 bp, Artificial Sequence
  Oligonucleotide for detection of SNP TSC0053355
aaattagaaatag

SEQ ID NO: 219440 - DNA, 13 bp, Artificial Sequence
  Oligonucleotide for detection of SNP TSC0053355
ctatttctaattt

SEQ ID NO: 219441 - DNA, 13 bp, Artificial Sequence
  Oligonucleotide for detection of SNP TSC0053355
aaattataaatag

SEQ ID NO: 219442 - DNA, 13 bp, Artificial Sequence
  Oligonucleotide for detection of SNP TSC0053355
ctatttataattt

SEQ ID NO: 219443 - DNA, 13 bp, Artificial Sequence
  Oligonucleotide for detection of SNP TSC0053362
ttattatttatga

SEQ ID NO: 219444 - DNA, 13 bp, Artificial Sequence
  Oligonucleotide for detection of SNP TSC0053362
tcataaataataa

SEQ ID NO: 219445 - DNA, 13 bp, Artificial Sequence
  Oligonucleotide for detection of SNP TSC0053363
gttgtggagttgg

SEQ ID NO: 219446 - DNA, 13 bp, Artificial Sequence
  Oligonucleotide for detection of SNP TSC0053363
ccaactccacaac

SEQ ID NO: 219447 - DNA, 13 bp, Artificial Sequence
  Oligonucleotide for detection of SNP TSC0053363
gttgtgaagttgg

SEQ ID NO: 219448 - DNA, 13 bp, Artificial Sequence
  Oligonucleotide for detection of SNP TSC0053363
ccaacttcacaac

SEQ ID NO: 219449 - DNA, 13 bp, Artificial Sequence
  Oligonucleotide for detection of SNP TSC0053366
tagggtgtggagg

SEQ ID NO: 219450 - DNA, 13 bp, Artificial Sequence
  Oligonucleotide for detection of SNP TSC0053366
cctccacacccta

SEQ ID NO: 219451 - DNA, 13 bp, Artificial Sequence
  Oligonucleotide for detection of SNP TSC0053366
tagggtttggagg

SEQ ID NO: 219452 - DNA, 13 bp, Artificial Sequence
  Oligonucleotide for detection of SNP TSC0053366
cctccaaacccta

SEQ ID NO: 219453 - DNA, 13 bp, Artificial Sequence
  Oligonucleotide for detection of SNP TSC0053373
tataggattgtat

SEQ ID NO: 219454 - DNA, 13 bp, Artificial Sequence
  Oligonucleotide for detection of SNP TSC0053373
atacaatcctata

SEQ ID NO: 219455 - DNA, 13 bp, Artificial Sequence
  Oligonucleotide for detection of SNP TSC0053373
tataggtttgtat

SEQ ID NO: 219456 - DNA, 13 bp, Artificial Sequence
  Oligonucleotide for detection of SNP TSC0053373
atacaaacctata

SEQ ID NO: 219457 - DNA, 13 bp, Artificial Sequence
  Oligonucleotide for detection of SNP TSC0053373
atatagttttata

SEQ ID NO: 219458 - DNA, 13 bp, Artificial Sequence
  Oligonucleotide for detection of SNP TSC0053373
tataaaactatat

SEQ ID NO: 219459 - DNA, 13 bp, Artificial Sequence
  Oligonucleotide for detection of SNP TSC0053375
gaatttattgaaa

SEQ ID NO: 219460 - DNA, 13 bp, Artificial Sequence
  Oligonucleotide for detection of SNP TSC0053375
tttcaataaattc

SEQ ID NO: 219461 - DNA, 13 bp, Artificial Sequence
  Oligonucleotide for detection of SNP TSC0053375
gaatttgttgaaa

SEQ ID NO: 219462 - DNA, 13 bp, Artificial Sequence
  Oligonucleotide for detection of SNP TSC0053375
tttcaacaaattc

SEQ ID NO: 219463 - DNA, 13 bp, Artificial Sequence
  Oligonucleotide for detection of SNP TSC0053378
tatttttggttaa

SEQ ID NO: 219464 - DNA, 13 bp, Artificial Sequence
  Oligonucleotide for detection of SNP TSC0053378
ttaaccaaaaata

SEQ ID NO: 219465 - DNA, 13 bp, Artificial Sequence
  Oligonucleotide for detection of SNP TSC0053378
tattttcggttaa

SEQ ID NO: 219466 - DNA, 13 bp, Artificial Sequence
  Oligonucleotide for detection of SNP TSC0053378
ttaaccgaaaata

SEQ ID NO: 219467 - DNA, 13 bp, Artificial Sequence
  Oligonucleotide for detection of SNP TSC0053378
ttggttggggatg

SEQ ID NO: 219468 - DNA, 13 bp, Artificial Sequence
  Oligonucleotide for detection of SNP TSC0053378
catccccaaccaa

SEQ ID NO: 219469 - DNA, 13 bp, Artificial Sequence
  Oligonucleotide for detection of SNP TSC0053378
ttggttagggatg

SEQ ID NO: 219470 - DNA, 13 bp, Artificial Sequence
  Oligonucleotide for detection of SNP TSC0053378
catccctaaccaa

SEQ ID NO: 219471 - DNA, 13 bp, Artificial Sequence
  Oligonucleotide for detection of SNP TSC0053378
ttggtcggggatg

SEQ ID NO: 219472 - DNA, 13 bp, Artificial Sequence
  Oligonucleotide for detection of SNP TSC0053378
catccccgaccaa

SEQ ID NO: 219473 - DNA, 13 bp, Artificial Sequence
  Oligonucleotide for detection of SNP TSC0053379
attataataatta

SEQ ID NO: 219474 - DNA, 13 bp, Artificial Sequence
  Oligonucleotide for detection of SNP TSC0053379
taattattataat

SEQ ID NO: 219475 - DNA, 13 bp, Artificial Sequence
  Oligonucleotide for detection of SNP TSC0053379
attatagtaatta

SEQ ID NO: 219476 - DNA, 13 bp, Artificial Sequence
  Oligonucleotide for detection of SNP TSC0053379
taattactataat

SEQ ID NO: 219477 - DNA, 13 bp, Artificial Sequence
  Oligonucleotide for detection of SNP TSC0053384
taggtagtatatt

SEQ ID NO: 219478 - DNA, 13 bp, Artificial Sequence
  Oligonucleotide for detection of SNP TSC0053384
aatatactaccta

SEQ ID NO: 219479 - DNA, 13 bp, Artificial Sequence
  Oligonucleotide for detection of SNP TSC0053384
taggtaatatatt

SEQ ID NO: 219480 - DNA, 13 bp, Artificial Sequence
  Oligonucleotide for detection of SNP TSC0053384
aatatattaccta

SEQ ID NO: 219481 - DNA, 13 bp, Artificial Sequence
  Oligonucleotide for detection of SNP TSC0053385
gatttttaaattt

SEQ ID NO: 219482 - DNA, 13 bp, Artificial Sequence
  Oligonucleotide for detection of SNP TSC0053385
aaatttaaaaatc

SEQ ID NO: 219483 - DNA, 13 bp, Artificial Sequence
  Oligonucleotide for detection of SNP TSC0053385
aaattttaaaaty

SEQ ID NO: 219484 - DNA, 13 bp, Artificial Sequence
  Oligonucleotide for detection of SNP TSC0053385
rattttaaaattt

SEQ ID NO: 219485 - DNA, 13 bp, Artificial Sequence
  Oligonucleotide for detection of SNP TSC0053385
aaatttaaaaaty

SEQ ID NO: 219486 - DNA, 13 bp, Artificial Sequence
  Oligonucleotide for detection of SNP TSC0053385
ratttttaaattt

SEQ ID NO: 219487 - DNA, 13 bp, Artificial Sequence
  Oligonucleotide for detection of SNP TSC0053386
tttttgtgaatga

SEQ ID NO: 219488 - DNA, 13 bp, Artificial Sequence
  Oligonucleotide for detection of SNP TSC0053386
tcattcacaaaaa

SEQ ID NO: 219489 - DNA, 13 bp, Artificial Sequence
  Oligonucleotide for detection of SNP TSC0053386
tttttgcgaatga

SEQ ID NO: 219490 - DNA, 13 bp, Artificial Sequence
  Oligonucleotide for detection of SNP TSC0053386
tcattcgcaaaaa

SEQ ID NO: 219491 - DNA, 13 bp, Artificial Sequence
  Oligonucleotide for detection of SNP TSC0053386
ttatttgtagagg

SEQ ID NO: 219492 - DNA, 13 bp, Artificial Sequence
  Oligonucleotide for detection of SNP TSC0053386
cctctacaaataa

SEQ ID NO: 219493 - DNA, 13 bp, Artificial Sequence
  Oligonucleotide for detection of SNP TSC0053386
ttatttatagagg

SEQ ID NO: 219494 - DNA, 13 bp, Artificial Sequence
  Oligonucleotide for detection of SNP TSC0053386
cctctataaataa

SEQ ID NO: 219495 - DNA, 13 bp, Artificial Sequence
  Oligonucleotide for detection of SNP TSC0053386
ttattcgtagagg

SEQ ID NO: 219496 - DNA, 13 bp, Artificial Sequence
  Oligonucleotide for detection of SNP TSC0053386
cctctacgaataa

SEQ ID NO: 219497 - DNA, 13 bp, Artificial Sequence
  Oligonucleotide for detection of SNP TSC0053387
taaagttgggtaa

SEQ ID NO: 219498 - DNA, 13 bp, Artificial Sequence
  Oligonucleotide for detection of SNP TSC0053387
ttacccaacttta

SEQ ID NO: 219499 - DNA, 13 bp, Artificial Sequence
  Oligonucleotide for detection of SNP TSC0053387
taaagtcgggtaa

SEQ ID NO: 219500 - DNA, 13 bp, Artificial Sequence
  Oligonucleotide for detection of SNP TSC0053387
ttacccgacttta

SEQ ID NO: 219501 - DNA, 13 bp, Artificial Sequence
  Oligonucleotide for detection of SNP TSC0053387
ttgtttgatttta

SEQ ID NO: 219502 - DNA, 13 bp, Artificial Sequence
  Oligonucleotide for detection of SNP TSC0053387
taaaatcaaacaa

SEQ ID NO: 219503 - DNA, 13 bp, Artificial Sequence
  Oligonucleotide for detection of SNP TSC0053387
ttgttcgatttta

SEQ ID NO: 219504 - DNA, 13 bp, Artificial Sequence
  Oligonucleotide for detection of SNP TSC0053387
taaaatcgaacaa

SEQ ID NO: 219505 - DNA, 13 bp, Artificial Sequence
  Oligonucleotide for detection of SNP TSC0053388
tatagtaaaaaaa

SEQ ID NO: 219506 - DNA, 13 bp, Artificial Sequence
  Oligonucleotide for detection of SNP TSC0053388
tttttttactata

SEQ ID NO: 219507 - DNA, 13 bp, Artificial Sequence
  Oligonucleotide for detection of SNP TSC0053388
tatagttaaaaaa

SEQ ID NO: 219508 - DNA, 13 bp, Artificial Sequence
  Oligonucleotide for detection of SNP TSC0053388
ttttttaactata

SEQ ID NO: 219509 - DNA, 13 bp, Artificial Sequence
  Oligonucleotide for detection of SNP TSC0053390
aatatgatttgat

SEQ ID NO: 219510 - DNA, 13 bp, Artificial Sequence
  Oligonucleotide for detection of SNP TSC0053390
atcaaatcatatt

SEQ ID NO: 219511 - DNA, 13 bp, Artificial Sequence
  Oligonucleotide for detection of SNP TSC0053390
aatatggtttgat

SEQ ID NO: 219512 - DNA, 13 bp, Artificial Sequence
  Oligonucleotide for detection of SNP TSC0053390
atcaaaccatatt

SEQ ID NO: 219513 - DNA, 13 bp, Artificial Sequence
  Oligonucleotide for detection of SNP TSC0053390
aatacgatttgat

SEQ ID NO: 219514 - DNA, 13 bp, Artificial Sequence
  Oligonucleotide for detection of SNP TSC0053390
atcaaatcgtatt

SEQ ID NO: 219515 - DNA, 13 bp, Artificial Sequence
  Oligonucleotide for detection of SNP TSC0053390
aatacggtttgat

SEQ ID NO: 219516 - DNA, 13 bp, Artificial Sequence
  Oligonucleotide for detection of SNP TSC0053390
atcaaaccgtatt

SEQ ID NO: 219517 - DNA, 13 bp, Artificial Sequence
  Oligonucleotide for detection of SNP TSC0053391
ttgtggggaaggt

SEQ ID NO: 219518 - DNA, 13 bp, Artificial Sequence
  Oligonucleotide for detection of SNP TSC0053391
accttccccacaa

SEQ ID NO: 219519 - DNA, 13 bp, Artificial Sequence
  Oligonucleotide for detection of SNP TSC0053391
ttgtggagaaggt

SEQ ID NO: 219520 - DNA, 13 bp, Artificial Sequence
  Oligonucleotide for detection of SNP TSC0053391
accttctccacaa

SEQ ID NO: 219521 - DNA, 13 bp, Artificial Sequence
  Oligonucleotide for detection of SNP TSC0053392
ggagggttattta

SEQ ID NO: 219522 - DNA, 13 bp, Artificial Sequence
  Oligonucleotide for detection of SNP TSC0053392
taaataaccctcc

SEQ ID NO: 219523 - DNA, 13 bp, Artificial Sequence
  Oligonucleotide for detection of SNP TSC0053392
ggaggggtattta

SEQ ID NO: 219524 - DNA, 13 bp, Artificial Sequence
  Oligonucleotide for detection of SNP TSC0053392
taaatacccctcc

SEQ ID NO: 219525 - DNA, 13 bp, Artificial Sequence
  Oligonucleotide for detection of SNP TSC0053392
tgggtggttttty

SEQ ID NO: 219526 - DNA, 13 bp, Artificial Sequence
  Oligonucleotide for detection of SNP TSC0053392
raaaaaccaccca

SEQ ID NO: 219527 - DNA, 13 bp, Artificial Sequence
  Oligonucleotide for detection of SNP TSC0053392
tgggtgtttttty

SEQ ID NO: 219528 - DNA, 13 bp, Artificial Sequence
  Oligonucleotide for detection of SNP TSC0053392
raaaaaacaccca

SEQ ID NO: 219529 - DNA, 13 bp, Artificial Sequence
  Oligonucleotide for detection of SNP TSC0053393
ttatgataataat

SEQ ID NO: 219530 - DNA, 13 bp, Artificial Sequence
  Oligonucleotide for detection of SNP TSC0053393
attattatcataa

SEQ ID NO: 219531 - DNA, 13 bp, Artificial Sequence
  Oligonucleotide for detection of SNP TSC0053393
ttatgagaataat

SEQ ID NO: 219532 - DNA, 13 bp, Artificial Sequence
  Oligonucleotide for detection of SNP TSC0053393
attattctcataa

SEQ ID NO: 219533 - DNA, 13 bp, Artificial Sequence
  Oligonucleotide for detection of SNP TSC0053393
attgttgttatag

SEQ ID NO: 219534 - DNA, 13 bp, Artificial Sequence
  Oligonucleotide for detection of SNP TSC0053393
ctataacaacaat

SEQ ID NO: 219535 - DNA, 13 bp, Artificial Sequence
  Oligonucleotide for detection of SNP TSC0053393
attgtttttatag

SEQ ID NO: 219536 - DNA, 13 bp, Artificial Sequence
  Oligonucleotide for detection of SNP TSC0053393
ctataaaaacaat

SEQ ID NO: 219537 - DNA, 13 bp, Artificial Sequence
  Oligonucleotide for detection of SNP TSC0053394
agaagtagtaaat

SEQ ID NO: 219538 - DNA, 13 bp, Artificial Sequence
  Oligonucleotide for detection of SNP TSC0053394
atttactacttct

SEQ ID NO: 219539 - DNA, 13 bp, Artificial Sequence
  Oligonucleotide for detection of SNP TSC0053394
agaagtggtaaat

SEQ ID NO: 219540 - DNA, 13 bp, Artificial Sequence
  Oligonucleotide for detection of SNP TSC0053394
atttaccacttct

SEQ ID NO: 219541 - DNA, 13 bp, Artificial Sequence
  Oligonucleotide for detection of SNP TSC0053394
agaagcggtaaat

SEQ ID NO: 219542 - DNA, 13 bp, Artificial Sequence
  Oligonucleotide for detection of SNP TSC0053394
atttaccgcttct

SEQ ID NO: 219543 - DNA, 13 bp, Artificial Sequence
  Oligonucleotide for detection of SNP TSC0053395
cgtatatgttttt

SEQ ID NO: 219544 - DNA, 13 bp, Artificial Sequence
  Oligonucleotide for detection of SNP TSC0053395
aaaaacatatacg

SEQ ID NO: 219545 - DNA, 13 bp, Artificial Sequence
  Oligonucleotide for detection of SNP TSC0053395
cgtatacgttttt

SEQ ID NO: 219546 - DNA, 13 bp, Artificial Sequence
  Oligonucleotide for detection of SNP TSC0053395
aaaaacgtatacg

SEQ ID NO: 219547 - DNA, 13 bp, Artificial Sequence
  Oligonucleotide for detection of SNP TSC0053395
aaaggtgtatatg

SEQ ID NO: 219548 - DNA, 13 bp, Artificial Sequence
  Oligonucleotide for detection of SNP TSC0053395
catatacaccttt

SEQ ID NO: 219549 - DNA, 13 bp, Artificial Sequence
  Oligonucleotide for detection of SNP TSC0053395
aaaggtatatatg

SEQ ID NO: 219550 - DNA, 13 bp, Artificial Sequence
  Oligonucleotide for detection of SNP TSC0053395
catatataccttt

SEQ ID NO: 219551 - DNA, 13 bp, Artificial Sequence
  Oligonucleotide for detection of SNP TSC0053395
aaaggcgtatatg

SEQ ID NO: 219552 - DNA, 13 bp, Artificial Sequence
  Oligonucleotide for detection of SNP TSC0053395
catatacgccttt

SEQ ID NO: 219553 - DNA, 13 bp, Artificial Sequence
  Oligonucleotide for detection of SNP TSC0053395
aaaggtatatacg

SEQ ID NO: 219554 - DNA, 13 bp, Artificial Sequence
  Oligonucleotide for detection of SNP TSC0053395
cgtatataccttt

SEQ ID NO: 219555 - DNA, 13 bp, Artificial Sequence
  Oligonucleotide for detection of SNP TSC0053395
aaaggtgtatacg

SEQ ID NO: 219556 - DNA, 13 bp, Artificial Sequence
  Oligonucleotide for detection of SNP TSC0053395
cgtatacaccttt

SEQ ID NO: 219557 - DNA, 13 bp, Artificial Sequence
  Oligonucleotide for detection of SNP TSC0053395
aaaggcgtatacg

SEQ ID NO: 219558 - DNA, 13 bp, Artificial Sequence
  Oligonucleotide for detection of SNP TSC0053395
cgtatacgccttt

SEQ ID NO: 219559 - DNA, 13 bp, Artificial Sequence
  Oligonucleotide for detection of SNP TSC0053396
attttggaattga

SEQ ID NO: 219560 - DNA, 13 bp, Artificial Sequence
  Oligonucleotide for detection of SNP TSC0053396
tcaattccaaaat

SEQ ID NO: 219561 - DNA, 13 bp, Artificial Sequence
  Oligonucleotide for detection of SNP TSC0053396
attttgaaattga

SEQ ID NO: 219562 - DNA, 13 bp, Artificial Sequence
  Oligonucleotide for detection of SNP TSC0053396
tcaatttcaaaat

SEQ ID NO: 219563 - DNA, 13 bp, Artificial Sequence
  Oligonucleotide for detection of SNP TSC0053397
tgttgaaaaattt

SEQ ID NO: 219564 - DNA, 13 bp, Artificial Sequence
  Oligonucleotide for detection of SNP TSC0053397
aaatttttcaaca

SEQ ID NO: 219565 - DNA, 13 bp, Artificial Sequence
  Oligonucleotide for detection of SNP TSC0053397
tgttgagaaattt

SEQ ID NO: 219566 - DNA, 13 bp, Artificial Sequence
  Oligonucleotide for detection of SNP TSC0053397
aaatttctcaaca

SEQ ID NO: 219567 - DNA, 13 bp, Artificial Sequence
  Oligonucleotide for detection of SNP TSC0053398
tggttgtgaatty

SEQ ID NO: 219568 - DNA, 13 bp, Artificial Sequence
  Oligonucleotide for detection of SNP TSC0053398
raattcacaacca

SEQ ID NO: 219569 - DNA, 13 bp, Artificial Sequence
  Oligonucleotide for detection of SNP TSC0053398
tggttgcgaatty

SEQ ID NO: 219570 - DNA, 13 bp, Artificial Sequence
  Oligonucleotide for detection of SNP TSC0053398
raattcgcaacca

SEQ ID NO: 219571 - DNA, 13 bp, Artificial Sequence
  Oligonucleotide for detection of SNP TSC0053398
gaatttgtagtta

SEQ ID NO: 219572 - DNA, 13 bp, Artificial Sequence
  Oligonucleotide for detection of SNP TSC0053398
taactacaaattc

SEQ ID NO: 219573 - DNA, 13 bp, Artificial Sequence
  Oligonucleotide for detection of SNP TSC0053398
gaatttatagtta

SEQ ID NO: 219574 - DNA, 13 bp, Artificial Sequence
  Oligonucleotide for detection of SNP TSC0053398
taactataaattc

SEQ ID NO: 219575 - DNA, 13 bp, Artificial Sequence
  Oligonucleotide for detection of SNP TSC0053398
gaattcgtagtta

SEQ ID NO: 219576 - DNA, 13 bp, Artificial Sequence
  Oligonucleotide for detection of SNP TSC0053398
taactacgaattc

SEQ ID NO: 219577 - DNA, 13 bp, Artificial Sequence
  Oligonucleotide for detection of SNP TSC0053399
gttttatggtgtt

SEQ ID NO: 219578 - DNA, 13 bp, Artificial Sequence
  Oligonucleotide for detection of SNP TSC0053399
aacaccataaaac

SEQ ID NO: 219579 - DNA, 13 bp, Artificial Sequence
  Oligonucleotide for detection of SNP TSC0053399
gttttacggtgtt

SEQ ID NO: 219580 - DNA, 13 bp, Artificial Sequence
  Oligonucleotide for detection of SNP TSC0053399
aacaccgtaaaac

SEQ ID NO: 219581 - DNA, 13 bp, Artificial Sequence
  Oligonucleotide for detection of SNP TSC0053405
ggttgggttagtg

SEQ ID NO: 219582 - DNA, 13 bp, Artificial Sequence
  Oligonucleotide for detection of SNP TSC0053405
cactaacccaacc

SEQ ID NO: 219583 - DNA, 13 bp, Artificial Sequence
  Oligonucleotide for detection of SNP TSC0053405
ggttggattagtg

SEQ ID NO: 219584 - DNA, 13 bp, Artificial Sequence
  Oligonucleotide for detection of SNP TSC0053405
cactaatccaacc

SEQ ID NO: 219585 - DNA, 13 bp, Artificial Sequence
  Oligonucleotide for detection of SNP TSC0053406
gggataaagttaa

SEQ ID NO: 219586 - DNA, 13 bp, Artificial Sequence
  Oligonucleotide for detection of SNP TSC0053406
ttaactttatccc

SEQ ID NO: 219587 - DNA, 13 bp, Artificial Sequence
  Oligonucleotide for detection of SNP TSC0053409
tattggtaaattt

SEQ ID NO: 219588 - DNA, 13 bp, Artificial Sequence
  Oligonucleotide for detection of SNP TSC0053409
aaatttaccaata

SEQ ID NO: 219589 - DNA, 13 bp, Artificial Sequence
  Oligonucleotide for detection of SNP TSC0053409
tattgggaaattt

SEQ ID NO: 219590 - DNA, 13 bp, Artificial Sequence
  Oligonucleotide for detection of SNP TSC0053409
aaatttcccaata

SEQ ID NO: 219591 - DNA, 13 bp, Artificial Sequence
  Oligonucleotide for detection of SNP TSC0053409
aaatttattagtg

SEQ ID NO: 219592 - DNA, 13 bp, Artificial Sequence
  Oligonucleotide for detection of SNP TSC0053409
cactaataaattt

SEQ ID NO: 219593 - DNA, 13 bp, Artificial Sequence
  Oligonucleotide for detection of SNP TSC0053409
aaattttttagtg

SEQ ID NO: 219594 - DNA, 13 bp, Artificial Sequence
  Oligonucleotide for detection of SNP TSC0053409
cactaaaaaattt

SEQ ID NO: 219595 - DNA, 13 bp, Artificial Sequence
  Oligonucleotide for detection of SNP TSC0053410
gtgttatgtttaa

SEQ ID NO: 219596 - DNA, 13 bp, Artificial Sequence
  Oligonucleotide for detection of SNP TSC0053410
ttaaacataacac

SEQ ID NO: 219597 - DNA, 13 bp, Artificial Sequence
  Oligonucleotide for detection of SNP TSC0053410
gtgttacgtttaa

SEQ ID NO: 219598 - DNA, 13 bp, Artificial Sequence
  Oligonucleotide for detection of SNP TSC0053410
ttaaacgtaacac

SEQ ID NO: 219599 - DNA, 13 bp, Artificial Sequence
  Oligonucleotide for detection of SNP TSC0053410
ttgaatgtagtay

SEQ ID NO: 219600 - DNA, 13 bp, Artificial Sequence
  Oligonucleotide for detection of SNP TSC0053410
rtactacattcaa

SEQ ID NO: 219601 - DNA, 13 bp, Artificial Sequence
  Oligonucleotide for detection of SNP TSC0053410
ttgaatatagtay

SEQ ID NO: 219602 - DNA, 13 bp, Artificial Sequence
  Oligonucleotide for detection of SNP TSC0053410
rtactatattcaa

SEQ ID NO: 219603 - DNA, 13 bp, Artificial Sequence
  Oligonucleotide for detection of SNP TSC0053410
ttgaacgtagtay

SEQ ID NO: 219604 - DNA, 13 bp, Artificial Sequence
  Oligonucleotide for detection of SNP TSC0053410
rtactacgttcaa

SEQ ID NO: 219605 - DNA, 13 bp, Artificial Sequence
  Oligonucleotide for detection of SNP TSC0053412
ggtattagttgtg

SEQ ID NO: 219606 - DNA, 13 bp, Artificial Sequence
  Oligonucleotide for detection of SNP TSC0053412
cacaactaatacc

SEQ ID NO: 219607 - DNA, 13 bp, Artificial Sequence
  Oligonucleotide for detection of SNP TSC0053412
ggtattggttgtg

SEQ ID NO: 219608 - DNA, 13 bp, Artificial Sequence
  Oligonucleotide for detection of SNP TSC0053412
cacaaccaatacc

SEQ ID NO: 219609 - DNA, 13 bp, Artificial Sequence
  Oligonucleotide for detection of SNP TSC0053412
ggtatcggttgtg

SEQ ID NO: 219610 - DNA, 13 bp, Artificial Sequence
  Oligonucleotide for detection of SNP TSC0053412
cacaaccgatacc

SEQ ID NO: 219611 - DNA, 13 bp, Artificial Sequence
  Oligonucleotide for detection of SNP TSC0053412
tatagttggtgty

SEQ ID NO: 219612 - DNA, 13 bp, Artificial Sequence
  Oligonucleotide for detection of SNP TSC0053412
racaccaactata

SEQ ID NO: 219613 - DNA, 13 bp, Artificial Sequence
  Oligonucleotide for detection of SNP TSC0053412
tatagtcggtgty

SEQ ID NO: 219614 - DNA, 13 bp, Artificial Sequence
  Oligonucleotide for detection of SNP TSC0053412
racaccgactata

SEQ ID NO: 219615 - DNA, 13 bp, Artificial Sequence
  Oligonucleotide for detection of SNP TSC0053413
agtgttattaaay

SEQ ID NO: 219616 - DNA, 13 bp, Artificial Sequence
  Oligonucleotide for detection of SNP TSC0053413
rtttaataacact

SEQ ID NO: 219617 - DNA, 13 bp, Artificial Sequence
  Oligonucleotide for detection of SNP TSC0053413
agtgttgttaaay

SEQ ID NO: 219618 - DNA, 13 bp, Artificial Sequence
  Oligonucleotide for detection of SNP TSC0053413
rtttaacaacact

SEQ ID NO: 219619 - DNA, 13 bp, Artificial Sequence
  Oligonucleotide for detection of SNP TSC0053413
agtgtcgttaaay

SEQ ID NO: 219620 - DNA, 13 bp, Artificial Sequence
  Oligonucleotide for detection of SNP TSC0053413
rtttaacgacact

SEQ ID NO: 219621 - DNA, 13 bp, Artificial Sequence
  Oligonucleotide for detection of SNP TSC0053413
gtttggtggtatt

SEQ ID NO: 219622 - DNA, 13 bp, Artificial Sequence
  Oligonucleotide for detection of SNP TSC0053413
aataccaccaaac

SEQ ID NO: 219623 - DNA, 13 bp, Artificial Sequence
  Oligonucleotide for detection of SNP TSC0053413
gtttggcggtatt

SEQ ID NO: 219624 - DNA, 13 bp, Artificial Sequence
  Oligonucleotide for detection of SNP TSC0053413
aataccgccaaac

SEQ ID NO: 219625 - DNA, 13 bp, Artificial Sequence
  Oligonucleotide for detection of SNP TSC0053415
tatgttatttgtg

SEQ ID NO: 219626 - DNA, 13 bp, Artificial Sequence
  Oligonucleotide for detection of SNP TSC0053415
cacaaataacata

SEQ ID NO: 219627 - DNA, 13 bp, Artificial Sequence
  Oligonucleotide for detection of SNP TSC0053415
tatgttgtttgtg

SEQ ID NO: 219628 - DNA, 13 bp, Artificial Sequence
  Oligonucleotide for detection of SNP TSC0053415
cacaaacaacata

SEQ ID NO: 219629 - DNA, 13 bp, Artificial Sequence
  Oligonucleotide for detection of SNP TSC0053419
ggggttggggtgg

SEQ ID NO: 219630 - DNA, 13 bp, Artificial Sequence
  Oligonucleotide for detection of SNP TSC0053419
ccaccccaacccc

SEQ ID NO: 219631 - DNA, 13 bp, Artificial Sequence
  Oligonucleotide for detection of SNP TSC0053419
ggggttagggtgg

SEQ ID NO: 219632 - DNA, 13 bp, Artificial Sequence
  Oligonucleotide for detection of SNP TSC0053419
ccaccctaacccc

SEQ ID NO: 219633 - DNA, 13 bp, Artificial Sequence
  Oligonucleotide for detection of SNP TSC0053419
ggggtcggggtgg

SEQ ID NO: 219634 - DNA, 13 bp, Artificial Sequence
  Oligonucleotide for detection of SNP TSC0053419
ccaccccgacccc

SEQ ID NO: 219635 - DNA, 13 bp, Artificial Sequence
  Oligonucleotide for detection of SNP TSC0053422
agaattaagtttg

SEQ ID NO: 219636 - DNA, 13 bp, Artificial Sequence
  Oligonucleotide for detection of SNP TSC0053422
caaacttaattct

SEQ ID NO: 219637 - DNA, 13 bp, Artificial Sequence
  Oligonucleotide for detection of SNP TSC0053422
agaatttagtttg

SEQ ID NO: 219638 - DNA, 13 bp, Artificial Sequence
  Oligonucleotide for detection of SNP TSC0053422
caaactaaattct

SEQ ID NO: 219639 - DNA, 13 bp, Artificial Sequence
  Oligonucleotide for detection of SNP TSC0053422
taaatttaatttt

SEQ ID NO: 219640 - DNA, 13 bp, Artificial Sequence
  Oligonucleotide for detection of SNP TSC0053422
aaaattaaattta

SEQ ID NO: 219641 - DNA, 13 bp, Artificial Sequence
  Oligonucleotide for detection of SNP TSC0053422
taaattgaatttt

SEQ ID NO: 219642 - DNA, 13 bp, Artificial Sequence
  Oligonucleotide for detection of SNP TSC0053422
aaaattcaattta

SEQ ID NO: 219643 - DNA, 13 bp, Artificial Sequence
  Oligonucleotide for detection of SNP TSC0053423
atattggaggatt

SEQ ID NO: 219644 - DNA, 13 bp, Artificial Sequence
  Oligonucleotide for detection of SNP TSC0053423
aatcctccaatat

SEQ ID NO: 219645 - DNA, 13 bp, Artificial Sequence
  Oligonucleotide for detection of SNP TSC0053423
atattgaaggatt

SEQ ID NO: 219646 - DNA, 13 bp, Artificial Sequence
  Oligonucleotide for detection of SNP TSC0053423
aatccttcaatat

SEQ ID NO: 219647 - DNA, 13 bp, Artificial Sequence
  Oligonucleotide for detection of SNP TSC0053425
tattggatttttt

SEQ ID NO: 219648 - DNA, 13 bp, Artificial Sequence
  Oligonucleotide for detection of SNP TSC0053425
aaaaaatccaata

SEQ ID NO: 219649 - DNA, 13 bp, Artificial Sequence
  Oligonucleotide for detection of SNP TSC0053426
gttagtaggggta

SEQ ID NO: 219650 - DNA, 13 bp, Artificial Sequence
  Oligonucleotide for detection of SNP TSC0053426
tacccctactaac

SEQ ID NO: 219651 - DNA, 13 bp, Artificial Sequence
  Oligonucleotide for detection of SNP TSC0053426
gttagtgggggta

SEQ ID NO: 219652 - DNA, 13 bp, Artificial Sequence
  Oligonucleotide for detection of SNP TSC0053426
tacccccactaac

SEQ ID NO: 219653 - DNA, 13 bp, Artificial Sequence
  Oligonucleotide for detection of SNP TSC0053433
gaggttttgagat

SEQ ID NO: 219654 - DNA, 13 bp, Artificial Sequence
  Oligonucleotide for detection of SNP TSC0053433
atctcaaaacctc

SEQ ID NO: 219655 - DNA, 13 bp, Artificial Sequence
  Oligonucleotide for detection of SNP TSC0053437
attttataaatga

SEQ ID NO: 219656 - DNA, 13 bp, Artificial Sequence
  Oligonucleotide for detection of SNP TSC0053437
tcatttataaaat

SEQ ID NO: 219657 - DNA, 13 bp, Artificial Sequence
  Oligonucleotide for detection of SNP TSC0053437
ttatttatgagat

SEQ ID NO: 219658 - DNA, 13 bp, Artificial Sequence
  Oligonucleotide for detection of SNP TSC0053437
atctcataaataa

SEQ ID NO: 219659 - DNA, 13 bp, Artificial Sequence
  Oligonucleotide for detection of SNP TSC0053437
ttatttttgagat

SEQ ID NO: 219660 - DNA, 13 bp, Artificial Sequence
  Oligonucleotide for detection of SNP TSC0053437
atctcaaaaataa

SEQ ID NO: 219661 - DNA, 13 bp, Artificial Sequence
  Oligonucleotide for detection of SNP TSC0053439
atatagatagttg

SEQ ID NO: 219662 - DNA, 13 bp, Artificial Sequence
  Oligonucleotide for detection of SNP TSC0053439
caactatctatat

SEQ ID NO: 219663 - DNA, 13 bp, Artificial Sequence
  Oligonucleotide for detection of SNP TSC0053439
atataggtagttg

SEQ ID NO: 219664 - DNA, 13 bp, Artificial Sequence
  Oligonucleotide for detection of SNP TSC0053439
caactacctatat

SEQ ID NO: 219665 - DNA, 13 bp, Artificial Sequence
  Oligonucleotide for detection of SNP TSC0053440
gatttttagtttt

SEQ ID NO: 219666 - DNA, 13 bp, Artificial Sequence
  Oligonucleotide for detection of SNP TSC0053440
aaaactaaaaatc

SEQ ID NO: 219667 - DNA, 13 bp, Artificial Sequence
  Oligonucleotide for detection of SNP TSC0053440
gattttgagtttt

SEQ ID NO: 219668 - DNA, 13 bp, Artificial Sequence
  Oligonucleotide for detection of SNP TSC0053440
aaaactcaaaatc

SEQ ID NO: 219669 - DNA, 13 bp, Artificial Sequence
  Oligonucleotide for detection of SNP TSC0053440
aaggttgaaaaty

SEQ ID NO: 219670 - DNA, 13 bp, Artificial Sequence
  Oligonucleotide for detection of SNP TSC0053440
rattttcaacctt

SEQ ID NO: 219671 - DNA, 13 bp, Artificial Sequence
  Oligonucleotide for detection of SNP TSC0053440
aaggtttaaaaty

SEQ ID NO: 219672 - DNA, 13 bp, Artificial Sequence
  Oligonucleotide for detection of SNP TSC0053440
rattttaaacctt

SEQ ID NO: 219673 - DNA, 13 bp, Artificial Sequence
  Oligonucleotide for detection of SNP TSC0053441
ttaaaagtaaaga

SEQ ID NO: 219674 - DNA, 13 bp, Artificial Sequence
  Oligonucleotide for detection of SNP TSC0053441
tctttacttttaa

SEQ ID NO: 219675 - DNA, 13 bp, Artificial Sequence
  Oligonucleotide for detection of SNP TSC0053441
ttaaaattaaaga

SEQ ID NO: 219676 - DNA, 13 bp, Artificial Sequence
  Oligonucleotide for detection of SNP TSC0053441
tctttaattttaa

SEQ ID NO: 219677 - DNA, 13 bp, Artificial Sequence
  Oligonucleotide for detection of SNP TSC0053443
ttttttgggatgt

SEQ ID NO: 219678 - DNA, 13 bp, Artificial Sequence
  Oligonucleotide for detection of SNP TSC0053443
acatcccaaaaaa

SEQ ID NO: 219679 - DNA, 13 bp, Artificial Sequence
  Oligonucleotide for detection of SNP TSC0053443
tttttcgggatgt

SEQ ID NO: 219680 - DNA, 13 bp, Artificial Sequence
  Oligonucleotide for detection of SNP TSC0053443
acatcccgaaaaa

SEQ ID NO: 219681 - DNA, 13 bp, Artificial Sequence
  Oligonucleotide for detection of SNP TSC0053443
atatttgggagag

SEQ ID NO: 219682 - DNA, 13 bp, Artificial Sequence
  Oligonucleotide for detection of SNP TSC0053443
ctctcccaaatat

SEQ ID NO: 219683 - DNA, 13 bp, Artificial Sequence
  Oligonucleotide for detection of SNP TSC0053443
atattcgggagag

SEQ ID NO: 219684 - DNA, 13 bp, Artificial Sequence
  Oligonucleotide for detection of SNP TSC0053443
ctctcccgaatat

SEQ ID NO: 219685 - DNA, 13 bp, Artificial Sequence
  Oligonucleotide for detection of SNP TSC0053447
atttagagtttty

SEQ ID NO: 219686 - DNA, 13 bp, Artificial Sequence
  Oligonucleotide for detection of SNP TSC0053447
raaaactctaaat

SEQ ID NO: 219687 - DNA, 13 bp, Artificial Sequence
  Oligonucleotide for detection of SNP TSC0053447
atttagtgtttty

SEQ ID NO: 219688 - DNA, 13 bp, Artificial Sequence
  Oligonucleotide for detection of SNP TSC0053447
raaaacactaaat

SEQ ID NO: 219689 - DNA, 13 bp, Artificial Sequence
  Oligonucleotide for detection of SNP TSC0053447
gagaattttaaat

SEQ ID NO: 219690 - DNA, 13 bp, Artificial Sequence
  Oligonucleotide for detection of SNP TSC0053447
atttaaaattctc

SEQ ID NO: 219691 - DNA, 13 bp, Artificial Sequence
  Oligonucleotide for detection of SNP TSC0053447
gagaatattaaat

SEQ ID NO: 219692 - DNA, 13 bp, Artificial Sequence
  Oligonucleotide for detection of SNP TSC0053447
atttaatattctc

SEQ ID NO: 219693 - DNA, 13 bp, Artificial Sequence
  Oligonucleotide for detection of SNP TSC0053451
agattagttgttg

SEQ ID NO: 219694 - DNA, 13 bp, Artificial Sequence
  Oligonucleotide for detection of SNP TSC0053451
caacaactaatct

SEQ ID NO: 219695 - DNA, 13 bp, Artificial Sequence
  Oligonucleotide for detection of SNP TSC0053451
agattaattgttg

SEQ ID NO: 219696 - DNA, 13 bp, Artificial Sequence
  Oligonucleotide for detection of SNP TSC0053451
caacaattaatct

SEQ ID NO: 219697 - DNA, 13 bp, Artificial Sequence
  Oligonucleotide for detection of SNP TSC0053452
tttgttagatttg

SEQ ID NO: 219698 - DNA, 13 bp, Artificial Sequence
  Oligonucleotide for detection of SNP TSC0053452
caaatctaacaaa

SEQ ID NO: 219699 - DNA, 13 bp, Artificial Sequence
  Oligonucleotide for detection of SNP TSC0053452
tttgttggatttg

SEQ ID NO: 219700 - DNA, 13 bp, Artificial Sequence
  Oligonucleotide for detection of SNP TSC0053452
caaatccaacaaa

SEQ ID NO: 219701 - DNA, 13 bp, Artificial Sequence
  Oligonucleotide for detection of SNP TSC0053452
tttgtcggatttg

SEQ ID NO: 219702 - DNA, 13 bp, Artificial Sequence
  Oligonucleotide for detection of SNP TSC0053452
caaatccgacaaa

SEQ ID NO: 219703 - DNA, 13 bp, Artificial Sequence
  Oligonucleotide for detection of SNP TSC0053452
taaatttgataag

SEQ ID NO: 219704 - DNA, 13 bp, Artificial Sequence
  Oligonucleotide for detection of SNP TSC0053452
cttatcaaattta

SEQ ID NO: 219705 - DNA, 13 bp, Artificial Sequence
  Oligonucleotide for detection of SNP TSC0053452
taaattcgataag

SEQ ID NO: 219706 - DNA, 13 bp, Artificial Sequence
  Oligonucleotide for detection of SNP TSC0053452
cttatcgaattta

SEQ ID NO: 219707 - DNA, 13 bp, Artificial Sequence
  Oligonucleotide for detection of SNP TSC0053453
gtattttgagtay

SEQ ID NO: 219708 - DNA, 13 bp, Artificial Sequence
  Oligonucleotide for detection of SNP TSC0053453
rtactcaaaatac

SEQ ID NO: 219709 - DNA, 13 bp, Artificial Sequence
  Oligonucleotide for detection of SNP TSC0053453
gtatttcgagtay

SEQ ID NO: 219710 - DNA, 13 bp, Artificial Sequence
  Oligonucleotide for detection of SNP TSC0053453
rtactcgaaatac

SEQ ID NO: 219711 - DNA, 13 bp, Artificial Sequence
  Oligonucleotide for detection of SNP TSC0053453
gtatttggaatgy

SEQ ID NO: 219712 - DNA, 13 bp, Artificial Sequence
  Oligonucleotide for detection of SNP TSC0053453
rcattccaaatac

SEQ ID NO: 219713 - DNA, 13 bp, Artificial Sequence
  Oligonucleotide for detection of SNP TSC0053453
gtatttagaatgy

SEQ ID NO: 219714 - DNA, 13 bp, Artificial Sequence
  Oligonucleotide for detection of SNP TSC0053453
rcattctaaatac

SEQ ID NO: 219715 - DNA, 13 bp, Artificial Sequence
  Oligonucleotide for detection of SNP TSC0053453
gtattcggaatgy

SEQ ID NO: 219716 - DNA, 13 bp, Artificial Sequence
  Oligonucleotide for detection of SNP TSC0053453
rcattccgaatac

SEQ ID NO: 219717 - DNA, 13 bp, Artificial Sequence
  Oligonucleotide for detection of SNP TSC0053454
aaaaaaagattta

SEQ ID NO: 219718 - DNA, 13 bp, Artificial Sequence
  Oligonucleotide for detection of SNP TSC0053454
taaatcttttttt

SEQ ID NO: 219719 - DNA, 13 bp, Artificial Sequence
  Oligonucleotide for detection of SNP TSC0053454
aaaaaaggattta

SEQ ID NO: 219720 - DNA, 13 bp, Artificial Sequence
  Oligonucleotide for detection of SNP TSC0053454
taaatcctttttt

SEQ ID NO: 219721 - DNA, 13 bp, Artificial Sequence
  Oligonucleotide for detection of SNP TSC0053455
ttgatttgttatg

SEQ ID NO: 219722 - DNA, 13 bp, Artificial Sequence
  Oligonucleotide for detection of SNP TSC0053455
cataacaaatcaa

SEQ ID NO: 219723 - DNA, 13 bp, Artificial Sequence
  Oligonucleotide for detection of SNP TSC0053455
ttgattcgttatg

SEQ ID NO: 219724 - DNA, 13 bp, Artificial Sequence
  Oligonucleotide for detection of SNP TSC0053455
cataacgaatcaa

SEQ ID NO: 219725 - DNA, 13 bp, Artificial Sequence
  Oligonucleotide for detection of SNP TSC0053455
tatgatgagttag

SEQ ID NO: 219726 - DNA, 13 bp, Artificial Sequence
  Oligonucleotide for detection of SNP TSC0053455
ctaactcatcata

SEQ ID NO: 219727 - DNA, 13 bp, Artificial Sequence
  Oligonucleotide for detection of SNP TSC0053455
tatgataagttag

SEQ ID NO: 219728 - DNA, 13 bp, Artificial Sequence
  Oligonucleotide for detection of SNP TSC0053455
ctaacttatcata

SEQ ID NO: 219729 - DNA, 13 bp, Artificial Sequence
  Oligonucleotide for detection of SNP TSC0053455
tatgacgagttag

SEQ ID NO: 219730 - DNA, 13 bp, Artificial Sequence
  Oligonucleotide for detection of SNP TSC0053455
ctaactcgtcata

SEQ ID NO: 219731 - DNA, 13 bp, Artificial Sequence
  Oligonucleotide for detection of SNP TSC0053456
attataatgagty

SEQ ID NO: 219732 - DNA, 13 bp, Artificial Sequence
  Oligonucleotide for detection of SNP TSC0053456
ractcattataat

SEQ ID NO: 219733 - DNA, 13 bp, Artificial Sequence
  Oligonucleotide for detection of SNP TSC0053456
attatagtgagty

SEQ ID NO: 219734 - DNA, 13 bp, Artificial Sequence
  Oligonucleotide for detection of SNP TSC0053456
ractcactataat

SEQ ID NO: 219735 - DNA, 13 bp, Artificial Sequence
  Oligonucleotide for detection of SNP TSC0053460
ttggggagttaaa

SEQ ID NO: 219736 - DNA, 13 bp, Artificial Sequence
  Oligonucleotide for detection of SNP TSC0053460
tttaactccccaa

SEQ ID NO: 219737 - DNA, 13 bp, Artificial Sequence
  Oligonucleotide for detection of SNP TSC0053460
ttggggggttaaa

SEQ ID NO: 219738 - DNA, 13 bp, Artificial Sequence
  Oligonucleotide for detection of SNP TSC0053460
tttaaccccccaa

SEQ ID NO: 219739 - DNA, 13 bp, Artificial Sequence
  Oligonucleotide for detection of SNP TSC0053461
ggttttttgagtt

SEQ ID NO: 219740 - DNA, 13 bp, Artificial Sequence
  Oligonucleotide for detection of SNP TSC0053461
aactcaaaaaacc

SEQ ID NO: 219741 - DNA, 13 bp, Artificial Sequence
  Oligonucleotide for detection of SNP TSC0053461
ggttttgtgagtt

SEQ ID NO: 219742 - DNA, 13 bp, Artificial Sequence
  Oligonucleotide for detection of SNP TSC0053461
aactcacaaaacc

SEQ ID NO: 219743 - DNA, 13 bp, Artificial Sequence
  Oligonucleotide for detection of SNP TSC0053461
ggtttcgtgagtt

SEQ ID NO: 219744 - DNA, 13 bp, Artificial Sequence
  Oligonucleotide for detection of SNP TSC0053461
aactcacgaaacc

SEQ ID NO: 219745 - DNA, 13 bp, Artificial Sequence
  Oligonucleotide for detection of SNP TSC0053461
aatttaggagaty

SEQ ID NO: 219746 - DNA, 13 bp, Artificial Sequence
  Oligonucleotide for detection of SNP TSC0053461
ratctcctaaatt

SEQ ID NO: 219747 - DNA, 13 bp, Artificial Sequence
  Oligonucleotide for detection of SNP TSC0053461
aatttatgagaty

SEQ ID NO: 219748 - DNA, 13 bp, Artificial Sequence
  Oligonucleotide for detection of SNP TSC0053461
ratctcataaatt

SEQ ID NO: 219749 - DNA, 13 bp, Artificial Sequence
  Oligonucleotide for detection of SNP TSC0053461
aatttacgagaty

SEQ ID NO: 219750 - DNA, 13 bp, Artificial Sequence
  Oligonucleotide for detection of SNP TSC0053461
ratctcgtaaatt

SEQ ID NO: 219751 - DNA, 13 bp, Artificial Sequence
  Oligonucleotide for detection of SNP TSC0053462
gtaaaaaaaaaay

SEQ ID NO: 219752 - DNA, 13 bp, Artificial Sequence
  Oligonucleotide for detection of SNP TSC0053462
rttttttttttac

SEQ ID NO: 219753 - DNA, 13 bp, Artificial Sequence
  Oligonucleotide for detection of SNP TSC0053462
gtaaaataaaaay

SEQ ID NO: 219754 - DNA, 13 bp, Artificial Sequence
  Oligonucleotide for detection of SNP TSC0053462
rtttttattttac

SEQ ID NO: 219755 - DNA, 13 bp, Artificial Sequence
  Oligonucleotide for detection of SNP TSC0053464
ttttggattaaaa

SEQ ID NO: 219756 - DNA, 13 bp, Artificial Sequence
  Oligonucleotide for detection of SNP TSC0053464
ttttaatccaaaa

SEQ ID NO: 219757 - DNA, 13 bp, Artificial Sequence
  Oligonucleotide for detection of SNP TSC0053464
ttttggtttaaaa

SEQ ID NO: 219758 - DNA, 13 bp, Artificial Sequence
  Oligonucleotide for detection of SNP TSC0053464
ttttaaaccaaaa

SEQ ID NO: 219759 - DNA, 13 bp, Artificial Sequence
  Oligonucleotide for detection of SNP TSC0053464
ttttagtttaaag

SEQ ID NO: 219760 - DNA, 13 bp, Artificial Sequence
  Oligonucleotide for detection of SNP TSC0053464
ctttaaactaaaa

SEQ ID NO: 219761 - DNA, 13 bp, Artificial Sequence
  Oligonucleotide for detection of SNP TSC0053465
tatttagagagta

SEQ ID NO: 219762 - DNA, 13 bp, Artificial Sequence
  Oligonucleotide for detection of SNP TSC0053465
tactctctaaata

SEQ ID NO: 219763 - DNA, 13 bp, Artificial Sequence
  Oligonucleotide for detection of SNP TSC0053465
tatttaaagagta

SEQ ID NO: 219764 - DNA, 13 bp, Artificial Sequence
  Oligonucleotide for detection of SNP TSC0053465
tactctttaaata

SEQ ID NO: 219765 - DNA, 13 bp, Artificial Sequence
  Oligonucleotide for detection of SNP TSC0053469
tttttaagtaaty

SEQ ID NO: 219766 - DNA, 13 bp, Artificial Sequence
  Oligonucleotide for detection of SNP TSC0053469
rattacttaaaaa

SEQ ID NO: 219767 - DNA, 13 bp, Artificial Sequence
  Oligonucleotide for detection of SNP TSC0053469
tttttaggtaaty

SEQ ID NO: 219768 - DNA, 13 bp, Artificial Sequence
  Oligonucleotide for detection of SNP TSC0053469
rattacctaaaaa

SEQ ID NO: 219769 - DNA, 13 bp, Artificial Sequence
  Oligonucleotide for detection of SNP TSC0053470
ttgagtatgtgga

SEQ ID NO: 219770 - DNA, 13 bp, Artificial Sequence
  Oligonucleotide for detection of SNP TSC0053470
tccacatactcaa

SEQ ID NO: 219771 - DNA, 13 bp, Artificial Sequence
  Oligonucleotide for detection of SNP TSC0053470
ttgagtgtgtgga

SEQ ID NO: 219772 - DNA, 13 bp, Artificial Sequence
  Oligonucleotide for detection of SNP TSC0053470
tccacacactcaa

SEQ ID NO: 219773 - DNA, 13 bp, Artificial Sequence
  Oligonucleotide for detection of SNP TSC0053470
ttgagcgtgtgga

SEQ ID NO: 219774 - DNA, 13 bp, Artificial Sequence
  Oligonucleotide for detection of SNP TSC0053470
tccacacgctcaa

SEQ ID NO: 219775 - DNA, 13 bp, Artificial Sequence
  Oligonucleotide for detection of SNP TSC0053471
ttatgtgtataat

SEQ ID NO: 219776 - DNA, 13 bp, Artificial Sequence
  Oligonucleotide for detection of SNP TSC0053471
attatacacataa

SEQ ID NO: 219777 - DNA, 13 bp, Artificial Sequence
  Oligonucleotide for detection of SNP TSC0053471
attatagatatag

SEQ ID NO: 219778 - DNA, 13 bp, Artificial Sequence
  Oligonucleotide for detection of SNP TSC0053471
ctatatctataat

SEQ ID NO: 219779 - DNA, 13 bp, Artificial Sequence
  Oligonucleotide for detection of SNP TSC0053471
attatatatatag

SEQ ID NO: 219780 - DNA, 13 bp, Artificial Sequence
  Oligonucleotide for detection of SNP TSC0053471
ctatatatataat

SEQ ID NO: 219781 - DNA, 13 bp, Artificial Sequence
  Oligonucleotide for detection of SNP TSC0053472
tgttgaattatty

SEQ ID NO: 219782 - DNA, 13 bp, Artificial Sequence
  Oligonucleotide for detection of SNP TSC0053472
raataattcaaca

SEQ ID NO: 219783 - DNA, 13 bp, Artificial Sequence
  Oligonucleotide for detection of SNP TSC0053472
tgttgagttatty

SEQ ID NO: 219784 - DNA, 13 bp, Artificial Sequence
  Oligonucleotide for detection of SNP TSC0053472
raataactcaaca

SEQ ID NO: 219785 - DNA, 13 bp, Artificial Sequence
  Oligonucleotide for detection of SNP TSC0053472
cgttgaattatty

SEQ ID NO: 219786 - DNA, 13 bp, Artificial Sequence
  Oligonucleotide for detection of SNP TSC0053472
raataattcaacg

SEQ ID NO: 219787 - DNA, 13 bp, Artificial Sequence
  Oligonucleotide for detection of SNP TSC0053472
cgttgagttatty

SEQ ID NO: 219788 - DNA, 13 bp, Artificial Sequence
  Oligonucleotide for detection of SNP TSC0053472
raataactcaacg

SEQ ID NO: 219789 - DNA, 13 bp, Artificial Sequence
  Oligonucleotide for detection of SNP TSC0053473
ttgggttgtttaa

SEQ ID NO: 219790 - DNA, 13 bp, Artificial Sequence
  Oligonucleotide for detection of SNP TSC0053473
ttaaacaacccaa

SEQ ID NO: 219791 - DNA, 13 bp, Artificial Sequence
  Oligonucleotide for detection of SNP TSC0053473
ttgggtggtttaa

SEQ ID NO: 219792 - DNA, 13 bp, Artificial Sequence
  Oligonucleotide for detection of SNP TSC0053473
ttaaaccacccaa

SEQ ID NO: 219793 - DNA, 13 bp, Artificial Sequence
  Oligonucleotide for detection of SNP TSC0053473
ttgaataatttaa

SEQ ID NO: 219794 - DNA, 13 bp, Artificial Sequence
  Oligonucleotide for detection of SNP TSC0053473
ttaaattattcaa

SEQ ID NO: 219795 - DNA, 13 bp, Artificial Sequence
  Oligonucleotide for detection of SNP TSC0053473
ttgaattatttaa

SEQ ID NO: 219796 - DNA, 13 bp, Artificial Sequence
  Oligonucleotide for detection of SNP TSC0053473
ttaaataattcaa

SEQ ID NO: 219797 - DNA, 13 bp, Artificial Sequence
  Oligonucleotide for detection of SNP TSC0053479
gttggtatgtttg

SEQ ID NO: 219798 - DNA, 13 bp, Artificial Sequence
  Oligonucleotide for detection of SNP TSC0053479
caaacataccaac

SEQ ID NO: 219799 - DNA, 13 bp, Artificial Sequence
  Oligonucleotide for detection of SNP TSC0053479
gttggtgtgtttg

SEQ ID NO: 219800 - DNA, 13 bp, Artificial Sequence
  Oligonucleotide for detection of SNP TSC0053479
caaacacaccaac

SEQ ID NO: 219801 - DNA, 13 bp, Artificial Sequence
  Oligonucleotide for detection of SNP TSC0053479
gttggcgtgtttg

SEQ ID NO: 219802 - DNA, 13 bp, Artificial Sequence
  Oligonucleotide for detection of SNP TSC0053479
caaacacgccaac

SEQ ID NO: 219803 - DNA, 13 bp, Artificial Sequence
  Oligonucleotide for detection of SNP TSC0053479
tagatatgttaay

SEQ ID NO: 219804 - DNA, 13 bp, Artificial Sequence
  Oligonucleotide for detection of SNP TSC0053479
rttaacatatcta

SEQ ID NO: 219805 - DNA, 13 bp, Artificial Sequence
  Oligonucleotide for detection of SNP TSC0053479
tagatacgttaay

SEQ ID NO: 219806 - DNA, 13 bp, Artificial Sequence
  Oligonucleotide for detection of SNP TSC0053479
rttaacgtatcta

SEQ ID NO: 219807 - DNA, 13 bp, Artificial Sequence
  Oligonucleotide for detection of SNP TSC0053480
gaaatttttggga

SEQ ID NO: 219808 - DNA, 13 bp, Artificial Sequence
  Oligonucleotide for detection of SNP TSC0053480
tcccaaaaatttc

SEQ ID NO: 219809 - DNA, 13 bp, Artificial Sequence
  Oligonucleotide for detection of SNP TSC0053480
gaaattgttggga

SEQ ID NO: 219810 - DNA, 13 bp, Artificial Sequence
  Oligonucleotide for detection of SNP TSC0053480
tcccaacaatttc

SEQ ID NO: 219811 - DNA, 13 bp, Artificial Sequence
  Oligonucleotide for detection of SNP TSC0053480
ttttaagaattty

SEQ ID NO: 219812 - DNA, 13 bp, Artificial Sequence
  Oligonucleotide for detection of SNP TSC0053480
raaattcttaaaa

SEQ ID NO: 219813 - DNA, 13 bp, Artificial Sequence
  Oligonucleotide for detection of SNP TSC0053480
ttttaataattty

SEQ ID NO: 219814 - DNA, 13 bp, Artificial Sequence
  Oligonucleotide for detection of SNP TSC0053480
raaattattaaaa

SEQ ID NO: 219815 - DNA, 13 bp, Artificial Sequence
  Oligonucleotide for detection of SNP TSC0053484
gttttattaaaga

SEQ ID NO: 219816 - DNA, 13 bp, Artificial Sequence
  Oligonucleotide for detection of SNP TSC0053484
tctttaataaaac

SEQ ID NO: 219817 - DNA, 13 bp, Artificial Sequence
  Oligonucleotide for detection of SNP TSC0053484
gttttagtaaaga

SEQ ID NO: 219818 - DNA, 13 bp, Artificial Sequence
  Oligonucleotide for detection of SNP TSC0053484
tctttactaaaac

SEQ ID NO: 219819 - DNA, 13 bp, Artificial Sequence
  Oligonucleotide for detection of SNP TSC0053485
ttttagatgatta

SEQ ID NO: 219820 - DNA, 13 bp, Artificial Sequence
  Oligonucleotide for detection of SNP TSC0053485
taatcatctaaaa

SEQ ID NO: 219821 - DNA, 13 bp, Artificial Sequence
  Oligonucleotide for detection of SNP TSC0053486
tagtgaagtttta

SEQ ID NO: 219822 - DNA, 13 bp, Artificial Sequence
  Oligonucleotide for detection of SNP TSC0053486
taaaacttcacta

SEQ ID NO: 219823 - DNA, 13 bp, Artificial Sequence
  Oligonucleotide for detection of SNP TSC0053486
tagtgaggtttta

SEQ ID NO: 219824 - DNA, 13 bp, Artificial Sequence
  Oligonucleotide for detection of SNP TSC0053486
taaaacctcacta

SEQ ID NO: 219825 - DNA, 13 bp, Artificial Sequence
  Oligonucleotide for detection of SNP TSC0005179
ttaaaattttgay

SEQ ID NO: 219826 - DNA, 13 bp, Artificial Sequence
  Oligonucleotide for detection of SNP TSC0005179
rtcaaaattttaa

SEQ ID NO: 219827 - DNA, 13 bp, Artificial Sequence
  Oligonucleotide for detection of SNP TSC0005179
ttaaaagtttgay

SEQ ID NO: 219828 - DNA, 13 bp, Artificial Sequence
  Oligonucleotide for detection of SNP TSC0005179
rtcaaacttttaa

SEQ ID NO: 219829 - DNA, 13 bp, Artificial Sequence
  Oligonucleotide for detection of SNP TSC0005179
gttagggttttaa

SEQ ID NO: 219830 - DNA, 13 bp, Artificial Sequence
  Oligonucleotide for detection of SNP TSC0005179
ttaaaaccctaac

SEQ ID NO: 219831 - DNA, 13 bp, Artificial Sequence
  Oligonucleotide for detection of SNP TSC0005179
gttaggtttttaa

SEQ ID NO: 219832 - DNA, 13 bp, Artificial Sequence
  Oligonucleotide for detection of SNP TSC0005179
ttaaaaacctaac

SEQ ID NO: 219833 - DNA, 13 bp, Artificial Sequence
  Oligonucleotide for detection of SNP TSC0053490
ttagaaaatggta

SEQ ID NO: 219834 - DNA, 13 bp, Artificial Sequence
  Oligonucleotide for detection of SNP TSC0053490
taccattttctaa

SEQ ID NO: 219835 - DNA, 13 bp, Artificial Sequence
  Oligonucleotide for detection of SNP TSC0053490
ttagaagatggta

SEQ ID NO: 219836 - DNA, 13 bp, Artificial Sequence
  Oligonucleotide for detection of SNP TSC0053490
taccatcttctaa

SEQ ID NO: 219837 - DNA, 13 bp, Artificial Sequence
  Oligonucleotide for detection of SNP TSC0053491
gaaggggattatt

SEQ ID NO: 219838 - DNA, 13 bp, Artificial Sequence
  Oligonucleotide for detection of SNP TSC0053491
aataatccccttc

SEQ ID NO: 219839 - DNA, 13 bp, Artificial Sequence
  Oligonucleotide for detection of SNP TSC0053491
gaagggaattatt

SEQ ID NO: 219840 - DNA, 13 bp, Artificial Sequence
  Oligonucleotide for detection of SNP TSC0053491
aataattcccttc

SEQ ID NO: 219841 - DNA, 13 bp, Artificial Sequence
  Oligonucleotide for detection of SNP TSC0053492
tgtggtgtgtttg

SEQ ID NO: 219842 - DNA, 13 bp, Artificial Sequence
  Oligonucleotide for detection of SNP TSC0053492
caaacacaccaca

SEQ ID NO: 219843 - DNA, 13 bp, Artificial Sequence
  Oligonucleotide for detection of SNP TSC0053492
tgtggtatgtttg

SEQ ID NO: 219844 - DNA, 13 bp, Artificial Sequence
  Oligonucleotide for detection of SNP TSC0053492
caaacataccaca

SEQ ID NO: 219845 - DNA, 13 bp, Artificial Sequence
  Oligonucleotide for detection of SNP TSC0053492
tgtggcgtgtttg

SEQ ID NO: 219846 - DNA, 13 bp, Artificial Sequence
  Oligonucleotide for detection of SNP TSC0053492
caaacacgccaca

SEQ ID NO: 219847 - DNA, 13 bp, Artificial Sequence
  Oligonucleotide for detection of SNP TSC0053494
tagaataggaaty

SEQ ID NO: 219848 - DNA, 13 bp, Artificial Sequence
  Oligonucleotide for detection of SNP TSC0053494
rattcctattcta

SEQ ID NO: 219849 - DNA, 13 bp, Artificial Sequence
  Oligonucleotide for detection of SNP TSC0053494
tagaatgggaaty

SEQ ID NO: 219850 - DNA, 13 bp, Artificial Sequence
  Oligonucleotide for detection of SNP TSC0053494
rattcccattcta

SEQ ID NO: 219851 - DNA, 13 bp, Artificial Sequence
  Oligonucleotide for detection of SNP TSC0053495
tttgaaatttgta

SEQ ID NO: 219852 - DNA, 13 bp, Artificial Sequence
  Oligonucleotide for detection of SNP TSC0053495
tacaaatttcaaa

SEQ ID NO: 219853 - DNA, 13 bp, Artificial Sequence
  Oligonucleotide for detection of SNP TSC0053498
ttttaggtgttty

SEQ ID NO: 219854 - DNA, 13 bp, Artificial Sequence
  Oligonucleotide for detection of SNP TSC0053498
raaacacctaaaa

SEQ ID NO: 219855 - DNA, 13 bp, Artificial Sequence
  Oligonucleotide for detection of SNP TSC0053498
ttttaggcgttty

SEQ ID NO: 219856 - DNA, 13 bp, Artificial Sequence
  Oligonucleotide for detection of SNP TSC0053498
raaacgcctaaaa

SEQ ID NO: 219857 - DNA, 13 bp, Artificial Sequence
  Oligonucleotide for detection of SNP TSC0053498
ttttagacgttty

SEQ ID NO: 219858 - DNA, 13 bp, Artificial Sequence
  Oligonucleotide for detection of SNP TSC0053498
raaacgtctaaaa

SEQ ID NO: 219859 - DNA, 13 bp, Artificial Sequence
  Oligonucleotide for detection of SNP TSC0053499
agtttataggtta

SEQ ID NO: 219860 - DNA, 13 bp, Artificial Sequence
  Oligonucleotide for detection of SNP TSC0053499
taacctataaact

SEQ ID NO: 219861 - DNA, 13 bp, Artificial Sequence
  Oligonucleotide for detection of SNP TSC0053499
agtttagaggtta

SEQ ID NO: 219862 - DNA, 13 bp, Artificial Sequence
  Oligonucleotide for detection of SNP TSC0053499
taacctctaaact

SEQ ID NO: 219863 - DNA, 13 bp, Artificial Sequence
  Oligonucleotide for detection of SNP TSC0053499
tagtttttgagtt

SEQ ID NO: 219864 - DNA, 13 bp, Artificial Sequence
  Oligonucleotide for detection of SNP TSC0053499
aactcaaaaacta

SEQ ID NO: 219865 - DNA, 13 bp, Artificial Sequence
  Oligonucleotide for detection of SNP TSC0053500
ttttgaaaggttt

SEQ ID NO: 219866 - DNA, 13 bp, Artificial Sequence
  Oligonucleotide for detection of SNP TSC0053500
aaacctttcaaaa

SEQ ID NO: 219867 - DNA, 13 bp, Artificial Sequence
  Oligonucleotide for detection of SNP TSC0053500
ttttgagaggttt

SEQ ID NO: 219868 - DNA, 13 bp, Artificial Sequence
  Oligonucleotide for detection of SNP TSC0053500
aaacctctcaaaa

SEQ ID NO: 219869 - DNA, 13 bp, Artificial Sequence
  Oligonucleotide for detection of SNP TSC0053502
aggtatatgtata

SEQ ID NO: 219870 - DNA, 13 bp, Artificial Sequence
  Oligonucleotide for detection of SNP TSC0053502
tatacatatacct

SEQ ID NO: 219871 - DNA, 13 bp, Artificial Sequence
  Oligonucleotide for detection of SNP TSC0053502
aggtatgtgtata

SEQ ID NO: 219872 - DNA, 13 bp, Artificial Sequence
  Oligonucleotide for detection of SNP TSC0053502
tatacacatacct

SEQ ID NO: 219873 - DNA, 13 bp, Artificial Sequence
  Oligonucleotide for detection of SNP TSC0053502
aggtacgtgtata

SEQ ID NO: 219874 - DNA, 13 bp, Artificial Sequence
  Oligonucleotide for detection of SNP TSC0053502
tatacacgtacct

SEQ ID NO: 219875 - DNA, 13 bp, Artificial Sequence
  Oligonucleotide for detection of SNP TSC0053502
tatatatgtgttt

SEQ ID NO: 219876 - DNA, 13 bp, Artificial Sequence
  Oligonucleotide for detection of SNP TSC0053502
aaacacatatata

SEQ ID NO: 219877 - DNA, 13 bp, Artificial Sequence
  Oligonucleotide for detection of SNP TSC0053502
tatatacgtgttt

SEQ ID NO: 219878 - DNA, 13 bp, Artificial Sequence
  Oligonucleotide for detection of SNP TSC0053502
aaacacgtatata

SEQ ID NO: 219879 - DNA, 13 bp, Artificial Sequence
  Oligonucleotide for detection of SNP TSC0053503
attgtagtttaaa

SEQ ID NO: 219880 - DNA, 13 bp, Artificial Sequence
  Oligonucleotide for detection of SNP TSC0053503
tttaaactacaat

SEQ ID NO: 219881 - DNA, 13 bp, Artificial Sequence
  Oligonucleotide for detection of SNP TSC0053504
atattagaaataa

SEQ ID NO: 219882 - DNA, 13 bp, Artificial Sequence
  Oligonucleotide for detection of SNP TSC0053504
ttatttctaatat

SEQ ID NO: 219883 - DNA, 13 bp, Artificial Sequence
  Oligonucleotide for detection of SNP TSC0053505
ttggtttgttaty

SEQ ID NO: 219884 - DNA, 13 bp, Artificial Sequence
  Oligonucleotide for detection of SNP TSC0053505
rataacaaaccaa

SEQ ID NO: 219885 - DNA, 13 bp, Artificial Sequence
  Oligonucleotide for detection of SNP TSC0053505
ttggttggttaty

SEQ ID NO: 219886 - DNA, 13 bp, Artificial Sequence
  Oligonucleotide for detection of SNP TSC0053505
rataaccaaccaa

SEQ ID NO: 219887 - DNA, 13 bp, Artificial Sequence
  Oligonucleotide for detection of SNP TSC0053505
ttggtcggttaty

SEQ ID NO: 219888 - DNA, 13 bp, Artificial Sequence
  Oligonucleotide for detection of SNP TSC0053505
rataaccgaccaa

SEQ ID NO: 219889 - DNA, 13 bp, Artificial Sequence
  Oligonucleotide for detection of SNP TSC0053505
ggtggtagattag

SEQ ID NO: 219890 - DNA, 13 bp, Artificial Sequence
  Oligonucleotide for detection of SNP TSC0053505
ctaatctaccacc

SEQ ID NO: 219891 - DNA, 13 bp, Artificial Sequence
  Oligonucleotide for detection of SNP TSC0053505
ggtggttgattag

SEQ ID NO: 219892 - DNA, 13 bp, Artificial Sequence
  Oligonucleotide for detection of SNP TSC0053505
ctaatcaaccacc

SEQ ID NO: 219893 - DNA, 13 bp, Artificial Sequence
  Oligonucleotide for detection of SNP TSC0053505
ggtggtcgattag

SEQ ID NO: 219894 - DNA, 13 bp, Artificial Sequence
  Oligonucleotide for detection of SNP TSC0053505
ctaatcgaccacc

SEQ ID NO: 219895 - DNA, 13 bp, Artificial Sequence
  Oligonucleotide for detection of SNP TSC0053507
gaaagagagtgga

SEQ ID NO: 219896 - DNA, 13 bp, Artificial Sequence
  Oligonucleotide for detection of SNP TSC0053507
tccactctctttc

SEQ ID NO: 219897 - DNA, 13 bp, Artificial Sequence
  Oligonucleotide for detection of SNP TSC0053507
gaaagatagtgga

SEQ ID NO: 219898 - DNA, 13 bp, Artificial Sequence
  Oligonucleotide for detection of SNP TSC0053507
tccactatctttc

SEQ ID NO: 219899 - DNA, 13 bp, Artificial Sequence
  Oligonucleotide for detection of SNP TSC0010043
ttatttattagty

SEQ ID NO: 219900 - DNA, 13 bp, Artificial Sequence
  Oligonucleotide for detection of SNP TSC0010043
ractaataaataa

SEQ ID NO: 219901 - DNA, 13 bp, Artificial Sequence
  Oligonucleotide for detection of SNP TSC0010043
ttatttgttagty

SEQ ID NO: 219902 - DNA, 13 bp, Artificial Sequence
  Oligonucleotide for detection of SNP TSC0010043
ractaacaaataa

SEQ ID NO: 219903 - DNA, 13 bp, Artificial Sequence
  Oligonucleotide for detection of SNP TSC0053508
ttataaggagtta

SEQ ID NO: 219904 - DNA, 13 bp, Artificial Sequence
  Oligonucleotide for detection of SNP TSC0053508
taactccttataa

SEQ ID NO: 219905 - DNA, 13 bp, Artificial Sequence
  Oligonucleotide for detection of SNP TSC0053508
ttataaagagtta

SEQ ID NO: 219906 - DNA, 13 bp, Artificial Sequence
  Oligonucleotide for detection of SNP TSC0053508
taactctttataa

SEQ ID NO: 219907 - DNA, 13 bp, Artificial Sequence
  Oligonucleotide for detection of SNP TSC0053509
tgaaaatggtgag

SEQ ID NO: 219908 - DNA, 13 bp, Artificial Sequence
  Oligonucleotide for detection of SNP TSC0053509
ctcaccattttca

SEQ ID NO: 219909 - DNA, 13 bp, Artificial Sequence
  Oligonucleotide for detection of SNP TSC0053509
tgaaaagggtgag

SEQ ID NO: 219910 - DNA, 13 bp, Artificial Sequence
  Oligonucleotide for detection of SNP TSC0053509
ctcacccttttca

SEQ ID NO: 219911 - DNA, 13 bp, Artificial Sequence
  Oligonucleotide for detection of SNP TSC0053509
tgaaaacggtgag

SEQ ID NO: 219912 - DNA, 13 bp, Artificial Sequence
  Oligonucleotide for detection of SNP TSC0053509
ctcaccgttttca

SEQ ID NO: 219913 - DNA, 13 bp, Artificial Sequence
  Oligonucleotide for detection of SNP TSC0053510
ggtgttagtgtat

SEQ ID NO: 219914 - DNA, 13 bp, Artificial Sequence
  Oligonucleotide for detection of SNP TSC0053510
atacactaacacc

SEQ ID NO: 219915 - DNA, 13 bp, Artificial Sequence
  Oligonucleotide for detection of SNP TSC0053510
ggtgtcggtgtat

SEQ ID NO: 219916 - DNA, 13 bp, Artificial Sequence
  Oligonucleotide for detection of SNP TSC0053510
atacaccgacacc

SEQ ID NO: 219917 - DNA, 13 bp, Artificial Sequence
  Oligonucleotide for detection of SNP TSC0053510
atatattgataty

SEQ ID NO: 219918 - DNA, 13 bp, Artificial Sequence
  Oligonucleotide for detection of SNP TSC0053510
ratatcaatatat

SEQ ID NO: 219919 - DNA, 13 bp, Artificial Sequence
  Oligonucleotide for detection of SNP TSC0053510
atatatcgataty

SEQ ID NO: 219920 - DNA, 13 bp, Artificial Sequence
  Oligonucleotide for detection of SNP TSC0053510
ratatcgatatat

SEQ ID NO: 219921 - DNA, 13 bp, Artificial Sequence
  Oligonucleotide for detection of SNP TSC0010236
ttattatggaggt

SEQ ID NO: 219922 - DNA, 13 bp, Artificial Sequence
  Oligonucleotide for detection of SNP TSC0010236
acctccataataa

SEQ ID NO: 219923 - DNA, 13 bp, Artificial Sequence
  Oligonucleotide for detection of SNP TSC0010236
ttattagggaggt

SEQ ID NO: 219924 - DNA, 13 bp, Artificial Sequence
  Oligonucleotide for detection of SNP TSC0010236
acctccctaataa

SEQ ID NO: 219925 - DNA, 13 bp, Artificial Sequence
  Oligonucleotide for detection of SNP TSC0010236
ttattacggaggt

SEQ ID NO: 219926 - DNA, 13 bp, Artificial Sequence
  Oligonucleotide for detection of SNP TSC0010236
acctccgtaataa

SEQ ID NO: 219927 - DNA, 13 bp, Artificial Sequence
  Oligonucleotide for detection of SNP TSC0010236
atttttttggtag

SEQ ID NO: 219928 - DNA, 13 bp, Artificial Sequence
  Oligonucleotide for detection of SNP TSC0010236
ctaccaaaaaaat

SEQ ID NO: 219929 - DNA, 13 bp, Artificial Sequence
  Oligonucleotide for detection of SNP TSC0010236
attttcgtggtag

SEQ ID NO: 219930 - DNA, 13 bp, Artificial Sequence
  Oligonucleotide for detection of SNP TSC0010236
ctaccacgaaaat

SEQ ID NO: 219931 - DNA, 13 bp, Artificial Sequence
  Oligonucleotide for detection of SNP TSC0053513
tgatttagttata

SEQ ID NO: 219932 - DNA, 13 bp, Artificial Sequence
  Oligonucleotide for detection of SNP TSC0053513
tataactaaatca

SEQ ID NO: 219933 - DNA, 13 bp, Artificial Sequence
  Oligonucleotide for detection of SNP TSC0053513
tgtaattggatta

SEQ ID NO: 219934 - DNA, 13 bp, Artificial Sequence
  Oligonucleotide for detection of SNP TSC0053513
taatccaattaca

SEQ ID NO: 219935 - DNA, 13 bp, Artificial Sequence
  Oligonucleotide for detection of SNP TSC0053513
tgtaataggatta

SEQ ID NO: 219936 - DNA, 13 bp, Artificial Sequence
  Oligonucleotide for detection of SNP TSC0053513
taatcctattaca

SEQ ID NO: 219937 - DNA, 13 bp, Artificial Sequence
  Oligonucleotide for detection of SNP TSC0053518
aatttttttattt

SEQ ID NO: 219938 - DNA, 13 bp, Artificial Sequence
  Oligonucleotide for detection of SNP TSC0053518
aaataaaaaaatt

SEQ ID NO: 219939 - DNA, 13 bp, Artificial Sequence
  Oligonucleotide for detection of SNP TSC0053518
aggtggtggggtt

SEQ ID NO: 219940 - DNA, 13 bp, Artificial Sequence
  Oligonucleotide for detection of SNP TSC0053518
aaccccaccacct

SEQ ID NO: 219941 - DNA, 13 bp, Artificial Sequence
  Oligonucleotide for detection of SNP TSC0053518
aggtgggggggtt

SEQ ID NO: 219942 - DNA, 13 bp, Artificial Sequence
  Oligonucleotide for detection of SNP TSC0053518
aacccccccacct

SEQ ID NO: 219943 - DNA, 13 bp, Artificial Sequence
  Oligonucleotide for detection of SNP TSC0053521
tgggtaatgggta

SEQ ID NO: 219944 - DNA, 13 bp, Artificial Sequence
  Oligonucleotide for detection of SNP TSC0053521
tacccattaccca

SEQ ID NO: 219945 - DNA, 13 bp, Artificial Sequence
  Oligonucleotide for detection of SNP TSC0053521
tgggtagtgggta

SEQ ID NO: 219946 - DNA, 13 bp, Artificial Sequence
  Oligonucleotide for detection of SNP TSC0053521
tacccactaccca

SEQ ID NO: 219947 - DNA, 13 bp, Artificial Sequence
  Oligonucleotide for detection of SNP TSC0053522
atatacgtatttg

SEQ ID NO: 219948 - DNA, 13 bp, Artificial Sequence
  Oligonucleotide for detection of SNP TSC0053522
caaatacgtatat

SEQ ID NO: 219949 - DNA, 13 bp, Artificial Sequence
  Oligonucleotide for detection of SNP TSC0053522
taagtatgtatat

SEQ ID NO: 219950 - DNA, 13 bp, Artificial Sequence
  Oligonucleotide for detection of SNP TSC0053522
atatacatactta

SEQ ID NO: 219951 - DNA, 13 bp, Artificial Sequence
  Oligonucleotide for detection of SNP TSC0053522
taagtacgtatat

SEQ ID NO: 219952 - DNA, 13 bp, Artificial Sequence
  Oligonucleotide for detection of SNP TSC0053522
atatacgtactta

SEQ ID NO: 219953 - DNA, 13 bp, Artificial Sequence
  Oligonucleotide for detection of SNP TSC0053525
tgatataattttg

SEQ ID NO: 219954 - DNA, 13 bp, Artificial Sequence
  Oligonucleotide for detection of SNP TSC0053525
caaaattatatca

SEQ ID NO: 219955 - DNA, 13 bp, Artificial Sequence
  Oligonucleotide for detection of SNP TSC0053525
tgatatgattttg

SEQ ID NO: 219956 - DNA, 13 bp, Artificial Sequence
  Oligonucleotide for detection of SNP TSC0053525
caaaatcatatca

SEQ ID NO: 219957 - DNA, 13 bp, Artificial Sequence
  Oligonucleotide for detection of SNP TSC0053525
tgatataatttcg

SEQ ID NO: 219958 - DNA, 13 bp, Artificial Sequence
  Oligonucleotide for detection of SNP TSC0053525
cgaaattatatca

SEQ ID NO: 219959 - DNA, 13 bp, Artificial Sequence
  Oligonucleotide for detection of SNP TSC0053525
tgatacgattttg

SEQ ID NO: 219960 - DNA, 13 bp, Artificial Sequence
  Oligonucleotide for detection of SNP TSC0053525
caaaatcgtatca

SEQ ID NO: 219961 - DNA, 13 bp, Artificial Sequence
  Oligonucleotide for detection of SNP TSC0053525
tgatatgatttcg

SEQ ID NO: 219962 - DNA, 13 bp, Artificial Sequence
  Oligonucleotide for detection of SNP TSC0053525
cgaaatcatatca

SEQ ID NO: 219963 - DNA, 13 bp, Artificial Sequence
  Oligonucleotide for detection of SNP TSC0053525
tgatacgatttcg

SEQ ID NO: 219964 - DNA, 13 bp, Artificial Sequence
  Oligonucleotide for detection of SNP TSC0053525
cgaaatcgtatca

SEQ ID NO: 219965 - DNA, 13 bp, Artificial Sequence
  Oligonucleotide for detection of SNP TSC0053525
tggagttgtgtta

SEQ ID NO: 219966 - DNA, 13 bp, Artificial Sequence
  Oligonucleotide for detection of SNP TSC0053525
taacacaactcca

SEQ ID NO: 219967 - DNA, 13 bp, Artificial Sequence
  Oligonucleotide for detection of SNP TSC0053525
cggagttgtgtta

SEQ ID NO: 219968 - DNA, 13 bp, Artificial Sequence
  Oligonucleotide for detection of SNP TSC0053525
taacacaactccg

SEQ ID NO: 219969 - DNA, 13 bp, Artificial Sequence
  Oligonucleotide for detection of SNP TSC0053525
tggagtcgtgtta

SEQ ID NO: 219970 - DNA, 13 bp, Artificial Sequence
  Oligonucleotide for detection of SNP TSC0053525
taacacgactcca

SEQ ID NO: 219971 - DNA, 13 bp, Artificial Sequence
  Oligonucleotide for detection of SNP TSC0053525
cggagtcgtgtta

SEQ ID NO: 219972 - DNA, 13 bp, Artificial Sequence
  Oligonucleotide for detection of SNP TSC0053525
taacacgactccg

SEQ ID NO: 219973 - DNA, 13 bp, Artificial Sequence
  Oligonucleotide for detection of SNP TSC0053526
tgatatataagga

SEQ ID NO: 219974 - DNA, 13 bp, Artificial Sequence
  Oligonucleotide for detection of SNP TSC0053526
tccttatatatca

SEQ ID NO: 219975 - DNA, 13 bp, Artificial Sequence
  Oligonucleotide for detection of SNP TSC0053526
tgatatttaagga

SEQ ID NO: 219976 - DNA, 13 bp, Artificial Sequence
  Oligonucleotide for detection of SNP TSC0053526
tccttaaatatca

SEQ ID NO: 219977 - DNA, 13 bp, Artificial Sequence
  Oligonucleotide for detection of SNP TSC0053526
tttttatgtgtta

SEQ ID NO: 219978 - DNA, 13 bp, Artificial Sequence
  Oligonucleotide for detection of SNP TSC0053526
taacacataaaaa

SEQ ID NO: 219979 - DNA, 13 bp, Artificial Sequence
  Oligonucleotide for detection of SNP TSC0010658
aattattagatat

SEQ ID NO: 219980 - DNA, 13 bp, Artificial Sequence
  Oligonucleotide for detection of SNP TSC0010658
atatctaataatt

SEQ ID NO: 219981 - DNA, 13 bp, Artificial Sequence
  Oligonucleotide for detection of SNP TSC0010658
aattatgagatat

SEQ ID NO: 219982 - DNA, 13 bp, Artificial Sequence
  Oligonucleotide for detection of SNP TSC0010658
atatctcataatt

SEQ ID NO: 219983 - DNA, 13 bp, Artificial Sequence
  Oligonucleotide for detection of SNP TSC0010658
aattacgagatat

SEQ ID NO: 219984 - DNA, 13 bp, Artificial Sequence
  Oligonucleotide for detection of SNP TSC0010658
atatctcgtaatt

SEQ ID NO: 219985 - DNA, 13 bp, Artificial Sequence
  Oligonucleotide for detection of SNP TSC0010658
atgtttggtagtt

SEQ ID NO: 219986 - DNA, 13 bp, Artificial Sequence
  Oligonucleotide for detection of SNP TSC0010658
aactaccaaacat

SEQ ID NO: 219987 - DNA, 13 bp, Artificial Sequence
  Oligonucleotide for detection of SNP TSC0010658
atgttttgtagtt

SEQ ID NO: 219988 - DNA, 13 bp, Artificial Sequence
  Oligonucleotide for detection of SNP TSC0010658
aactacaaaacat

SEQ ID NO: 219989 - DNA, 13 bp, Artificial Sequence
  Oligonucleotide for detection of SNP TSC0010658
atgtttcgtagtt

SEQ ID NO: 219990 - DNA, 13 bp, Artificial Sequence
  Oligonucleotide for detection of SNP TSC0010658
aactacgaaacat

SEQ ID NO: 219991 - DNA, 13 bp, Artificial Sequence
  Oligonucleotide for detection of SNP TSC0053529
aataagaatttay

SEQ ID NO: 219992 - DNA, 13 bp, Artificial Sequence
  Oligonucleotide for detection of SNP TSC0053529
rtaaattcttatt

SEQ ID NO: 219993 - DNA, 13 bp, Artificial Sequence
  Oligonucleotide for detection of SNP TSC0053529
aataagtatttay

SEQ ID NO: 219994 - DNA, 13 bp, Artificial Sequence
  Oligonucleotide for detection of SNP TSC0053529
rtaaatacttatt

SEQ ID NO: 219995 - DNA, 13 bp, Artificial Sequence
  Oligonucleotide for detection of SNP TSC0053529
gtgggtttttgtt

SEQ ID NO: 219996 - DNA, 13 bp, Artificial Sequence
  Oligonucleotide for detection of SNP TSC0053529
aacaaaaacccac

SEQ ID NO: 219997 - DNA, 13 bp, Artificial Sequence
  Oligonucleotide for detection of SNP TSC0053529
gtgggtgtttgtt

SEQ ID NO: 219998 - DNA, 13 bp, Artificial Sequence
  Oligonucleotide for detection of SNP TSC0053529
aacaaacacccac

SEQ ID NO: 219999 - DNA, 13 bp, Artificial Sequence
  Oligonucleotide for detection of SNP TSC0053531
aggtgggaggaty

SEQ ID NO: 220000 - DNA, 13 bp, Artificial Sequence
  Oligonucleotide for detection of SNP TSC0053531
ratcctcccacct

SEQ ID NO: 220001 - DNA, 13 bp, Artificial Sequence
  Oligonucleotide for detection of SNP TSC0053531
aggtggaaggaty

SEQ ID NO: 220002 - DNA, 13 bp, Artificial Sequence
  Oligonucleotide for detection of SNP TSC0053531
ratccttccacct

SEQ ID NO: 220003 - DNA, 13 bp, Artificial Sequence
  Oligonucleotide for detection of SNP TSC0053531
aggcgggaggaty

SEQ ID NO: 220004 - DNA, 13 bp, Artificial Sequence
  Oligonucleotide for detection of SNP TSC0053531
ratcctcccgcct

SEQ ID NO: 220005 - DNA, 13 bp, Artificial Sequence
  Oligonucleotide for detection of SNP TSC0053531
aggcggaaggaty

SEQ ID NO: 220006 - DNA, 13 bp, Artificial Sequence
  Oligonucleotide for detection of SNP TSC0053531
ratccttccgcct

SEQ ID NO: 220007 - DNA, 13 bp, Artificial Sequence
  Oligonucleotide for detection of SNP TSC0053532
gaaataaatggat

SEQ ID NO: 220008 - DNA, 13 bp, Artificial Sequence
  Oligonucleotide for detection of SNP TSC0053532
atccatttatttc

SEQ ID NO: 220009 - DNA, 13 bp, Artificial Sequence
  Oligonucleotide for detection of SNP TSC0053532
gaaatagatggat

SEQ ID NO: 220010 - DNA, 13 bp, Artificial Sequence
  Oligonucleotide for detection of SNP TSC0053532
atccatctatttc

SEQ ID NO: 220011 - DNA, 13 bp, Artificial Sequence
  Oligonucleotide for detection of SNP TSC0053533
tggtaaaatgagy

SEQ ID NO: 220012 - DNA, 13 bp, Artificial Sequence
  Oligonucleotide for detection of SNP TSC0053533
rctcattttacca

SEQ ID NO: 220013 - DNA, 13 bp, Artificial Sequence
  Oligonucleotide for detection of SNP TSC0053533
tggtaagatgagy

SEQ ID NO: 220014 - DNA, 13 bp, Artificial Sequence
  Oligonucleotide for detection of SNP TSC0053533
rctcatcttacca

SEQ ID NO: 220015 - DNA, 13 bp, Artificial Sequence
  Oligonucleotide for detection of SNP TSC0053533
cggtaaaatgagy

SEQ ID NO: 220016 - DNA, 13 bp, Artificial Sequence
  Oligonucleotide for detection of SNP TSC0053533
rctcattttaccg

SEQ ID NO: 220017 - DNA, 13 bp, Artificial Sequence
  Oligonucleotide for detection of SNP TSC0053533
cggtaagatgagy

SEQ ID NO: 220018 - DNA, 13 bp, Artificial Sequence
  Oligonucleotide for detection of SNP TSC0053533
rctcatcttaccg

SEQ ID NO: 220019 - DNA, 13 bp, Artificial Sequence
  Oligonucleotide for detection of SNP TSC0053534
agttatgatatgg

SEQ ID NO: 220020 - DNA, 13 bp, Artificial Sequence
  Oligonucleotide for detection of SNP TSC0053534
ccatatcataact

SEQ ID NO: 220021 - DNA, 13 bp, Artificial Sequence
  Oligonucleotide for detection of SNP TSC0053534
agttataatatgg

SEQ ID NO: 220022 - DNA, 13 bp, Artificial Sequence
  Oligonucleotide for detection of SNP TSC0053534
ccatattataact

SEQ ID NO: 220023 - DNA, 13 bp, Artificial Sequence
  Oligonucleotide for detection of SNP TSC0053534
agttacgatatgg

SEQ ID NO: 220024 - DNA, 13 bp, Artificial Sequence
  Oligonucleotide for detection of SNP TSC0053534
ccatatcgtaact

SEQ ID NO: 220025 - DNA, 13 bp, Artificial Sequence
  Oligonucleotide for detection of SNP TSC0053535
ttagtatgatatg

SEQ ID NO: 220026 - DNA, 13 bp, Artificial Sequence
  Oligonucleotide for detection of SNP TSC0053535
catatcatactaa

SEQ ID NO: 220027 - DNA, 13 bp, Artificial Sequence
  Oligonucleotide for detection of SNP TSC0053535
ttagtaggatatg

SEQ ID NO: 220028 - DNA, 13 bp, Artificial Sequence
  Oligonucleotide for detection of SNP TSC0053535
catatcctactaa

SEQ ID NO: 220029 - DNA, 13 bp, Artificial Sequence
  Oligonucleotide for detection of SNP TSC0053535
tatgttatgttgg

SEQ ID NO: 220030 - DNA, 13 bp, Artificial Sequence
  Oligonucleotide for detection of SNP TSC0053535
ccaacataacata

SEQ ID NO: 220031 - DNA, 13 bp, Artificial Sequence
  Oligonucleotide for detection of SNP TSC0053535
tatgttttgttgg

SEQ ID NO: 220032 - DNA, 13 bp, Artificial Sequence
  Oligonucleotide for detection of SNP TSC0053535
ccaacaaaacata

SEQ ID NO: 220033 - DNA, 13 bp, Artificial Sequence
  Oligonucleotide for detection of SNP TSC0053539
aagtttataagty

SEQ ID NO: 220034 - DNA, 13 bp, Artificial Sequence
  Oligonucleotide for detection of SNP TSC0053539
racttataaactt

SEQ ID NO: 220035 - DNA, 13 bp, Artificial Sequence
  Oligonucleotide for detection of SNP TSC0053539
aagtttttaagty

SEQ ID NO: 220036 - DNA, 13 bp, Artificial Sequence
  Oligonucleotide for detection of SNP TSC0053539
racttaaaaactt

SEQ ID NO: 220037 - DNA, 13 bp, Artificial Sequence
  Oligonucleotide for detection of SNP TSC0053539
gatttataagttt

SEQ ID NO: 220038 - DNA, 13 bp, Artificial Sequence
  Oligonucleotide for detection of SNP TSC0053539
aaacttataaatc

SEQ ID NO: 220039 - DNA, 13 bp, Artificial Sequence
  Oligonucleotide for detection of SNP TSC0053539
gatttagaagttt

SEQ ID NO: 220040 - DNA, 13 bp, Artificial Sequence
  Oligonucleotide for detection of SNP TSC0053539
aaacttctaaatc

SEQ ID NO: 220041 - DNA, 13 bp, Artificial Sequence
  Oligonucleotide for detection of SNP TSC0053540
atattagtaaata

SEQ ID NO: 220042 - DNA, 13 bp, Artificial Sequence
  Oligonucleotide for detection of SNP TSC0053540
tatttactaatat

SEQ ID NO: 220043 - DNA, 13 bp, Artificial Sequence
  Oligonucleotide for detection of SNP TSC0053541
taataatgtatta

SEQ ID NO: 220044 - DNA, 13 bp, Artificial Sequence
  Oligonucleotide for detection of SNP TSC0053541
taatacattatta

SEQ ID NO: 220045 - DNA, 13 bp, Artificial Sequence
  Oligonucleotide for detection of SNP TSC0053541
taataacgtatta

SEQ ID NO: 220046 - DNA, 13 bp, Artificial Sequence
  Oligonucleotide for detection of SNP TSC0053541
taatacgttatta

SEQ ID NO: 220047 - DNA, 13 bp, Artificial Sequence
  Oligonucleotide for detection of SNP TSC0053541
taatatgttgttg

SEQ ID NO: 220048 - DNA, 13 bp, Artificial Sequence
  Oligonucleotide for detection of SNP TSC0053541
caacaacatatta

SEQ ID NO: 220049 - DNA, 13 bp, Artificial Sequence
  Oligonucleotide for detection of SNP TSC0053541
taatacgttgttg

SEQ ID NO: 220050 - DNA, 13 bp, Artificial Sequence
  Oligonucleotide for detection of SNP TSC0053541
caacaacgtatta

SEQ ID NO: 220051 - DNA, 13 bp, Artificial Sequence
  Oligonucleotide for detection of SNP TSC0053542
aataatatattag

SEQ ID NO: 220052 - DNA, 13 bp, Artificial Sequence
  Oligonucleotide for detection of SNP TSC0053542
ctaatatattatt

SEQ ID NO: 220053 - DNA, 13 bp, Artificial Sequence
  Oligonucleotide for detection of SNP TSC0053542
aataatgtattag

SEQ ID NO: 220054 - DNA, 13 bp, Artificial Sequence
  Oligonucleotide for detection of SNP TSC0053542
ctaatacattatt

SEQ ID NO: 220055 - DNA, 13 bp, Artificial Sequence
  Oligonucleotide for detection of SNP TSC0053544
tgggttaatgaaa

SEQ ID NO: 220056 - DNA, 13 bp, Artificial Sequence
  Oligonucleotide for detection of SNP TSC0053544
tttcattaaccca

SEQ ID NO: 220057 - DNA, 13 bp, Artificial Sequence
  Oligonucleotide for detection of SNP TSC0053544
tgggttgatgaaa

SEQ ID NO: 220058 - DNA, 13 bp, Artificial Sequence
  Oligonucleotide for detection of SNP TSC0053544
tttcatcaaccca

SEQ ID NO: 220059 - DNA, 13 bp, Artificial Sequence
  Oligonucleotide for detection of SNP TSC0053545
attaatgatttga

SEQ ID NO: 220060 - DNA, 13 bp, Artificial Sequence
  Oligonucleotide for detection of SNP TSC0053545
tcaaatcattaat

SEQ ID NO: 220061 - DNA, 13 bp, Artificial Sequence
  Oligonucleotide for detection of SNP TSC0053545
attaataatttga

SEQ ID NO: 220062 - DNA, 13 bp, Artificial Sequence
  Oligonucleotide for detection of SNP TSC0053545
tcaaattattaat

SEQ ID NO: 220063 - DNA, 13 bp, Artificial Sequence
  Oligonucleotide for detection of SNP TSC0053546
aagggtttggaaa

SEQ ID NO: 220064 - DNA, 13 bp, Artificial Sequence
  Oligonucleotide for detection of SNP TSC0053546
tttccaaaccctt

SEQ ID NO: 220065 - DNA, 13 bp, Artificial Sequence
  Oligonucleotide for detection of SNP TSC0053546
aagggtatggaaa

SEQ ID NO: 220066 - DNA, 13 bp, Artificial Sequence
  Oligonucleotide for detection of SNP TSC0053546
tttccataccctt

SEQ ID NO: 220067 - DNA, 13 bp, Artificial Sequence
  Oligonucleotide for detection of SNP TSC0053547
ggtgttatataga

SEQ ID NO: 220068 - DNA, 13 bp, Artificial Sequence
  Oligonucleotide for detection of SNP TSC0053547
tctatataacacc

SEQ ID NO: 220069 - DNA, 13 bp, Artificial Sequence
  Oligonucleotide for detection of SNP TSC0053547
ggtgttgtataga

SEQ ID NO: 220070 - DNA, 13 bp, Artificial Sequence
  Oligonucleotide for detection of SNP TSC0053547
tctatacaacacc

SEQ ID NO: 220071 - DNA, 13 bp, Artificial Sequence
  Oligonucleotide for detection of SNP TSC0053547
ggtgtcgtataga

SEQ ID NO: 220072 - DNA, 13 bp, Artificial Sequence
  Oligonucleotide for detection of SNP TSC0053547
tctatacgacacc

SEQ ID NO: 220073 - DNA, 13 bp, Artificial Sequence
  Oligonucleotide for detection of SNP TSC0053551
attaaattgtttt

SEQ ID NO: 220074 - DNA, 13 bp, Artificial Sequence
  Oligonucleotide for detection of SNP TSC0053551
aaaacaatttaat

SEQ ID NO: 220075 - DNA, 13 bp, Artificial Sequence
  Oligonucleotide for detection of SNP TSC0053551
aagatagtttgat

SEQ ID NO: 220076 - DNA, 13 bp, Artificial Sequence
  Oligonucleotide for detection of SNP TSC0053551
atcaaactatctt

SEQ ID NO: 220077 - DNA, 13 bp, Artificial Sequence
  Oligonucleotide for detection of SNP TSC0053551
aagatattttgat

SEQ ID NO: 220078 - DNA, 13 bp, Artificial Sequence
  Oligonucleotide for detection of SNP TSC0053551
atcaaaatatctt

SEQ ID NO: 220079 - DNA, 13 bp, Artificial Sequence
  Oligonucleotide for detection of SNP TSC0053552
tatatggtatata

SEQ ID NO: 220080 - DNA, 13 bp, Artificial Sequence
  Oligonucleotide for detection of SNP TSC0053552
tatataccatata

SEQ ID NO: 220081 - DNA, 13 bp, Artificial Sequence
  Oligonucleotide for detection of SNP TSC0053554
atatatataaaga

SEQ ID NO: 220082 - DNA, 13 bp, Artificial Sequence
  Oligonucleotide for detection of SNP TSC0053554
tctttatatatat

SEQ ID NO: 220083 - DNA, 13 bp, Artificial Sequence
  Oligonucleotide for detection of SNP TSC0053554
atatatgtaaaga

SEQ ID NO: 220084 - DNA, 13 bp, Artificial Sequence
  Oligonucleotide for detection of SNP TSC0053554
tctttacatatat

SEQ ID NO: 220085 - DNA, 13 bp, Artificial Sequence
  Oligonucleotide for detection of SNP TSC0053555
aaatatatgtata

SEQ ID NO: 220086 - DNA, 13 bp, Artificial Sequence
  Oligonucleotide for detection of SNP TSC0053555
tatacatatattt

SEQ ID NO: 220087 - DNA, 13 bp, Artificial Sequence
  Oligonucleotide for detection of SNP TSC0053555
aaatatgtgtata

SEQ ID NO: 220088 - DNA, 13 bp, Artificial Sequence
  Oligonucleotide for detection of SNP TSC0053555
tatacacatattt

SEQ ID NO: 220089 - DNA, 13 bp, Artificial Sequence
  Oligonucleotide for detection of SNP TSC0053559
tgtaaatggttgt

SEQ ID NO: 220090 - DNA, 13 bp, Artificial Sequence
  Oligonucleotide for detection of SNP TSC0053559
acaaccatttaca

SEQ ID NO: 220091 - DNA, 13 bp, Artificial Sequence
  Oligonucleotide for detection of SNP TSC0053559
tgtaaacggttgt

SEQ ID NO: 220092 - DNA, 13 bp, Artificial Sequence
  Oligonucleotide for detection of SNP TSC0053559
acaaccgtttaca

SEQ ID NO: 220093 - DNA, 13 bp, Artificial Sequence
  Oligonucleotide for detection of SNP TSC0053559
ataattgtttgta

SEQ ID NO: 220094 - DNA, 13 bp, Artificial Sequence
  Oligonucleotide for detection of SNP TSC0053559
tacaaacaattat

SEQ ID NO: 220095 - DNA, 13 bp, Artificial Sequence
  Oligonucleotide for detection of SNP TSC0053559
ataattatttgta

SEQ ID NO: 220096 - DNA, 13 bp, Artificial Sequence
  Oligonucleotide for detection of SNP TSC0053559
tacaaataattat

SEQ ID NO: 220097 - DNA, 13 bp, Artificial Sequence
  Oligonucleotide for detection of SNP TSC0053559
ataatcgtttgta

SEQ ID NO: 220098 - DNA, 13 bp, Artificial Sequence
  Oligonucleotide for detection of SNP TSC0053559
tacaaacgattat

SEQ ID NO: 220099 - DNA, 13 bp, Artificial Sequence
  Oligonucleotide for detection of SNP TSC0053560
ttatgtatgtgta

SEQ ID NO: 220100 - DNA, 13 bp, Artificial Sequence
  Oligonucleotide for detection of SNP TSC0053560
tacacatacataa

SEQ ID NO: 220101 - DNA, 13 bp, Artificial Sequence
  Oligonucleotide for detection of SNP TSC0053560
ttatgtgtgtgta

SEQ ID NO: 220102 - DNA, 13 bp, Artificial Sequence
  Oligonucleotide for detection of SNP TSC0053560
tacacacacataa

SEQ ID NO: 220103 - DNA, 13 bp, Artificial Sequence
  Oligonucleotide for detection of SNP TSC0053560
ttatgtacgtgta

SEQ ID NO: 220104 - DNA, 13 bp, Artificial Sequence
  Oligonucleotide for detection of SNP TSC0053560
tacacgtacataa

SEQ ID NO: 220105 - DNA, 13 bp, Artificial Sequence
  Oligonucleotide for detection of SNP TSC0053560
ttatgtgcgtgta

SEQ ID NO: 220106 - DNA, 13 bp, Artificial Sequence
  Oligonucleotide for detection of SNP TSC0053560
tacacgcacataa

SEQ ID NO: 220107 - DNA, 13 bp, Artificial Sequence
  Oligonucleotide for detection of SNP TSC0000121
ttgtagatatgat

SEQ ID NO: 220108 - DNA, 13 bp, Artificial Sequence
  Oligonucleotide for detection of SNP TSC0000121
atcatatctacaa

SEQ ID NO: 220109 - DNA, 13 bp, Artificial Sequence
  Oligonucleotide for detection of SNP TSC0000121
ttgtaggtatgat

SEQ ID NO: 220110 - DNA, 13 bp, Artificial Sequence
  Oligonucleotide for detection of SNP TSC0000121
atcatacctacaa

SEQ ID NO: 220111 - DNA, 13 bp, Artificial Sequence
  Oligonucleotide for detection of SNP TSC0053561
tttttagtaaatg

SEQ ID NO: 220112 - DNA, 13 bp, Artificial Sequence
  Oligonucleotide for detection of SNP TSC0053561
catttactaaaaa

SEQ ID NO: 220113 - DNA, 13 bp, Artificial Sequence
  Oligonucleotide for detection of SNP TSC0053561
tttttaataaatg

SEQ ID NO: 220114 - DNA, 13 bp, Artificial Sequence
  Oligonucleotide for detection of SNP TSC0053561
catttattaaaaa

SEQ ID NO: 220115 - DNA, 13 bp, Artificial Sequence
  Oligonucleotide for detection of SNP TSC0053562
atttaaaaattat

SEQ ID NO: 220116 - DNA, 13 bp, Artificial Sequence
  Oligonucleotide for detection of SNP TSC0053562
ataatttttaaat

SEQ ID NO: 220117 - DNA, 13 bp, Artificial Sequence
  Oligonucleotide for detection of SNP TSC0053562
atttaagaattat

SEQ ID NO: 220118 - DNA, 13 bp, Artificial Sequence
  Oligonucleotide for detection of SNP TSC0053562
ataattcttaaat

SEQ ID NO: 220119 - DNA, 13 bp, Artificial Sequence
  Oligonucleotide for detection of SNP TSC0053563
agtgttatttgty

SEQ ID NO: 220120 - DNA, 13 bp, Artificial Sequence
  Oligonucleotide for detection of SNP TSC0053563
racaaataacact

SEQ ID NO: 220121 - DNA, 13 bp, Artificial Sequence
  Oligonucleotide for detection of SNP TSC0053563
agtgttgtttgty

SEQ ID NO: 220122 - DNA, 13 bp, Artificial Sequence
  Oligonucleotide for detection of SNP TSC0053563
racaaacaacact

SEQ ID NO: 220123 - DNA, 13 bp, Artificial Sequence
  Oligonucleotide for detection of SNP TSC0053563
agtgttattcgty

SEQ ID NO: 220124 - DNA, 13 bp, Artificial Sequence
  Oligonucleotide for detection of SNP TSC0053563
racgaataacact

SEQ ID NO: 220125 - DNA, 13 bp, Artificial Sequence
  Oligonucleotide for detection of SNP TSC0053563
agtgtcgtttgty

SEQ ID NO: 220126 - DNA, 13 bp, Artificial Sequence
  Oligonucleotide for detection of SNP TSC0053563
racaaacgacact

SEQ ID NO: 220127 - DNA, 13 bp, Artificial Sequence
  Oligonucleotide for detection of SNP TSC0053563
agtgttgttcgty

SEQ ID NO: 220128 - DNA, 13 bp, Artificial Sequence
  Oligonucleotide for detection of SNP TSC0053563
racgaacaacact

SEQ ID NO: 220129 - DNA, 13 bp, Artificial Sequence
  Oligonucleotide for detection of SNP TSC0053563
agtgtcgttcgty

SEQ ID NO: 220130 - DNA, 13 bp, Artificial Sequence
  Oligonucleotide for detection of SNP TSC0053563
racgaacgacact

SEQ ID NO: 220131 - DNA, 13 bp, Artificial Sequence
  Oligonucleotide for detection of SNP TSC0053563
gatggatgatatt

SEQ ID NO: 220132 - DNA, 13 bp, Artificial Sequence
  Oligonucleotide for detection of SNP TSC0053563
aatatcatccatc

SEQ ID NO: 220133 - DNA, 13 bp, Artificial Sequence
  Oligonucleotide for detection of SNP TSC0053563
gacggatgatatt

SEQ ID NO: 220134 - DNA, 13 bp, Artificial Sequence
  Oligonucleotide for detection of SNP TSC0053563
aatatcatccgtc

SEQ ID NO: 220135 - DNA, 13 bp, Artificial Sequence
  Oligonucleotide for detection of SNP TSC0053563
gatggacgatatt

SEQ ID NO: 220136 - DNA, 13 bp, Artificial Sequence
  Oligonucleotide for detection of SNP TSC0053563
aatatcgtccatc

SEQ ID NO: 220137 - DNA, 13 bp, Artificial Sequence
  Oligonucleotide for detection of SNP TSC0053563
gacggacgatatt

SEQ ID NO: 220138 - DNA, 13 bp, Artificial Sequence
  Oligonucleotide for detection of SNP TSC0053563
aatatcgtccgtc

SEQ ID NO: 220139 - DNA, 13 bp, Artificial Sequence
  Oligonucleotide for detection of SNP TSC0053565
atttttatggaag

SEQ ID NO: 220140 - DNA, 13 bp, Artificial Sequence
  Oligonucleotide for detection of SNP TSC0053565
cttccataaaaat

SEQ ID NO: 220141 - DNA, 13 bp, Artificial Sequence
  Oligonucleotide for detection of SNP TSC0053566
gttttagttgtaa

SEQ ID NO: 220142 - DNA, 13 bp, Artificial Sequence
  Oligonucleotide for detection of SNP TSC0053566
ttacaactaaaac

SEQ ID NO: 220143 - DNA, 13 bp, Artificial Sequence
  Oligonucleotide for detection of SNP TSC0053569
agatggagaaaat

SEQ ID NO: 220144 - DNA, 13 bp, Artificial Sequence
  Oligonucleotide for detection of SNP TSC0053569
attttctccatct

SEQ ID NO: 220145 - DNA, 13 bp, Artificial Sequence
  Oligonucleotide for detection of SNP TSC0053569
agatggggaaaat

SEQ ID NO: 220146 - DNA, 13 bp, Artificial Sequence
  Oligonucleotide for detection of SNP TSC0053569
attttccccatct

SEQ ID NO: 220147 - DNA, 13 bp, Artificial Sequence
  Oligonucleotide for detection of SNP TSC0053570
ttttgattaaata

SEQ ID NO: 220148 - DNA, 13 bp, Artificial Sequence
  Oligonucleotide for detection of SNP TSC0053570
tatttaatcaaaa

SEQ ID NO: 220149 - DNA, 13 bp, Artificial Sequence
  Oligonucleotide for detection of SNP TSC0053570
tgtttaattaaaa

SEQ ID NO: 220150 - DNA, 13 bp, Artificial Sequence
  Oligonucleotide for detection of SNP TSC0053570
ttttaattaaaca

SEQ ID NO: 220151 - DNA, 13 bp, Artificial Sequence
  Oligonucleotide for detection of SNP TSC0053570
tgtttatttaaaa

SEQ ID NO: 220152 - DNA, 13 bp, Artificial Sequence
  Oligonucleotide for detection of SNP TSC0053570
ttttaaataaaca

SEQ ID NO: 220153 - DNA, 13 bp, Artificial Sequence
  Oligonucleotide for detection of SNP TSC0053573
aatatatgaaagg

SEQ ID NO: 220154 - DNA, 13 bp, Artificial Sequence
  Oligonucleotide for detection of SNP TSC0053573
cctttcatatatt

SEQ ID NO: 220155 - DNA, 13 bp, Artificial Sequence
  Oligonucleotide for detection of SNP TSC0053573
aatatacgaaagg

SEQ ID NO: 220156 - DNA, 13 bp, Artificial Sequence
  Oligonucleotide for detection of SNP TSC0053573
cctttcgtatatt

SEQ ID NO: 220157 - DNA, 13 bp, Artificial Sequence
  Oligonucleotide for detection of SNP TSC0053575
gaggaagaagtty

SEQ ID NO: 220158 - DNA, 13 bp, Artificial Sequence
  Oligonucleotide for detection of SNP TSC0053575
raacttcttcctc

SEQ ID NO: 220159 - DNA, 13 bp, Artificial Sequence
  Oligonucleotide for detection of SNP TSC0053575
gaggaaaaagtty

SEQ ID NO: 220160 - DNA, 13 bp, Artificial Sequence
  Oligonucleotide for detection of SNP TSC0053575
raactttttcctc

SEQ ID NO: 220161 - DNA, 13 bp, Artificial Sequence
  Oligonucleotide for detection of SNP TSC0053576
tttatttttgttg

SEQ ID NO: 220162 - DNA, 13 bp, Artificial Sequence
  Oligonucleotide for detection of SNP TSC0053576
caacaaaaataaa

SEQ ID NO: 220163 - DNA, 13 bp, Artificial Sequence
  Oligonucleotide for detection of SNP TSC0053576
tttattgttgttg

SEQ ID NO: 220164 - DNA, 13 bp, Artificial Sequence
  Oligonucleotide for detection of SNP TSC0053576
caacaacaataaa

SEQ ID NO: 220165 - DNA, 13 bp, Artificial Sequence
  Oligonucleotide for detection of SNP TSC0053576
tagtagaagtgga

SEQ ID NO: 220166 - DNA, 13 bp, Artificial Sequence
  Oligonucleotide for detection of SNP TSC0053576
tccacttctacta

SEQ ID NO: 220167 - DNA, 13 bp, Artificial Sequence
  Oligonucleotide for detection of SNP TSC0053576
tagtagtagtgga

SEQ ID NO: 220168 - DNA, 13 bp, Artificial Sequence
  Oligonucleotide for detection of SNP TSC0053576
tccactactacta

SEQ ID NO: 220169 - DNA, 13 bp, Artificial Sequence
  Oligonucleotide for detection of SNP TSC0053577
aagggggtaaaag

SEQ ID NO: 220170 - DNA, 13 bp, Artificial Sequence
  Oligonucleotide for detection of SNP TSC0053577
cttttaccccctt

SEQ ID NO: 220171 - DNA, 13 bp, Artificial Sequence
  Oligonucleotide for detection of SNP TSC0053577
aaggggataaaag

SEQ ID NO: 220172 - DNA, 13 bp, Artificial Sequence
  Oligonucleotide for detection of SNP TSC0053577
cttttatcccctt

SEQ ID NO: 220173 - DNA, 13 bp, Artificial Sequence
  Oligonucleotide for detection of SNP TSC0053579
gggtataattttt

SEQ ID NO: 220174 - DNA, 13 bp, Artificial Sequence
  Oligonucleotide for detection of SNP TSC0053579
aaaaattataccc

SEQ ID NO: 220175 - DNA, 13 bp, Artificial Sequence
  Oligonucleotide for detection of SNP TSC0053579
gggtatgattttt

SEQ ID NO: 220176 - DNA, 13 bp, Artificial Sequence
  Oligonucleotide for detection of SNP TSC0053579
aaaaatcataccc

SEQ ID NO: 220177 - DNA, 13 bp, Artificial Sequence
  Oligonucleotide for detection of SNP TSC0053580
tttggtggttaga

SEQ ID NO: 220178 - DNA, 13 bp, Artificial Sequence
  Oligonucleotide for detection of SNP TSC0053580
tctaaccaccaaa

SEQ ID NO: 220179 - DNA, 13 bp, Artificial Sequence
  Oligonucleotide for detection of SNP TSC0053580
tttggtagttaga

SEQ ID NO: 220180 - DNA, 13 bp, Artificial Sequence
  Oligonucleotide for detection of SNP TSC0053580
tctaactaccaaa

SEQ ID NO: 220181 - DNA, 13 bp, Artificial Sequence
  Oligonucleotide for detection of SNP TSC0053581
tttaaaggttaat

SEQ ID NO: 220182 - DNA, 13 bp, Artificial Sequence
  Oligonucleotide for detection of SNP TSC0053581
attaacctttaaa

SEQ ID NO: 220183 - DNA, 13 bp, Artificial Sequence
  Oligonucleotide for detection of SNP TSC0053581
attgatgtttagg

SEQ ID NO: 220184 - DNA, 13 bp, Artificial Sequence
  Oligonucleotide for detection of SNP TSC0053581
cctaaacatcaat

SEQ ID NO: 220185 - DNA, 13 bp, Artificial Sequence
  Oligonucleotide for detection of SNP TSC0053581
attgatttttagg

SEQ ID NO: 220186 - DNA, 13 bp, Artificial Sequence
  Oligonucleotide for detection of SNP TSC0053581
cctaaaaatcaat

SEQ ID NO: 220187 - DNA, 13 bp, Artificial Sequence
  Oligonucleotide for detection of SNP TSC0053581
attgacgtttagg

SEQ ID NO: 220188 - DNA, 13 bp, Artificial Sequence
  Oligonucleotide for detection of SNP TSC0053581
cctaaacgtcaat

SEQ ID NO: 220189 - DNA, 13 bp, Artificial Sequence
  Oligonucleotide for detection of SNP TSC0053585
ttatgtattaagy

SEQ ID NO: 220190 - DNA, 13 bp, Artificial Sequence
  Oligonucleotide for detection of SNP TSC0053585
rcttaatacataa

SEQ ID NO: 220191 - DNA, 13 bp, Artificial Sequence
  Oligonucleotide for detection of SNP TSC0053585
ttatgttttaagy

SEQ ID NO: 220192 - DNA, 13 bp, Artificial Sequence
  Oligonucleotide for detection of SNP TSC0053585
rcttaaaacataa

SEQ ID NO: 220193 - DNA, 13 bp, Artificial Sequence
  Oligonucleotide for detection of SNP TSC0053585
gtttgatatatgg

SEQ ID NO: 220194 - DNA, 13 bp, Artificial Sequence
  Oligonucleotide for detection of SNP TSC0053585
ccatatatcaaac

SEQ ID NO: 220195 - DNA, 13 bp, Artificial Sequence
  Oligonucleotide for detection of SNP TSC0053585
gtttgagatatgg

SEQ ID NO: 220196 - DNA, 13 bp, Artificial Sequence
  Oligonucleotide for detection of SNP TSC0053585
ccatatctcaaac

SEQ ID NO: 220197 - DNA, 13 bp, Artificial Sequence
  Oligonucleotide for detection of SNP TSC0053586
ataaatgttatty

SEQ ID NO: 220198 - DNA, 13 bp, Artificial Sequence
  Oligonucleotide for detection of SNP TSC0053586
raataacatttat

SEQ ID NO: 220199 - DNA, 13 bp, Artificial Sequence
  Oligonucleotide for detection of SNP TSC0053586
ataaatattatty

SEQ ID NO: 220200 - DNA, 13 bp, Artificial Sequence
  Oligonucleotide for detection of SNP TSC0053586
raataatatttat

SEQ ID NO: 220201 - DNA, 13 bp, Artificial Sequence
  Oligonucleotide for detection of SNP TSC0053587
taatatataagtt

SEQ ID NO: 220202 - DNA, 13 bp, Artificial Sequence
  Oligonucleotide for detection of SNP TSC0053587
aacttatatatta

SEQ ID NO: 220203 - DNA, 13 bp, Artificial Sequence
  Oligonucleotide for detection of SNP TSC0053587
taatatttaagtt

SEQ ID NO: 220204 - DNA, 13 bp, Artificial Sequence
  Oligonucleotide for detection of SNP TSC0053587
aacttaaatatta

SEQ ID NO: 220205 - DNA, 13 bp, Artificial Sequence
  Oligonucleotide for detection of SNP TSC0053587
aatttatatgtta

SEQ ID NO: 220206 - DNA, 13 bp, Artificial Sequence
  Oligonucleotide for detection of SNP TSC0053587
taacatataaatt

SEQ ID NO: 220207 - DNA, 13 bp, Artificial Sequence
  Oligonucleotide for detection of SNP TSC0053587
aatttagatgtta

SEQ ID NO: 220208 - DNA, 13 bp, Artificial Sequence
  Oligonucleotide for detection of SNP TSC0053587
taacatctaaatt

SEQ ID NO: 220209 - DNA, 13 bp, Artificial Sequence
  Oligonucleotide for detection of SNP TSC0053589
agtagtggagacg

SEQ ID NO: 220210 - DNA, 13 bp, Artificial Sequence
  Oligonucleotide for detection of SNP TSC0053589
cgtctccactact

SEQ ID NO: 220211 - DNA, 13 bp, Artificial Sequence
  Oligonucleotide for detection of SNP TSC0053589
agtagtagagacg

SEQ ID NO: 220212 - DNA, 13 bp, Artificial Sequence
  Oligonucleotide for detection of SNP TSC0053589
cgtctctactact

SEQ ID NO: 220213 - DNA, 13 bp, Artificial Sequence
  Oligonucleotide for detection of SNP TSC0053591
gaagaagtggtta

SEQ ID NO: 220214 - DNA, 13 bp, Artificial Sequence
  Oligonucleotide for detection of SNP TSC0053591
taaccacttcttc

SEQ ID NO: 220215 - DNA, 13 bp, Artificial Sequence
  Oligonucleotide for detection of SNP TSC0053591
gaagaaatggtta

SEQ ID NO: 220216 - DNA, 13 bp, Artificial Sequence
  Oligonucleotide for detection of SNP TSC0053591
taaccatttcttc

SEQ ID NO: 220217 - DNA, 13 bp, Artificial Sequence
  Oligonucleotide for detection of SNP TSC0053595
attaatagataga

SEQ ID NO: 220218 - DNA, 13 bp, Artificial Sequence
  Oligonucleotide for detection of SNP TSC0053595
tctatctattaat

SEQ ID NO: 220219 - DNA, 13 bp, Artificial Sequence
  Oligonucleotide for detection of SNP TSC0053595
attaatggataga

SEQ ID NO: 220220 - DNA, 13 bp, Artificial Sequence
  Oligonucleotide for detection of SNP TSC0053595
tctatccattaat

SEQ ID NO: 220221 - DNA, 13 bp, Artificial Sequence
  Oligonucleotide for detection of SNP TSC0053595
attaacggataga

SEQ ID NO: 220222 - DNA, 13 bp, Artificial Sequence
  Oligonucleotide for detection of SNP TSC0053595
tctatccgttaat

SEQ ID NO: 220223 - DNA, 13 bp, Artificial Sequence
  Oligonucleotide for detection of SNP TSC0053595
tttatttgttgat

SEQ ID NO: 220224 - DNA, 13 bp, Artificial Sequence
  Oligonucleotide for detection of SNP TSC0053595
atcaacaaataaa

SEQ ID NO: 220225 - DNA, 13 bp, Artificial Sequence
  Oligonucleotide for detection of SNP TSC0053595
tttattcgttgat

SEQ ID NO: 220226 - DNA, 13 bp, Artificial Sequence
  Oligonucleotide for detection of SNP TSC0053595
atcaacgaataaa

SEQ ID NO: 220227 - DNA, 13 bp, Artificial Sequence
  Oligonucleotide for detection of SNP TSC0053597
attttaatgtagg

SEQ ID NO: 220228 - DNA, 13 bp, Artificial Sequence
  Oligonucleotide for detection of SNP TSC0053597
cctacattaaaat

SEQ ID NO: 220229 - DNA, 13 bp, Artificial Sequence
  Oligonucleotide for detection of SNP TSC0053597
attttagtgtagg

SEQ ID NO: 220230 - DNA, 13 bp, Artificial Sequence
  Oligonucleotide for detection of SNP TSC0053597
cctacactaaaat

SEQ ID NO: 220231 - DNA, 13 bp, Artificial Sequence
  Oligonucleotide for detection of SNP TSC0053600
tgtttgatgaggt

SEQ ID NO: 220232 - DNA, 13 bp, Artificial Sequence
  Oligonucleotide for detection of SNP TSC0053600
acctcatcaaaca

SEQ ID NO: 220233 - DNA, 13 bp, Artificial Sequence
  Oligonucleotide for detection of SNP TSC0053600
tgtttgttgaggt

SEQ ID NO: 220234 - DNA, 13 bp, Artificial Sequence
  Oligonucleotide for detection of SNP TSC0053600
acctcaacaaaca

SEQ ID NO: 220235 - DNA, 13 bp, Artificial Sequence
  Oligonucleotide for detection of SNP TSC0053600
attttattaggta

SEQ ID NO: 220236 - DNA, 13 bp, Artificial Sequence
  Oligonucleotide for detection of SNP TSC0053600
tacctaataaaat

SEQ ID NO: 220237 - DNA, 13 bp, Artificial Sequence
  Oligonucleotide for detection of SNP TSC0053600
attttagtaggta

SEQ ID NO: 220238 - DNA, 13 bp, Artificial Sequence
  Oligonucleotide for detection of SNP TSC0053600
tacctactaaaat

SEQ ID NO: 220239 - DNA, 13 bp, Artificial Sequence
  Oligonucleotide for detection of SNP TSC0053601
tgatttataagaa

SEQ ID NO: 220240 - DNA, 13 bp, Artificial Sequence
  Oligonucleotide for detection of SNP TSC0053601
ttcttataaatca

SEQ ID NO: 220241 - DNA, 13 bp, Artificial Sequence
  Oligonucleotide for detection of SNP TSC0053601
tgatttgtaagaa

SEQ ID NO: 220242 - DNA, 13 bp, Artificial Sequence
  Oligonucleotide for detection of SNP TSC0053601
ttcttacaaatca

SEQ ID NO: 220243 - DNA, 13 bp, Artificial Sequence
  Oligonucleotide for detection of SNP TSC0053602
aatgttagagata

SEQ ID NO: 220244 - DNA, 13 bp, Artificial Sequence
  Oligonucleotide for detection of SNP TSC0053602
tatctctaacatt

SEQ ID NO: 220245 - DNA, 13 bp, Artificial Sequence
  Oligonucleotide for detection of SNP TSC0053602
aatgttggagata

SEQ ID NO: 220246 - DNA, 13 bp, Artificial Sequence
  Oligonucleotide for detection of SNP TSC0053602
tatctccaacatt

SEQ ID NO: 220247 - DNA, 13 bp, Artificial Sequence
  Oligonucleotide for detection of SNP TSC0053602
aatgtcggagata

SEQ ID NO: 220248 - DNA, 13 bp, Artificial Sequence
  Oligonucleotide for detection of SNP TSC0053602
tatctccgacatt

SEQ ID NO: 220249 - DNA, 13 bp, Artificial Sequence
  Oligonucleotide for detection of SNP TSC0053602
tatttttggtatt

SEQ ID NO: 220250 - DNA, 13 bp, Artificial Sequence
  Oligonucleotide for detection of SNP TSC0053602
aataccaaaaata

SEQ ID NO: 220251 - DNA, 13 bp, Artificial Sequence
  Oligonucleotide for detection of SNP TSC0053602
tattttcggtatt

SEQ ID NO: 220252 - DNA, 13 bp, Artificial Sequence
  Oligonucleotide for detection of SNP TSC0053602
aataccgaaaata

SEQ ID NO: 220253 - DNA, 13 bp, Artificial Sequence
  Oligonucleotide for detection of SNP TSC0053603
tttttatgttata

SEQ ID NO: 220254 - DNA, 13 bp, Artificial Sequence
  Oligonucleotide for detection of SNP TSC0053603
tataacataaaaa

SEQ ID NO: 220255 - DNA, 13 bp, Artificial Sequence
  Oligonucleotide for detection of SNP TSC0053603
tttttacgttata

SEQ ID NO: 220256 - DNA, 13 bp, Artificial Sequence
  Oligonucleotide for detection of SNP TSC0053603
tataacgtaaaaa

SEQ ID NO: 220257 - DNA, 13 bp, Artificial Sequence
  Oligonucleotide for detection of SNP TSC0053603
tgtaatgtaggaa

SEQ ID NO: 220258 - DNA, 13 bp, Artificial Sequence
  Oligonucleotide for detection of SNP TSC0053603
ttcctacattaca

SEQ ID NO: 220259 - DNA, 13 bp, Artificial Sequence
  Oligonucleotide for detection of SNP TSC0053603
tgtaatataggaa

SEQ ID NO: 220260 - DNA, 13 bp, Artificial Sequence
  Oligonucleotide for detection of SNP TSC0053603
ttcctatattaca

SEQ ID NO: 220261 - DNA, 13 bp, Artificial Sequence
  Oligonucleotide for detection of SNP TSC0053603
tgtaacgtaggaa

SEQ ID NO: 220262 - DNA, 13 bp, Artificial Sequence
  Oligonucleotide for detection of SNP TSC0053603
ttcctacgttaca

SEQ ID NO: 220263 - DNA, 13 bp, Artificial Sequence
  Oligonucleotide for detection of SNP TSC0053604
tttaagtgttaaa

SEQ ID NO: 220264 - DNA, 13 bp, Artificial Sequence
  Oligonucleotide for detection of SNP TSC0053604
tttaacacttaaa

SEQ ID NO: 220265 - DNA, 13 bp, Artificial Sequence
  Oligonucleotide for detection of SNP TSC0053604
tttaagcgttaaa

SEQ ID NO: 220266 - DNA, 13 bp, Artificial Sequence
  Oligonucleotide for detection of SNP TSC0053604
tttaacgcttaaa

SEQ ID NO: 220267 - DNA, 13 bp, Artificial Sequence
  Oligonucleotide for detection of SNP TSC0053604
tttaatgtttgaa

SEQ ID NO: 220268 - DNA, 13 bp, Artificial Sequence
  Oligonucleotide for detection of SNP TSC0053604
ttcaaacattaaa

SEQ ID NO: 220269 - DNA, 13 bp, Artificial Sequence
  Oligonucleotide for detection of SNP TSC0053604
tttaatatttgaa

SEQ ID NO: 220270 - DNA, 13 bp, Artificial Sequence
  Oligonucleotide for detection of SNP TSC0053604
ttcaaatattaaa

SEQ ID NO: 220271 - DNA, 13 bp, Artificial Sequence
  Oligonucleotide for detection of SNP TSC0053604
tttaacgtttgaa

SEQ ID NO: 220272 - DNA, 13 bp, Artificial Sequence
  Oligonucleotide for detection of SNP TSC0053604
ttcaaacgttaaa

SEQ ID NO: 220273 - DNA, 13 bp, Artificial Sequence
  Oligonucleotide for detection of SNP TSC0053605
gtaagagtaagag

SEQ ID NO: 220274 - DNA, 13 bp, Artificial Sequence
  Oligonucleotide for detection of SNP TSC0053605
ctcttactcttac

SEQ ID NO: 220275 - DNA, 13 bp, Artificial Sequence
  Oligonucleotide for detection of SNP TSC0053605
gtaagaataagag

SEQ ID NO: 220276 - DNA, 13 bp, Artificial Sequence
  Oligonucleotide for detection of SNP TSC0053605
ctcttattcttac

SEQ ID NO: 220277 - DNA, 13 bp, Artificial Sequence
  Oligonucleotide for detection of SNP TSC0053606
ggatatgttaaaa

SEQ ID NO: 220278 - DNA, 13 bp, Artificial Sequence
  Oligonucleotide for detection of SNP TSC0053606
ttttaacatatcc

SEQ ID NO: 220279 - DNA, 13 bp, Artificial Sequence
  Oligonucleotide for detection of SNP TSC0053606
ggatatattaaaa

SEQ ID NO: 220280 - DNA, 13 bp, Artificial Sequence
  Oligonucleotide for detection of SNP TSC0053606
ttttaatatatcc

SEQ ID NO: 220281 - DNA, 13 bp, Artificial Sequence
  Oligonucleotide for detection of SNP TSC0053607
ttttttaggtaaa

SEQ ID NO: 220282 - DNA, 13 bp, Artificial Sequence
  Oligonucleotide for detection of SNP TSC0053607
tttacctaaaaaa

SEQ ID NO: 220283 - DNA, 13 bp, Artificial Sequence
  Oligonucleotide for detection of SNP TSC0053607
ttttttgggtaaa

SEQ ID NO: 220284 - DNA, 13 bp, Artificial Sequence
  Oligonucleotide for detection of SNP TSC0053607
tttacccaaaaaa

SEQ ID NO: 220285 - DNA, 13 bp, Artificial Sequence
  Oligonucleotide for detection of SNP TSC0053607
tttttcgggtaaa

SEQ ID NO: 220286 - DNA, 13 bp, Artificial Sequence
  Oligonucleotide for detection of SNP TSC0053607
tttacccgaaaaa

SEQ ID NO: 220287 - DNA, 13 bp, Artificial Sequence
  Oligonucleotide for detection of SNP TSC0053607
tttgtttgaagaa

SEQ ID NO: 220288 - DNA, 13 bp, Artificial Sequence
  Oligonucleotide for detection of SNP TSC0053607
ttcttcaaacaaa

SEQ ID NO: 220289 - DNA, 13 bp, Artificial Sequence
  Oligonucleotide for detection of SNP TSC0053607
tttgttcgaagaa

SEQ ID NO: 220290 - DNA, 13 bp, Artificial Sequence
  Oligonucleotide for detection of SNP TSC0053607
ttcttcgaacaaa

SEQ ID NO: 220291 - DNA, 13 bp, Artificial Sequence
  Oligonucleotide for detection of SNP TSC0053608
tagtttgtaagat

SEQ ID NO: 220292 - DNA, 13 bp, Artificial Sequence
  Oligonucleotide for detection of SNP TSC0053608
atcttacaaacta

SEQ ID NO: 220293 - DNA, 13 bp, Artificial Sequence
  Oligonucleotide for detection of SNP TSC0053608
tagtttataagat

SEQ ID NO: 220294 - DNA, 13 bp, Artificial Sequence
  Oligonucleotide for detection of SNP TSC0053608
atcttataaacta

SEQ ID NO: 220295 - DNA, 13 bp, Artificial Sequence
  Oligonucleotide for detection of SNP TSC0053609
tttagtatattgg

SEQ ID NO: 220296 - DNA, 13 bp, Artificial Sequence
  Oligonucleotide for detection of SNP TSC0053609
ccaatatactaaa

SEQ ID NO: 220297 - DNA, 13 bp, Artificial Sequence
  Oligonucleotide for detection of SNP TSC0053609
tttagtttattgg

SEQ ID NO: 220298 - DNA, 13 bp, Artificial Sequence
  Oligonucleotide for detection of SNP TSC0053609
ccaataaactaaa

SEQ ID NO: 220299 - DNA, 13 bp, Artificial Sequence
  Oligonucleotide for detection of SNP TSC0053609
ttaatgtgttggg

SEQ ID NO: 220300 - DNA, 13 bp, Artificial Sequence
  Oligonucleotide for detection of SNP TSC0053609
cccaacacattaa

SEQ ID NO: 220301 - DNA, 13 bp, Artificial Sequence
  Oligonucleotide for detection of SNP TSC0053609
ttaatgggttggg

SEQ ID NO: 220302 - DNA, 13 bp, Artificial Sequence
  Oligonucleotide for detection of SNP TSC0053609
cccaacccattaa

SEQ ID NO: 220303 - DNA, 13 bp, Artificial Sequence
  Oligonucleotide for detection of SNP TSC0008997
tggaaggttggty

SEQ ID NO: 220304 - DNA, 13 bp, Artificial Sequence
  Oligonucleotide for detection of SNP TSC0008997
raccaaccttcca

SEQ ID NO: 220305 - DNA, 13 bp, Artificial Sequence
  Oligonucleotide for detection of SNP TSC0008997
tggaagattggty

SEQ ID NO: 220306 - DNA, 13 bp, Artificial Sequence
  Oligonucleotide for detection of SNP TSC0008997
raccaatcttcca

SEQ ID NO: 220307 - DNA, 13 bp, Artificial Sequence
  Oligonucleotide for detection of SNP TSC0008998
tggggtttttttt

SEQ ID NO: 220308 - DNA, 13 bp, Artificial Sequence
  Oligonucleotide for detection of SNP TSC0008998
aaaaaaaacccca

SEQ ID NO: 220309 - DNA, 13 bp, Artificial Sequence
  Oligonucleotide for detection of SNP TSC0008998
aagaaatatttta

SEQ ID NO: 220310 - DNA, 13 bp, Artificial Sequence
  Oligonucleotide for detection of SNP TSC0008998
taaaatatttctt

SEQ ID NO: 220311 - DNA, 13 bp, Artificial Sequence
  Oligonucleotide for detection of SNP TSC0008998
aagaaagatttta

SEQ ID NO: 220312 - DNA, 13 bp, Artificial Sequence
  Oligonucleotide for detection of SNP TSC0008998
taaaatctttctt

SEQ ID NO: 220313 - DNA, 13 bp, Artificial Sequence
  Oligonucleotide for detection of SNP TSC0053614
tttgttggagtty

SEQ ID NO: 220314 - DNA, 13 bp, Artificial Sequence
  Oligonucleotide for detection of SNP TSC0053614
raactccaacaaa

SEQ ID NO: 220315 - DNA, 13 bp, Artificial Sequence
  Oligonucleotide for detection of SNP TSC0053614
tttgttagagtty

SEQ ID NO: 220316 - DNA, 13 bp, Artificial Sequence
  Oligonucleotide for detection of SNP TSC0053614
raactctaacaaa

SEQ ID NO: 220317 - DNA, 13 bp, Artificial Sequence
  Oligonucleotide for detection of SNP TSC0053615
gatataagagggy

SEQ ID NO: 220318 - DNA, 13 bp, Artificial Sequence
  Oligonucleotide for detection of SNP TSC0053615
rccctcttatatc

SEQ ID NO: 220319 - DNA, 13 bp, Artificial Sequence
  Oligonucleotide for detection of SNP TSC0053615
gatataggagggy

SEQ ID NO: 220320 - DNA, 13 bp, Artificial Sequence
  Oligonucleotide for detection of SNP TSC0053615
rccctcctatatc

SEQ ID NO: 220321 - DNA, 13 bp, Artificial Sequence
  Oligonucleotide for detection of SNP TSC0053622
ttggttatgatgt

SEQ ID NO: 220322 - DNA, 13 bp, Artificial Sequence
  Oligonucleotide for detection of SNP TSC0053622
acatcataaccaa

SEQ ID NO: 220323 - DNA, 13 bp, Artificial Sequence
  Oligonucleotide for detection of SNP TSC0053622
ttggttttgatgt

SEQ ID NO: 220324 - DNA, 13 bp, Artificial Sequence
  Oligonucleotide for detection of SNP TSC0053622
acatcaaaaccaa

SEQ ID NO: 220325 - DNA, 13 bp, Artificial Sequence
  Oligonucleotide for detection of SNP TSC0053622
ttggttatgacgt

SEQ ID NO: 220326 - DNA, 13 bp, Artificial Sequence
  Oligonucleotide for detection of SNP TSC0053622
acgtcataaccaa

SEQ ID NO: 220327 - DNA, 13 bp, Artificial Sequence
  Oligonucleotide for detection of SNP TSC0053622
ttggttttgacgt

SEQ ID NO: 220328 - DNA, 13 bp, Artificial Sequence
  Oligonucleotide for detection of SNP TSC0053622
acgtcaaaaccaa

SEQ ID NO: 220329 - DNA, 13 bp, Artificial Sequence
  Oligonucleotide for detection of SNP TSC0053622
atgttataattag

SEQ ID NO: 220330 - DNA, 13 bp, Artificial Sequence
  Oligonucleotide for detection of SNP TSC0053622
ctaattataacat

SEQ ID NO: 220331 - DNA, 13 bp, Artificial Sequence
  Oligonucleotide for detection of SNP TSC0053622
atgttaaaattag

SEQ ID NO: 220332 - DNA, 13 bp, Artificial Sequence
  Oligonucleotide for detection of SNP TSC0053622
ctaattttaacat

SEQ ID NO: 220333 - DNA, 13 bp, Artificial Sequence
  Oligonucleotide for detection of SNP TSC0053622
acgttataattag

SEQ ID NO: 220334 - DNA, 13 bp, Artificial Sequence
  Oligonucleotide for detection of SNP TSC0053622
ctaattataacgt

SEQ ID NO: 220335 - DNA, 13 bp, Artificial Sequence
  Oligonucleotide for detection of SNP TSC0053622
acgttaaaattag

SEQ ID NO: 220336 - DNA, 13 bp, Artificial Sequence
  Oligonucleotide for detection of SNP TSC0053622
ctaattttaacgt

SEQ ID NO: 220337 - DNA, 13 bp, Artificial Sequence
  Oligonucleotide for detection of SNP TSC0053623
tatgacgtttttt

SEQ ID NO: 220338 - DNA, 13 bp, Artificial Sequence
  Oligonucleotide for detection of SNP TSC0053623
aaaaaacgtcata

SEQ ID NO: 220339 - DNA, 13 bp, Artificial Sequence
  Oligonucleotide for detection of SNP TSC0053623
agagaatgttata

SEQ ID NO: 220340 - DNA, 13 bp, Artificial Sequence
  Oligonucleotide for detection of SNP TSC0053623
tataacattctct

SEQ ID NO: 220341 - DNA, 13 bp, Artificial Sequence
  Oligonucleotide for detection of SNP TSC0053623
agagaacgttata

SEQ ID NO: 220342 - DNA, 13 bp, Artificial Sequence
  Oligonucleotide for detection of SNP TSC0053623
tataacgttctct

SEQ ID NO: 220343 - DNA, 13 bp, Artificial Sequence
  Oligonucleotide for detection of SNP TSC0053624
gtgtatatgattt

SEQ ID NO: 220344 - DNA, 13 bp, Artificial Sequence
  Oligonucleotide for detection of SNP TSC0053624
aaatcatatacac

SEQ ID NO: 220345 - DNA, 13 bp, Artificial Sequence
  Oligonucleotide for detection of SNP TSC0053624
gtgtatgtgattt

SEQ ID NO: 220346 - DNA, 13 bp, Artificial Sequence
  Oligonucleotide for detection of SNP TSC0053624
aaatcacatacac

SEQ ID NO: 220347 - DNA, 13 bp, Artificial Sequence
  Oligonucleotide for detection of SNP TSC0053624
gtgtacgtgattt

SEQ ID NO: 220348 - DNA, 13 bp, Artificial Sequence
  Oligonucleotide for detection of SNP TSC0053624
aaatcacgtacac

SEQ ID NO: 220349 - DNA, 13 bp, Artificial Sequence
  Oligonucleotide for detection of SNP TSC0053626
aaaagtatatgty

SEQ ID NO: 220350 - DNA, 13 bp, Artificial Sequence
  Oligonucleotide for detection of SNP TSC0053626
racatatactttt

SEQ ID NO: 220351 - DNA, 13 bp, Artificial Sequence
  Oligonucleotide for detection of SNP TSC0053626
aaaagtgtatgty

SEQ ID NO: 220352 - DNA, 13 bp, Artificial Sequence
  Oligonucleotide for detection of SNP TSC0053626
racatacactttt

SEQ ID NO: 220353 - DNA, 13 bp, Artificial Sequence
  Oligonucleotide for detection of SNP TSC0053629
attttttgtgaaa

SEQ ID NO: 220354 - DNA, 13 bp, Artificial Sequence
  Oligonucleotide for detection of SNP TSC0053629
tttcacaaaaaat

SEQ ID NO: 220355 - DNA, 13 bp, Artificial Sequence
  Oligonucleotide for detection of SNP TSC0053629
atttttggtgaaa

SEQ ID NO: 220356 - DNA, 13 bp, Artificial Sequence
  Oligonucleotide for detection of SNP TSC0053629
tttcaccaaaaat

SEQ ID NO: 220357 - DNA, 13 bp, Artificial Sequence
  Oligonucleotide for detection of SNP TSC0053629
atttttcgtgaaa

SEQ ID NO: 220358 - DNA, 13 bp, Artificial Sequence
  Oligonucleotide for detection of SNP TSC0053629
tttcacgaaaaat

SEQ ID NO: 220359 - DNA, 13 bp, Artificial Sequence
  Oligonucleotide for detection of SNP TSC0053629
ttttatgaaaagt

SEQ ID NO: 220360 - DNA, 13 bp, Artificial Sequence
  Oligonucleotide for detection of SNP TSC0053629
acttttcataaaa

SEQ ID NO: 220361 - DNA, 13 bp, Artificial Sequence
  Oligonucleotide for detection of SNP TSC0053629
ttttattaaaagt

SEQ ID NO: 220362 - DNA, 13 bp, Artificial Sequence
  Oligonucleotide for detection of SNP TSC0053629
acttttaataaaa

SEQ ID NO: 220363 - DNA, 13 bp, Artificial Sequence
  Oligonucleotide for detection of SNP TSC0053629
ttttacgaaaagt

SEQ ID NO: 220364 - DNA, 13 bp, Artificial Sequence
  Oligonucleotide for detection of SNP TSC0053629
acttttcgtaaaa

SEQ ID NO: 220365 - DNA, 13 bp, Artificial Sequence
  Oligonucleotide for detection of SNP TSC0053630
aatttatattttt

SEQ ID NO: 220366 - DNA, 13 bp, Artificial Sequence
  Oligonucleotide for detection of SNP TSC0053630
aaaaatataaatt

SEQ ID NO: 220367 - DNA, 13 bp, Artificial Sequence
  Oligonucleotide for detection of SNP TSC0053630
aatttagattttt

SEQ ID NO: 220368 - DNA, 13 bp, Artificial Sequence
  Oligonucleotide for detection of SNP TSC0053630
aaaaatctaaatt

SEQ ID NO: 220369 - DNA, 13 bp, Artificial Sequence
  Oligonucleotide for detection of SNP TSC0053630
aaaaatttaaatt

SEQ ID NO: 220370 - DNA, 13 bp, Artificial Sequence
  Oligonucleotide for detection of SNP TSC0053630
aatttaaattttt

SEQ ID NO: 220371 - DNA, 13 bp, Artificial Sequence
  Oligonucleotide for detection of SNP TSC0053633
tattaaagatgta

SEQ ID NO: 220372 - DNA, 13 bp, Artificial Sequence
  Oligonucleotide for detection of SNP TSC0053633
tacatctttaata

SEQ ID NO: 220373 - DNA, 13 bp, Artificial Sequence
  Oligonucleotide for detection of SNP TSC0053633
tattaaggatgta

SEQ ID NO: 220374 - DNA, 13 bp, Artificial Sequence
  Oligonucleotide for detection of SNP TSC0053633
tacatccttaata

SEQ ID NO: 220375 - DNA, 13 bp, Artificial Sequence
  Oligonucleotide for detection of SNP TSC0053634
gaatattttaata

SEQ ID NO: 220376 - DNA, 13 bp, Artificial Sequence
  Oligonucleotide for detection of SNP TSC0053634
tattaaaatattc

SEQ ID NO: 220377 - DNA, 13 bp, Artificial Sequence
  Oligonucleotide for detection of SNP TSC0053634
gaatatgttaata

SEQ ID NO: 220378 - DNA, 13 bp, Artificial Sequence
  Oligonucleotide for detection of SNP TSC0053634
tattaacatattc

SEQ ID NO: 220379 - DNA, 13 bp, Artificial Sequence
  Oligonucleotide for detection of SNP TSC0053634
tattgagatatty

SEQ ID NO: 220380 - DNA, 13 bp, Artificial Sequence
  Oligonucleotide for detection of SNP TSC0053634
raatatctcaata

SEQ ID NO: 220381 - DNA, 13 bp, Artificial Sequence
  Oligonucleotide for detection of SNP TSC0053634
tattgatatatty

SEQ ID NO: 220382 - DNA, 13 bp, Artificial Sequence
  Oligonucleotide for detection of SNP TSC0053634
raatatatcaata

SEQ ID NO: 220383 - DNA, 13 bp, Artificial Sequence
  Oligonucleotide for detection of SNP TSC0053636
tatatatgtttty

SEQ ID NO: 220384 - DNA, 13 bp, Artificial Sequence
  Oligonucleotide for detection of SNP TSC0053636
raaaacatatata

SEQ ID NO: 220385 - DNA, 13 bp, Artificial Sequence
  Oligonucleotide for detection of SNP TSC0053636
tatatacgtttty

SEQ ID NO: 220386 - DNA, 13 bp, Artificial Sequence
  Oligonucleotide for detection of SNP TSC0053636
raaaacgtatata

SEQ ID NO: 220387 - DNA, 13 bp, Artificial Sequence
  Oligonucleotide for detection of SNP TSC0053636
gagggtgtgtgtg

SEQ ID NO: 220388 - DNA, 13 bp, Artificial Sequence
  Oligonucleotide for detection of SNP TSC0053636
cacacacaccctc

SEQ ID NO: 220389 - DNA, 13 bp, Artificial Sequence
  Oligonucleotide for detection of SNP TSC0053636
gagggtatgtgtg

SEQ ID NO: 220390 - DNA, 13 bp, Artificial Sequence
  Oligonucleotide for detection of SNP TSC0053636
cacacataccctc

SEQ ID NO: 220391 - DNA, 13 bp, Artificial Sequence
  Oligonucleotide for detection of SNP TSC0053636
gagggcgtgtgtg

SEQ ID NO: 220392 - DNA, 13 bp, Artificial Sequence
  Oligonucleotide for detection of SNP TSC0053636
cacacacgccctc

SEQ ID NO: 220393 - DNA, 13 bp, Artificial Sequence
  Oligonucleotide for detection of SNP TSC0053637
tttttttggaaty

SEQ ID NO: 220394 - DNA, 13 bp, Artificial Sequence
  Oligonucleotide for detection of SNP TSC0053637
rattccaaaaaaa

SEQ ID NO: 220395 - DNA, 13 bp, Artificial Sequence
  Oligonucleotide for detection of SNP TSC0053637
ttttttgggaaty

SEQ ID NO: 220396 - DNA, 13 bp, Artificial Sequence
  Oligonucleotide for detection of SNP TSC0053637
rattcccaaaaaa

SEQ ID NO: 220397 - DNA, 13 bp, Artificial Sequence
  Oligonucleotide for detection of SNP TSC0053637
tttttcgggaaty

SEQ ID NO: 220398 - DNA, 13 bp, Artificial Sequence
  Oligonucleotide for detection of SNP TSC0053637
rattcccgaaaaa

SEQ ID NO: 220399 - DNA, 13 bp, Artificial Sequence
  Oligonucleotide for detection of SNP TSC0053637
ggttttagggagg

SEQ ID NO: 220400 - DNA, 13 bp, Artificial Sequence
  Oligonucleotide for detection of SNP TSC0053637
cctccctaaaacc

SEQ ID NO: 220401 - DNA, 13 bp, Artificial Sequence
  Oligonucleotide for detection of SNP TSC0053637
ggtttttgggagg

SEQ ID NO: 220402 - DNA, 13 bp, Artificial Sequence
  Oligonucleotide for detection of SNP TSC0053637
cctcccaaaaacc

SEQ ID NO: 220403 - DNA, 13 bp, Artificial Sequence
  Oligonucleotide for detection of SNP TSC0053637
ggttttcgggagg

SEQ ID NO: 220404 - DNA, 13 bp, Artificial Sequence
  Oligonucleotide for detection of SNP TSC0053637
cctcccgaaaacc

SEQ ID NO: 220405 - DNA, 13 bp, Artificial Sequence
  Oligonucleotide for detection of SNP TSC0053638
tttatgcgttttt

SEQ ID NO: 220406 - DNA, 13 bp, Artificial Sequence
  Oligonucleotide for detection of SNP TSC0053638
aaaaacgcataaa

SEQ ID NO: 220407 - DNA, 13 bp, Artificial Sequence
  Oligonucleotide for detection of SNP TSC0053638
aagaatgtatgag

SEQ ID NO: 220408 - DNA, 13 bp, Artificial Sequence
  Oligonucleotide for detection of SNP TSC0053638
ctcatacattctt

SEQ ID NO: 220409 - DNA, 13 bp, Artificial Sequence
  Oligonucleotide for detection of SNP TSC0053638
aagaatatatgag

SEQ ID NO: 220410 - DNA, 13 bp, Artificial Sequence
  Oligonucleotide for detection of SNP TSC0053638
ctcatatattctt

SEQ ID NO: 220411 - DNA, 13 bp, Artificial Sequence
  Oligonucleotide for detection of SNP TSC0053638
aagaacgtatgag

SEQ ID NO: 220412 - DNA, 13 bp, Artificial Sequence
  Oligonucleotide for detection of SNP TSC0053638
ctcatacgttctt

SEQ ID NO: 220413 - DNA, 13 bp, Artificial Sequence
  Oligonucleotide for detection of SNP TSC0053639
tttatttaggttt

SEQ ID NO: 220414 - DNA, 13 bp, Artificial Sequence
  Oligonucleotide for detection of SNP TSC0053639
aaacctaaataaa

SEQ ID NO: 220415 - DNA, 13 bp, Artificial Sequence
  Oligonucleotide for detection of SNP TSC0053639
tttattgaggttt

SEQ ID NO: 220416 - DNA, 13 bp, Artificial Sequence
  Oligonucleotide for detection of SNP TSC0053639
aaacctcaataaa

SEQ ID NO: 220417 - DNA, 13 bp, Artificial Sequence
  Oligonucleotide for detection of SNP TSC0053639
agatttaaataaa

SEQ ID NO: 220418 - DNA, 13 bp, Artificial Sequence
  Oligonucleotide for detection of SNP TSC0053639
tttatttaaatct

SEQ ID NO: 220419 - DNA, 13 bp, Artificial Sequence
  Oligonucleotide for detection of SNP TSC0053639
agattttaataaa

SEQ ID NO: 220420 - DNA, 13 bp, Artificial Sequence
  Oligonucleotide for detection of SNP TSC0053639
tttattaaaatct

SEQ ID NO: 220421 - DNA, 13 bp, Artificial Sequence
  Oligonucleotide for detection of SNP TSC0053640
ttattaagatgty

SEQ ID NO: 220422 - DNA, 13 bp, Artificial Sequence
  Oligonucleotide for detection of SNP TSC0053640
racatcttaataa

SEQ ID NO: 220423 - DNA, 13 bp, Artificial Sequence
  Oligonucleotide for detection of SNP TSC0053640
ttattaggatgty

SEQ ID NO: 220424 - DNA, 13 bp, Artificial Sequence
  Oligonucleotide for detection of SNP TSC0053640
racatcctaataa

SEQ ID NO: 220425 - DNA, 13 bp, Artificial Sequence
  Oligonucleotide for detection of SNP TSC0053642
ttataggagataa

SEQ ID NO: 220426 - DNA, 13 bp, Artificial Sequence
  Oligonucleotide for detection of SNP TSC0053642
ttatctcctataa

SEQ ID NO: 220427 - DNA, 13 bp, Artificial Sequence
  Oligonucleotide for detection of SNP TSC0053642
ttatagaagataa

SEQ ID NO: 220428 - DNA, 13 bp, Artificial Sequence
  Oligonucleotide for detection of SNP TSC0053642
ttatcttctataa

SEQ ID NO: 220429 - DNA, 13 bp, Artificial Sequence
  Oligonucleotide for detection of SNP TSC0053643
ggatttgtgaatt

SEQ ID NO: 220430 - DNA, 13 bp, Artificial Sequence
  Oligonucleotide for detection of SNP TSC0053643
aattcacaaatcc

SEQ ID NO: 220431 - DNA, 13 bp, Artificial Sequence
  Oligonucleotide for detection of SNP TSC0053643
ggatttatgaatt

SEQ ID NO: 220432 - DNA, 13 bp, Artificial Sequence
  Oligonucleotide for detection of SNP TSC0053643
aattcataaatcc

SEQ ID NO: 220433 - DNA, 13 bp, Artificial Sequence
  Oligonucleotide for detection of SNP TSC0053644
attgttatgaggg

SEQ ID NO: 220434 - DNA, 13 bp, Artificial Sequence
  Oligonucleotide for detection of SNP TSC0053644
ccctcataacaat

SEQ ID NO: 220435 - DNA, 13 bp, Artificial Sequence
  Oligonucleotide for detection of SNP TSC0053644
attgttgtgaggg

SEQ ID NO: 220436 - DNA, 13 bp, Artificial Sequence
  Oligonucleotide for detection of SNP TSC0053644
ccctcacaacaat

SEQ ID NO: 220437 - DNA, 13 bp, Artificial Sequence
  Oligonucleotide for detection of SNP TSC0053644
atcgttatgaggg

SEQ ID NO: 220438 - DNA, 13 bp, Artificial Sequence
  Oligonucleotide for detection of SNP TSC0053644
ccctcataacgat

SEQ ID NO: 220439 - DNA, 13 bp, Artificial Sequence
  Oligonucleotide for detection of SNP TSC0053644
atcgttgtgaggg

SEQ ID NO: 220440 - DNA, 13 bp, Artificial Sequence
  Oligonucleotide for detection of SNP TSC0053644
ccctcacaacgat

SEQ ID NO: 220441 - DNA, 13 bp, Artificial Sequence
  Oligonucleotide for detection of SNP TSC0053645
tggagaggaagty

SEQ ID NO: 220442 - DNA, 13 bp, Artificial Sequence
  Oligonucleotide for detection of SNP TSC0053645
racttcctctcca

SEQ ID NO: 220443 - DNA, 13 bp, Artificial Sequence
  Oligonucleotide for detection of SNP TSC0053645
tggagaagaagty

SEQ ID NO: 220444 - DNA, 13 bp, Artificial Sequence
  Oligonucleotide for detection of SNP TSC0053645
racttcttctcca

SEQ ID NO: 220445 - DNA, 13 bp, Artificial Sequence
  Oligonucleotide for detection of SNP TSC0053647
agtttgaattatt

SEQ ID NO: 220446 - DNA, 13 bp, Artificial Sequence
  Oligonucleotide for detection of SNP TSC0053647
aataattcaaact

SEQ ID NO: 220447 - DNA, 13 bp, Artificial Sequence
  Oligonucleotide for detection of SNP TSC0053647
agtttggattatt

SEQ ID NO: 220448 - DNA, 13 bp, Artificial Sequence
  Oligonucleotide for detection of SNP TSC0053647
aataatccaaact

SEQ ID NO: 220449 - DNA, 13 bp, Artificial Sequence
  Oligonucleotide for detection of SNP TSC0053647
agttcgaattatt

SEQ ID NO: 220450 - DNA, 13 bp, Artificial Sequence
  Oligonucleotide for detection of SNP TSC0053647
aataattcgaact

SEQ ID NO: 220451 - DNA, 13 bp, Artificial Sequence
  Oligonucleotide for detection of SNP TSC0053647
agttcggattatt

SEQ ID NO: 220452 - DNA, 13 bp, Artificial Sequence
  Oligonucleotide for detection of SNP TSC0053647
aataatccgaact

SEQ ID NO: 220453 - DNA, 13 bp, Artificial Sequence
  Oligonucleotide for detection of SNP TSC0053648
tggggggtatgtt

SEQ ID NO: 220454 - DNA, 13 bp, Artificial Sequence
  Oligonucleotide for detection of SNP TSC0053648
aacatacccccca

SEQ ID NO: 220455 - DNA, 13 bp, Artificial Sequence
  Oligonucleotide for detection of SNP TSC0053648
tgggggatatgtt

SEQ ID NO: 220456 - DNA, 13 bp, Artificial Sequence
  Oligonucleotide for detection of SNP TSC0053648
aacatatccccca

SEQ ID NO: 220457 - DNA, 13 bp, Artificial Sequence
  Oligonucleotide for detection of SNP TSC0053649
ttgtgtattgttt

SEQ ID NO: 220458 - DNA, 13 bp, Artificial Sequence
  Oligonucleotide for detection of SNP TSC0053649
aaacaatacacaa

SEQ ID NO: 220459 - DNA, 13 bp, Artificial Sequence
  Oligonucleotide for detection of SNP TSC0053649
ttgtgtgttgttt

SEQ ID NO: 220460 - DNA, 13 bp, Artificial Sequence
  Oligonucleotide for detection of SNP TSC0053649
aaacaacacacaa

SEQ ID NO: 220461 - DNA, 13 bp, Artificial Sequence
  Oligonucleotide for detection of SNP TSC0053650
atttttaatgatt

SEQ ID NO: 220462 - DNA, 13 bp, Artificial Sequence
  Oligonucleotide for detection of SNP TSC0053650
aatcattaaaaat

SEQ ID NO: 220463 - DNA, 13 bp, Artificial Sequence
  Oligonucleotide for detection of SNP TSC0053650
atttttgatgatt

SEQ ID NO: 220464 - DNA, 13 bp, Artificial Sequence
  Oligonucleotide for detection of SNP TSC0053650
aatcatcaaaaat

SEQ ID NO: 220465 - DNA, 13 bp, Artificial Sequence
  Oligonucleotide for detection of SNP TSC0053651
tgtgttatagagy

SEQ ID NO: 220466 - DNA, 13 bp, Artificial Sequence
  Oligonucleotide for detection of SNP TSC0053651
rctctataacaca

SEQ ID NO: 220467 - DNA, 13 bp, Artificial Sequence
  Oligonucleotide for detection of SNP TSC0053651
tgtgttgtagagy

SEQ ID NO: 220468 - DNA, 13 bp, Artificial Sequence
  Oligonucleotide for detection of SNP TSC0053651
rctctacaacaca

SEQ ID NO: 220469 - DNA, 13 bp, Artificial Sequence
  Oligonucleotide for detection of SNP TSC0053651
tgtgtcgtagagy

SEQ ID NO: 220470 - DNA, 13 bp, Artificial Sequence
  Oligonucleotide for detection of SNP TSC0053651
rctctacgacaca

SEQ ID NO: 220471 - DNA, 13 bp, Artificial Sequence
  Oligonucleotide for detection of SNP TSC0053651
gttttatgatata

SEQ ID NO: 220472 - DNA, 13 bp, Artificial Sequence
  Oligonucleotide for detection of SNP TSC0053651
tatatcataaaac

SEQ ID NO: 220473 - DNA, 13 bp, Artificial Sequence
  Oligonucleotide for detection of SNP TSC0053651
gttttacgatata

SEQ ID NO: 220474 - DNA, 13 bp, Artificial Sequence
  Oligonucleotide for detection of SNP TSC0053651
tatatcgtaaaac

SEQ ID NO: 220475 - DNA, 13 bp, Artificial Sequence
  Oligonucleotide for detection of SNP TSC0053652
ttatattggttat

SEQ ID NO: 220476 - DNA, 13 bp, Artificial Sequence
  Oligonucleotide for detection of SNP TSC0053652
ataaccaatataa

SEQ ID NO: 220477 - DNA, 13 bp, Artificial Sequence
  Oligonucleotide for detection of SNP TSC0053652
ttatatcggttat

SEQ ID NO: 220478 - DNA, 13 bp, Artificial Sequence
  Oligonucleotide for detection of SNP TSC0053652
ataaccgatataa

SEQ ID NO: 220479 - DNA, 13 bp, Artificial Sequence
  Oligonucleotide for detection of SNP TSC0053652
atggttggtatag

SEQ ID NO: 220480 - DNA, 13 bp, Artificial Sequence
  Oligonucleotide for detection of SNP TSC0053652
ctataccaaccat

SEQ ID NO: 220481 - DNA, 13 bp, Artificial Sequence
  Oligonucleotide for detection of SNP TSC0053652
atggttagtatag

SEQ ID NO: 220482 - DNA, 13 bp, Artificial Sequence
  Oligonucleotide for detection of SNP TSC0053652
ctatactaaccat

SEQ ID NO: 220483 - DNA, 13 bp, Artificial Sequence
  Oligonucleotide for detection of SNP TSC0053652
atggtcggtatag

SEQ ID NO: 220484 - DNA, 13 bp, Artificial Sequence
  Oligonucleotide for detection of SNP TSC0053652
ctataccgaccat

SEQ ID NO: 220485 - DNA, 13 bp, Artificial Sequence
  Oligonucleotide for detection of SNP TSC0053653
tagttagtgaaga

SEQ ID NO: 220486 - DNA, 13 bp, Artificial Sequence
  Oligonucleotide for detection of SNP TSC0053653
tcttcactaacta

SEQ ID NO: 220487 - DNA, 13 bp, Artificial Sequence
  Oligonucleotide for detection of SNP TSC0053653
tagttaatgaaga

SEQ ID NO: 220488 - DNA, 13 bp, Artificial Sequence
  Oligonucleotide for detection of SNP TSC0053653
tcttcattaacta

SEQ ID NO: 220489 - DNA, 13 bp, Artificial Sequence
  Oligonucleotide for detection of SNP TSC0053654
aatattttttagt

SEQ ID NO: 220490 - DNA, 13 bp, Artificial Sequence
  Oligonucleotide for detection of SNP TSC0053654
actaaaaaatatt

SEQ ID NO: 220491 - DNA, 13 bp, Artificial Sequence
  Oligonucleotide for detection of SNP TSC0053654
aatattgtttagt

SEQ ID NO: 220492 - DNA, 13 bp, Artificial Sequence
  Oligonucleotide for detection of SNP TSC0053654
actaaacaatatt

SEQ ID NO: 220493 - DNA, 13 bp, Artificial Sequence
  Oligonucleotide for detection of SNP TSC0053654
aatatcgtttagt

SEQ ID NO: 220494 - DNA, 13 bp, Artificial Sequence
  Oligonucleotide for detection of SNP TSC0053654
actaaacgatatt

SEQ ID NO: 220495 - DNA, 13 bp, Artificial Sequence
  Oligonucleotide for detection of SNP TSC0053654
attagaagatatt

SEQ ID NO: 220496 - DNA, 13 bp, Artificial Sequence
  Oligonucleotide for detection of SNP TSC0053654
aatatcttctaat

SEQ ID NO: 220497 - DNA, 13 bp, Artificial Sequence
  Oligonucleotide for detection of SNP TSC0053654
attagatgatatt

SEQ ID NO: 220498 - DNA, 13 bp, Artificial Sequence
  Oligonucleotide for detection of SNP TSC0053654
aatatcatctaat

SEQ ID NO: 220499 - DNA, 13 bp, Artificial Sequence
  Oligonucleotide for detection of SNP TSC0053654
attagacgatatt

SEQ ID NO: 220500 - DNA, 13 bp, Artificial Sequence
  Oligonucleotide for detection of SNP TSC0053654
aatatcgtctaat

SEQ ID NO: 220501 - DNA, 13 bp, Artificial Sequence
  Oligonucleotide for detection of SNP TSC0053655
gtagtaggtgagg

SEQ ID NO: 220502 - DNA, 13 bp, Artificial Sequence
  Oligonucleotide for detection of SNP TSC0053655
cctcacctactac

SEQ ID NO: 220503 - DNA, 13 bp, Artificial Sequence
  Oligonucleotide for detection of SNP TSC0053655
gtagtaagtgagg

SEQ ID NO: 220504 - DNA, 13 bp, Artificial Sequence
  Oligonucleotide for detection of SNP TSC0053655
cctcacttactac

SEQ ID NO: 220505 - DNA, 13 bp, Artificial Sequence
  Oligonucleotide for detection of SNP TSC0053656
tagaattaattaa

SEQ ID NO: 220506 - DNA, 13 bp, Artificial Sequence
  Oligonucleotide for detection of SNP TSC0053656
ttaattaattcta

SEQ ID NO: 220507 - DNA, 13 bp, Artificial Sequence
  Oligonucleotide for detection of SNP TSC0053656
tagaatgaattaa

SEQ ID NO: 220508 - DNA, 13 bp, Artificial Sequence
  Oligonucleotide for detection of SNP TSC0053656
ttaattcattcta

SEQ ID NO: 220509 - DNA, 13 bp, Artificial Sequence
  Oligonucleotide for detection of SNP TSC0053656
ttaattgatttta

SEQ ID NO: 220510 - DNA, 13 bp, Artificial Sequence
  Oligonucleotide for detection of SNP TSC0053656
taaaatcaattaa

SEQ ID NO: 220511 - DNA, 13 bp, Artificial Sequence
  Oligonucleotide for detection of SNP TSC0053657
tatttaaattgaa

SEQ ID NO: 220512 - DNA, 13 bp, Artificial Sequence
  Oligonucleotide for detection of SNP TSC0053657
ttcaatttaaata

SEQ ID NO: 220513 - DNA, 13 bp, Artificial Sequence
  Oligonucleotide for detection of SNP TSC0053657
tatttagattgaa

SEQ ID NO: 220514 - DNA, 13 bp, Artificial Sequence
  Oligonucleotide for detection of SNP TSC0053657
ttcaatctaaata

SEQ ID NO: 220515 - DNA, 13 bp, Artificial Sequence
  Oligonucleotide for detection of SNP TSC0053658
gtgtagtggtata

SEQ ID NO: 220516 - DNA, 13 bp, Artificial Sequence
  Oligonucleotide for detection of SNP TSC0053658
tataccactacac

SEQ ID NO: 220517 - DNA, 13 bp, Artificial Sequence
  Oligonucleotide for detection of SNP TSC0053658
gtgtaggggtata

SEQ ID NO: 220518 - DNA, 13 bp, Artificial Sequence
  Oligonucleotide for detection of SNP TSC0053658
tatacccctacac

SEQ ID NO: 220519 - DNA, 13 bp, Artificial Sequence
  Oligonucleotide for detection of SNP TSC0053662
tagtaaggtttty

SEQ ID NO: 220520 - DNA, 13 bp, Artificial Sequence
  Oligonucleotide for detection of SNP TSC0053662
raaaaccttacta

SEQ ID NO: 220521 - DNA, 13 bp, Artificial Sequence
  Oligonucleotide for detection of SNP TSC0053662
tagtaaagtttty

SEQ ID NO: 220522 - DNA, 13 bp, Artificial Sequence
  Oligonucleotide for detection of SNP TSC0053662
raaaactttacta

SEQ ID NO: 220523 - DNA, 13 bp, Artificial Sequence
  Oligonucleotide for detection of SNP TSC0053663
tgatggatttatt

SEQ ID NO: 220524 - DNA, 13 bp, Artificial Sequence
  Oligonucleotide for detection of SNP TSC0053663
aataaatccatca

SEQ ID NO: 220525 - DNA, 13 bp, Artificial Sequence
  Oligonucleotide for detection of SNP TSC0053663
tgatgggtttatt

SEQ ID NO: 220526 - DNA, 13 bp, Artificial Sequence
  Oligonucleotide for detection of SNP TSC0053663
aataaacccatca

SEQ ID NO: 220527 - DNA, 13 bp, Artificial Sequence
  Oligonucleotide for detection of SNP TSC0053664
ttatagttgagga

SEQ ID NO: 220528 - DNA, 13 bp, Artificial Sequence
  Oligonucleotide for detection of SNP TSC0053664
tcctcaactataa

SEQ ID NO: 220529 - DNA, 13 bp, Artificial Sequence
  Oligonucleotide for detection of SNP TSC0053664
ttatagatgagga

SEQ ID NO: 220530 - DNA, 13 bp, Artificial Sequence
  Oligonucleotide for detection of SNP TSC0053664
tcctcatctataa

SEQ ID NO: 220531 - DNA, 13 bp, Artificial Sequence
  Oligonucleotide for detection of SNP TSC0053665
aagtttaaaagat

SEQ ID NO: 220532 - DNA, 13 bp, Artificial Sequence
  Oligonucleotide for detection of SNP TSC0053665
atcttttaaactt

SEQ ID NO: 220533 - DNA, 13 bp, Artificial Sequence
  Oligonucleotide for detection of SNP TSC0053665
aagtttgaaagat

SEQ ID NO: 220534 - DNA, 13 bp, Artificial Sequence
  Oligonucleotide for detection of SNP TSC0053665
atctttcaaactt

SEQ ID NO: 220535 - DNA, 13 bp, Artificial Sequence
  Oligonucleotide for detection of SNP TSC0053667
tatagttgaatat

SEQ ID NO: 220536 - DNA, 13 bp, Artificial Sequence
  Oligonucleotide for detection of SNP TSC0053667
atattcaactata

SEQ ID NO: 220537 - DNA, 13 bp, Artificial Sequence
  Oligonucleotide for detection of SNP TSC0053667
tatagtcgaatat

SEQ ID NO: 220538 - DNA, 13 bp, Artificial Sequence
  Oligonucleotide for detection of SNP TSC0053667
atattcgactata

SEQ ID NO: 220539 - DNA, 13 bp, Artificial Sequence
  Oligonucleotide for detection of SNP TSC0053667
atgtttggttgta

SEQ ID NO: 220540 - DNA, 13 bp, Artificial Sequence
  Oligonucleotide for detection of SNP TSC0053667
tacaaccaaacat

SEQ ID NO: 220541 - DNA, 13 bp, Artificial Sequence
  Oligonucleotide for detection of SNP TSC0053667
atgtttagttgta

SEQ ID NO: 220542 - DNA, 13 bp, Artificial Sequence
  Oligonucleotide for detection of SNP TSC0053667
tacaactaaacat

SEQ ID NO: 220543 - DNA, 13 bp, Artificial Sequence
  Oligonucleotide for detection of SNP TSC0053667
atgttcggttgta

SEQ ID NO: 220544 - DNA, 13 bp, Artificial Sequence
  Oligonucleotide for detection of SNP TSC0053667
tacaaccgaacat

SEQ ID NO: 220545 - DNA, 13 bp, Artificial Sequence
  Oligonucleotide for detection of SNP TSC0053673
gggttttgagtgt

SEQ ID NO: 220546 - DNA, 13 bp, Artificial Sequence
  Oligonucleotide for detection of SNP TSC0053673
acactcaaaaccc

SEQ ID NO: 220547 - DNA, 13 bp, Artificial Sequence
  Oligonucleotide for detection of SNP TSC0053673
gggtttggagtgt

SEQ ID NO: 220548 - DNA, 13 bp, Artificial Sequence
  Oligonucleotide for detection of SNP TSC0053673
acactccaaaccc

SEQ ID NO: 220549 - DNA, 13 bp, Artificial Sequence
  Oligonucleotide for detection of SNP TSC0053673
gggttttgagcgt

SEQ ID NO: 220550 - DNA, 13 bp, Artificial Sequence
  Oligonucleotide for detection of SNP TSC0053673
acgctcaaaaccc

SEQ ID NO: 220551 - DNA, 13 bp, Artificial Sequence
  Oligonucleotide for detection of SNP TSC0053673
gggttcggagtgt

SEQ ID NO: 220552 - DNA, 13 bp, Artificial Sequence
  Oligonucleotide for detection of SNP TSC0053673
acactccgaaccc

SEQ ID NO: 220553 - DNA, 13 bp, Artificial Sequence
  Oligonucleotide for detection of SNP TSC0053673
gggtttggagcgt

SEQ ID NO: 220554 - DNA, 13 bp, Artificial Sequence
  Oligonucleotide for detection of SNP TSC0053673
acgctccaaaccc

SEQ ID NO: 220555 - DNA, 13 bp, Artificial Sequence
  Oligonucleotide for detection of SNP TSC0053673
gggttcggagcgt

SEQ ID NO: 220556 - DNA, 13 bp, Artificial Sequence
  Oligonucleotide for detection of SNP TSC0053673
acgctccgaaccc

SEQ ID NO: 220557 - DNA, 13 bp, Artificial Sequence
  Oligonucleotide for detection of SNP TSC0053673
atgtttagagtty

SEQ ID NO: 220558 - DNA, 13 bp, Artificial Sequence
  Oligonucleotide for detection of SNP TSC0053673
raactctaaacat

SEQ ID NO: 220559 - DNA, 13 bp, Artificial Sequence
  Oligonucleotide for detection of SNP TSC0053673
atgttttgagtty

SEQ ID NO: 220560 - DNA, 13 bp, Artificial Sequence
  Oligonucleotide for detection of SNP TSC0053673
raactcaaaacat

SEQ ID NO: 220561 - DNA, 13 bp, Artificial Sequence
  Oligonucleotide for detection of SNP TSC0053673
acgtttagagtty

SEQ ID NO: 220562 - DNA, 13 bp, Artificial Sequence
  Oligonucleotide for detection of SNP TSC0053673
raactctaaacgt

SEQ ID NO: 220563 - DNA, 13 bp, Artificial Sequence
  Oligonucleotide for detection of SNP TSC0053673
acgttttgagtty

SEQ ID NO: 220564 - DNA, 13 bp, Artificial Sequence
  Oligonucleotide for detection of SNP TSC0053673
raactcaaaacgt

SEQ ID NO: 220565 - DNA, 13 bp, Artificial Sequence
  Oligonucleotide for detection of SNP TSC0053673
atgtttcgagtty

SEQ ID NO: 220566 - DNA, 13 bp, Artificial Sequence
  Oligonucleotide for detection of SNP TSC0053673
raactcgaaacat

SEQ ID NO: 220567 - DNA, 13 bp, Artificial Sequence
  Oligonucleotide for detection of SNP TSC0053673
acgtttcgagtty

SEQ ID NO: 220568 - DNA, 13 bp, Artificial Sequence
  Oligonucleotide for detection of SNP TSC0053673
raactcgaaacgt

SEQ ID NO: 220569 - DNA, 13 bp, Artificial Sequence
  Oligonucleotide for detection of SNP TSC0053681
gtagagaaaataa

SEQ ID NO: 220570 - DNA, 13 bp, Artificial Sequence
  Oligonucleotide for detection of SNP TSC0053681
ttattttctctac

SEQ ID NO: 220571 - DNA, 13 bp, Artificial Sequence
  Oligonucleotide for detection of SNP TSC0053681
gtagagtaaataa

SEQ ID NO: 220572 - DNA, 13 bp, Artificial Sequence
  Oligonucleotide for detection of SNP TSC0053681
ttatttactctac

SEQ ID NO: 220573 - DNA, 13 bp, Artificial Sequence
  Oligonucleotide for detection of SNP TSC0053682
ttattaatagaga

SEQ ID NO: 220574 - DNA, 13 bp, Artificial Sequence
  Oligonucleotide for detection of SNP TSC0053682
tctctattaataa

SEQ ID NO: 220575 - DNA, 13 bp, Artificial Sequence
  Oligonucleotide for detection of SNP TSC0004910
tttaggattagtt

SEQ ID NO: 220576 - DNA, 13 bp, Artificial Sequence
  Oligonucleotide for detection of SNP TSC0004910
aactaatcctaaa

SEQ ID NO: 220577 - DNA, 13 bp, Artificial Sequence
  Oligonucleotide for detection of SNP TSC0004910
tttagggttagtt

SEQ ID NO: 220578 - DNA, 13 bp, Artificial Sequence
  Oligonucleotide for detection of SNP TSC0004910
aactaaccctaaa

SEQ ID NO: 220579 - DNA, 13 bp, Artificial Sequence
  Oligonucleotide for detection of SNP TSC0004911
tggtggttgggaa

SEQ ID NO: 220580 - DNA, 13 bp, Artificial Sequence
  Oligonucleotide for detection of SNP TSC0004911
ttcccaaccacca

SEQ ID NO: 220581 - DNA, 13 bp, Artificial Sequence
  Oligonucleotide for detection of SNP TSC0004911
tggtgggtgggaa

SEQ ID NO: 220582 - DNA, 13 bp, Artificial Sequence
  Oligonucleotide for detection of SNP TSC0004911
ttcccacccacca

SEQ ID NO: 220583 - DNA, 13 bp, Artificial Sequence
  Oligonucleotide for detection of SNP TSC0004912
ggtattaaagagg

SEQ ID NO: 220584 - DNA, 13 bp, Artificial Sequence
  Oligonucleotide for detection of SNP TSC0004912
cctctttaatacc

SEQ ID NO: 220585 - DNA, 13 bp, Artificial Sequence
  Oligonucleotide for detection of SNP TSC0004912
ggtattgaagagg

SEQ ID NO: 220586 - DNA, 13 bp, Artificial Sequence
  Oligonucleotide for detection of SNP TSC0004912
cctcttcaatacc

SEQ ID NO: 220587 - DNA, 13 bp, Artificial Sequence
  Oligonucleotide for detection of SNP TSC0004912
ggtatcgaagagg

SEQ ID NO: 220588 - DNA, 13 bp, Artificial Sequence
  Oligonucleotide for detection of SNP TSC0004912
cctcttcgatacc

SEQ ID NO: 220589 - DNA, 13 bp, Artificial Sequence
  Oligonucleotide for detection of SNP TSC0004912
tttttttgataty

SEQ ID NO: 220590 - DNA, 13 bp, Artificial Sequence
  Oligonucleotide for detection of SNP TSC0004912
ratatcaaaaaaa

SEQ ID NO: 220591 - DNA, 13 bp, Artificial Sequence
  Oligonucleotide for detection of SNP TSC0004912
ttttttcgataty

SEQ ID NO: 220592 - DNA, 13 bp, Artificial Sequence
  Oligonucleotide for detection of SNP TSC0004912
ratatcgaaaaaa

SEQ ID NO: 220593 - DNA, 13 bp, Artificial Sequence
  Oligonucleotide for detection of SNP TSC0053691
taggataagatga

SEQ ID NO: 220594 - DNA, 13 bp, Artificial Sequence
  Oligonucleotide for detection of SNP TSC0053691
tcatcttatccta

SEQ ID NO: 220595 - DNA, 13 bp, Artificial Sequence
  Oligonucleotide for detection of SNP TSC0053691
taggatgagatga

SEQ ID NO: 220596 - DNA, 13 bp, Artificial Sequence
  Oligonucleotide for detection of SNP TSC0053691
tcatctcatccta

SEQ ID NO: 220597 - DNA, 13 bp, Artificial Sequence
  Oligonucleotide for detection of SNP TSC0053691
taggataagacga

SEQ ID NO: 220598 - DNA, 13 bp, Artificial Sequence
  Oligonucleotide for detection of SNP TSC0053691
tcgtcttatccta

SEQ ID NO: 220599 - DNA, 13 bp, Artificial Sequence
  Oligonucleotide for detection of SNP TSC0053691
taggatgagacga

SEQ ID NO: 220600 - DNA, 13 bp, Artificial Sequence
  Oligonucleotide for detection of SNP TSC0053691
tcgtctcatccta

SEQ ID NO: 220601 - DNA, 13 bp, Artificial Sequence
  Oligonucleotide for detection of SNP TSC0053692
agaagtatgagga

SEQ ID NO: 220602 - DNA, 13 bp, Artificial Sequence
  Oligonucleotide for detection of SNP TSC0053692
tcctcatacttct

SEQ ID NO: 220603 - DNA, 13 bp, Artificial Sequence
  Oligonucleotide for detection of SNP TSC0053692
agaagtttgagga

SEQ ID NO: 220604 - DNA, 13 bp, Artificial Sequence
  Oligonucleotide for detection of SNP TSC0053692
tcctcaaacttct

SEQ ID NO: 220605 - DNA, 13 bp, Artificial Sequence
  Oligonucleotide for detection of SNP TSC0053693
gggagtagatggg

SEQ ID NO: 220606 - DNA, 13 bp, Artificial Sequence
  Oligonucleotide for detection of SNP TSC0053693
cccatctactccc

SEQ ID NO: 220607 - DNA, 13 bp, Artificial Sequence
  Oligonucleotide for detection of SNP TSC0053693
gggagtggatggg

SEQ ID NO: 220608 - DNA, 13 bp, Artificial Sequence
  Oligonucleotide for detection of SNP TSC0053693
cccatccactccc

SEQ ID NO: 220609 - DNA, 13 bp, Artificial Sequence
  Oligonucleotide for detection of SNP TSC0053693
gggagtagacggg

SEQ ID NO: 220610 - DNA, 13 bp, Artificial Sequence
  Oligonucleotide for detection of SNP TSC0053693
cccgtctactccc

SEQ ID NO: 220611 - DNA, 13 bp, Artificial Sequence
  Oligonucleotide for detection of SNP TSC0053693
gggagtggacggg

SEQ ID NO: 220612 - DNA, 13 bp, Artificial Sequence
  Oligonucleotide for detection of SNP TSC0053693
cccgtccactccc

SEQ ID NO: 220613 - DNA, 13 bp, Artificial Sequence
  Oligonucleotide for detection of SNP TSC0053694
tggttagtaaggg

SEQ ID NO: 220614 - DNA, 13 bp, Artificial Sequence
  Oligonucleotide for detection of SNP TSC0053694
cccttactaacca

SEQ ID NO: 220615 - DNA, 13 bp, Artificial Sequence
  Oligonucleotide for detection of SNP TSC0053694
tggttaataaggg

SEQ ID NO: 220616 - DNA, 13 bp, Artificial Sequence
  Oligonucleotide for detection of SNP TSC0053694
cccttattaacca

SEQ ID NO: 220617 - DNA, 13 bp, Artificial Sequence
  Oligonucleotide for detection of SNP TSC0053696
agtgtaatagtta

SEQ ID NO: 220618 - DNA, 13 bp, Artificial Sequence
  Oligonucleotide for detection of SNP TSC0053696
taactattacact

SEQ ID NO: 220619 - DNA, 13 bp, Artificial Sequence
  Oligonucleotide for detection of SNP TSC0053696
agtgtattagtta

SEQ ID NO: 220620 - DNA, 13 bp, Artificial Sequence
  Oligonucleotide for detection of SNP TSC0053696
taactaatacact

SEQ ID NO: 220621 - DNA, 13 bp, Artificial Sequence
  Oligonucleotide for detection of SNP TSC0053696
taattgttatatt

SEQ ID NO: 220622 - DNA, 13 bp, Artificial Sequence
  Oligonucleotide for detection of SNP TSC0053696
aatataacaatta

SEQ ID NO: 220623 - DNA, 13 bp, Artificial Sequence
  Oligonucleotide for detection of SNP TSC0053696
taattgatatatt

SEQ ID NO: 220624 - DNA, 13 bp, Artificial Sequence
  Oligonucleotide for detection of SNP TSC0053696
aatatatcaatta

SEQ ID NO: 220625 - DNA, 13 bp, Artificial Sequence
  Oligonucleotide for detection of SNP TSC0053697
ttggattgtgtag

SEQ ID NO: 220626 - DNA, 13 bp, Artificial Sequence
  Oligonucleotide for detection of SNP TSC0053697
ctacacaatccaa

SEQ ID NO: 220627 - DNA, 13 bp, Artificial Sequence
  Oligonucleotide for detection of SNP TSC0053697
ttggatcgtgtag

SEQ ID NO: 220628 - DNA, 13 bp, Artificial Sequence
  Oligonucleotide for detection of SNP TSC0053697
ctacacgatccaa

SEQ ID NO: 220629 - DNA, 13 bp, Artificial Sequence
  Oligonucleotide for detection of SNP TSC0053697
ttgtatgatttag

SEQ ID NO: 220630 - DNA, 13 bp, Artificial Sequence
  Oligonucleotide for detection of SNP TSC0053697
ctaaatcatacaa

SEQ ID NO: 220631 - DNA, 13 bp, Artificial Sequence
  Oligonucleotide for detection of SNP TSC0053697
ttgtataatttag

SEQ ID NO: 220632 - DNA, 13 bp, Artificial Sequence
  Oligonucleotide for detection of SNP TSC0053697
ctaaattatacaa

SEQ ID NO: 220633 - DNA, 13 bp, Artificial Sequence
  Oligonucleotide for detection of SNP TSC0053697
ttgtacgatttag

SEQ ID NO: 220634 - DNA, 13 bp, Artificial Sequence
  Oligonucleotide for detection of SNP TSC0053697
ctaaatcgtacaa

SEQ ID NO: 220635 - DNA, 13 bp, Artificial Sequence
  Oligonucleotide for detection of SNP TSC0053698
taaaaattataty

SEQ ID NO: 220636 - DNA, 13 bp, Artificial Sequence
  Oligonucleotide for detection of SNP TSC0053698
ratataattttta

SEQ ID NO: 220637 - DNA, 13 bp, Artificial Sequence
  Oligonucleotide for detection of SNP TSC0053698
taaaaagtataty

SEQ ID NO: 220638 - DNA, 13 bp, Artificial Sequence
  Oligonucleotide for detection of SNP TSC0053698
ratatacttttta

SEQ ID NO: 220639 - DNA, 13 bp, Artificial Sequence
  Oligonucleotide for detection of SNP TSC0053698
gatatatttttta

SEQ ID NO: 220640 - DNA, 13 bp, Artificial Sequence
  Oligonucleotide for detection of SNP TSC0053698
taaaaaatatatc

SEQ ID NO: 220641 - DNA, 13 bp, Artificial Sequence
  Oligonucleotide for detection of SNP TSC0053699
taagtagtattat

SEQ ID NO: 220642 - DNA, 13 bp, Artificial Sequence
  Oligonucleotide for detection of SNP TSC0053699
ataatactactta

SEQ ID NO: 220643 - DNA, 13 bp, Artificial Sequence
  Oligonucleotide for detection of SNP TSC0053699
taagtaatattat

SEQ ID NO: 220644 - DNA, 13 bp, Artificial Sequence
  Oligonucleotide for detection of SNP TSC0053699
ataatattactta

SEQ ID NO: 220645 - DNA, 13 bp, Artificial Sequence
  Oligonucleotide for detection of SNP TSC0053700
tataatataaaag

SEQ ID NO: 220646 - DNA, 13 bp, Artificial Sequence
  Oligonucleotide for detection of SNP TSC0053700
cttttatattata

SEQ ID NO: 220647 - DNA, 13 bp, Artificial Sequence
  Oligonucleotide for detection of SNP TSC0053700
tataatttaaaag

SEQ ID NO: 220648 - DNA, 13 bp, Artificial Sequence
  Oligonucleotide for detection of SNP TSC0053700
cttttaaattata

SEQ ID NO: 220649 - DNA, 13 bp, Artificial Sequence
  Oligonucleotide for detection of SNP TSC0053700
tttttgtgttgtg

SEQ ID NO: 220650 - DNA, 13 bp, Artificial Sequence
  Oligonucleotide for detection of SNP TSC0053700
cacaacacaaaaa

SEQ ID NO: 220651 - DNA, 13 bp, Artificial Sequence
  Oligonucleotide for detection of SNP TSC0053700
tttttgagttgtg

SEQ ID NO: 220652 - DNA, 13 bp, Artificial Sequence
  Oligonucleotide for detection of SNP TSC0053700
cacaactcaaaaa

SEQ ID NO: 220653 - DNA, 13 bp, Artificial Sequence
  Oligonucleotide for detection of SNP TSC0053701
agtaaagtgtatt

SEQ ID NO: 220654 - DNA, 13 bp, Artificial Sequence
  Oligonucleotide for detection of SNP TSC0053701
aatacactttact

SEQ ID NO: 220655 - DNA, 13 bp, Artificial Sequence
  Oligonucleotide for detection of SNP TSC0053701
agtaaaatgtatt

SEQ ID NO: 220656 - DNA, 13 bp, Artificial Sequence
  Oligonucleotide for detection of SNP TSC0053701
aatacattttact

SEQ ID NO: 220657 - DNA, 13 bp, Artificial Sequence
  Oligonucleotide for detection of SNP TSC0053702
tatagtaatttty

SEQ ID NO: 220658 - DNA, 13 bp, Artificial Sequence
  Oligonucleotide for detection of SNP TSC0053702
raaaattactata

SEQ ID NO: 220659 - DNA, 13 bp, Artificial Sequence
  Oligonucleotide for detection of SNP TSC0053702
tatagttatttty

SEQ ID NO: 220660 - DNA, 13 bp, Artificial Sequence
  Oligonucleotide for detection of SNP TSC0053702
raaaataactata

SEQ ID NO: 220661 - DNA, 13 bp, Artificial Sequence
  Oligonucleotide for detection of SNP TSC0053702
gggagttattata

SEQ ID NO: 220662 - DNA, 13 bp, Artificial Sequence
  Oligonucleotide for detection of SNP TSC0053702
tataataactccc

SEQ ID NO: 220663 - DNA, 13 bp, Artificial Sequence
  Oligonucleotide for detection of SNP TSC0053702
gggagtgattata

SEQ ID NO: 220664 - DNA, 13 bp, Artificial Sequence
  Oligonucleotide for detection of SNP TSC0053702
tataatcactccc

SEQ ID NO: 220665 - DNA, 13 bp, Artificial Sequence
  Oligonucleotide for detection of SNP TSC0053704
atatttgagaggy

SEQ ID NO: 220666 - DNA, 13 bp, Artificial Sequence
  Oligonucleotide for detection of SNP TSC0053704
rcctctcaaatat

SEQ ID NO: 220667 - DNA, 13 bp, Artificial Sequence
  Oligonucleotide for detection of SNP TSC0053704
atatttaagaggy

SEQ ID NO: 220668 - DNA, 13 bp, Artificial Sequence
  Oligonucleotide for detection of SNP TSC0053704
rcctcttaaatat

SEQ ID NO: 220669 - DNA, 13 bp, Artificial Sequence
  Oligonucleotide for detection of SNP TSC0053707
gtttataaaggga

SEQ ID NO: 220670 - DNA, 13 bp, Artificial Sequence
  Oligonucleotide for detection of SNP TSC0053707
tccctttataaac

SEQ ID NO: 220671 - DNA, 13 bp, Artificial Sequence
  Oligonucleotide for detection of SNP TSC0053707
gtttattaaggga

SEQ ID NO: 220672 - DNA, 13 bp, Artificial Sequence
  Oligonucleotide for detection of SNP TSC0053707
tcccttaataaac

SEQ ID NO: 220673 - DNA, 13 bp, Artificial Sequence
  Oligonucleotide for detection of SNP TSC0053707
tttttttgtaaay

SEQ ID NO: 220674 - DNA, 13 bp, Artificial Sequence
  Oligonucleotide for detection of SNP TSC0053707
rtttacaaaaaaa

SEQ ID NO: 220675 - DNA, 13 bp, Artificial Sequence
  Oligonucleotide for detection of SNP TSC0053707
ttttttggtaaay

SEQ ID NO: 220676 - DNA, 13 bp, Artificial Sequence
  Oligonucleotide for detection of SNP TSC0053707
rtttaccaaaaaa

SEQ ID NO: 220677 - DNA, 13 bp, Artificial Sequence
  Oligonucleotide for detection of SNP TSC0053708
tgtgttggttttt

SEQ ID NO: 220678 - DNA, 13 bp, Artificial Sequence
  Oligonucleotide for detection of SNP TSC0053708
aaaaaccaacaca

SEQ ID NO: 220679 - DNA, 13 bp, Artificial Sequence
  Oligonucleotide for detection of SNP TSC0053708
tgtgttagttttt

SEQ ID NO: 220680 - DNA, 13 bp, Artificial Sequence
  Oligonucleotide for detection of SNP TSC0053708
aaaaactaacaca

SEQ ID NO: 220681 - DNA, 13 bp, Artificial Sequence
  Oligonucleotide for detection of SNP TSC0053709
gtagtgagttgtg

SEQ ID NO: 220682 - DNA, 13 bp, Artificial Sequence
  Oligonucleotide for detection of SNP TSC0053709
cacaactcactac

SEQ ID NO: 220683 - DNA, 13 bp, Artificial Sequence
  Oligonucleotide for detection of SNP TSC0053709
gtagtgggttgtg

SEQ ID NO: 220684 - DNA, 13 bp, Artificial Sequence
  Oligonucleotide for detection of SNP TSC0053709
cacaacccactac

SEQ ID NO: 220685 - DNA, 13 bp, Artificial Sequence
  Oligonucleotide for detection of SNP TSC0053710
gaagtattgtaga

SEQ ID NO: 220686 - DNA, 13 bp, Artificial Sequence
  Oligonucleotide for detection of SNP TSC0053710
tctacaatacttc

SEQ ID NO: 220687 - DNA, 13 bp, Artificial Sequence
  Oligonucleotide for detection of SNP TSC0053710
gaagtagtgtaga

SEQ ID NO: 220688 - DNA, 13 bp, Artificial Sequence
  Oligonucleotide for detection of SNP TSC0053710
tctacactacttc

SEQ ID NO: 220689 - DNA, 13 bp, Artificial Sequence
  Oligonucleotide for detection of SNP TSC0053710
tttatattattty

SEQ ID NO: 220690 - DNA, 13 bp, Artificial Sequence
  Oligonucleotide for detection of SNP TSC0053710
raaataatataaa

SEQ ID NO: 220691 - DNA, 13 bp, Artificial Sequence
  Oligonucleotide for detection of SNP TSC0053711
ttaattagatatg

SEQ ID NO: 220692 - DNA, 13 bp, Artificial Sequence
  Oligonucleotide for detection of SNP TSC0053711
catatctaattaa

SEQ ID NO: 220693 - DNA, 13 bp, Artificial Sequence
  Oligonucleotide for detection of SNP TSC0053711
ttaattggatatg

SEQ ID NO: 220694 - DNA, 13 bp, Artificial Sequence
  Oligonucleotide for detection of SNP TSC0053711
catatccaattaa

SEQ ID NO: 220695 - DNA, 13 bp, Artificial Sequence
  Oligonucleotide for detection of SNP TSC0053712
gattttatataag

SEQ ID NO: 220696 - DNA, 13 bp, Artificial Sequence
  Oligonucleotide for detection of SNP TSC0053712
cttatataaaatc

SEQ ID NO: 220697 - DNA, 13 bp, Artificial Sequence
  Oligonucleotide for detection of SNP TSC0053712
gattttgtataag

SEQ ID NO: 220698 - DNA, 13 bp, Artificial Sequence
  Oligonucleotide for detection of SNP TSC0053712
cttatacaaaatc

SEQ ID NO: 220699 - DNA, 13 bp, Artificial Sequence
  Oligonucleotide for detection of SNP TSC0053713
atattttgataty

SEQ ID NO: 220700 - DNA, 13 bp, Artificial Sequence
  Oligonucleotide for detection of SNP TSC0053713
ratatcaaaatat

SEQ ID NO: 220701 - DNA, 13 bp, Artificial Sequence
  Oligonucleotide for detection of SNP TSC0053713
atatttcgataty

SEQ ID NO: 220702 - DNA, 13 bp, Artificial Sequence
  Oligonucleotide for detection of SNP TSC0053713
ratatcgaaatat

SEQ ID NO: 220703 - DNA, 13 bp, Artificial Sequence
  Oligonucleotide for detection of SNP TSC0053713
gatattggaatat

SEQ ID NO: 220704 - DNA, 13 bp, Artificial Sequence
  Oligonucleotide for detection of SNP TSC0053713
atattccaatatc

SEQ ID NO: 220705 - DNA, 13 bp, Artificial Sequence
  Oligonucleotide for detection of SNP TSC0053713
gatattagaatat

SEQ ID NO: 220706 - DNA, 13 bp, Artificial Sequence
  Oligonucleotide for detection of SNP TSC0053713
atattctaatatc

SEQ ID NO: 220707 - DNA, 13 bp, Artificial Sequence
  Oligonucleotide for detection of SNP TSC0053713
gatatcggaatat

SEQ ID NO: 220708 - DNA, 13 bp, Artificial Sequence
  Oligonucleotide for detection of SNP TSC0053713
atattccgatatc

SEQ ID NO: 220709 - DNA, 13 bp, Artificial Sequence
  Oligonucleotide for detection of SNP TSC0053714
tgggagtattatt

SEQ ID NO: 220710 - DNA, 13 bp, Artificial Sequence
  Oligonucleotide for detection of SNP TSC0053714
aataatactccca

SEQ ID NO: 220711 - DNA, 13 bp, Artificial Sequence
  Oligonucleotide for detection of SNP TSC0053714
tgggaggattatt

SEQ ID NO: 220712 - DNA, 13 bp, Artificial Sequence
  Oligonucleotide for detection of SNP TSC0053714
aataatcctccca

SEQ ID NO: 220713 - DNA, 13 bp, Artificial Sequence
  Oligonucleotide for detection of SNP TSC0053714
agtgattttttta

SEQ ID NO: 220714 - DNA, 13 bp, Artificial Sequence
  Oligonucleotide for detection of SNP TSC0053714
taaaaaaatcact

SEQ ID NO: 220715 - DNA, 13 bp, Artificial Sequence
  Oligonucleotide for detection of SNP TSC0053716
tagaagtgaggaa

SEQ ID NO: 220716 - DNA, 13 bp, Artificial Sequence
  Oligonucleotide for detection of SNP TSC0053716
ttcctcacttcta

SEQ ID NO: 220717 - DNA, 13 bp, Artificial Sequence
  Oligonucleotide for detection of SNP TSC0053716
tagaagcgaggaa

SEQ ID NO: 220718 - DNA, 13 bp, Artificial Sequence
  Oligonucleotide for detection of SNP TSC0053716
ttcctcgcttcta

SEQ ID NO: 220719 - DNA, 13 bp, Artificial Sequence
  Oligonucleotide for detection of SNP TSC0053718
ttataagggtttt

SEQ ID NO: 220720 - DNA, 13 bp, Artificial Sequence
  Oligonucleotide for detection of SNP TSC0053718
aaaacccttataa

SEQ ID NO: 220721 - DNA, 13 bp, Artificial Sequence
  Oligonucleotide for detection of SNP TSC0053718
ttataaaggtttt

SEQ ID NO: 220722 - DNA, 13 bp, Artificial Sequence
  Oligonucleotide for detection of SNP TSC0053718
aaaacctttataa

SEQ ID NO: 220723 - DNA, 13 bp, Artificial Sequence
  Oligonucleotide for detection of SNP TSC0009099
gtgtgtatgcgtg

SEQ ID NO: 220724 - DNA, 13 bp, Artificial Sequence
  Oligonucleotide for detection of SNP TSC0009099
cacgcatacacac

SEQ ID NO: 220725 - DNA, 13 bp, Artificial Sequence
  Oligonucleotide for detection of SNP TSC0009099
gtgtgtatgtgcg

SEQ ID NO: 220726 - DNA, 13 bp, Artificial Sequence
  Oligonucleotide for detection of SNP TSC0009099
cgcacatacacac

SEQ ID NO: 220727 - DNA, 13 bp, Artificial Sequence
  Oligonucleotide for detection of SNP TSC0009099
gtgtgtgtgcgtg

SEQ ID NO: 220728 - DNA, 13 bp, Artificial Sequence
  Oligonucleotide for detection of SNP TSC0009099
cacgcacacacac

SEQ ID NO: 220729 - DNA, 13 bp, Artificial Sequence
  Oligonucleotide for detection of SNP TSC0009099
gtgtgtatgcgcg

SEQ ID NO: 220730 - DNA, 13 bp, Artificial Sequence
  Oligonucleotide for detection of SNP TSC0009099
cgcgcatacacac

SEQ ID NO: 220731 - DNA, 13 bp, Artificial Sequence
  Oligonucleotide for detection of SNP TSC0009099
gtgtgtgtgtgcg

SEQ ID NO: 220732 - DNA, 13 bp, Artificial Sequence
  Oligonucleotide for detection of SNP TSC0009099
cgcacacacacac

SEQ ID NO: 220733 - DNA, 13 bp, Artificial Sequence
  Oligonucleotide for detection of SNP TSC0009099
gtgtgcgtgcgtg

SEQ ID NO: 220734 - DNA, 13 bp, Artificial Sequence
  Oligonucleotide for detection of SNP TSC0009099
cacgcacgcacac

SEQ ID NO: 220735 - DNA, 13 bp, Artificial Sequence
  Oligonucleotide for detection of SNP TSC0009099
gtgtgcgtgtgcg

SEQ ID NO: 220736 - DNA, 13 bp, Artificial Sequence
  Oligonucleotide for detection of SNP TSC0009099
cgcacacgcacac

SEQ ID NO: 220737 - DNA, 13 bp, Artificial Sequence
  Oligonucleotide for detection of SNP TSC0009099
gtgtgtgtgcgcg

SEQ ID NO: 220738 - DNA, 13 bp, Artificial Sequence
  Oligonucleotide for detection of SNP TSC0009099
cgcgcacacacac

SEQ ID NO: 220739 - DNA, 13 bp, Artificial Sequence
  Oligonucleotide for detection of SNP TSC0009099
gtgtgcgtgcgcg

SEQ ID NO: 220740 - DNA, 13 bp, Artificial Sequence
  Oligonucleotide for detection of SNP TSC0009099
cgcgcacgcacac

SEQ ID NO: 220741 - DNA, 13 bp, Artificial Sequence
  Oligonucleotide for detection of SNP TSC0009099
tgtgtatgtatay

SEQ ID NO: 220742 - DNA, 13 bp, Artificial Sequence
  Oligonucleotide for detection of SNP TSC0009099
rtatacatacaca

SEQ ID NO: 220743 - DNA, 13 bp, Artificial Sequence
  Oligonucleotide for detection of SNP TSC0009099
cgtgtatgtatay

SEQ ID NO: 220744 - DNA, 13 bp, Artificial Sequence
  Oligonucleotide for detection of SNP TSC0009099
rtatacatacacg

SEQ ID NO: 220745 - DNA, 13 bp, Artificial Sequence
  Oligonucleotide for detection of SNP TSC0009099
tgcgtatgtatay

SEQ ID NO: 220746 - DNA, 13 bp, Artificial Sequence
  Oligonucleotide for detection of SNP TSC0009099
rtatacatacgca

SEQ ID NO: 220747 - DNA, 13 bp, Artificial Sequence
  Oligonucleotide for detection of SNP TSC0009099
cgcgtatgtatay

SEQ ID NO: 220748 - DNA, 13 bp, Artificial Sequence
  Oligonucleotide for detection of SNP TSC0009099
rtatacatacgcg

SEQ ID NO: 220749 - DNA, 13 bp, Artificial Sequence
  Oligonucleotide for detection of SNP TSC0009099
tgtgtacgtatay

SEQ ID NO: 220750 - DNA, 13 bp, Artificial Sequence
  Oligonucleotide for detection of SNP TSC0009099
rtatacgtacaca

SEQ ID NO: 220751 - DNA, 13 bp, Artificial Sequence
  Oligonucleotide for detection of SNP TSC0009099
cgtgtacgtatay

SEQ ID NO: 220752 - DNA, 13 bp, Artificial Sequence
  Oligonucleotide for detection of SNP TSC0009099
rtatacgtacacg

SEQ ID NO: 220753 - DNA, 13 bp, Artificial Sequence
  Oligonucleotide for detection of SNP TSC0009099
tgcgtacgtatay

SEQ ID NO: 220754 - DNA, 13 bp, Artificial Sequence
  Oligonucleotide for detection of SNP TSC0009099
rtatacgtacgca

SEQ ID NO: 220755 - DNA, 13 bp, Artificial Sequence
  Oligonucleotide for detection of SNP TSC0009099
cgcgtacgtatay

SEQ ID NO: 220756 - DNA, 13 bp, Artificial Sequence
  Oligonucleotide for detection of SNP TSC0009099
rtatacgtacgcg

SEQ ID NO: 220757 - DNA, 13 bp, Artificial Sequence
  Oligonucleotide for detection of SNP TSC0053719
tgcgtgtgtatgy

SEQ ID NO: 220758 - DNA, 13 bp, Artificial Sequence
  Oligonucleotide for detection of SNP TSC0053719
rcatacacacgca

SEQ ID NO: 220759 - DNA, 13 bp, Artificial Sequence
  Oligonucleotide for detection of SNP TSC0053719
tgtgcgtgtatgy

SEQ ID NO: 220760 - DNA, 13 bp, Artificial Sequence
  Oligonucleotide for detection of SNP TSC0053719
rcatacacgcaca

SEQ ID NO: 220761 - DNA, 13 bp, Artificial Sequence
  Oligonucleotide for detection of SNP TSC0053719
tgcgcgtgtatgy

SEQ ID NO: 220762 - DNA, 13 bp, Artificial Sequence
  Oligonucleotide for detection of SNP TSC0053719
rcatacacgcgca

SEQ ID NO: 220763 - DNA, 13 bp, Artificial Sequence
  Oligonucleotide for detection of SNP TSC0053719
tgcgtgcgtatgy

SEQ ID NO: 220764 - DNA, 13 bp, Artificial Sequence
  Oligonucleotide for detection of SNP TSC0053719
rcatacgcacgca

SEQ ID NO: 220765 - DNA, 13 bp, Artificial Sequence
  Oligonucleotide for detection of SNP TSC0053719
tgtgcgcgtatgy

SEQ ID NO: 220766 - DNA, 13 bp, Artificial Sequence
  Oligonucleotide for detection of SNP TSC0053719
rcatacgcgcaca

SEQ ID NO: 220767 - DNA, 13 bp, Artificial Sequence
  Oligonucleotide for detection of SNP TSC0053719
tgcgcgcgtatgy

SEQ ID NO: 220768 - DNA, 13 bp, Artificial Sequence
  Oligonucleotide for detection of SNP TSC0053719
rcatacgcgcgca

SEQ ID NO: 220769 - DNA, 13 bp, Artificial Sequence
  Oligonucleotide for detection of SNP TSC0053722
gtaaagattttaa

SEQ ID NO: 220770 - DNA, 13 bp, Artificial Sequence
  Oligonucleotide for detection of SNP TSC0053722
ttaaaatctttac

SEQ ID NO: 220771 - DNA, 13 bp, Artificial Sequence
  Oligonucleotide for detection of SNP TSC0053722
gtaaagtttttaa

SEQ ID NO: 220772 - DNA, 13 bp, Artificial Sequence
  Oligonucleotide for detection of SNP TSC0053722
ttaaaaactttac

SEQ ID NO: 220773 - DNA, 13 bp, Artificial Sequence
  Oligonucleotide for detection of SNP TSC0053722
ttgaaatttttay

SEQ ID NO: 220774 - DNA, 13 bp, Artificial Sequence
  Oligonucleotide for detection of SNP TSC0053722
rtaaaaatttcaa

SEQ ID NO: 220775 - DNA, 13 bp, Artificial Sequence
  Oligonucleotide for detection of SNP TSC0053722
ttgaaaattttay

SEQ ID NO: 220776 - DNA, 13 bp, Artificial Sequence
  Oligonucleotide for detection of SNP TSC0053722
rtaaaattttcaa

SEQ ID NO: 220777 - DNA, 13 bp, Artificial Sequence
  Oligonucleotide for detection of SNP TSC0053724
attgatatttttg

SEQ ID NO: 220778 - DNA, 13 bp, Artificial Sequence
  Oligonucleotide for detection of SNP TSC0053724
caaaaatatcaat

SEQ ID NO: 220779 - DNA, 13 bp, Artificial Sequence
  Oligonucleotide for detection of SNP TSC0053724
attgatttttttg

SEQ ID NO: 220780 - DNA, 13 bp, Artificial Sequence
  Oligonucleotide for detection of SNP TSC0053724
caaaaaaatcaat

SEQ ID NO: 220781 - DNA, 13 bp, Artificial Sequence
  Oligonucleotide for detection of SNP TSC0053725
ttaattttagtta

SEQ ID NO: 220782 - DNA, 13 bp, Artificial Sequence
  Oligonucleotide for detection of SNP TSC0053725
taactaaaattaa

SEQ ID NO: 220783 - DNA, 13 bp, Artificial Sequence
  Oligonucleotide for detection of SNP TSC0053725
ttaattgtagtta

SEQ ID NO: 220784 - DNA, 13 bp, Artificial Sequence
  Oligonucleotide for detection of SNP TSC0053725
taactacaattaa

SEQ ID NO: 220785 - DNA, 13 bp, Artificial Sequence
  Oligonucleotide for detection of SNP TSC0053725
tggttgaaattaa

SEQ ID NO: 220786 - DNA, 13 bp, Artificial Sequence
  Oligonucleotide for detection of SNP TSC0053725
ttaatttcaacca

SEQ ID NO: 220787 - DNA, 13 bp, Artificial Sequence
  Oligonucleotide for detection of SNP TSC0053725
tggttgtaattaa

SEQ ID NO: 220788 - DNA, 13 bp, Artificial Sequence
  Oligonucleotide for detection of SNP TSC0053725
ttaattacaacca

SEQ ID NO: 220789 - DNA, 13 bp, Artificial Sequence
  Oligonucleotide for detection of SNP TSC0053726
tatatatgttgta

SEQ ID NO: 220790 - DNA, 13 bp, Artificial Sequence
  Oligonucleotide for detection of SNP TSC0053726
tacaacatatata

SEQ ID NO: 220791 - DNA, 13 bp, Artificial Sequence
  Oligonucleotide for detection of SNP TSC0053726
tatatatgtcgta

SEQ ID NO: 220792 - DNA, 13 bp, Artificial Sequence
  Oligonucleotide for detection of SNP TSC0053726
tacgacatatata

SEQ ID NO: 220793 - DNA, 13 bp, Artificial Sequence
  Oligonucleotide for detection of SNP TSC0053726
tatatacgttgta

SEQ ID NO: 220794 - DNA, 13 bp, Artificial Sequence
  Oligonucleotide for detection of SNP TSC0053726
tacaacgtatata

SEQ ID NO: 220795 - DNA, 13 bp, Artificial Sequence
  Oligonucleotide for detection of SNP TSC0053726
tatatacgtcgta

SEQ ID NO: 220796 - DNA, 13 bp, Artificial Sequence
  Oligonucleotide for detection of SNP TSC0053726
tacgacgtatata

SEQ ID NO: 220797 - DNA, 13 bp, Artificial Sequence
  Oligonucleotide for detection of SNP TSC0053726
tatggtatatgtg

SEQ ID NO: 220798 - DNA, 13 bp, Artificial Sequence
  Oligonucleotide for detection of SNP TSC0053726
cacatataccata

SEQ ID NO: 220799 - DNA, 13 bp, Artificial Sequence
  Oligonucleotide for detection of SNP TSC0053726
tatggtgtatgtg

SEQ ID NO: 220800 - DNA, 13 bp, Artificial Sequence
  Oligonucleotide for detection of SNP TSC0053726
cacatacaccata

SEQ ID NO: 220801 - DNA, 13 bp, Artificial Sequence
  Oligonucleotide for detection of SNP TSC0053726
tacggtatatgtg

SEQ ID NO: 220802 - DNA, 13 bp, Artificial Sequence
  Oligonucleotide for detection of SNP TSC0053726
cacatataccgta

SEQ ID NO: 220803 - DNA, 13 bp, Artificial Sequence
  Oligonucleotide for detection of SNP TSC0053726
tacggtgtatgtg

SEQ ID NO: 220804 - DNA, 13 bp, Artificial Sequence
  Oligonucleotide for detection of SNP TSC0053726
cacatacaccgta

SEQ ID NO: 220805 - DNA, 13 bp, Artificial Sequence
  Oligonucleotide for detection of SNP TSC0053726
tatggcgtatgtg

SEQ ID NO: 220806 - DNA, 13 bp, Artificial Sequence
  Oligonucleotide for detection of SNP TSC0053726
cacatacgccata

SEQ ID NO: 220807 - DNA, 13 bp, Artificial Sequence
  Oligonucleotide for detection of SNP TSC0053726
tacggcgtatgtg

SEQ ID NO: 220808 - DNA, 13 bp, Artificial Sequence
  Oligonucleotide for detection of SNP TSC0053726
cacatacgccgta

SEQ ID NO: 220809 - DNA, 13 bp, Artificial Sequence
  Oligonucleotide for detection of SNP TSC0053727
gtaggaagaaatt

SEQ ID NO: 220810 - DNA, 13 bp, Artificial Sequence
  Oligonucleotide for detection of SNP TSC0053727
aatttcttcctac

SEQ ID NO: 220811 - DNA, 13 bp, Artificial Sequence
  Oligonucleotide for detection of SNP TSC0053727
gtaggaggaaatt

SEQ ID NO: 220812 - DNA, 13 bp, Artificial Sequence
  Oligonucleotide for detection of SNP TSC0053727
aatttcctcctac

SEQ ID NO: 220813 - DNA, 13 bp, Artificial Sequence
  Oligonucleotide for detection of SNP TSC0053728
taagatataagag

SEQ ID NO: 220814 - DNA, 13 bp, Artificial Sequence
  Oligonucleotide for detection of SNP TSC0053728
ctcttatatctta

SEQ ID NO: 220815 - DNA, 13 bp, Artificial Sequence
  Oligonucleotide for detection of SNP TSC0053728
taagatgtaagag

SEQ ID NO: 220816 - DNA, 13 bp, Artificial Sequence
  Oligonucleotide for detection of SNP TSC0053728
ctcttacatctta

SEQ ID NO: 220817 - DNA, 13 bp, Artificial Sequence
  Oligonucleotide for detection of SNP TSC0053731
tttgttatatata

SEQ ID NO: 220818 - DNA, 13 bp, Artificial Sequence
  Oligonucleotide for detection of SNP TSC0053731
tatatataacaaa

SEQ ID NO: 220819 - DNA, 13 bp, Artificial Sequence
  Oligonucleotide for detection of SNP TSC0053731
tttgttttatata

SEQ ID NO: 220820 - DNA, 13 bp, Artificial Sequence
  Oligonucleotide for detection of SNP TSC0053731
tatataaaacaaa

SEQ ID NO: 220821 - DNA, 13 bp, Artificial Sequence
  Oligonucleotide for detection of SNP TSC0053731
tgtatagggtaga

SEQ ID NO: 220822 - DNA, 13 bp, Artificial Sequence
  Oligonucleotide for detection of SNP TSC0053731
tctaccctataca

SEQ ID NO: 220823 - DNA, 13 bp, Artificial Sequence
  Oligonucleotide for detection of SNP TSC0053732
gttttggaatgtg

SEQ ID NO: 220824 - DNA, 13 bp, Artificial Sequence
  Oligonucleotide for detection of SNP TSC0053732
cacattccaaaac

SEQ ID NO: 220825 - DNA, 13 bp, Artificial Sequence
  Oligonucleotide for detection of SNP TSC0053732
gttttgaaatgtg

SEQ ID NO: 220826 - DNA, 13 bp, Artificial Sequence
  Oligonucleotide for detection of SNP TSC0053732
cacatttcaaaac

SEQ ID NO: 220827 - DNA, 13 bp, Artificial Sequence
  Oligonucleotide for detection of SNP TSC0053732
gtttcggaatgtg

SEQ ID NO: 220828 - DNA, 13 bp, Artificial Sequence
  Oligonucleotide for detection of SNP TSC0053732
cacattccgaaac

SEQ ID NO: 220829 - DNA, 13 bp, Artificial Sequence
  Oligonucleotide for detection of SNP TSC0053732
gtttcgaaatgtg

SEQ ID NO: 220830 - DNA, 13 bp, Artificial Sequence
  Oligonucleotide for detection of SNP TSC0053732
cacatttcgaaac

SEQ ID NO: 220831 - DNA, 13 bp, Artificial Sequence
  Oligonucleotide for detection of SNP TSC0053735
gtgttaaggttat

SEQ ID NO: 220832 - DNA, 13 bp, Artificial Sequence
  Oligonucleotide for detection of SNP TSC0053735
ataaccttaacac

SEQ ID NO: 220833 - DNA, 13 bp, Artificial Sequence
  Oligonucleotide for detection of SNP TSC0053735
gtgttagggttat

SEQ ID NO: 220834 - DNA, 13 bp, Artificial Sequence
  Oligonucleotide for detection of SNP TSC0053735
ataaccctaacac

SEQ ID NO: 220835 - DNA, 13 bp, Artificial Sequence
  Oligonucleotide for detection of SNP TSC0004845
tgagtattttttt

SEQ ID NO: 220836 - DNA, 13 bp, Artificial Sequence
  Oligonucleotide for detection of SNP TSC0004845
aaaaaaatactca

SEQ ID NO: 220837 - DNA, 13 bp, Artificial Sequence
  Oligonucleotide for detection of SNP TSC0004845
agaagattgttta

SEQ ID NO: 220838 - DNA, 13 bp, Artificial Sequence
  Oligonucleotide for detection of SNP TSC0004845
taaacaatcttct

SEQ ID NO: 220839 - DNA, 13 bp, Artificial Sequence
  Oligonucleotide for detection of SNP TSC0004845
agaagaatgttta

SEQ ID NO: 220840 - DNA, 13 bp, Artificial Sequence
  Oligonucleotide for detection of SNP TSC0004845
taaacattcttct

SEQ ID NO: 220841 - DNA, 13 bp, Artificial Sequence
  Oligonucleotide for detection of SNP TSC0005740
gtgttaatgagty

SEQ ID NO: 220842 - DNA, 13 bp, Artificial Sequence
  Oligonucleotide for detection of SNP TSC0005740
ractcattaacac

SEQ ID NO: 220843 - DNA, 13 bp, Artificial Sequence
  Oligonucleotide for detection of SNP TSC0005740
ggtttattggtay

SEQ ID NO: 220844 - DNA, 13 bp, Artificial Sequence
  Oligonucleotide for detection of SNP TSC0005740
rtaccaataaacc

SEQ ID NO: 220845 - DNA, 13 bp, Artificial Sequence
  Oligonucleotide for detection of SNP TSC0005740
ggtttagtggtay

SEQ ID NO: 220846 - DNA, 13 bp, Artificial Sequence
  Oligonucleotide for detection of SNP TSC0005740
rtaccactaaacc

SEQ ID NO: 220847 - DNA, 13 bp, Artificial Sequence
  Oligonucleotide for detection of SNP TSC0005741
ttttttaaagggg

SEQ ID NO: 220848 - DNA, 13 bp, Artificial Sequence
  Oligonucleotide for detection of SNP TSC0005741
cccctttaaaaaa

SEQ ID NO: 220849 - DNA, 13 bp, Artificial Sequence
  Oligonucleotide for detection of SNP TSC0005741
tttttttaagggg

SEQ ID NO: 220850 - DNA, 13 bp, Artificial Sequence
  Oligonucleotide for detection of SNP TSC0005741
ccccttaaaaaaa

SEQ ID NO: 220851 - DNA, 13 bp, Artificial Sequence
  Oligonucleotide for detection of SNP TSC0053737
ttttttttagggg

SEQ ID NO: 220852 - DNA, 13 bp, Artificial Sequence
  Oligonucleotide for detection of SNP TSC0053737
cccctaaaaaaaa

SEQ ID NO: 220853 - DNA, 13 bp, Artificial Sequence
  Oligonucleotide for detection of SNP TSC0053737
ttttttgtagggg

SEQ ID NO: 220854 - DNA, 13 bp, Artificial Sequence
  Oligonucleotide for detection of SNP TSC0053737
cccctacaaaaaa

SEQ ID NO: 220855 - DNA, 13 bp, Artificial Sequence
  Oligonucleotide for detection of SNP TSC0053739
tttattaagttaa

SEQ ID NO: 220856 - DNA, 13 bp, Artificial Sequence
  Oligonucleotide for detection of SNP TSC0053739
ttaacttaataaa

SEQ ID NO: 220857 - DNA, 13 bp, Artificial Sequence
  Oligonucleotide for detection of SNP TSC0053739
tttattgagttaa

SEQ ID NO: 220858 - DNA, 13 bp, Artificial Sequence
  Oligonucleotide for detection of SNP TSC0053739
ttaactcaataaa

SEQ ID NO: 220859 - DNA, 13 bp, Artificial Sequence
  Oligonucleotide for detection of SNP TSC0053739
tttatcgagttaa

SEQ ID NO: 220860 - DNA, 13 bp, Artificial Sequence
  Oligonucleotide for detection of SNP TSC0053739
ttaactcgataaa

SEQ ID NO: 220861 - DNA, 13 bp, Artificial Sequence
  Oligonucleotide for detection of SNP TSC0053739
ttggtttggtgaa

SEQ ID NO: 220862 - DNA, 13 bp, Artificial Sequence
  Oligonucleotide for detection of SNP TSC0053739
ttcaccaaaccaa

SEQ ID NO: 220863 - DNA, 13 bp, Artificial Sequence
  Oligonucleotide for detection of SNP TSC0053739
ttggttcggtgaa

SEQ ID NO: 220864 - DNA, 13 bp, Artificial Sequence
  Oligonucleotide for detection of SNP TSC0053739
ttcaccgaaccaa

SEQ ID NO: 220865 - DNA, 13 bp, Artificial Sequence
  Oligonucleotide for detection of SNP TSC0053741
aataattgaaatt

SEQ ID NO: 220866 - DNA, 13 bp, Artificial Sequence
  Oligonucleotide for detection of SNP TSC0053741
aatttcaattatt

SEQ ID NO: 220867 - DNA, 13 bp, Artificial Sequence
  Oligonucleotide for detection of SNP TSC0053744
aagaaatgtaaaa

SEQ ID NO: 220868 - DNA, 13 bp, Artificial Sequence
  Oligonucleotide for detection of SNP TSC0053744
ttttacatttctt

SEQ ID NO: 220869 - DNA, 13 bp, Artificial Sequence
  Oligonucleotide for detection of SNP TSC0053744
aagaaaagtaaaa

SEQ ID NO: 220870 - DNA, 13 bp, Artificial Sequence
  Oligonucleotide for detection of SNP TSC0053744
ttttacttttctt

SEQ ID NO: 220871 - DNA, 13 bp, Artificial Sequence
  Oligonucleotide for detection of SNP TSC0053749
aaatttatatata

SEQ ID NO: 220872 - DNA, 13 bp, Artificial Sequence
  Oligonucleotide for detection of SNP TSC0053749
tatatataaattt

SEQ ID NO: 220873 - DNA, 13 bp, Artificial Sequence
  Oligonucleotide for detection of SNP TSC0053749
aaatttgtatata

SEQ ID NO: 220874 - DNA, 13 bp, Artificial Sequence
  Oligonucleotide for detection of SNP TSC0053749
tatatacaaattt

SEQ ID NO: 220875 - DNA, 13 bp, Artificial Sequence
  Oligonucleotide for detection of SNP TSC0053749
aaattcgtatata

SEQ ID NO: 220876 - DNA, 13 bp, Artificial Sequence
  Oligonucleotide for detection of SNP TSC0053749
tatatacgaattt

SEQ ID NO: 220877 - DNA, 13 bp, Artificial Sequence
  Oligonucleotide for detection of SNP TSC0053749
tgtgtgtgagttt

SEQ ID NO: 220878 - DNA, 13 bp, Artificial Sequence
  Oligonucleotide for detection of SNP TSC0053749
aaactcacacaca

SEQ ID NO: 220879 - DNA, 13 bp, Artificial Sequence
  Oligonucleotide for detection of SNP TSC0053749
tgtgtgcgagttt

SEQ ID NO: 220880 - DNA, 13 bp, Artificial Sequence
  Oligonucleotide for detection of SNP TSC0053749
aaactcgcacaca

SEQ ID NO: 220881 - DNA, 13 bp, Artificial Sequence
  Oligonucleotide for detection of SNP TSC0053750
tgtagtgtagtta

SEQ ID NO: 220882 - DNA, 13 bp, Artificial Sequence
  Oligonucleotide for detection of SNP TSC0053750
taactacactaca

SEQ ID NO: 220883 - DNA, 13 bp, Artificial Sequence
  Oligonucleotide for detection of SNP TSC0053750
tgtagtatagtta

SEQ ID NO: 220884 - DNA, 13 bp, Artificial Sequence
  Oligonucleotide for detection of SNP TSC0053750
taactatactaca

SEQ ID NO: 220885 - DNA, 13 bp, Artificial Sequence
  Oligonucleotide for detection of SNP TSC0053751
gtgaatatgataa

SEQ ID NO: 220886 - DNA, 13 bp, Artificial Sequence
  Oligonucleotide for detection of SNP TSC0053751
ttatcatattcac

SEQ ID NO: 220887 - DNA, 13 bp, Artificial Sequence
  Oligonucleotide for detection of SNP TSC0053751
gtgaatttgataa

SEQ ID NO: 220888 - DNA, 13 bp, Artificial Sequence
  Oligonucleotide for detection of SNP TSC0053751
ttatcaaattcac

SEQ ID NO: 220889 - DNA, 13 bp, Artificial Sequence
  Oligonucleotide for detection of SNP TSC0053751
ttattaggtttay

SEQ ID NO: 220890 - DNA, 13 bp, Artificial Sequence
  Oligonucleotide for detection of SNP TSC0053751
rtaaacctaataa

SEQ ID NO: 220891 - DNA, 13 bp, Artificial Sequence
  Oligonucleotide for detection of SNP TSC0053752
atatatatatggy

SEQ ID NO: 220892 - DNA, 13 bp, Artificial Sequence
  Oligonucleotide for detection of SNP TSC0053752
rccatatatatat

SEQ ID NO: 220893 - DNA, 13 bp, Artificial Sequence
  Oligonucleotide for detection of SNP TSC0053752
atatatttatggy

SEQ ID NO: 220894 - DNA, 13 bp, Artificial Sequence
  Oligonucleotide for detection of SNP TSC0053752
rccataaatatat

SEQ ID NO: 220895 - DNA, 13 bp, Artificial Sequence
  Oligonucleotide for detection of SNP TSC0053752
gttatgtatatat

SEQ ID NO: 220896 - DNA, 13 bp, Artificial Sequence
  Oligonucleotide for detection of SNP TSC0053752
atatatacataac

SEQ ID NO: 220897 - DNA, 13 bp, Artificial Sequence
  Oligonucleotide for detection of SNP TSC0053752
gttatggatatat

SEQ ID NO: 220898 - DNA, 13 bp, Artificial Sequence
  Oligonucleotide for detection of SNP TSC0053752
atatatccataac

SEQ ID NO: 220899 - DNA, 13 bp, Artificial Sequence
  Oligonucleotide for detection of SNP TSC0008785
attaagagtaaaa

SEQ ID NO: 220900 - DNA, 13 bp, Artificial Sequence
  Oligonucleotide for detection of SNP TSC0008785
ttttactcttaat

SEQ ID NO: 220901 - DNA, 13 bp, Artificial Sequence
  Oligonucleotide for detection of SNP TSC0008785
attaagtgtaaaa

SEQ ID NO: 220902 - DNA, 13 bp, Artificial Sequence
  Oligonucleotide for detection of SNP TSC0008785
ttttacacttaat

SEQ ID NO: 220903 - DNA, 13 bp, Artificial Sequence
  Oligonucleotide for detection of SNP TSC0053754
ttttttaggcgta

SEQ ID NO: 220904 - DNA, 13 bp, Artificial Sequence
  Oligonucleotide for detection of SNP TSC0053754
tacgcctaaaaaa

SEQ ID NO: 220905 - DNA, 13 bp, Artificial Sequence
  Oligonucleotide for detection of SNP TSC0053754
ttttttgggcgta

SEQ ID NO: 220906 - DNA, 13 bp, Artificial Sequence
  Oligonucleotide for detection of SNP TSC0053754
tacgcccaaaaaa

SEQ ID NO: 220907 - DNA, 13 bp, Artificial Sequence
  Oligonucleotide for detection of SNP TSC0053754
tttttcgggcgta

SEQ ID NO: 220908 - DNA, 13 bp, Artificial Sequence
  Oligonucleotide for detection of SNP TSC0053754
tacgcccgaaaaa

SEQ ID NO: 220909 - DNA, 13 bp, Artificial Sequence
  Oligonucleotide for detection of SNP TSC0053754
tgtgtttggaaaa

SEQ ID NO: 220910 - DNA, 13 bp, Artificial Sequence
  Oligonucleotide for detection of SNP TSC0053754
ttttccaaacaca

SEQ ID NO: 220911 - DNA, 13 bp, Artificial Sequence
  Oligonucleotide for detection of SNP TSC0053754
tgcgtttggaaaa

SEQ ID NO: 220912 - DNA, 13 bp, Artificial Sequence
  Oligonucleotide for detection of SNP TSC0053754
ttttccaaacgca

SEQ ID NO: 220913 - DNA, 13 bp, Artificial Sequence
  Oligonucleotide for detection of SNP TSC0053754
tgtgttcggaaaa

SEQ ID NO: 220914 - DNA, 13 bp, Artificial Sequence
  Oligonucleotide for detection of SNP TSC0053754
ttttccgaacaca

SEQ ID NO: 220915 - DNA, 13 bp, Artificial Sequence
  Oligonucleotide for detection of SNP TSC0053754
tgcgttcggaaaa

SEQ ID NO: 220916 - DNA, 13 bp, Artificial Sequence
  Oligonucleotide for detection of SNP TSC0053754
ttttccgaacgca

SEQ ID NO: 220917 - DNA, 13 bp, Artificial Sequence
  Oligonucleotide for detection of SNP TSC0053755
ttgtgatgaagtt

SEQ ID NO: 220918 - DNA, 13 bp, Artificial Sequence
  Oligonucleotide for detection of SNP TSC0053755
aacttcatcacaa

SEQ ID NO: 220919 - DNA, 13 bp, Artificial Sequence
  Oligonucleotide for detection of SNP TSC0053755
ttgtgacgaagtt

SEQ ID NO: 220920 - DNA, 13 bp, Artificial Sequence
  Oligonucleotide for detection of SNP TSC0053755
aacttcgtcacaa

SEQ ID NO: 220921 - DNA, 13 bp, Artificial Sequence
  Oligonucleotide for detection of SNP TSC0053755
aatttcgttatag

SEQ ID NO: 220922 - DNA, 13 bp, Artificial Sequence
  Oligonucleotide for detection of SNP TSC0053755
ctataacgaaatt

SEQ ID NO: 220923 - DNA, 13 bp, Artificial Sequence
  Oligonucleotide for detection of SNP TSC0053756
attgtttgaggta

SEQ ID NO: 220924 - DNA, 13 bp, Artificial Sequence
  Oligonucleotide for detection of SNP TSC0053756
tacctcaaacaat

SEQ ID NO: 220925 - DNA, 13 bp, Artificial Sequence
  Oligonucleotide for detection of SNP TSC0053756
attgttggaggta

SEQ ID NO: 220926 - DNA, 13 bp, Artificial Sequence
  Oligonucleotide for detection of SNP TSC0053756
tacctccaacaat

SEQ ID NO: 220927 - DNA, 13 bp, Artificial Sequence
  Oligonucleotide for detection of SNP TSC0053756
tgttttaaataat

SEQ ID NO: 220928 - DNA, 13 bp, Artificial Sequence
  Oligonucleotide for detection of SNP TSC0053756
attatttaaaaca

SEQ ID NO: 220929 - DNA, 13 bp, Artificial Sequence
  Oligonucleotide for detection of SNP TSC0053756
tgtttttaataat

SEQ ID NO: 220930 - DNA, 13 bp, Artificial Sequence
  Oligonucleotide for detection of SNP TSC0053756
attattaaaaaca

SEQ ID NO: 220931 - DNA, 13 bp, Artificial Sequence
  Oligonucleotide for detection of SNP TSC0053757
atttaataatgta

SEQ ID NO: 220932 - DNA, 13 bp, Artificial Sequence
  Oligonucleotide for detection of SNP TSC0053757
tacattattaaat

SEQ ID NO: 220933 - DNA, 13 bp, Artificial Sequence
  Oligonucleotide for detection of SNP TSC0053757
atttaagaatgta

SEQ ID NO: 220934 - DNA, 13 bp, Artificial Sequence
  Oligonucleotide for detection of SNP TSC0053757
tacattcttaaat

SEQ ID NO: 220935 - DNA, 13 bp, Artificial Sequence
  Oligonucleotide for detection of SNP TSC0053757
tgtattattagat

SEQ ID NO: 220936 - DNA, 13 bp, Artificial Sequence
  Oligonucleotide for detection of SNP TSC0053757
atctaataataca

SEQ ID NO: 220937 - DNA, 13 bp, Artificial Sequence
  Oligonucleotide for detection of SNP TSC0053757
tgtatttttagat

SEQ ID NO: 220938 - DNA, 13 bp, Artificial Sequence
  Oligonucleotide for detection of SNP TSC0053757
atctaaaaataca

SEQ ID NO: 220939 - DNA, 13 bp, Artificial Sequence
  Oligonucleotide for detection of SNP TSC0053758
ttaagtatgtaga

SEQ ID NO: 220940 - DNA, 13 bp, Artificial Sequence
  Oligonucleotide for detection of SNP TSC0053758
tctacatacttaa

SEQ ID NO: 220941 - DNA, 13 bp, Artificial Sequence
  Oligonucleotide for detection of SNP TSC0053758
ttaagtttgtaga

SEQ ID NO: 220942 - DNA, 13 bp, Artificial Sequence
  Oligonucleotide for detection of SNP TSC0053758
tctacaaacttaa

SEQ ID NO: 220943 - DNA, 13 bp, Artificial Sequence
  Oligonucleotide for detection of SNP TSC0053758
tttgtatgtttaa

SEQ ID NO: 220944 - DNA, 13 bp, Artificial Sequence
  Oligonucleotide for detection of SNP TSC0053758
ttaaacatacaaa

SEQ ID NO: 220945 - DNA, 13 bp, Artificial Sequence
  Oligonucleotide for detection of SNP TSC0053758
tttgtaggtttaa

SEQ ID NO: 220946 - DNA, 13 bp, Artificial Sequence
  Oligonucleotide for detection of SNP TSC0053758
ttaaacctacaaa

SEQ ID NO: 220947 - DNA, 13 bp, Artificial Sequence
  Oligonucleotide for detection of SNP TSC0053759
ttgttaatatttg

SEQ ID NO: 220948 - DNA, 13 bp, Artificial Sequence
  Oligonucleotide for detection of SNP TSC0053759
caaatattaacaa

SEQ ID NO: 220949 - DNA, 13 bp, Artificial Sequence
  Oligonucleotide for detection of SNP TSC0053759
ttgttagtatttg

SEQ ID NO: 220950 - DNA, 13 bp, Artificial Sequence
  Oligonucleotide for detection of SNP TSC0053759
caaatactaacaa

SEQ ID NO: 220951 - DNA, 13 bp, Artificial Sequence
  Oligonucleotide for detection of SNP TSC0053760
gtttagataagty

SEQ ID NO: 220952 - DNA, 13 bp, Artificial Sequence
  Oligonucleotide for detection of SNP TSC0053760
racttatctaaac

SEQ ID NO: 220953 - DNA, 13 bp, Artificial Sequence
  Oligonucleotide for detection of SNP TSC0053760
gtttaggtaagty

SEQ ID NO: 220954 - DNA, 13 bp, Artificial Sequence
  Oligonucleotide for detection of SNP TSC0053760
racttacctaaac

SEQ ID NO: 220955 - DNA, 13 bp, Artificial Sequence
  Oligonucleotide for detection of SNP TSC0053761
ggaagtgttgata

SEQ ID NO: 220956 - DNA, 13 bp, Artificial Sequence
  Oligonucleotide for detection of SNP TSC0053761
tatcaacacttcc

SEQ ID NO: 220957 - DNA, 13 bp, Artificial Sequence
  Oligonucleotide for detection of SNP TSC0053761
ggaagtattgata

SEQ ID NO: 220958 - DNA, 13 bp, Artificial Sequence
  Oligonucleotide for detection of SNP TSC0053761
tatcaatacttcc

SEQ ID NO: 220959 - DNA, 13 bp, Artificial Sequence
  Oligonucleotide for detection of SNP TSC0053762
gtggttatgtggg

SEQ ID NO: 220960 - DNA, 13 bp, Artificial Sequence
  Oligonucleotide for detection of SNP TSC0053762
cccacataaccac

SEQ ID NO: 220961 - DNA, 13 bp, Artificial Sequence
  Oligonucleotide for detection of SNP TSC0053762
gtggttgtgtggg

SEQ ID NO: 220962 - DNA, 13 bp, Artificial Sequence
  Oligonucleotide for detection of SNP TSC0053762
cccacacaaccac

SEQ ID NO: 220963 - DNA, 13 bp, Artificial Sequence
  Oligonucleotide for detection of SNP TSC0053762
gtggtcgtgtggg

SEQ ID NO: 220964 - DNA, 13 bp, Artificial Sequence
  Oligonucleotide for detection of SNP TSC0053762
cccacacgaccac

SEQ ID NO: 220965 - DNA, 13 bp, Artificial Sequence
  Oligonucleotide for detection of SNP TSC0053763
tgttatgaagtty

SEQ ID NO: 220966 - DNA, 13 bp, Artificial Sequence
  Oligonucleotide for detection of SNP TSC0053763
raacttcataaca

SEQ ID NO: 220967 - DNA, 13 bp, Artificial Sequence
  Oligonucleotide for detection of SNP TSC0053763
tgttataaagtty

SEQ ID NO: 220968 - DNA, 13 bp, Artificial Sequence
  Oligonucleotide for detection of SNP TSC0053763
raactttataaca

SEQ ID NO: 220969 - DNA, 13 bp, Artificial Sequence
  Oligonucleotide for detection of SNP TSC0053766
agtttaagtttgg

SEQ ID NO: 220970 - DNA, 13 bp, Artificial Sequence
  Oligonucleotide for detection of SNP TSC0053766
ccaaacttaaact

SEQ ID NO: 220971 - DNA, 13 bp, Artificial Sequence
  Oligonucleotide for detection of SNP TSC0053768
aaatttaaaagtt

SEQ ID NO: 220972 - DNA, 13 bp, Artificial Sequence
  Oligonucleotide for detection of SNP TSC0053768
aacttttaaattt

SEQ ID NO: 220973 - DNA, 13 bp, Artificial Sequence
  Oligonucleotide for detection of SNP TSC0053768
aaattttaaagtt

SEQ ID NO: 220974 - DNA, 13 bp, Artificial Sequence
  Oligonucleotide for detection of SNP TSC0053768
aactttaaaattt

SEQ ID NO: 220975 - DNA, 13 bp, Artificial Sequence
  Oligonucleotide for detection of SNP TSC0053768
agtttttggattt

SEQ ID NO: 220976 - DNA, 13 bp, Artificial Sequence
  Oligonucleotide for detection of SNP TSC0053768
aaatccaaaaact

SEQ ID NO: 220977 - DNA, 13 bp, Artificial Sequence
  Oligonucleotide for detection of SNP TSC0053768
agttttgggattt

SEQ ID NO: 220978 - DNA, 13 bp, Artificial Sequence
  Oligonucleotide for detection of SNP TSC0053768
aaatcccaaaact

SEQ ID NO: 220979 - DNA, 13 bp, Artificial Sequence
  Oligonucleotide for detection of SNP TSC0053770
taatacgtattaa

SEQ ID NO: 220980 - DNA, 13 bp, Artificial Sequence
  Oligonucleotide for detection of SNP TSC0053770
ttaatacgtatta

SEQ ID NO: 220981 - DNA, 13 bp, Artificial Sequence
  Oligonucleotide for detection of SNP TSC0053770
ttaatatgtatta

SEQ ID NO: 220982 - DNA, 13 bp, Artificial Sequence
  Oligonucleotide for detection of SNP TSC0053770
taatacatattaa

SEQ ID NO: 220983 - DNA, 13 bp, Artificial Sequence
  Oligonucleotide for detection of SNP TSC0053771
aatatagtaatga

SEQ ID NO: 220984 - DNA, 13 bp, Artificial Sequence
  Oligonucleotide for detection of SNP TSC0053771
tcattactatatt

SEQ ID NO: 220985 - DNA, 13 bp, Artificial Sequence
  Oligonucleotide for detection of SNP TSC0053772
ggtttgattaggg

SEQ ID NO: 220986 - DNA, 13 bp, Artificial Sequence
  Oligonucleotide for detection of SNP TSC0053772
ccctaatcaaacc

SEQ ID NO: 220987 - DNA, 13 bp, Artificial Sequence
  Oligonucleotide for detection of SNP TSC0053772
ggtttgtttaggg

SEQ ID NO: 220988 - DNA, 13 bp, Artificial Sequence
  Oligonucleotide for detection of SNP TSC0053772
ccctaaacaaacc

SEQ ID NO: 220989 - DNA, 13 bp, Artificial Sequence
  Oligonucleotide for detection of SNP TSC0053772
ggttcgattaggg

SEQ ID NO: 220990 - DNA, 13 bp, Artificial Sequence
  Oligonucleotide for detection of SNP TSC0053772
ccctaatcgaacc

SEQ ID NO: 220991 - DNA, 13 bp, Artificial Sequence
  Oligonucleotide for detection of SNP TSC0053772
ggttcgtttaggg

SEQ ID NO: 220992 - DNA, 13 bp, Artificial Sequence
  Oligonucleotide for detection of SNP TSC0053772
ccctaaacgaacc

SEQ ID NO: 220993 - DNA, 13 bp, Artificial Sequence
  Oligonucleotide for detection of SNP TSC0053772
ttttgattggaty

SEQ ID NO: 220994 - DNA, 13 bp, Artificial Sequence
  Oligonucleotide for detection of SNP TSC0053772
ratccaatcaaaa

SEQ ID NO: 220995 - DNA, 13 bp, Artificial Sequence
  Oligonucleotide for detection of SNP TSC0053772
ttttgaatggaty

SEQ ID NO: 220996 - DNA, 13 bp, Artificial Sequence
  Oligonucleotide for detection of SNP TSC0053772
ratccattcaaaa

SEQ ID NO: 220997 - DNA, 13 bp, Artificial Sequence
  Oligonucleotide for detection of SNP TSC0053772
ttttgatcggaty

SEQ ID NO: 220998 - DNA, 13 bp, Artificial Sequence
  Oligonucleotide for detection of SNP TSC0053772
ratccgatcaaaa

SEQ ID NO: 220999 - DNA, 13 bp, Artificial Sequence
  Oligonucleotide for detection of SNP TSC0053772
ttttgaacggaty

SEQ ID NO: 221000 - DNA, 13 bp, Artificial Sequence
  Oligonucleotide for detection of SNP TSC0053772
ratccgttcaaaa

SEQ ID NO: 221001 - DNA, 13 bp, Artificial Sequence
  Oligonucleotide for detection of SNP TSC0053773
tatttatttgtat

SEQ ID NO: 221002 - DNA, 13 bp, Artificial Sequence
  Oligonucleotide for detection of SNP TSC0053773
atacaaataaata

SEQ ID NO: 221003 - DNA, 13 bp, Artificial Sequence
  Oligonucleotide for detection of SNP TSC0053773
tatttagttgtat

SEQ ID NO: 221004 - DNA, 13 bp, Artificial Sequence
  Oligonucleotide for detection of SNP TSC0053773
atacaactaaata

SEQ ID NO: 221005 - DNA, 13 bp, Artificial Sequence
  Oligonucleotide for detection of SNP TSC0053773
atatagataaatg

SEQ ID NO: 221006 - DNA, 13 bp, Artificial Sequence
  Oligonucleotide for detection of SNP TSC0053773
catttatctatat

SEQ ID NO: 221007 - DNA, 13 bp, Artificial Sequence
  Oligonucleotide for detection of SNP TSC0053773
atatagttaaatg

SEQ ID NO: 221008 - DNA, 13 bp, Artificial Sequence
  Oligonucleotide for detection of SNP TSC0053773
catttaactatat

SEQ ID NO: 221009 - DNA, 13 bp, Artificial Sequence
  Oligonucleotide for detection of SNP TSC0053774
tatagaaatgttg

SEQ ID NO: 221010 - DNA, 13 bp, Artificial Sequence
  Oligonucleotide for detection of SNP TSC0053774
caacatttctata

SEQ ID NO: 221011 - DNA, 13 bp, Artificial Sequence
  Oligonucleotide for detection of SNP TSC0053774
tatagagatgttg

SEQ ID NO: 221012 - DNA, 13 bp, Artificial Sequence
  Oligonucleotide for detection of SNP TSC0053774
caacatctctata

SEQ ID NO: 221013 - DNA, 13 bp, Artificial Sequence
  Oligonucleotide for detection of SNP TSC0053776
atgtaattgtttt

SEQ ID NO: 221014 - DNA, 13 bp, Artificial Sequence
  Oligonucleotide for detection of SNP TSC0053776
aaaacaattacat

SEQ ID NO: 221015 - DNA, 13 bp, Artificial Sequence
  Oligonucleotide for detection of SNP TSC0053776
atgtaagtgtttt

SEQ ID NO: 221016 - DNA, 13 bp, Artificial Sequence
  Oligonucleotide for detection of SNP TSC0053776
aaaacacttacat

SEQ ID NO: 221017 - DNA, 13 bp, Artificial Sequence
  Oligonucleotide for detection of SNP TSC0053776
aaaataattgtat

SEQ ID NO: 221018 - DNA, 13 bp, Artificial Sequence
  Oligonucleotide for detection of SNP TSC0053776
atacaattatttt

SEQ ID NO: 221019 - DNA, 13 bp, Artificial Sequence
  Oligonucleotide for detection of SNP TSC0053776
aaaatatttgtat

SEQ ID NO: 221020 - DNA, 13 bp, Artificial Sequence
  Oligonucleotide for detection of SNP TSC0053776
atacaaatatttt

SEQ ID NO: 221021 - DNA, 13 bp, Artificial Sequence
  Oligonucleotide for detection of SNP TSC0053777
gggaagtggggag

SEQ ID NO: 221022 - DNA, 13 bp, Artificial Sequence
  Oligonucleotide for detection of SNP TSC0053777
ctccccacttccc

SEQ ID NO: 221023 - DNA, 13 bp, Artificial Sequence
  Oligonucleotide for detection of SNP TSC0053778
gagtaagggatgg

SEQ ID NO: 221024 - DNA, 13 bp, Artificial Sequence
  Oligonucleotide for detection of SNP TSC0053778
ccatcccttactc

SEQ ID NO: 221025 - DNA, 13 bp, Artificial Sequence
  Oligonucleotide for detection of SNP TSC0053778
gagtaaaggatgg

SEQ ID NO: 221026 - DNA, 13 bp, Artificial Sequence
  Oligonucleotide for detection of SNP TSC0053778
ccatcctttactc

SEQ ID NO: 221027 - DNA, 13 bp, Artificial Sequence
  Oligonucleotide for detection of SNP TSC0053779
gaatagtgtttty

SEQ ID NO: 221028 - DNA, 13 bp, Artificial Sequence
  Oligonucleotide for detection of SNP TSC0053779
raaaacactattc

SEQ ID NO: 221029 - DNA, 13 bp, Artificial Sequence
  Oligonucleotide for detection of SNP TSC0053779
gaatagggtttty

SEQ ID NO: 221030 - DNA, 13 bp, Artificial Sequence
  Oligonucleotide for detection of SNP TSC0053779
raaaaccctattc

SEQ ID NO: 221031 - DNA, 13 bp, Artificial Sequence
  Oligonucleotide for detection of SNP TSC0053779
gaaaatattatty

SEQ ID NO: 221032 - DNA, 13 bp, Artificial Sequence
  Oligonucleotide for detection of SNP TSC0053779
raataatattttc

SEQ ID NO: 221033 - DNA, 13 bp, Artificial Sequence
  Oligonucleotide for detection of SNP TSC0053779
gaaaattttatty

SEQ ID NO: 221034 - DNA, 13 bp, Artificial Sequence
  Oligonucleotide for detection of SNP TSC0053779
raataaaattttc

SEQ ID NO: 221035 - DNA, 13 bp, Artificial Sequence
  Oligonucleotide for detection of SNP TSC0053780
agaaatatatgta

SEQ ID NO: 221036 - DNA, 13 bp, Artificial Sequence
  Oligonucleotide for detection of SNP TSC0053780
tacatatatttct

SEQ ID NO: 221037 - DNA, 13 bp, Artificial Sequence
  Oligonucleotide for detection of SNP TSC0053780
agaaatgtatgta

SEQ ID NO: 221038 - DNA, 13 bp, Artificial Sequence
  Oligonucleotide for detection of SNP TSC0053780
tacatacatttct

SEQ ID NO: 221039 - DNA, 13 bp, Artificial Sequence
  Oligonucleotide for detection of SNP TSC0053781
tttatggtatagg

SEQ ID NO: 221040 - DNA, 13 bp, Artificial Sequence
  Oligonucleotide for detection of SNP TSC0053781
cctataccataaa

SEQ ID NO: 221041 - DNA, 13 bp, Artificial Sequence
  Oligonucleotide for detection of SNP TSC0053781
tttatgatatagg

SEQ ID NO: 221042 - DNA, 13 bp, Artificial Sequence
  Oligonucleotide for detection of SNP TSC0053781
cctatatcataaa

SEQ ID NO: 221043 - DNA, 13 bp, Artificial Sequence
  Oligonucleotide for detection of SNP TSC0053785
tttgtagttatta

SEQ ID NO: 221044 - DNA, 13 bp, Artificial Sequence
  Oligonucleotide for detection of SNP TSC0053785
taataactacaaa

SEQ ID NO: 221045 - DNA, 13 bp, Artificial Sequence
  Oligonucleotide for detection of SNP TSC0053787
attatttgagtty

SEQ ID NO: 221046 - DNA, 13 bp, Artificial Sequence
  Oligonucleotide for detection of SNP TSC0053787
raactcaaataat

SEQ ID NO: 221047 - DNA, 13 bp, Artificial Sequence
  Oligonucleotide for detection of SNP TSC0053787
attattggagtty

SEQ ID NO: 221048 - DNA, 13 bp, Artificial Sequence
  Oligonucleotide for detection of SNP TSC0053787
raactccaataat

SEQ ID NO: 221049 - DNA, 13 bp, Artificial Sequence
  Oligonucleotide for detection of SNP TSC0053787
attatcggagtty

SEQ ID NO: 221050 - DNA, 13 bp, Artificial Sequence
  Oligonucleotide for detection of SNP TSC0053787
raactccgataat

SEQ ID NO: 221051 - DNA, 13 bp, Artificial Sequence
  Oligonucleotide for detection of SNP TSC0053787
gggtttaggtaat

SEQ ID NO: 221052 - DNA, 13 bp, Artificial Sequence
  Oligonucleotide for detection of SNP TSC0053787
attacctaaaccc

SEQ ID NO: 221053 - DNA, 13 bp, Artificial Sequence
  Oligonucleotide for detection of SNP TSC0053787
gggttttggtaat

SEQ ID NO: 221054 - DNA, 13 bp, Artificial Sequence
  Oligonucleotide for detection of SNP TSC0053787
attaccaaaaccc

SEQ ID NO: 221055 - DNA, 13 bp, Artificial Sequence
  Oligonucleotide for detection of SNP TSC0053787
gggtttcggtaat

SEQ ID NO: 221056 - DNA, 13 bp, Artificial Sequence
  Oligonucleotide for detection of SNP TSC0053787
attaccgaaaccc

SEQ ID NO: 221057 - DNA, 13 bp, Artificial Sequence
  Oligonucleotide for detection of SNP TSC0053794
ttattttgtggty

SEQ ID NO: 221058 - DNA, 13 bp, Artificial Sequence
  Oligonucleotide for detection of SNP TSC0053794
raccacaaaataa

SEQ ID NO: 221059 - DNA, 13 bp, Artificial Sequence
  Oligonucleotide for detection of SNP TSC0053794
ttatttcgtggty

SEQ ID NO: 221060 - DNA, 13 bp, Artificial Sequence
  Oligonucleotide for detection of SNP TSC0053794
raccacgaaataa

SEQ ID NO: 221061 - DNA, 13 bp, Artificial Sequence
  Oligonucleotide for detection of SNP TSC0053794
ggttatggaataa

SEQ ID NO: 221062 - DNA, 13 bp, Artificial Sequence
  Oligonucleotide for detection of SNP TSC0053794
ttattccataacc

SEQ ID NO: 221063 - DNA, 13 bp, Artificial Sequence
  Oligonucleotide for detection of SNP TSC0053794
ggttatagaataa

SEQ ID NO: 221064 - DNA, 13 bp, Artificial Sequence
  Oligonucleotide for detection of SNP TSC0053794
ttattctataacc

SEQ ID NO: 221065 - DNA, 13 bp, Artificial Sequence
  Oligonucleotide for detection of SNP TSC0053794
ggttacggaataa

SEQ ID NO: 221066 - DNA, 13 bp, Artificial Sequence
  Oligonucleotide for detection of SNP TSC0053794
ttattccgtaacc

SEQ ID NO: 221067 - DNA, 13 bp, Artificial Sequence
  Oligonucleotide for detection of SNP TSC0053795
atgaatattgttt

SEQ ID NO: 221068 - DNA, 13 bp, Artificial Sequence
  Oligonucleotide for detection of SNP TSC0053795
aaacaatattcat

SEQ ID NO: 221069 - DNA, 13 bp, Artificial Sequence
  Oligonucleotide for detection of SNP TSC0053796
taatatgtattta

SEQ ID NO: 221070 - DNA, 13 bp, Artificial Sequence
  Oligonucleotide for detection of SNP TSC0053796
taaatacatatta

SEQ ID NO: 221071 - DNA, 13 bp, Artificial Sequence
  Oligonucleotide for detection of SNP TSC0053796
taatatatattta

SEQ ID NO: 221072 - DNA, 13 bp, Artificial Sequence
  Oligonucleotide for detection of SNP TSC0053796
taaatatatatta

SEQ ID NO: 221073 - DNA, 13 bp, Artificial Sequence
  Oligonucleotide for detection of SNP TSC0053796
taatacgtattta

SEQ ID NO: 221074 - DNA, 13 bp, Artificial Sequence
  Oligonucleotide for detection of SNP TSC0053796
taaatacgtatta

SEQ ID NO: 221075 - DNA, 13 bp, Artificial Sequence
  Oligonucleotide for detection of SNP TSC0053797
gatttgaaagtty

SEQ ID NO: 221076 - DNA, 13 bp, Artificial Sequence
  Oligonucleotide for detection of SNP TSC0053797
raactttcaaatc

SEQ ID NO: 221077 - DNA, 13 bp, Artificial Sequence
  Oligonucleotide for detection of SNP TSC0053797
gatttggaagtty

SEQ ID NO: 221078 - DNA, 13 bp, Artificial Sequence
  Oligonucleotide for detection of SNP TSC0053797
raacttccaaatc

SEQ ID NO: 221079 - DNA, 13 bp, Artificial Sequence
  Oligonucleotide for detection of SNP TSC0053798
attggtatttagt

SEQ ID NO: 221080 - DNA, 13 bp, Artificial Sequence
  Oligonucleotide for detection of SNP TSC0053798
actaaataccaat

SEQ ID NO: 221081 - DNA, 13 bp, Artificial Sequence
  Oligonucleotide for detection of SNP TSC0053798
attggtgtttagt

SEQ ID NO: 221082 - DNA, 13 bp, Artificial Sequence
  Oligonucleotide for detection of SNP TSC0053798
actaaacaccaat

SEQ ID NO: 221083 - DNA, 13 bp, Artificial Sequence
  Oligonucleotide for detection of SNP TSC0053799
attagttgatttg

SEQ ID NO: 221084 - DNA, 13 bp, Artificial Sequence
  Oligonucleotide for detection of SNP TSC0053799
caaatcaactaat

SEQ ID NO: 221085 - DNA, 13 bp, Artificial Sequence
  Oligonucleotide for detection of SNP TSC0053799
attagtcgatttg

SEQ ID NO: 221086 - DNA, 13 bp, Artificial Sequence
  Oligonucleotide for detection of SNP TSC0053799
caaatcgactaat

SEQ ID NO: 221087 - DNA, 13 bp, Artificial Sequence
  Oligonucleotide for detection of SNP TSC0053799
taaattggttagt

SEQ ID NO: 221088 - DNA, 13 bp, Artificial Sequence
  Oligonucleotide for detection of SNP TSC0053799
actaaccaattta

SEQ ID NO: 221089 - DNA, 13 bp, Artificial Sequence
  Oligonucleotide for detection of SNP TSC0053799
taaattagttagt

SEQ ID NO: 221090 - DNA, 13 bp, Artificial Sequence
  Oligonucleotide for detection of SNP TSC0053799
actaactaattta

SEQ ID NO: 221091 - DNA, 13 bp, Artificial Sequence
  Oligonucleotide for detection of SNP TSC0053799
taaatcggttagt

SEQ ID NO: 221092 - DNA, 13 bp, Artificial Sequence
  Oligonucleotide for detection of SNP TSC0053799
actaaccgattta

SEQ ID NO: 221093 - DNA, 13 bp, Artificial Sequence
  Oligonucleotide for detection of SNP TSC0053802
gttattaaaaaty

SEQ ID NO: 221094 - DNA, 13 bp, Artificial Sequence
  Oligonucleotide for detection of SNP TSC0053802
ratttttaataac

SEQ ID NO: 221095 - DNA, 13 bp, Artificial Sequence
  Oligonucleotide for detection of SNP TSC0053802
gttattgaaaaty

SEQ ID NO: 221096 - DNA, 13 bp, Artificial Sequence
  Oligonucleotide for detection of SNP TSC0053802
rattttcaataac

SEQ ID NO: 221097 - DNA, 13 bp, Artificial Sequence
  Oligonucleotide for detection of SNP TSC0053804
tttgggaaatatt

SEQ ID NO: 221098 - DNA, 13 bp, Artificial Sequence
  Oligonucleotide for detection of SNP TSC0053804
aatatttcccaaa

SEQ ID NO: 221099 - DNA, 13 bp, Artificial Sequence
  Oligonucleotide for detection of SNP TSC0053804
tttgggtaatatt

SEQ ID NO: 221100 - DNA, 13 bp, Artificial Sequence
  Oligonucleotide for detection of SNP TSC0053804
aatattacccaaa

SEQ ID NO: 221101 - DNA, 13 bp, Artificial Sequence
  Oligonucleotide for detection of SNP TSC0053804
agtgttttttagg

SEQ ID NO: 221102 - DNA, 13 bp, Artificial Sequence
  Oligonucleotide for detection of SNP TSC0053804
cctaaaaaacact

SEQ ID NO: 221103 - DNA, 13 bp, Artificial Sequence
  Oligonucleotide for detection of SNP TSC0053804
agtgttgtttagg

SEQ ID NO: 221104 - DNA, 13 bp, Artificial Sequence
  Oligonucleotide for detection of SNP TSC0053804
cctaaacaacact

SEQ ID NO: 221105 - DNA, 13 bp, Artificial Sequence
  Oligonucleotide for detection of SNP TSC0053805
aggagttgggaty

SEQ ID NO: 221106 - DNA, 13 bp, Artificial Sequence
  Oligonucleotide for detection of SNP TSC0053805
ratcccaactcct

SEQ ID NO: 221107 - DNA, 13 bp, Artificial Sequence
  Oligonucleotide for detection of SNP TSC0053805
aggagtcgggaty

SEQ ID NO: 221108 - DNA, 13 bp, Artificial Sequence
  Oligonucleotide for detection of SNP TSC0053805
ratcccgactcct

SEQ ID NO: 221109 - DNA, 13 bp, Artificial Sequence
  Oligonucleotide for detection of SNP TSC0053807
atgggatatagag

SEQ ID NO: 221110 - DNA, 13 bp, Artificial Sequence
  Oligonucleotide for detection of SNP TSC0053807
ctctatatcccat

SEQ ID NO: 221111 - DNA, 13 bp, Artificial Sequence
  Oligonucleotide for detection of SNP TSC0053807
atgggagatagag

SEQ ID NO: 221112 - DNA, 13 bp, Artificial Sequence
  Oligonucleotide for detection of SNP TSC0053807
ctctatctcccat

SEQ ID NO: 221113 - DNA, 13 bp, Artificial Sequence
  Oligonucleotide for detection of SNP TSC0053808
tttttataagtat

SEQ ID NO: 221114 - DNA, 13 bp, Artificial Sequence
  Oligonucleotide for detection of SNP TSC0053808
atacttataaaaa

SEQ ID NO: 221115 - DNA, 13 bp, Artificial Sequence
  Oligonucleotide for detection of SNP TSC0053808
atatttataggaa

SEQ ID NO: 221116 - DNA, 13 bp, Artificial Sequence
  Oligonucleotide for detection of SNP TSC0053808
ttcctataaatat

SEQ ID NO: 221117 - DNA, 13 bp, Artificial Sequence
  Oligonucleotide for detection of SNP TSC0053808
atatttttaggaa

SEQ ID NO: 221118 - DNA, 13 bp, Artificial Sequence
  Oligonucleotide for detection of SNP TSC0053808
ttcctaaaaatat

SEQ ID NO: 221119 - DNA, 13 bp, Artificial Sequence
  Oligonucleotide for detection of SNP TSC0053809
agagatttttttt

SEQ ID NO: 221120 - DNA, 13 bp, Artificial Sequence
  Oligonucleotide for detection of SNP TSC0053809
aaaaaaaatctct

SEQ ID NO: 221121 - DNA, 13 bp, Artificial Sequence
  Oligonucleotide for detection of SNP TSC0053809
agagatatttttt

SEQ ID NO: 221122 - DNA, 13 bp, Artificial Sequence
  Oligonucleotide for detection of SNP TSC0053809
aaaaaatatctct

SEQ ID NO: 221123 - DNA, 13 bp, Artificial Sequence
  Oligonucleotide for detection of SNP TSC0053810
gatggtaatagta

SEQ ID NO: 221124 - DNA, 13 bp, Artificial Sequence
  Oligonucleotide for detection of SNP TSC0053810
tactattaccatc

SEQ ID NO: 221125 - DNA, 13 bp, Artificial Sequence
  Oligonucleotide for detection of SNP TSC0053810
gatggtgatagta

SEQ ID NO: 221126 - DNA, 13 bp, Artificial Sequence
  Oligonucleotide for detection of SNP TSC0053810
tactatcaccatc

SEQ ID NO: 221127 - DNA, 13 bp, Artificial Sequence
  Oligonucleotide for detection of SNP TSC0053811
aaatttggagaga

SEQ ID NO: 221128 - DNA, 13 bp, Artificial Sequence
  Oligonucleotide for detection of SNP TSC0053811
tctctccaaattt

SEQ ID NO: 221129 - DNA, 13 bp, Artificial Sequence
  Oligonucleotide for detection of SNP TSC0053811
aaatttagagaga

SEQ ID NO: 221130 - DNA, 13 bp, Artificial Sequence
  Oligonucleotide for detection of SNP TSC0053811
tctctctaaattt

SEQ ID NO: 221131 - DNA, 13 bp, Artificial Sequence
  Oligonucleotide for detection of SNP TSC0053811
aaattcggagaga

SEQ ID NO: 221132 - DNA, 13 bp, Artificial Sequence
  Oligonucleotide for detection of SNP TSC0053811
tctctccgaattt

SEQ ID NO: 221133 - DNA, 13 bp, Artificial Sequence
  Oligonucleotide for detection of SNP TSC0053815
ttttttatagggt

SEQ ID NO: 221134 - DNA, 13 bp, Artificial Sequence
  Oligonucleotide for detection of SNP TSC0053815
accctataaaaaa

SEQ ID NO: 221135 - DNA, 13 bp, Artificial Sequence
  Oligonucleotide for detection of SNP TSC0053815
ttttttttagggt

SEQ ID NO: 221136 - DNA, 13 bp, Artificial Sequence
  Oligonucleotide for detection of SNP TSC0053815
accctaaaaaaaa

SEQ ID NO: 221137 - DNA, 13 bp, Artificial Sequence
  Oligonucleotide for detection of SNP TSC0053815
attttgtaaagga

SEQ ID NO: 221138 - DNA, 13 bp, Artificial Sequence
  Oligonucleotide for detection of SNP TSC0053815
tcctttacaaaat

SEQ ID NO: 221139 - DNA, 13 bp, Artificial Sequence
  Oligonucleotide for detection of SNP TSC0053815
attttggaaagga

SEQ ID NO: 221140 - DNA, 13 bp, Artificial Sequence
  Oligonucleotide for detection of SNP TSC0053815
tcctttccaaaat

SEQ ID NO: 221141 - DNA, 13 bp, Artificial Sequence
  Oligonucleotide for detection of SNP TSC0053815
attttgaaaagga

SEQ ID NO: 221142 - DNA, 13 bp, Artificial Sequence
  Oligonucleotide for detection of SNP TSC0053815
tccttttcaaaat

SEQ ID NO: 221143 - DNA, 13 bp, Artificial Sequence
  Oligonucleotide for detection of SNP TSC0053816
gggataatatgtg

SEQ ID NO: 221144 - DNA, 13 bp, Artificial Sequence
  Oligonucleotide for detection of SNP TSC0053816
cacatattatccc

SEQ ID NO: 221145 - DNA, 13 bp, Artificial Sequence
  Oligonucleotide for detection of SNP TSC0053816
gggatattatgtg

SEQ ID NO: 221146 - DNA, 13 bp, Artificial Sequence
  Oligonucleotide for detection of SNP TSC0053816
cacataatatccc

SEQ ID NO: 221147 - DNA, 13 bp, Artificial Sequence
  Oligonucleotide for detection of SNP TSC0053816
gggataatatgcg

SEQ ID NO: 221148 - DNA, 13 bp, Artificial Sequence
  Oligonucleotide for detection of SNP TSC0053816
cgcatattatccc

SEQ ID NO: 221149 - DNA, 13 bp, Artificial Sequence
  Oligonucleotide for detection of SNP TSC0053816
gggatattatgcg

SEQ ID NO: 221150 - DNA, 13 bp, Artificial Sequence
  Oligonucleotide for detection of SNP TSC0053816
cgcataatatccc

SEQ ID NO: 221151 - DNA, 13 bp, Artificial Sequence
  Oligonucleotide for detection of SNP TSC0053816
tgtatattattty

SEQ ID NO: 221152 - DNA, 13 bp, Artificial Sequence
  Oligonucleotide for detection of SNP TSC0053816
raaataatataca

SEQ ID NO: 221153 - DNA, 13 bp, Artificial Sequence
  Oligonucleotide for detection of SNP TSC0053816
tgtatagtattty

SEQ ID NO: 221154 - DNA, 13 bp, Artificial Sequence
  Oligonucleotide for detection of SNP TSC0053816
raaatactataca

SEQ ID NO: 221155 - DNA, 13 bp, Artificial Sequence
  Oligonucleotide for detection of SNP TSC0053816
tgtataatattty

SEQ ID NO: 221156 - DNA, 13 bp, Artificial Sequence
  Oligonucleotide for detection of SNP TSC0053816
raaatattataca

SEQ ID NO: 221157 - DNA, 13 bp, Artificial Sequence
  Oligonucleotide for detection of SNP TSC0053816
cgtatattattty

SEQ ID NO: 221158 - DNA, 13 bp, Artificial Sequence
  Oligonucleotide for detection of SNP TSC0053816
raaataatatacg

SEQ ID NO: 221159 - DNA, 13 bp, Artificial Sequence
  Oligonucleotide for detection of SNP TSC0053816
cgtatagtattty

SEQ ID NO: 221160 - DNA, 13 bp, Artificial Sequence
  Oligonucleotide for detection of SNP TSC0053816
raaatactatacg

SEQ ID NO: 221161 - DNA, 13 bp, Artificial Sequence
  Oligonucleotide for detection of SNP TSC0053816
cgtataatattty

SEQ ID NO: 221162 - DNA, 13 bp, Artificial Sequence
  Oligonucleotide for detection of SNP TSC0053816
raaatattatacg

SEQ ID NO: 221163 - DNA, 13 bp, Artificial Sequence
  Oligonucleotide for detection of SNP TSC0053817
gggaaattttaag

SEQ ID NO: 221164 - DNA, 13 bp, Artificial Sequence
  Oligonucleotide for detection of SNP TSC0053817
cttaaaatttccc

SEQ ID NO: 221165 - DNA, 13 bp, Artificial Sequence
  Oligonucleotide for detection of SNP TSC0053817
gggaaagtttaag

SEQ ID NO: 221166 - DNA, 13 bp, Artificial Sequence
  Oligonucleotide for detection of SNP TSC0053817
cttaaactttccc

SEQ ID NO: 221167 - DNA, 13 bp, Artificial Sequence
  Oligonucleotide for detection of SNP TSC0053817
tttagaattttty

SEQ ID NO: 221168 - DNA, 13 bp, Artificial Sequence
  Oligonucleotide for detection of SNP TSC0053817
raaaaattctaaa

SEQ ID NO: 221169 - DNA, 13 bp, Artificial Sequence
  Oligonucleotide for detection of SNP TSC0053817
tttagatttttty

SEQ ID NO: 221170 - DNA, 13 bp, Artificial Sequence
  Oligonucleotide for detection of SNP TSC0053817
raaaaaatctaaa

SEQ ID NO: 221171 - DNA, 13 bp, Artificial Sequence
  Oligonucleotide for detection of SNP TSC0053821
gaatattgtattt

SEQ ID NO: 221172 - DNA, 13 bp, Artificial Sequence
  Oligonucleotide for detection of SNP TSC0053821
aaatacaatattc

SEQ ID NO: 221173 - DNA, 13 bp, Artificial Sequence
  Oligonucleotide for detection of SNP TSC0053821
gaatatcgtattt

SEQ ID NO: 221174 - DNA, 13 bp, Artificial Sequence
  Oligonucleotide for detection of SNP TSC0053821
aaatacgatattc

SEQ ID NO: 221175 - DNA, 13 bp, Artificial Sequence
  Oligonucleotide for detection of SNP TSC0053821
aagtgtgatatty

SEQ ID NO: 221176 - DNA, 13 bp, Artificial Sequence
  Oligonucleotide for detection of SNP TSC0053821
raatatcacactt

SEQ ID NO: 221177 - DNA, 13 bp, Artificial Sequence
  Oligonucleotide for detection of SNP TSC0053821
aagtgtaatatty

SEQ ID NO: 221178 - DNA, 13 bp, Artificial Sequence
  Oligonucleotide for detection of SNP TSC0053821
raatattacactt

SEQ ID NO: 221179 - DNA, 13 bp, Artificial Sequence
  Oligonucleotide for detection of SNP TSC0053821
aagtgcgatatty

SEQ ID NO: 221180 - DNA, 13 bp, Artificial Sequence
  Oligonucleotide for detection of SNP TSC0053821
raatatcgcactt

SEQ ID NO: 221181 - DNA, 13 bp, Artificial Sequence
  Oligonucleotide for detection of SNP TSC0053822
agtttaagagaaa

SEQ ID NO: 221182 - DNA, 13 bp, Artificial Sequence
  Oligonucleotide for detection of SNP TSC0053822
tttctcttaaact

SEQ ID NO: 221183 - DNA, 13 bp, Artificial Sequence
  Oligonucleotide for detection of SNP TSC0053822
agtttaggagaaa

SEQ ID NO: 221184 - DNA, 13 bp, Artificial Sequence
  Oligonucleotide for detection of SNP TSC0053822
tttctcctaaact

SEQ ID NO: 221185 - DNA, 13 bp, Artificial Sequence
  Oligonucleotide for detection of SNP TSC0053824
gaagaaattttat

SEQ ID NO: 221186 - DNA, 13 bp, Artificial Sequence
  Oligonucleotide for detection of SNP TSC0053824
ataaaatttcttc

SEQ ID NO: 221187 - DNA, 13 bp, Artificial Sequence
  Oligonucleotide for detection of SNP TSC0053824
gaagaatttttat

SEQ ID NO: 221188 - DNA, 13 bp, Artificial Sequence
  Oligonucleotide for detection of SNP TSC0053824
ataaaaattcttc

SEQ ID NO: 221189 - DNA, 13 bp, Artificial Sequence
  Oligonucleotide for detection of SNP TSC0053824
ataaagtttttty

SEQ ID NO: 221190 - DNA, 13 bp, Artificial Sequence
  Oligonucleotide for detection of SNP TSC0053824
raaaaaactttat

SEQ ID NO: 221191 - DNA, 13 bp, Artificial Sequence
  Oligonucleotide for detection of SNP TSC0053825
ggatttattttaa

SEQ ID NO: 221192 - DNA, 13 bp, Artificial Sequence
  Oligonucleotide for detection of SNP TSC0053825
ttaaaataaatcc

SEQ ID NO: 221193 - DNA, 13 bp, Artificial Sequence
  Oligonucleotide for detection of SNP TSC0053825
ttaaaataagtty

SEQ ID NO: 221194 - DNA, 13 bp, Artificial Sequence
  Oligonucleotide for detection of SNP TSC0053825
raacttattttaa

SEQ ID NO: 221195 - DNA, 13 bp, Artificial Sequence
  Oligonucleotide for detection of SNP TSC0053825
ttaaaagaagtty

SEQ ID NO: 221196 - DNA, 13 bp, Artificial Sequence
  Oligonucleotide for detection of SNP TSC0053825
raacttcttttaa

SEQ ID NO: 221197 - DNA, 13 bp, Artificial Sequence
  Oligonucleotide for detection of SNP TSC0053826
gtttttgtttaay

SEQ ID NO: 221198 - DNA, 13 bp, Artificial Sequence
  Oligonucleotide for detection of SNP TSC0053826
rttaaacaaaaac

SEQ ID NO: 221199 - DNA, 13 bp, Artificial Sequence
  Oligonucleotide for detection of SNP TSC0053826
gtttttatttaay

SEQ ID NO: 221200 - DNA, 13 bp, Artificial Sequence
  Oligonucleotide for detection of SNP TSC0053826
rttaaataaaaac

SEQ ID NO: 221201 - DNA, 13 bp, Artificial Sequence
  Oligonucleotide for detection of SNP TSC0053828
agtatggtaataa

SEQ ID NO: 221202 - DNA, 13 bp, Artificial Sequence
  Oligonucleotide for detection of SNP TSC0053828
ttattaccatact

SEQ ID NO: 221203 - DNA, 13 bp, Artificial Sequence
  Oligonucleotide for detection of SNP TSC0053828
agtatgataataa

SEQ ID NO: 221204 - DNA, 13 bp, Artificial Sequence
  Oligonucleotide for detection of SNP TSC0053828
ttattatcatact

SEQ ID NO: 221205 - DNA, 13 bp, Artificial Sequence
  Oligonucleotide for detection of SNP TSC0053831
agtaaagatgagt

SEQ ID NO: 221206 - DNA, 13 bp, Artificial Sequence
  Oligonucleotide for detection of SNP TSC0053831
actcatctttact

SEQ ID NO: 221207 - DNA, 13 bp, Artificial Sequence
  Oligonucleotide for detection of SNP TSC0053831
agtaaaaatgagt

SEQ ID NO: 221208 - DNA, 13 bp, Artificial Sequence
  Oligonucleotide for detection of SNP TSC0053831
actcatttttact

SEQ ID NO: 221209 - DNA, 13 bp, Artificial Sequence
  Oligonucleotide for detection of SNP TSC0053832
attttatattggy

SEQ ID NO: 221210 - DNA, 13 bp, Artificial Sequence
  Oligonucleotide for detection of SNP TSC0053832
rccaatataaaat

SEQ ID NO: 221211 - DNA, 13 bp, Artificial Sequence
  Oligonucleotide for detection of SNP TSC0053832
attttagattggy

SEQ ID NO: 221212 - DNA, 13 bp, Artificial Sequence
  Oligonucleotide for detection of SNP TSC0053832
rccaatctaaaat

SEQ ID NO: 221213 - DNA, 13 bp, Artificial Sequence
  Oligonucleotide for detection of SNP TSC0053832
gttaatataaaat

SEQ ID NO: 221214 - DNA, 13 bp, Artificial Sequence
  Oligonucleotide for detection of SNP TSC0053832
attttatattaac

SEQ ID NO: 221215 - DNA, 13 bp, Artificial Sequence
  Oligonucleotide for detection of SNP TSC0053832
gttaatttaaaat

SEQ ID NO: 221216 - DNA, 13 bp, Artificial Sequence
  Oligonucleotide for detection of SNP TSC0053832
attttaaattaac

SEQ ID NO: 221217 - DNA, 13 bp, Artificial Sequence
  Oligonucleotide for detection of SNP TSC0053833
ttagttatgttgg

SEQ ID NO: 221218 - DNA, 13 bp, Artificial Sequence
  Oligonucleotide for detection of SNP TSC0053833
ccaacataactaa

SEQ ID NO: 221219 - DNA, 13 bp, Artificial Sequence
  Oligonucleotide for detection of SNP TSC0053833
ttagttgtgttgg

SEQ ID NO: 221220 - DNA, 13 bp, Artificial Sequence
  Oligonucleotide for detection of SNP TSC0053833
ccaacacaactaa

SEQ ID NO: 221221 - DNA, 13 bp, Artificial Sequence
  Oligonucleotide for detection of SNP TSC0053833
ttagtcgtgttgg

SEQ ID NO: 221222 - DNA, 13 bp, Artificial Sequence
  Oligonucleotide for detection of SNP TSC0053833
ccaacacgactaa

SEQ ID NO: 221223 - DNA, 13 bp, Artificial Sequence
  Oligonucleotide for detection of SNP TSC0053833
ttagtatggttgg

SEQ ID NO: 221224 - DNA, 13 bp, Artificial Sequence
  Oligonucleotide for detection of SNP TSC0053833
ccaaccatactaa

SEQ ID NO: 221225 - DNA, 13 bp, Artificial Sequence
  Oligonucleotide for detection of SNP TSC0053833
ttagtacggttgg

SEQ ID NO: 221226 - DNA, 13 bp, Artificial Sequence
  Oligonucleotide for detection of SNP TSC0053833
ccaaccgtactaa

SEQ ID NO: 221227 - DNA, 13 bp, Artificial Sequence
  Oligonucleotide for detection of SNP TSC0053835
tttttaagtattt

SEQ ID NO: 221228 - DNA, 13 bp, Artificial Sequence
  Oligonucleotide for detection of SNP TSC0053835
aaatacttaaaaa

SEQ ID NO: 221229 - DNA, 13 bp, Artificial Sequence
  Oligonucleotide for detection of SNP TSC0053836
aataaaaagatat

SEQ ID NO: 221230 - DNA, 13 bp, Artificial Sequence
  Oligonucleotide for detection of SNP TSC0053836
atatctttttatt

SEQ ID NO: 221231 - DNA, 13 bp, Artificial Sequence
  Oligonucleotide for detection of SNP TSC0053836
aataaagagatat

SEQ ID NO: 221232 - DNA, 13 bp, Artificial Sequence
  Oligonucleotide for detection of SNP TSC0053836
atatctctttatt

SEQ ID NO: 221233 - DNA, 13 bp, Artificial Sequence
  Oligonucleotide for detection of SNP TSC0053837
tttatagtttatt

SEQ ID NO: 221234 - DNA, 13 bp, Artificial Sequence
  Oligonucleotide for detection of SNP TSC0053837
aataaactataaa

SEQ ID NO: 221235 - DNA, 13 bp, Artificial Sequence
  Oligonucleotide for detection of SNP TSC0053837
tttataatttatt

SEQ ID NO: 221236 - DNA, 13 bp, Artificial Sequence
  Oligonucleotide for detection of SNP TSC0053837
aataaattataaa

SEQ ID NO: 221237 - DNA, 13 bp, Artificial Sequence
  Oligonucleotide for detection of SNP TSC0053838
ttgatggtatatg

SEQ ID NO: 221238 - DNA, 13 bp, Artificial Sequence
  Oligonucleotide for detection of SNP TSC0053838
catataccatcaa

SEQ ID NO: 221239 - DNA, 13 bp, Artificial Sequence
  Oligonucleotide for detection of SNP TSC0053838
ttgatgatatatg

SEQ ID NO: 221240 - DNA, 13 bp, Artificial Sequence
  Oligonucleotide for detection of SNP TSC0053838
catatatcatcaa

SEQ ID NO: 221241 - DNA, 13 bp, Artificial Sequence
  Oligonucleotide for detection of SNP TSC0053839
tatgtaaatgtty

SEQ ID NO: 221242 - DNA, 13 bp, Artificial Sequence
  Oligonucleotide for detection of SNP TSC0053839
raacatttacata

SEQ ID NO: 221243 - DNA, 13 bp, Artificial Sequence
  Oligonucleotide for detection of SNP TSC0053839
tatgtagatgtty

SEQ ID NO: 221244 - DNA, 13 bp, Artificial Sequence
  Oligonucleotide for detection of SNP TSC0053839
raacatctacata

SEQ ID NO: 221245 - DNA, 13 bp, Artificial Sequence
  Oligonucleotide for detection of SNP TSC0053844
tagaattgtttgg

SEQ ID NO: 221246 - DNA, 13 bp, Artificial Sequence
  Oligonucleotide for detection of SNP TSC0053844
ccaaacaattcta

SEQ ID NO: 221247 - DNA, 13 bp, Artificial Sequence
  Oligonucleotide for detection of SNP TSC0053844
tagaatggtttgg

SEQ ID NO: 221248 - DNA, 13 bp, Artificial Sequence
  Oligonucleotide for detection of SNP TSC0053844
ccaaaccattcta

SEQ ID NO: 221249 - DNA, 13 bp, Artificial Sequence
  Oligonucleotide for detection of SNP TSC0053844
tagaatcgtttgg

SEQ ID NO: 221250 - DNA, 13 bp, Artificial Sequence
  Oligonucleotide for detection of SNP TSC0053844
ccaaacgattcta

SEQ ID NO: 221251 - DNA, 13 bp, Artificial Sequence
  Oligonucleotide for detection of SNP TSC0053844
ttaggtgatttta

SEQ ID NO: 221252 - DNA, 13 bp, Artificial Sequence
  Oligonucleotide for detection of SNP TSC0053844
taaaatcacctaa

SEQ ID NO: 221253 - DNA, 13 bp, Artificial Sequence
  Oligonucleotide for detection of SNP TSC0053844
ttaggcgatttta

SEQ ID NO: 221254 - DNA, 13 bp, Artificial Sequence
  Oligonucleotide for detection of SNP TSC0053844
taaaatcgcctaa

SEQ ID NO: 221255 - DNA, 13 bp, Artificial Sequence
  Oligonucleotide for detection of SNP TSC0053851
ttagttgggtttt

SEQ ID NO: 221256 - DNA, 13 bp, Artificial Sequence
  Oligonucleotide for detection of SNP TSC0053851
aaaacccaactaa

SEQ ID NO: 221257 - DNA, 13 bp, Artificial Sequence
  Oligonucleotide for detection of SNP TSC0053851
ttagttaggtttt

SEQ ID NO: 221258 - DNA, 13 bp, Artificial Sequence
  Oligonucleotide for detection of SNP TSC0053851
aaaacctaactaa

SEQ ID NO: 221259 - DNA, 13 bp, Artificial Sequence
  Oligonucleotide for detection of SNP TSC0053852
taattattaaaag

SEQ ID NO: 221260 - DNA, 13 bp, Artificial Sequence
  Oligonucleotide for detection of SNP TSC0053852
cttttaataatta

SEQ ID NO: 221261 - DNA, 13 bp, Artificial Sequence
  Oligonucleotide for detection of SNP TSC0053852
taattagtaaaag

SEQ ID NO: 221262 - DNA, 13 bp, Artificial Sequence
  Oligonucleotide for detection of SNP TSC0053852
cttttactaatta

SEQ ID NO: 221263 - DNA, 13 bp, Artificial Sequence
  Oligonucleotide for detection of SNP TSC0053853
attttagatttgy

SEQ ID NO: 221264 - DNA, 13 bp, Artificial Sequence
  Oligonucleotide for detection of SNP TSC0053853
rcaaatctaaaat

SEQ ID NO: 221265 - DNA, 13 bp, Artificial Sequence
  Oligonucleotide for detection of SNP TSC0053853
attttaaatttgy

SEQ ID NO: 221266 - DNA, 13 bp, Artificial Sequence
  Oligonucleotide for detection of SNP TSC0053853
rcaaatttaaaat

SEQ ID NO: 221267 - DNA, 13 bp, Artificial Sequence
  Oligonucleotide for detection of SNP TSC0053854
ttaaatataaaay

SEQ ID NO: 221268 - DNA, 13 bp, Artificial Sequence
  Oligonucleotide for detection of SNP TSC0053854
rttttatatttaa

SEQ ID NO: 221269 - DNA, 13 bp, Artificial Sequence
  Oligonucleotide for detection of SNP TSC0053854
ttaaatttaaaay

SEQ ID NO: 221270 - DNA, 13 bp, Artificial Sequence
  Oligonucleotide for detection of SNP TSC0053854
rttttaaatttaa

SEQ ID NO: 221271 - DNA, 13 bp, Artificial Sequence
  Oligonucleotide for detection of SNP TSC0053854
gttttgtgtttga

SEQ ID NO: 221272 - DNA, 13 bp, Artificial Sequence
  Oligonucleotide for detection of SNP TSC0053854
tcaaacacaaaac

SEQ ID NO: 221273 - DNA, 13 bp, Artificial Sequence
  Oligonucleotide for detection of SNP TSC0053854
gttttgggtttga

SEQ ID NO: 221274 - DNA, 13 bp, Artificial Sequence
  Oligonucleotide for detection of SNP TSC0053854
tcaaacccaaaac

SEQ ID NO: 221275 - DNA, 13 bp, Artificial Sequence
  Oligonucleotide for detection of SNP TSC0053855
taaaatgtaagtg

SEQ ID NO: 221276 - DNA, 13 bp, Artificial Sequence
  Oligonucleotide for detection of SNP TSC0053855
cacttacatttta

SEQ ID NO: 221277 - DNA, 13 bp, Artificial Sequence
  Oligonucleotide for detection of SNP TSC0053855
taaaatataagtg

SEQ ID NO: 221278 - DNA, 13 bp, Artificial Sequence
  Oligonucleotide for detection of SNP TSC0053855
cacttatatttta

SEQ ID NO: 221279 - DNA, 13 bp, Artificial Sequence
  Oligonucleotide for detection of SNP TSC0053857
gattttttgttag

SEQ ID NO: 221280 - DNA, 13 bp, Artificial Sequence
  Oligonucleotide for detection of SNP TSC0053857
ctaacaaaaaatc

SEQ ID NO: 221281 - DNA, 13 bp, Artificial Sequence
  Oligonucleotide for detection of SNP TSC0053857
gattttgtgttag

SEQ ID NO: 221282 - DNA, 13 bp, Artificial Sequence
  Oligonucleotide for detection of SNP TSC0053857
ctaacacaaaatc

SEQ ID NO: 221283 - DNA, 13 bp, Artificial Sequence
  Oligonucleotide for detection of SNP TSC0053857
ttagtaaaaaaty

SEQ ID NO: 221284 - DNA, 13 bp, Artificial Sequence
  Oligonucleotide for detection of SNP TSC0053857
rattttttactaa

SEQ ID NO: 221285 - DNA, 13 bp, Artificial Sequence
  Oligonucleotide for detection of SNP TSC0053857
ttagtataaaaty

SEQ ID NO: 221286 - DNA, 13 bp, Artificial Sequence
  Oligonucleotide for detection of SNP TSC0053857
rattttatactaa

SEQ ID NO: 221287 - DNA, 13 bp, Artificial Sequence
  Oligonucleotide for detection of SNP TSC0053858
tgaaaaaagagaa

SEQ ID NO: 221288 - DNA, 13 bp, Artificial Sequence
  Oligonucleotide for detection of SNP TSC0053858
ttctcttttttca

SEQ ID NO: 221289 - DNA, 13 bp, Artificial Sequence
  Oligonucleotide for detection of SNP TSC0053858
tgaaaatagagaa

SEQ ID NO: 221290 - DNA, 13 bp, Artificial Sequence
  Oligonucleotide for detection of SNP TSC0053858
ttctctattttca

SEQ ID NO: 221291 - DNA, 13 bp, Artificial Sequence
  Oligonucleotide for detection of SNP TSC0053859
ttattataatatg

SEQ ID NO: 221292 - DNA, 13 bp, Artificial Sequence
  Oligonucleotide for detection of SNP TSC0053859
catattataataa

SEQ ID NO: 221293 - DNA, 13 bp, Artificial Sequence
  Oligonucleotide for detection of SNP TSC0053859
tatgttatagtag

SEQ ID NO: 221294 - DNA, 13 bp, Artificial Sequence
  Oligonucleotide for detection of SNP TSC0053859
ctactataacata

SEQ ID NO: 221295 - DNA, 13 bp, Artificial Sequence
  Oligonucleotide for detection of SNP TSC0053859
tatgttttagtag

SEQ ID NO: 221296 - DNA, 13 bp, Artificial Sequence
  Oligonucleotide for detection of SNP TSC0053859
ctactaaaacata

SEQ ID NO: 221297 - DNA, 13 bp, Artificial Sequence
  Oligonucleotide for detection of SNP TSC0053861
aaaagggtagttg

SEQ ID NO: 221298 - DNA, 13 bp, Artificial Sequence
  Oligonucleotide for detection of SNP TSC0053861
caactaccctttt

SEQ ID NO: 221299 - DNA, 13 bp, Artificial Sequence
  Oligonucleotide for detection of SNP TSC0053861
aaaaggatagttg

SEQ ID NO: 221300 - DNA, 13 bp, Artificial Sequence
  Oligonucleotide for detection of SNP TSC0053861
caactatcctttt

SEQ ID NO: 221301 - DNA, 13 bp, Artificial Sequence
  Oligonucleotide for detection of SNP TSC0053862
tatgttattgtga

SEQ ID NO: 221302 - DNA, 13 bp, Artificial Sequence
  Oligonucleotide for detection of SNP TSC0053862
tcacaataacata

SEQ ID NO: 221303 - DNA, 13 bp, Artificial Sequence
  Oligonucleotide for detection of SNP TSC0053862
tatgttgttgtga

SEQ ID NO: 221304 - DNA, 13 bp, Artificial Sequence
  Oligonucleotide for detection of SNP TSC0053862
tcacaacaacata

SEQ ID NO: 221305 - DNA, 13 bp, Artificial Sequence
  Oligonucleotide for detection of SNP TSC0053862
tatgttatcgtga

SEQ ID NO: 221306 - DNA, 13 bp, Artificial Sequence
  Oligonucleotide for detection of SNP TSC0053862
tcacgataacata

SEQ ID NO: 221307 - DNA, 13 bp, Artificial Sequence
  Oligonucleotide for detection of SNP TSC0053862
tatgttgtcgtga

SEQ ID NO: 221308 - DNA, 13 bp, Artificial Sequence
  Oligonucleotide for detection of SNP TSC0053862
tcacgacaacata

SEQ ID NO: 221309 - DNA, 13 bp, Artificial Sequence
  Oligonucleotide for detection of SNP TSC0053863
gtaatttgtatta

SEQ ID NO: 221310 - DNA, 13 bp, Artificial Sequence
  Oligonucleotide for detection of SNP TSC0053863
taatacaaattac

SEQ ID NO: 221311 - DNA, 13 bp, Artificial Sequence
  Oligonucleotide for detection of SNP TSC0053863
gtaattcgtatta

SEQ ID NO: 221312 - DNA, 13 bp, Artificial Sequence
  Oligonucleotide for detection of SNP TSC0053863
taatacgaattac

SEQ ID NO: 221313 - DNA, 13 bp, Artificial Sequence
  Oligonucleotide for detection of SNP TSC0053863
tgatatgaattay

SEQ ID NO: 221314 - DNA, 13 bp, Artificial Sequence
  Oligonucleotide for detection of SNP TSC0053863
rtaattcatatca

SEQ ID NO: 221315 - DNA, 13 bp, Artificial Sequence
  Oligonucleotide for detection of SNP TSC0053863
tgatataaattay

SEQ ID NO: 221316 - DNA, 13 bp, Artificial Sequence
  Oligonucleotide for detection of SNP TSC0053863
rtaatttatatca

SEQ ID NO: 221317 - DNA, 13 bp, Artificial Sequence
  Oligonucleotide for detection of SNP TSC0053863
tgatacgaattay

SEQ ID NO: 221318 - DNA, 13 bp, Artificial Sequence
  Oligonucleotide for detection of SNP TSC0053863
rtaattcgtatca

SEQ ID NO: 221319 - DNA, 13 bp, Artificial Sequence
  Oligonucleotide for detection of SNP TSC0053864
tattagattttag

SEQ ID NO: 221320 - DNA, 13 bp, Artificial Sequence
  Oligonucleotide for detection of SNP TSC0053864
ctaaaatctaata

SEQ ID NO: 221321 - DNA, 13 bp, Artificial Sequence
  Oligonucleotide for detection of SNP TSC0053864
tattagtttttag

SEQ ID NO: 221322 - DNA, 13 bp, Artificial Sequence
  Oligonucleotide for detection of SNP TSC0053864
ctaaaaactaata

SEQ ID NO: 221323 - DNA, 13 bp, Artificial Sequence
  Oligonucleotide for detection of SNP TSC0053864
ttggagtttggta

SEQ ID NO: 221324 - DNA, 13 bp, Artificial Sequence
  Oligonucleotide for detection of SNP TSC0053864
taccaaactccaa

SEQ ID NO: 221325 - DNA, 13 bp, Artificial Sequence
  Oligonucleotide for detection of SNP TSC0053864
ttggaggttggta

SEQ ID NO: 221326 - DNA, 13 bp, Artificial Sequence
  Oligonucleotide for detection of SNP TSC0053864
taccaacctccaa

SEQ ID NO: 221327 - DNA, 13 bp, Artificial Sequence
  Oligonucleotide for detection of SNP TSC0053865
ttggaaatgattg

SEQ ID NO: 221328 - DNA, 13 bp, Artificial Sequence
  Oligonucleotide for detection of SNP TSC0053865
caatcatttccaa

SEQ ID NO: 221329 - DNA, 13 bp, Artificial Sequence
  Oligonucleotide for detection of SNP TSC0053865
ttggaattgattg

SEQ ID NO: 221330 - DNA, 13 bp, Artificial Sequence
  Oligonucleotide for detection of SNP TSC0053865
caatcaattccaa

SEQ ID NO: 221331 - DNA, 13 bp, Artificial Sequence
  Oligonucleotide for detection of SNP TSC0053866
gagaagaaaattg

SEQ ID NO: 221332 - DNA, 13 bp, Artificial Sequence
  Oligonucleotide for detection of SNP TSC0053866
caattttcttctc

SEQ ID NO: 221333 - DNA, 13 bp, Artificial Sequence
  Oligonucleotide for detection of SNP TSC0053866
gagaagtaaattg

SEQ ID NO: 221334 - DNA, 13 bp, Artificial Sequence
  Oligonucleotide for detection of SNP TSC0053866
caatttacttctc

SEQ ID NO: 221335 - DNA, 13 bp, Artificial Sequence
  Oligonucleotide for detection of SNP TSC0053867
ttattatggtgty

SEQ ID NO: 221336 - DNA, 13 bp, Artificial Sequence
  Oligonucleotide for detection of SNP TSC0053867
racaccataataa

SEQ ID NO: 221337 - DNA, 13 bp, Artificial Sequence
  Oligonucleotide for detection of SNP TSC0053867
ttattacggtgty

SEQ ID NO: 221338 - DNA, 13 bp, Artificial Sequence
  Oligonucleotide for detection of SNP TSC0053867
racaccgtaataa

SEQ ID NO: 221339 - DNA, 13 bp, Artificial Sequence
  Oligonucleotide for detection of SNP TSC0053867
gatattgtggtga

SEQ ID NO: 221340 - DNA, 13 bp, Artificial Sequence
  Oligonucleotide for detection of SNP TSC0053867
tcaccacaatatc

SEQ ID NO: 221341 - DNA, 13 bp, Artificial Sequence
  Oligonucleotide for detection of SNP TSC0053867
gatattatggtga

SEQ ID NO: 221342 - DNA, 13 bp, Artificial Sequence
  Oligonucleotide for detection of SNP TSC0053867
tcaccataatatc

SEQ ID NO: 221343 - DNA, 13 bp, Artificial Sequence
  Oligonucleotide for detection of SNP TSC0053867
gatatcgtggtga

SEQ ID NO: 221344 - DNA, 13 bp, Artificial Sequence
  Oligonucleotide for detection of SNP TSC0053867
tcaccacgatatc

SEQ ID NO: 221345 - DNA, 13 bp, Artificial Sequence
  Oligonucleotide for detection of SNP TSC0053873
ttttatagtttta

SEQ ID NO: 221346 - DNA, 13 bp, Artificial Sequence
  Oligonucleotide for detection of SNP TSC0053873
taaaactataaaa

SEQ ID NO: 221347 - DNA, 13 bp, Artificial Sequence
  Oligonucleotide for detection of SNP TSC0053873
ttttatggtttta

SEQ ID NO: 221348 - DNA, 13 bp, Artificial Sequence
  Oligonucleotide for detection of SNP TSC0053873
taaaaccataaaa

SEQ ID NO: 221349 - DNA, 13 bp, Artificial Sequence
  Oligonucleotide for detection of SNP TSC0053873
ttttacggtttta

SEQ ID NO: 221350 - DNA, 13 bp, Artificial Sequence
  Oligonucleotide for detection of SNP TSC0053873
taaaaccgtaaaa

SEQ ID NO: 221351 - DNA, 13 bp, Artificial Sequence
  Oligonucleotide for detection of SNP TSC0053873
tggggttgtaaga

SEQ ID NO: 221352 - DNA, 13 bp, Artificial Sequence
  Oligonucleotide for detection of SNP TSC0053873
tcttacaacccca

SEQ ID NO: 221353 - DNA, 13 bp, Artificial Sequence
  Oligonucleotide for detection of SNP TSC0053873
tggggtcgtaaga

SEQ ID NO: 221354 - DNA, 13 bp, Artificial Sequence
  Oligonucleotide for detection of SNP TSC0053873
tcttacgacccca

SEQ ID NO: 221355 - DNA, 13 bp, Artificial Sequence
  Oligonucleotide for detection of SNP TSC0053874
gaattatgttgaa

SEQ ID NO: 221356 - DNA, 13 bp, Artificial Sequence
  Oligonucleotide for detection of SNP TSC0053874
ttcaacataattc

SEQ ID NO: 221357 - DNA, 13 bp, Artificial Sequence
  Oligonucleotide for detection of SNP TSC0053874
gaattacgttgaa

SEQ ID NO: 221358 - DNA, 13 bp, Artificial Sequence
  Oligonucleotide for detection of SNP TSC0053874
ttcaacgtaattc

SEQ ID NO: 221359 - DNA, 13 bp, Artificial Sequence
  Oligonucleotide for detection of SNP TSC0053874
tttagtgtagtty

SEQ ID NO: 221360 - DNA, 13 bp, Artificial Sequence
  Oligonucleotide for detection of SNP TSC0053874
raactacactaaa

SEQ ID NO: 221361 - DNA, 13 bp, Artificial Sequence
  Oligonucleotide for detection of SNP TSC0053874
tttagtatagtty

SEQ ID NO: 221362 - DNA, 13 bp, Artificial Sequence
  Oligonucleotide for detection of SNP TSC0053874
raactatactaaa

SEQ ID NO: 221363 - DNA, 13 bp, Artificial Sequence
  Oligonucleotide for detection of SNP TSC0053874
tttagcgtagtty

SEQ ID NO: 221364 - DNA, 13 bp, Artificial Sequence
  Oligonucleotide for detection of SNP TSC0053874
raactacgctaaa

SEQ ID NO: 221365 - DNA, 13 bp, Artificial Sequence
  Oligonucleotide for detection of SNP TSC0053875
atgtaggttggag

SEQ ID NO: 221366 - DNA, 13 bp, Artificial Sequence
  Oligonucleotide for detection of SNP TSC0053875
ctccaacctacat

SEQ ID NO: 221367 - DNA, 13 bp, Artificial Sequence
  Oligonucleotide for detection of SNP TSC0053875
atgtagattggag

SEQ ID NO: 221368 - DNA, 13 bp, Artificial Sequence
  Oligonucleotide for detection of SNP TSC0053875
ctccaatctacat

SEQ ID NO: 221369 - DNA, 13 bp, Artificial Sequence
  Oligonucleotide for detection of SNP TSC0053876
tgaaaatagaatt

SEQ ID NO: 221370 - DNA, 13 bp, Artificial Sequence
  Oligonucleotide for detection of SNP TSC0053876
aattctattttca

SEQ ID NO: 221371 - DNA, 13 bp, Artificial Sequence
  Oligonucleotide for detection of SNP TSC0053876
tgaaaagagaatt

SEQ ID NO: 221372 - DNA, 13 bp, Artificial Sequence
  Oligonucleotide for detection of SNP TSC0053876
aattctcttttca

SEQ ID NO: 221373 - DNA, 13 bp, Artificial Sequence
  Oligonucleotide for detection of SNP TSC0053878
ggaagggaatttg

SEQ ID NO: 221374 - DNA, 13 bp, Artificial Sequence
  Oligonucleotide for detection of SNP TSC0053878
caaattcccttcc

SEQ ID NO: 221375 - DNA, 13 bp, Artificial Sequence
  Oligonucleotide for detection of SNP TSC0053878
ggaaggaaatttg

SEQ ID NO: 221376 - DNA, 13 bp, Artificial Sequence
  Oligonucleotide for detection of SNP TSC0053878
caaatttccttcc

SEQ ID NO: 221377 - DNA, 13 bp, Artificial Sequence
  Oligonucleotide for detection of SNP TSC0053879
aggggagggaaaa

SEQ ID NO: 221378 - DNA, 13 bp, Artificial Sequence
  Oligonucleotide for detection of SNP TSC0053879
ttttccctcccct

SEQ ID NO: 221379 - DNA, 13 bp, Artificial Sequence
  Oligonucleotide for detection of SNP TSC0053879
aggggaaggaaaa

SEQ ID NO: 221380 - DNA, 13 bp, Artificial Sequence
  Oligonucleotide for detection of SNP TSC0053879
ttttccttcccct

SEQ ID NO: 221381 - DNA, 13 bp, Artificial Sequence
  Oligonucleotide for detection of SNP TSC0053880
tttaagtgttttt

SEQ ID NO: 221382 - DNA, 13 bp, Artificial Sequence
  Oligonucleotide for detection of SNP TSC0053880
aaaaacacttaaa

SEQ ID NO: 221383 - DNA, 13 bp, Artificial Sequence
  Oligonucleotide for detection of SNP TSC0053880
tttaagggttttt

SEQ ID NO: 221384 - DNA, 13 bp, Artificial Sequence
  Oligonucleotide for detection of SNP TSC0053880
aaaaacccttaaa

SEQ ID NO: 221385 - DNA, 13 bp, Artificial Sequence
  Oligonucleotide for detection of SNP TSC0053880
tttaagcgttttt

SEQ ID NO: 221386 - DNA, 13 bp, Artificial Sequence
  Oligonucleotide for detection of SNP TSC0053880
aaaaacgcttaaa

SEQ ID NO: 221387 - DNA, 13 bp, Artificial Sequence
  Oligonucleotide for detection of SNP TSC0053880
aagagtgtttgag

SEQ ID NO: 221388 - DNA, 13 bp, Artificial Sequence
  Oligonucleotide for detection of SNP TSC0053880
ctcaaacactctt

SEQ ID NO: 221389 - DNA, 13 bp, Artificial Sequence
  Oligonucleotide for detection of SNP TSC0053880
aagagtttttgag

SEQ ID NO: 221390 - DNA, 13 bp, Artificial Sequence
  Oligonucleotide for detection of SNP TSC0053880
ctcaaaaactctt

SEQ ID NO: 221391 - DNA, 13 bp, Artificial Sequence
  Oligonucleotide for detection of SNP TSC0053880
aagagcgtttgag

SEQ ID NO: 221392 - DNA, 13 bp, Artificial Sequence
  Oligonucleotide for detection of SNP TSC0053880
ctcaaacgctctt

SEQ ID NO: 221393 - DNA, 13 bp, Artificial Sequence
  Oligonucleotide for detection of SNP TSC0053884
gtgttatgggggy

SEQ ID NO: 221394 - DNA, 13 bp, Artificial Sequence
  Oligonucleotide for detection of SNP TSC0053884
rcccccataacac

SEQ ID NO: 221395 - DNA, 13 bp, Artificial Sequence
  Oligonucleotide for detection of SNP TSC0053884
gtgttacgggggy

SEQ ID NO: 221396 - DNA, 13 bp, Artificial Sequence
  Oligonucleotide for detection of SNP TSC0053884
rcccccgtaacac

SEQ ID NO: 221397 - DNA, 13 bp, Artificial Sequence
  Oligonucleotide for detection of SNP TSC0053884
gtttttgtgatay

SEQ ID NO: 221398 - DNA, 13 bp, Artificial Sequence
  Oligonucleotide for detection of SNP TSC0053884
rtatcacaaaaac

SEQ ID NO: 221399 - DNA, 13 bp, Artificial Sequence
  Oligonucleotide for detection of SNP TSC0053884
gtttttatgatay

SEQ ID NO: 221400 - DNA, 13 bp, Artificial Sequence
  Oligonucleotide for detection of SNP TSC0053884
rtatcataaaaac

SEQ ID NO: 221401 - DNA, 13 bp, Artificial Sequence
  Oligonucleotide for detection of SNP TSC0053884
gttttcgtgatay

SEQ ID NO: 221402 - DNA, 13 bp, Artificial Sequence
  Oligonucleotide for detection of SNP TSC0053884
rtatcacgaaaac

SEQ ID NO: 221403 - DNA, 13 bp, Artificial Sequence
  Oligonucleotide for detection of SNP TSC0053885
ggtttaatatttt

SEQ ID NO: 221404 - DNA, 13 bp, Artificial Sequence
  Oligonucleotide for detection of SNP TSC0053885
aaaatattaaacc

SEQ ID NO: 221405 - DNA, 13 bp, Artificial Sequence
  Oligonucleotide for detection of SNP TSC0053885
ggtttagtatttt

SEQ ID NO: 221406 - DNA, 13 bp, Artificial Sequence
  Oligonucleotide for detection of SNP TSC0053885
aaaatactaaacc

SEQ ID NO: 221407 - DNA, 13 bp, Artificial Sequence
  Oligonucleotide for detection of SNP TSC0053887
ttttataaagtta

SEQ ID NO: 221408 - DNA, 13 bp, Artificial Sequence
  Oligonucleotide for detection of SNP TSC0053887
taactttataaaa

SEQ ID NO: 221409 - DNA, 13 bp, Artificial Sequence
  Oligonucleotide for detection of SNP TSC0053887
ttttatgaagtta

SEQ ID NO: 221410 - DNA, 13 bp, Artificial Sequence
  Oligonucleotide for detection of SNP TSC0053887
taacttcataaaa

SEQ ID NO: 221411 - DNA, 13 bp, Artificial Sequence
  Oligonucleotide for detection of SNP TSC0053887
ttttacgaagtta

SEQ ID NO: 221412 - DNA, 13 bp, Artificial Sequence
  Oligonucleotide for detection of SNP TSC0053887
taacttcgtaaaa

SEQ ID NO: 221413 - DNA, 13 bp, Artificial Sequence
  Oligonucleotide for detection of SNP TSC0053887
tgattttgtaggg

SEQ ID NO: 221414 - DNA, 13 bp, Artificial Sequence
  Oligonucleotide for detection of SNP TSC0053887
ccctacaaaatca

SEQ ID NO: 221415 - DNA, 13 bp, Artificial Sequence
  Oligonucleotide for detection of SNP TSC0053887
tgatttcgtaggg

SEQ ID NO: 221416 - DNA, 13 bp, Artificial Sequence
  Oligonucleotide for detection of SNP TSC0053887
ccctacgaaatca

SEQ ID NO: 221417 - DNA, 13 bp, Artificial Sequence
  Oligonucleotide for detection of SNP TSC0053888
tattatatatagt

SEQ ID NO: 221418 - DNA, 13 bp, Artificial Sequence
  Oligonucleotide for detection of SNP TSC0053888
actatatataata

SEQ ID NO: 221419 - DNA, 13 bp, Artificial Sequence
  Oligonucleotide for detection of SNP TSC0053888
tattatgtatagt

SEQ ID NO: 221420 - DNA, 13 bp, Artificial Sequence
  Oligonucleotide for detection of SNP TSC0053888
actatacataata

SEQ ID NO: 221421 - DNA, 13 bp, Artificial Sequence
  Oligonucleotide for detection of SNP TSC0053888
tattacgtatagt

SEQ ID NO: 221422 - DNA, 13 bp, Artificial Sequence
  Oligonucleotide for detection of SNP TSC0053888
actatacgtaata

SEQ ID NO: 221423 - DNA, 13 bp, Artificial Sequence
  Oligonucleotide for detection of SNP TSC0053888
attatatgtaatg

SEQ ID NO: 221424 - DNA, 13 bp, Artificial Sequence
  Oligonucleotide for detection of SNP TSC0053888
cattacatataat

SEQ ID NO: 221425 - DNA, 13 bp, Artificial Sequence
  Oligonucleotide for detection of SNP TSC0053888
attatacgtaatg

SEQ ID NO: 221426 - DNA, 13 bp, Artificial Sequence
  Oligonucleotide for detection of SNP TSC0053888
cattacgtataat

SEQ ID NO: 221427 - DNA, 13 bp, Artificial Sequence
  Oligonucleotide for detection of SNP TSC0053889
tattaatgtgtgt

SEQ ID NO: 221428 - DNA, 13 bp, Artificial Sequence
  Oligonucleotide for detection of SNP TSC0053889
acacacattaata

SEQ ID NO: 221429 - DNA, 13 bp, Artificial Sequence
  Oligonucleotide for detection of SNP TSC0053889
tattaacgtgtgt

SEQ ID NO: 221430 - DNA, 13 bp, Artificial Sequence
  Oligonucleotide for detection of SNP TSC0053889
acacacgttaata

SEQ ID NO: 221431 - DNA, 13 bp, Artificial Sequence
  Oligonucleotide for detection of SNP TSC0053889
atatatgttggtg

SEQ ID NO: 221432 - DNA, 13 bp, Artificial Sequence
  Oligonucleotide for detection of SNP TSC0053889
caccaacatatat

SEQ ID NO: 221433 - DNA, 13 bp, Artificial Sequence
  Oligonucleotide for detection of SNP TSC0053889
atatatattggtg

SEQ ID NO: 221434 - DNA, 13 bp, Artificial Sequence
  Oligonucleotide for detection of SNP TSC0053889
caccaatatatat

SEQ ID NO: 221435 - DNA, 13 bp, Artificial Sequence
  Oligonucleotide for detection of SNP TSC0053889
atatacgttggtg

SEQ ID NO: 221436 - DNA, 13 bp, Artificial Sequence
  Oligonucleotide for detection of SNP TSC0053889
caccaacgtatat

SEQ ID NO: 221437 - DNA, 13 bp, Artificial Sequence
  Oligonucleotide for detection of SNP TSC0053890
tgattaggaggga

SEQ ID NO: 221438 - DNA, 13 bp, Artificial Sequence
  Oligonucleotide for detection of SNP TSC0053890
tccctcctaatca

SEQ ID NO: 221439 - DNA, 13 bp, Artificial Sequence
  Oligonucleotide for detection of SNP TSC0053890
tgattaagaggga

SEQ ID NO: 221440 - DNA, 13 bp, Artificial Sequence
  Oligonucleotide for detection of SNP TSC0053890
tccctcttaatca

SEQ ID NO: 221441 - DNA, 13 bp, Artificial Sequence
  Oligonucleotide for detection of SNP TSC0053891
ttggtttggatga

SEQ ID NO: 221442 - DNA, 13 bp, Artificial Sequence
  Oligonucleotide for detection of SNP TSC0053891
tcatccaaaccaa

SEQ ID NO: 221443 - DNA, 13 bp, Artificial Sequence
  Oligonucleotide for detection of SNP TSC0053891
ttggttgggatga

SEQ ID NO: 221444 - DNA, 13 bp, Artificial Sequence
  Oligonucleotide for detection of SNP TSC0053891
tcatcccaaccaa

SEQ ID NO: 221445 - DNA, 13 bp, Artificial Sequence
  Oligonucleotide for detection of SNP TSC0053891
ttatttaaattaa

SEQ ID NO: 221446 - DNA, 13 bp, Artificial Sequence
  Oligonucleotide for detection of SNP TSC0053891
ttaatttaaataa

SEQ ID NO: 221447 - DNA, 13 bp, Artificial Sequence
  Oligonucleotide for detection of SNP TSC0053892
ttaattgatattt

SEQ ID NO: 221448 - DNA, 13 bp, Artificial Sequence
  Oligonucleotide for detection of SNP TSC0053892
aaatatcaattaa

SEQ ID NO: 221449 - DNA, 13 bp, Artificial Sequence
  Oligonucleotide for detection of SNP TSC0053892
ttaatcgatattt

SEQ ID NO: 221450 - DNA, 13 bp, Artificial Sequence
  Oligonucleotide for detection of SNP TSC0053892
aaatatcgattaa

SEQ ID NO: 221451 - DNA, 13 bp, Artificial Sequence
  Oligonucleotide for detection of SNP TSC0053892
aaatattgattga

SEQ ID NO: 221452 - DNA, 13 bp, Artificial Sequence
  Oligonucleotide for detection of SNP TSC0053892
tcaatcaatattt

SEQ ID NO: 221453 - DNA, 13 bp, Artificial Sequence
  Oligonucleotide for detection of SNP TSC0053892
aaatatcgattga

SEQ ID NO: 221454 - DNA, 13 bp, Artificial Sequence
  Oligonucleotide for detection of SNP TSC0053892
tcaatcgatattt

SEQ ID NO: 221455 - DNA, 13 bp, Artificial Sequence
  Oligonucleotide for detection of SNP TSC0053894
tgaatagggtaag

SEQ ID NO: 221456 - DNA, 13 bp, Artificial Sequence
  Oligonucleotide for detection of SNP TSC0053894
cttaccctattca

SEQ ID NO: 221457 - DNA, 13 bp, Artificial Sequence
  Oligonucleotide for detection of SNP TSC0053894
tttattttgttta

SEQ ID NO: 221458 - DNA, 13 bp, Artificial Sequence
  Oligonucleotide for detection of SNP TSC0053894
taaacaaaataaa

SEQ ID NO: 221459 - DNA, 13 bp, Artificial Sequence
  Oligonucleotide for detection of SNP TSC0053896
ttttaagttgtga

SEQ ID NO: 221460 - DNA, 13 bp, Artificial Sequence
  Oligonucleotide for detection of SNP TSC0053896
tcacaacttaaaa

SEQ ID NO: 221461 - DNA, 13 bp, Artificial Sequence
  Oligonucleotide for detection of SNP TSC0053897
gtgttggtatttg

SEQ ID NO: 221462 - DNA, 13 bp, Artificial Sequence
  Oligonucleotide for detection of SNP TSC0053897
caaataccaacac

SEQ ID NO: 221463 - DNA, 13 bp, Artificial Sequence
  Oligonucleotide for detection of SNP TSC0053897
gtgttgatatttg

SEQ ID NO: 221464 - DNA, 13 bp, Artificial Sequence
  Oligonucleotide for detection of SNP TSC0053897
caaatatcaacac

SEQ ID NO: 221465 - DNA, 13 bp, Artificial Sequence
  Oligonucleotide for detection of SNP TSC0053899
tttttttttaggg

SEQ ID NO: 221466 - DNA, 13 bp, Artificial Sequence
  Oligonucleotide for detection of SNP TSC0053899
ccctaaaaaaaaa

SEQ ID NO: 221467 - DNA, 13 bp, Artificial Sequence
  Oligonucleotide for detection of SNP TSC0053899
ttttagggggaga

SEQ ID NO: 221468 - DNA, 13 bp, Artificial Sequence
  Oligonucleotide for detection of SNP TSC0053899
tctccccctaaaa

SEQ ID NO: 221469 - DNA, 13 bp, Artificial Sequence
  Oligonucleotide for detection of SNP TSC0053899
ttttagtgggaga

SEQ ID NO: 221470 - DNA, 13 bp, Artificial Sequence
  Oligonucleotide for detection of SNP TSC0053899
tctcccactaaaa

SEQ ID NO: 221471 - DNA, 13 bp, Artificial Sequence
  Oligonucleotide for detection of SNP TSC0053899
ttttagcgggaga

SEQ ID NO: 221472 - DNA, 13 bp, Artificial Sequence
  Oligonucleotide for detection of SNP TSC0053899
tctcccgctaaaa

SEQ ID NO: 221473 - DNA, 13 bp, Artificial Sequence
  Oligonucleotide for detection of SNP TSC0053900
ttgaattgattta

SEQ ID NO: 221474 - DNA, 13 bp, Artificial Sequence
  Oligonucleotide for detection of SNP TSC0053900
taaatcaattcaa

SEQ ID NO: 221475 - DNA, 13 bp, Artificial Sequence
  Oligonucleotide for detection of SNP TSC0053900
ttgaatcgattta

SEQ ID NO: 221476 - DNA, 13 bp, Artificial Sequence
  Oligonucleotide for detection of SNP TSC0053900
taaatcgattcaa

SEQ ID NO: 221477 - DNA, 13 bp, Artificial Sequence
  Oligonucleotide for detection of SNP TSC0053900
taaattgatttag

SEQ ID NO: 221478 - DNA, 13 bp, Artificial Sequence
  Oligonucleotide for detection of SNP TSC0053900
ctaaatcaattta

SEQ ID NO: 221479 - DNA, 13 bp, Artificial Sequence
  Oligonucleotide for detection of SNP TSC0053900
taaattaatttag

SEQ ID NO: 221480 - DNA, 13 bp, Artificial Sequence
  Oligonucleotide for detection of SNP TSC0053900
ctaaattaattta

SEQ ID NO: 221481 - DNA, 13 bp, Artificial Sequence
  Oligonucleotide for detection of SNP TSC0053900
taaatcgatttag

SEQ ID NO: 221482 - DNA, 13 bp, Artificial Sequence
  Oligonucleotide for detection of SNP TSC0053900
ctaaatcgattta

SEQ ID NO: 221483 - DNA, 13 bp, Artificial Sequence
  Oligonucleotide for detection of SNP TSC0053902
gtagatgaattga

SEQ ID NO: 221484 - DNA, 13 bp, Artificial Sequence
  Oligonucleotide for detection of SNP TSC0053902
tcaattcatctac

SEQ ID NO: 221485 - DNA, 13 bp, Artificial Sequence
  Oligonucleotide for detection of SNP TSC0053902
gtagataaattga

SEQ ID NO: 221486 - DNA, 13 bp, Artificial Sequence
  Oligonucleotide for detection of SNP TSC0053902
tcaatttatctac

SEQ ID NO: 221487 - DNA, 13 bp, Artificial Sequence
  Oligonucleotide for detection of SNP TSC0053903
tggaggaggagty

SEQ ID NO: 221488 - DNA, 13 bp, Artificial Sequence
  Oligonucleotide for detection of SNP TSC0053903
ractcctcctcca

SEQ ID NO: 221489 - DNA, 13 bp, Artificial Sequence
  Oligonucleotide for detection of SNP TSC0053903
tggagggggagty

SEQ ID NO: 221490 - DNA, 13 bp, Artificial Sequence
  Oligonucleotide for detection of SNP TSC0053903
ractccccctcca

SEQ ID NO: 221491 - DNA, 13 bp, Artificial Sequence
  Oligonucleotide for detection of SNP TSC0053905
tatgattttgtgg

SEQ ID NO: 221492 - DNA, 13 bp, Artificial Sequence
  Oligonucleotide for detection of SNP TSC0053905
ccacaaaatcata

SEQ ID NO: 221493 - DNA, 13 bp, Artificial Sequence
  Oligonucleotide for detection of SNP TSC0053905
tatgatgttgtgg

SEQ ID NO: 221494 - DNA, 13 bp, Artificial Sequence
  Oligonucleotide for detection of SNP TSC0053905
ccacaacatcata

SEQ ID NO: 221495 - DNA, 13 bp, Artificial Sequence
  Oligonucleotide for detection of SNP TSC0053905
ttataagattatg

SEQ ID NO: 221496 - DNA, 13 bp, Artificial Sequence
  Oligonucleotide for detection of SNP TSC0053905
cataatcttataa

SEQ ID NO: 221497 - DNA, 13 bp, Artificial Sequence
  Oligonucleotide for detection of SNP TSC0053905
ttataatattatg

SEQ ID NO: 221498 - DNA, 13 bp, Artificial Sequence
  Oligonucleotide for detection of SNP TSC0053905
cataatattataa

SEQ ID NO: 221499 - DNA, 13 bp, Artificial Sequence
  Oligonucleotide for detection of SNP TSC0053909
atatagagataga

SEQ ID NO: 221500 - DNA, 13 bp, Artificial Sequence
  Oligonucleotide for detection of SNP TSC0053909
tctatctctatat

SEQ ID NO: 221501 - DNA, 13 bp, Artificial Sequence
  Oligonucleotide for detection of SNP TSC0053909
atatagggataga

SEQ ID NO: 221502 - DNA, 13 bp, Artificial Sequence
  Oligonucleotide for detection of SNP TSC0053909
tctatccctatat

SEQ ID NO: 221503 - DNA, 13 bp, Artificial Sequence
  Oligonucleotide for detection of SNP TSC0053910
agttttatttcgg

SEQ ID NO: 221504 - DNA, 13 bp, Artificial Sequence
  Oligonucleotide for detection of SNP TSC0053910
ccgaaataaaact

SEQ ID NO: 221505 - DNA, 13 bp, Artificial Sequence
  Oligonucleotide for detection of SNP TSC0053910
agttttgtttcgg

SEQ ID NO: 221506 - DNA, 13 bp, Artificial Sequence
  Oligonucleotide for detection of SNP TSC0053910
ccgaaacaaaact

SEQ ID NO: 221507 - DNA, 13 bp, Artificial Sequence
  Oligonucleotide for detection of SNP TSC0053910
agtttcgtttcgg

SEQ ID NO: 221508 - DNA, 13 bp, Artificial Sequence
  Oligonucleotide for detection of SNP TSC0053910
ccgaaacgaaact

SEQ ID NO: 221509 - DNA, 13 bp, Artificial Sequence
  Oligonucleotide for detection of SNP TSC0053910
ttgggatggagtt

SEQ ID NO: 221510 - DNA, 13 bp, Artificial Sequence
  Oligonucleotide for detection of SNP TSC0053910
aactccatcccaa

SEQ ID NO: 221511 - DNA, 13 bp, Artificial Sequence
  Oligonucleotide for detection of SNP TSC0053910
tcgggatggagtt

SEQ ID NO: 221512 - DNA, 13 bp, Artificial Sequence
  Oligonucleotide for detection of SNP TSC0053910
aactccatcccga

SEQ ID NO: 221513 - DNA, 13 bp, Artificial Sequence
  Oligonucleotide for detection of SNP TSC0053910
ttgggacggagtt

SEQ ID NO: 221514 - DNA, 13 bp, Artificial Sequence
  Oligonucleotide for detection of SNP TSC0053910
aactccgtcccaa

SEQ ID NO: 221515 - DNA, 13 bp, Artificial Sequence
  Oligonucleotide for detection of SNP TSC0053910
tcgggacggagtt

SEQ ID NO: 221516 - DNA, 13 bp, Artificial Sequence
  Oligonucleotide for detection of SNP TSC0053910
aactccgtcccga

SEQ ID NO: 221517 - DNA, 13 bp, Artificial Sequence
  Oligonucleotide for detection of SNP TSC0053912
ggaaatatgttat

SEQ ID NO: 221518 - DNA, 13 bp, Artificial Sequence
  Oligonucleotide for detection of SNP TSC0053912
ataacatatttcc

SEQ ID NO: 221519 - DNA, 13 bp, Artificial Sequence
  Oligonucleotide for detection of SNP TSC0053912
ggaaatgtgttat

SEQ ID NO: 221520 - DNA, 13 bp, Artificial Sequence
  Oligonucleotide for detection of SNP TSC0053912
ataacacatttcc

SEQ ID NO: 221521 - DNA, 13 bp, Artificial Sequence
  Oligonucleotide for detection of SNP TSC0053912
ggaaacgtgttat

SEQ ID NO: 221522 - DNA, 13 bp, Artificial Sequence
  Oligonucleotide for detection of SNP TSC0053912
ataacacgtttcc

SEQ ID NO: 221523 - DNA, 13 bp, Artificial Sequence
  Oligonucleotide for detection of SNP TSC0053912
atggtatgtttty

SEQ ID NO: 221524 - DNA, 13 bp, Artificial Sequence
  Oligonucleotide for detection of SNP TSC0053912
raaaacataccat

SEQ ID NO: 221525 - DNA, 13 bp, Artificial Sequence
  Oligonucleotide for detection of SNP TSC0053912
atggtacgtttty

SEQ ID NO: 221526 - DNA, 13 bp, Artificial Sequence
  Oligonucleotide for detection of SNP TSC0053912
raaaacgtaccat

SEQ ID NO: 221527 - DNA, 13 bp, Artificial Sequence
  Oligonucleotide for detection of SNP TSC0053918
gtaataatggtgy

SEQ ID NO: 221528 - DNA, 13 bp, Artificial Sequence
  Oligonucleotide for detection of SNP TSC0053918
rcaccattattac

SEQ ID NO: 221529 - DNA, 13 bp, Artificial Sequence
  Oligonucleotide for detection of SNP TSC0053918
gtaatattggtgy

SEQ ID NO: 221530 - DNA, 13 bp, Artificial Sequence
  Oligonucleotide for detection of SNP TSC0053918
rcaccaatattac

SEQ ID NO: 221531 - DNA, 13 bp, Artificial Sequence
  Oligonucleotide for detection of SNP TSC0053918
gtaataatggcgy

SEQ ID NO: 221532 - DNA, 13 bp, Artificial Sequence
  Oligonucleotide for detection of SNP TSC0053918
rcgccattattac

SEQ ID NO: 221533 - DNA, 13 bp, Artificial Sequence
  Oligonucleotide for detection of SNP TSC0053918
gtaatattggcgy

SEQ ID NO: 221534 - DNA, 13 bp, Artificial Sequence
  Oligonucleotide for detection of SNP TSC0053918
rcgccaatattac

SEQ ID NO: 221535 - DNA, 13 bp, Artificial Sequence
  Oligonucleotide for detection of SNP TSC0053918
gtgttattgttgy

SEQ ID NO: 221536 - DNA, 13 bp, Artificial Sequence
  Oligonucleotide for detection of SNP TSC0053918
rcaacaataacac

SEQ ID NO: 221537 - DNA, 13 bp, Artificial Sequence
  Oligonucleotide for detection of SNP TSC0053918
gtgttagtgttgy

SEQ ID NO: 221538 - DNA, 13 bp, Artificial Sequence
  Oligonucleotide for detection of SNP TSC0053918
rcaacactaacac

SEQ ID NO: 221539 - DNA, 13 bp, Artificial Sequence
  Oligonucleotide for detection of SNP TSC0053918
gcgttattgttgy

SEQ ID NO: 221540 - DNA, 13 bp, Artificial Sequence
  Oligonucleotide for detection of SNP TSC0053918
rcaacaataacgc

SEQ ID NO: 221541 - DNA, 13 bp, Artificial Sequence
  Oligonucleotide for detection of SNP TSC0053918
gcgttagtgttgy

SEQ ID NO: 221542 - DNA, 13 bp, Artificial Sequence
  Oligonucleotide for detection of SNP TSC0053918
rcaacactaacgc

SEQ ID NO: 221543 - DNA, 13 bp, Artificial Sequence
  Oligonucleotide for detection of SNP TSC0053919
tgtgtaaagttaa

SEQ ID NO: 221544 - DNA, 13 bp, Artificial Sequence
  Oligonucleotide for detection of SNP TSC0053919
ttaactttacaca

SEQ ID NO: 221545 - DNA, 13 bp, Artificial Sequence
  Oligonucleotide for detection of SNP TSC0053919
tgtgtagagttaa

SEQ ID NO: 221546 - DNA, 13 bp, Artificial Sequence
  Oligonucleotide for detection of SNP TSC0053919
ttaactctacaca

SEQ ID NO: 221547 - DNA, 13 bp, Artificial Sequence
  Oligonucleotide for detection of SNP TSC0053925
ttttatttgggaa

SEQ ID NO: 221548 - DNA, 13 bp, Artificial Sequence
  Oligonucleotide for detection of SNP TSC0053925
ttcccaaataaaa

SEQ ID NO: 221549 - DNA, 13 bp, Artificial Sequence
  Oligonucleotide for detection of SNP TSC0053925
ttttatgtgggaa

SEQ ID NO: 221550 - DNA, 13 bp, Artificial Sequence
  Oligonucleotide for detection of SNP TSC0053925
ttcccacataaaa

SEQ ID NO: 221551 - DNA, 13 bp, Artificial Sequence
  Oligonucleotide for detection of SNP TSC0053925
tttttagataggg

SEQ ID NO: 221552 - DNA, 13 bp, Artificial Sequence
  Oligonucleotide for detection of SNP TSC0053925
ccctatctaaaaa

SEQ ID NO: 221553 - DNA, 13 bp, Artificial Sequence
  Oligonucleotide for detection of SNP TSC0053925
tttttatataggg

SEQ ID NO: 221554 - DNA, 13 bp, Artificial Sequence
  Oligonucleotide for detection of SNP TSC0053925
ccctatataaaaa

SEQ ID NO: 221555 - DNA, 13 bp, Artificial Sequence
  Oligonucleotide for detection of SNP TSC0053931
ataaaaatagtty

SEQ ID NO: 221556 - DNA, 13 bp, Artificial Sequence
  Oligonucleotide for detection of SNP TSC0053931
raactatttttat

SEQ ID NO: 221557 - DNA, 13 bp, Artificial Sequence
  Oligonucleotide for detection of SNP TSC0053931
ataaaattagtty

SEQ ID NO: 221558 - DNA, 13 bp, Artificial Sequence
  Oligonucleotide for detection of SNP TSC0053931
raactaattttat

SEQ ID NO: 221559 - DNA, 13 bp, Artificial Sequence
  Oligonucleotide for detection of SNP TSC0053931
gggttgtttttat

SEQ ID NO: 221560 - DNA, 13 bp, Artificial Sequence
  Oligonucleotide for detection of SNP TSC0053931
ataaaaacaaccc

SEQ ID NO: 221561 - DNA, 13 bp, Artificial Sequence
  Oligonucleotide for detection of SNP TSC0053931
gggttggttttat

SEQ ID NO: 221562 - DNA, 13 bp, Artificial Sequence
  Oligonucleotide for detection of SNP TSC0053931
ataaaaccaaccc

SEQ ID NO: 221563 - DNA, 13 bp, Artificial Sequence
  Oligonucleotide for detection of SNP TSC0053933
ggtattgtaatat

SEQ ID NO: 221564 - DNA, 13 bp, Artificial Sequence
  Oligonucleotide for detection of SNP TSC0053933
atattacaatacc

SEQ ID NO: 221565 - DNA, 13 bp, Artificial Sequence
  Oligonucleotide for detection of SNP TSC0053933
ggtattataatat

SEQ ID NO: 221566 - DNA, 13 bp, Artificial Sequence
  Oligonucleotide for detection of SNP TSC0053933
atattataatacc

SEQ ID NO: 221567 - DNA, 13 bp, Artificial Sequence
  Oligonucleotide for detection of SNP TSC0053934
agtttttgaaatg

SEQ ID NO: 221568 - DNA, 13 bp, Artificial Sequence
  Oligonucleotide for detection of SNP TSC0053934
catttcaaaaact

SEQ ID NO: 221569 - DNA, 13 bp, Artificial Sequence
  Oligonucleotide for detection of SNP TSC0053934
agttttcgaaatg

SEQ ID NO: 221570 - DNA, 13 bp, Artificial Sequence
  Oligonucleotide for detection of SNP TSC0053934
catttcgaaaact

SEQ ID NO: 221571 - DNA, 13 bp, Artificial Sequence
  Oligonucleotide for detection of SNP TSC0053934
tattttgaaaatt

SEQ ID NO: 221572 - DNA, 13 bp, Artificial Sequence
  Oligonucleotide for detection of SNP TSC0053934
aattttcaaaata

SEQ ID NO: 221573 - DNA, 13 bp, Artificial Sequence
  Oligonucleotide for detection of SNP TSC0053934
tattttaaaaatt

SEQ ID NO: 221574 - DNA, 13 bp, Artificial Sequence
  Oligonucleotide for detection of SNP TSC0053934
aatttttaaaata

SEQ ID NO: 221575 - DNA, 13 bp, Artificial Sequence
  Oligonucleotide for detection of SNP TSC0053934
tatttcgaaaatt

SEQ ID NO: 221576 - DNA, 13 bp, Artificial Sequence
  Oligonucleotide for detection of SNP TSC0053934
aattttcgaaata

SEQ ID NO: 221577 - DNA, 13 bp, Artificial Sequence
  Oligonucleotide for detection of SNP TSC0053935
atgattagaaaay

SEQ ID NO: 221578 - DNA, 13 bp, Artificial Sequence
  Oligonucleotide for detection of SNP TSC0053935
rttttctaatcat

SEQ ID NO: 221579 - DNA, 13 bp, Artificial Sequence
  Oligonucleotide for detection of SNP TSC0053935
atgattggaaaay

SEQ ID NO: 221580 - DNA, 13 bp, Artificial Sequence
  Oligonucleotide for detection of SNP TSC0053935
rttttccaatcat

SEQ ID NO: 221581 - DNA, 13 bp, Artificial Sequence
  Oligonucleotide for detection of SNP TSC0053936
gttttaaattgtg

SEQ ID NO: 221582 - DNA, 13 bp, Artificial Sequence
  Oligonucleotide for detection of SNP TSC0053936
cacaatttaaaac

SEQ ID NO: 221583 - DNA, 13 bp, Artificial Sequence
  Oligonucleotide for detection of SNP TSC0053936
gttttatattgtg

SEQ ID NO: 221584 - DNA, 13 bp, Artificial Sequence
  Oligonucleotide for detection of SNP TSC0053936
cacaatataaaac

SEQ ID NO: 221585 - DNA, 13 bp, Artificial Sequence
  Oligonucleotide for detection of SNP TSC0053936
tataatttgagay

SEQ ID NO: 221586 - DNA, 13 bp, Artificial Sequence
  Oligonucleotide for detection of SNP TSC0053936
rtctcaaattata

SEQ ID NO: 221587 - DNA, 13 bp, Artificial Sequence
  Oligonucleotide for detection of SNP TSC0053936
tataatgtgagay

SEQ ID NO: 221588 - DNA, 13 bp, Artificial Sequence
  Oligonucleotide for detection of SNP TSC0053936
rtctcacattata

SEQ ID NO: 221589 - DNA, 13 bp, Artificial Sequence
  Oligonucleotide for detection of SNP TSC0053937
tatattatattaa

SEQ ID NO: 221590 - DNA, 13 bp, Artificial Sequence
  Oligonucleotide for detection of SNP TSC0053937
ttaatataatata

SEQ ID NO: 221591 - DNA, 13 bp, Artificial Sequence
  Oligonucleotide for detection of SNP TSC0053937
tatattgtattaa

SEQ ID NO: 221592 - DNA, 13 bp, Artificial Sequence
  Oligonucleotide for detection of SNP TSC0053937
ttaatacaatata

SEQ ID NO: 221593 - DNA, 13 bp, Artificial Sequence
  Oligonucleotide for detection of SNP TSC0053937
tatatcgtattaa

SEQ ID NO: 221594 - DNA, 13 bp, Artificial Sequence
  Oligonucleotide for detection of SNP TSC0053937
ttaatacgatata

SEQ ID NO: 221595 - DNA, 13 bp, Artificial Sequence
  Oligonucleotide for detection of SNP TSC0053937
ttaatatgatatg

SEQ ID NO: 221596 - DNA, 13 bp, Artificial Sequence
  Oligonucleotide for detection of SNP TSC0053937
catatcatattaa

SEQ ID NO: 221597 - DNA, 13 bp, Artificial Sequence
  Oligonucleotide for detection of SNP TSC0053937
ttaatacgatatg

SEQ ID NO: 221598 - DNA, 13 bp, Artificial Sequence
  Oligonucleotide for detection of SNP TSC0053937
catatcgtattaa

SEQ ID NO: 221599 - DNA, 13 bp, Artificial Sequence
  Oligonucleotide for detection of SNP TSC0053939
tggggtatggtta

SEQ ID NO: 221600 - DNA, 13 bp, Artificial Sequence
  Oligonucleotide for detection of SNP TSC0053939
taaccatacccca

SEQ ID NO: 221601 - DNA, 13 bp, Artificial Sequence
  Oligonucleotide for detection of SNP TSC0053939
tggggtgtggtta

SEQ ID NO: 221602 - DNA, 13 bp, Artificial Sequence
  Oligonucleotide for detection of SNP TSC0053939
taaccacacccca

SEQ ID NO: 221603 - DNA, 13 bp, Artificial Sequence
  Oligonucleotide for detection of SNP TSC0053939
tggggcgtggtta

SEQ ID NO: 221604 - DNA, 13 bp, Artificial Sequence
  Oligonucleotide for detection of SNP TSC0053939
taaccacgcccca

SEQ ID NO: 221605 - DNA, 13 bp, Artificial Sequence
  Oligonucleotide for detection of SNP TSC0053939
taattatgtttta

SEQ ID NO: 221606 - DNA, 13 bp, Artificial Sequence
  Oligonucleotide for detection of SNP TSC0053939
taaaacataatta

SEQ ID NO: 221607 - DNA, 13 bp, Artificial Sequence
  Oligonucleotide for detection of SNP TSC0053939
taattacgtttta

SEQ ID NO: 221608 - DNA, 13 bp, Artificial Sequence
  Oligonucleotide for detection of SNP TSC0053939
taaaacgtaatta

SEQ ID NO: 221609 - DNA, 13 bp, Artificial Sequence
  Oligonucleotide for detection of SNP TSC0053940
gagatatgtatta

SEQ ID NO: 221610 - DNA, 13 bp, Artificial Sequence
  Oligonucleotide for detection of SNP TSC0053940
taatacatatctc

SEQ ID NO: 221611 - DNA, 13 bp, Artificial Sequence
  Oligonucleotide for detection of SNP TSC0053940
gagatacgtatta

SEQ ID NO: 221612 - DNA, 13 bp, Artificial Sequence
  Oligonucleotide for detection of SNP TSC0053940
taatacgtatctc

SEQ ID NO: 221613 - DNA, 13 bp, Artificial Sequence
  Oligonucleotide for detection of SNP TSC0053943
tttattaagttta

SEQ ID NO: 221614 - DNA, 13 bp, Artificial Sequence
  Oligonucleotide for detection of SNP TSC0053943
taaacttaataaa

SEQ ID NO: 221615 - DNA, 13 bp, Artificial Sequence
  Oligonucleotide for detection of SNP TSC0053943
tttattgagttta

SEQ ID NO: 221616 - DNA, 13 bp, Artificial Sequence
  Oligonucleotide for detection of SNP TSC0053943
taaactcaataaa

SEQ ID NO: 221617 - DNA, 13 bp, Artificial Sequence
  Oligonucleotide for detection of SNP TSC0053944
tttgttttgggaa

SEQ ID NO: 221618 - DNA, 13 bp, Artificial Sequence
  Oligonucleotide for detection of SNP TSC0053944
ttcccaaaacaaa

SEQ ID NO: 221619 - DNA, 13 bp, Artificial Sequence
  Oligonucleotide for detection of SNP TSC0053944
tttgttgtgggaa

SEQ ID NO: 221620 - DNA, 13 bp, Artificial Sequence
  Oligonucleotide for detection of SNP TSC0053944
ttcccacaacaaa

SEQ ID NO: 221621 - DNA, 13 bp, Artificial Sequence
  Oligonucleotide for detection of SNP TSC0053944
tttgtcgtgggaa

SEQ ID NO: 221622 - DNA, 13 bp, Artificial Sequence
  Oligonucleotide for detection of SNP TSC0053944
ttcccacgacaaa

SEQ ID NO: 221623 - DNA, 13 bp, Artificial Sequence
  Oligonucleotide for detection of SNP TSC0053944
tttttaggataaa

SEQ ID NO: 221624 - DNA, 13 bp, Artificial Sequence
  Oligonucleotide for detection of SNP TSC0053944
tttatcctaaaaa

SEQ ID NO: 221625 - DNA, 13 bp, Artificial Sequence
  Oligonucleotide for detection of SNP TSC0053944
tttttatgataaa

SEQ ID NO: 221626 - DNA, 13 bp, Artificial Sequence
  Oligonucleotide for detection of SNP TSC0053944
tttatcataaaaa

SEQ ID NO: 221627 - DNA, 13 bp, Artificial Sequence
  Oligonucleotide for detection of SNP TSC0053944
tttttacgataaa

SEQ ID NO: 221628 - DNA, 13 bp, Artificial Sequence
  Oligonucleotide for detection of SNP TSC0053944
tttatcgtaaaaa

SEQ ID NO: 221629 - DNA, 13 bp, Artificial Sequence
  Oligonucleotide for detection of SNP TSC0006944
ttgtgtatttgtt

SEQ ID NO: 221630 - DNA, 13 bp, Artificial Sequence
  Oligonucleotide for detection of SNP TSC0006944
aacaaatacacaa

SEQ ID NO: 221631 - DNA, 13 bp, Artificial Sequence
  Oligonucleotide for detection of SNP TSC0053947
tttttaatgagtt

SEQ ID NO: 221632 - DNA, 13 bp, Artificial Sequence
  Oligonucleotide for detection of SNP TSC0053947
aactcattaaaaa

SEQ ID NO: 221633 - DNA, 13 bp, Artificial Sequence
  Oligonucleotide for detection of SNP TSC0053947
aatttaatgagag

SEQ ID NO: 221634 - DNA, 13 bp, Artificial Sequence
  Oligonucleotide for detection of SNP TSC0053947
ctctcattaaatt

SEQ ID NO: 221635 - DNA, 13 bp, Artificial Sequence
  Oligonucleotide for detection of SNP TSC0053947
aatttattgagag

SEQ ID NO: 221636 - DNA, 13 bp, Artificial Sequence
  Oligonucleotide for detection of SNP TSC0053947
ctctcaataaatt

SEQ ID NO: 221637 - DNA, 13 bp, Artificial Sequence
  Oligonucleotide for detection of SNP TSC0053948
agggaaataaatg

SEQ ID NO: 221638 - DNA, 13 bp, Artificial Sequence
  Oligonucleotide for detection of SNP TSC0053948
catttatttccct

SEQ ID NO: 221639 - DNA, 13 bp, Artificial Sequence
  Oligonucleotide for detection of SNP TSC0053948
agggaagtaaatg

SEQ ID NO: 221640 - DNA, 13 bp, Artificial Sequence
  Oligonucleotide for detection of SNP TSC0053948
catttacttccct

SEQ ID NO: 221641 - DNA, 13 bp, Artificial Sequence
  Oligonucleotide for detection of SNP TSC0053949
tttttaaagtaag

SEQ ID NO: 221642 - DNA, 13 bp, Artificial Sequence
  Oligonucleotide for detection of SNP TSC0053949
cttactttaaaaa

SEQ ID NO: 221643 - DNA, 13 bp, Artificial Sequence
  Oligonucleotide for detection of SNP TSC0053949
tttttagagtaag

SEQ ID NO: 221644 - DNA, 13 bp, Artificial Sequence
  Oligonucleotide for detection of SNP TSC0053949
cttactctaaaaa

SEQ ID NO: 221645 - DNA, 13 bp, Artificial Sequence
  Oligonucleotide for detection of SNP TSC0053951
aatatagaaaatt

SEQ ID NO: 221646 - DNA, 13 bp, Artificial Sequence
  Oligonucleotide for detection of SNP TSC0053951
aattttctatatt

SEQ ID NO: 221647 - DNA, 13 bp, Artificial Sequence
  Oligonucleotide for detection of SNP TSC0053951
agttttgtatgtt

SEQ ID NO: 221648 - DNA, 13 bp, Artificial Sequence
  Oligonucleotide for detection of SNP TSC0053951
aacatacaaaact

SEQ ID NO: 221649 - DNA, 13 bp, Artificial Sequence
  Oligonucleotide for detection of SNP TSC0053951
agttttttatgtt

SEQ ID NO: 221650 - DNA, 13 bp, Artificial Sequence
  Oligonucleotide for detection of SNP TSC0053951
aacataaaaaact

SEQ ID NO: 221651 - DNA, 13 bp, Artificial Sequence
  Oligonucleotide for detection of SNP TSC0053953
aattttatgtgtt

SEQ ID NO: 221652 - DNA, 13 bp, Artificial Sequence
  Oligonucleotide for detection of SNP TSC0053953
aacacataaaatt

SEQ ID NO: 221653 - DNA, 13 bp, Artificial Sequence
  Oligonucleotide for detection of SNP TSC0053953
aattttttgtgtt

SEQ ID NO: 221654 - DNA, 13 bp, Artificial Sequence
  Oligonucleotide for detection of SNP TSC0053953
aacacaaaaaatt

SEQ ID NO: 221655 - DNA, 13 bp, Artificial Sequence
  Oligonucleotide for detection of SNP TSC0053953
aatatatgggatt

SEQ ID NO: 221656 - DNA, 13 bp, Artificial Sequence
  Oligonucleotide for detection of SNP TSC0053953
aatcccatatatt

SEQ ID NO: 221657 - DNA, 13 bp, Artificial Sequence
  Oligonucleotide for detection of SNP TSC0053953
aatataagggatt

SEQ ID NO: 221658 - DNA, 13 bp, Artificial Sequence
  Oligonucleotide for detection of SNP TSC0053953
aatcccttatatt

SEQ ID NO: 221659 - DNA, 13 bp, Artificial Sequence
  Oligonucleotide for detection of SNP TSC0053954
tatagttttgata

SEQ ID NO: 221660 - DNA, 13 bp, Artificial Sequence
  Oligonucleotide for detection of SNP TSC0053954
tatcaaaactata

SEQ ID NO: 221661 - DNA, 13 bp, Artificial Sequence
  Oligonucleotide for detection of SNP TSC0053954
tatagtgttgata

SEQ ID NO: 221662 - DNA, 13 bp, Artificial Sequence
  Oligonucleotide for detection of SNP TSC0053954
tatcaacactata

SEQ ID NO: 221663 - DNA, 13 bp, Artificial Sequence
  Oligonucleotide for detection of SNP TSC0053954
tattaatattata

SEQ ID NO: 221664 - DNA, 13 bp, Artificial Sequence
  Oligonucleotide for detection of SNP TSC0053954
tataatattaata

SEQ ID NO: 221665 - DNA, 13 bp, Artificial Sequence
  Oligonucleotide for detection of SNP TSC0053955
aaattaataagaa

SEQ ID NO: 221666 - DNA, 13 bp, Artificial Sequence
  Oligonucleotide for detection of SNP TSC0053955
ttcttattaattt

SEQ ID NO: 221667 - DNA, 13 bp, Artificial Sequence
  Oligonucleotide for detection of SNP TSC0053955
aaattagtaagaa

SEQ ID NO: 221668 - DNA, 13 bp, Artificial Sequence
  Oligonucleotide for detection of SNP TSC0053955
ttcttactaattt

SEQ ID NO: 221669 - DNA, 13 bp, Artificial Sequence
  Oligonucleotide for detection of SNP TSC0053956
ttaaaaaatgttt

SEQ ID NO: 221670 - DNA, 13 bp, Artificial Sequence
  Oligonucleotide for detection of SNP TSC0053956
aaacattttttaa

SEQ ID NO: 221671 - DNA, 13 bp, Artificial Sequence
  Oligonucleotide for detection of SNP TSC0053956
ttaaaatatgttt

SEQ ID NO: 221672 - DNA, 13 bp, Artificial Sequence
  Oligonucleotide for detection of SNP TSC0053956
aaacatattttaa

SEQ ID NO: 221673 - DNA, 13 bp, Artificial Sequence
  Oligonucleotide for detection of SNP TSC0053956
aaatattttttga

SEQ ID NO: 221674 - DNA, 13 bp, Artificial Sequence
  Oligonucleotide for detection of SNP TSC0053956
tcaaaaaatattt

SEQ ID NO: 221675 - DNA, 13 bp, Artificial Sequence
  Oligonucleotide for detection of SNP TSC0053956
aaatatgttttga

SEQ ID NO: 221676 - DNA, 13 bp, Artificial Sequence
  Oligonucleotide for detection of SNP TSC0053956
tcaaaacatattt

SEQ ID NO: 221677 - DNA, 13 bp, Artificial Sequence
  Oligonucleotide for detection of SNP TSC0053957
tgatattgaggty

SEQ ID NO: 221678 - DNA, 13 bp, Artificial Sequence
  Oligonucleotide for detection of SNP TSC0053957
racctcaatatca

SEQ ID NO: 221679 - DNA, 13 bp, Artificial Sequence
  Oligonucleotide for detection of SNP TSC0053957
tgatatcgaggty

SEQ ID NO: 221680 - DNA, 13 bp, Artificial Sequence
  Oligonucleotide for detection of SNP TSC0053957
racctcgatatca

SEQ ID NO: 221681 - DNA, 13 bp, Artificial Sequence
  Oligonucleotide for detection of SNP TSC0053957
ggttttggtgtta

SEQ ID NO: 221682 - DNA, 13 bp, Artificial Sequence
  Oligonucleotide for detection of SNP TSC0053957
taacaccaaaacc

SEQ ID NO: 221683 - DNA, 13 bp, Artificial Sequence
  Oligonucleotide for detection of SNP TSC0053957
ggttttagtgtta

SEQ ID NO: 221684 - DNA, 13 bp, Artificial Sequence
  Oligonucleotide for detection of SNP TSC0053957
taacactaaaacc

SEQ ID NO: 221685 - DNA, 13 bp, Artificial Sequence
  Oligonucleotide for detection of SNP TSC0053957
ggtttcggtgtta

SEQ ID NO: 221686 - DNA, 13 bp, Artificial Sequence
  Oligonucleotide for detection of SNP TSC0053957
taacaccgaaacc

SEQ ID NO: 221687 - DNA, 13 bp, Artificial Sequence
  Oligonucleotide for detection of SNP TSC0053958
gaaaggatttttt

SEQ ID NO: 221688 - DNA, 13 bp, Artificial Sequence
  Oligonucleotide for detection of SNP TSC0053958
aaaaaatcctttc

SEQ ID NO: 221689 - DNA, 13 bp, Artificial Sequence
  Oligonucleotide for detection of SNP TSC0053958
gaaagggtttttt

SEQ ID NO: 221690 - DNA, 13 bp, Artificial Sequence
  Oligonucleotide for detection of SNP TSC0053958
aaaaaaccctttc

SEQ ID NO: 221691 - DNA, 13 bp, Artificial Sequence
  Oligonucleotide for detection of SNP TSC0053959
aagatatgtgtat

SEQ ID NO: 221692 - DNA, 13 bp, Artificial Sequence
  Oligonucleotide for detection of SNP TSC0053959
atacacatatctt

SEQ ID NO: 221693 - DNA, 13 bp, Artificial Sequence
  Oligonucleotide for detection of SNP TSC0053959
aagatacgtgtat

SEQ ID NO: 221694 - DNA, 13 bp, Artificial Sequence
  Oligonucleotide for detection of SNP TSC0053959
atacacgtatctt

SEQ ID NO: 221695 - DNA, 13 bp, Artificial Sequence
  Oligonucleotide for detection of SNP TSC0053959
atgtacgtatttt

SEQ ID NO: 221696 - DNA, 13 bp, Artificial Sequence
  Oligonucleotide for detection of SNP TSC0053959
aaaatacgtacat

SEQ ID NO: 221697 - DNA, 13 bp, Artificial Sequence
  Oligonucleotide for detection of SNP TSC0053960
aatttaataaatt

SEQ ID NO: 221698 - DNA, 13 bp, Artificial Sequence
  Oligonucleotide for detection of SNP TSC0053960
aatttattaaatt

SEQ ID NO: 221699 - DNA, 13 bp, Artificial Sequence
  Oligonucleotide for detection of SNP TSC0053960
aatttagtaaatt

SEQ ID NO: 221700 - DNA, 13 bp, Artificial Sequence
  Oligonucleotide for detection of SNP TSC0053960
aatttactaaatt

SEQ ID NO: 221701 - DNA, 13 bp, Artificial Sequence
  Oligonucleotide for detection of SNP TSC0053961
gttgtaggaatat

SEQ ID NO: 221702 - DNA, 13 bp, Artificial Sequence
  Oligonucleotide for detection of SNP TSC0053961
atattcctacaac

SEQ ID NO: 221703 - DNA, 13 bp, Artificial Sequence
  Oligonucleotide for detection of SNP TSC0053961
gttgtaagaatat

SEQ ID NO: 221704 - DNA, 13 bp, Artificial Sequence
  Oligonucleotide for detection of SNP TSC0053961
atattcttacaac

SEQ ID NO: 221705 - DNA, 13 bp, Artificial Sequence
  Oligonucleotide for detection of SNP TSC0053962
gaaattgggaggy

SEQ ID NO: 221706 - DNA, 13 bp, Artificial Sequence
  Oligonucleotide for detection of SNP TSC0053962
rcctcccaatttc

SEQ ID NO: 221707 - DNA, 13 bp, Artificial Sequence
  Oligonucleotide for detection of SNP TSC0053962
gaaattaggaggy

SEQ ID NO: 221708 - DNA, 13 bp, Artificial Sequence
  Oligonucleotide for detection of SNP TSC0053962
rcctcctaatttc

SEQ ID NO: 221709 - DNA, 13 bp, Artificial Sequence
  Oligonucleotide for detection of SNP TSC0053962
gaaatcgggaggy

SEQ ID NO: 221710 - DNA, 13 bp, Artificial Sequence
  Oligonucleotide for detection of SNP TSC0053962
rcctcccgatttc

SEQ ID NO: 221711 - DNA, 13 bp, Artificial Sequence
  Oligonucleotide for detection of SNP TSC0053963
atgaatattttgy

SEQ ID NO: 221712 - DNA, 13 bp, Artificial Sequence
  Oligonucleotide for detection of SNP TSC0053963
rcaaaatattcat

SEQ ID NO: 221713 - DNA, 13 bp, Artificial Sequence
  Oligonucleotide for detection of SNP TSC0053963
atgaattttttgy

SEQ ID NO: 221714 - DNA, 13 bp, Artificial Sequence
  Oligonucleotide for detection of SNP TSC0053963
rcaaaaaattcat

SEQ ID NO: 221715 - DNA, 13 bp, Artificial Sequence
  Oligonucleotide for detection of SNP TSC0053963
gtaggatatttat

SEQ ID NO: 221716 - DNA, 13 bp, Artificial Sequence
  Oligonucleotide for detection of SNP TSC0053963
ataaatatcctac

SEQ ID NO: 221717 - DNA, 13 bp, Artificial Sequence
  Oligonucleotide for detection of SNP TSC0053963
gtaggagatttat

SEQ ID NO: 221718 - DNA, 13 bp, Artificial Sequence
  Oligonucleotide for detection of SNP TSC0053963
ataaatctcctac

SEQ ID NO: 221719 - DNA, 13 bp, Artificial Sequence
  Oligonucleotide for detection of SNP TSC0053964
aagtattgtttty

SEQ ID NO: 221720 - DNA, 13 bp, Artificial Sequence
  Oligonucleotide for detection of SNP TSC0053964
raaaacaatactt

SEQ ID NO: 221721 - DNA, 13 bp, Artificial Sequence
  Oligonucleotide for detection of SNP TSC0053964
aagtatcgtttty

SEQ ID NO: 221722 - DNA, 13 bp, Artificial Sequence
  Oligonucleotide for detection of SNP TSC0053964
raaaacgatactt

SEQ ID NO: 221723 - DNA, 13 bp, Artificial Sequence
  Oligonucleotide for detection of SNP TSC0053964
gggagtggtattt

SEQ ID NO: 221724 - DNA, 13 bp, Artificial Sequence
  Oligonucleotide for detection of SNP TSC0053964
aaataccactccc

SEQ ID NO: 221725 - DNA, 13 bp, Artificial Sequence
  Oligonucleotide for detection of SNP TSC0053964
gggagtagtattt

SEQ ID NO: 221726 - DNA, 13 bp, Artificial Sequence
  Oligonucleotide for detection of SNP TSC0053964
aaatactactccc

SEQ ID NO: 221727 - DNA, 13 bp, Artificial Sequence
  Oligonucleotide for detection of SNP TSC0053964
gggagcggtattt

SEQ ID NO: 221728 - DNA, 13 bp, Artificial Sequence
  Oligonucleotide for detection of SNP TSC0053964
aaataccgctccc

SEQ ID NO: 221729 - DNA, 13 bp, Artificial Sequence
  Oligonucleotide for detection of SNP TSC0053965
gggggaataaagg

SEQ ID NO: 221730 - DNA, 13 bp, Artificial Sequence
  Oligonucleotide for detection of SNP TSC0053965
cctttattccccc

SEQ ID NO: 221731 - DNA, 13 bp, Artificial Sequence
  Oligonucleotide for detection of SNP TSC0053965
gggggattaaagg

SEQ ID NO: 221732 - DNA, 13 bp, Artificial Sequence
  Oligonucleotide for detection of SNP TSC0053965
cctttaatccccc

SEQ ID NO: 221733 - DNA, 13 bp, Artificial Sequence
  Oligonucleotide for detection of SNP TSC0007033
agttttatagtag

SEQ ID NO: 221734 - DNA, 13 bp, Artificial Sequence
  Oligonucleotide for detection of SNP TSC0007033
ctactataaaact

SEQ ID NO: 221735 - DNA, 13 bp, Artificial Sequence
  Oligonucleotide for detection of SNP TSC0007033
agttttttagtag

SEQ ID NO: 221736 - DNA, 13 bp, Artificial Sequence
  Oligonucleotide for detection of SNP TSC0007033
ctactaaaaaact

SEQ ID NO: 221737 - DNA, 13 bp, Artificial Sequence
  Oligonucleotide for detection of SNP TSC0007033
ttattataaagtt

SEQ ID NO: 221738 - DNA, 13 bp, Artificial Sequence
  Oligonucleotide for detection of SNP TSC0007033
aactttataataa

SEQ ID NO: 221739 - DNA, 13 bp, Artificial Sequence
  Oligonucleotide for detection of SNP TSC0007033
ttattagaaagtt

SEQ ID NO: 221740 - DNA, 13 bp, Artificial Sequence
  Oligonucleotide for detection of SNP TSC0007033
aactttctaataa

SEQ ID NO: 221741 - DNA, 13 bp, Artificial Sequence
  Oligonucleotide for detection of SNP TSC0053967
gtagtagaagtay

SEQ ID NO: 221742 - DNA, 13 bp, Artificial Sequence
  Oligonucleotide for detection of SNP TSC0053967
rtacttctactac

SEQ ID NO: 221743 - DNA, 13 bp, Artificial Sequence
  Oligonucleotide for detection of SNP TSC0053967
gtagtaaaagtay

SEQ ID NO: 221744 - DNA, 13 bp, Artificial Sequence
  Oligonucleotide for detection of SNP TSC0053967
rtacttttactac

SEQ ID NO: 221745 - DNA, 13 bp, Artificial Sequence
  Oligonucleotide for detection of SNP TSC0053969
aaaaaataaaagt

SEQ ID NO: 221746 - DNA, 13 bp, Artificial Sequence
  Oligonucleotide for detection of SNP TSC0053969
acttttatttttt

SEQ ID NO: 221747 - DNA, 13 bp, Artificial Sequence
  Oligonucleotide for detection of SNP TSC0053970
tttaggttatttt

SEQ ID NO: 221748 - DNA, 13 bp, Artificial Sequence
  Oligonucleotide for detection of SNP TSC0053970
aaaataacctaaa

SEQ ID NO: 221749 - DNA, 13 bp, Artificial Sequence
  Oligonucleotide for detection of SNP TSC0053970
tttagggtatttt

SEQ ID NO: 221750 - DNA, 13 bp, Artificial Sequence
  Oligonucleotide for detection of SNP TSC0053970
aaaataccctaaa

SEQ ID NO: 221751 - DNA, 13 bp, Artificial Sequence
  Oligonucleotide for detection of SNP TSC0053970
aagatagtttgaa

SEQ ID NO: 221752 - DNA, 13 bp, Artificial Sequence
  Oligonucleotide for detection of SNP TSC0053970
ttcaaactatctt

SEQ ID NO: 221753 - DNA, 13 bp, Artificial Sequence
  Oligonucleotide for detection of SNP TSC0053970
aagatattttgaa

SEQ ID NO: 221754 - DNA, 13 bp, Artificial Sequence
  Oligonucleotide for detection of SNP TSC0053970
ttcaaaatatctt

SEQ ID NO: 221755 - DNA, 13 bp, Artificial Sequence
  Oligonucleotide for detection of SNP TSC0053971
aaatagtagtaty

SEQ ID NO: 221756 - DNA, 13 bp, Artificial Sequence
  Oligonucleotide for detection of SNP TSC0053971
ratactactattt

SEQ ID NO: 221757 - DNA, 13 bp, Artificial Sequence
  Oligonucleotide for detection of SNP TSC0053971
aaataggagtaty

SEQ ID NO: 221758 - DNA, 13 bp, Artificial Sequence
  Oligonucleotide for detection of SNP TSC0053971
ratactcctattt

SEQ ID NO: 221759 - DNA, 13 bp, Artificial Sequence
  Oligonucleotide for detection of SNP TSC0053971
gatattgttgttt

SEQ ID NO: 221760 - DNA, 13 bp, Artificial Sequence
  Oligonucleotide for detection of SNP TSC0053971
aaacaacaatatc

SEQ ID NO: 221761 - DNA, 13 bp, Artificial Sequence
  Oligonucleotide for detection of SNP TSC0053971
gatatttttgttt

SEQ ID NO: 221762 - DNA, 13 bp, Artificial Sequence
  Oligonucleotide for detection of SNP TSC0053971
aaacaaaaatatc

SEQ ID NO: 221763 - DNA, 13 bp, Artificial Sequence
  Oligonucleotide for detection of SNP TSC0053973
taatttattatgg

SEQ ID NO: 221764 - DNA, 13 bp, Artificial Sequence
  Oligonucleotide for detection of SNP TSC0053973
ccataataaatta

SEQ ID NO: 221765 - DNA, 13 bp, Artificial Sequence
  Oligonucleotide for detection of SNP TSC0053973
taattttttatgg

SEQ ID NO: 221766 - DNA, 13 bp, Artificial Sequence
  Oligonucleotide for detection of SNP TSC0053973
ccataaaaaatta

SEQ ID NO: 221767 - DNA, 13 bp, Artificial Sequence
  Oligonucleotide for detection of SNP TSC0053973
ttatggtaaatta

SEQ ID NO: 221768 - DNA, 13 bp, Artificial Sequence
  Oligonucleotide for detection of SNP TSC0053973
taatttaccataa

SEQ ID NO: 221769 - DNA, 13 bp, Artificial Sequence
  Oligonucleotide for detection of SNP TSC0053973
ttatgggaaatta

SEQ ID NO: 221770 - DNA, 13 bp, Artificial Sequence
  Oligonucleotide for detection of SNP TSC0053973
taatttcccataa

SEQ ID NO: 221771 - DNA, 13 bp, Artificial Sequence
  Oligonucleotide for detection of SNP TSC0053979
tatatgtttttag

SEQ ID NO: 221772 - DNA, 13 bp, Artificial Sequence
  Oligonucleotide for detection of SNP TSC0053979
ctaaaaacatata

SEQ ID NO: 221773 - DNA, 13 bp, Artificial Sequence
  Oligonucleotide for detection of SNP TSC0053979
tatatggttttag

SEQ ID NO: 221774 - DNA, 13 bp, Artificial Sequence
  Oligonucleotide for detection of SNP TSC0053979
ctaaaaccatata

SEQ ID NO: 221775 - DNA, 13 bp, Artificial Sequence
  Oligonucleotide for detection of SNP TSC0053979
ttgaaaatatatg

SEQ ID NO: 221776 - DNA, 13 bp, Artificial Sequence
  Oligonucleotide for detection of SNP TSC0053979
catatattttcaa

SEQ ID NO: 221777 - DNA, 13 bp, Artificial Sequence
  Oligonucleotide for detection of SNP TSC0053979
ttgaaattatatg

SEQ ID NO: 221778 - DNA, 13 bp, Artificial Sequence
  Oligonucleotide for detection of SNP TSC0053979
catataatttcaa

SEQ ID NO: 221779 - DNA, 13 bp, Artificial Sequence
  Oligonucleotide for detection of SNP TSC0053980
tttatttggaagt

SEQ ID NO: 221780 - DNA, 13 bp, Artificial Sequence
  Oligonucleotide for detection of SNP TSC0053980
acttccaaataaa

SEQ ID NO: 221781 - DNA, 13 bp, Artificial Sequence
  Oligonucleotide for detection of SNP TSC0053980
tttattcggaagt

SEQ ID NO: 221782 - DNA, 13 bp, Artificial Sequence
  Oligonucleotide for detection of SNP TSC0053980
acttccgaataaa

SEQ ID NO: 221783 - DNA, 13 bp, Artificial Sequence
  Oligonucleotide for detection of SNP TSC0053980
atttttgggtgga

SEQ ID NO: 221784 - DNA, 13 bp, Artificial Sequence
  Oligonucleotide for detection of SNP TSC0053980
tccacccaaaaat

SEQ ID NO: 221785 - DNA, 13 bp, Artificial Sequence
  Oligonucleotide for detection of SNP TSC0053980
atttttaggtgga

SEQ ID NO: 221786 - DNA, 13 bp, Artificial Sequence
  Oligonucleotide for detection of SNP TSC0053980
tccacctaaaaat

SEQ ID NO: 221787 - DNA, 13 bp, Artificial Sequence
  Oligonucleotide for detection of SNP TSC0053980
attttcgggtgga

SEQ ID NO: 221788 - DNA, 13 bp, Artificial Sequence
  Oligonucleotide for detection of SNP TSC0053980
tccacccgaaaat

SEQ ID NO: 221789 - DNA, 13 bp, Artificial Sequence
  Oligonucleotide for detection of SNP TSC0007515
tagtttatgtgtt

SEQ ID NO: 221790 - DNA, 13 bp, Artificial Sequence
  Oligonucleotide for detection of SNP TSC0007515
aacacataaacta

SEQ ID NO: 221791 - DNA, 13 bp, Artificial Sequence
  Oligonucleotide for detection of SNP TSC0007515
tagtttgtgtgtt

SEQ ID NO: 221792 - DNA, 13 bp, Artificial Sequence
  Oligonucleotide for detection of SNP TSC0007515
aacacacaaacta

SEQ ID NO: 221793 - DNA, 13 bp, Artificial Sequence
  Oligonucleotide for detection of SNP TSC0007516
ggaaaatgaatgg

SEQ ID NO: 221794 - DNA, 13 bp, Artificial Sequence
  Oligonucleotide for detection of SNP TSC0007516
ccattcattttcc

SEQ ID NO: 221795 - DNA, 13 bp, Artificial Sequence
  Oligonucleotide for detection of SNP TSC0007516
ggaaaaggaatgg

SEQ ID NO: 221796 - DNA, 13 bp, Artificial Sequence
  Oligonucleotide for detection of SNP TSC0007516
ccattccttttcc

SEQ ID NO: 221797 - DNA, 13 bp, Artificial Sequence
  Oligonucleotide for detection of SNP TSC0053983
ggagagggttaty

SEQ ID NO: 221798 - DNA, 13 bp, Artificial Sequence
  Oligonucleotide for detection of SNP TSC0053983
rataaccctctcc

SEQ ID NO: 221799 - DNA, 13 bp, Artificial Sequence
  Oligonucleotide for detection of SNP TSC0053983
ggagagagttaty

SEQ ID NO: 221800 - DNA, 13 bp, Artificial Sequence
  Oligonucleotide for detection of SNP TSC0053983
rataactctctcc

SEQ ID NO: 221801 - DNA, 13 bp, Artificial Sequence
  Oligonucleotide for detection of SNP TSC0053984
agttttgtgaggt

SEQ ID NO: 221802 - DNA, 13 bp, Artificial Sequence
  Oligonucleotide for detection of SNP TSC0053984
acctcacaaaact

SEQ ID NO: 221803 - DNA, 13 bp, Artificial Sequence
  Oligonucleotide for detection of SNP TSC0053984
agttttatgaggt

SEQ ID NO: 221804 - DNA, 13 bp, Artificial Sequence
  Oligonucleotide for detection of SNP TSC0053984
acctcataaaact

SEQ ID NO: 221805 - DNA, 13 bp, Artificial Sequence
  Oligonucleotide for detection of SNP TSC0053984
agttttgcgaggt

SEQ ID NO: 221806 - DNA, 13 bp, Artificial Sequence
  Oligonucleotide for detection of SNP TSC0053984
acctcgcaaaact

SEQ ID NO: 221807 - DNA, 13 bp, Artificial Sequence
  Oligonucleotide for detection of SNP TSC0053984
agttttacgaggt

SEQ ID NO: 221808 - DNA, 13 bp, Artificial Sequence
  Oligonucleotide for detection of SNP TSC0053984
acctcgtaaaact

SEQ ID NO: 221809 - DNA, 13 bp, Artificial Sequence
  Oligonucleotide for detection of SNP TSC0006406
ggttatttattga

SEQ ID NO: 221810 - DNA, 13 bp, Artificial Sequence
  Oligonucleotide for detection of SNP TSC0006406
tcaataaataacc

SEQ ID NO: 221811 - DNA, 13 bp, Artificial Sequence
  Oligonucleotide for detection of SNP TSC0006406
ggttatgtattga

SEQ ID NO: 221812 - DNA, 13 bp, Artificial Sequence
  Oligonucleotide for detection of SNP TSC0006406
tcaatacataacc

SEQ ID NO: 221813 - DNA, 13 bp, Artificial Sequence
  Oligonucleotide for detection of SNP TSC0006406
ggttacgtattga

SEQ ID NO: 221814 - DNA, 13 bp, Artificial Sequence
  Oligonucleotide for detection of SNP TSC0006406
tcaatacgtaacc

SEQ ID NO: 221815 - DNA, 13 bp, Artificial Sequence
  Oligonucleotide for detection of SNP TSC0006406
ttagtgagtaaty

SEQ ID NO: 221816 - DNA, 13 bp, Artificial Sequence
  Oligonucleotide for detection of SNP TSC0006406
rattactcactaa

SEQ ID NO: 221817 - DNA, 13 bp, Artificial Sequence
  Oligonucleotide for detection of SNP TSC0006406
ttagtgtgtaaty

SEQ ID NO: 221818 - DNA, 13 bp, Artificial Sequence
  Oligonucleotide for detection of SNP TSC0006406
rattacacactaa

SEQ ID NO: 221819 - DNA, 13 bp, Artificial Sequence
  Oligonucleotide for detection of SNP TSC0006406
ttagtgcgtaaty

SEQ ID NO: 221820 - DNA, 13 bp, Artificial Sequence
  Oligonucleotide for detection of SNP TSC0006406
rattacgcactaa

SEQ ID NO: 221821 - DNA, 13 bp, Artificial Sequence
  Oligonucleotide for detection of SNP TSC0053988
tattgggtaggay

SEQ ID NO: 221822 - DNA, 13 bp, Artificial Sequence
  Oligonucleotide for detection of SNP TSC0053988
rtcctacccaata

SEQ ID NO: 221823 - DNA, 13 bp, Artificial Sequence
  Oligonucleotide for detection of SNP TSC0053988
tattggataggay

SEQ ID NO: 221824 - DNA, 13 bp, Artificial Sequence
  Oligonucleotide for detection of SNP TSC0053988
rtcctatccaata

SEQ ID NO: 221825 - DNA, 13 bp, Artificial Sequence
  Oligonucleotide for detection of SNP TSC0053989
tagtatagttttg

SEQ ID NO: 221826 - DNA, 13 bp, Artificial Sequence
  Oligonucleotide for detection of SNP TSC0053989
caaaactatacta

SEQ ID NO: 221827 - DNA, 13 bp, Artificial Sequence
  Oligonucleotide for detection of SNP TSC0053989
taaagttatatta

SEQ ID NO: 221828 - DNA, 13 bp, Artificial Sequence
  Oligonucleotide for detection of SNP TSC0053989
taatataacttta

SEQ ID NO: 221829 - DNA, 13 bp, Artificial Sequence
  Oligonucleotide for detection of SNP TSC0053989
taaagtaatatta

SEQ ID NO: 221830 - DNA, 13 bp, Artificial Sequence
  Oligonucleotide for detection of SNP TSC0053989
taatattacttta

SEQ ID NO: 221831 - DNA, 13 bp, Artificial Sequence
  Oligonucleotide for detection of SNP TSC0053990
agaaatagtattg

SEQ ID NO: 221832 - DNA, 13 bp, Artificial Sequence
  Oligonucleotide for detection of SNP TSC0053990
caatactatttct

SEQ ID NO: 221833 - DNA, 13 bp, Artificial Sequence
  Oligonucleotide for detection of SNP TSC0053990
agaaattgtattg

SEQ ID NO: 221834 - DNA, 13 bp, Artificial Sequence
  Oligonucleotide for detection of SNP TSC0053990
caatacaatttct

SEQ ID NO: 221835 - DNA, 13 bp, Artificial Sequence
  Oligonucleotide for detection of SNP TSC0053990
agaaatcgtattg

SEQ ID NO: 221836 - DNA, 13 bp, Artificial Sequence
  Oligonucleotide for detection of SNP TSC0053990
caatacgatttct

SEQ ID NO: 221837 - DNA, 13 bp, Artificial Sequence
  Oligonucleotide for detection of SNP TSC0053991
tttcgtttttttt

SEQ ID NO: 221838 - DNA, 13 bp, Artificial Sequence
  Oligonucleotide for detection of SNP TSC0053991
aaaaaaaacgaaa

SEQ ID NO: 221839 - DNA, 13 bp, Artificial Sequence
  Oligonucleotide for detection of SNP TSC0053991
agaagatatgaga

SEQ ID NO: 221840 - DNA, 13 bp, Artificial Sequence
  Oligonucleotide for detection of SNP TSC0053991
tctcatatcttct

SEQ ID NO: 221841 - DNA, 13 bp, Artificial Sequence
  Oligonucleotide for detection of SNP TSC0053991
agaagagatgaga

SEQ ID NO: 221842 - DNA, 13 bp, Artificial Sequence
  Oligonucleotide for detection of SNP TSC0053991
tctcatctcttct

SEQ ID NO: 221843 - DNA, 13 bp, Artificial Sequence
  Oligonucleotide for detection of SNP TSC0053991
agaagatacgaga

SEQ ID NO: 221844 - DNA, 13 bp, Artificial Sequence
  Oligonucleotide for detection of SNP TSC0053991
tctcgtatcttct

SEQ ID NO: 221845 - DNA, 13 bp, Artificial Sequence
  Oligonucleotide for detection of SNP TSC0053991
agaagagacgaga

SEQ ID NO: 221846 - DNA, 13 bp, Artificial Sequence
  Oligonucleotide for detection of SNP TSC0053991
tctcgtctcttct

SEQ ID NO: 221847 - DNA, 13 bp, Artificial Sequence
  Oligonucleotide for detection of SNP TSC0053992
taggagttgtagg

SEQ ID NO: 221848 - DNA, 13 bp, Artificial Sequence
  Oligonucleotide for detection of SNP TSC0053992
cctacaactccta

SEQ ID NO: 221849 - DNA, 13 bp, Artificial Sequence
  Oligonucleotide for detection of SNP TSC0053992
taggaggtgtagg

SEQ ID NO: 221850 - DNA, 13 bp, Artificial Sequence
  Oligonucleotide for detection of SNP TSC0053992
cctacacctccta

SEQ ID NO: 221851 - DNA, 13 bp, Artificial Sequence
  Oligonucleotide for detection of SNP TSC0053992
tttgtagtttttg

SEQ ID NO: 221852 - DNA, 13 bp, Artificial Sequence
  Oligonucleotide for detection of SNP TSC0053992
caaaaactacaaa

SEQ ID NO: 221853 - DNA, 13 bp, Artificial Sequence
  Oligonucleotide for detection of SNP TSC0053992
tttgtattttttg

SEQ ID NO: 221854 - DNA, 13 bp, Artificial Sequence
  Oligonucleotide for detection of SNP TSC0053992
caaaaaatacaaa

SEQ ID NO: 221855 - DNA, 13 bp, Artificial Sequence
  Oligonucleotide for detection of SNP TSC0053993
tggatggtgtaag

SEQ ID NO: 221856 - DNA, 13 bp, Artificial Sequence
  Oligonucleotide for detection of SNP TSC0053993
cttacaccatcca

SEQ ID NO: 221857 - DNA, 13 bp, Artificial Sequence
  Oligonucleotide for detection of SNP TSC0053993
tggatgatgtaag

SEQ ID NO: 221858 - DNA, 13 bp, Artificial Sequence
  Oligonucleotide for detection of SNP TSC0053993
cttacatcatcca

SEQ ID NO: 221859 - DNA, 13 bp, Artificial Sequence
  Oligonucleotide for detection of SNP TSC0053994
gttaaggttagty

SEQ ID NO: 221860 - DNA, 13 bp, Artificial Sequence
  Oligonucleotide for detection of SNP TSC0053994
ractaaccttaac

SEQ ID NO: 221861 - DNA, 13 bp, Artificial Sequence
  Oligonucleotide for detection of SNP TSC0053994
gttaagattagty

SEQ ID NO: 221862 - DNA, 13 bp, Artificial Sequence
  Oligonucleotide for detection of SNP TSC0053994
ractaatcttaac

SEQ ID NO: 221863 - DNA, 13 bp, Artificial Sequence
  Oligonucleotide for detection of SNP TSC0053997
tgttgttgttgta

SEQ ID NO: 221864 - DNA, 13 bp, Artificial Sequence
  Oligonucleotide for detection of SNP TSC0053997
tacaacaacaaca

SEQ ID NO: 221865 - DNA, 13 bp, Artificial Sequence
  Oligonucleotide for detection of SNP TSC0053997
tgtcgttgttgta

SEQ ID NO: 221866 - DNA, 13 bp, Artificial Sequence
  Oligonucleotide for detection of SNP TSC0053997
tacaacaacgaca

SEQ ID NO: 221867 - DNA, 13 bp, Artificial Sequence
  Oligonucleotide for detection of SNP TSC0053997
tgttgtcgttgta

SEQ ID NO: 221868 - DNA, 13 bp, Artificial Sequence
  Oligonucleotide for detection of SNP TSC0053997
tacaacgacaaca

SEQ ID NO: 221869 - DNA, 13 bp, Artificial Sequence
  Oligonucleotide for detection of SNP TSC0053997
tgttgttgtcgta

SEQ ID NO: 221870 - DNA, 13 bp, Artificial Sequence
  Oligonucleotide for detection of SNP TSC0053997
tacgacaacaaca

SEQ ID NO: 221871 - DNA, 13 bp, Artificial Sequence
  Oligonucleotide for detection of SNP TSC0053997
tgtcgttgtcgta

SEQ ID NO: 221872 - DNA, 13 bp, Artificial Sequence
  Oligonucleotide for detection of SNP TSC0053997
tacgacaacgaca

SEQ ID NO: 221873 - DNA, 13 bp, Artificial Sequence
  Oligonucleotide for detection of SNP TSC0053997
tgtcgtcgttgta

SEQ ID NO: 221874 - DNA, 13 bp, Artificial Sequence
  Oligonucleotide for detection of SNP TSC0053997
tacaacgacgaca

SEQ ID NO: 221875 - DNA, 13 bp, Artificial Sequence
  Oligonucleotide for detection of SNP TSC0053997
tgttgtcgtcgta

SEQ ID NO: 221876 - DNA, 13 bp, Artificial Sequence
  Oligonucleotide for detection of SNP TSC0053997
tacgacgacaaca

SEQ ID NO: 221877 - DNA, 13 bp, Artificial Sequence
  Oligonucleotide for detection of SNP TSC0053997
tgtcgtcgtcgta

SEQ ID NO: 221878 - DNA, 13 bp, Artificial Sequence
  Oligonucleotide for detection of SNP TSC0053997
tacgacgacgaca

SEQ ID NO: 221879 - DNA, 13 bp, Artificial Sequence
  Oligonucleotide for detection of SNP TSC0053997
tatgatggtgata

SEQ ID NO: 221880 - DNA, 13 bp, Artificial Sequence
  Oligonucleotide for detection of SNP TSC0053997
tatcaccatcata

SEQ ID NO: 221881 - DNA, 13 bp, Artificial Sequence
  Oligonucleotide for detection of SNP TSC0053997
tatgatagtgata

SEQ ID NO: 221882 - DNA, 13 bp, Artificial Sequence
  Oligonucleotide for detection of SNP TSC0053997
tatcactatcata

SEQ ID NO: 221883 - DNA, 13 bp, Artificial Sequence
  Oligonucleotide for detection of SNP TSC0053997
tacgatggtgata

SEQ ID NO: 221884 - DNA, 13 bp, Artificial Sequence
  Oligonucleotide for detection of SNP TSC0053997
tatcaccatcgta

SEQ ID NO: 221885 - DNA, 13 bp, Artificial Sequence
  Oligonucleotide for detection of SNP TSC0053997
tacgatagtgata

SEQ ID NO: 221886 - DNA, 13 bp, Artificial Sequence
  Oligonucleotide for detection of SNP TSC0053997
tatcactatcgta

SEQ ID NO: 221887 - DNA, 13 bp, Artificial Sequence
  Oligonucleotide for detection of SNP TSC0053997
tatgacggtgata

SEQ ID NO: 221888 - DNA, 13 bp, Artificial Sequence
  Oligonucleotide for detection of SNP TSC0053997
tatcaccgtcata

SEQ ID NO: 221889 - DNA, 13 bp, Artificial Sequence
  Oligonucleotide for detection of SNP TSC0053997
tatgatagcgata

SEQ ID NO: 221890 - DNA, 13 bp, Artificial Sequence
  Oligonucleotide for detection of SNP TSC0053997
tatcgctatcata

SEQ ID NO: 221891 - DNA, 13 bp, Artificial Sequence
  Oligonucleotide for detection of SNP TSC0053997
tatgatggcgata

SEQ ID NO: 221892 - DNA, 13 bp, Artificial Sequence
  Oligonucleotide for detection of SNP TSC0053997
tatcgccatcata

SEQ ID NO: 221893 - DNA, 13 bp, Artificial Sequence
  Oligonucleotide for detection of SNP TSC0053997
tacgatagcgata

SEQ ID NO: 221894 - DNA, 13 bp, Artificial Sequence
  Oligonucleotide for detection of SNP TSC0053997
tatcgctatcgta

SEQ ID NO: 221895 - DNA, 13 bp, Artificial Sequence
  Oligonucleotide for detection of SNP TSC0053997
tacgacggtgata

SEQ ID NO: 221896 - DNA, 13 bp, Artificial Sequence
  Oligonucleotide for detection of SNP TSC0053997
tatcaccgtcgta

SEQ ID NO: 221897 - DNA, 13 bp, Artificial Sequence
  Oligonucleotide for detection of SNP TSC0053997
tacgatggcgata

SEQ ID NO: 221898 - DNA, 13 bp, Artificial Sequence
  Oligonucleotide for detection of SNP TSC0053997
tatcgccatcgta

SEQ ID NO: 221899 - DNA, 13 bp, Artificial Sequence
  Oligonucleotide for detection of SNP TSC0053997
tatgacggcgata

SEQ ID NO: 221900 - DNA, 13 bp, Artificial Sequence
  Oligonucleotide for detection of SNP TSC0053997
tatcgccgtcata

SEQ ID NO: 221901 - DNA, 13 bp, Artificial Sequence
  Oligonucleotide for detection of SNP TSC0053997
tacgacggcgata

SEQ ID NO: 221902 - DNA, 13 bp, Artificial Sequence
  Oligonucleotide for detection of SNP TSC0053997
tatcgccgtcgta

SEQ ID NO: 221903 - DNA, 13 bp, Artificial Sequence
  Oligonucleotide for detection of SNP TSC0053999
tgattttagttgt

SEQ ID NO: 221904 - DNA, 13 bp, Artificial Sequence
  Oligonucleotide for detection of SNP TSC0053999
acaactaaaatca

SEQ ID NO: 221905 - DNA, 13 bp, Artificial Sequence
  Oligonucleotide for detection of SNP TSC0053999
tgatttgagttgt

SEQ ID NO: 221906 - DNA, 13 bp, Artificial Sequence
  Oligonucleotide for detection of SNP TSC0053999
acaactcaaatca

SEQ ID NO: 221907 - DNA, 13 bp, Artificial Sequence
  Oligonucleotide for detection of SNP TSC0053999
ataattaaggtta

SEQ ID NO: 221908 - DNA, 13 bp, Artificial Sequence
  Oligonucleotide for detection of SNP TSC0053999
taaccttaattat

SEQ ID NO: 221909 - DNA, 13 bp, Artificial Sequence
  Oligonucleotide for detection of SNP TSC0053999
ataatttaggtta

SEQ ID NO: 221910 - DNA, 13 bp, Artificial Sequence
  Oligonucleotide for detection of SNP TSC0053999
taacctaaattat

SEQ ID NO: 221911 - DNA, 13 bp, Artificial Sequence
  Oligonucleotide for detection of SNP TSC0054000
ttgattgtgataa

SEQ ID NO: 221912 - DNA, 13 bp, Artificial Sequence
  Oligonucleotide for detection of SNP TSC0054000
ttatcacaatcaa

SEQ ID NO: 221913 - DNA, 13 bp, Artificial Sequence
  Oligonucleotide for detection of SNP TSC0054000
ttgattatgataa

SEQ ID NO: 221914 - DNA, 13 bp, Artificial Sequence
  Oligonucleotide for detection of SNP TSC0054000
ttatcataatcaa

SEQ ID NO: 221915 - DNA, 13 bp, Artificial Sequence
  Oligonucleotide for detection of SNP TSC0054000
tcgattgtgataa

SEQ ID NO: 221916 - DNA, 13 bp, Artificial Sequence
  Oligonucleotide for detection of SNP TSC0054000
ttatcacaatcga

SEQ ID NO: 221917 - DNA, 13 bp, Artificial Sequence
  Oligonucleotide for detection of SNP TSC0054000
tcgattatgataa

SEQ ID NO: 221918 - DNA, 13 bp, Artificial Sequence
  Oligonucleotide for detection of SNP TSC0054000
ttatcataatcga

SEQ ID NO: 221919 - DNA, 13 bp, Artificial Sequence
  Oligonucleotide for detection of SNP TSC0054001
atttggagtttga

SEQ ID NO: 221920 - DNA, 13 bp, Artificial Sequence
  Oligonucleotide for detection of SNP TSC0054001
tcaaactccaaat

SEQ ID NO: 221921 - DNA, 13 bp, Artificial Sequence
  Oligonucleotide for detection of SNP TSC0054001
atttggggtttga

SEQ ID NO: 221922 - DNA, 13 bp, Artificial Sequence
  Oligonucleotide for detection of SNP TSC0054001
tcaaaccccaaat

SEQ ID NO: 221923 - DNA, 13 bp, Artificial Sequence
  Oligonucleotide for detection of SNP TSC0054002
tttggtggtaggt

SEQ ID NO: 221924 - DNA, 13 bp, Artificial Sequence
  Oligonucleotide for detection of SNP TSC0054002
acctaccaccaaa

SEQ ID NO: 221925 - DNA, 13 bp, Artificial Sequence
  Oligonucleotide for detection of SNP TSC0054002
tttggtagtaggt

SEQ ID NO: 221926 - DNA, 13 bp, Artificial Sequence
  Oligonucleotide for detection of SNP TSC0054002
acctactaccaaa

SEQ ID NO: 221927 - DNA, 13 bp, Artificial Sequence
  Oligonucleotide for detection of SNP TSC0054003
attttgatagtay

SEQ ID NO: 221928 - DNA, 13 bp, Artificial Sequence
  Oligonucleotide for detection of SNP TSC0054003
rtactatcaaaat

SEQ ID NO: 221929 - DNA, 13 bp, Artificial Sequence
  Oligonucleotide for detection of SNP TSC0054003
attttggtagtay

SEQ ID NO: 221930 - DNA, 13 bp, Artificial Sequence
  Oligonucleotide for detection of SNP TSC0054003
rtactaccaaaat

SEQ ID NO: 221931 - DNA, 13 bp, Artificial Sequence
  Oligonucleotide for detection of SNP TSC0054004
taaattaaaaagt

SEQ ID NO: 221932 - DNA, 13 bp, Artificial Sequence
  Oligonucleotide for detection of SNP TSC0054004
actttttaattta

SEQ ID NO: 221933 - DNA, 13 bp, Artificial Sequence
  Oligonucleotide for detection of SNP TSC0054004
taaatttaaaagt

SEQ ID NO: 221934 - DNA, 13 bp, Artificial Sequence
  Oligonucleotide for detection of SNP TSC0054004
acttttaaattta

SEQ ID NO: 221935 - DNA, 13 bp, Artificial Sequence
  Oligonucleotide for detection of SNP TSC0054004
attttttaatttg

SEQ ID NO: 221936 - DNA, 13 bp, Artificial Sequence
  Oligonucleotide for detection of SNP TSC0054004
caaattaaaaaat

SEQ ID NO: 221937 - DNA, 13 bp, Artificial Sequence
  Oligonucleotide for detection of SNP TSC0054004
atttttgaatttg

SEQ ID NO: 221938 - DNA, 13 bp, Artificial Sequence
  Oligonucleotide for detection of SNP TSC0054004
caaattcaaaaat

SEQ ID NO: 221939 - DNA, 13 bp, Artificial Sequence
  Oligonucleotide for detection of SNP TSC0054007
tagtagtgtgaga

SEQ ID NO: 221940 - DNA, 13 bp, Artificial Sequence
  Oligonucleotide for detection of SNP TSC0054007
tctcacactacta

SEQ ID NO: 221941 - DNA, 13 bp, Artificial Sequence
  Oligonucleotide for detection of SNP TSC0054007
tagtagagtgaga

SEQ ID NO: 221942 - DNA, 13 bp, Artificial Sequence
  Oligonucleotide for detection of SNP TSC0054007
tctcactctacta

SEQ ID NO: 221943 - DNA, 13 bp, Artificial Sequence
  Oligonucleotide for detection of SNP TSC0054008
taagaatgaaata

SEQ ID NO: 221944 - DNA, 13 bp, Artificial Sequence
  Oligonucleotide for detection of SNP TSC0054008
tatttcattctta

SEQ ID NO: 221945 - DNA, 13 bp, Artificial Sequence
  Oligonucleotide for detection of SNP TSC0054008
taagaacgaaata

SEQ ID NO: 221946 - DNA, 13 bp, Artificial Sequence
  Oligonucleotide for detection of SNP TSC0054008
tatttcgttctta

SEQ ID NO: 221947 - DNA, 13 bp, Artificial Sequence
  Oligonucleotide for detection of SNP TSC0054010
tgtgtgtagaata

SEQ ID NO: 221948 - DNA, 13 bp, Artificial Sequence
  Oligonucleotide for detection of SNP TSC0054010
tattctacacaca

SEQ ID NO: 221949 - DNA, 13 bp, Artificial Sequence
  Oligonucleotide for detection of SNP TSC0054010
tgtgtggagaata

SEQ ID NO: 221950 - DNA, 13 bp, Artificial Sequence
  Oligonucleotide for detection of SNP TSC0054010
tattctccacaca

SEQ ID NO: 221951 - DNA, 13 bp, Artificial Sequence
  Oligonucleotide for detection of SNP TSC0054011
ttagttttttaat

SEQ ID NO: 221952 - DNA, 13 bp, Artificial Sequence
  Oligonucleotide for detection of SNP TSC0054011
attaaaaaactaa

SEQ ID NO: 221953 - DNA, 13 bp, Artificial Sequence
  Oligonucleotide for detection of SNP TSC0054011
ttagttgtttaat

SEQ ID NO: 221954 - DNA, 13 bp, Artificial Sequence
  Oligonucleotide for detection of SNP TSC0054011
attaaacaactaa

SEQ ID NO: 221955 - DNA, 13 bp, Artificial Sequence
  Oligonucleotide for detection of SNP TSC0054011
ttagtcgtttaat

SEQ ID NO: 221956 - DNA, 13 bp, Artificial Sequence
  Oligonucleotide for detection of SNP TSC0054011
attaaacgactaa

SEQ ID NO: 221957 - DNA, 13 bp, Artificial Sequence
  Oligonucleotide for detection of SNP TSC0054011
attagaagattga

SEQ ID NO: 221958 - DNA, 13 bp, Artificial Sequence
  Oligonucleotide for detection of SNP TSC0054011
tcaatcttctaat

SEQ ID NO: 221959 - DNA, 13 bp, Artificial Sequence
  Oligonucleotide for detection of SNP TSC0054011
attagatgattga

SEQ ID NO: 221960 - DNA, 13 bp, Artificial Sequence
  Oligonucleotide for detection of SNP TSC0054011
tcaatcatctaat

SEQ ID NO: 221961 - DNA, 13 bp, Artificial Sequence
  Oligonucleotide for detection of SNP TSC0054011
attagacgattga

SEQ ID NO: 221962 - DNA, 13 bp, Artificial Sequence
  Oligonucleotide for detection of SNP TSC0054011
tcaatcgtctaat

SEQ ID NO: 221963 - DNA, 13 bp, Artificial Sequence
  Oligonucleotide for detection of SNP TSC0054012
tgagtggtttatt

SEQ ID NO: 221964 - DNA, 13 bp, Artificial Sequence
  Oligonucleotide for detection of SNP TSC0054012
aataaaccactca

SEQ ID NO: 221965 - DNA, 13 bp, Artificial Sequence
  Oligonucleotide for detection of SNP TSC0054012
tgagtgatttatt

SEQ ID NO: 221966 - DNA, 13 bp, Artificial Sequence
  Oligonucleotide for detection of SNP TSC0054012
aataaatcactca

SEQ ID NO: 221967 - DNA, 13 bp, Artificial Sequence
  Oligonucleotide for detection of SNP TSC0054013
ttttaaaggatta

SEQ ID NO: 221968 - DNA, 13 bp, Artificial Sequence
  Oligonucleotide for detection of SNP TSC0054013
taatcctttaaaa

SEQ ID NO: 221969 - DNA, 13 bp, Artificial Sequence
  Oligonucleotide for detection of SNP TSC0054013
ttttaagggatta

SEQ ID NO: 221970 - DNA, 13 bp, Artificial Sequence
  Oligonucleotide for detection of SNP TSC0054013
taatcccttaaaa

SEQ ID NO: 221971 - DNA, 13 bp, Artificial Sequence
  Oligonucleotide for detection of SNP TSC0054015
gtttagtatatta

SEQ ID NO: 221972 - DNA, 13 bp, Artificial Sequence
  Oligonucleotide for detection of SNP TSC0054015
taatatactaaac

SEQ ID NO: 221973 - DNA, 13 bp, Artificial Sequence
  Oligonucleotide for detection of SNP TSC0054015
gtttaggatatta

SEQ ID NO: 221974 - DNA, 13 bp, Artificial Sequence
  Oligonucleotide for detection of SNP TSC0054015
taatatcctaaac

SEQ ID NO: 221975 - DNA, 13 bp, Artificial Sequence
  Oligonucleotide for detection of SNP TSC0054015
tgatgtattggay

SEQ ID NO: 221976 - DNA, 13 bp, Artificial Sequence
  Oligonucleotide for detection of SNP TSC0054015
rtccaatacatca

SEQ ID NO: 221977 - DNA, 13 bp, Artificial Sequence
  Oligonucleotide for detection of SNP TSC0054015
tgatgttttggay

SEQ ID NO: 221978 - DNA, 13 bp, Artificial Sequence
  Oligonucleotide for detection of SNP TSC0054015
rtccaaaacatca

SEQ ID NO: 221979 - DNA, 13 bp, Artificial Sequence
  Oligonucleotide for detection of SNP TSC0054017
tatataaatggty

SEQ ID NO: 221980 - DNA, 13 bp, Artificial Sequence
  Oligonucleotide for detection of SNP TSC0054017
raccatttatata

SEQ ID NO: 221981 - DNA, 13 bp, Artificial Sequence
  Oligonucleotide for detection of SNP TSC0054017
tatatatatggty

SEQ ID NO: 221982 - DNA, 13 bp, Artificial Sequence
  Oligonucleotide for detection of SNP TSC0054017
raccatatatata

SEQ ID NO: 221983 - DNA, 13 bp, Artificial Sequence
  Oligonucleotide for detection of SNP TSC0054017
ggttatttgtata

SEQ ID NO: 221984 - DNA, 13 bp, Artificial Sequence
  Oligonucleotide for detection of SNP TSC0054017
tatacaaataacc

SEQ ID NO: 221985 - DNA, 13 bp, Artificial Sequence
  Oligonucleotide for detection of SNP TSC0054017
ggttatgtgtata

SEQ ID NO: 221986 - DNA, 13 bp, Artificial Sequence
  Oligonucleotide for detection of SNP TSC0054017
tatacacataacc

SEQ ID NO: 221987 - DNA, 13 bp, Artificial Sequence
  Oligonucleotide for detection of SNP TSC0054018
tttaagggattaa

SEQ ID NO: 221988 - DNA, 13 bp, Artificial Sequence
  Oligonucleotide for detection of SNP TSC0054018
ttaatcccttaaa

SEQ ID NO: 221989 - DNA, 13 bp, Artificial Sequence
  Oligonucleotide for detection of SNP TSC0054018
tttaagagattaa

SEQ ID NO: 221990 - DNA, 13 bp, Artificial Sequence
  Oligonucleotide for detection of SNP TSC0054018
ttaatctcttaaa

SEQ ID NO: 221991 - DNA, 13 bp, Artificial Sequence
  Oligonucleotide for detection of SNP TSC0054021
tggaagaagggty

SEQ ID NO: 221992 - DNA, 13 bp, Artificial Sequence
  Oligonucleotide for detection of SNP TSC0054021
racccttcttcca

SEQ ID NO: 221993 - DNA, 13 bp, Artificial Sequence
  Oligonucleotide for detection of SNP TSC0054021
tggaagtagggty

SEQ ID NO: 221994 - DNA, 13 bp, Artificial Sequence
  Oligonucleotide for detection of SNP TSC0054021
raccctacttcca

SEQ ID NO: 221995 - DNA, 13 bp, Artificial Sequence
  Oligonucleotide for detection of SNP TSC0008220
taataagaataaa

SEQ ID NO: 221996 - DNA, 13 bp, Artificial Sequence
  Oligonucleotide for detection of SNP TSC0008220
tttattcttatta

SEQ ID NO: 221997 - DNA, 13 bp, Artificial Sequence
  Oligonucleotide for detection of SNP TSC0054024
gtgtaagttatta

SEQ ID NO: 221998 - DNA, 13 bp, Artificial Sequence
  Oligonucleotide for detection of SNP TSC0054024
taataacttacac

SEQ ID NO: 221999 - DNA, 13 bp, Artificial Sequence
  Oligonucleotide for detection of SNP TSC0054024
gtgtaaattatta

SEQ ID NO: 222000 - DNA, 13 bp, Artificial Sequence
  Oligonucleotide for detection of SNP TSC0054024
taataatttacac

SEQ ID NO: 222001 - DNA, 13 bp, Artificial Sequence
  Oligonucleotide for detection of SNP TSC0054027
atttgtattatta

SEQ ID NO: 222002 - DNA, 13 bp, Artificial Sequence
  Oligonucleotide for detection of SNP TSC0054027
taataatacaaat

SEQ ID NO: 222003 - DNA, 13 bp, Artificial Sequence
  Oligonucleotide for detection of SNP TSC0054027
atttgtgttatta

SEQ ID NO: 222004 - DNA, 13 bp, Artificial Sequence
  Oligonucleotide for detection of SNP TSC0054027
taataacacaaat

SEQ ID NO: 222005 - DNA, 13 bp, Artificial Sequence
  Oligonucleotide for detection of SNP TSC0054027
atttgcgttatta

SEQ ID NO: 222006 - DNA, 13 bp, Artificial Sequence
  Oligonucleotide for detection of SNP TSC0054027
taataacgcaaat

SEQ ID NO: 222007 - DNA, 13 bp, Artificial Sequence
  Oligonucleotide for detection of SNP TSC0054027
taataacgtaaat

SEQ ID NO: 222008 - DNA, 13 bp, Artificial Sequence
  Oligonucleotide for detection of SNP TSC0054027
atttacgttatta

SEQ ID NO: 222009 - DNA, 13 bp, Artificial Sequence
  Oligonucleotide for detection of SNP TSC0054033
aatttgatattgt

SEQ ID NO: 222010 - DNA, 13 bp, Artificial Sequence
  Oligonucleotide for detection of SNP TSC0054033
acaatatcaaatt

SEQ ID NO: 222011 - DNA, 13 bp, Artificial Sequence
  Oligonucleotide for detection of SNP TSC0054033
aatttgttattgt

SEQ ID NO: 222012 - DNA, 13 bp, Artificial Sequence
  Oligonucleotide for detection of SNP TSC0054033
acaataacaaatt

SEQ ID NO: 222013 - DNA, 13 bp, Artificial Sequence
  Oligonucleotide for detection of SNP TSC0054033
ataatgttaagtt

SEQ ID NO: 222014 - DNA, 13 bp, Artificial Sequence
  Oligonucleotide for detection of SNP TSC0054033
aacttaacattat

SEQ ID NO: 222015 - DNA, 13 bp, Artificial Sequence
  Oligonucleotide for detection of SNP TSC0054033
ataatggtaagtt

SEQ ID NO: 222016 - DNA, 13 bp, Artificial Sequence
  Oligonucleotide for detection of SNP TSC0054033
aacttaccattat

SEQ ID NO: 222017 - DNA, 13 bp, Artificial Sequence
  Oligonucleotide for detection of SNP TSC0054034
gaaaagagtgttt

SEQ ID NO: 222018 - DNA, 13 bp, Artificial Sequence
  Oligonucleotide for detection of SNP TSC0054034
aaacactcttttc

SEQ ID NO: 222019 - DNA, 13 bp, Artificial Sequence
  Oligonucleotide for detection of SNP TSC0054034
gaaaagggtgttt

SEQ ID NO: 222020 - DNA, 13 bp, Artificial Sequence
  Oligonucleotide for detection of SNP TSC0054034
aaacacccttttc

SEQ ID NO: 222021 - DNA, 13 bp, Artificial Sequence
  Oligonucleotide for detection of SNP TSC0008669
ttttataatggtt

SEQ ID NO: 222022 - DNA, 13 bp, Artificial Sequence
  Oligonucleotide for detection of SNP TSC0008669
aaccattataaaa

SEQ ID NO: 222023 - DNA, 13 bp, Artificial Sequence
  Oligonucleotide for detection of SNP TSC0008669
ttttatgatggtt

SEQ ID NO: 222024 - DNA, 13 bp, Artificial Sequence
  Oligonucleotide for detection of SNP TSC0008669
aaccatcataaaa

SEQ ID NO: 222025 - DNA, 13 bp, Artificial Sequence
  Oligonucleotide for detection of SNP TSC0008669
ttttacgatggtt

SEQ ID NO: 222026 - DNA, 13 bp, Artificial Sequence
  Oligonucleotide for detection of SNP TSC0008669
aaccatcgtaaaa

SEQ ID NO: 222027 - DNA, 13 bp, Artificial Sequence
  Oligonucleotide for detection of SNP TSC0008669
agttattgtaaga

SEQ ID NO: 222028 - DNA, 13 bp, Artificial Sequence
  Oligonucleotide for detection of SNP TSC0008669
tcttacaataact

SEQ ID NO: 222029 - DNA, 13 bp, Artificial Sequence
  Oligonucleotide for detection of SNP TSC0008669
agttatcgtaaga

SEQ ID NO: 222030 - DNA, 13 bp, Artificial Sequence
  Oligonucleotide for detection of SNP TSC0008669
tcttacgataact

SEQ ID NO: 222031 - DNA, 13 bp, Artificial Sequence
  Oligonucleotide for detection of SNP TSC0054035
agagttggggtga

SEQ ID NO: 222032 - DNA, 13 bp, Artificial Sequence
  Oligonucleotide for detection of SNP TSC0054035
tcaccccaactct

SEQ ID NO: 222033 - DNA, 13 bp, Artificial Sequence
  Oligonucleotide for detection of SNP TSC0054035
agagttagggtga

SEQ ID NO: 222034 - DNA, 13 bp, Artificial Sequence
  Oligonucleotide for detection of SNP TSC0054035
tcaccctaactct

SEQ ID NO: 222035 - DNA, 13 bp, Artificial Sequence
  Oligonucleotide for detection of SNP TSC0054036
tgggtagttagag

SEQ ID NO: 222036 - DNA, 13 bp, Artificial Sequence
  Oligonucleotide for detection of SNP TSC0054036
ctctaactaccca

SEQ ID NO: 222037 - DNA, 13 bp, Artificial Sequence
  Oligonucleotide for detection of SNP TSC0054036
tgggtatttagag

SEQ ID NO: 222038 - DNA, 13 bp, Artificial Sequence
  Oligonucleotide for detection of SNP TSC0054036
ctctaaataccca

SEQ ID NO: 222039 - DNA, 13 bp, Artificial Sequence
  Oligonucleotide for detection of SNP TSC0054037
ttgtttagttggt

SEQ ID NO: 222040 - DNA, 13 bp, Artificial Sequence
  Oligonucleotide for detection of SNP TSC0054037
accaactaaacaa

SEQ ID NO: 222041 - DNA, 13 bp, Artificial Sequence
  Oligonucleotide for detection of SNP TSC0054037
ttgtttggttggt

SEQ ID NO: 222042 - DNA, 13 bp, Artificial Sequence
  Oligonucleotide for detection of SNP TSC0054037
accaaccaaacaa

SEQ ID NO: 222043 - DNA, 13 bp, Artificial Sequence
  Oligonucleotide for detection of SNP TSC0054037
ttgttcggttggt

SEQ ID NO: 222044 - DNA, 13 bp, Artificial Sequence
  Oligonucleotide for detection of SNP TSC0054037
accaaccgaacaa

SEQ ID NO: 222045 - DNA, 13 bp, Artificial Sequence
  Oligonucleotide for detection of SNP TSC0054037
attaattgaataa

SEQ ID NO: 222046 - DNA, 13 bp, Artificial Sequence
  Oligonucleotide for detection of SNP TSC0054037
ttattcaattaat

SEQ ID NO: 222047 - DNA, 13 bp, Artificial Sequence
  Oligonucleotide for detection of SNP TSC0054037
attaatcgaataa

SEQ ID NO: 222048 - DNA, 13 bp, Artificial Sequence
  Oligonucleotide for detection of SNP TSC0054037
ttattcgattaat

SEQ ID NO: 222049 - DNA, 13 bp, Artificial Sequence
  Oligonucleotide for detection of SNP TSC0054038
aaatatgtttaaa

SEQ ID NO: 222050 - DNA, 13 bp, Artificial Sequence
  Oligonucleotide for detection of SNP TSC0054038
tttaaacatattt

SEQ ID NO: 222051 - DNA, 13 bp, Artificial Sequence
  Oligonucleotide for detection of SNP TSC0054039
ggtgtgtgaggat

SEQ ID NO: 222052 - DNA, 13 bp, Artificial Sequence
  Oligonucleotide for detection of SNP TSC0054039
atcctcacacacc

SEQ ID NO: 222053 - DNA, 13 bp, Artificial Sequence
  Oligonucleotide for detection of SNP TSC0054039
ggtgtgggaggat

SEQ ID NO: 222054 - DNA, 13 bp, Artificial Sequence
  Oligonucleotide for detection of SNP TSC0054039
atcctcccacacc

SEQ ID NO: 222055 - DNA, 13 bp, Artificial Sequence
  Oligonucleotide for detection of SNP TSC0054039
ggtgtgcgaggat

SEQ ID NO: 222056 - DNA, 13 bp, Artificial Sequence
  Oligonucleotide for detection of SNP TSC0054039
atcctcgcacacc

SEQ ID NO: 222057 - DNA, 13 bp, Artificial Sequence
  Oligonucleotide for detection of SNP TSC0054039
attttcgtataty

SEQ ID NO: 222058 - DNA, 13 bp, Artificial Sequence
  Oligonucleotide for detection of SNP TSC0054039
ratatacgaaaat

SEQ ID NO: 222059 - DNA, 13 bp, Artificial Sequence
  Oligonucleotide for detection of SNP TSC0000133
taatatggtttgg

SEQ ID NO: 222060 - DNA, 13 bp, Artificial Sequence
  Oligonucleotide for detection of SNP TSC0000133
ccaaaccatatta

SEQ ID NO: 222061 - DNA, 13 bp, Artificial Sequence
  Oligonucleotide for detection of SNP TSC0000133
taatatagtttgg

SEQ ID NO: 222062 - DNA, 13 bp, Artificial Sequence
  Oligonucleotide for detection of SNP TSC0000133
ccaaactatatta

SEQ ID NO: 222063 - DNA, 13 bp, Artificial Sequence
  Oligonucleotide for detection of SNP TSC0054041
taaattataaaty

SEQ ID NO: 222064 - DNA, 13 bp, Artificial Sequence
  Oligonucleotide for detection of SNP TSC0054041
ratttataattta

SEQ ID NO: 222065 - DNA, 13 bp, Artificial Sequence
  Oligonucleotide for detection of SNP TSC0054041
taaattgtaaaty

SEQ ID NO: 222066 - DNA, 13 bp, Artificial Sequence
  Oligonucleotide for detection of SNP TSC0054041
ratttacaattta

SEQ ID NO: 222067 - DNA, 13 bp, Artificial Sequence
  Oligonucleotide for detection of SNP TSC0054041
taaatcgtaaaty

SEQ ID NO: 222068 - DNA, 13 bp, Artificial Sequence
  Oligonucleotide for detection of SNP TSC0054041
ratttacgattta

SEQ ID NO: 222069 - DNA, 13 bp, Artificial Sequence
  Oligonucleotide for detection of SNP TSC0054041
ggtttatgatttg

SEQ ID NO: 222070 - DNA, 13 bp, Artificial Sequence
  Oligonucleotide for detection of SNP TSC0054041
caaatcataaacc

SEQ ID NO: 222071 - DNA, 13 bp, Artificial Sequence
  Oligonucleotide for detection of SNP TSC0054041
ggtttacgatttg

SEQ ID NO: 222072 - DNA, 13 bp, Artificial Sequence
  Oligonucleotide for detection of SNP TSC0054041
caaatcgtaaacc

SEQ ID NO: 222073 - DNA, 13 bp, Artificial Sequence
  Oligonucleotide for detection of SNP TSC0054042
tatgttaaggatt

SEQ ID NO: 222074 - DNA, 13 bp, Artificial Sequence
  Oligonucleotide for detection of SNP TSC0054042
aatccttaacata

SEQ ID NO: 222075 - DNA, 13 bp, Artificial Sequence
  Oligonucleotide for detection of SNP TSC0054042
tatgtttaggatt

SEQ ID NO: 222076 - DNA, 13 bp, Artificial Sequence
  Oligonucleotide for detection of SNP TSC0054042
aatcctaaacata

SEQ ID NO: 222077 - DNA, 13 bp, Artificial Sequence
  Oligonucleotide for detection of SNP TSC0054042
agtttttaatata

SEQ ID NO: 222078 - DNA, 13 bp, Artificial Sequence
  Oligonucleotide for detection of SNP TSC0054042
tatattaaaaact

SEQ ID NO: 222079 - DNA, 13 bp, Artificial Sequence
  Oligonucleotide for detection of SNP TSC0054042
agttttgaatata

SEQ ID NO: 222080 - DNA, 13 bp, Artificial Sequence
  Oligonucleotide for detection of SNP TSC0054042
tatattcaaaact

SEQ ID NO: 222081 - DNA, 13 bp, Artificial Sequence
  Oligonucleotide for detection of SNP TSC0054044
ttttttatatagg

SEQ ID NO: 222082 - DNA, 13 bp, Artificial Sequence
  Oligonucleotide for detection of SNP TSC0054044
cctatataaaaaa

SEQ ID NO: 222083 - DNA, 13 bp, Artificial Sequence
  Oligonucleotide for detection of SNP TSC0054044
ttttttgtatagg

SEQ ID NO: 222084 - DNA, 13 bp, Artificial Sequence
  Oligonucleotide for detection of SNP TSC0054044
cctatacaaaaaa

SEQ ID NO: 222085 - DNA, 13 bp, Artificial Sequence
  Oligonucleotide for detection of SNP TSC0054045
atttttttttggy

SEQ ID NO: 222086 - DNA, 13 bp, Artificial Sequence
  Oligonucleotide for detection of SNP TSC0054045
rccaaaaaaaaat

SEQ ID NO: 222087 - DNA, 13 bp, Artificial Sequence
  Oligonucleotide for detection of SNP TSC0054045
atttttgtttggy

SEQ ID NO: 222088 - DNA, 13 bp, Artificial Sequence
  Oligonucleotide for detection of SNP TSC0054045
rccaaacaaaaat

SEQ ID NO: 222089 - DNA, 13 bp, Artificial Sequence
  Oligonucleotide for detection of SNP TSC0054045
gttaaggagaggt

SEQ ID NO: 222090 - DNA, 13 bp, Artificial Sequence
  Oligonucleotide for detection of SNP TSC0054045
acctctccttaac

SEQ ID NO: 222091 - DNA, 13 bp, Artificial Sequence
  Oligonucleotide for detection of SNP TSC0054045
gttaagtagaggt

SEQ ID NO: 222092 - DNA, 13 bp, Artificial Sequence
  Oligonucleotide for detection of SNP TSC0054045
acctctacttaac

SEQ ID NO: 222093 - DNA, 13 bp, Artificial Sequence
  Oligonucleotide for detection of SNP TSC0006147
attataatttata

SEQ ID NO: 222094 - DNA, 13 bp, Artificial Sequence
  Oligonucleotide for detection of SNP TSC0006147
tataaattataat

SEQ ID NO: 222095 - DNA, 13 bp, Artificial Sequence
  Oligonucleotide for detection of SNP TSC0006147
attatattttata

SEQ ID NO: 222096 - DNA, 13 bp, Artificial Sequence
  Oligonucleotide for detection of SNP TSC0006147
tataaaatataat

SEQ ID NO: 222097 - DNA, 13 bp, Artificial Sequence
  Oligonucleotide for detection of SNP TSC0006147
tgtaggttgtagt

SEQ ID NO: 222098 - DNA, 13 bp, Artificial Sequence
  Oligonucleotide for detection of SNP TSC0006147
actacaacctaca

SEQ ID NO: 222099 - DNA, 13 bp, Artificial Sequence
  Oligonucleotide for detection of SNP TSC0006147
tgtagggtgtagt

SEQ ID NO: 222100 - DNA, 13 bp, Artificial Sequence
  Oligonucleotide for detection of SNP TSC0006147
actacaccctaca

SEQ ID NO: 222101 - DNA, 13 bp, Artificial Sequence
  Oligonucleotide for detection of SNP TSC0054046
aattttttttggy

SEQ ID NO: 222102 - DNA, 13 bp, Artificial Sequence
  Oligonucleotide for detection of SNP TSC0054046
rccaaaaaaaatt

SEQ ID NO: 222103 - DNA, 13 bp, Artificial Sequence
  Oligonucleotide for detection of SNP TSC0054046
aattttgtttggy

SEQ ID NO: 222104 - DNA, 13 bp, Artificial Sequence
  Oligonucleotide for detection of SNP TSC0054046
rccaaacaaaatt

SEQ ID NO: 222105 - DNA, 13 bp, Artificial Sequence
  Oligonucleotide for detection of SNP TSC0054046
aatttcgtttggy

SEQ ID NO: 222106 - DNA, 13 bp, Artificial Sequence
  Oligonucleotide for detection of SNP TSC0054046
rccaaacgaaatt

SEQ ID NO: 222107 - DNA, 13 bp, Artificial Sequence
  Oligonucleotide for detection of SNP TSC0054046
gttaaggggggtt

SEQ ID NO: 222108 - DNA, 13 bp, Artificial Sequence
  Oligonucleotide for detection of SNP TSC0054046
aaccccccttaac

SEQ ID NO: 222109 - DNA, 13 bp, Artificial Sequence
  Oligonucleotide for detection of SNP TSC0054046
gttaagtggggtt

SEQ ID NO: 222110 - DNA, 13 bp, Artificial Sequence
  Oligonucleotide for detection of SNP TSC0054046
aaccccacttaac

SEQ ID NO: 222111 - DNA, 13 bp, Artificial Sequence
  Oligonucleotide for detection of SNP TSC0054046
gttaagcggggtt

SEQ ID NO: 222112 - DNA, 13 bp, Artificial Sequence
  Oligonucleotide for detection of SNP TSC0054046
aaccccgcttaac

SEQ ID NO: 222113 - DNA, 13 bp, Artificial Sequence
  Oligonucleotide for detection of SNP TSC0054047
aagaatatattag

SEQ ID NO: 222114 - DNA, 13 bp, Artificial Sequence
  Oligonucleotide for detection of SNP TSC0054047
ctaatatattctt

SEQ ID NO: 222115 - DNA, 13 bp, Artificial Sequence
  Oligonucleotide for detection of SNP TSC0054047
aagaatgtattag

SEQ ID NO: 222116 - DNA, 13 bp, Artificial Sequence
  Oligonucleotide for detection of SNP TSC0054047
ctaatacattctt

SEQ ID NO: 222117 - DNA, 13 bp, Artificial Sequence
  Oligonucleotide for detection of SNP TSC0054048
aatagtttttaga

SEQ ID NO: 222118 - DNA, 13 bp, Artificial Sequence
  Oligonucleotide for detection of SNP TSC0054048
tctaaaaactatt

SEQ ID NO: 222119 - DNA, 13 bp, Artificial Sequence
  Oligonucleotide for detection of SNP TSC0054048
aatagtgtttaga

SEQ ID NO: 222120 - DNA, 13 bp, Artificial Sequence
  Oligonucleotide for detection of SNP TSC0054048
tctaaacactatt

SEQ ID NO: 222121 - DNA, 13 bp, Artificial Sequence
  Oligonucleotide for detection of SNP TSC0054048
aatagcgtttaga

SEQ ID NO: 222122 - DNA, 13 bp, Artificial Sequence
  Oligonucleotide for detection of SNP TSC0054048
tctaaacgctatt

SEQ ID NO: 222123 - DNA, 13 bp, Artificial Sequence
  Oligonucleotide for detection of SNP TSC0054048
tttgagggttgtt

SEQ ID NO: 222124 - DNA, 13 bp, Artificial Sequence
  Oligonucleotide for detection of SNP TSC0054048
aacaaccctcaaa

SEQ ID NO: 222125 - DNA, 13 bp, Artificial Sequence
  Oligonucleotide for detection of SNP TSC0054048
tttgagtgttgtt

SEQ ID NO: 222126 - DNA, 13 bp, Artificial Sequence
  Oligonucleotide for detection of SNP TSC0054048
aacaacactcaaa

SEQ ID NO: 222127 - DNA, 13 bp, Artificial Sequence
  Oligonucleotide for detection of SNP TSC0054048
tttgagcgttgtt

SEQ ID NO: 222128 - DNA, 13 bp, Artificial Sequence
  Oligonucleotide for detection of SNP TSC0054048
aacaacgctcaaa

SEQ ID NO: 222129 - DNA, 13 bp, Artificial Sequence
  Oligonucleotide for detection of SNP TSC0054049
ttttaaggttgag

SEQ ID NO: 222130 - DNA, 13 bp, Artificial Sequence
  Oligonucleotide for detection of SNP TSC0054049
ctcaaccttaaaa

SEQ ID NO: 222131 - DNA, 13 bp, Artificial Sequence
  Oligonucleotide for detection of SNP TSC0005569
ttaaggatattty

SEQ ID NO: 222132 - DNA, 13 bp, Artificial Sequence
  Oligonucleotide for detection of SNP TSC0005569
raaatatccttaa

SEQ ID NO: 222133 - DNA, 13 bp, Artificial Sequence
  Oligonucleotide for detection of SNP TSC0005569
ttaagggtattty

SEQ ID NO: 222134 - DNA, 13 bp, Artificial Sequence
  Oligonucleotide for detection of SNP TSC0005569
raaatacccttaa

SEQ ID NO: 222135 - DNA, 13 bp, Artificial Sequence
  Oligonucleotide for detection of SNP TSC0005570
tttttgggtgtgt

SEQ ID NO: 222136 - DNA, 13 bp, Artificial Sequence
  Oligonucleotide for detection of SNP TSC0005570
acacacccaaaaa

SEQ ID NO: 222137 - DNA, 13 bp, Artificial Sequence
  Oligonucleotide for detection of SNP TSC0054057
attaaaaaagagg

SEQ ID NO: 222138 - DNA, 13 bp, Artificial Sequence
  Oligonucleotide for detection of SNP TSC0054057
cctcttttttaat

SEQ ID NO: 222139 - DNA, 13 bp, Artificial Sequence
  Oligonucleotide for detection of SNP TSC0054057
attaaataagagg

SEQ ID NO: 222140 - DNA, 13 bp, Artificial Sequence
  Oligonucleotide for detection of SNP TSC0054057
cctcttatttaat

SEQ ID NO: 222141 - DNA, 13 bp, Artificial Sequence
  Oligonucleotide for detection of SNP TSC0054058
tgttaaatgggta

SEQ ID NO: 222142 - DNA, 13 bp, Artificial Sequence
  Oligonucleotide for detection of SNP TSC0054058
tacccatttaaca

SEQ ID NO: 222143 - DNA, 13 bp, Artificial Sequence
  Oligonucleotide for detection of SNP TSC0054058
tgttaattgggta

SEQ ID NO: 222144 - DNA, 13 bp, Artificial Sequence
  Oligonucleotide for detection of SNP TSC0054058
tacccaattaaca

SEQ ID NO: 222145 - DNA, 13 bp, Artificial Sequence
  Oligonucleotide for detection of SNP TSC0054058
tgttaagtgggta

SEQ ID NO: 222146 - DNA, 13 bp, Artificial Sequence
  Oligonucleotide for detection of SNP TSC0054058
tacccacttaaca

SEQ ID NO: 222147 - DNA, 13 bp, Artificial Sequence
  Oligonucleotide for detection of SNP TSC0054058
tgtttatttggta

SEQ ID NO: 222148 - DNA, 13 bp, Artificial Sequence
  Oligonucleotide for detection of SNP TSC0054058
taccaaataaaca

SEQ ID NO: 222149 - DNA, 13 bp, Artificial Sequence
  Oligonucleotide for detection of SNP TSC0054058
tgtttaattggta

SEQ ID NO: 222150 - DNA, 13 bp, Artificial Sequence
  Oligonucleotide for detection of SNP TSC0054058
taccaattaaaca

SEQ ID NO: 222151 - DNA, 13 bp, Artificial Sequence
  Oligonucleotide for detection of SNP TSC0054064
taaattttattaa

SEQ ID NO: 222152 - DNA, 13 bp, Artificial Sequence
  Oligonucleotide for detection of SNP TSC0054064
ttaataaaattta

SEQ ID NO: 222153 - DNA, 13 bp, Artificial Sequence
  Oligonucleotide for detection of SNP TSC0054064
ttgataggatttg

SEQ ID NO: 222154 - DNA, 13 bp, Artificial Sequence
  Oligonucleotide for detection of SNP TSC0054064
caaatcctatcaa

SEQ ID NO: 222155 - DNA, 13 bp, Artificial Sequence
  Oligonucleotide for detection of SNP TSC0054064
ttgatatgatttg

SEQ ID NO: 222156 - DNA, 13 bp, Artificial Sequence
  Oligonucleotide for detection of SNP TSC0054064
caaatcatatcaa

SEQ ID NO: 222157 - DNA, 13 bp, Artificial Sequence
  Oligonucleotide for detection of SNP TSC0054064
ttgatacgatttg

SEQ ID NO: 222158 - DNA, 13 bp, Artificial Sequence
  Oligonucleotide for detection of SNP TSC0054064
caaatcgtatcaa

SEQ ID NO: 222159 - DNA, 13 bp, Artificial Sequence
  Oligonucleotide for detection of SNP TSC0054065
attaatgtaagta

SEQ ID NO: 222160 - DNA, 13 bp, Artificial Sequence
  Oligonucleotide for detection of SNP TSC0054065
tacttacattaat

SEQ ID NO: 222161 - DNA, 13 bp, Artificial Sequence
  Oligonucleotide for detection of SNP TSC0054066
tttagagtggatg

SEQ ID NO: 222162 - DNA, 13 bp, Artificial Sequence
  Oligonucleotide for detection of SNP TSC0054066
catccactctaaa

SEQ ID NO: 222163 - DNA, 13 bp, Artificial Sequence
  Oligonucleotide for detection of SNP TSC0054066
tttagaatggatg

SEQ ID NO: 222164 - DNA, 13 bp, Artificial Sequence
  Oligonucleotide for detection of SNP TSC0054066
catccattctaaa

SEQ ID NO: 222165 - DNA, 13 bp, Artificial Sequence
  Oligonucleotide for detection of SNP TSC0054067
ttttagttatata

SEQ ID NO: 222166 - DNA, 13 bp, Artificial Sequence
  Oligonucleotide for detection of SNP TSC0054067
tatataactaaaa

SEQ ID NO: 222167 - DNA, 13 bp, Artificial Sequence
  Oligonucleotide for detection of SNP TSC0054067
tatataattaaga

SEQ ID NO: 222168 - DNA, 13 bp, Artificial Sequence
  Oligonucleotide for detection of SNP TSC0054067
tcttaattatata

SEQ ID NO: 222169 - DNA, 13 bp, Artificial Sequence
  Oligonucleotide for detection of SNP TSC0054067
tatatatttaaga

SEQ ID NO: 222170 - DNA, 13 bp, Artificial Sequence
  Oligonucleotide for detection of SNP TSC0054067
tcttaaatatata

SEQ ID NO: 222171 - DNA, 13 bp, Artificial Sequence
  Oligonucleotide for detection of SNP TSC0008993
ttgagaaagttta

SEQ ID NO: 222172 - DNA, 13 bp, Artificial Sequence
  Oligonucleotide for detection of SNP TSC0008993
taaactttctcaa

SEQ ID NO: 222173 - DNA, 13 bp, Artificial Sequence
  Oligonucleotide for detection of SNP TSC0008993
ttgagagagttta

SEQ ID NO: 222174 - DNA, 13 bp, Artificial Sequence
  Oligonucleotide for detection of SNP TSC0008993
taaactctctcaa

SEQ ID NO: 222175 - DNA, 13 bp, Artificial Sequence
  Oligonucleotide for detection of SNP TSC0008993
tcgagaaagttta

SEQ ID NO: 222176 - DNA, 13 bp, Artificial Sequence
  Oligonucleotide for detection of SNP TSC0008993
taaactttctcga

SEQ ID NO: 222177 - DNA, 13 bp, Artificial Sequence
  Oligonucleotide for detection of SNP TSC0008993
tcgagagagttta

SEQ ID NO: 222178 - DNA, 13 bp, Artificial Sequence
  Oligonucleotide for detection of SNP TSC0008993
taaactctctcga

SEQ ID NO: 222179 - DNA, 13 bp, Artificial Sequence
  Oligonucleotide for detection of SNP TSC0054068
ttttttattgtaa

SEQ ID NO: 222180 - DNA, 13 bp, Artificial Sequence
  Oligonucleotide for detection of SNP TSC0054068
ttacaataaaaaa

SEQ ID NO: 222181 - DNA, 13 bp, Artificial Sequence
  Oligonucleotide for detection of SNP TSC0054068
ttttttgttgtaa

SEQ ID NO: 222182 - DNA, 13 bp, Artificial Sequence
  Oligonucleotide for detection of SNP TSC0054068
ttacaacaaaaaa

SEQ ID NO: 222183 - DNA, 13 bp, Artificial Sequence
  Oligonucleotide for detection of SNP TSC0054069
ttgtttgtggagt

SEQ ID NO: 222184 - DNA, 13 bp, Artificial Sequence
  Oligonucleotide for detection of SNP TSC0054069
actccacaaacaa

SEQ ID NO: 222185 - DNA, 13 bp, Artificial Sequence
  Oligonucleotide for detection of SNP TSC0054069
ttgtttatggagt

SEQ ID NO: 222186 - DNA, 13 bp, Artificial Sequence
  Oligonucleotide for detection of SNP TSC0054069
actccataaacaa

SEQ ID NO: 222187 - DNA, 13 bp, Artificial Sequence
  Oligonucleotide for detection of SNP TSC0054070
atgatgagtgatt

SEQ ID NO: 222188 - DNA, 13 bp, Artificial Sequence
  Oligonucleotide for detection of SNP TSC0054070
aatcactcatcat

SEQ ID NO: 222189 - DNA, 13 bp, Artificial Sequence
  Oligonucleotide for detection of SNP TSC0054070
atgatgtgtgatt

SEQ ID NO: 222190 - DNA, 13 bp, Artificial Sequence
  Oligonucleotide for detection of SNP TSC0054070
aatcacacatcat

SEQ ID NO: 222191 - DNA, 13 bp, Artificial Sequence
  Oligonucleotide for detection of SNP TSC0054070
acgatgagtgatt

SEQ ID NO: 222192 - DNA, 13 bp, Artificial Sequence
  Oligonucleotide for detection of SNP TSC0054070
aatcactcatcgt

SEQ ID NO: 222193 - DNA, 13 bp, Artificial Sequence
  Oligonucleotide for detection of SNP TSC0054070
acgatgtgtgatt

SEQ ID NO: 222194 - DNA, 13 bp, Artificial Sequence
  Oligonucleotide for detection of SNP TSC0054070
aatcacacatcgt

SEQ ID NO: 222195 - DNA, 13 bp, Artificial Sequence
  Oligonucleotide for detection of SNP TSC0054070
atgatgcgtgatt

SEQ ID NO: 222196 - DNA, 13 bp, Artificial Sequence
  Oligonucleotide for detection of SNP TSC0054070
aatcacgcatcat

SEQ ID NO: 222197 - DNA, 13 bp, Artificial Sequence
  Oligonucleotide for detection of SNP TSC0054070
acgatgcgtgatt

SEQ ID NO: 222198 - DNA, 13 bp, Artificial Sequence
  Oligonucleotide for detection of SNP TSC0054070
aatcacgcatcgt

SEQ ID NO: 222199 - DNA, 13 bp, Artificial Sequence
  Oligonucleotide for detection of SNP TSC0054070
agttatttattgt

SEQ ID NO: 222200 - DNA, 13 bp, Artificial Sequence
  Oligonucleotide for detection of SNP TSC0054070
acaataaataact

SEQ ID NO: 222201 - DNA, 13 bp, Artificial Sequence
  Oligonucleotide for detection of SNP TSC0054070
agttatgtattgt

SEQ ID NO: 222202 - DNA, 13 bp, Artificial Sequence
  Oligonucleotide for detection of SNP TSC0054070
acaatacataact

SEQ ID NO: 222203 - DNA, 13 bp, Artificial Sequence
  Oligonucleotide for detection of SNP TSC0054070
agttatttatcgt

SEQ ID NO: 222204 - DNA, 13 bp, Artificial Sequence
  Oligonucleotide for detection of SNP TSC0054070
acgataaataact

SEQ ID NO: 222205 - DNA, 13 bp, Artificial Sequence
  Oligonucleotide for detection of SNP TSC0054070
agttacgtattgt

SEQ ID NO: 222206 - DNA, 13 bp, Artificial Sequence
  Oligonucleotide for detection of SNP TSC0054070
acaatacgtaact

SEQ ID NO: 222207 - DNA, 13 bp, Artificial Sequence
  Oligonucleotide for detection of SNP TSC0054070
agttatgtatcgt

SEQ ID NO: 222208 - DNA, 13 bp, Artificial Sequence
  Oligonucleotide for detection of SNP TSC0054070
acgatacataact

SEQ ID NO: 222209 - DNA, 13 bp, Artificial Sequence
  Oligonucleotide for detection of SNP TSC0054070
agttacgtatcgt

SEQ ID NO: 222210 - DNA, 13 bp, Artificial Sequence
  Oligonucleotide for detection of SNP TSC0054070
acgatacgtaact

SEQ ID NO: 222211 - DNA, 13 bp, Artificial Sequence
  Oligonucleotide for detection of SNP TSC0054071
taggtttgtttta

SEQ ID NO: 222212 - DNA, 13 bp, Artificial Sequence
  Oligonucleotide for detection of SNP TSC0054071
taaaacaaaccta

SEQ ID NO: 222213 - DNA, 13 bp, Artificial Sequence
  Oligonucleotide for detection of SNP TSC0054071
taggttcgtttta

SEQ ID NO: 222214 - DNA, 13 bp, Artificial Sequence
  Oligonucleotide for detection of SNP TSC0054071
taaaacgaaccta

SEQ ID NO: 222215 - DNA, 13 bp, Artificial Sequence
  Oligonucleotide for detection of SNP TSC0054072
tgaaaatgtgaaa

SEQ ID NO: 222216 - DNA, 13 bp, Artificial Sequence
  Oligonucleotide for detection of SNP TSC0054072
tttcacattttca

SEQ ID NO: 222217 - DNA, 13 bp, Artificial Sequence
  Oligonucleotide for detection of SNP TSC0054072
tgaaaaggtgaaa

SEQ ID NO: 222218 - DNA, 13 bp, Artificial Sequence
  Oligonucleotide for detection of SNP TSC0054072
tttcaccttttca

SEQ ID NO: 222219 - DNA, 13 bp, Artificial Sequence
  Oligonucleotide for detection of SNP TSC0054072
tgaaaacgtgaaa

SEQ ID NO: 222220 - DNA, 13 bp, Artificial Sequence
  Oligonucleotide for detection of SNP TSC0054072
tttcacgttttca

SEQ ID NO: 222221 - DNA, 13 bp, Artificial Sequence
  Oligonucleotide for detection of SNP TSC0054073
tatattataaagy

SEQ ID NO: 222222 - DNA, 13 bp, Artificial Sequence
  Oligonucleotide for detection of SNP TSC0054073
rctttataatata

SEQ ID NO: 222223 - DNA, 13 bp, Artificial Sequence
  Oligonucleotide for detection of SNP TSC0054073
tatattttaaagy

SEQ ID NO: 222224 - DNA, 13 bp, Artificial Sequence
  Oligonucleotide for detection of SNP TSC0054073
rctttaaaatata

SEQ ID NO: 222225 - DNA, 13 bp, Artificial Sequence
  Oligonucleotide for detection of SNP TSC0054073
tatattgtaaagy

SEQ ID NO: 222226 - DNA, 13 bp, Artificial Sequence
  Oligonucleotide for detection of SNP TSC0054073
rctttacaatata

SEQ ID NO: 222227 - DNA, 13 bp, Artificial Sequence
  Oligonucleotide for detection of SNP TSC0054073
tatatcgtaaagy

SEQ ID NO: 222228 - DNA, 13 bp, Artificial Sequence
  Oligonucleotide for detection of SNP TSC0054073
rctttacgatata

SEQ ID NO: 222229 - DNA, 13 bp, Artificial Sequence
  Oligonucleotide for detection of SNP TSC0054073
gttttaggatata

SEQ ID NO: 222230 - DNA, 13 bp, Artificial Sequence
  Oligonucleotide for detection of SNP TSC0054073
tatatcctaaaac

SEQ ID NO: 222231 - DNA, 13 bp, Artificial Sequence
  Oligonucleotide for detection of SNP TSC0054074
tttatttttaata

SEQ ID NO: 222232 - DNA, 13 bp, Artificial Sequence
  Oligonucleotide for detection of SNP TSC0054074
tattaaaaataaa

SEQ ID NO: 222233 - DNA, 13 bp, Artificial Sequence
  Oligonucleotide for detection of SNP TSC0054074
tttattgttaata

SEQ ID NO: 222234 - DNA, 13 bp, Artificial Sequence
  Oligonucleotide for detection of SNP TSC0054074
tattaacaataaa

SEQ ID NO: 222235 - DNA, 13 bp, Artificial Sequence
  Oligonucleotide for detection of SNP TSC0054074
tttatcgttaata

SEQ ID NO: 222236 - DNA, 13 bp, Artificial Sequence
  Oligonucleotide for detection of SNP TSC0054074
tattaacgataaa

SEQ ID NO: 222237 - DNA, 13 bp, Artificial Sequence
  Oligonucleotide for detection of SNP TSC0054074
tgttagggatgga

SEQ ID NO: 222238 - DNA, 13 bp, Artificial Sequence
  Oligonucleotide for detection of SNP TSC0054074
tccatccctaaca

SEQ ID NO: 222239 - DNA, 13 bp, Artificial Sequence
  Oligonucleotide for detection of SNP TSC0054074
tgttagtgatgga

SEQ ID NO: 222240 - DNA, 13 bp, Artificial Sequence
  Oligonucleotide for detection of SNP TSC0054074
tccatcactaaca

SEQ ID NO: 222241 - DNA, 13 bp, Artificial Sequence
  Oligonucleotide for detection of SNP TSC0054074
tgttagcgatgga

SEQ ID NO: 222242 - DNA, 13 bp, Artificial Sequence
  Oligonucleotide for detection of SNP TSC0054074
tccatcgctaaca

SEQ ID NO: 222243 - DNA, 13 bp, Artificial Sequence
  Oligonucleotide for detection of SNP TSC0054075
attataatggtag

SEQ ID NO: 222244 - DNA, 13 bp, Artificial Sequence
  Oligonucleotide for detection of SNP TSC0054075
ctaccattataat

SEQ ID NO: 222245 - DNA, 13 bp, Artificial Sequence
  Oligonucleotide for detection of SNP TSC0054075
attatagtggtag

SEQ ID NO: 222246 - DNA, 13 bp, Artificial Sequence
  Oligonucleotide for detection of SNP TSC0054075
ctaccactataat

SEQ ID NO: 222247 - DNA, 13 bp, Artificial Sequence
  Oligonucleotide for detection of SNP TSC0054076
aatttggaaaaga

SEQ ID NO: 222248 - DNA, 13 bp, Artificial Sequence
  Oligonucleotide for detection of SNP TSC0054076
tcttttccaaatt

SEQ ID NO: 222249 - DNA, 13 bp, Artificial Sequence
  Oligonucleotide for detection of SNP TSC0054076
aatttgaaaaaga

SEQ ID NO: 222250 - DNA, 13 bp, Artificial Sequence
  Oligonucleotide for detection of SNP TSC0054076
tctttttcaaatt

SEQ ID NO: 222251 - DNA, 13 bp, Artificial Sequence
  Oligonucleotide for detection of SNP TSC0054078
tttataggtatgg

SEQ ID NO: 222252 - DNA, 13 bp, Artificial Sequence
  Oligonucleotide for detection of SNP TSC0054078
ccatacctataaa

SEQ ID NO: 222253 - DNA, 13 bp, Artificial Sequence
  Oligonucleotide for detection of SNP TSC0054078
tttataagtatgg

SEQ ID NO: 222254 - DNA, 13 bp, Artificial Sequence
  Oligonucleotide for detection of SNP TSC0054078
ccatacttataaa

SEQ ID NO: 222255 - DNA, 13 bp, Artificial Sequence
  Oligonucleotide for detection of SNP TSC0054079
aatttattatgty

SEQ ID NO: 222256 - DNA, 13 bp, Artificial Sequence
  Oligonucleotide for detection of SNP TSC0054079
racataataaatt

SEQ ID NO: 222257 - DNA, 13 bp, Artificial Sequence
  Oligonucleotide for detection of SNP TSC0054079
aatttagtatgty

SEQ ID NO: 222258 - DNA, 13 bp, Artificial Sequence
  Oligonucleotide for detection of SNP TSC0054079
racatactaaatt

SEQ ID NO: 222259 - DNA, 13 bp, Artificial Sequence
  Oligonucleotide for detection of SNP TSC0054079
gatatgatggatt

SEQ ID NO: 222260 - DNA, 13 bp, Artificial Sequence
  Oligonucleotide for detection of SNP TSC0054079
aatccatcatatc

SEQ ID NO: 222261 - DNA, 13 bp, Artificial Sequence
  Oligonucleotide for detection of SNP TSC0054079
gatatgttggatt

SEQ ID NO: 222262 - DNA, 13 bp, Artificial Sequence
  Oligonucleotide for detection of SNP TSC0054079
aatccaacatatc

SEQ ID NO: 222263 - DNA, 13 bp, Artificial Sequence
  Oligonucleotide for detection of SNP TSC0054080
tttagaagtttty

SEQ ID NO: 222264 - DNA, 13 bp, Artificial Sequence
  Oligonucleotide for detection of SNP TSC0054080
raaaacttctaaa

SEQ ID NO: 222265 - DNA, 13 bp, Artificial Sequence
  Oligonucleotide for detection of SNP TSC0054080
tttagaggtttty

SEQ ID NO: 222266 - DNA, 13 bp, Artificial Sequence
  Oligonucleotide for detection of SNP TSC0054080
raaaacctctaaa

SEQ ID NO: 222267 - DNA, 13 bp, Artificial Sequence
  Oligonucleotide for detection of SNP TSC0054081
ttggaatgtggga

SEQ ID NO: 222268 - DNA, 13 bp, Artificial Sequence
  Oligonucleotide for detection of SNP TSC0054081
tcccacattccaa

SEQ ID NO: 222269 - DNA, 13 bp, Artificial Sequence
  Oligonucleotide for detection of SNP TSC0054081
ttggaacgtggga

SEQ ID NO: 222270 - DNA, 13 bp, Artificial Sequence
  Oligonucleotide for detection of SNP TSC0054081
tcccacgttccaa

SEQ ID NO: 222271 - DNA, 13 bp, Artificial Sequence
  Oligonucleotide for detection of SNP TSC0054085
taagatattggaa

SEQ ID NO: 222272 - DNA, 13 bp, Artificial Sequence
  Oligonucleotide for detection of SNP TSC0054085
ttccaatatctta

SEQ ID NO: 222273 - DNA, 13 bp, Artificial Sequence
  Oligonucleotide for detection of SNP TSC0054085
taagattttggaa

SEQ ID NO: 222274 - DNA, 13 bp, Artificial Sequence
  Oligonucleotide for detection of SNP TSC0054085
ttccaaaatctta

SEQ ID NO: 222275 - DNA, 13 bp, Artificial Sequence
  Oligonucleotide for detection of SNP TSC0054086
attaataatgttg

SEQ ID NO: 222276 - DNA, 13 bp, Artificial Sequence
  Oligonucleotide for detection of SNP TSC0054086
caacattattaat

SEQ ID NO: 222277 - DNA, 13 bp, Artificial Sequence
  Oligonucleotide for detection of SNP TSC0054086
attaatgatgttg

SEQ ID NO: 222278 - DNA, 13 bp, Artificial Sequence
  Oligonucleotide for detection of SNP TSC0054086
caacatcattaat

SEQ ID NO: 222279 - DNA, 13 bp, Artificial Sequence
  Oligonucleotide for detection of SNP TSC0054086
attaataacgttg

SEQ ID NO: 222280 - DNA, 13 bp, Artificial Sequence
  Oligonucleotide for detection of SNP TSC0054086
caacgttattaat

SEQ ID NO: 222281 - DNA, 13 bp, Artificial Sequence
  Oligonucleotide for detection of SNP TSC0054086
attaatgacgttg

SEQ ID NO: 222282 - DNA, 13 bp, Artificial Sequence
  Oligonucleotide for detection of SNP TSC0054086
caacgtcattaat

SEQ ID NO: 222283 - DNA, 13 bp, Artificial Sequence
  Oligonucleotide for detection of SNP TSC0054087
taatgaaataagg

SEQ ID NO: 222284 - DNA, 13 bp, Artificial Sequence
  Oligonucleotide for detection of SNP TSC0054087
ccttatttcatta

SEQ ID NO: 222285 - DNA, 13 bp, Artificial Sequence
  Oligonucleotide for detection of SNP TSC0054087
taatgagataagg

SEQ ID NO: 222286 - DNA, 13 bp, Artificial Sequence
  Oligonucleotide for detection of SNP TSC0054087
ccttatctcatta

SEQ ID NO: 222287 - DNA, 13 bp, Artificial Sequence
  Oligonucleotide for detection of SNP TSC0054088
tatatatgtataa

SEQ ID NO: 222288 - DNA, 13 bp, Artificial Sequence
  Oligonucleotide for detection of SNP TSC0054088
ttatacatatata

SEQ ID NO: 222289 - DNA, 13 bp, Artificial Sequence
  Oligonucleotide for detection of SNP TSC0054088
ttgtgcgtatgtg

SEQ ID NO: 222290 - DNA, 13 bp, Artificial Sequence
  Oligonucleotide for detection of SNP TSC0054088
cacatacgcacaa

SEQ ID NO: 222291 - DNA, 13 bp, Artificial Sequence
  Oligonucleotide for detection of SNP TSC0054089
attttaatataag

SEQ ID NO: 222292 - DNA, 13 bp, Artificial Sequence
  Oligonucleotide for detection of SNP TSC0054089
cttatattaaaat

SEQ ID NO: 222293 - DNA, 13 bp, Artificial Sequence
  Oligonucleotide for detection of SNP TSC0054089
attttagtataag

SEQ ID NO: 222294 - DNA, 13 bp, Artificial Sequence
  Oligonucleotide for detection of SNP TSC0054089
cttatactaaaat

SEQ ID NO: 222295 - DNA, 13 bp, Artificial Sequence
  Oligonucleotide for detection of SNP TSC0054091
gggtgtgtaaaty

SEQ ID NO: 222296 - DNA, 13 bp, Artificial Sequence
  Oligonucleotide for detection of SNP TSC0054091
ratttacacaccc

SEQ ID NO: 222297 - DNA, 13 bp, Artificial Sequence
  Oligonucleotide for detection of SNP TSC0054091
gggtgtataaaty

SEQ ID NO: 222298 - DNA, 13 bp, Artificial Sequence
  Oligonucleotide for detection of SNP TSC0054091
ratttatacaccc

SEQ ID NO: 222299 - DNA, 13 bp, Artificial Sequence
  Oligonucleotide for detection of SNP TSC0054092
atttagatgttgt

SEQ ID NO: 222300 - DNA, 13 bp, Artificial Sequence
  Oligonucleotide for detection of SNP TSC0054092
acaacatctaaat

SEQ ID NO: 222301 - DNA, 13 bp, Artificial Sequence
  Oligonucleotide for detection of SNP TSC0054092
atttagttgttgt

SEQ ID NO: 222302 - DNA, 13 bp, Artificial Sequence
  Oligonucleotide for detection of SNP TSC0054092
acaacaactaaat

SEQ ID NO: 222303 - DNA, 13 bp, Artificial Sequence
  Oligonucleotide for detection of SNP TSC0054092
atagtatttgagt

SEQ ID NO: 222304 - DNA, 13 bp, Artificial Sequence
  Oligonucleotide for detection of SNP TSC0054092
actcaaatactat

SEQ ID NO: 222305 - DNA, 13 bp, Artificial Sequence
  Oligonucleotide for detection of SNP TSC0054092
atagtagttgagt

SEQ ID NO: 222306 - DNA, 13 bp, Artificial Sequence
  Oligonucleotide for detection of SNP TSC0054092
actcaactactat

SEQ ID NO: 222307 - DNA, 13 bp, Artificial Sequence
  Oligonucleotide for detection of SNP TSC0054095
ttgggtgtataty

SEQ ID NO: 222308 - DNA, 13 bp, Artificial Sequence
  Oligonucleotide for detection of SNP TSC0054095
ratatacacccaa

SEQ ID NO: 222309 - DNA, 13 bp, Artificial Sequence
  Oligonucleotide for detection of SNP TSC0054095
ttgggtatataty

SEQ ID NO: 222310 - DNA, 13 bp, Artificial Sequence
  Oligonucleotide for detection of SNP TSC0054095
ratatatacccaa

SEQ ID NO: 222311 - DNA, 13 bp, Artificial Sequence
  Oligonucleotide for detection of SNP TSC0054096
aattttaaagagy

SEQ ID NO: 222312 - DNA, 13 bp, Artificial Sequence
  Oligonucleotide for detection of SNP TSC0054096
rctctttaaaatt

SEQ ID NO: 222313 - DNA, 13 bp, Artificial Sequence
  Oligonucleotide for detection of SNP TSC0054096
aattttgaagagy

SEQ ID NO: 222314 - DNA, 13 bp, Artificial Sequence
  Oligonucleotide for detection of SNP TSC0054096
rctcttcaaaatt

SEQ ID NO: 222315 - DNA, 13 bp, Artificial Sequence
  Oligonucleotide for detection of SNP TSC0054097
ggtgggtgggtgg

SEQ ID NO: 222316 - DNA, 13 bp, Artificial Sequence
  Oligonucleotide for detection of SNP TSC0054097
ccacccacccacc

SEQ ID NO: 222317 - DNA, 13 bp, Artificial Sequence
  Oligonucleotide for detection of SNP TSC0054097
ggtgggggggtgg

SEQ ID NO: 222318 - DNA, 13 bp, Artificial Sequence
  Oligonucleotide for detection of SNP TSC0054097
ccacccccccacc

SEQ ID NO: 222319 - DNA, 13 bp, Artificial Sequence
  Oligonucleotide for detection of SNP TSC0054097
ggcgggtgggtgg

SEQ ID NO: 222320 - DNA, 13 bp, Artificial Sequence
  Oligonucleotide for detection of SNP TSC0054097
ccacccacccgcc

SEQ ID NO: 222321 - DNA, 13 bp, Artificial Sequence
  Oligonucleotide for detection of SNP TSC0054097
ggcgggggggtgg

SEQ ID NO: 222322 - DNA, 13 bp, Artificial Sequence
  Oligonucleotide for detection of SNP TSC0054097
ccacccccccgcc

SEQ ID NO: 222323 - DNA, 13 bp, Artificial Sequence
  Oligonucleotide for detection of SNP TSC0054098
gtggtgatggtgg

SEQ ID NO: 222324 - DNA, 13 bp, Artificial Sequence
  Oligonucleotide for detection of SNP TSC0054098
ccaccatcaccac

SEQ ID NO: 222325 - DNA, 13 bp, Artificial Sequence
  Oligonucleotide for detection of SNP TSC0054098
gtggtggtggtgg

SEQ ID NO: 222326 - DNA, 13 bp, Artificial Sequence
  Oligonucleotide for detection of SNP TSC0054098
ccaccaccaccac

SEQ ID NO: 222327 - DNA, 13 bp, Artificial Sequence
  Oligonucleotide for detection of SNP TSC0054098
gtggtgacggtgg

SEQ ID NO: 222328 - DNA, 13 bp, Artificial Sequence
  Oligonucleotide for detection of SNP TSC0054098
ccaccgtcaccac

SEQ ID NO: 222329 - DNA, 13 bp, Artificial Sequence
  Oligonucleotide for detection of SNP TSC0054098
gtggtggcggtgg

SEQ ID NO: 222330 - DNA, 13 bp, Artificial Sequence
  Oligonucleotide for detection of SNP TSC0054098
ccaccgccaccac

SEQ ID NO: 222331 - DNA, 13 bp, Artificial Sequence
  Oligonucleotide for detection of SNP TSC0054098
gtggtgatggcgg

SEQ ID NO: 222332 - DNA, 13 bp, Artificial Sequence
  Oligonucleotide for detection of SNP TSC0054098
ccgccatcaccac

SEQ ID NO: 222333 - DNA, 13 bp, Artificial Sequence
  Oligonucleotide for detection of SNP TSC0054098
gtggtggtggcgg

SEQ ID NO: 222334 - DNA, 13 bp, Artificial Sequence
  Oligonucleotide for detection of SNP TSC0054098
ccgccaccaccac

SEQ ID NO: 222335 - DNA, 13 bp, Artificial Sequence
  Oligonucleotide for detection of SNP TSC0054098
gtggtgacggcgg

SEQ ID NO: 222336 - DNA, 13 bp, Artificial Sequence
  Oligonucleotide for detection of SNP TSC0054098
ccgccgtcaccac

SEQ ID NO: 222337 - DNA, 13 bp, Artificial Sequence
  Oligonucleotide for detection of SNP TSC0054098
gtggtggcggcgg

SEQ ID NO: 222338 - DNA, 13 bp, Artificial Sequence
  Oligonucleotide for detection of SNP TSC0054098
ccgccgccaccac

SEQ ID NO: 222339 - DNA, 13 bp, Artificial Sequence
  Oligonucleotide for detection of SNP TSC0054099
ggtaagattgatg

SEQ ID NO: 222340 - DNA, 13 bp, Artificial Sequence
  Oligonucleotide for detection of SNP TSC0054099
catcaatcttacc

SEQ ID NO: 222341 - DNA, 13 bp, Artificial Sequence
  Oligonucleotide for detection of SNP TSC0054099
ggtaagtttgatg

SEQ ID NO: 222342 - DNA, 13 bp, Artificial Sequence
  Oligonucleotide for detection of SNP TSC0054099
catcaaacttacc

SEQ ID NO: 222343 - DNA, 13 bp, Artificial Sequence
  Oligonucleotide for detection of SNP TSC0054099
tattagttttgty

SEQ ID NO: 222344 - DNA, 13 bp, Artificial Sequence
  Oligonucleotide for detection of SNP TSC0054099
racaaaactaata

SEQ ID NO: 222345 - DNA, 13 bp, Artificial Sequence
  Oligonucleotide for detection of SNP TSC0054099
tattagatttgty

SEQ ID NO: 222346 - DNA, 13 bp, Artificial Sequence
  Oligonucleotide for detection of SNP TSC0054099
racaaatctaata

SEQ ID NO: 222347 - DNA, 13 bp, Artificial Sequence
  Oligonucleotide for detection of SNP TSC0054100
gatttggaaagtt

SEQ ID NO: 222348 - DNA, 13 bp, Artificial Sequence
  Oligonucleotide for detection of SNP TSC0054100
aactttccaaatc

SEQ ID NO: 222349 - DNA, 13 bp, Artificial Sequence
  Oligonucleotide for detection of SNP TSC0054100
gatttgaaaagtt

SEQ ID NO: 222350 - DNA, 13 bp, Artificial Sequence
  Oligonucleotide for detection of SNP TSC0054100
aacttttcaaatc

SEQ ID NO: 222351 - DNA, 13 bp, Artificial Sequence
  Oligonucleotide for detection of SNP TSC0054101
ttatgataaagta

SEQ ID NO: 222352 - DNA, 13 bp, Artificial Sequence
  Oligonucleotide for detection of SNP TSC0054101
tactttatcataa

SEQ ID NO: 222353 - DNA, 13 bp, Artificial Sequence
  Oligonucleotide for detection of SNP TSC0054101
ttatgagaaagta

SEQ ID NO: 222354 - DNA, 13 bp, Artificial Sequence
  Oligonucleotide for detection of SNP TSC0054101
tactttctcataa

SEQ ID NO: 222355 - DNA, 13 bp, Artificial Sequence
  Oligonucleotide for detection of SNP TSC0054101
tgttttattatgg

SEQ ID NO: 222356 - DNA, 13 bp, Artificial Sequence
  Oligonucleotide for detection of SNP TSC0054101
ccataataaaaca

SEQ ID NO: 222357 - DNA, 13 bp, Artificial Sequence
  Oligonucleotide for detection of SNP TSC0054101
tgtttttttatgg

SEQ ID NO: 222358 - DNA, 13 bp, Artificial Sequence
  Oligonucleotide for detection of SNP TSC0054101
ccataaaaaaaca

SEQ ID NO: 222359 - DNA, 13 bp, Artificial Sequence
  Oligonucleotide for detection of SNP TSC0054102
gtatgttgtgatt

SEQ ID NO: 222360 - DNA, 13 bp, Artificial Sequence
  Oligonucleotide for detection of SNP TSC0054102
aatcacaacatac

SEQ ID NO: 222361 - DNA, 13 bp, Artificial Sequence
  Oligonucleotide for detection of SNP TSC0054102
gtatgtcgtgatt

SEQ ID NO: 222362 - DNA, 13 bp, Artificial Sequence
  Oligonucleotide for detection of SNP TSC0054102
aatcacgacatac

SEQ ID NO: 222363 - DNA, 13 bp, Artificial Sequence
  Oligonucleotide for detection of SNP TSC0054103
taatttgttaggt

SEQ ID NO: 222364 - DNA, 13 bp, Artificial Sequence
  Oligonucleotide for detection of SNP TSC0054103
acctaacaaatta

SEQ ID NO: 222365 - DNA, 13 bp, Artificial Sequence
  Oligonucleotide for detection of SNP TSC0054103
taatttattaggt

SEQ ID NO: 222366 - DNA, 13 bp, Artificial Sequence
  Oligonucleotide for detection of SNP TSC0054103
acctaataaatta

SEQ ID NO: 222367 - DNA, 13 bp, Artificial Sequence
  Oligonucleotide for detection of SNP TSC0054104
agagttataatty

SEQ ID NO: 222368 - DNA, 13 bp, Artificial Sequence
  Oligonucleotide for detection of SNP TSC0054104
raattataactct

SEQ ID NO: 222369 - DNA, 13 bp, Artificial Sequence
  Oligonucleotide for detection of SNP TSC0054104
agagtcgtaatty

SEQ ID NO: 222370 - DNA, 13 bp, Artificial Sequence
  Oligonucleotide for detection of SNP TSC0054104
raattacgactct

SEQ ID NO: 222371 - DNA, 13 bp, Artificial Sequence
  Oligonucleotide for detection of SNP TSC0054104
gagttgtggtttt

SEQ ID NO: 222372 - DNA, 13 bp, Artificial Sequence
  Oligonucleotide for detection of SNP TSC0054104
aaaaccacaactc

SEQ ID NO: 222373 - DNA, 13 bp, Artificial Sequence
  Oligonucleotide for detection of SNP TSC0054104
gagttgcggtttt

SEQ ID NO: 222374 - DNA, 13 bp, Artificial Sequence
  Oligonucleotide for detection of SNP TSC0054104
aaaaccgcaactc

SEQ ID NO: 222375 - DNA, 13 bp, Artificial Sequence
  Oligonucleotide for detection of SNP TSC0054105
gggagaggtgttt

SEQ ID NO: 222376 - DNA, 13 bp, Artificial Sequence
  Oligonucleotide for detection of SNP TSC0054105
aaacacctctccc

SEQ ID NO: 222377 - DNA, 13 bp, Artificial Sequence
  Oligonucleotide for detection of SNP TSC0054105
gggagatgtgttt

SEQ ID NO: 222378 - DNA, 13 bp, Artificial Sequence
  Oligonucleotide for detection of SNP TSC0054105
aaacacatctccc

SEQ ID NO: 222379 - DNA, 13 bp, Artificial Sequence
  Oligonucleotide for detection of SNP TSC0054105
gggagacgtgttt

SEQ ID NO: 222380 - DNA, 13 bp, Artificial Sequence
  Oligonucleotide for detection of SNP TSC0054105
aaacacgtctccc

SEQ ID NO: 222381 - DNA, 13 bp, Artificial Sequence
  Oligonucleotide for detection of SNP TSC0054106
agtttttttaaga

SEQ ID NO: 222382 - DNA, 13 bp, Artificial Sequence
  Oligonucleotide for detection of SNP TSC0054106
tcttaaaaaaact

SEQ ID NO: 222383 - DNA, 13 bp, Artificial Sequence
  Oligonucleotide for detection of SNP TSC0054106
agttttgttaaga

SEQ ID NO: 222384 - DNA, 13 bp, Artificial Sequence
  Oligonucleotide for detection of SNP TSC0054106
tcttaacaaaact

SEQ ID NO: 222385 - DNA, 13 bp, Artificial Sequence
  Oligonucleotide for detection of SNP TSC0054106
ttttggtaaaatt

SEQ ID NO: 222386 - DNA, 13 bp, Artificial Sequence
  Oligonucleotide for detection of SNP TSC0054106
aattttaccaaaa

SEQ ID NO: 222387 - DNA, 13 bp, Artificial Sequence
  Oligonucleotide for detection of SNP TSC0054107
gaatggatttgaa

SEQ ID NO: 222388 - DNA, 13 bp, Artificial Sequence
  Oligonucleotide for detection of SNP TSC0054107
ttcaaatccattc

SEQ ID NO: 222389 - DNA, 13 bp, Artificial Sequence
  Oligonucleotide for detection of SNP TSC0054107
gaatgggtttgaa

SEQ ID NO: 222390 - DNA, 13 bp, Artificial Sequence
  Oligonucleotide for detection of SNP TSC0054107
ttcaaacccattc

SEQ ID NO: 222391 - DNA, 13 bp, Artificial Sequence
  Oligonucleotide for detection of SNP TSC0054109
ttaaaaaaaaaay

SEQ ID NO: 222392 - DNA, 13 bp, Artificial Sequence
  Oligonucleotide for detection of SNP TSC0054109
rttttttttttaa

SEQ ID NO: 222393 - DNA, 13 bp, Artificial Sequence
  Oligonucleotide for detection of SNP TSC0054111
ttaatggtgattt

SEQ ID NO: 222394 - DNA, 13 bp, Artificial Sequence
  Oligonucleotide for detection of SNP TSC0054111
aaatcaccattaa

SEQ ID NO: 222395 - DNA, 13 bp, Artificial Sequence
  Oligonucleotide for detection of SNP TSC0054111
ttaatgatgattt

SEQ ID NO: 222396 - DNA, 13 bp, Artificial Sequence
  Oligonucleotide for detection of SNP TSC0054111
aaatcatcattaa

SEQ ID NO: 222397 - DNA, 13 bp, Artificial Sequence
  Oligonucleotide for detection of SNP TSC0054112
attataaatgaaa

SEQ ID NO: 222398 - DNA, 13 bp, Artificial Sequence
  Oligonucleotide for detection of SNP TSC0054112
tttcatttataat

SEQ ID NO: 222399 - DNA, 13 bp, Artificial Sequence
  Oligonucleotide for detection of SNP TSC0054112
attatagatgaaa

SEQ ID NO: 222400 - DNA, 13 bp, Artificial Sequence
  Oligonucleotide for detection of SNP TSC0054112
tttcatctataat

SEQ ID NO: 222401 - DNA, 13 bp, Artificial Sequence
  Oligonucleotide for detection of SNP TSC0054114
gaatattgtgtta

SEQ ID NO: 222402 - DNA, 13 bp, Artificial Sequence
  Oligonucleotide for detection of SNP TSC0054114
taacacaatattc

SEQ ID NO: 222403 - DNA, 13 bp, Artificial Sequence
  Oligonucleotide for detection of SNP TSC0054114
gaatatcgtgtta

SEQ ID NO: 222404 - DNA, 13 bp, Artificial Sequence
  Oligonucleotide for detection of SNP TSC0054114
taacacgatattc

SEQ ID NO: 222405 - DNA, 13 bp, Artificial Sequence
  Oligonucleotide for detection of SNP TSC0054114
tgatatggtgtty

SEQ ID NO: 222406 - DNA, 13 bp, Artificial Sequence
  Oligonucleotide for detection of SNP TSC0054114
raacaccatatca

SEQ ID NO: 222407 - DNA, 13 bp, Artificial Sequence
  Oligonucleotide for detection of SNP TSC0054114
tgatatagtgtty

SEQ ID NO: 222408 - DNA, 13 bp, Artificial Sequence
  Oligonucleotide for detection of SNP TSC0054114
raacactatatca

SEQ ID NO: 222409 - DNA, 13 bp, Artificial Sequence
  Oligonucleotide for detection of SNP TSC0054114
tgatacggtgtty

SEQ ID NO: 222410 - DNA, 13 bp, Artificial Sequence
  Oligonucleotide for detection of SNP TSC0054114
raacaccgtatca

SEQ ID NO: 222411 - DNA, 13 bp, Artificial Sequence
  Oligonucleotide for detection of SNP TSC0054115
tgtttgtagtaga

SEQ ID NO: 222412 - DNA, 13 bp, Artificial Sequence
  Oligonucleotide for detection of SNP TSC0054115
tctactacaaaca

SEQ ID NO: 222413 - DNA, 13 bp, Artificial Sequence
  Oligonucleotide for detection of SNP TSC0054115
tgtttggagtaga

SEQ ID NO: 222414 - DNA, 13 bp, Artificial Sequence
  Oligonucleotide for detection of SNP TSC0054115
tctactccaaaca

SEQ ID NO: 222415 - DNA, 13 bp, Artificial Sequence
  Oligonucleotide for detection of SNP TSC0054115
cgtttgtagtaga

SEQ ID NO: 222416 - DNA, 13 bp, Artificial Sequence
  Oligonucleotide for detection of SNP TSC0054115
tctactacaaacg

SEQ ID NO: 222417 - DNA, 13 bp, Artificial Sequence
  Oligonucleotide for detection of SNP TSC0054115
cgtttggagtaga

SEQ ID NO: 222418 - DNA, 13 bp, Artificial Sequence
  Oligonucleotide for detection of SNP TSC0054115
tctactccaaacg

SEQ ID NO: 222419 - DNA, 13 bp, Artificial Sequence
  Oligonucleotide for detection of SNP TSC0054115
tttattataaatg

SEQ ID NO: 222420 - DNA, 13 bp, Artificial Sequence
  Oligonucleotide for detection of SNP TSC0054115
catttataataaa

SEQ ID NO: 222421 - DNA, 13 bp, Artificial Sequence
  Oligonucleotide for detection of SNP TSC0054115
tttattataaacg

SEQ ID NO: 222422 - DNA, 13 bp, Artificial Sequence
  Oligonucleotide for detection of SNP TSC0054115
cgtttataataaa

SEQ ID NO: 222423 - DNA, 13 bp, Artificial Sequence
  Oligonucleotide for detection of SNP TSC0054115
tttattttaaacg

SEQ ID NO: 222424 - DNA, 13 bp, Artificial Sequence
  Oligonucleotide for detection of SNP TSC0054115
cgtttaaaataaa

SEQ ID NO: 222425 - DNA, 13 bp, Artificial Sequence
  Oligonucleotide for detection of SNP TSC0054120
tataataagggtt

SEQ ID NO: 222426 - DNA, 13 bp, Artificial Sequence
  Oligonucleotide for detection of SNP TSC0054120
aacccttattata

SEQ ID NO: 222427 - DNA, 13 bp, Artificial Sequence
  Oligonucleotide for detection of SNP TSC0054120
tataattagggtt

SEQ ID NO: 222428 - DNA, 13 bp, Artificial Sequence
  Oligonucleotide for detection of SNP TSC0054120
aaccctaattata

SEQ ID NO: 222429 - DNA, 13 bp, Artificial Sequence
  Oligonucleotide for detection of SNP TSC0054120
aattttggttgta

SEQ ID NO: 222430 - DNA, 13 bp, Artificial Sequence
  Oligonucleotide for detection of SNP TSC0054120
tacaaccaaaatt

SEQ ID NO: 222431 - DNA, 13 bp, Artificial Sequence
  Oligonucleotide for detection of SNP TSC0054121
agatatgtaattt

SEQ ID NO: 222432 - DNA, 13 bp, Artificial Sequence
  Oligonucleotide for detection of SNP TSC0054121
aaattacatatct

SEQ ID NO: 222433 - DNA, 13 bp, Artificial Sequence
  Oligonucleotide for detection of SNP TSC0054121
agatatataattt

SEQ ID NO: 222434 - DNA, 13 bp, Artificial Sequence
  Oligonucleotide for detection of SNP TSC0054121
aaattatatatct

SEQ ID NO: 222435 - DNA, 13 bp, Artificial Sequence
  Oligonucleotide for detection of SNP TSC0054123
tgtatatgtgtgg

SEQ ID NO: 222436 - DNA, 13 bp, Artificial Sequence
  Oligonucleotide for detection of SNP TSC0054123
ccacacatataca

SEQ ID NO: 222437 - DNA, 13 bp, Artificial Sequence
  Oligonucleotide for detection of SNP TSC0054123
tgtatacgtgtgg

SEQ ID NO: 222438 - DNA, 13 bp, Artificial Sequence
  Oligonucleotide for detection of SNP TSC0054123
ccacacgtataca

SEQ ID NO: 222439 - DNA, 13 bp, Artificial Sequence
  Oligonucleotide for detection of SNP TSC0054126
tttgtaatatagy

SEQ ID NO: 222440 - DNA, 13 bp, Artificial Sequence
  Oligonucleotide for detection of SNP TSC0054126
rctatattacaaa

SEQ ID NO: 222441 - DNA, 13 bp, Artificial Sequence
  Oligonucleotide for detection of SNP TSC0054126
tttgtagtatagy

SEQ ID NO: 222442 - DNA, 13 bp, Artificial Sequence
  Oligonucleotide for detection of SNP TSC0054126
rctatactacaaa

SEQ ID NO: 222443 - DNA, 13 bp, Artificial Sequence
  Oligonucleotide for detection of SNP TSC0054127
tttaatagatgay

SEQ ID NO: 222444 - DNA, 13 bp, Artificial Sequence
  Oligonucleotide for detection of SNP TSC0054127
rtcatctattaaa

SEQ ID NO: 222445 - DNA, 13 bp, Artificial Sequence
  Oligonucleotide for detection of SNP TSC0054127
tttaatggatgay

SEQ ID NO: 222446 - DNA, 13 bp, Artificial Sequence
  Oligonucleotide for detection of SNP TSC0054127
rtcatccattaaa

SEQ ID NO: 222447 - DNA, 13 bp, Artificial Sequence
  Oligonucleotide for detection of SNP TSC0054128
ggtaaatttttty

SEQ ID NO: 222448 - DNA, 13 bp, Artificial Sequence
  Oligonucleotide for detection of SNP TSC0054128
raaaaaatttacc

SEQ ID NO: 222449 - DNA, 13 bp, Artificial Sequence
  Oligonucleotide for detection of SNP TSC0054128
ggtaaagttttty

SEQ ID NO: 222450 - DNA, 13 bp, Artificial Sequence
  Oligonucleotide for detection of SNP TSC0054128
raaaaactttacc

SEQ ID NO: 222451 - DNA, 13 bp, Artificial Sequence
  Oligonucleotide for detection of SNP TSC0054128
gaaaaagtttgty

SEQ ID NO: 222452 - DNA, 13 bp, Artificial Sequence
  Oligonucleotide for detection of SNP TSC0054128
racaaactttttc

SEQ ID NO: 222453 - DNA, 13 bp, Artificial Sequence
  Oligonucleotide for detection of SNP TSC0054128
gaaaaattttgty

SEQ ID NO: 222454 - DNA, 13 bp, Artificial Sequence
  Oligonucleotide for detection of SNP TSC0054128
racaaaatttttc

SEQ ID NO: 222455 - DNA, 13 bp, Artificial Sequence
  Oligonucleotide for detection of SNP TSC0054130
gttgtatttatga

SEQ ID NO: 222456 - DNA, 13 bp, Artificial Sequence
  Oligonucleotide for detection of SNP TSC0054130
tcataaatacaac

SEQ ID NO: 222457 - DNA, 13 bp, Artificial Sequence
  Oligonucleotide for detection of SNP TSC0054130
gttgtagttatga

SEQ ID NO: 222458 - DNA, 13 bp, Artificial Sequence
  Oligonucleotide for detection of SNP TSC0054130
tcataactacaac

SEQ ID NO: 222459 - DNA, 13 bp, Artificial Sequence
  Oligonucleotide for detection of SNP TSC0054130
gttgtatttacga

SEQ ID NO: 222460 - DNA, 13 bp, Artificial Sequence
  Oligonucleotide for detection of SNP TSC0054130
tcgtaaatacaac

SEQ ID NO: 222461 - DNA, 13 bp, Artificial Sequence
  Oligonucleotide for detection of SNP TSC0054130
gttgtagttacga

SEQ ID NO: 222462 - DNA, 13 bp, Artificial Sequence
  Oligonucleotide for detection of SNP TSC0054130
tcgtaactacaac

SEQ ID NO: 222463 - DNA, 13 bp, Artificial Sequence
  Oligonucleotide for detection of SNP TSC0054130
ttgtaaatgtagy

SEQ ID NO: 222464 - DNA, 13 bp, Artificial Sequence
  Oligonucleotide for detection of SNP TSC0054130
rctacatttacaa

SEQ ID NO: 222465 - DNA, 13 bp, Artificial Sequence
  Oligonucleotide for detection of SNP TSC0054130
ttgtaattgtagy

SEQ ID NO: 222466 - DNA, 13 bp, Artificial Sequence
  Oligonucleotide for detection of SNP TSC0054130
rctacaattacaa

SEQ ID NO: 222467 - DNA, 13 bp, Artificial Sequence
  Oligonucleotide for detection of SNP TSC0054130
tcgtaaatgtagy

SEQ ID NO: 222468 - DNA, 13 bp, Artificial Sequence
  Oligonucleotide for detection of SNP TSC0054130
rctacatttacga

SEQ ID NO: 222469 - DNA, 13 bp, Artificial Sequence
  Oligonucleotide for detection of SNP TSC0054130
tcgtaattgtagy

SEQ ID NO: 222470 - DNA, 13 bp, Artificial Sequence
  Oligonucleotide for detection of SNP TSC0054130
rctacaattacga

SEQ ID NO: 222471 - DNA, 13 bp, Artificial Sequence
  Oligonucleotide for detection of SNP TSC0054131
gttggaatatggy

SEQ ID NO: 222472 - DNA, 13 bp, Artificial Sequence
  Oligonucleotide for detection of SNP TSC0054131
rccatattccaac

SEQ ID NO: 222473 - DNA, 13 bp, Artificial Sequence
  Oligonucleotide for detection of SNP TSC0054131
gttggagtatggy

SEQ ID NO: 222474 - DNA, 13 bp, Artificial Sequence
  Oligonucleotide for detection of SNP TSC0054131
rccatactccaac

SEQ ID NO: 222475 - DNA, 13 bp, Artificial Sequence
  Oligonucleotide for detection of SNP TSC0054132
ggaggttgagaty

SEQ ID NO: 222476 - DNA, 13 bp, Artificial Sequence
  Oligonucleotide for detection of SNP TSC0054132
ratctcaacctcc

SEQ ID NO: 222477 - DNA, 13 bp, Artificial Sequence
  Oligonucleotide for detection of SNP TSC0054132
ggaggtcgagaty

SEQ ID NO: 222478 - DNA, 13 bp, Artificial Sequence
  Oligonucleotide for detection of SNP TSC0054132
ratctcgacctcc

SEQ ID NO: 222479 - DNA, 13 bp, Artificial Sequence
  Oligonucleotide for detection of SNP TSC0054132
ggttttaatttty

SEQ ID NO: 222480 - DNA, 13 bp, Artificial Sequence
  Oligonucleotide for detection of SNP TSC0054132
raaaattaaaacc

SEQ ID NO: 222481 - DNA, 13 bp, Artificial Sequence
  Oligonucleotide for detection of SNP TSC0054133
gttgagatgggag

SEQ ID NO: 222482 - DNA, 13 bp, Artificial Sequence
  Oligonucleotide for detection of SNP TSC0054133
ctcccatctcaac

SEQ ID NO: 222483 - DNA, 13 bp, Artificial Sequence
  Oligonucleotide for detection of SNP TSC0054133
gttgaggtgggag

SEQ ID NO: 222484 - DNA, 13 bp, Artificial Sequence
  Oligonucleotide for detection of SNP TSC0054133
ctcccacctcaac

SEQ ID NO: 222485 - DNA, 13 bp, Artificial Sequence
  Oligonucleotide for detection of SNP TSC0054134
aatgatattgaat

SEQ ID NO: 222486 - DNA, 13 bp, Artificial Sequence
  Oligonucleotide for detection of SNP TSC0054134
attcaatatcatt

SEQ ID NO: 222487 - DNA, 13 bp, Artificial Sequence
  Oligonucleotide for detection of SNP TSC0054134
aatgattttgaat

SEQ ID NO: 222488 - DNA, 13 bp, Artificial Sequence
  Oligonucleotide for detection of SNP TSC0054134
attcaaaatcatt

SEQ ID NO: 222489 - DNA, 13 bp, Artificial Sequence
  Oligonucleotide for detection of SNP TSC0054134
atttagtgttatt

SEQ ID NO: 222490 - DNA, 13 bp, Artificial Sequence
  Oligonucleotide for detection of SNP TSC0054134
aataacactaaat

SEQ ID NO: 222491 - DNA, 13 bp, Artificial Sequence
  Oligonucleotide for detection of SNP TSC0054134
atttagagttatt

SEQ ID NO: 222492 - DNA, 13 bp, Artificial Sequence
  Oligonucleotide for detection of SNP TSC0054134
aataactctaaat

SEQ ID NO: 222493 - DNA, 13 bp, Artificial Sequence
  Oligonucleotide for detection of SNP TSC0054135
atttaagttttay

SEQ ID NO: 222494 - DNA, 13 bp, Artificial Sequence
  Oligonucleotide for detection of SNP TSC0054135
rtaaaacttaaat

SEQ ID NO: 222495 - DNA, 13 bp, Artificial Sequence
  Oligonucleotide for detection of SNP TSC0054135
atttaaattttay

SEQ ID NO: 222496 - DNA, 13 bp, Artificial Sequence
  Oligonucleotide for detection of SNP TSC0054135
rtaaaatttaaat

SEQ ID NO: 222497 - DNA, 13 bp, Artificial Sequence
  Oligonucleotide for detection of SNP TSC0054136
ttttttaagtaaa

SEQ ID NO: 222498 - DNA, 13 bp, Artificial Sequence
  Oligonucleotide for detection of SNP TSC0054136
tttacttaaaaaa

SEQ ID NO: 222499 - DNA, 13 bp, Artificial Sequence
  Oligonucleotide for detection of SNP TSC0054136
tttgtttagaggg

SEQ ID NO: 222500 - DNA, 13 bp, Artificial Sequence
  Oligonucleotide for detection of SNP TSC0054136
ccctctaaacaaa

SEQ ID NO: 222501 - DNA, 13 bp, Artificial Sequence
  Oligonucleotide for detection of SNP TSC0054136
tttgttgagaggg

SEQ ID NO: 222502 - DNA, 13 bp, Artificial Sequence
  Oligonucleotide for detection of SNP TSC0054136
ccctctcaacaaa

SEQ ID NO: 222503 - DNA, 13 bp, Artificial Sequence
  Oligonucleotide for detection of SNP TSC0054137
aaagaatgtaggt

SEQ ID NO: 222504 - DNA, 13 bp, Artificial Sequence
  Oligonucleotide for detection of SNP TSC0054137
acctacattcttt

SEQ ID NO: 222505 - DNA, 13 bp, Artificial Sequence
  Oligonucleotide for detection of SNP TSC0054137
aaagaaggtaggt

SEQ ID NO: 222506 - DNA, 13 bp, Artificial Sequence
  Oligonucleotide for detection of SNP TSC0054137
acctaccttcttt

SEQ ID NO: 222507 - DNA, 13 bp, Artificial Sequence
  Oligonucleotide for detection of SNP TSC0054138
agtataaggtgta

SEQ ID NO: 222508 - DNA, 13 bp, Artificial Sequence
  Oligonucleotide for detection of SNP TSC0054138
tacaccttatact

SEQ ID NO: 222509 - DNA, 13 bp, Artificial Sequence
  Oligonucleotide for detection of SNP TSC0054138
agtatagggtgta

SEQ ID NO: 222510 - DNA, 13 bp, Artificial Sequence
  Oligonucleotide for detection of SNP TSC0054138
tacaccctatact

SEQ ID NO: 222511 - DNA, 13 bp, Artificial Sequence
  Oligonucleotide for detection of SNP TSC0054139
aaaaaattagtat

SEQ ID NO: 222512 - DNA, 13 bp, Artificial Sequence
  Oligonucleotide for detection of SNP TSC0054139
atactaatttttt

SEQ ID NO: 222513 - DNA, 13 bp, Artificial Sequence
  Oligonucleotide for detection of SNP TSC0054139
aaaaaaatagtat

SEQ ID NO: 222514 - DNA, 13 bp, Artificial Sequence
  Oligonucleotide for detection of SNP TSC0054139
atactattttttt

SEQ ID NO: 222515 - DNA, 13 bp, Artificial Sequence
  Oligonucleotide for detection of SNP TSC0054140
gaggggagtttag

SEQ ID NO: 222516 - DNA, 13 bp, Artificial Sequence
  Oligonucleotide for detection of SNP TSC0054140
ctaaactcccctc

SEQ ID NO: 222517 - DNA, 13 bp, Artificial Sequence
  Oligonucleotide for detection of SNP TSC0054141
agtattgtagaty

SEQ ID NO: 222518 - DNA, 13 bp, Artificial Sequence
  Oligonucleotide for detection of SNP TSC0054141
ratctacaatact

SEQ ID NO: 222519 - DNA, 13 bp, Artificial Sequence
  Oligonucleotide for detection of SNP TSC0054141
agtattatagaty

SEQ ID NO: 222520 - DNA, 13 bp, Artificial Sequence
  Oligonucleotide for detection of SNP TSC0054141
ratctataatact

SEQ ID NO: 222521 - DNA, 13 bp, Artificial Sequence
  Oligonucleotide for detection of SNP TSC0054142
aggataagaaaga

SEQ ID NO: 222522 - DNA, 13 bp, Artificial Sequence
  Oligonucleotide for detection of SNP TSC0054142
tctttcttatcct

SEQ ID NO: 222523 - DNA, 13 bp, Artificial Sequence
  Oligonucleotide for detection of SNP TSC0054142
aggataggaaaga

SEQ ID NO: 222524 - DNA, 13 bp, Artificial Sequence
  Oligonucleotide for detection of SNP TSC0054142
tctttcctatcct

SEQ ID NO: 222525 - DNA, 13 bp, Artificial Sequence
  Oligonucleotide for detection of SNP TSC0054143
gtttgggggaggg

SEQ ID NO: 222526 - DNA, 13 bp, Artificial Sequence
  Oligonucleotide for detection of SNP TSC0054143
ccctcccccaaac

SEQ ID NO: 222527 - DNA, 13 bp, Artificial Sequence
  Oligonucleotide for detection of SNP TSC0054143
ttttttattaagy

SEQ ID NO: 222528 - DNA, 13 bp, Artificial Sequence
  Oligonucleotide for detection of SNP TSC0054143
rcttaataaaaaa

SEQ ID NO: 222529 - DNA, 13 bp, Artificial Sequence
  Oligonucleotide for detection of SNP TSC0054143
tttttttttaagy

SEQ ID NO: 222530 - DNA, 13 bp, Artificial Sequence
  Oligonucleotide for detection of SNP TSC0054143
rcttaaaaaaaaa

SEQ ID NO: 222531 - DNA, 13 bp, Artificial Sequence
  Oligonucleotide for detection of SNP TSC0054144
aaggtagtattgt

SEQ ID NO: 222532 - DNA, 13 bp, Artificial Sequence
  Oligonucleotide for detection of SNP TSC0054144
acaatactacctt

SEQ ID NO: 222533 - DNA, 13 bp, Artificial Sequence
  Oligonucleotide for detection of SNP TSC0054144
aaggtaatattgt

SEQ ID NO: 222534 - DNA, 13 bp, Artificial Sequence
  Oligonucleotide for detection of SNP TSC0054144
acaatattacctt

SEQ ID NO: 222535 - DNA, 13 bp, Artificial Sequence
  Oligonucleotide for detection of SNP TSC0054145
agaaagatatgaa

SEQ ID NO: 222536 - DNA, 13 bp, Artificial Sequence
  Oligonucleotide for detection of SNP TSC0054145
ttcatatctttct

SEQ ID NO: 222537 - DNA, 13 bp, Artificial Sequence
  Oligonucleotide for detection of SNP TSC0054145
agaaaggtatgaa

SEQ ID NO: 222538 - DNA, 13 bp, Artificial Sequence
  Oligonucleotide for detection of SNP TSC0054145
ttcatacctttct

SEQ ID NO: 222539 - DNA, 13 bp, Artificial Sequence
  Oligonucleotide for detection of SNP TSC0054147
aagattatagata

SEQ ID NO: 222540 - DNA, 13 bp, Artificial Sequence
  Oligonucleotide for detection of SNP TSC0054147
tatctataatctt

SEQ ID NO: 222541 - DNA, 13 bp, Artificial Sequence
  Oligonucleotide for detection of SNP TSC0054147
aagattgtagata

SEQ ID NO: 222542 - DNA, 13 bp, Artificial Sequence
  Oligonucleotide for detection of SNP TSC0054147
tatctacaatctt

SEQ ID NO: 222543 - DNA, 13 bp, Artificial Sequence
  Oligonucleotide for detection of SNP TSC0054147
aagatcgtagata

SEQ ID NO: 222544 - DNA, 13 bp, Artificial Sequence
  Oligonucleotide for detection of SNP TSC0054147
tatctacgatctt

SEQ ID NO: 222545 - DNA, 13 bp, Artificial Sequence
  Oligonucleotide for detection of SNP TSC0054147
tgtttgtggtttt

SEQ ID NO: 222546 - DNA, 13 bp, Artificial Sequence
  Oligonucleotide for detection of SNP TSC0054147
aaaaccacaaaca

SEQ ID NO: 222547 - DNA, 13 bp, Artificial Sequence
  Oligonucleotide for detection of SNP TSC0054147
tgtttgcggtttt

SEQ ID NO: 222548 - DNA, 13 bp, Artificial Sequence
  Oligonucleotide for detection of SNP TSC0054147
aaaaccgcaaaca

SEQ ID NO: 222549 - DNA, 13 bp, Artificial Sequence
  Oligonucleotide for detection of SNP TSC0054149
ataataatttatt

SEQ ID NO: 222550 - DNA, 13 bp, Artificial Sequence
  Oligonucleotide for detection of SNP TSC0054149
aataaattattat

SEQ ID NO: 222551 - DNA, 13 bp, Artificial Sequence
  Oligonucleotide for detection of SNP TSC0054150
tttagtatattaa

SEQ ID NO: 222552 - DNA, 13 bp, Artificial Sequence
  Oligonucleotide for detection of SNP TSC0054150
ttaatatactaaa

SEQ ID NO: 222553 - DNA, 13 bp, Artificial Sequence
  Oligonucleotide for detection of SNP TSC0054151
tttattcgtatty

SEQ ID NO: 222554 - DNA, 13 bp, Artificial Sequence
  Oligonucleotide for detection of SNP TSC0054151
raatacgaataaa

SEQ ID NO: 222555 - DNA, 13 bp, Artificial Sequence
  Oligonucleotide for detection of SNP TSC0054151
gagtgtgagtaaa

SEQ ID NO: 222556 - DNA, 13 bp, Artificial Sequence
  Oligonucleotide for detection of SNP TSC0054151
tttactcacactc

SEQ ID NO: 222557 - DNA, 13 bp, Artificial Sequence
  Oligonucleotide for detection of SNP TSC0054151
gagtgtaagtaaa

SEQ ID NO: 222558 - DNA, 13 bp, Artificial Sequence
  Oligonucleotide for detection of SNP TSC0054151
tttacttacactc

SEQ ID NO: 222559 - DNA, 13 bp, Artificial Sequence
  Oligonucleotide for detection of SNP TSC0054151
gagtgcgagtaaa

SEQ ID NO: 222560 - DNA, 13 bp, Artificial Sequence
  Oligonucleotide for detection of SNP TSC0054151
tttactcgcactc

SEQ ID NO: 222561 - DNA, 13 bp, Artificial Sequence
  Oligonucleotide for detection of SNP TSC0054158
tttaatattttat

SEQ ID NO: 222562 - DNA, 13 bp, Artificial Sequence
  Oligonucleotide for detection of SNP TSC0054158
ataaaatattaaa

SEQ ID NO: 222563 - DNA, 13 bp, Artificial Sequence
  Oligonucleotide for detection of SNP TSC0054158
tttaatgttttat

SEQ ID NO: 222564 - DNA, 13 bp, Artificial Sequence
  Oligonucleotide for detection of SNP TSC0054158
ataaaacattaaa

SEQ ID NO: 222565 - DNA, 13 bp, Artificial Sequence
  Oligonucleotide for detection of SNP TSC0054158
ataaaatgttaag

SEQ ID NO: 222566 - DNA, 13 bp, Artificial Sequence
  Oligonucleotide for detection of SNP TSC0054158
cttaacattttat

SEQ ID NO: 222567 - DNA, 13 bp, Artificial Sequence
  Oligonucleotide for detection of SNP TSC0054158
ataaaacgttaag

SEQ ID NO: 222568 - DNA, 13 bp, Artificial Sequence
  Oligonucleotide for detection of SNP TSC0054158
cttaacgttttat

SEQ ID NO: 222569 - DNA, 13 bp, Artificial Sequence
  Oligonucleotide for detection of SNP TSC0054165
gaattaatgtatt

SEQ ID NO: 222570 - DNA, 13 bp, Artificial Sequence
  Oligonucleotide for detection of SNP TSC0054165
aatacattaattc

SEQ ID NO: 222571 - DNA, 13 bp, Artificial Sequence
  Oligonucleotide for detection of SNP TSC0054165
gaattagtgtatt

SEQ ID NO: 222572 - DNA, 13 bp, Artificial Sequence
  Oligonucleotide for detection of SNP TSC0054165
aatacactaattc

SEQ ID NO: 222573 - DNA, 13 bp, Artificial Sequence
  Oligonucleotide for detection of SNP TSC0054166
gattttgtgtgta

SEQ ID NO: 222574 - DNA, 13 bp, Artificial Sequence
  Oligonucleotide for detection of SNP TSC0054166
tacacacaaaatc

SEQ ID NO: 222575 - DNA, 13 bp, Artificial Sequence
  Oligonucleotide for detection of SNP TSC0054166
gattttatgtgta

SEQ ID NO: 222576 - DNA, 13 bp, Artificial Sequence
  Oligonucleotide for detection of SNP TSC0054166
tacacataaaatc

SEQ ID NO: 222577 - DNA, 13 bp, Artificial Sequence
  Oligonucleotide for detection of SNP TSC0054167
ttaattattattg

SEQ ID NO: 222578 - DNA, 13 bp, Artificial Sequence
  Oligonucleotide for detection of SNP TSC0054167
caataataattaa

SEQ ID NO: 222579 - DNA, 13 bp, Artificial Sequence
  Oligonucleotide for detection of SNP TSC0054167
ttaattgttattg

SEQ ID NO: 222580 - DNA, 13 bp, Artificial Sequence
  Oligonucleotide for detection of SNP TSC0054167
caataacaattaa

SEQ ID NO: 222581 - DNA, 13 bp, Artificial Sequence
  Oligonucleotide for detection of SNP TSC0054167
ttaatcgttattg

SEQ ID NO: 222582 - DNA, 13 bp, Artificial Sequence
  Oligonucleotide for detection of SNP TSC0054167
caataacgattaa

SEQ ID NO: 222583 - DNA, 13 bp, Artificial Sequence
  Oligonucleotide for detection of SNP TSC0054167
taatagtgattgg

SEQ ID NO: 222584 - DNA, 13 bp, Artificial Sequence
  Oligonucleotide for detection of SNP TSC0054167
ccaatcactatta

SEQ ID NO: 222585 - DNA, 13 bp, Artificial Sequence
  Oligonucleotide for detection of SNP TSC0054167
taatagcgattgg

SEQ ID NO: 222586 - DNA, 13 bp, Artificial Sequence
  Oligonucleotide for detection of SNP TSC0054167
ccaatcgctatta

SEQ ID NO: 222587 - DNA, 13 bp, Artificial Sequence
  Oligonucleotide for detection of SNP TSC0054168
tgtgatatttgtg

SEQ ID NO: 222588 - DNA, 13 bp, Artificial Sequence
  Oligonucleotide for detection of SNP TSC0054168
cacaaatatcaca

SEQ ID NO: 222589 - DNA, 13 bp, Artificial Sequence
  Oligonucleotide for detection of SNP TSC0054168
tgtgatttttgtg

SEQ ID NO: 222590 - DNA, 13 bp, Artificial Sequence
  Oligonucleotide for detection of SNP TSC0054168
cacaaaaatcaca

SEQ ID NO: 222591 - DNA, 13 bp, Artificial Sequence
  Oligonucleotide for detection of SNP TSC0054168
tataaatgttata

SEQ ID NO: 222592 - DNA, 13 bp, Artificial Sequence
  Oligonucleotide for detection of SNP TSC0054168
tataacatttata

SEQ ID NO: 222593 - DNA, 13 bp, Artificial Sequence
  Oligonucleotide for detection of SNP TSC0054168
tataaaagttata

SEQ ID NO: 222594 - DNA, 13 bp, Artificial Sequence
  Oligonucleotide for detection of SNP TSC0054168
tataacttttata

SEQ ID NO: 222595 - DNA, 13 bp, Artificial Sequence
  Oligonucleotide for detection of SNP TSC0054169
atatgattataag

SEQ ID NO: 222596 - DNA, 13 bp, Artificial Sequence
  Oligonucleotide for detection of SNP TSC0054169
cttataatcatat

SEQ ID NO: 222597 - DNA, 13 bp, Artificial Sequence
  Oligonucleotide for detection of SNP TSC0054169
atatgagtataag

SEQ ID NO: 222598 - DNA, 13 bp, Artificial Sequence
  Oligonucleotide for detection of SNP TSC0054169
cttatactcatat

SEQ ID NO: 222599 - DNA, 13 bp, Artificial Sequence
  Oligonucleotide for detection of SNP TSC0054169
tttatgattatgt

SEQ ID NO: 222600 - DNA, 13 bp, Artificial Sequence
  Oligonucleotide for detection of SNP TSC0054169
acataatcataaa

SEQ ID NO: 222601 - DNA, 13 bp, Artificial Sequence
  Oligonucleotide for detection of SNP TSC0054170
agaatataaatat

SEQ ID NO: 222602 - DNA, 13 bp, Artificial Sequence
  Oligonucleotide for detection of SNP TSC0054170
atatttatattct

SEQ ID NO: 222603 - DNA, 13 bp, Artificial Sequence
  Oligonucleotide for detection of SNP TSC0054170
agaatagaaatat

SEQ ID NO: 222604 - DNA, 13 bp, Artificial Sequence
  Oligonucleotide for detection of SNP TSC0054170
atatttctattct

SEQ ID NO: 222605 - DNA, 13 bp, Artificial Sequence
  Oligonucleotide for detection of SNP TSC0054176
gtattatatagtg

SEQ ID NO: 222606 - DNA, 13 bp, Artificial Sequence
  Oligonucleotide for detection of SNP TSC0054176
cactatataatac

SEQ ID NO: 222607 - DNA, 13 bp, Artificial Sequence
  Oligonucleotide for detection of SNP TSC0054176
gtattagatagtg

SEQ ID NO: 222608 - DNA, 13 bp, Artificial Sequence
  Oligonucleotide for detection of SNP TSC0054176
cactatctaatac

SEQ ID NO: 222609 - DNA, 13 bp, Artificial Sequence
  Oligonucleotide for detection of SNP TSC0054176
tattgtgtgatay

SEQ ID NO: 222610 - DNA, 13 bp, Artificial Sequence
  Oligonucleotide for detection of SNP TSC0054176
rtatcacacaata

SEQ ID NO: 222611 - DNA, 13 bp, Artificial Sequence
  Oligonucleotide for detection of SNP TSC0054176
tattgtttgatay

SEQ ID NO: 222612 - DNA, 13 bp, Artificial Sequence
  Oligonucleotide for detection of SNP TSC0054176
rtatcaaacaata

SEQ ID NO: 222613 - DNA, 13 bp, Artificial Sequence
  Oligonucleotide for detection of SNP TSC0054177
tttattaatattt

SEQ ID NO: 222614 - DNA, 13 bp, Artificial Sequence
  Oligonucleotide for detection of SNP TSC0054177
aaatattaataaa

SEQ ID NO: 222615 - DNA, 13 bp, Artificial Sequence
  Oligonucleotide for detection of SNP TSC0054177
tttattgatattt

SEQ ID NO: 222616 - DNA, 13 bp, Artificial Sequence
  Oligonucleotide for detection of SNP TSC0054177
aaatatcaataaa

SEQ ID NO: 222617 - DNA, 13 bp, Artificial Sequence
  Oligonucleotide for detection of SNP TSC0054177
tttatcgatattt

SEQ ID NO: 222618 - DNA, 13 bp, Artificial Sequence
  Oligonucleotide for detection of SNP TSC0054177
aaatatcgataaa

SEQ ID NO: 222619 - DNA, 13 bp, Artificial Sequence
  Oligonucleotide for detection of SNP TSC0054177
aaatattggtgaa

SEQ ID NO: 222620 - DNA, 13 bp, Artificial Sequence
  Oligonucleotide for detection of SNP TSC0054177
ttcaccaatattt

SEQ ID NO: 222621 - DNA, 13 bp, Artificial Sequence
  Oligonucleotide for detection of SNP TSC0054177
aaatatcggtgaa

SEQ ID NO: 222622 - DNA, 13 bp, Artificial Sequence
  Oligonucleotide for detection of SNP TSC0054177
ttcaccgatattt

SEQ ID NO: 222623 - DNA, 13 bp, Artificial Sequence
  Oligonucleotide for detection of SNP TSC0054178
tagaaaggtaggg

SEQ ID NO: 222624 - DNA, 13 bp, Artificial Sequence
  Oligonucleotide for detection of SNP TSC0054178
ccctacctttcta

SEQ ID NO: 222625 - DNA, 13 bp, Artificial Sequence
  Oligonucleotide for detection of SNP TSC0054178
tagaaaagtaggg

SEQ ID NO: 222626 - DNA, 13 bp, Artificial Sequence
  Oligonucleotide for detection of SNP TSC0054178
ccctacttttcta

SEQ ID NO: 222627 - DNA, 13 bp, Artificial Sequence
  Oligonucleotide for detection of SNP TSC0054179
gaggttagagaay

SEQ ID NO: 222628 - DNA, 13 bp, Artificial Sequence
  Oligonucleotide for detection of SNP TSC0054179
rttctctaacctc

SEQ ID NO: 222629 - DNA, 13 bp, Artificial Sequence
  Oligonucleotide for detection of SNP TSC0054179
gaggtttgagaay

SEQ ID NO: 222630 - DNA, 13 bp, Artificial Sequence
  Oligonucleotide for detection of SNP TSC0054179
rttctcaaacctc

SEQ ID NO: 222631 - DNA, 13 bp, Artificial Sequence
  Oligonucleotide for detection of SNP TSC0054180
ggtgttgagtgty

SEQ ID NO: 222632 - DNA, 13 bp, Artificial Sequence
  Oligonucleotide for detection of SNP TSC0054180
racactcaacacc

SEQ ID NO: 222633 - DNA, 13 bp, Artificial Sequence
  Oligonucleotide for detection of SNP TSC0054180
ggtgttaagtgty

SEQ ID NO: 222634 - DNA, 13 bp, Artificial Sequence
  Oligonucleotide for detection of SNP TSC0054180
racacttaacacc

SEQ ID NO: 222635 - DNA, 13 bp, Artificial Sequence
  Oligonucleotide for detection of SNP TSC0054180
ggcgttgagtgty

SEQ ID NO: 222636 - DNA, 13 bp, Artificial Sequence
  Oligonucleotide for detection of SNP TSC0054180
racactcaacgcc

SEQ ID NO: 222637 - DNA, 13 bp, Artificial Sequence
  Oligonucleotide for detection of SNP TSC0054180
ggcgttaagtgty

SEQ ID NO: 222638 - DNA, 13 bp, Artificial Sequence
  Oligonucleotide for detection of SNP TSC0054180
racacttaacgcc

SEQ ID NO: 222639 - DNA, 13 bp, Artificial Sequence
  Oligonucleotide for detection of SNP TSC0054187
gaataagtataaa

SEQ ID NO: 222640 - DNA, 13 bp, Artificial Sequence
  Oligonucleotide for detection of SNP TSC0054187
tttatacttattc

SEQ ID NO: 222641 - DNA, 13 bp, Artificial Sequence
  Oligonucleotide for detection of SNP TSC0054187
gaataaatataaa

SEQ ID NO: 222642 - DNA, 13 bp, Artificial Sequence
  Oligonucleotide for detection of SNP TSC0054187
tttatatttattc

SEQ ID NO: 222643 - DNA, 13 bp, Artificial Sequence
  Oligonucleotide for detection of SNP TSC0054196
gaatttattgggg

SEQ ID NO: 222644 - DNA, 13 bp, Artificial Sequence
  Oligonucleotide for detection of SNP TSC0054196
ccccaataaattc

SEQ ID NO: 222645 - DNA, 13 bp, Artificial Sequence
  Oligonucleotide for detection of SNP TSC0054196
gaatttgttgggg

SEQ ID NO: 222646 - DNA, 13 bp, Artificial Sequence
  Oligonucleotide for detection of SNP TSC0054196
ccccaacaaattc

SEQ ID NO: 222647 - DNA, 13 bp, Artificial Sequence
  Oligonucleotide for detection of SNP TSC0054196
gaattcgttgggg

SEQ ID NO: 222648 - DNA, 13 bp, Artificial Sequence
  Oligonucleotide for detection of SNP TSC0054196
ccccaacgaattc

SEQ ID NO: 222649 - DNA, 13 bp, Artificial Sequence
  Oligonucleotide for detection of SNP TSC0054196
ttttagtgggtty

SEQ ID NO: 222650 - DNA, 13 bp, Artificial Sequence
  Oligonucleotide for detection of SNP TSC0054196
raacccactaaaa

SEQ ID NO: 222651 - DNA, 13 bp, Artificial Sequence
  Oligonucleotide for detection of SNP TSC0054196
ttttagcgggtty

SEQ ID NO: 222652 - DNA, 13 bp, Artificial Sequence
  Oligonucleotide for detection of SNP TSC0054196
raacccgctaaaa

SEQ ID NO: 222653 - DNA, 13 bp, Artificial Sequence
  Oligonucleotide for detection of SNP TSC0054200
ataagaagattta

SEQ ID NO: 222654 - DNA, 13 bp, Artificial Sequence
  Oligonucleotide for detection of SNP TSC0054200
taaatcttcttat

SEQ ID NO: 222655 - DNA, 13 bp, Artificial Sequence
  Oligonucleotide for detection of SNP TSC0054200
ataagaggattta

SEQ ID NO: 222656 - DNA, 13 bp, Artificial Sequence
  Oligonucleotide for detection of SNP TSC0054200
taaatcctcttat

SEQ ID NO: 222657 - DNA, 13 bp, Artificial Sequence
  Oligonucleotide for detection of SNP TSC0054201
gtatgtggttgat

SEQ ID NO: 222658 - DNA, 13 bp, Artificial Sequence
  Oligonucleotide for detection of SNP TSC0054201
atcaaccacatac

SEQ ID NO: 222659 - DNA, 13 bp, Artificial Sequence
  Oligonucleotide for detection of SNP TSC0054201
gtatgtagttgat

SEQ ID NO: 222660 - DNA, 13 bp, Artificial Sequence
  Oligonucleotide for detection of SNP TSC0054201
atcaactacatac

SEQ ID NO: 222661 - DNA, 13 bp, Artificial Sequence
  Oligonucleotide for detection of SNP TSC0054202
ttgtatatggata

SEQ ID NO: 222662 - DNA, 13 bp, Artificial Sequence
  Oligonucleotide for detection of SNP TSC0054202
tatccatatacaa

SEQ ID NO: 222663 - DNA, 13 bp, Artificial Sequence
  Oligonucleotide for detection of SNP TSC0054202
ttgtatgtggata

SEQ ID NO: 222664 - DNA, 13 bp, Artificial Sequence
  Oligonucleotide for detection of SNP TSC0054202
tatccacatacaa

SEQ ID NO: 222665 - DNA, 13 bp, Artificial Sequence
  Oligonucleotide for detection of SNP TSC0054202
ttgtacgtggata

SEQ ID NO: 222666 - DNA, 13 bp, Artificial Sequence
  Oligonucleotide for detection of SNP TSC0054202
tatccacgtacaa

SEQ ID NO: 222667 - DNA, 13 bp, Artificial Sequence
  Oligonucleotide for detection of SNP TSC0054202
tgtttatgtatag

SEQ ID NO: 222668 - DNA, 13 bp, Artificial Sequence
  Oligonucleotide for detection of SNP TSC0054202
ctatacataaaca

SEQ ID NO: 222669 - DNA, 13 bp, Artificial Sequence
  Oligonucleotide for detection of SNP TSC0054202
tgtttacgtatag

SEQ ID NO: 222670 - DNA, 13 bp, Artificial Sequence
  Oligonucleotide for detection of SNP TSC0054202
ctatacgtaaaca

SEQ ID NO: 222671 - DNA, 13 bp, Artificial Sequence
  Oligonucleotide for detection of SNP TSC0054203
tttatagagggtt

SEQ ID NO: 222672 - DNA, 13 bp, Artificial Sequence
  Oligonucleotide for detection of SNP TSC0054203
aaccctctataaa

SEQ ID NO: 222673 - DNA, 13 bp, Artificial Sequence
  Oligonucleotide for detection of SNP TSC0054203
tttataaagggtt

SEQ ID NO: 222674 - DNA, 13 bp, Artificial Sequence
  Oligonucleotide for detection of SNP TSC0054203
aaccctttataaa

SEQ ID NO: 222675 - DNA, 13 bp, Artificial Sequence
  Oligonucleotide for detection of SNP TSC0054204
tattttgtgttag

SEQ ID NO: 222676 - DNA, 13 bp, Artificial Sequence
  Oligonucleotide for detection of SNP TSC0054204
ctaacacaaaata

SEQ ID NO: 222677 - DNA, 13 bp, Artificial Sequence
  Oligonucleotide for detection of SNP TSC0054204
tattttatgttag

SEQ ID NO: 222678 - DNA, 13 bp, Artificial Sequence
  Oligonucleotide for detection of SNP TSC0054204
ctaacataaaata

SEQ ID NO: 222679 - DNA, 13 bp, Artificial Sequence
  Oligonucleotide for detection of SNP TSC0054205
gtatttggttaat

SEQ ID NO: 222680 - DNA, 13 bp, Artificial Sequence
  Oligonucleotide for detection of SNP TSC0054205
attaaccaaatac

SEQ ID NO: 222681 - DNA, 13 bp, Artificial Sequence
  Oligonucleotide for detection of SNP TSC0054205
gtatttagttaat

SEQ ID NO: 222682 - DNA, 13 bp, Artificial Sequence
  Oligonucleotide for detection of SNP TSC0054205
attaactaaatac

SEQ ID NO: 222683 - DNA, 13 bp, Artificial Sequence
  Oligonucleotide for detection of SNP TSC0054206
tttaatgtttgta

SEQ ID NO: 222684 - DNA, 13 bp, Artificial Sequence
  Oligonucleotide for detection of SNP TSC0054206
tacaaacattaaa

SEQ ID NO: 222685 - DNA, 13 bp, Artificial Sequence
  Oligonucleotide for detection of SNP TSC0054206
tttaatatttgta

SEQ ID NO: 222686 - DNA, 13 bp, Artificial Sequence
  Oligonucleotide for detection of SNP TSC0054206
tacaaatattaaa

SEQ ID NO: 222687 - DNA, 13 bp, Artificial Sequence
  Oligonucleotide for detection of SNP TSC0054207
ttttagatttaty

SEQ ID NO: 222688 - DNA, 13 bp, Artificial Sequence
  Oligonucleotide for detection of SNP TSC0054207
rataaatctaaaa

SEQ ID NO: 222689 - DNA, 13 bp, Artificial Sequence
  Oligonucleotide for detection of SNP TSC0054209
gtgtgaaattttt

SEQ ID NO: 222690 - DNA, 13 bp, Artificial Sequence
  Oligonucleotide for detection of SNP TSC0054209
aaaaatttcacac

SEQ ID NO: 222691 - DNA, 13 bp, Artificial Sequence
  Oligonucleotide for detection of SNP TSC0054209
gtgtgagattttt

SEQ ID NO: 222692 - DNA, 13 bp, Artificial Sequence
  Oligonucleotide for detection of SNP TSC0054209
aaaaatctcacac

SEQ ID NO: 222693 - DNA, 13 bp, Artificial Sequence
  Oligonucleotide for detection of SNP TSC0054210
tttgtgtggtaat

SEQ ID NO: 222694 - DNA, 13 bp, Artificial Sequence
  Oligonucleotide for detection of SNP TSC0054210
attaccacacaaa

SEQ ID NO: 222695 - DNA, 13 bp, Artificial Sequence
  Oligonucleotide for detection of SNP TSC0054210
tttgtggggtaat

SEQ ID NO: 222696 - DNA, 13 bp, Artificial Sequence
  Oligonucleotide for detection of SNP TSC0054210
attaccccacaaa

SEQ ID NO: 222697 - DNA, 13 bp, Artificial Sequence
  Oligonucleotide for detection of SNP TSC0054210
tttgtgcggtaat

SEQ ID NO: 222698 - DNA, 13 bp, Artificial Sequence
  Oligonucleotide for detection of SNP TSC0054210
attaccgcacaaa

SEQ ID NO: 222699 - DNA, 13 bp, Artificial Sequence
  Oligonucleotide for detection of SNP TSC0054210
attattgtataga

SEQ ID NO: 222700 - DNA, 13 bp, Artificial Sequence
  Oligonucleotide for detection of SNP TSC0054210
tctatacaataat

SEQ ID NO: 222701 - DNA, 13 bp, Artificial Sequence
  Oligonucleotide for detection of SNP TSC0054210
attattttataga

SEQ ID NO: 222702 - DNA, 13 bp, Artificial Sequence
  Oligonucleotide for detection of SNP TSC0054210
tctataaaataat

SEQ ID NO: 222703 - DNA, 13 bp, Artificial Sequence
  Oligonucleotide for detection of SNP TSC0054210
attatcgtataga

SEQ ID NO: 222704 - DNA, 13 bp, Artificial Sequence
  Oligonucleotide for detection of SNP TSC0054210
tctatacgataat

SEQ ID NO: 222705 - DNA, 13 bp, Artificial Sequence
  Oligonucleotide for detection of SNP TSC0054215
ttttataattagt

SEQ ID NO: 222706 - DNA, 13 bp, Artificial Sequence
  Oligonucleotide for detection of SNP TSC0054215
actaattataaaa

SEQ ID NO: 222707 - DNA, 13 bp, Artificial Sequence
  Oligonucleotide for detection of SNP TSC0054215
ttttatgattagt

SEQ ID NO: 222708 - DNA, 13 bp, Artificial Sequence
  Oligonucleotide for detection of SNP TSC0054215
actaatcataaaa

SEQ ID NO: 222709 - DNA, 13 bp, Artificial Sequence
  Oligonucleotide for detection of SNP TSC0054215
ttttacgattagt

SEQ ID NO: 222710 - DNA, 13 bp, Artificial Sequence
  Oligonucleotide for detection of SNP TSC0054215
actaatcgtaaaa

SEQ ID NO: 222711 - DNA, 13 bp, Artificial Sequence
  Oligonucleotide for detection of SNP TSC0054215
attaattgtagga

SEQ ID NO: 222712 - DNA, 13 bp, Artificial Sequence
  Oligonucleotide for detection of SNP TSC0054215
tcctacaattaat

SEQ ID NO: 222713 - DNA, 13 bp, Artificial Sequence
  Oligonucleotide for detection of SNP TSC0054215
attaatcgtagga

SEQ ID NO: 222714 - DNA, 13 bp, Artificial Sequence
  Oligonucleotide for detection of SNP TSC0054215
tcctacgattaat

SEQ ID NO: 222715 - DNA, 13 bp, Artificial Sequence
  Oligonucleotide for detection of SNP TSC0054216
tattgttgggaat

SEQ ID NO: 222716 - DNA, 13 bp, Artificial Sequence
  Oligonucleotide for detection of SNP TSC0054216
attcccaacaata

SEQ ID NO: 222717 - DNA, 13 bp, Artificial Sequence
  Oligonucleotide for detection of SNP TSC0054216
tattgtggggaat

SEQ ID NO: 222718 - DNA, 13 bp, Artificial Sequence
  Oligonucleotide for detection of SNP TSC0054216
attccccacaata

SEQ ID NO: 222719 - DNA, 13 bp, Artificial Sequence
  Oligonucleotide for detection of SNP TSC0054216
atttttaatagtg

SEQ ID NO: 222720 - DNA, 13 bp, Artificial Sequence
  Oligonucleotide for detection of SNP TSC0054216
cactattaaaaat

SEQ ID NO: 222721 - DNA, 13 bp, Artificial Sequence
  Oligonucleotide for detection of SNP TSC0054216
attttttatagtg

SEQ ID NO: 222722 - DNA, 13 bp, Artificial Sequence
  Oligonucleotide for detection of SNP TSC0054216
cactataaaaaat

SEQ ID NO: 222723 - DNA, 13 bp, Artificial Sequence
  Oligonucleotide for detection of SNP TSC0054218
gtgatgaaaggta

SEQ ID NO: 222724 - DNA, 13 bp, Artificial Sequence
  Oligonucleotide for detection of SNP TSC0054218
tacctttcatcac

SEQ ID NO: 222725 - DNA, 13 bp, Artificial Sequence
  Oligonucleotide for detection of SNP TSC0054218
gtgatggaaggta

SEQ ID NO: 222726 - DNA, 13 bp, Artificial Sequence
  Oligonucleotide for detection of SNP TSC0054218
taccttccatcac

SEQ ID NO: 222727 - DNA, 13 bp, Artificial Sequence
  Oligonucleotide for detection of SNP TSC0054219
taattttgtttgy

SEQ ID NO: 222728 - DNA, 13 bp, Artificial Sequence
  Oligonucleotide for detection of SNP TSC0054219
rcaaacaaaatta

SEQ ID NO: 222729 - DNA, 13 bp, Artificial Sequence
  Oligonucleotide for detection of SNP TSC0054219
taatttcgtttgy

SEQ ID NO: 222730 - DNA, 13 bp, Artificial Sequence
  Oligonucleotide for detection of SNP TSC0054219
rcaaacgaaatta

SEQ ID NO: 222731 - DNA, 13 bp, Artificial Sequence
  Oligonucleotide for detection of SNP TSC0054219
gtaaatgagatta

SEQ ID NO: 222732 - DNA, 13 bp, Artificial Sequence
  Oligonucleotide for detection of SNP TSC0054219
taatctcatttac

SEQ ID NO: 222733 - DNA, 13 bp, Artificial Sequence
  Oligonucleotide for detection of SNP TSC0054219
gtaaataagatta

SEQ ID NO: 222734 - DNA, 13 bp, Artificial Sequence
  Oligonucleotide for detection of SNP TSC0054219
taatcttatttac

SEQ ID NO: 222735 - DNA, 13 bp, Artificial Sequence
  Oligonucleotide for detection of SNP TSC0054219
gtaaacgagatta

SEQ ID NO: 222736 - DNA, 13 bp, Artificial Sequence
  Oligonucleotide for detection of SNP TSC0054219
taatctcgtttac

SEQ ID NO: 222737 - DNA, 13 bp, Artificial Sequence
  Oligonucleotide for detection of SNP TSC0054220
gtttaaaatggta

SEQ ID NO: 222738 - DNA, 13 bp, Artificial Sequence
  Oligonucleotide for detection of SNP TSC0054220
taccattttaaac

SEQ ID NO: 222739 - DNA, 13 bp, Artificial Sequence
  Oligonucleotide for detection of SNP TSC0054220
gtttaatatggta

SEQ ID NO: 222740 - DNA, 13 bp, Artificial Sequence
  Oligonucleotide for detection of SNP TSC0054220
taccatattaaac

SEQ ID NO: 222741 - DNA, 13 bp, Artificial Sequence
  Oligonucleotide for detection of SNP TSC0054220
tgttattttgaay

SEQ ID NO: 222742 - DNA, 13 bp, Artificial Sequence
  Oligonucleotide for detection of SNP TSC0054220
rttcaaaataaca

SEQ ID NO: 222743 - DNA, 13 bp, Artificial Sequence
  Oligonucleotide for detection of SNP TSC0054220
tgttatgttgaay

SEQ ID NO: 222744 - DNA, 13 bp, Artificial Sequence
  Oligonucleotide for detection of SNP TSC0054220
rttcaacataaca

SEQ ID NO: 222745 - DNA, 13 bp, Artificial Sequence
  Oligonucleotide for detection of SNP TSC0054221
aaagaggtgggta

SEQ ID NO: 222746 - DNA, 13 bp, Artificial Sequence
  Oligonucleotide for detection of SNP TSC0054221
tacccacctcttt

SEQ ID NO: 222747 - DNA, 13 bp, Artificial Sequence
  Oligonucleotide for detection of SNP TSC0054221
aaagagatgggta

SEQ ID NO: 222748 - DNA, 13 bp, Artificial Sequence
  Oligonucleotide for detection of SNP TSC0054221
tacccatctcttt

SEQ ID NO: 222749 - DNA, 13 bp, Artificial Sequence
  Oligonucleotide for detection of SNP TSC0054227
ttattgtgttagy

SEQ ID NO: 222750 - DNA, 13 bp, Artificial Sequence
  Oligonucleotide for detection of SNP TSC0054227
rctaacacaataa

SEQ ID NO: 222751 - DNA, 13 bp, Artificial Sequence
  Oligonucleotide for detection of SNP TSC0054227
ttatcgtgttagy

SEQ ID NO: 222752 - DNA, 13 bp, Artificial Sequence
  Oligonucleotide for detection of SNP TSC0054227
rctaacacgataa

SEQ ID NO: 222753 - DNA, 13 bp, Artificial Sequence
  Oligonucleotide for detection of SNP TSC0054227
ttattgcgttagy

SEQ ID NO: 222754 - DNA, 13 bp, Artificial Sequence
  Oligonucleotide for detection of SNP TSC0054227
rctaacgcaataa

SEQ ID NO: 222755 - DNA, 13 bp, Artificial Sequence
  Oligonucleotide for detection of SNP TSC0054227
ttatcgcgttagy

SEQ ID NO: 222756 - DNA, 13 bp, Artificial Sequence
  Oligonucleotide for detection of SNP TSC0054227
rctaacgcgataa

SEQ ID NO: 222757 - DNA, 13 bp, Artificial Sequence
  Oligonucleotide for detection of SNP TSC0054227
gttaatacggtga

SEQ ID NO: 222758 - DNA, 13 bp, Artificial Sequence
  Oligonucleotide for detection of SNP TSC0054227
tcaccgtattaac

SEQ ID NO: 222759 - DNA, 13 bp, Artificial Sequence
  Oligonucleotide for detection of SNP TSC0054227
gttaatgcggtga

SEQ ID NO: 222760 - DNA, 13 bp, Artificial Sequence
  Oligonucleotide for detection of SNP TSC0054227
tcaccgcattaac

SEQ ID NO: 222761 - DNA, 13 bp, Artificial Sequence
  Oligonucleotide for detection of SNP TSC0054227
gttaacgcggtga

SEQ ID NO: 222762 - DNA, 13 bp, Artificial Sequence
  Oligonucleotide for detection of SNP TSC0054227
tcaccgcgttaac

SEQ ID NO: 222763 - DNA, 13 bp, Artificial Sequence
  Oligonucleotide for detection of SNP TSC0054228
taggagaagtaty

SEQ ID NO: 222764 - DNA, 13 bp, Artificial Sequence
  Oligonucleotide for detection of SNP TSC0054228
ratacttctccta

SEQ ID NO: 222765 - DNA, 13 bp, Artificial Sequence
  Oligonucleotide for detection of SNP TSC0054228
taggaggagtaty

SEQ ID NO: 222766 - DNA, 13 bp, Artificial Sequence
  Oligonucleotide for detection of SNP TSC0054228
ratactcctccta

SEQ ID NO: 222767 - DNA, 13 bp, Artificial Sequence
  Oligonucleotide for detection of SNP TSC0054229
ttaatatagggag

SEQ ID NO: 222768 - DNA, 13 bp, Artificial Sequence
  Oligonucleotide for detection of SNP TSC0054229
ctccctatattaa

SEQ ID NO: 222769 - DNA, 13 bp, Artificial Sequence
  Oligonucleotide for detection of SNP TSC0054229
ttaatagagggag

SEQ ID NO: 222770 - DNA, 13 bp, Artificial Sequence
  Oligonucleotide for detection of SNP TSC0054229
ctccctctattaa

SEQ ID NO: 222771 - DNA, 13 bp, Artificial Sequence
  Oligonucleotide for detection of SNP TSC0054230
aattggatgattt

SEQ ID NO: 222772 - DNA, 13 bp, Artificial Sequence
  Oligonucleotide for detection of SNP TSC0054230
aaatcatccaatt

SEQ ID NO: 222773 - DNA, 13 bp, Artificial Sequence
  Oligonucleotide for detection of SNP TSC0054230
aattgggtgattt

SEQ ID NO: 222774 - DNA, 13 bp, Artificial Sequence
  Oligonucleotide for detection of SNP TSC0054230
aaatcacccaatt

SEQ ID NO: 222775 - DNA, 13 bp, Artificial Sequence
  Oligonucleotide for detection of SNP TSC0054236
gaaaatagtatta

SEQ ID NO: 222776 - DNA, 13 bp, Artificial Sequence
  Oligonucleotide for detection of SNP TSC0054236
taatactattttc

SEQ ID NO: 222777 - DNA, 13 bp, Artificial Sequence
  Oligonucleotide for detection of SNP TSC0054236
gaaaatggtatta

SEQ ID NO: 222778 - DNA, 13 bp, Artificial Sequence
  Oligonucleotide for detection of SNP TSC0054236
taataccattttc

SEQ ID NO: 222779 - DNA, 13 bp, Artificial Sequence
  Oligonucleotide for detection of SNP TSC0054237
tttgggattttat

SEQ ID NO: 222780 - DNA, 13 bp, Artificial Sequence
  Oligonucleotide for detection of SNP TSC0054237
ataaaatcccaaa

SEQ ID NO: 222781 - DNA, 13 bp, Artificial Sequence
  Oligonucleotide for detection of SNP TSC0054237
tttggggttttat

SEQ ID NO: 222782 - DNA, 13 bp, Artificial Sequence
  Oligonucleotide for detection of SNP TSC0054237
ataaaaccccaaa

SEQ ID NO: 222783 - DNA, 13 bp, Artificial Sequence
  Oligonucleotide for detection of SNP TSC0054238
atattatgatgta

SEQ ID NO: 222784 - DNA, 13 bp, Artificial Sequence
  Oligonucleotide for detection of SNP TSC0054238
tacatcataatat

SEQ ID NO: 222785 - DNA, 13 bp, Artificial Sequence
  Oligonucleotide for detection of SNP TSC0054238
atattacgatgta

SEQ ID NO: 222786 - DNA, 13 bp, Artificial Sequence
  Oligonucleotide for detection of SNP TSC0054238
tacatcgtaatat

SEQ ID NO: 222787 - DNA, 13 bp, Artificial Sequence
  Oligonucleotide for detection of SNP TSC0054238
tgtattgtaatgt

SEQ ID NO: 222788 - DNA, 13 bp, Artificial Sequence
  Oligonucleotide for detection of SNP TSC0054238
acattacaataca

SEQ ID NO: 222789 - DNA, 13 bp, Artificial Sequence
  Oligonucleotide for detection of SNP TSC0054238
tgtattataatgt

SEQ ID NO: 222790 - DNA, 13 bp, Artificial Sequence
  Oligonucleotide for detection of SNP TSC0054238
acattataataca

SEQ ID NO: 222791 - DNA, 13 bp, Artificial Sequence
  Oligonucleotide for detection of SNP TSC0054238
tgtatcgtaatgt

SEQ ID NO: 222792 - DNA, 13 bp, Artificial Sequence
  Oligonucleotide for detection of SNP TSC0054238
acattacgataca

SEQ ID NO: 222793 - DNA, 13 bp, Artificial Sequence
  Oligonucleotide for detection of SNP TSC0054239
gttattgttataa

SEQ ID NO: 222794 - DNA, 13 bp, Artificial Sequence
  Oligonucleotide for detection of SNP TSC0054239
ttataacaataac

SEQ ID NO: 222795 - DNA, 13 bp, Artificial Sequence
  Oligonucleotide for detection of SNP TSC0054239
gttattattataa

SEQ ID NO: 222796 - DNA, 13 bp, Artificial Sequence
  Oligonucleotide for detection of SNP TSC0054239
ttataataataac

SEQ ID NO: 222797 - DNA, 13 bp, Artificial Sequence
  Oligonucleotide for detection of SNP TSC0054240
ttatgatgtagtt

SEQ ID NO: 222798 - DNA, 13 bp, Artificial Sequence
  Oligonucleotide for detection of SNP TSC0054240
aactacatcataa

SEQ ID NO: 222799 - DNA, 13 bp, Artificial Sequence
  Oligonucleotide for detection of SNP TSC0054240
ttacgatgtagtt

SEQ ID NO: 222800 - DNA, 13 bp, Artificial Sequence
  Oligonucleotide for detection of SNP TSC0054240
aactacatcgtaa

SEQ ID NO: 222801 - DNA, 13 bp, Artificial Sequence
  Oligonucleotide for detection of SNP TSC0054240
ttatgacgtagtt

SEQ ID NO: 222802 - DNA, 13 bp, Artificial Sequence
  Oligonucleotide for detection of SNP TSC0054240
aactacgtcataa

SEQ ID NO: 222803 - DNA, 13 bp, Artificial Sequence
  Oligonucleotide for detection of SNP TSC0054240
ttacgacgtagtt

SEQ ID NO: 222804 - DNA, 13 bp, Artificial Sequence
  Oligonucleotide for detection of SNP TSC0054240
aactacgtcgtaa

SEQ ID NO: 222805 - DNA, 13 bp, Artificial Sequence
  Oligonucleotide for detection of SNP TSC0054240
aattgtgttgtaa

SEQ ID NO: 222806 - DNA, 13 bp, Artificial Sequence
  Oligonucleotide for detection of SNP TSC0054240
ttacaacacaatt

SEQ ID NO: 222807 - DNA, 13 bp, Artificial Sequence
  Oligonucleotide for detection of SNP TSC0054240
aattgtattgtaa

SEQ ID NO: 222808 - DNA, 13 bp, Artificial Sequence
  Oligonucleotide for detection of SNP TSC0054240
ttacaatacaatt

SEQ ID NO: 222809 - DNA, 13 bp, Artificial Sequence
  Oligonucleotide for detection of SNP TSC0054240
aattgcgttgtaa

SEQ ID NO: 222810 - DNA, 13 bp, Artificial Sequence
  Oligonucleotide for detection of SNP TSC0054240
ttacaacgcaatt

SEQ ID NO: 222811 - DNA, 13 bp, Artificial Sequence
  Oligonucleotide for detection of SNP TSC0054240
aattgtatcgtaa

SEQ ID NO: 222812 - DNA, 13 bp, Artificial Sequence
  Oligonucleotide for detection of SNP TSC0054240
ttacgatacaatt

SEQ ID NO: 222813 - DNA, 13 bp, Artificial Sequence
  Oligonucleotide for detection of SNP TSC0054240
aattgtgtcgtaa

SEQ ID NO: 222814 - DNA, 13 bp, Artificial Sequence
  Oligonucleotide for detection of SNP TSC0054240
ttacgacacaatt

SEQ ID NO: 222815 - DNA, 13 bp, Artificial Sequence
  Oligonucleotide for detection of SNP TSC0054240
aattgcgtcgtaa

SEQ ID NO: 222816 - DNA, 13 bp, Artificial Sequence
  Oligonucleotide for detection of SNP TSC0054240
ttacgacgcaatt

SEQ ID NO: 222817 - DNA, 13 bp, Artificial Sequence
  Oligonucleotide for detection of SNP TSC0054241
atatgatgtataa

SEQ ID NO: 222818 - DNA, 13 bp, Artificial Sequence
  Oligonucleotide for detection of SNP TSC0054241
ttatacatcatat

SEQ ID NO: 222819 - DNA, 13 bp, Artificial Sequence
  Oligonucleotide for detection of SNP TSC0054241
atatgacgtataa

SEQ ID NO: 222820 - DNA, 13 bp, Artificial Sequence
  Oligonucleotide for detection of SNP TSC0054241
ttatacgtcatat

SEQ ID NO: 222821 - DNA, 13 bp, Artificial Sequence
  Oligonucleotide for detection of SNP TSC0054241
ttgtatgttatgt

SEQ ID NO: 222822 - DNA, 13 bp, Artificial Sequence
  Oligonucleotide for detection of SNP TSC0054241
acataacatacaa

SEQ ID NO: 222823 - DNA, 13 bp, Artificial Sequence
  Oligonucleotide for detection of SNP TSC0054241
ttgtatattatgt

SEQ ID NO: 222824 - DNA, 13 bp, Artificial Sequence
  Oligonucleotide for detection of SNP TSC0054241
acataatatacaa

SEQ ID NO: 222825 - DNA, 13 bp, Artificial Sequence
  Oligonucleotide for detection of SNP TSC0054241
ttgtacgttatgt

SEQ ID NO: 222826 - DNA, 13 bp, Artificial Sequence
  Oligonucleotide for detection of SNP TSC0054241
acataacgtacaa

SEQ ID NO: 222827 - DNA, 13 bp, Artificial Sequence
  Oligonucleotide for detection of SNP TSC0054244
atattatggatta

SEQ ID NO: 222828 - DNA, 13 bp, Artificial Sequence
  Oligonucleotide for detection of SNP TSC0054244
taatccataatat

SEQ ID NO: 222829 - DNA, 13 bp, Artificial Sequence
  Oligonucleotide for detection of SNP TSC0054244
atattagggatta

SEQ ID NO: 222830 - DNA, 13 bp, Artificial Sequence
  Oligonucleotide for detection of SNP TSC0054244
taatccctaatat

SEQ ID NO: 222831 - DNA, 13 bp, Artificial Sequence
  Oligonucleotide for detection of SNP TSC0054244
tggtttatgatat

SEQ ID NO: 222832 - DNA, 13 bp, Artificial Sequence
  Oligonucleotide for detection of SNP TSC0054244
atatcataaacca

SEQ ID NO: 222833 - DNA, 13 bp, Artificial Sequence
  Oligonucleotide for detection of SNP TSC0054244
tggtttttgatat

SEQ ID NO: 222834 - DNA, 13 bp, Artificial Sequence
  Oligonucleotide for detection of SNP TSC0054244
atatcaaaaacca

SEQ ID NO: 222835 - DNA, 13 bp, Artificial Sequence
  Oligonucleotide for detection of SNP TSC0054249
tattatataggtg

SEQ ID NO: 222836 - DNA, 13 bp, Artificial Sequence
  Oligonucleotide for detection of SNP TSC0054249
cacctatataata

SEQ ID NO: 222837 - DNA, 13 bp, Artificial Sequence
  Oligonucleotide for detection of SNP TSC0054249
tattatgtaggtg

SEQ ID NO: 222838 - DNA, 13 bp, Artificial Sequence
  Oligonucleotide for detection of SNP TSC0054249
cacctacataata

SEQ ID NO: 222839 - DNA, 13 bp, Artificial Sequence
  Oligonucleotide for detection of SNP TSC0054250
ttaatgtattaaa

SEQ ID NO: 222840 - DNA, 13 bp, Artificial Sequence
  Oligonucleotide for detection of SNP TSC0054250
tttaatacattaa

SEQ ID NO: 222841 - DNA, 13 bp, Artificial Sequence
  Oligonucleotide for detection of SNP TSC0054250
ttaatggattaaa

SEQ ID NO: 222842 - DNA, 13 bp, Artificial Sequence
  Oligonucleotide for detection of SNP TSC0054250
tttaatccattaa

SEQ ID NO: 222843 - DNA, 13 bp, Artificial Sequence
  Oligonucleotide for detection of SNP TSC0054250
tttgatttattgg

SEQ ID NO: 222844 - DNA, 13 bp, Artificial Sequence
  Oligonucleotide for detection of SNP TSC0054250
ccaataaatcaaa

SEQ ID NO: 222845 - DNA, 13 bp, Artificial Sequence
  Oligonucleotide for detection of SNP TSC0006654
tttttggtgagay

SEQ ID NO: 222846 - DNA, 13 bp, Artificial Sequence
  Oligonucleotide for detection of SNP TSC0006654
rtctcaccaaaaa

SEQ ID NO: 222847 - DNA, 13 bp, Artificial Sequence
  Oligonucleotide for detection of SNP TSC0006654
tttttgttgagay

SEQ ID NO: 222848 - DNA, 13 bp, Artificial Sequence
  Oligonucleotide for detection of SNP TSC0006654
rtctcaacaaaaa

SEQ ID NO: 222849 - DNA, 13 bp, Artificial Sequence
  Oligonucleotide for detection of SNP TSC0054252
aggtatggataaa

SEQ ID NO: 222850 - DNA, 13 bp, Artificial Sequence
  Oligonucleotide for detection of SNP TSC0054252
tttatccatacct

SEQ ID NO: 222851 - DNA, 13 bp, Artificial Sequence
  Oligonucleotide for detection of SNP TSC0054252
aggtatagataaa

SEQ ID NO: 222852 - DNA, 13 bp, Artificial Sequence
  Oligonucleotide for detection of SNP TSC0054252
tttatctatacct

SEQ ID NO: 222853 - DNA, 13 bp, Artificial Sequence
  Oligonucleotide for detection of SNP TSC0054253
tttgttggaggta

SEQ ID NO: 222854 - DNA, 13 bp, Artificial Sequence
  Oligonucleotide for detection of SNP TSC0054253
tacctccaacaaa

SEQ ID NO: 222855 - DNA, 13 bp, Artificial Sequence
  Oligonucleotide for detection of SNP TSC0054253
tttgttagaggta

SEQ ID NO: 222856 - DNA, 13 bp, Artificial Sequence
  Oligonucleotide for detection of SNP TSC0054253
tacctctaacaaa

SEQ ID NO: 222857 - DNA, 13 bp, Artificial Sequence
  Oligonucleotide for detection of SNP TSC0054254
aggatataagttt

SEQ ID NO: 222858 - DNA, 13 bp, Artificial Sequence
  Oligonucleotide for detection of SNP TSC0054254
aaacttatatcct

SEQ ID NO: 222859 - DNA, 13 bp, Artificial Sequence
  Oligonucleotide for detection of SNP TSC0054254
aggatagaagttt

SEQ ID NO: 222860 - DNA, 13 bp, Artificial Sequence
  Oligonucleotide for detection of SNP TSC0054254
aaacttctatcct

SEQ ID NO: 222861 - DNA, 13 bp, Artificial Sequence
  Oligonucleotide for detection of SNP TSC0054254
aaatttatatttt

SEQ ID NO: 222862 - DNA, 13 bp, Artificial Sequence
  Oligonucleotide for detection of SNP TSC0054254
aaaatataaattt

SEQ ID NO: 222863 - DNA, 13 bp, Artificial Sequence
  Oligonucleotide for detection of SNP TSC0054254
aaatttttatttt

SEQ ID NO: 222864 - DNA, 13 bp, Artificial Sequence
  Oligonucleotide for detection of SNP TSC0054254
aaaataaaaattt

SEQ ID NO: 222865 - DNA, 13 bp, Artificial Sequence
  Oligonucleotide for detection of SNP TSC0054255
taattaattatgy

SEQ ID NO: 222866 - DNA, 13 bp, Artificial Sequence
  Oligonucleotide for detection of SNP TSC0054255
rcataattaatta

SEQ ID NO: 222867 - DNA, 13 bp, Artificial Sequence
  Oligonucleotide for detection of SNP TSC0054255
taattagttatgy

SEQ ID NO: 222868 - DNA, 13 bp, Artificial Sequence
  Oligonucleotide for detection of SNP TSC0054255
rcataactaatta

SEQ ID NO: 222869 - DNA, 13 bp, Artificial Sequence
  Oligonucleotide for detection of SNP TSC0054256
ttgtttagagtaa

SEQ ID NO: 222870 - DNA, 13 bp, Artificial Sequence
  Oligonucleotide for detection of SNP TSC0054256
ttactctaaacaa

SEQ ID NO: 222871 - DNA, 13 bp, Artificial Sequence
  Oligonucleotide for detection of SNP TSC0054256
ttgttttgagtaa

SEQ ID NO: 222872 - DNA, 13 bp, Artificial Sequence
  Oligonucleotide for detection of SNP TSC0054256
ttactcaaaacaa

SEQ ID NO: 222873 - DNA, 13 bp, Artificial Sequence
  Oligonucleotide for detection of SNP TSC0054256
ttgtttggagtaa

SEQ ID NO: 222874 - DNA, 13 bp, Artificial Sequence
  Oligonucleotide for detection of SNP TSC0054256
ttactccaaacaa

SEQ ID NO: 222875 - DNA, 13 bp, Artificial Sequence
  Oligonucleotide for detection of SNP TSC0054256
ttgtttcgagtaa

SEQ ID NO: 222876 - DNA, 13 bp, Artificial Sequence
  Oligonucleotide for detection of SNP TSC0054256
ttactcgaaacaa

SEQ ID NO: 222877 - DNA, 13 bp, Artificial Sequence
  Oligonucleotide for detection of SNP TSC0054256
ttattcgaaatag

SEQ ID NO: 222878 - DNA, 13 bp, Artificial Sequence
  Oligonucleotide for detection of SNP TSC0054256
ctatttcgaataa

SEQ ID NO: 222879 - DNA, 13 bp, Artificial Sequence
  Oligonucleotide for detection of SNP TSC0054257
aggatgagtataa

SEQ ID NO: 222880 - DNA, 13 bp, Artificial Sequence
  Oligonucleotide for detection of SNP TSC0054257
ttatactcatcct

SEQ ID NO: 222881 - DNA, 13 bp, Artificial Sequence
  Oligonucleotide for detection of SNP TSC0054257
aggatgtgtataa

SEQ ID NO: 222882 - DNA, 13 bp, Artificial Sequence
  Oligonucleotide for detection of SNP TSC0054257
ttatacacatcct

SEQ ID NO: 222883 - DNA, 13 bp, Artificial Sequence
  Oligonucleotide for detection of SNP TSC0054257
aggatgcgtataa

SEQ ID NO: 222884 - DNA, 13 bp, Artificial Sequence
  Oligonucleotide for detection of SNP TSC0054257
ttatacgcatcct

SEQ ID NO: 222885 - DNA, 13 bp, Artificial Sequence
  Oligonucleotide for detection of SNP TSC0006573
tataggggttttg

SEQ ID NO: 222886 - DNA, 13 bp, Artificial Sequence
  Oligonucleotide for detection of SNP TSC0006573
caaaacccctata

SEQ ID NO: 222887 - DNA, 13 bp, Artificial Sequence
  Oligonucleotide for detection of SNP TSC0006573
tataggagttttg

SEQ ID NO: 222888 - DNA, 13 bp, Artificial Sequence
  Oligonucleotide for detection of SNP TSC0006573
caaaactcctata

SEQ ID NO: 222889 - DNA, 13 bp, Artificial Sequence
  Oligonucleotide for detection of SNP TSC0006574
taggaatatggtg

SEQ ID NO: 222890 - DNA, 13 bp, Artificial Sequence
  Oligonucleotide for detection of SNP TSC0006574
caccatattccta

SEQ ID NO: 222891 - DNA, 13 bp, Artificial Sequence
  Oligonucleotide for detection of SNP TSC0006574
taggaagatggtg

SEQ ID NO: 222892 - DNA, 13 bp, Artificial Sequence
  Oligonucleotide for detection of SNP TSC0006574
caccatcttccta

SEQ ID NO: 222893 - DNA, 13 bp, Artificial Sequence
  Oligonucleotide for detection of SNP TSC0054260
aggttgattttta

SEQ ID NO: 222894 - DNA, 13 bp, Artificial Sequence
  Oligonucleotide for detection of SNP TSC0054260
taaaaatcaacct

SEQ ID NO: 222895 - DNA, 13 bp, Artificial Sequence
  Oligonucleotide for detection of SNP TSC0054260
aggttgtttttta

SEQ ID NO: 222896 - DNA, 13 bp, Artificial Sequence
  Oligonucleotide for detection of SNP TSC0054260
taaaaaacaacct

SEQ ID NO: 222897 - DNA, 13 bp, Artificial Sequence
  Oligonucleotide for detection of SNP TSC0054260
aggtcgattttta

SEQ ID NO: 222898 - DNA, 13 bp, Artificial Sequence
  Oligonucleotide for detection of SNP TSC0054260
taaaaatcgacct

SEQ ID NO: 222899 - DNA, 13 bp, Artificial Sequence
  Oligonucleotide for detection of SNP TSC0054260
aggtcgtttttta

SEQ ID NO: 222900 - DNA, 13 bp, Artificial Sequence
  Oligonucleotide for detection of SNP TSC0054260
taaaaaacgacct

SEQ ID NO: 222901 - DNA, 13 bp, Artificial Sequence
  Oligonucleotide for detection of SNP TSC0054260
tgagagttggttt

SEQ ID NO: 222902 - DNA, 13 bp, Artificial Sequence
  Oligonucleotide for detection of SNP TSC0054260
aaaccaactctca

SEQ ID NO: 222903 - DNA, 13 bp, Artificial Sequence
  Oligonucleotide for detection of SNP TSC0054260
tgagaggtggttt

SEQ ID NO: 222904 - DNA, 13 bp, Artificial Sequence
  Oligonucleotide for detection of SNP TSC0054260
aaaccacctctca

SEQ ID NO: 222905 - DNA, 13 bp, Artificial Sequence
  Oligonucleotide for detection of SNP TSC0054260
tgagagtcggttt

SEQ ID NO: 222906 - DNA, 13 bp, Artificial Sequence
  Oligonucleotide for detection of SNP TSC0054260
aaaccgactctca

SEQ ID NO: 222907 - DNA, 13 bp, Artificial Sequence
  Oligonucleotide for detection of SNP TSC0054260
tgagaggcggttt

SEQ ID NO: 222908 - DNA, 13 bp, Artificial Sequence
  Oligonucleotide for detection of SNP TSC0054260
aaaccgcctctca

SEQ ID NO: 222909 - DNA, 13 bp, Artificial Sequence
  Oligonucleotide for detection of SNP TSC0054264
ttatggtgtatgg

SEQ ID NO: 222910 - DNA, 13 bp, Artificial Sequence
  Oligonucleotide for detection of SNP TSC0054264
ccatacaccataa

SEQ ID NO: 222911 - DNA, 13 bp, Artificial Sequence
  Oligonucleotide for detection of SNP TSC0054264
ttatggggtatgg

SEQ ID NO: 222912 - DNA, 13 bp, Artificial Sequence
  Oligonucleotide for detection of SNP TSC0054264
ccataccccataa

SEQ ID NO: 222913 - DNA, 13 bp, Artificial Sequence
  Oligonucleotide for detection of SNP TSC0054264
ttatatattatga

SEQ ID NO: 222914 - DNA, 13 bp, Artificial Sequence
  Oligonucleotide for detection of SNP TSC0054264
tcataatatataa

SEQ ID NO: 222915 - DNA, 13 bp, Artificial Sequence
  Oligonucleotide for detection of SNP TSC0054264
ttatattttatga

SEQ ID NO: 222916 - DNA, 13 bp, Artificial Sequence
  Oligonucleotide for detection of SNP TSC0054264
tcataaaatataa

SEQ ID NO: 222917 - DNA, 13 bp, Artificial Sequence
  Oligonucleotide for detection of SNP TSC0054266
tggggatgtaggg

SEQ ID NO: 222918 - DNA, 13 bp, Artificial Sequence
  Oligonucleotide for detection of SNP TSC0054266
ccctacatcccca

SEQ ID NO: 222919 - DNA, 13 bp, Artificial Sequence
  Oligonucleotide for detection of SNP TSC0054266
tggggaggtaggg

SEQ ID NO: 222920 - DNA, 13 bp, Artificial Sequence
  Oligonucleotide for detection of SNP TSC0054266
ccctacctcccca

SEQ ID NO: 222921 - DNA, 13 bp, Artificial Sequence
  Oligonucleotide for detection of SNP TSC0054267
tttagtagtgggt

SEQ ID NO: 222922 - DNA, 13 bp, Artificial Sequence
  Oligonucleotide for detection of SNP TSC0054267
acccactactaaa

SEQ ID NO: 222923 - DNA, 13 bp, Artificial Sequence
  Oligonucleotide for detection of SNP TSC0054267
tttagtggtgggt

SEQ ID NO: 222924 - DNA, 13 bp, Artificial Sequence
  Oligonucleotide for detection of SNP TSC0054267
acccaccactaaa

SEQ ID NO: 222925 - DNA, 13 bp, Artificial Sequence
  Oligonucleotide for detection of SNP TSC0054267
tttagcggtgggt

SEQ ID NO: 222926 - DNA, 13 bp, Artificial Sequence
  Oligonucleotide for detection of SNP TSC0054267
acccaccgctaaa

SEQ ID NO: 222927 - DNA, 13 bp, Artificial Sequence
  Oligonucleotide for detection of SNP TSC0006525
gagttagttgggt

SEQ ID NO: 222928 - DNA, 13 bp, Artificial Sequence
  Oligonucleotide for detection of SNP TSC0006525
acccaactaactc

SEQ ID NO: 222929 - DNA, 13 bp, Artificial Sequence
  Oligonucleotide for detection of SNP TSC0006525
gagttaattgggt

SEQ ID NO: 222930 - DNA, 13 bp, Artificial Sequence
  Oligonucleotide for detection of SNP TSC0006525
acccaattaactc

SEQ ID NO: 222931 - DNA, 13 bp, Artificial Sequence
  Oligonucleotide for detection of SNP TSC0054274
ttaataaggataa

SEQ ID NO: 222932 - DNA, 13 bp, Artificial Sequence
  Oligonucleotide for detection of SNP TSC0054274
ttatccttattaa

SEQ ID NO: 222933 - DNA, 13 bp, Artificial Sequence
  Oligonucleotide for detection of SNP TSC0054274
ttaatagggataa

SEQ ID NO: 222934 - DNA, 13 bp, Artificial Sequence
  Oligonucleotide for detection of SNP TSC0054274
ttatccctattaa

SEQ ID NO: 222935 - DNA, 13 bp, Artificial Sequence
  Oligonucleotide for detection of SNP TSC0054276
tagttagagaatg

SEQ ID NO: 222936 - DNA, 13 bp, Artificial Sequence
  Oligonucleotide for detection of SNP TSC0054276
cattctctaacta

SEQ ID NO: 222937 - DNA, 13 bp, Artificial Sequence
  Oligonucleotide for detection of SNP TSC0054276
tagttatagaatg

SEQ ID NO: 222938 - DNA, 13 bp, Artificial Sequence
  Oligonucleotide for detection of SNP TSC0054276
cattctataacta

SEQ ID NO: 222939 - DNA, 13 bp, Artificial Sequence
  Oligonucleotide for detection of SNP TSC0054277
attttttgagtat

SEQ ID NO: 222940 - DNA, 13 bp, Artificial Sequence
  Oligonucleotide for detection of SNP TSC0054277
atactcaaaaaat

SEQ ID NO: 222941 - DNA, 13 bp, Artificial Sequence
  Oligonucleotide for detection of SNP TSC0054277
atttttcgagtat

SEQ ID NO: 222942 - DNA, 13 bp, Artificial Sequence
  Oligonucleotide for detection of SNP TSC0054277
atactcgaaaaat

SEQ ID NO: 222943 - DNA, 13 bp, Artificial Sequence
  Oligonucleotide for detection of SNP TSC0054277
atgtttgagaagt

SEQ ID NO: 222944 - DNA, 13 bp, Artificial Sequence
  Oligonucleotide for detection of SNP TSC0054277
acttctcaaacat

SEQ ID NO: 222945 - DNA, 13 bp, Artificial Sequence
  Oligonucleotide for detection of SNP TSC0054277
atgtttaagaagt

SEQ ID NO: 222946 - DNA, 13 bp, Artificial Sequence
  Oligonucleotide for detection of SNP TSC0054277
acttcttaaacat

SEQ ID NO: 222947 - DNA, 13 bp, Artificial Sequence
  Oligonucleotide for detection of SNP TSC0054277
atgttcgagaagt

SEQ ID NO: 222948 - DNA, 13 bp, Artificial Sequence
  Oligonucleotide for detection of SNP TSC0054277
acttctcgaacat

SEQ ID NO: 222949 - DNA, 13 bp, Artificial Sequence
  Oligonucleotide for detection of SNP TSC0054278
tatagtatggttt

SEQ ID NO: 222950 - DNA, 13 bp, Artificial Sequence
  Oligonucleotide for detection of SNP TSC0054278
aaaccatactata

SEQ ID NO: 222951 - DNA, 13 bp, Artificial Sequence
  Oligonucleotide for detection of SNP TSC0054278
tatagtgtggttt

SEQ ID NO: 222952 - DNA, 13 bp, Artificial Sequence
  Oligonucleotide for detection of SNP TSC0054278
aaaccacactata

SEQ ID NO: 222953 - DNA, 13 bp, Artificial Sequence
  Oligonucleotide for detection of SNP TSC0054278
tatagcgtggttt

SEQ ID NO: 222954 - DNA, 13 bp, Artificial Sequence
  Oligonucleotide for detection of SNP TSC0054278
aaaccacgctata

SEQ ID NO: 222955 - DNA, 13 bp, Artificial Sequence
  Oligonucleotide for detection of SNP TSC0054278
aagttatgttgtg

SEQ ID NO: 222956 - DNA, 13 bp, Artificial Sequence
  Oligonucleotide for detection of SNP TSC0054278
cacaacataactt

SEQ ID NO: 222957 - DNA, 13 bp, Artificial Sequence
  Oligonucleotide for detection of SNP TSC0054278
aagttacgttgtg

SEQ ID NO: 222958 - DNA, 13 bp, Artificial Sequence
  Oligonucleotide for detection of SNP TSC0054278
cacaacgtaactt

SEQ ID NO: 222959 - DNA, 13 bp, Artificial Sequence
  Oligonucleotide for detection of SNP TSC0054279
agagtttagttty

SEQ ID NO: 222960 - DNA, 13 bp, Artificial Sequence
  Oligonucleotide for detection of SNP TSC0054279
raaactaaactct

SEQ ID NO: 222961 - DNA, 13 bp, Artificial Sequence
  Oligonucleotide for detection of SNP TSC0054279
agagttgagttty

SEQ ID NO: 222962 - DNA, 13 bp, Artificial Sequence
  Oligonucleotide for detection of SNP TSC0054279
raaactcaactct

SEQ ID NO: 222963 - DNA, 13 bp, Artificial Sequence
  Oligonucleotide for detection of SNP TSC0054279
ggggttgagtttt

SEQ ID NO: 222964 - DNA, 13 bp, Artificial Sequence
  Oligonucleotide for detection of SNP TSC0054279
aaaactcaacccc

SEQ ID NO: 222965 - DNA, 13 bp, Artificial Sequence
  Oligonucleotide for detection of SNP TSC0054279
ggggtttagtttt

SEQ ID NO: 222966 - DNA, 13 bp, Artificial Sequence
  Oligonucleotide for detection of SNP TSC0054279
aaaactaaacccc

SEQ ID NO: 222967 - DNA, 13 bp, Artificial Sequence
  Oligonucleotide for detection of SNP TSC0054280
aaagagttgagga

SEQ ID NO: 222968 - DNA, 13 bp, Artificial Sequence
  Oligonucleotide for detection of SNP TSC0054280
tcctcaactcttt

SEQ ID NO: 222969 - DNA, 13 bp, Artificial Sequence
  Oligonucleotide for detection of SNP TSC0054280
aaagaggtgagga

SEQ ID NO: 222970 - DNA, 13 bp, Artificial Sequence
  Oligonucleotide for detection of SNP TSC0054280
tcctcacctcttt

SEQ ID NO: 222971 - DNA, 13 bp, Artificial Sequence
  Oligonucleotide for detection of SNP TSC0006347
aattaaaaaataa

SEQ ID NO: 222972 - DNA, 13 bp, Artificial Sequence
  Oligonucleotide for detection of SNP TSC0006347
ttattttttaatt

SEQ ID NO: 222973 - DNA, 13 bp, Artificial Sequence
  Oligonucleotide for detection of SNP TSC0006347
aattaagaaataa

SEQ ID NO: 222974 - DNA, 13 bp, Artificial Sequence
  Oligonucleotide for detection of SNP TSC0006347
ttatttcttaatt

SEQ ID NO: 222975 - DNA, 13 bp, Artificial Sequence
  Oligonucleotide for detection of SNP TSC0054285
taatttatgattt

SEQ ID NO: 222976 - DNA, 13 bp, Artificial Sequence
  Oligonucleotide for detection of SNP TSC0054285
aaatcataaatta

SEQ ID NO: 222977 - DNA, 13 bp, Artificial Sequence
  Oligonucleotide for detection of SNP TSC0054285
taatttgtgattt

SEQ ID NO: 222978 - DNA, 13 bp, Artificial Sequence
  Oligonucleotide for detection of SNP TSC0054285
aaatcacaaatta

SEQ ID NO: 222979 - DNA, 13 bp, Artificial Sequence
  Oligonucleotide for detection of SNP TSC0054288
ggatatatttatt

SEQ ID NO: 222980 - DNA, 13 bp, Artificial Sequence
  Oligonucleotide for detection of SNP TSC0054288
aataaatatatcc

SEQ ID NO: 222981 - DNA, 13 bp, Artificial Sequence
  Oligonucleotide for detection of SNP TSC0054288
ggatatgtttatt

SEQ ID NO: 222982 - DNA, 13 bp, Artificial Sequence
  Oligonucleotide for detection of SNP TSC0054288
aataaacatatcc

SEQ ID NO: 222983 - DNA, 13 bp, Artificial Sequence
  Oligonucleotide for detection of SNP TSC0054288
ggatacgtttatt

SEQ ID NO: 222984 - DNA, 13 bp, Artificial Sequence
  Oligonucleotide for detection of SNP TSC0054288
aataaacgtatcc

SEQ ID NO: 222985 - DNA, 13 bp, Artificial Sequence
  Oligonucleotide for detection of SNP TSC0054288
aatgaatgtgtty

SEQ ID NO: 222986 - DNA, 13 bp, Artificial Sequence
  Oligonucleotide for detection of SNP TSC0054288
raacacattcatt

SEQ ID NO: 222987 - DNA, 13 bp, Artificial Sequence
  Oligonucleotide for detection of SNP TSC0054288
aatgaacgtgtty

SEQ ID NO: 222988 - DNA, 13 bp, Artificial Sequence
  Oligonucleotide for detection of SNP TSC0054288
raacacgttcatt

SEQ ID NO: 222989 - DNA, 13 bp, Artificial Sequence
  Oligonucleotide for detection of SNP TSC0054289
tgtttagaagagt

SEQ ID NO: 222990 - DNA, 13 bp, Artificial Sequence
  Oligonucleotide for detection of SNP TSC0054289
actcttctaaaca

SEQ ID NO: 222991 - DNA, 13 bp, Artificial Sequence
  Oligonucleotide for detection of SNP TSC0054291
attattatttaty

SEQ ID NO: 222992 - DNA, 13 bp, Artificial Sequence
  Oligonucleotide for detection of SNP TSC0054291
rataaataataat

SEQ ID NO: 222993 - DNA, 13 bp, Artificial Sequence
  Oligonucleotide for detection of SNP TSC0054291
attattgtttaty

SEQ ID NO: 222994 - DNA, 13 bp, Artificial Sequence
  Oligonucleotide for detection of SNP TSC0054291
rataaacaataat

SEQ ID NO: 222995 - DNA, 13 bp, Artificial Sequence
  Oligonucleotide for detection of SNP TSC0054291
attatcgtttaty

SEQ ID NO: 222996 - DNA, 13 bp, Artificial Sequence
  Oligonucleotide for detection of SNP TSC0054291
rataaacgataat

SEQ ID NO: 222997 - DNA, 13 bp, Artificial Sequence
  Oligonucleotide for detection of SNP TSC0054291
ggtagatggtggt

SEQ ID NO: 222998 - DNA, 13 bp, Artificial Sequence
  Oligonucleotide for detection of SNP TSC0054291
accaccatctacc

SEQ ID NO: 222999 - DNA, 13 bp, Artificial Sequence
  Oligonucleotide for detection of SNP TSC0054291
ggtagacggtggt

SEQ ID NO: 223000 - DNA, 13 bp, Artificial Sequence
  Oligonucleotide for detection of SNP TSC0054291
accaccgtctacc

SEQ ID NO: 223001 - DNA, 13 bp, Artificial Sequence
  Oligonucleotide for detection of SNP TSC0054292
gtttattttttty

SEQ ID NO: 223002 - DNA, 13 bp, Artificial Sequence
  Oligonucleotide for detection of SNP TSC0054292
raaaaaaataaac

SEQ ID NO: 223003 - DNA, 13 bp, Artificial Sequence
  Oligonucleotide for detection of SNP TSC0054292
gtttatgttttty

SEQ ID NO: 223004 - DNA, 13 bp, Artificial Sequence
  Oligonucleotide for detection of SNP TSC0054292
raaaaacataaac

SEQ ID NO: 223005 - DNA, 13 bp, Artificial Sequence
  Oligonucleotide for detection of SNP TSC0054292
gtttacgttttty

SEQ ID NO: 223006 - DNA, 13 bp, Artificial Sequence
  Oligonucleotide for detection of SNP TSC0054292
raaaaacgtaaac

SEQ ID NO: 223007 - DNA, 13 bp, Artificial Sequence
  Oligonucleotide for detection of SNP TSC0054292
gaaaggggtgaay

SEQ ID NO: 223008 - DNA, 13 bp, Artificial Sequence
  Oligonucleotide for detection of SNP TSC0054292
rttcacccctttc

SEQ ID NO: 223009 - DNA, 13 bp, Artificial Sequence
  Oligonucleotide for detection of SNP TSC0054292
gaaaggtgtgaay

SEQ ID NO: 223010 - DNA, 13 bp, Artificial Sequence
  Oligonucleotide for detection of SNP TSC0054292
rttcacacctttc

SEQ ID NO: 223011 - DNA, 13 bp, Artificial Sequence
  Oligonucleotide for detection of SNP TSC0054292
gaaaggcgtgaay

SEQ ID NO: 223012 - DNA, 13 bp, Artificial Sequence
  Oligonucleotide for detection of SNP TSC0054292
rttcacgcctttc

SEQ ID NO: 223013 - DNA, 13 bp, Artificial Sequence
  Oligonucleotide for detection of SNP TSC0054294
ttttgataaatga

SEQ ID NO: 223014 - DNA, 13 bp, Artificial Sequence
  Oligonucleotide for detection of SNP TSC0054294
tcatttatcaaaa

SEQ ID NO: 223015 - DNA, 13 bp, Artificial Sequence
  Oligonucleotide for detection of SNP TSC0054294
ttttgagaaatga

SEQ ID NO: 223016 - DNA, 13 bp, Artificial Sequence
  Oligonucleotide for detection of SNP TSC0054294
tcatttctcaaaa

SEQ ID NO: 223017 - DNA, 13 bp, Artificial Sequence
  Oligonucleotide for detection of SNP TSC0054295
tttttgataaatg

SEQ ID NO: 223018 - DNA, 13 bp, Artificial Sequence
  Oligonucleotide for detection of SNP TSC0054295
catttatcaaaaa

SEQ ID NO: 223019 - DNA, 13 bp, Artificial Sequence
  Oligonucleotide for detection of SNP TSC0054295
tttttggtaaatg

SEQ ID NO: 223020 - DNA, 13 bp, Artificial Sequence
  Oligonucleotide for detection of SNP TSC0054295
catttaccaaaaa

SEQ ID NO: 223021 - DNA, 13 bp, Artificial Sequence
  Oligonucleotide for detection of SNP TSC0054300
tagttaaaagaaa

SEQ ID NO: 223022 - DNA, 13 bp, Artificial Sequence
  Oligonucleotide for detection of SNP TSC0054300
tttcttttaacta

SEQ ID NO: 223023 - DNA, 13 bp, Artificial Sequence
  Oligonucleotide for detection of SNP TSC0054300
tagttagaagaaa

SEQ ID NO: 223024 - DNA, 13 bp, Artificial Sequence
  Oligonucleotide for detection of SNP TSC0054300
tttcttctaacta

SEQ ID NO: 223025 - DNA, 13 bp, Artificial Sequence
  Oligonucleotide for detection of SNP TSC0054303
gaggatgttttgy

SEQ ID NO: 223026 - DNA, 13 bp, Artificial Sequence
  Oligonucleotide for detection of SNP TSC0054303
rcaaaacatcctc

SEQ ID NO: 223027 - DNA, 13 bp, Artificial Sequence
  Oligonucleotide for detection of SNP TSC0054303
gaggatattttgy

SEQ ID NO: 223028 - DNA, 13 bp, Artificial Sequence
  Oligonucleotide for detection of SNP TSC0054303
rcaaaatatcctc

SEQ ID NO: 223029 - DNA, 13 bp, Artificial Sequence
  Oligonucleotide for detection of SNP TSC0054304
agatttagtaatt

SEQ ID NO: 223030 - DNA, 13 bp, Artificial Sequence
  Oligonucleotide for detection of SNP TSC0054304
aattactaaatct

SEQ ID NO: 223031 - DNA, 13 bp, Artificial Sequence
  Oligonucleotide for detection of SNP TSC0054304
agatttggtaatt

SEQ ID NO: 223032 - DNA, 13 bp, Artificial Sequence
  Oligonucleotide for detection of SNP TSC0054304
aattaccaaatct

SEQ ID NO: 223033 - DNA, 13 bp, Artificial Sequence
  Oligonucleotide for detection of SNP TSC0054304
agattcggtaatt

SEQ ID NO: 223034 - DNA, 13 bp, Artificial Sequence
  Oligonucleotide for detection of SNP TSC0054304
aattaccgaatct

SEQ ID NO: 223035 - DNA, 13 bp, Artificial Sequence
  Oligonucleotide for detection of SNP TSC0007683
gtattaaaaagtg

SEQ ID NO: 223036 - DNA, 13 bp, Artificial Sequence
  Oligonucleotide for detection of SNP TSC0007683
cactttttaatac

SEQ ID NO: 223037 - DNA, 13 bp, Artificial Sequence
  Oligonucleotide for detection of SNP TSC0007683
gtattagaaagtg

SEQ ID NO: 223038 - DNA, 13 bp, Artificial Sequence
  Oligonucleotide for detection of SNP TSC0007683
cactttctaatac

SEQ ID NO: 223039 - DNA, 13 bp, Artificial Sequence
  Oligonucleotide for detection of SNP TSC0054305
tggtatattgaag

SEQ ID NO: 223040 - DNA, 13 bp, Artificial Sequence
  Oligonucleotide for detection of SNP TSC0054305
cttcaatatacca

SEQ ID NO: 223041 - DNA, 13 bp, Artificial Sequence
  Oligonucleotide for detection of SNP TSC0054305
tggtatgttgaag

SEQ ID NO: 223042 - DNA, 13 bp, Artificial Sequence
  Oligonucleotide for detection of SNP TSC0054305
cttcaacatacca

SEQ ID NO: 223043 - DNA, 13 bp, Artificial Sequence
  Oligonucleotide for detection of SNP TSC0054306
tagttgagttgag

SEQ ID NO: 223044 - DNA, 13 bp, Artificial Sequence
  Oligonucleotide for detection of SNP TSC0054306
ctcaactcaacta

SEQ ID NO: 223045 - DNA, 13 bp, Artificial Sequence
  Oligonucleotide for detection of SNP TSC0054306
tagttgtgttgag

SEQ ID NO: 223046 - DNA, 13 bp, Artificial Sequence
  Oligonucleotide for detection of SNP TSC0054306
ctcaacacaacta

SEQ ID NO: 223047 - DNA, 13 bp, Artificial Sequence
  Oligonucleotide for detection of SNP TSC0054307
agagagagtatty

SEQ ID NO: 223048 - DNA, 13 bp, Artificial Sequence
  Oligonucleotide for detection of SNP TSC0054307
raatactctctct

SEQ ID NO: 223049 - DNA, 13 bp, Artificial Sequence
  Oligonucleotide for detection of SNP TSC0054307
agagagggtatty

SEQ ID NO: 223050 - DNA, 13 bp, Artificial Sequence
  Oligonucleotide for detection of SNP TSC0054307
raataccctctct

SEQ ID NO: 223051 - DNA, 13 bp, Artificial Sequence
  Oligonucleotide for detection of SNP TSC0054308
ttatttaagagtt

SEQ ID NO: 223052 - DNA, 13 bp, Artificial Sequence
  Oligonucleotide for detection of SNP TSC0054308
aactcttaaataa

SEQ ID NO: 223053 - DNA, 13 bp, Artificial Sequence
  Oligonucleotide for detection of SNP TSC0054308
ttatttgagagtt

SEQ ID NO: 223054 - DNA, 13 bp, Artificial Sequence
  Oligonucleotide for detection of SNP TSC0054308
aactctcaaataa

SEQ ID NO: 223055 - DNA, 13 bp, Artificial Sequence
  Oligonucleotide for detection of SNP TSC0054308
ttattcgagagtt

SEQ ID NO: 223056 - DNA, 13 bp, Artificial Sequence
  Oligonucleotide for detection of SNP TSC0054308
aactctcgaataa

SEQ ID NO: 223057 - DNA, 13 bp, Artificial Sequence
  Oligonucleotide for detection of SNP TSC0054308
agtttttgagtgg

SEQ ID NO: 223058 - DNA, 13 bp, Artificial Sequence
  Oligonucleotide for detection of SNP TSC0054308
ccactcaaaaact

SEQ ID NO: 223059 - DNA, 13 bp, Artificial Sequence
  Oligonucleotide for detection of SNP TSC0054308
agttttcgagtgg

SEQ ID NO: 223060 - DNA, 13 bp, Artificial Sequence
  Oligonucleotide for detection of SNP TSC0054308
ccactcgaaaact

SEQ ID NO: 223061 - DNA, 13 bp, Artificial Sequence
  Oligonucleotide for detection of SNP TSC0054311
aggtagagtattg

SEQ ID NO: 223062 - DNA, 13 bp, Artificial Sequence
  Oligonucleotide for detection of SNP TSC0054311
caatactctacct

SEQ ID NO: 223063 - DNA, 13 bp, Artificial Sequence
  Oligonucleotide for detection of SNP TSC0054311
aggtagtgtattg

SEQ ID NO: 223064 - DNA, 13 bp, Artificial Sequence
  Oligonucleotide for detection of SNP TSC0054311
caatacactacct

SEQ ID NO: 223065 - DNA, 13 bp, Artificial Sequence
  Oligonucleotide for detection of SNP TSC0054311
aggtagcgtattg

SEQ ID NO: 223066 - DNA, 13 bp, Artificial Sequence
  Oligonucleotide for detection of SNP TSC0054311
caatacgctacct

SEQ ID NO: 223067 - DNA, 13 bp, Artificial Sequence
  Oligonucleotide for detection of SNP TSC0054311
tagtgttttgttt

SEQ ID NO: 223068 - DNA, 13 bp, Artificial Sequence
  Oligonucleotide for detection of SNP TSC0054311
aaacaaaacacta

SEQ ID NO: 223069 - DNA, 13 bp, Artificial Sequence
  Oligonucleotide for detection of SNP TSC0054311
tagtgtgttgttt

SEQ ID NO: 223070 - DNA, 13 bp, Artificial Sequence
  Oligonucleotide for detection of SNP TSC0054311
aaacaacacacta

SEQ ID NO: 223071 - DNA, 13 bp, Artificial Sequence
  Oligonucleotide for detection of SNP TSC0054311
tagtgcgttgttt

SEQ ID NO: 223072 - DNA, 13 bp, Artificial Sequence
  Oligonucleotide for detection of SNP TSC0054311
aaacaacgcacta

SEQ ID NO: 223073 - DNA, 13 bp, Artificial Sequence
  Oligonucleotide for detection of SNP TSC0054312
tttgatattaaaa

SEQ ID NO: 223074 - DNA, 13 bp, Artificial Sequence
  Oligonucleotide for detection of SNP TSC0054312
ttttaatatcaaa

SEQ ID NO: 223075 - DNA, 13 bp, Artificial Sequence
  Oligonucleotide for detection of SNP TSC0054312
tttgatgttaaaa

SEQ ID NO: 223076 - DNA, 13 bp, Artificial Sequence
  Oligonucleotide for detection of SNP TSC0054312
ttttaacatcaaa

SEQ ID NO: 223077 - DNA, 13 bp, Artificial Sequence
  Oligonucleotide for detection of SNP TSC0054313
tttaataaagtay

SEQ ID NO: 223078 - DNA, 13 bp, Artificial Sequence
  Oligonucleotide for detection of SNP TSC0054313
rtactttattaaa

SEQ ID NO: 223079 - DNA, 13 bp, Artificial Sequence
  Oligonucleotide for detection of SNP TSC0054313
tttaatgaagtay

SEQ ID NO: 223080 - DNA, 13 bp, Artificial Sequence
  Oligonucleotide for detection of SNP TSC0054313
rtacttcattaaa

SEQ ID NO: 223081 - DNA, 13 bp, Artificial Sequence
  Oligonucleotide for detection of SNP TSC0054313
tttaacgaagtay

SEQ ID NO: 223082 - DNA, 13 bp, Artificial Sequence
  Oligonucleotide for detection of SNP TSC0054313
rtacttcgttaaa

SEQ ID NO: 223083 - DNA, 13 bp, Artificial Sequence
  Oligonucleotide for detection of SNP TSC0054313
gtattttgttaaa

SEQ ID NO: 223084 - DNA, 13 bp, Artificial Sequence
  Oligonucleotide for detection of SNP TSC0054313
tttaacaaaatac

SEQ ID NO: 223085 - DNA, 13 bp, Artificial Sequence
  Oligonucleotide for detection of SNP TSC0054313
gtatttcgttaaa

SEQ ID NO: 223086 - DNA, 13 bp, Artificial Sequence
  Oligonucleotide for detection of SNP TSC0054313
tttaacgaaatac

SEQ ID NO: 223087 - DNA, 13 bp, Artificial Sequence
  Oligonucleotide for detection of SNP TSC0054314
tggttagtttttg

SEQ ID NO: 223088 - DNA, 13 bp, Artificial Sequence
  Oligonucleotide for detection of SNP TSC0054314
caaaaactaacca

SEQ ID NO: 223089 - DNA, 13 bp, Artificial Sequence
  Oligonucleotide for detection of SNP TSC0054315
ggaattaagggta

SEQ ID NO: 223090 - DNA, 13 bp, Artificial Sequence
  Oligonucleotide for detection of SNP TSC0054315
tacccttaattcc

SEQ ID NO: 223091 - DNA, 13 bp, Artificial Sequence
  Oligonucleotide for detection of SNP TSC0054315
ggaatttagggta

SEQ ID NO: 223092 - DNA, 13 bp, Artificial Sequence
  Oligonucleotide for detection of SNP TSC0054315
taccctaaattcc

SEQ ID NO: 223093 - DNA, 13 bp, Artificial Sequence
  Oligonucleotide for detection of SNP TSC0054315
tatttttgattty

SEQ ID NO: 223094 - DNA, 13 bp, Artificial Sequence
  Oligonucleotide for detection of SNP TSC0054315
raaatcaaaaata

SEQ ID NO: 223095 - DNA, 13 bp, Artificial Sequence
  Oligonucleotide for detection of SNP TSC0054315
tattttggattty

SEQ ID NO: 223096 - DNA, 13 bp, Artificial Sequence
  Oligonucleotide for detection of SNP TSC0054315
raaatccaaaata

SEQ ID NO: 223097 - DNA, 13 bp, Artificial Sequence
  Oligonucleotide for detection of SNP TSC0054319
gtttttgtagaat

SEQ ID NO: 223098 - DNA, 13 bp, Artificial Sequence
  Oligonucleotide for detection of SNP TSC0054319
attctacaaaaac

SEQ ID NO: 223099 - DNA, 13 bp, Artificial Sequence
  Oligonucleotide for detection of SNP TSC0054319
gtttttatagaat

SEQ ID NO: 223100 - DNA, 13 bp, Artificial Sequence
  Oligonucleotide for detection of SNP TSC0054319
attctataaaaac

SEQ ID NO: 223101 - DNA, 13 bp, Artificial Sequence
  Oligonucleotide for detection of SNP TSC0054320
gaagataaaggaa

SEQ ID NO: 223102 - DNA, 13 bp, Artificial Sequence
  Oligonucleotide for detection of SNP TSC0054320
ttcctttatcttc

SEQ ID NO: 223103 - DNA, 13 bp, Artificial Sequence
  Oligonucleotide for detection of SNP TSC0054320
gaagatgaaggaa

SEQ ID NO: 223104 - DNA, 13 bp, Artificial Sequence
  Oligonucleotide for detection of SNP TSC0054320
ttccttcatcttc

SEQ ID NO: 223105 - DNA, 13 bp, Artificial Sequence
  Oligonucleotide for detection of SNP TSC0054321
atttgtataatty

SEQ ID NO: 223106 - DNA, 13 bp, Artificial Sequence
  Oligonucleotide for detection of SNP TSC0054321
raattatacaaat

SEQ ID NO: 223107 - DNA, 13 bp, Artificial Sequence
  Oligonucleotide for detection of SNP TSC0054321
attcgtataatty

SEQ ID NO: 223108 - DNA, 13 bp, Artificial Sequence
  Oligonucleotide for detection of SNP TSC0054321
raattatacgaat

SEQ ID NO: 223109 - DNA, 13 bp, Artificial Sequence
  Oligonucleotide for detection of SNP TSC0054321
attcgtgtaatty

SEQ ID NO: 223110 - DNA, 13 bp, Artificial Sequence
  Oligonucleotide for detection of SNP TSC0054321
raattacacgaat

SEQ ID NO: 223111 - DNA, 13 bp, Artificial Sequence
  Oligonucleotide for detection of SNP TSC0054322
ggtttttttttgt

SEQ ID NO: 223112 - DNA, 13 bp, Artificial Sequence
  Oligonucleotide for detection of SNP TSC0054322
acaaaaaaaaacc

SEQ ID NO: 223113 - DNA, 13 bp, Artificial Sequence
  Oligonucleotide for detection of SNP TSC0054322
ataagggaaggty

SEQ ID NO: 223114 - DNA, 13 bp, Artificial Sequence
  Oligonucleotide for detection of SNP TSC0054322
raccttcccttat

SEQ ID NO: 223115 - DNA, 13 bp, Artificial Sequence
  Oligonucleotide for detection of SNP TSC0054322
ataaggtaaggty

SEQ ID NO: 223116 - DNA, 13 bp, Artificial Sequence
  Oligonucleotide for detection of SNP TSC0054322
raccttaccttat

SEQ ID NO: 223117 - DNA, 13 bp, Artificial Sequence
  Oligonucleotide for detection of SNP TSC0054323
tatttgatggatg

SEQ ID NO: 223118 - DNA, 13 bp, Artificial Sequence
  Oligonucleotide for detection of SNP TSC0054323
catccatcaaata

SEQ ID NO: 223119 - DNA, 13 bp, Artificial Sequence
  Oligonucleotide for detection of SNP TSC0054323
tatttggtggatg

SEQ ID NO: 223120 - DNA, 13 bp, Artificial Sequence
  Oligonucleotide for detection of SNP TSC0054323
catccaccaaata

SEQ ID NO: 223121 - DNA, 13 bp, Artificial Sequence
  Oligonucleotide for detection of SNP TSC0054324
aagaggtgttata

SEQ ID NO: 223122 - DNA, 13 bp, Artificial Sequence
  Oligonucleotide for detection of SNP TSC0054324
tataacacctctt

SEQ ID NO: 223123 - DNA, 13 bp, Artificial Sequence
  Oligonucleotide for detection of SNP TSC0054324
aagaggcgttata

SEQ ID NO: 223124 - DNA, 13 bp, Artificial Sequence
  Oligonucleotide for detection of SNP TSC0054324
tataacgcctctt

SEQ ID NO: 223125 - DNA, 13 bp, Artificial Sequence
  Oligonucleotide for detection of SNP TSC0054328
tagtaaatttatt

SEQ ID NO: 223126 - DNA, 13 bp, Artificial Sequence
  Oligonucleotide for detection of SNP TSC0054328
aataaatttacta

SEQ ID NO: 223127 - DNA, 13 bp, Artificial Sequence
  Oligonucleotide for detection of SNP TSC0054328
tagtaattttatt

SEQ ID NO: 223128 - DNA, 13 bp, Artificial Sequence
  Oligonucleotide for detection of SNP TSC0054328
aataaaattacta

SEQ ID NO: 223129 - DNA, 13 bp, Artificial Sequence
  Oligonucleotide for detection of SNP TSC0054328
agtgggtttgttg

SEQ ID NO: 223130 - DNA, 13 bp, Artificial Sequence
  Oligonucleotide for detection of SNP TSC0054328
caacaaacccact

SEQ ID NO: 223131 - DNA, 13 bp, Artificial Sequence
  Oligonucleotide for detection of SNP TSC0054328
agtgggattgttg

SEQ ID NO: 223132 - DNA, 13 bp, Artificial Sequence
  Oligonucleotide for detection of SNP TSC0054328
caacaatcccact

SEQ ID NO: 223133 - DNA, 13 bp, Artificial Sequence
  Oligonucleotide for detection of SNP TSC0054329
attttaggttgta

SEQ ID NO: 223134 - DNA, 13 bp, Artificial Sequence
  Oligonucleotide for detection of SNP TSC0054329
tacaacctaaaat

SEQ ID NO: 223135 - DNA, 13 bp, Artificial Sequence
  Oligonucleotide for detection of SNP TSC0054329
attttaagttgta

SEQ ID NO: 223136 - DNA, 13 bp, Artificial Sequence
  Oligonucleotide for detection of SNP TSC0054329
tacaacttaaaat

SEQ ID NO: 223137 - DNA, 13 bp, Artificial Sequence
  Oligonucleotide for detection of SNP TSC0010962
agaattgggattt

SEQ ID NO: 223138 - DNA, 13 bp, Artificial Sequence
  Oligonucleotide for detection of SNP TSC0010962
aaatcccaattct

SEQ ID NO: 223139 - DNA, 13 bp, Artificial Sequence
  Oligonucleotide for detection of SNP TSC0010962
agaattaggattt

SEQ ID NO: 223140 - DNA, 13 bp, Artificial Sequence
  Oligonucleotide for detection of SNP TSC0010962
aaatcctaattct

SEQ ID NO: 223141 - DNA, 13 bp, Artificial Sequence
  Oligonucleotide for detection of SNP TSC0054331
tgtataatatatt

SEQ ID NO: 223142 - DNA, 13 bp, Artificial Sequence
  Oligonucleotide for detection of SNP TSC0054331
aatatattataca

SEQ ID NO: 223143 - DNA, 13 bp, Artificial Sequence
  Oligonucleotide for detection of SNP TSC0054331
tgtatattatatt

SEQ ID NO: 223144 - DNA, 13 bp, Artificial Sequence
  Oligonucleotide for detection of SNP TSC0054331
aatataatataca

SEQ ID NO: 223145 - DNA, 13 bp, Artificial Sequence
  Oligonucleotide for detection of SNP TSC0054331
agtgtattgtata

SEQ ID NO: 223146 - DNA, 13 bp, Artificial Sequence
  Oligonucleotide for detection of SNP TSC0054331
tatacaatacact

SEQ ID NO: 223147 - DNA, 13 bp, Artificial Sequence
  Oligonucleotide for detection of SNP TSC0054331
agtgtagtgtata

SEQ ID NO: 223148 - DNA, 13 bp, Artificial Sequence
  Oligonucleotide for detection of SNP TSC0054331
tatacactacact

SEQ ID NO: 223149 - DNA, 13 bp, Artificial Sequence
  Oligonucleotide for detection of SNP TSC0054335
ataaatagatgga

SEQ ID NO: 223150 - DNA, 13 bp, Artificial Sequence
  Oligonucleotide for detection of SNP TSC0054335
tccatctatttat

SEQ ID NO: 223151 - DNA, 13 bp, Artificial Sequence
  Oligonucleotide for detection of SNP TSC0054335
ataaatggatgga

SEQ ID NO: 223152 - DNA, 13 bp, Artificial Sequence
  Oligonucleotide for detection of SNP TSC0054335
tccatccatttat

SEQ ID NO: 223153 - DNA, 13 bp, Artificial Sequence
  Oligonucleotide for detection of SNP TSC0054342
agaggtatatttt

SEQ ID NO: 223154 - DNA, 13 bp, Artificial Sequence
  Oligonucleotide for detection of SNP TSC0054342
aaaatatacctct

SEQ ID NO: 223155 - DNA, 13 bp, Artificial Sequence
  Oligonucleotide for detection of SNP TSC0054342
aaaatatgttttt

SEQ ID NO: 223156 - DNA, 13 bp, Artificial Sequence
  Oligonucleotide for detection of SNP TSC0054342
aaaaacatatttt

SEQ ID NO: 223157 - DNA, 13 bp, Artificial Sequence
  Oligonucleotide for detection of SNP TSC0054342
aaaataagttttt

SEQ ID NO: 223158 - DNA, 13 bp, Artificial Sequence
  Oligonucleotide for detection of SNP TSC0054342
aaaaacttatttt

SEQ ID NO: 223159 - DNA, 13 bp, Artificial Sequence
  Oligonucleotide for detection of SNP TSC0054343
ttggtggtggtga

SEQ ID NO: 223160 - DNA, 13 bp, Artificial Sequence
  Oligonucleotide for detection of SNP TSC0054343
tcaccaccaccaa

SEQ ID NO: 223161 - DNA, 13 bp, Artificial Sequence
  Oligonucleotide for detection of SNP TSC0054343
ttggtgatggtga

SEQ ID NO: 223162 - DNA, 13 bp, Artificial Sequence
  Oligonucleotide for detection of SNP TSC0054343
tcaccatcaccaa

SEQ ID NO: 223163 - DNA, 13 bp, Artificial Sequence
  Oligonucleotide for detection of SNP TSC0054344
ttattaattttay

SEQ ID NO: 223164 - DNA, 13 bp, Artificial Sequence
  Oligonucleotide for detection of SNP TSC0054344
rtaaaattaataa

SEQ ID NO: 223165 - DNA, 13 bp, Artificial Sequence
  Oligonucleotide for detection of SNP TSC0054344
ttattagttttay

SEQ ID NO: 223166 - DNA, 13 bp, Artificial Sequence
  Oligonucleotide for detection of SNP TSC0054344
rtaaaactaataa

SEQ ID NO: 223167 - DNA, 13 bp, Artificial Sequence
  Oligonucleotide for detection of SNP TSC0054345
attaagtttagtt

SEQ ID NO: 223168 - DNA, 13 bp, Artificial Sequence
  Oligonucleotide for detection of SNP TSC0054345
aactaaacttaat

SEQ ID NO: 223169 - DNA, 13 bp, Artificial Sequence
  Oligonucleotide for detection of SNP TSC0054345
attaaggttagtt

SEQ ID NO: 223170 - DNA, 13 bp, Artificial Sequence
  Oligonucleotide for detection of SNP TSC0054345
aactaaccttaat

SEQ ID NO: 223171 - DNA, 13 bp, Artificial Sequence
  Oligonucleotide for detection of SNP TSC0054345
agttgagtttggt

SEQ ID NO: 223172 - DNA, 13 bp, Artificial Sequence
  Oligonucleotide for detection of SNP TSC0054345
accaaactcaact

SEQ ID NO: 223173 - DNA, 13 bp, Artificial Sequence
  Oligonucleotide for detection of SNP TSC0054345
agttgattttggt

SEQ ID NO: 223174 - DNA, 13 bp, Artificial Sequence
  Oligonucleotide for detection of SNP TSC0054345
accaaaatcaact

SEQ ID NO: 223175 - DNA, 13 bp, Artificial Sequence
  Oligonucleotide for detection of SNP TSC0054346
tagtatagatgty

SEQ ID NO: 223176 - DNA, 13 bp, Artificial Sequence
  Oligonucleotide for detection of SNP TSC0054346
racatctatacta

SEQ ID NO: 223177 - DNA, 13 bp, Artificial Sequence
  Oligonucleotide for detection of SNP TSC0054346
tagtattgatgty

SEQ ID NO: 223178 - DNA, 13 bp, Artificial Sequence
  Oligonucleotide for detection of SNP TSC0054346
racatcaatacta

SEQ ID NO: 223179 - DNA, 13 bp, Artificial Sequence
  Oligonucleotide for detection of SNP TSC0054346
tagtatcgatgty

SEQ ID NO: 223180 - DNA, 13 bp, Artificial Sequence
  Oligonucleotide for detection of SNP TSC0054346
racatcgatacta

SEQ ID NO: 223181 - DNA, 13 bp, Artificial Sequence
  Oligonucleotide for detection of SNP TSC0054346
ggtatttatgttg

SEQ ID NO: 223182 - DNA, 13 bp, Artificial Sequence
  Oligonucleotide for detection of SNP TSC0054346
caacataaatacc

SEQ ID NO: 223183 - DNA, 13 bp, Artificial Sequence
  Oligonucleotide for detection of SNP TSC0054346
ggtattgatgttg

SEQ ID NO: 223184 - DNA, 13 bp, Artificial Sequence
  Oligonucleotide for detection of SNP TSC0054346
caacatcaatacc

SEQ ID NO: 223185 - DNA, 13 bp, Artificial Sequence
  Oligonucleotide for detection of SNP TSC0054346
ggtatcgatgttg

SEQ ID NO: 223186 - DNA, 13 bp, Artificial Sequence
  Oligonucleotide for detection of SNP TSC0054346
caacatcgatacc

SEQ ID NO: 223187 - DNA, 13 bp, Artificial Sequence
  Oligonucleotide for detection of SNP TSC0006648
tagtaaattttat

SEQ ID NO: 223188 - DNA, 13 bp, Artificial Sequence
  Oligonucleotide for detection of SNP TSC0006648
ataaaatttacta

SEQ ID NO: 223189 - DNA, 13 bp, Artificial Sequence
  Oligonucleotide for detection of SNP TSC0006648
tagtaatttttat

SEQ ID NO: 223190 - DNA, 13 bp, Artificial Sequence
  Oligonucleotide for detection of SNP TSC0006648
ataaaaattacta

SEQ ID NO: 223191 - DNA, 13 bp, Artificial Sequence
  Oligonucleotide for detection of SNP TSC0006648
atggaatttattg

SEQ ID NO: 223192 - DNA, 13 bp, Artificial Sequence
  Oligonucleotide for detection of SNP TSC0006648
caataaattccat

SEQ ID NO: 223193 - DNA, 13 bp, Artificial Sequence
  Oligonucleotide for detection of SNP TSC0006648
atggaaattattg

SEQ ID NO: 223194 - DNA, 13 bp, Artificial Sequence
  Oligonucleotide for detection of SNP TSC0006648
caataatttccat

SEQ ID NO: 223195 - DNA, 13 bp, Artificial Sequence
  Oligonucleotide for detection of SNP TSC0005990
ttttttgtggaaa

SEQ ID NO: 223196 - DNA, 13 bp, Artificial Sequence
  Oligonucleotide for detection of SNP TSC0005990
tttccacaaaaaa

SEQ ID NO: 223197 - DNA, 13 bp, Artificial Sequence
  Oligonucleotide for detection of SNP TSC0005990
tttttagaaaagg

SEQ ID NO: 223198 - DNA, 13 bp, Artificial Sequence
  Oligonucleotide for detection of SNP TSC0005990
ccttttctaaaaa

SEQ ID NO: 223199 - DNA, 13 bp, Artificial Sequence
  Oligonucleotide for detection of SNP TSC0005990
tttttataaaagg

SEQ ID NO: 223200 - DNA, 13 bp, Artificial Sequence
  Oligonucleotide for detection of SNP TSC0005990
ccttttataaaaa

SEQ ID NO: 223201 - DNA, 13 bp, Artificial Sequence
  Oligonucleotide for detection of SNP TSC0054356
attagagtttatt

SEQ ID NO: 223202 - DNA, 13 bp, Artificial Sequence
  Oligonucleotide for detection of SNP TSC0054356
aataaactctaat

SEQ ID NO: 223203 - DNA, 13 bp, Artificial Sequence
  Oligonucleotide for detection of SNP TSC0054356
attagaatttatt

SEQ ID NO: 223204 - DNA, 13 bp, Artificial Sequence
  Oligonucleotide for detection of SNP TSC0054356
aataaattctaat

SEQ ID NO: 223205 - DNA, 13 bp, Artificial Sequence
  Oligonucleotide for detection of SNP TSC0054357
atttgtagcgagy

SEQ ID NO: 223206 - DNA, 13 bp, Artificial Sequence
  Oligonucleotide for detection of SNP TSC0054357
rctcgctacaaat

SEQ ID NO: 223207 - DNA, 13 bp, Artificial Sequence
  Oligonucleotide for detection of SNP TSC0054357
atttgtggcgagy

SEQ ID NO: 223208 - DNA, 13 bp, Artificial Sequence
  Oligonucleotide for detection of SNP TSC0054357
rctcgccacaaat

SEQ ID NO: 223209 - DNA, 13 bp, Artificial Sequence
  Oligonucleotide for detection of SNP TSC0054357
atttgcggcgagy

SEQ ID NO: 223210 - DNA, 13 bp, Artificial Sequence
  Oligonucleotide for detection of SNP TSC0054357
rctcgccgcaaat

SEQ ID NO: 223211 - DNA, 13 bp, Artificial Sequence
  Oligonucleotide for detection of SNP TSC0054357
gtttgttgtaagt

SEQ ID NO: 223212 - DNA, 13 bp, Artificial Sequence
  Oligonucleotide for detection of SNP TSC0054357
acttacaacaaac

SEQ ID NO: 223213 - DNA, 13 bp, Artificial Sequence
  Oligonucleotide for detection of SNP TSC0054357
gttcgttgtaagt

SEQ ID NO: 223214 - DNA, 13 bp, Artificial Sequence
  Oligonucleotide for detection of SNP TSC0054357
acttacaacgaac

SEQ ID NO: 223215 - DNA, 13 bp, Artificial Sequence
  Oligonucleotide for detection of SNP TSC0054357
gtttgtcgtaagt

SEQ ID NO: 223216 - DNA, 13 bp, Artificial Sequence
  Oligonucleotide for detection of SNP TSC0054357
acttacgacaaac

SEQ ID NO: 223217 - DNA, 13 bp, Artificial Sequence
  Oligonucleotide for detection of SNP TSC0054357
gttcgtcgtaagt

SEQ ID NO: 223218 - DNA, 13 bp, Artificial Sequence
  Oligonucleotide for detection of SNP TSC0054357
acttacgacgaac

SEQ ID NO: 223219 - DNA, 13 bp, Artificial Sequence
  Oligonucleotide for detection of SNP TSC0054361
tttgtaatgttag

SEQ ID NO: 223220 - DNA, 13 bp, Artificial Sequence
  Oligonucleotide for detection of SNP TSC0054361
ctaacattacaaa

SEQ ID NO: 223221 - DNA, 13 bp, Artificial Sequence
  Oligonucleotide for detection of SNP TSC0054361
tttgtagtgttag

SEQ ID NO: 223222 - DNA, 13 bp, Artificial Sequence
  Oligonucleotide for detection of SNP TSC0054361
ctaacactacaaa

SEQ ID NO: 223223 - DNA, 13 bp, Artificial Sequence
  Oligonucleotide for detection of SNP TSC0054362
tagtggcgtaaty

SEQ ID NO: 223224 - DNA, 13 bp, Artificial Sequence
  Oligonucleotide for detection of SNP TSC0054362
rattacgccacta

SEQ ID NO: 223225 - DNA, 13 bp, Artificial Sequence
  Oligonucleotide for detection of SNP TSC0054363
tatgagaattata

SEQ ID NO: 223226 - DNA, 13 bp, Artificial Sequence
  Oligonucleotide for detection of SNP TSC0054363
tataattctcata

SEQ ID NO: 223227 - DNA, 13 bp, Artificial Sequence
  Oligonucleotide for detection of SNP TSC0054363
tatgaggattata

SEQ ID NO: 223228 - DNA, 13 bp, Artificial Sequence
  Oligonucleotide for detection of SNP TSC0054363
tataatcctcata

SEQ ID NO: 223229 - DNA, 13 bp, Artificial Sequence
  Oligonucleotide for detection of SNP TSC0005300
attttttgtggag

SEQ ID NO: 223230 - DNA, 13 bp, Artificial Sequence
  Oligonucleotide for detection of SNP TSC0005300
ctccacaaaaaat

SEQ ID NO: 223231 - DNA, 13 bp, Artificial Sequence
  Oligonucleotide for detection of SNP TSC0005300
atttttcgtggag

SEQ ID NO: 223232 - DNA, 13 bp, Artificial Sequence
  Oligonucleotide for detection of SNP TSC0005300
ctccacgaaaaat

SEQ ID NO: 223233 - DNA, 13 bp, Artificial Sequence
  Oligonucleotide for detection of SNP TSC0005300
ttttatgaagggt

SEQ ID NO: 223234 - DNA, 13 bp, Artificial Sequence
  Oligonucleotide for detection of SNP TSC0005300
acccttcataaaa

SEQ ID NO: 223235 - DNA, 13 bp, Artificial Sequence
  Oligonucleotide for detection of SNP TSC0005300
ttttataaagggt

SEQ ID NO: 223236 - DNA, 13 bp, Artificial Sequence
  Oligonucleotide for detection of SNP TSC0005300
accctttataaaa

SEQ ID NO: 223237 - DNA, 13 bp, Artificial Sequence
  Oligonucleotide for detection of SNP TSC0005300
ttttacgaagggt

SEQ ID NO: 223238 - DNA, 13 bp, Artificial Sequence
  Oligonucleotide for detection of SNP TSC0005300
acccttcgtaaaa

SEQ ID NO: 223239 - DNA, 13 bp, Artificial Sequence
  Oligonucleotide for detection of SNP TSC0054365
aaggaaaggttty

SEQ ID NO: 223240 - DNA, 13 bp, Artificial Sequence
  Oligonucleotide for detection of SNP TSC0054365
raaacctttcctt

SEQ ID NO: 223241 - DNA, 13 bp, Artificial Sequence
  Oligonucleotide for detection of SNP TSC0054365
aaggaagggttty

SEQ ID NO: 223242 - DNA, 13 bp, Artificial Sequence
  Oligonucleotide for detection of SNP TSC0054365
raaacccttcctt

SEQ ID NO: 223243 - DNA, 13 bp, Artificial Sequence
  Oligonucleotide for detection of SNP TSC0054366
agtagattgaatt

SEQ ID NO: 223244 - DNA, 13 bp, Artificial Sequence
  Oligonucleotide for detection of SNP TSC0054366
aattcaatctact

SEQ ID NO: 223245 - DNA, 13 bp, Artificial Sequence
  Oligonucleotide for detection of SNP TSC0054366
agtagagtgaatt

SEQ ID NO: 223246 - DNA, 13 bp, Artificial Sequence
  Oligonucleotide for detection of SNP TSC0054366
aattcactctact

SEQ ID NO: 223247 - DNA, 13 bp, Artificial Sequence
  Oligonucleotide for detection of SNP TSC0054366
aatttaatttgtt

SEQ ID NO: 223248 - DNA, 13 bp, Artificial Sequence
  Oligonucleotide for detection of SNP TSC0054366
aacaaattaaatt

SEQ ID NO: 223249 - DNA, 13 bp, Artificial Sequence
  Oligonucleotide for detection of SNP TSC0054366
aatttattttgtt

SEQ ID NO: 223250 - DNA, 13 bp, Artificial Sequence
  Oligonucleotide for detection of SNP TSC0054366
aacaaaataaatt

SEQ ID NO: 223251 - DNA, 13 bp, Artificial Sequence
  Oligonucleotide for detection of SNP TSC0054367
tgaaatatgagat

SEQ ID NO: 223252 - DNA, 13 bp, Artificial Sequence
  Oligonucleotide for detection of SNP TSC0054367
atctcatatttca

SEQ ID NO: 223253 - DNA, 13 bp, Artificial Sequence
  Oligonucleotide for detection of SNP TSC0054367
tgaaatttgagat

SEQ ID NO: 223254 - DNA, 13 bp, Artificial Sequence
  Oligonucleotide for detection of SNP TSC0054367
atctcaaatttca

SEQ ID NO: 223255 - DNA, 13 bp, Artificial Sequence
  Oligonucleotide for detection of SNP TSC0054367
attttagatttta

SEQ ID NO: 223256 - DNA, 13 bp, Artificial Sequence
  Oligonucleotide for detection of SNP TSC0054367
taaaatctaaaat

SEQ ID NO: 223257 - DNA, 13 bp, Artificial Sequence
  Oligonucleotide for detection of SNP TSC0054368
ttatttatagttt

SEQ ID NO: 223258 - DNA, 13 bp, Artificial Sequence
  Oligonucleotide for detection of SNP TSC0054368
aaactataaataa

SEQ ID NO: 223259 - DNA, 13 bp, Artificial Sequence
  Oligonucleotide for detection of SNP TSC0054368
ttatttgtagttt

SEQ ID NO: 223260 - DNA, 13 bp, Artificial Sequence
  Oligonucleotide for detection of SNP TSC0054368
aaactacaaataa

SEQ ID NO: 223261 - DNA, 13 bp, Artificial Sequence
  Oligonucleotide for detection of SNP TSC0054369
tttgttgtaagty

SEQ ID NO: 223262 - DNA, 13 bp, Artificial Sequence
  Oligonucleotide for detection of SNP TSC0054369
racttacaacaaa

SEQ ID NO: 223263 - DNA, 13 bp, Artificial Sequence
  Oligonucleotide for detection of SNP TSC0054369
tttgttataagty

SEQ ID NO: 223264 - DNA, 13 bp, Artificial Sequence
  Oligonucleotide for detection of SNP TSC0054369
racttataacaaa

SEQ ID NO: 223265 - DNA, 13 bp, Artificial Sequence
  Oligonucleotide for detection of SNP TSC0054370
aatgtataaatta

SEQ ID NO: 223266 - DNA, 13 bp, Artificial Sequence
  Oligonucleotide for detection of SNP TSC0054370
taatttatacatt

SEQ ID NO: 223267 - DNA, 13 bp, Artificial Sequence
  Oligonucleotide for detection of SNP TSC0054370
tgatttgtgtatt

SEQ ID NO: 223268 - DNA, 13 bp, Artificial Sequence
  Oligonucleotide for detection of SNP TSC0054370
aatacacaaatca

SEQ ID NO: 223269 - DNA, 13 bp, Artificial Sequence
  Oligonucleotide for detection of SNP TSC0054370
tgatttttgtatt

SEQ ID NO: 223270 - DNA, 13 bp, Artificial Sequence
  Oligonucleotide for detection of SNP TSC0054370
aatacaaaaatca

SEQ ID NO: 223271 - DNA, 13 bp, Artificial Sequence
  Oligonucleotide for detection of SNP TSC0054372
tttatatatgtag

SEQ ID NO: 223272 - DNA, 13 bp, Artificial Sequence
  Oligonucleotide for detection of SNP TSC0054372
ctacatatataaa

SEQ ID NO: 223273 - DNA, 13 bp, Artificial Sequence
  Oligonucleotide for detection of SNP TSC0054372
tttatagatgtag

SEQ ID NO: 223274 - DNA, 13 bp, Artificial Sequence
  Oligonucleotide for detection of SNP TSC0054372
ctacatctataaa

SEQ ID NO: 223275 - DNA, 13 bp, Artificial Sequence
  Oligonucleotide for detection of SNP TSC0054372
ttgtatatgtgag

SEQ ID NO: 223276 - DNA, 13 bp, Artificial Sequence
  Oligonucleotide for detection of SNP TSC0054372
ctcacatatacaa

SEQ ID NO: 223277 - DNA, 13 bp, Artificial Sequence
  Oligonucleotide for detection of SNP TSC0054372
ttgtatttgtgag

SEQ ID NO: 223278 - DNA, 13 bp, Artificial Sequence
  Oligonucleotide for detection of SNP TSC0054372
ctcacaaatacaa

SEQ ID NO: 223279 - DNA, 13 bp, Artificial Sequence
  Oligonucleotide for detection of SNP TSC0054373
agatgatgttaay

SEQ ID NO: 223280 - DNA, 13 bp, Artificial Sequence
  Oligonucleotide for detection of SNP TSC0054373
rttaacatcatct

SEQ ID NO: 223281 - DNA, 13 bp, Artificial Sequence
  Oligonucleotide for detection of SNP TSC0054373
agatgacgttaay

SEQ ID NO: 223282 - DNA, 13 bp, Artificial Sequence
  Oligonucleotide for detection of SNP TSC0054373
rttaacgtcatct

SEQ ID NO: 223283 - DNA, 13 bp, Artificial Sequence
  Oligonucleotide for detection of SNP TSC0054373
gttggtgttattt

SEQ ID NO: 223284 - DNA, 13 bp, Artificial Sequence
  Oligonucleotide for detection of SNP TSC0054373
aaataacaccaac

SEQ ID NO: 223285 - DNA, 13 bp, Artificial Sequence
  Oligonucleotide for detection of SNP TSC0054373
gttggtattattt

SEQ ID NO: 223286 - DNA, 13 bp, Artificial Sequence
  Oligonucleotide for detection of SNP TSC0054373
aaataataccaac

SEQ ID NO: 223287 - DNA, 13 bp, Artificial Sequence
  Oligonucleotide for detection of SNP TSC0054373
gttggcgttattt

SEQ ID NO: 223288 - DNA, 13 bp, Artificial Sequence
  Oligonucleotide for detection of SNP TSC0054373
aaataacgccaac

SEQ ID NO: 223289 - DNA, 13 bp, Artificial Sequence
  Oligonucleotide for detection of SNP TSC0005484
aattttatttggy

SEQ ID NO: 223290 - DNA, 13 bp, Artificial Sequence
  Oligonucleotide for detection of SNP TSC0005484
rccaaataaaatt

SEQ ID NO: 223291 - DNA, 13 bp, Artificial Sequence
  Oligonucleotide for detection of SNP TSC0005484
gttaagtgaaatt

SEQ ID NO: 223292 - DNA, 13 bp, Artificial Sequence
  Oligonucleotide for detection of SNP TSC0005484
aatttcacttaac

SEQ ID NO: 223293 - DNA, 13 bp, Artificial Sequence
  Oligonucleotide for detection of SNP TSC0005484
gttaagcgaaatt

SEQ ID NO: 223294 - DNA, 13 bp, Artificial Sequence
  Oligonucleotide for detection of SNP TSC0005484
aatttcgcttaac

SEQ ID NO: 223295 - DNA, 13 bp, Artificial Sequence
  Oligonucleotide for detection of SNP TSC0054374
ttattatgttgtg

SEQ ID NO: 223296 - DNA, 13 bp, Artificial Sequence
  Oligonucleotide for detection of SNP TSC0054374
cacaacataataa

SEQ ID NO: 223297 - DNA, 13 bp, Artificial Sequence
  Oligonucleotide for detection of SNP TSC0054374
ttattacgttgtg

SEQ ID NO: 223298 - DNA, 13 bp, Artificial Sequence
  Oligonucleotide for detection of SNP TSC0054374
cacaacgtaataa

SEQ ID NO: 223299 - DNA, 13 bp, Artificial Sequence
  Oligonucleotide for detection of SNP TSC0054374
tatagtgtggtag

SEQ ID NO: 223300 - DNA, 13 bp, Artificial Sequence
  Oligonucleotide for detection of SNP TSC0054374
ctaccacactata

SEQ ID NO: 223301 - DNA, 13 bp, Artificial Sequence
  Oligonucleotide for detection of SNP TSC0054374
tatagtatggtag

SEQ ID NO: 223302 - DNA, 13 bp, Artificial Sequence
  Oligonucleotide for detection of SNP TSC0054374
ctaccatactata

SEQ ID NO: 223303 - DNA, 13 bp, Artificial Sequence
  Oligonucleotide for detection of SNP TSC0054374
tatagcgtggtag

SEQ ID NO: 223304 - DNA, 13 bp, Artificial Sequence
  Oligonucleotide for detection of SNP TSC0054374
ctaccacgctata

SEQ ID NO: 223305 - DNA, 13 bp, Artificial Sequence
  Oligonucleotide for detection of SNP TSC0054375
atttagaatatat

SEQ ID NO: 223306 - DNA, 13 bp, Artificial Sequence
  Oligonucleotide for detection of SNP TSC0054375
atatattctaaat

SEQ ID NO: 223307 - DNA, 13 bp, Artificial Sequence
  Oligonucleotide for detection of SNP TSC0054375
atttaggatatat

SEQ ID NO: 223308 - DNA, 13 bp, Artificial Sequence
  Oligonucleotide for detection of SNP TSC0054375
atatatcctaaat

SEQ ID NO: 223309 - DNA, 13 bp, Artificial Sequence
  Oligonucleotide for detection of SNP TSC0054376
tattttttgagag

SEQ ID NO: 223310 - DNA, 13 bp, Artificial Sequence
  Oligonucleotide for detection of SNP TSC0054376
ctctcaaaaaata

SEQ ID NO: 223311 - DNA, 13 bp, Artificial Sequence
  Oligonucleotide for detection of SNP TSC0054376
tattttgtgagag

SEQ ID NO: 223312 - DNA, 13 bp, Artificial Sequence
  Oligonucleotide for detection of SNP TSC0054376
ctctcacaaaata

SEQ ID NO: 223313 - DNA, 13 bp, Artificial Sequence
  Oligonucleotide for detection of SNP TSC0054376
tttttagaagata

SEQ ID NO: 223314 - DNA, 13 bp, Artificial Sequence
  Oligonucleotide for detection of SNP TSC0054376
tatcttctaaaaa

SEQ ID NO: 223315 - DNA, 13 bp, Artificial Sequence
  Oligonucleotide for detection of SNP TSC0054376
tttttataagata

SEQ ID NO: 223316 - DNA, 13 bp, Artificial Sequence
  Oligonucleotide for detection of SNP TSC0054376
tatcttataaaaa

SEQ ID NO: 223317 - DNA, 13 bp, Artificial Sequence
  Oligonucleotide for detection of SNP TSC0054377
aagatattatttt

SEQ ID NO: 223318 - DNA, 13 bp, Artificial Sequence
  Oligonucleotide for detection of SNP TSC0054377
aaaataatatctt

SEQ ID NO: 223319 - DNA, 13 bp, Artificial Sequence
  Oligonucleotide for detection of SNP TSC0054377
aagatagtatttt

SEQ ID NO: 223320 - DNA, 13 bp, Artificial Sequence
  Oligonucleotide for detection of SNP TSC0054377
aaaatactatctt

SEQ ID NO: 223321 - DNA, 13 bp, Artificial Sequence
  Oligonucleotide for detection of SNP TSC0054377
aaaataatgtttt

SEQ ID NO: 223322 - DNA, 13 bp, Artificial Sequence
  Oligonucleotide for detection of SNP TSC0054377
aaaacattatttt

SEQ ID NO: 223323 - DNA, 13 bp, Artificial Sequence
  Oligonucleotide for detection of SNP TSC0054377
aaaatattgtttt

SEQ ID NO: 223324 - DNA, 13 bp, Artificial Sequence
  Oligonucleotide for detection of SNP TSC0054377
aaaacaatatttt

SEQ ID NO: 223325 - DNA, 13 bp, Artificial Sequence
  Oligonucleotide for detection of SNP TSC0054378
ggtagtggaaaaa

SEQ ID NO: 223326 - DNA, 13 bp, Artificial Sequence
  Oligonucleotide for detection of SNP TSC0054378
tttttccactacc

SEQ ID NO: 223327 - DNA, 13 bp, Artificial Sequence
  Oligonucleotide for detection of SNP TSC0054378
ggtagtagaaaaa

SEQ ID NO: 223328 - DNA, 13 bp, Artificial Sequence
  Oligonucleotide for detection of SNP TSC0054378
tttttctactacc

SEQ ID NO: 223329 - DNA, 13 bp, Artificial Sequence
  Oligonucleotide for detection of SNP TSC0054378
ggtagcggaaaaa

SEQ ID NO: 223330 - DNA, 13 bp, Artificial Sequence
  Oligonucleotide for detection of SNP TSC0054378
tttttccgctacc

SEQ ID NO: 223331 - DNA, 13 bp, Artificial Sequence
  Oligonucleotide for detection of SNP TSC0054380
atttggggaggty

SEQ ID NO: 223332 - DNA, 13 bp, Artificial Sequence
  Oligonucleotide for detection of SNP TSC0054380
racctccccaaat

SEQ ID NO: 223333 - DNA, 13 bp, Artificial Sequence
  Oligonucleotide for detection of SNP TSC0054380
atttggagaggty

SEQ ID NO: 223334 - DNA, 13 bp, Artificial Sequence
  Oligonucleotide for detection of SNP TSC0054380
racctctccaaat

SEQ ID NO: 223335 - DNA, 13 bp, Artificial Sequence
  Oligonucleotide for detection of SNP TSC0054381
atagtataaatta

SEQ ID NO: 223336 - DNA, 13 bp, Artificial Sequence
  Oligonucleotide for detection of SNP TSC0054381
taatttatactat

SEQ ID NO: 223337 - DNA, 13 bp, Artificial Sequence
  Oligonucleotide for detection of SNP TSC0054381
atagtagaaatta

SEQ ID NO: 223338 - DNA, 13 bp, Artificial Sequence
  Oligonucleotide for detection of SNP TSC0054381
taatttctactat

SEQ ID NO: 223339 - DNA, 13 bp, Artificial Sequence
  Oligonucleotide for detection of SNP TSC0054381
tgatttatattgt

SEQ ID NO: 223340 - DNA, 13 bp, Artificial Sequence
  Oligonucleotide for detection of SNP TSC0054381
acaatataaatca

SEQ ID NO: 223341 - DNA, 13 bp, Artificial Sequence
  Oligonucleotide for detection of SNP TSC0054381
tgatttttattgt

SEQ ID NO: 223342 - DNA, 13 bp, Artificial Sequence
  Oligonucleotide for detection of SNP TSC0054381
acaataaaaatca

SEQ ID NO: 223343 - DNA, 13 bp, Artificial Sequence
  Oligonucleotide for detection of SNP TSC0054383
taaaattggggag

SEQ ID NO: 223344 - DNA, 13 bp, Artificial Sequence
  Oligonucleotide for detection of SNP TSC0054383
ctccccaatttta

SEQ ID NO: 223345 - DNA, 13 bp, Artificial Sequence
  Oligonucleotide for detection of SNP TSC0054383
taaaatcggggag

SEQ ID NO: 223346 - DNA, 13 bp, Artificial Sequence
  Oligonucleotide for detection of SNP TSC0054383
ctccccgatttta

SEQ ID NO: 223347 - DNA, 13 bp, Artificial Sequence
  Oligonucleotide for detection of SNP TSC0054384
ttgttggtaaatt

SEQ ID NO: 223348 - DNA, 13 bp, Artificial Sequence
  Oligonucleotide for detection of SNP TSC0054384
aatttaccaacaa

SEQ ID NO: 223349 - DNA, 13 bp, Artificial Sequence
  Oligonucleotide for detection of SNP TSC0054384
ttgttgataaatt

SEQ ID NO: 223350 - DNA, 13 bp, Artificial Sequence
  Oligonucleotide for detection of SNP TSC0054384
aatttatcaacaa

SEQ ID NO: 223351 - DNA, 13 bp, Artificial Sequence
  Oligonucleotide for detection of SNP TSC0054385
ttttgtatagttt

SEQ ID NO: 223352 - DNA, 13 bp, Artificial Sequence
  Oligonucleotide for detection of SNP TSC0054385
aaactatacaaaa

SEQ ID NO: 223353 - DNA, 13 bp, Artificial Sequence
  Oligonucleotide for detection of SNP TSC0054385
ttttgtgtagttt

SEQ ID NO: 223354 - DNA, 13 bp, Artificial Sequence
  Oligonucleotide for detection of SNP TSC0054385
aaactacacaaaa

SEQ ID NO: 223355 - DNA, 13 bp, Artificial Sequence
  Oligonucleotide for detection of SNP TSC0054385
ttttgcgtagttt

SEQ ID NO: 223356 - DNA, 13 bp, Artificial Sequence
  Oligonucleotide for detection of SNP TSC0054385
aaactacgcaaaa

SEQ ID NO: 223357 - DNA, 13 bp, Artificial Sequence
  Oligonucleotide for detection of SNP TSC0054385
aagttatgtaaaa

SEQ ID NO: 223358 - DNA, 13 bp, Artificial Sequence
  Oligonucleotide for detection of SNP TSC0054385
ttttacataactt

SEQ ID NO: 223359 - DNA, 13 bp, Artificial Sequence
  Oligonucleotide for detection of SNP TSC0054385
aagttacgtaaaa

SEQ ID NO: 223360 - DNA, 13 bp, Artificial Sequence
  Oligonucleotide for detection of SNP TSC0054385
ttttacgtaactt

SEQ ID NO: 223361 - DNA, 13 bp, Artificial Sequence
  Oligonucleotide for detection of SNP TSC0054386
ttaggaattaaga

SEQ ID NO: 223362 - DNA, 13 bp, Artificial Sequence
  Oligonucleotide for detection of SNP TSC0054386
tcttaattcctaa

SEQ ID NO: 223363 - DNA, 13 bp, Artificial Sequence
  Oligonucleotide for detection of SNP TSC0054386
ttaggatttaaga

SEQ ID NO: 223364 - DNA, 13 bp, Artificial Sequence
  Oligonucleotide for detection of SNP TSC0054386
tcttaaatcctaa

SEQ ID NO: 223365 - DNA, 13 bp, Artificial Sequence
  Oligonucleotide for detection of SNP TSC0054386
ttttagattttgg

SEQ ID NO: 223366 - DNA, 13 bp, Artificial Sequence
  Oligonucleotide for detection of SNP TSC0054386
ccaaaatctaaaa

SEQ ID NO: 223367 - DNA, 13 bp, Artificial Sequence
  Oligonucleotide for detection of SNP TSC0054387
gtattaatgatga

SEQ ID NO: 223368 - DNA, 13 bp, Artificial Sequence
  Oligonucleotide for detection of SNP TSC0054387
tcatcattaatac

SEQ ID NO: 223369 - DNA, 13 bp, Artificial Sequence
  Oligonucleotide for detection of SNP TSC0054387
gtattattgatga

SEQ ID NO: 223370 - DNA, 13 bp, Artificial Sequence
  Oligonucleotide for detection of SNP TSC0054387
tcatcaataatac

SEQ ID NO: 223371 - DNA, 13 bp, Artificial Sequence
  Oligonucleotide for detection of SNP TSC0054387
ttattattgatgy

SEQ ID NO: 223372 - DNA, 13 bp, Artificial Sequence
  Oligonucleotide for detection of SNP TSC0054387
rcatcaataataa

SEQ ID NO: 223373 - DNA, 13 bp, Artificial Sequence
  Oligonucleotide for detection of SNP TSC0054387
ttattagtgatgy

SEQ ID NO: 223374 - DNA, 13 bp, Artificial Sequence
  Oligonucleotide for detection of SNP TSC0054387
rcatcactaataa

SEQ ID NO: 223375 - DNA, 13 bp, Artificial Sequence
  Oligonucleotide for detection of SNP TSC0054388
agttgagtgatga

SEQ ID NO: 223376 - DNA, 13 bp, Artificial Sequence
  Oligonucleotide for detection of SNP TSC0054388
tcatcactcaact

SEQ ID NO: 223377 - DNA, 13 bp, Artificial Sequence
  Oligonucleotide for detection of SNP TSC0054388
agttgaatgatga

SEQ ID NO: 223378 - DNA, 13 bp, Artificial Sequence
  Oligonucleotide for detection of SNP TSC0054388
tcatcattcaact

SEQ ID NO: 223379 - DNA, 13 bp, Artificial Sequence
  Oligonucleotide for detection of SNP TSC0054389
ggttgatttaaay

SEQ ID NO: 223380 - DNA, 13 bp, Artificial Sequence
  Oligonucleotide for detection of SNP TSC0054389
rtttaaatcaacc

SEQ ID NO: 223381 - DNA, 13 bp, Artificial Sequence
  Oligonucleotide for detection of SNP TSC0054389
ggttgagttaaay

SEQ ID NO: 223382 - DNA, 13 bp, Artificial Sequence
  Oligonucleotide for detection of SNP TSC0054389
rtttaactcaacc

SEQ ID NO: 223383 - DNA, 13 bp, Artificial Sequence
  Oligonucleotide for detection of SNP TSC0054389
ggtcgatttaaay

SEQ ID NO: 223384 - DNA, 13 bp, Artificial Sequence
  Oligonucleotide for detection of SNP TSC0054389
rtttaaatcgacc

SEQ ID NO: 223385 - DNA, 13 bp, Artificial Sequence
  Oligonucleotide for detection of SNP TSC0054389
ggtcgagttaaay

SEQ ID NO: 223386 - DNA, 13 bp, Artificial Sequence
  Oligonucleotide for detection of SNP TSC0054389
rtttaactcgacc

SEQ ID NO: 223387 - DNA, 13 bp, Artificial Sequence
  Oligonucleotide for detection of SNP TSC0054389
gtttgagttgaty

SEQ ID NO: 223388 - DNA, 13 bp, Artificial Sequence
  Oligonucleotide for detection of SNP TSC0054389
ratcaactcaaac

SEQ ID NO: 223389 - DNA, 13 bp, Artificial Sequence
  Oligonucleotide for detection of SNP TSC0054389
gtttgatttgaty

SEQ ID NO: 223390 - DNA, 13 bp, Artificial Sequence
  Oligonucleotide for detection of SNP TSC0054389
ratcaaatcaaac

SEQ ID NO: 223391 - DNA, 13 bp, Artificial Sequence
  Oligonucleotide for detection of SNP TSC0054389
gtttgagtcgaty

SEQ ID NO: 223392 - DNA, 13 bp, Artificial Sequence
  Oligonucleotide for detection of SNP TSC0054389
ratcgactcaaac

SEQ ID NO: 223393 - DNA, 13 bp, Artificial Sequence
  Oligonucleotide for detection of SNP TSC0054389
gtttgattcgaty

SEQ ID NO: 223394 - DNA, 13 bp, Artificial Sequence
  Oligonucleotide for detection of SNP TSC0054389
ratcgaatcaaac

SEQ ID NO: 223395 - DNA, 13 bp, Artificial Sequence
  Oligonucleotide for detection of SNP TSC0054390
gtattttttttta

SEQ ID NO: 223396 - DNA, 13 bp, Artificial Sequence
  Oligonucleotide for detection of SNP TSC0054390
taaaaaaaaatac

SEQ ID NO: 223397 - DNA, 13 bp, Artificial Sequence
  Oligonucleotide for detection of SNP TSC0054390
tgagaatggatgy

SEQ ID NO: 223398 - DNA, 13 bp, Artificial Sequence
  Oligonucleotide for detection of SNP TSC0054390
rcatccattctca

SEQ ID NO: 223399 - DNA, 13 bp, Artificial Sequence
  Oligonucleotide for detection of SNP TSC0054390
tgagaagggatgy

SEQ ID NO: 223400 - DNA, 13 bp, Artificial Sequence
  Oligonucleotide for detection of SNP TSC0054390
rcatcccttctca

SEQ ID NO: 223401 - DNA, 13 bp, Artificial Sequence
  Oligonucleotide for detection of SNP TSC0054391
ttatttattgtag

SEQ ID NO: 223402 - DNA, 13 bp, Artificial Sequence
  Oligonucleotide for detection of SNP TSC0054391
ctacaataaataa

SEQ ID NO: 223403 - DNA, 13 bp, Artificial Sequence
  Oligonucleotide for detection of SNP TSC0054391
ttatttgttgtag

SEQ ID NO: 223404 - DNA, 13 bp, Artificial Sequence
  Oligonucleotide for detection of SNP TSC0054391
ctacaacaaataa

SEQ ID NO: 223405 - DNA, 13 bp, Artificial Sequence
  Oligonucleotide for detection of SNP TSC0054391
ttattcgttgtag

SEQ ID NO: 223406 - DNA, 13 bp, Artificial Sequence
  Oligonucleotide for detection of SNP TSC0054391
ctacaacgaataa

SEQ ID NO: 223407 - DNA, 13 bp, Artificial Sequence
  Oligonucleotide for detection of SNP TSC0054391
ttgtagtggataa

SEQ ID NO: 223408 - DNA, 13 bp, Artificial Sequence
  Oligonucleotide for detection of SNP TSC0054391
ttatccactacaa

SEQ ID NO: 223409 - DNA, 13 bp, Artificial Sequence
  Oligonucleotide for detection of SNP TSC0054391
ttgtagcggataa

SEQ ID NO: 223410 - DNA, 13 bp, Artificial Sequence
  Oligonucleotide for detection of SNP TSC0054391
ttatccgctacaa

SEQ ID NO: 223411 - DNA, 13 bp, Artificial Sequence
  Oligonucleotide for detection of SNP TSC0054392
gttgtagtggata

SEQ ID NO: 223412 - DNA, 13 bp, Artificial Sequence
  Oligonucleotide for detection of SNP TSC0054392
tatccactacaac

SEQ ID NO: 223413 - DNA, 13 bp, Artificial Sequence
  Oligonucleotide for detection of SNP TSC0054392
gttgtaatggata

SEQ ID NO: 223414 - DNA, 13 bp, Artificial Sequence
  Oligonucleotide for detection of SNP TSC0054392
tatccattacaac

SEQ ID NO: 223415 - DNA, 13 bp, Artificial Sequence
  Oligonucleotide for detection of SNP TSC0054393
aatatatggtagy

SEQ ID NO: 223416 - DNA, 13 bp, Artificial Sequence
  Oligonucleotide for detection of SNP TSC0054393
rctaccatatatt

SEQ ID NO: 223417 - DNA, 13 bp, Artificial Sequence
  Oligonucleotide for detection of SNP TSC0054393
aatatacggtagy

SEQ ID NO: 223418 - DNA, 13 bp, Artificial Sequence
  Oligonucleotide for detection of SNP TSC0054393
rctaccgtatatt

SEQ ID NO: 223419 - DNA, 13 bp, Artificial Sequence
  Oligonucleotide for detection of SNP TSC0054393
gttgttgtgtgtt

SEQ ID NO: 223420 - DNA, 13 bp, Artificial Sequence
  Oligonucleotide for detection of SNP TSC0054393
aacacacaacaac

SEQ ID NO: 223421 - DNA, 13 bp, Artificial Sequence
  Oligonucleotide for detection of SNP TSC0054393
gttgttatgtgtt

SEQ ID NO: 223422 - DNA, 13 bp, Artificial Sequence
  Oligonucleotide for detection of SNP TSC0054393
aacacataacaac

SEQ ID NO: 223423 - DNA, 13 bp, Artificial Sequence
  Oligonucleotide for detection of SNP TSC0054393
gttgtcgtgtgtt

SEQ ID NO: 223424 - DNA, 13 bp, Artificial Sequence
  Oligonucleotide for detection of SNP TSC0054393
aacacacgacaac

SEQ ID NO: 223425 - DNA, 13 bp, Artificial Sequence
  Oligonucleotide for detection of SNP TSC0054394
attgtaaagatay

SEQ ID NO: 223426 - DNA, 13 bp, Artificial Sequence
  Oligonucleotide for detection of SNP TSC0054394
rtatctttacaat

SEQ ID NO: 223427 - DNA, 13 bp, Artificial Sequence
  Oligonucleotide for detection of SNP TSC0054394
attgtagagatay

SEQ ID NO: 223428 - DNA, 13 bp, Artificial Sequence
  Oligonucleotide for detection of SNP TSC0054394
rtatctctacaat

SEQ ID NO: 223429 - DNA, 13 bp, Artificial Sequence
  Oligonucleotide for detection of SNP TSC0054395
ggtatggtttttt

SEQ ID NO: 223430 - DNA, 13 bp, Artificial Sequence
  Oligonucleotide for detection of SNP TSC0054395
aaaaaaccatacc

SEQ ID NO: 223431 - DNA, 13 bp, Artificial Sequence
  Oligonucleotide for detection of SNP TSC0054395
ggtatgatttttt

SEQ ID NO: 223432 - DNA, 13 bp, Artificial Sequence
  Oligonucleotide for detection of SNP TSC0054395
aaaaaatcatacc

SEQ ID NO: 223433 - DNA, 13 bp, Artificial Sequence
  Oligonucleotide for detection of SNP TSC0054396
ttttttttataat

SEQ ID NO: 223434 - DNA, 13 bp, Artificial Sequence
  Oligonucleotide for detection of SNP TSC0054396
attataaaaaaaa

SEQ ID NO: 223435 - DNA, 13 bp, Artificial Sequence
  Oligonucleotide for detection of SNP TSC0054398
taatgatgacgtg

SEQ ID NO: 223436 - DNA, 13 bp, Artificial Sequence
  Oligonucleotide for detection of SNP TSC0054398
cacgtcatcatta

SEQ ID NO: 223437 - DNA, 13 bp, Artificial Sequence
  Oligonucleotide for detection of SNP TSC0054398
taatgacgacgtg

SEQ ID NO: 223438 - DNA, 13 bp, Artificial Sequence
  Oligonucleotide for detection of SNP TSC0054398
cacgtcgtcatta

SEQ ID NO: 223439 - DNA, 13 bp, Artificial Sequence
  Oligonucleotide for detection of SNP TSC0054398
tatgttgttatta

SEQ ID NO: 223440 - DNA, 13 bp, Artificial Sequence
  Oligonucleotide for detection of SNP TSC0054398
taataacaacata

SEQ ID NO: 223441 - DNA, 13 bp, Artificial Sequence
  Oligonucleotide for detection of SNP TSC0054398
tacgttgttatta

SEQ ID NO: 223442 - DNA, 13 bp, Artificial Sequence
  Oligonucleotide for detection of SNP TSC0054398
taataacaacgta

SEQ ID NO: 223443 - DNA, 13 bp, Artificial Sequence
  Oligonucleotide for detection of SNP TSC0054398
tacgttattatta

SEQ ID NO: 223444 - DNA, 13 bp, Artificial Sequence
  Oligonucleotide for detection of SNP TSC0054398
taataataacgta

SEQ ID NO: 223445 - DNA, 13 bp, Artificial Sequence
  Oligonucleotide for detection of SNP TSC0054398
tatgtcgttatta

SEQ ID NO: 223446 - DNA, 13 bp, Artificial Sequence
  Oligonucleotide for detection of SNP TSC0054398
taataacgacata

SEQ ID NO: 223447 - DNA, 13 bp, Artificial Sequence
  Oligonucleotide for detection of SNP TSC0054398
tacgtcgttatta

SEQ ID NO: 223448 - DNA, 13 bp, Artificial Sequence
  Oligonucleotide for detection of SNP TSC0054398
taataacgacgta

SEQ ID NO: 223449 - DNA, 13 bp, Artificial Sequence
  Oligonucleotide for detection of SNP TSC0054399
ttattttgaatay

SEQ ID NO: 223450 - DNA, 13 bp, Artificial Sequence
  Oligonucleotide for detection of SNP TSC0054399
rtattcaaaataa

SEQ ID NO: 223451 - DNA, 13 bp, Artificial Sequence
  Oligonucleotide for detection of SNP TSC0054399
ttatttggaatay

SEQ ID NO: 223452 - DNA, 13 bp, Artificial Sequence
  Oligonucleotide for detection of SNP TSC0054399
rtattccaaataa

SEQ ID NO: 223453 - DNA, 13 bp, Artificial Sequence
  Oligonucleotide for detection of SNP TSC0054399
gtgtttaagatgg

SEQ ID NO: 223454 - DNA, 13 bp, Artificial Sequence
  Oligonucleotide for detection of SNP TSC0054399
ccatcttaaacac

SEQ ID NO: 223455 - DNA, 13 bp, Artificial Sequence
  Oligonucleotide for detection of SNP TSC0054399
gtgttttagatgg

SEQ ID NO: 223456 - DNA, 13 bp, Artificial Sequence
  Oligonucleotide for detection of SNP TSC0054399
ccatctaaaacac

SEQ ID NO: 223457 - DNA, 13 bp, Artificial Sequence
  Oligonucleotide for detection of SNP TSC0054400
gatataagaggta

SEQ ID NO: 223458 - DNA, 13 bp, Artificial Sequence
  Oligonucleotide for detection of SNP TSC0054400
tacctcttatatc

SEQ ID NO: 223459 - DNA, 13 bp, Artificial Sequence
  Oligonucleotide for detection of SNP TSC0054400
gatataggaggta

SEQ ID NO: 223460 - DNA, 13 bp, Artificial Sequence
  Oligonucleotide for detection of SNP TSC0054400
tacctcctatatc

SEQ ID NO: 223461 - DNA, 13 bp, Artificial Sequence
  Oligonucleotide for detection of SNP TSC0054401
aaattagtttata

SEQ ID NO: 223462 - DNA, 13 bp, Artificial Sequence
  Oligonucleotide for detection of SNP TSC0054401
tataaactaattt

SEQ ID NO: 223463 - DNA, 13 bp, Artificial Sequence
  Oligonucleotide for detection of SNP TSC0054402
tgtgaagaaatga

SEQ ID NO: 223464 - DNA, 13 bp, Artificial Sequence
  Oligonucleotide for detection of SNP TSC0054402
tcatttcttcaca

SEQ ID NO: 223465 - DNA, 13 bp, Artificial Sequence
  Oligonucleotide for detection of SNP TSC0054402
tgtgaaaaaatga

SEQ ID NO: 223466 - DNA, 13 bp, Artificial Sequence
  Oligonucleotide for detection of SNP TSC0054402
tcattttttcaca

SEQ ID NO: 223467 - DNA, 13 bp, Artificial Sequence
  Oligonucleotide for detection of SNP TSC0054403
aagtaggtgattg

SEQ ID NO: 223468 - DNA, 13 bp, Artificial Sequence
  Oligonucleotide for detection of SNP TSC0054403
caatcacctactt

SEQ ID NO: 223469 - DNA, 13 bp, Artificial Sequence
  Oligonucleotide for detection of SNP TSC0054403
aagtagatgattg

SEQ ID NO: 223470 - DNA, 13 bp, Artificial Sequence
  Oligonucleotide for detection of SNP TSC0054403
caatcatctactt

SEQ ID NO: 223471 - DNA, 13 bp, Artificial Sequence
  Oligonucleotide for detection of SNP TSC0054404
ttttatagaatty

SEQ ID NO: 223472 - DNA, 13 bp, Artificial Sequence
  Oligonucleotide for detection of SNP TSC0054404
raattctataaaa

SEQ ID NO: 223473 - DNA, 13 bp, Artificial Sequence
  Oligonucleotide for detection of SNP TSC0054404
gagttttgtaagg

SEQ ID NO: 223474 - DNA, 13 bp, Artificial Sequence
  Oligonucleotide for detection of SNP TSC0054404
ccttacaaaactc

SEQ ID NO: 223475 - DNA, 13 bp, Artificial Sequence
  Oligonucleotide for detection of SNP TSC0054404
gagtttcgtaagg

SEQ ID NO: 223476 - DNA, 13 bp, Artificial Sequence
  Oligonucleotide for detection of SNP TSC0054404
ccttacgaaactc

SEQ ID NO: 223477 - DNA, 13 bp, Artificial Sequence
  Oligonucleotide for detection of SNP TSC0054405
ggaaaagaaatta

SEQ ID NO: 223478 - DNA, 13 bp, Artificial Sequence
  Oligonucleotide for detection of SNP TSC0054405
taatttcttttcc

SEQ ID NO: 223479 - DNA, 13 bp, Artificial Sequence
  Oligonucleotide for detection of SNP TSC0054405
ggaaaaaaaatta

SEQ ID NO: 223480 - DNA, 13 bp, Artificial Sequence
  Oligonucleotide for detection of SNP TSC0054405
taattttttttcc

SEQ ID NO: 223481 - DNA, 13 bp, Artificial Sequence
  Oligonucleotide for detection of SNP TSC0054406
atataggtttttt

SEQ ID NO: 223482 - DNA, 13 bp, Artificial Sequence
  Oligonucleotide for detection of SNP TSC0054406
aaaaaacctatat

SEQ ID NO: 223483 - DNA, 13 bp, Artificial Sequence
  Oligonucleotide for detection of SNP TSC0054406
aagaagattgtgt

SEQ ID NO: 223484 - DNA, 13 bp, Artificial Sequence
  Oligonucleotide for detection of SNP TSC0054406
acacaatcttctt

SEQ ID NO: 223485 - DNA, 13 bp, Artificial Sequence
  Oligonucleotide for detection of SNP TSC0054406
aagaagtttgtgt

SEQ ID NO: 223486 - DNA, 13 bp, Artificial Sequence
  Oligonucleotide for detection of SNP TSC0054406
acacaaacttctt

SEQ ID NO: 223487 - DNA, 13 bp, Artificial Sequence
  Oligonucleotide for detection of SNP TSC0054407
aagtaggttgtay

SEQ ID NO: 223488 - DNA, 13 bp, Artificial Sequence
  Oligonucleotide for detection of SNP TSC0054407
rtacaacctactt

SEQ ID NO: 223489 - DNA, 13 bp, Artificial Sequence
  Oligonucleotide for detection of SNP TSC0054407
aagtagattgtay

SEQ ID NO: 223490 - DNA, 13 bp, Artificial Sequence
  Oligonucleotide for detection of SNP TSC0054407
rtacaatctactt

SEQ ID NO: 223491 - DNA, 13 bp, Artificial Sequence
  Oligonucleotide for detection of SNP TSC0006420
tgtattaggtttt

SEQ ID NO: 223492 - DNA, 13 bp, Artificial Sequence
  Oligonucleotide for detection of SNP TSC0006420
aaaacctaataca

SEQ ID NO: 223493 - DNA, 13 bp, Artificial Sequence
  Oligonucleotide for detection of SNP TSC0006420
cgtattaggtttt

SEQ ID NO: 223494 - DNA, 13 bp, Artificial Sequence
  Oligonucleotide for detection of SNP TSC0006420
aaaacctaatacg

SEQ ID NO: 223495 - DNA, 13 bp, Artificial Sequence
  Oligonucleotide for detection of SNP TSC0008323
ataaaaatagaay

SEQ ID NO: 223496 - DNA, 13 bp, Artificial Sequence
  Oligonucleotide for detection of SNP TSC0008323
rttctatttttat

SEQ ID NO: 223497 - DNA, 13 bp, Artificial Sequence
  Oligonucleotide for detection of SNP TSC0054410
gttagtaatttty

SEQ ID NO: 223498 - DNA, 13 bp, Artificial Sequence
  Oligonucleotide for detection of SNP TSC0054410
raaaattactaac

SEQ ID NO: 223499 - DNA, 13 bp, Artificial Sequence
  Oligonucleotide for detection of SNP TSC0054411
tttaaatgttaty

SEQ ID NO: 223500 - DNA, 13 bp, Artificial Sequence
  Oligonucleotide for detection of SNP TSC0054411
rataacatttaaa

SEQ ID NO: 223501 - DNA, 13 bp, Artificial Sequence
  Oligonucleotide for detection of SNP TSC0054411
tttaaacgttaty

SEQ ID NO: 223502 - DNA, 13 bp, Artificial Sequence
  Oligonucleotide for detection of SNP TSC0054411
rataacgtttaaa

SEQ ID NO: 223503 - DNA, 13 bp, Artificial Sequence
  Oligonucleotide for detection of SNP TSC0054411
ggtgatgtttaga

SEQ ID NO: 223504 - DNA, 13 bp, Artificial Sequence
  Oligonucleotide for detection of SNP TSC0054411
tctaaacatcacc

SEQ ID NO: 223505 - DNA, 13 bp, Artificial Sequence
  Oligonucleotide for detection of SNP TSC0054411
ggtgatatttaga

SEQ ID NO: 223506 - DNA, 13 bp, Artificial Sequence
  Oligonucleotide for detection of SNP TSC0054411
tctaaatatcacc

SEQ ID NO: 223507 - DNA, 13 bp, Artificial Sequence
  Oligonucleotide for detection of SNP TSC0054411
ggtgacgtttaga

SEQ ID NO: 223508 - DNA, 13 bp, Artificial Sequence
  Oligonucleotide for detection of SNP TSC0054411
tctaaacgtcacc

SEQ ID NO: 223509 - DNA, 13 bp, Artificial Sequence
  Oligonucleotide for detection of SNP TSC0054412
gtagtttggggty

SEQ ID NO: 223510 - DNA, 13 bp, Artificial Sequence
  Oligonucleotide for detection of SNP TSC0054412
raccccaaactac

SEQ ID NO: 223511 - DNA, 13 bp, Artificial Sequence
  Oligonucleotide for detection of SNP TSC0054412
gtagttcggggty

SEQ ID NO: 223512 - DNA, 13 bp, Artificial Sequence
  Oligonucleotide for detection of SNP TSC0054412
raccccgaactac

SEQ ID NO: 223513 - DNA, 13 bp, Artificial Sequence
  Oligonucleotide for detection of SNP TSC0054412
ggttttgggttgy

SEQ ID NO: 223514 - DNA, 13 bp, Artificial Sequence
  Oligonucleotide for detection of SNP TSC0054412
rcaacccaaaacc

SEQ ID NO: 223515 - DNA, 13 bp, Artificial Sequence
  Oligonucleotide for detection of SNP TSC0054412
ggttttaggttgy

SEQ ID NO: 223516 - DNA, 13 bp, Artificial Sequence
  Oligonucleotide for detection of SNP TSC0054412
rcaacctaaaacc

SEQ ID NO: 223517 - DNA, 13 bp, Artificial Sequence
  Oligonucleotide for detection of SNP TSC0054412
ggtttcgggttgy

SEQ ID NO: 223518 - DNA, 13 bp, Artificial Sequence
  Oligonucleotide for detection of SNP TSC0054412
rcaacccgaaacc

SEQ ID NO: 223519 - DNA, 13 bp, Artificial Sequence
  Oligonucleotide for detection of SNP TSC0010846
tgagttaatgggt

SEQ ID NO: 223520 - DNA, 13 bp, Artificial Sequence
  Oligonucleotide for detection of SNP TSC0010846
acccattaactca

SEQ ID NO: 223521 - DNA, 13 bp, Artificial Sequence
  Oligonucleotide for detection of SNP TSC0010846
tgagtttatgggt

SEQ ID NO: 223522 - DNA, 13 bp, Artificial Sequence
  Oligonucleotide for detection of SNP TSC0010846
acccataaactca

SEQ ID NO: 223523 - DNA, 13 bp, Artificial Sequence
  Oligonucleotide for detection of SNP TSC0010846
atttattggttta

SEQ ID NO: 223524 - DNA, 13 bp, Artificial Sequence
  Oligonucleotide for detection of SNP TSC0010846
taaaccaataaat

SEQ ID NO: 223525 - DNA, 13 bp, Artificial Sequence
  Oligonucleotide for detection of SNP TSC0010846
atttataggttta

SEQ ID NO: 223526 - DNA, 13 bp, Artificial Sequence
  Oligonucleotide for detection of SNP TSC0010846
taaacctataaat

SEQ ID NO: 223527 - DNA, 13 bp, Artificial Sequence
  Oligonucleotide for detection of SNP TSC0054413
tttttgtgttttt

SEQ ID NO: 223528 - DNA, 13 bp, Artificial Sequence
  Oligonucleotide for detection of SNP TSC0054413
aaaaacacaaaaa

SEQ ID NO: 223529 - DNA, 13 bp, Artificial Sequence
  Oligonucleotide for detection of SNP TSC0054413
tttttgcgttttt

SEQ ID NO: 223530 - DNA, 13 bp, Artificial Sequence
  Oligonucleotide for detection of SNP TSC0054413
aaaaacgcaaaaa

SEQ ID NO: 223531 - DNA, 13 bp, Artificial Sequence
  Oligonucleotide for detection of SNP TSC0054413
aaaagtgtaaaga

SEQ ID NO: 223532 - DNA, 13 bp, Artificial Sequence
  Oligonucleotide for detection of SNP TSC0054413
tctttacactttt

SEQ ID NO: 223533 - DNA, 13 bp, Artificial Sequence
  Oligonucleotide for detection of SNP TSC0054413
aaaagtataaaga

SEQ ID NO: 223534 - DNA, 13 bp, Artificial Sequence
  Oligonucleotide for detection of SNP TSC0054413
tctttatactttt

SEQ ID NO: 223535 - DNA, 13 bp, Artificial Sequence
  Oligonucleotide for detection of SNP TSC0054413
aaaagcgtaaaga

SEQ ID NO: 223536 - DNA, 13 bp, Artificial Sequence
  Oligonucleotide for detection of SNP TSC0054413
tctttacgctttt

SEQ ID NO: 223537 - DNA, 13 bp, Artificial Sequence
  Oligonucleotide for detection of SNP TSC0054414
gtgtgtaggattt

SEQ ID NO: 223538 - DNA, 13 bp, Artificial Sequence
  Oligonucleotide for detection of SNP TSC0054414
aaatcctacacac

SEQ ID NO: 223539 - DNA, 13 bp, Artificial Sequence
  Oligonucleotide for detection of SNP TSC0054414
gtgtgtgggattt

SEQ ID NO: 223540 - DNA, 13 bp, Artificial Sequence
  Oligonucleotide for detection of SNP TSC0054414
aaatcccacacac

SEQ ID NO: 223541 - DNA, 13 bp, Artificial Sequence
  Oligonucleotide for detection of SNP TSC0054414
gtgtgcgggattt

SEQ ID NO: 223542 - DNA, 13 bp, Artificial Sequence
  Oligonucleotide for detection of SNP TSC0054414
aaatcccgcacac

SEQ ID NO: 223543 - DNA, 13 bp, Artificial Sequence
  Oligonucleotide for detection of SNP TSC0054414
aaattttgtatay

SEQ ID NO: 223544 - DNA, 13 bp, Artificial Sequence
  Oligonucleotide for detection of SNP TSC0054414
rtatacaaaattt

SEQ ID NO: 223545 - DNA, 13 bp, Artificial Sequence
  Oligonucleotide for detection of SNP TSC0054414
aaatttcgtatay

SEQ ID NO: 223546 - DNA, 13 bp, Artificial Sequence
  Oligonucleotide for detection of SNP TSC0054414
rtatacgaaattt

SEQ ID NO: 223547 - DNA, 13 bp, Artificial Sequence
  Oligonucleotide for detection of SNP TSC0054416
tattttaatgatt

SEQ ID NO: 223548 - DNA, 13 bp, Artificial Sequence
  Oligonucleotide for detection of SNP TSC0054416
aatcattaaaata

SEQ ID NO: 223549 - DNA, 13 bp, Artificial Sequence
  Oligonucleotide for detection of SNP TSC0054416
tattttgatgatt

SEQ ID NO: 223550 - DNA, 13 bp, Artificial Sequence
  Oligonucleotide for detection of SNP TSC0054416
aatcatcaaaata

SEQ ID NO: 223551 - DNA, 13 bp, Artificial Sequence
  Oligonucleotide for detection of SNP TSC0054416
tatttcgatgatt

SEQ ID NO: 223552 - DNA, 13 bp, Artificial Sequence
  Oligonucleotide for detection of SNP TSC0054416
aatcatcgaaata

SEQ ID NO: 223553 - DNA, 13 bp, Artificial Sequence
  Oligonucleotide for detection of SNP TSC0054416
agttattgaagtg

SEQ ID NO: 223554 - DNA, 13 bp, Artificial Sequence
  Oligonucleotide for detection of SNP TSC0054416
cacttcaataact

SEQ ID NO: 223555 - DNA, 13 bp, Artificial Sequence
  Oligonucleotide for detection of SNP TSC0054416
agttatcgaagtg

SEQ ID NO: 223556 - DNA, 13 bp, Artificial Sequence
  Oligonucleotide for detection of SNP TSC0054416
cacttcgataact

SEQ ID NO: 223557 - DNA, 13 bp, Artificial Sequence
  Oligonucleotide for detection of SNP TSC0054417
aagtatataatat

SEQ ID NO: 223558 - DNA, 13 bp, Artificial Sequence
  Oligonucleotide for detection of SNP TSC0054417
atattatatactt

SEQ ID NO: 223559 - DNA, 13 bp, Artificial Sequence
  Oligonucleotide for detection of SNP TSC0054417
aagtatgtaatat

SEQ ID NO: 223560 - DNA, 13 bp, Artificial Sequence
  Oligonucleotide for detection of SNP TSC0054417
atattacatactt

SEQ ID NO: 223561 - DNA, 13 bp, Artificial Sequence
  Oligonucleotide for detection of SNP TSC0054417
aagtacgtaatat

SEQ ID NO: 223562 - DNA, 13 bp, Artificial Sequence
  Oligonucleotide for detection of SNP TSC0054417
atattacgtactt

SEQ ID NO: 223563 - DNA, 13 bp, Artificial Sequence
  Oligonucleotide for detection of SNP TSC0054417
atattatgtgttt

SEQ ID NO: 223564 - DNA, 13 bp, Artificial Sequence
  Oligonucleotide for detection of SNP TSC0054417
aaacacataatat

SEQ ID NO: 223565 - DNA, 13 bp, Artificial Sequence
  Oligonucleotide for detection of SNP TSC0054417
atattacgtgttt

SEQ ID NO: 223566 - DNA, 13 bp, Artificial Sequence
  Oligonucleotide for detection of SNP TSC0054417
aaacacgtaatat

SEQ ID NO: 223567 - DNA, 13 bp, Artificial Sequence
  Oligonucleotide for detection of SNP TSC0054418
ggtttttgtttay

SEQ ID NO: 223568 - DNA, 13 bp, Artificial Sequence
  Oligonucleotide for detection of SNP TSC0054418
rtaaacaaaaacc

SEQ ID NO: 223569 - DNA, 13 bp, Artificial Sequence
  Oligonucleotide for detection of SNP TSC0054418
ggttttcgtttay

SEQ ID NO: 223570 - DNA, 13 bp, Artificial Sequence
  Oligonucleotide for detection of SNP TSC0054418
rtaaacgaaaacc

SEQ ID NO: 223571 - DNA, 13 bp, Artificial Sequence
  Oligonucleotide for detection of SNP TSC0054418
gtgggtgggggty

SEQ ID NO: 223572 - DNA, 13 bp, Artificial Sequence
  Oligonucleotide for detection of SNP TSC0054418
racccccacccac

SEQ ID NO: 223573 - DNA, 13 bp, Artificial Sequence
  Oligonucleotide for detection of SNP TSC0054418
gtgggtaggggty

SEQ ID NO: 223574 - DNA, 13 bp, Artificial Sequence
  Oligonucleotide for detection of SNP TSC0054418
racccctacccac

SEQ ID NO: 223575 - DNA, 13 bp, Artificial Sequence
  Oligonucleotide for detection of SNP TSC0054418
gtgggcgggggty

SEQ ID NO: 223576 - DNA, 13 bp, Artificial Sequence
  Oligonucleotide for detection of SNP TSC0054418
racccccgcccac

SEQ ID NO: 223577 - DNA, 13 bp, Artificial Sequence
  Oligonucleotide for detection of SNP TSC0054423
ataagtagtagta

SEQ ID NO: 223578 - DNA, 13 bp, Artificial Sequence
  Oligonucleotide for detection of SNP TSC0054423
tactactacttat

SEQ ID NO: 223579 - DNA, 13 bp, Artificial Sequence
  Oligonucleotide for detection of SNP TSC0054423
ataagtggtagta

SEQ ID NO: 223580 - DNA, 13 bp, Artificial Sequence
  Oligonucleotide for detection of SNP TSC0054423
tactaccacttat

SEQ ID NO: 223581 - DNA, 13 bp, Artificial Sequence
  Oligonucleotide for detection of SNP TSC0054423
ataagcggtagta

SEQ ID NO: 223582 - DNA, 13 bp, Artificial Sequence
  Oligonucleotide for detection of SNP TSC0054423
tactaccgcttat

SEQ ID NO: 223583 - DNA, 13 bp, Artificial Sequence
  Oligonucleotide for detection of SNP TSC0054423
tgttattgtttgt

SEQ ID NO: 223584 - DNA, 13 bp, Artificial Sequence
  Oligonucleotide for detection of SNP TSC0054423
acaaacaataaca

SEQ ID NO: 223585 - DNA, 13 bp, Artificial Sequence
  Oligonucleotide for detection of SNP TSC0054423
tgttatcgtttgt

SEQ ID NO: 223586 - DNA, 13 bp, Artificial Sequence
  Oligonucleotide for detection of SNP TSC0054423
acaaacgataaca

SEQ ID NO: 223587 - DNA, 13 bp, Artificial Sequence
  Oligonucleotide for detection of SNP TSC0054424
ggtagatgttgta

SEQ ID NO: 223588 - DNA, 13 bp, Artificial Sequence
  Oligonucleotide for detection of SNP TSC0054424
tacaacatctacc

SEQ ID NO: 223589 - DNA, 13 bp, Artificial Sequence
  Oligonucleotide for detection of SNP TSC0054424
tgtaatatttgty

SEQ ID NO: 223590 - DNA, 13 bp, Artificial Sequence
  Oligonucleotide for detection of SNP TSC0054424
racaaatattaca

SEQ ID NO: 223591 - DNA, 13 bp, Artificial Sequence
  Oligonucleotide for detection of SNP TSC0054424
tgtaatttttgty

SEQ ID NO: 223592 - DNA, 13 bp, Artificial Sequence
  Oligonucleotide for detection of SNP TSC0054424
racaaaaattaca

SEQ ID NO: 223593 - DNA, 13 bp, Artificial Sequence
  Oligonucleotide for detection of SNP TSC0054425
agatattaaggga

SEQ ID NO: 223594 - DNA, 13 bp, Artificial Sequence
  Oligonucleotide for detection of SNP TSC0054425
tcccttaatatct

SEQ ID NO: 223595 - DNA, 13 bp, Artificial Sequence
  Oligonucleotide for detection of SNP TSC0054425
agatatgaaggga

SEQ ID NO: 223596 - DNA, 13 bp, Artificial Sequence
  Oligonucleotide for detection of SNP TSC0054425
tcccttcatatct

SEQ ID NO: 223597 - DNA, 13 bp, Artificial Sequence
  Oligonucleotide for detection of SNP TSC0054425
agatacgaaggga

SEQ ID NO: 223598 - DNA, 13 bp, Artificial Sequence
  Oligonucleotide for detection of SNP TSC0054425
tcccttcgtatct

SEQ ID NO: 223599 - DNA, 13 bp, Artificial Sequence
  Oligonucleotide for detection of SNP TSC0054425
ttttttggtgttt

SEQ ID NO: 223600 - DNA, 13 bp, Artificial Sequence
  Oligonucleotide for detection of SNP TSC0054425
aaacaccaaaaaa

SEQ ID NO: 223601 - DNA, 13 bp, Artificial Sequence
  Oligonucleotide for detection of SNP TSC0054426
ggattagtgtttg

SEQ ID NO: 223602 - DNA, 13 bp, Artificial Sequence
  Oligonucleotide for detection of SNP TSC0054426
caaacactaatcc

SEQ ID NO: 223603 - DNA, 13 bp, Artificial Sequence
  Oligonucleotide for detection of SNP TSC0054426
ggattaatgtttg

SEQ ID NO: 223604 - DNA, 13 bp, Artificial Sequence
  Oligonucleotide for detection of SNP TSC0054426
caaacattaatcc

SEQ ID NO: 223605 - DNA, 13 bp, Artificial Sequence
  Oligonucleotide for detection of SNP TSC0054427
ggtagggttttta

SEQ ID NO: 223606 - DNA, 13 bp, Artificial Sequence
  Oligonucleotide for detection of SNP TSC0054427
taaaaaccctacc

SEQ ID NO: 223607 - DNA, 13 bp, Artificial Sequence
  Oligonucleotide for detection of SNP TSC0054427
ggtaggattttta

SEQ ID NO: 223608 - DNA, 13 bp, Artificial Sequence
  Oligonucleotide for detection of SNP TSC0054427
taaaaatcctacc

SEQ ID NO: 223609 - DNA, 13 bp, Artificial Sequence
  Oligonucleotide for detection of SNP TSC0054431
ttatatatttgaa

SEQ ID NO: 223610 - DNA, 13 bp, Artificial Sequence
  Oligonucleotide for detection of SNP TSC0054431
ttcaaatatataa

SEQ ID NO: 223611 - DNA, 13 bp, Artificial Sequence
  Oligonucleotide for detection of SNP TSC0054431
ttatatttttgaa

SEQ ID NO: 223612 - DNA, 13 bp, Artificial Sequence
  Oligonucleotide for detection of SNP TSC0054431
ttcaaaaatataa

SEQ ID NO: 223613 - DNA, 13 bp, Artificial Sequence
  Oligonucleotide for detection of SNP TSC0054432
aaaaaaaatttat

SEQ ID NO: 223614 - DNA, 13 bp, Artificial Sequence
  Oligonucleotide for detection of SNP TSC0054432
ataaatttttttt

SEQ ID NO: 223615 - DNA, 13 bp, Artificial Sequence
  Oligonucleotide for detection of SNP TSC0054432
aaaaaatatttat

SEQ ID NO: 223616 - DNA, 13 bp, Artificial Sequence
  Oligonucleotide for detection of SNP TSC0054432
ataaatatttttt

SEQ ID NO: 223617 - DNA, 13 bp, Artificial Sequence
  Oligonucleotide for detection of SNP TSC0054432
atggatttttttt

SEQ ID NO: 223618 - DNA, 13 bp, Artificial Sequence
  Oligonucleotide for detection of SNP TSC0054432
aaaaaaaatccat

SEQ ID NO: 223619 - DNA, 13 bp, Artificial Sequence
  Oligonucleotide for detection of SNP TSC0054432
atggatatttttt

SEQ ID NO: 223620 - DNA, 13 bp, Artificial Sequence
  Oligonucleotide for detection of SNP TSC0054432
aaaaaatatccat

SEQ ID NO: 223621 - DNA, 13 bp, Artificial Sequence
  Oligonucleotide for detection of SNP TSC0054433
tttaaaattgtaa

SEQ ID NO: 223622 - DNA, 13 bp, Artificial Sequence
  Oligonucleotide for detection of SNP TSC0054433
ttacaattttaaa

SEQ ID NO: 223623 - DNA, 13 bp, Artificial Sequence
  Oligonucleotide for detection of SNP TSC0054433
tttaaatttgtaa

SEQ ID NO: 223624 - DNA, 13 bp, Artificial Sequence
  Oligonucleotide for detection of SNP TSC0054433
ttacaaatttaaa

SEQ ID NO: 223625 - DNA, 13 bp, Artificial Sequence
  Oligonucleotide for detection of SNP TSC0054433
ttatagttttaga

SEQ ID NO: 223626 - DNA, 13 bp, Artificial Sequence
  Oligonucleotide for detection of SNP TSC0054433
tctaaaactataa

SEQ ID NO: 223627 - DNA, 13 bp, Artificial Sequence
  Oligonucleotide for detection of SNP TSC0054433
ttatagatttaga

SEQ ID NO: 223628 - DNA, 13 bp, Artificial Sequence
  Oligonucleotide for detection of SNP TSC0054433
tctaaatctataa

SEQ ID NO: 223629 - DNA, 13 bp, Artificial Sequence
  Oligonucleotide for detection of SNP TSC0054434
ttgttttttatta

SEQ ID NO: 223630 - DNA, 13 bp, Artificial Sequence
  Oligonucleotide for detection of SNP TSC0054434
taataaaaaacaa

SEQ ID NO: 223631 - DNA, 13 bp, Artificial Sequence
  Oligonucleotide for detection of SNP TSC0054434
taataatgaataa

SEQ ID NO: 223632 - DNA, 13 bp, Artificial Sequence
  Oligonucleotide for detection of SNP TSC0054434
ttattcattatta

SEQ ID NO: 223633 - DNA, 13 bp, Artificial Sequence
  Oligonucleotide for detection of SNP TSC0054434
taataaagaataa

SEQ ID NO: 223634 - DNA, 13 bp, Artificial Sequence
  Oligonucleotide for detection of SNP TSC0054434
ttattctttatta

SEQ ID NO: 223635 - DNA, 13 bp, Artificial Sequence
  Oligonucleotide for detection of SNP TSC0054435
gatatatttattg

SEQ ID NO: 223636 - DNA, 13 bp, Artificial Sequence
  Oligonucleotide for detection of SNP TSC0054435
caataaatatatc

SEQ ID NO: 223637 - DNA, 13 bp, Artificial Sequence
  Oligonucleotide for detection of SNP TSC0054435
gatatagttattg

SEQ ID NO: 223638 - DNA, 13 bp, Artificial Sequence
  Oligonucleotide for detection of SNP TSC0054435
caataactatatc

SEQ ID NO: 223639 - DNA, 13 bp, Artificial Sequence
  Oligonucleotide for detection of SNP TSC0054435
taataggtgtgty

SEQ ID NO: 223640 - DNA, 13 bp, Artificial Sequence
  Oligonucleotide for detection of SNP TSC0054435
racacacctatta

SEQ ID NO: 223641 - DNA, 13 bp, Artificial Sequence
  Oligonucleotide for detection of SNP TSC0054435
taatagttgtgty

SEQ ID NO: 223642 - DNA, 13 bp, Artificial Sequence
  Oligonucleotide for detection of SNP TSC0054435
racacaactatta

SEQ ID NO: 223643 - DNA, 13 bp, Artificial Sequence
  Oligonucleotide for detection of SNP TSC0054436
tggtaaagagtta

SEQ ID NO: 223644 - DNA, 13 bp, Artificial Sequence
  Oligonucleotide for detection of SNP TSC0054436
taactctttacca

SEQ ID NO: 223645 - DNA, 13 bp, Artificial Sequence
  Oligonucleotide for detection of SNP TSC0054436
tggtaaggagtta

SEQ ID NO: 223646 - DNA, 13 bp, Artificial Sequence
  Oligonucleotide for detection of SNP TSC0054436
taactccttacca

SEQ ID NO: 223647 - DNA, 13 bp, Artificial Sequence
  Oligonucleotide for detection of SNP TSC0054443
ggaagtggaagaa

SEQ ID NO: 223648 - DNA, 13 bp, Artificial Sequence
  Oligonucleotide for detection of SNP TSC0054443
ttcttccacttcc

SEQ ID NO: 223649 - DNA, 13 bp, Artificial Sequence
  Oligonucleotide for detection of SNP TSC0054443
ggaagtagaagaa

SEQ ID NO: 223650 - DNA, 13 bp, Artificial Sequence
  Oligonucleotide for detection of SNP TSC0054443
ttcttctacttcc

SEQ ID NO: 223651 - DNA, 13 bp, Artificial Sequence
  Oligonucleotide for detection of SNP TSC0054444
taaagatggatag

SEQ ID NO: 223652 - DNA, 13 bp, Artificial Sequence
  Oligonucleotide for detection of SNP TSC0054444
ctatccatcttta

SEQ ID NO: 223653 - DNA, 13 bp, Artificial Sequence
  Oligonucleotide for detection of SNP TSC0054444
taaagacggatag

SEQ ID NO: 223654 - DNA, 13 bp, Artificial Sequence
  Oligonucleotide for detection of SNP TSC0054444
ctatccgtcttta

SEQ ID NO: 223655 - DNA, 13 bp, Artificial Sequence
  Oligonucleotide for detection of SNP TSC0054445
tttttggtatgty

SEQ ID NO: 223656 - DNA, 13 bp, Artificial Sequence
  Oligonucleotide for detection of SNP TSC0054445
racataccaaaaa

SEQ ID NO: 223657 - DNA, 13 bp, Artificial Sequence
  Oligonucleotide for detection of SNP TSC0054445
tttttgatatgty

SEQ ID NO: 223658 - DNA, 13 bp, Artificial Sequence
  Oligonucleotide for detection of SNP TSC0054445
racatatcaaaaa

SEQ ID NO: 223659 - DNA, 13 bp, Artificial Sequence
  Oligonucleotide for detection of SNP TSC0054446
aatttttgattta

SEQ ID NO: 223660 - DNA, 13 bp, Artificial Sequence
  Oligonucleotide for detection of SNP TSC0054446
taaatcaaaaatt

SEQ ID NO: 223661 - DNA, 13 bp, Artificial Sequence
  Oligonucleotide for detection of SNP TSC0054446
aattttggattta

SEQ ID NO: 223662 - DNA, 13 bp, Artificial Sequence
  Oligonucleotide for detection of SNP TSC0054446
taaatccaaaatt

SEQ ID NO: 223663 - DNA, 13 bp, Artificial Sequence
  Oligonucleotide for detection of SNP TSC0054446
aattttcgattta

SEQ ID NO: 223664 - DNA, 13 bp, Artificial Sequence
  Oligonucleotide for detection of SNP TSC0054446
taaatcgaaaatt

SEQ ID NO: 223665 - DNA, 13 bp, Artificial Sequence
  Oligonucleotide for detection of SNP TSC0054446
taaattgaaggtt

SEQ ID NO: 223666 - DNA, 13 bp, Artificial Sequence
  Oligonucleotide for detection of SNP TSC0054446
aaccttcaattta

SEQ ID NO: 223667 - DNA, 13 bp, Artificial Sequence
  Oligonucleotide for detection of SNP TSC0054446
taaatttaaggtt

SEQ ID NO: 223668 - DNA, 13 bp, Artificial Sequence
  Oligonucleotide for detection of SNP TSC0054446
aaccttaaattta

SEQ ID NO: 223669 - DNA, 13 bp, Artificial Sequence
  Oligonucleotide for detection of SNP TSC0054446
taaatcgaaggtt

SEQ ID NO: 223670 - DNA, 13 bp, Artificial Sequence
  Oligonucleotide for detection of SNP TSC0054446
aaccttcgattta

SEQ ID NO: 223671 - DNA, 13 bp, Artificial Sequence
  Oligonucleotide for detection of SNP TSC0054447
aagggaataataa

SEQ ID NO: 223672 - DNA, 13 bp, Artificial Sequence
  Oligonucleotide for detection of SNP TSC0054447
ttattattccctt

SEQ ID NO: 223673 - DNA, 13 bp, Artificial Sequence
  Oligonucleotide for detection of SNP TSC0054447
aagggattaataa

SEQ ID NO: 223674 - DNA, 13 bp, Artificial Sequence
  Oligonucleotide for detection of SNP TSC0054447
ttattaatccctt

SEQ ID NO: 223675 - DNA, 13 bp, Artificial Sequence
  Oligonucleotide for detection of SNP TSC0054449
aattattttatag

SEQ ID NO: 223676 - DNA, 13 bp, Artificial Sequence
  Oligonucleotide for detection of SNP TSC0054449
ctataaaataatt

SEQ ID NO: 223677 - DNA, 13 bp, Artificial Sequence
  Oligonucleotide for detection of SNP TSC0054449
aattatgttatag

SEQ ID NO: 223678 - DNA, 13 bp, Artificial Sequence
  Oligonucleotide for detection of SNP TSC0054449
ctataacataatt

SEQ ID NO: 223679 - DNA, 13 bp, Artificial Sequence
  Oligonucleotide for detection of SNP TSC0054449
ttgtgaaatagtt

SEQ ID NO: 223680 - DNA, 13 bp, Artificial Sequence
  Oligonucleotide for detection of SNP TSC0054449
aactatttcacaa

SEQ ID NO: 223681 - DNA, 13 bp, Artificial Sequence
  Oligonucleotide for detection of SNP TSC0054449
ttgtgatatagtt

SEQ ID NO: 223682 - DNA, 13 bp, Artificial Sequence
  Oligonucleotide for detection of SNP TSC0054449
aactatatcacaa

SEQ ID NO: 223683 - DNA, 13 bp, Artificial Sequence
  Oligonucleotide for detection of SNP TSC0054451
ataaataaaaagy

SEQ ID NO: 223684 - DNA, 13 bp, Artificial Sequence
  Oligonucleotide for detection of SNP TSC0054451
rctttttatttat

SEQ ID NO: 223685 - DNA, 13 bp, Artificial Sequence
  Oligonucleotide for detection of SNP TSC0054451
ataaatgaaaagy

SEQ ID NO: 223686 - DNA, 13 bp, Artificial Sequence
  Oligonucleotide for detection of SNP TSC0054451
rcttttcatttat

SEQ ID NO: 223687 - DNA, 13 bp, Artificial Sequence
  Oligonucleotide for detection of SNP TSC0054452
tagaaggtattta

SEQ ID NO: 223688 - DNA, 13 bp, Artificial Sequence
  Oligonucleotide for detection of SNP TSC0054452
taaataccttcta

SEQ ID NO: 223689 - DNA, 13 bp, Artificial Sequence
  Oligonucleotide for detection of SNP TSC0054452
tagaagatattta

SEQ ID NO: 223690 - DNA, 13 bp, Artificial Sequence
  Oligonucleotide for detection of SNP TSC0054452
taaatatcttcta

SEQ ID NO: 223691 - DNA, 13 bp, Artificial Sequence
  Oligonucleotide for detection of SNP TSC0054454
ttattagttttga

SEQ ID NO: 223692 - DNA, 13 bp, Artificial Sequence
  Oligonucleotide for detection of SNP TSC0054454
tcaaaactaataa

SEQ ID NO: 223693 - DNA, 13 bp, Artificial Sequence
  Oligonucleotide for detection of SNP TSC0054454
ttattaattttga

SEQ ID NO: 223694 - DNA, 13 bp, Artificial Sequence
  Oligonucleotide for detection of SNP TSC0054454
tcaaaattaataa

SEQ ID NO: 223695 - DNA, 13 bp, Artificial Sequence
  Oligonucleotide for detection of SNP TSC0054455
ttatgagaatatg

SEQ ID NO: 223696 - DNA, 13 bp, Artificial Sequence
  Oligonucleotide for detection of SNP TSC0054455
catattctcataa

SEQ ID NO: 223697 - DNA, 13 bp, Artificial Sequence
  Oligonucleotide for detection of SNP TSC0054455
ttatgaaaatatg

SEQ ID NO: 223698 - DNA, 13 bp, Artificial Sequence
  Oligonucleotide for detection of SNP TSC0054455
catattttcataa

SEQ ID NO: 223699 - DNA, 13 bp, Artificial Sequence
  Oligonucleotide for detection of SNP TSC0054458
gtagttgaggttt

SEQ ID NO: 223700 - DNA, 13 bp, Artificial Sequence
  Oligonucleotide for detection of SNP TSC0054458
aaacctcaactac

SEQ ID NO: 223701 - DNA, 13 bp, Artificial Sequence
  Oligonucleotide for detection of SNP TSC0054458
gtagttaaggttt

SEQ ID NO: 223702 - DNA, 13 bp, Artificial Sequence
  Oligonucleotide for detection of SNP TSC0054458
aaaccttaactac

SEQ ID NO: 223703 - DNA, 13 bp, Artificial Sequence
  Oligonucleotide for detection of SNP TSC0054459
gaaaaatattaga

SEQ ID NO: 223704 - DNA, 13 bp, Artificial Sequence
  Oligonucleotide for detection of SNP TSC0054459
tctaatatttttc

SEQ ID NO: 223705 - DNA, 13 bp, Artificial Sequence
  Oligonucleotide for detection of SNP TSC0054459
gaaaaagattaga

SEQ ID NO: 223706 - DNA, 13 bp, Artificial Sequence
  Oligonucleotide for detection of SNP TSC0054459
tctaatctttttc

SEQ ID NO: 223707 - DNA, 13 bp, Artificial Sequence
  Oligonucleotide for detection of SNP TSC0054461
tttgaagttgagy

SEQ ID NO: 223708 - DNA, 13 bp, Artificial Sequence
  Oligonucleotide for detection of SNP TSC0054461
rctcaacttcaaa

SEQ ID NO: 223709 - DNA, 13 bp, Artificial Sequence
  Oligonucleotide for detection of SNP TSC0054461
tttgaaattgagy

SEQ ID NO: 223710 - DNA, 13 bp, Artificial Sequence
  Oligonucleotide for detection of SNP TSC0054461
rctcaatttcaaa

SEQ ID NO: 223711 - DNA, 13 bp, Artificial Sequence
  Oligonucleotide for detection of SNP TSC0054464
ttttttatgaatt

SEQ ID NO: 223712 - DNA, 13 bp, Artificial Sequence
  Oligonucleotide for detection of SNP TSC0054464
aattcataaaaaa

SEQ ID NO: 223713 - DNA, 13 bp, Artificial Sequence
  Oligonucleotide for detection of SNP TSC0054464
tttttcgtgaatt

SEQ ID NO: 223714 - DNA, 13 bp, Artificial Sequence
  Oligonucleotide for detection of SNP TSC0054464
aattcacgaaaaa

SEQ ID NO: 223715 - DNA, 13 bp, Artificial Sequence
  Oligonucleotide for detection of SNP TSC0054464
aatttatggaaga

SEQ ID NO: 223716 - DNA, 13 bp, Artificial Sequence
  Oligonucleotide for detection of SNP TSC0054464
tcttccataaatt

SEQ ID NO: 223717 - DNA, 13 bp, Artificial Sequence
  Oligonucleotide for detection of SNP TSC0054464
aatttacggaaga

SEQ ID NO: 223718 - DNA, 13 bp, Artificial Sequence
  Oligonucleotide for detection of SNP TSC0054464
tcttccgtaaatt

SEQ ID NO: 223719 - DNA, 13 bp, Artificial Sequence
  Oligonucleotide for detection of SNP TSC0054465
tagtatatatgtt

SEQ ID NO: 223720 - DNA, 13 bp, Artificial Sequence
  Oligonucleotide for detection of SNP TSC0054465
aacatatatacta

SEQ ID NO: 223721 - DNA, 13 bp, Artificial Sequence
  Oligonucleotide for detection of SNP TSC0054465
tagtatgtatgtt

SEQ ID NO: 223722 - DNA, 13 bp, Artificial Sequence
  Oligonucleotide for detection of SNP TSC0054465
aacatacatacta

SEQ ID NO: 223723 - DNA, 13 bp, Artificial Sequence
  Oligonucleotide for detection of SNP TSC0054469
aattaaggttaat

SEQ ID NO: 223724 - DNA, 13 bp, Artificial Sequence
  Oligonucleotide for detection of SNP TSC0054469
attaaccttaatt

SEQ ID NO: 223725 - DNA, 13 bp, Artificial Sequence
  Oligonucleotide for detection of SNP TSC0054469
attagtattagtt

SEQ ID NO: 223726 - DNA, 13 bp, Artificial Sequence
  Oligonucleotide for detection of SNP TSC0054469
aactaatactaat

SEQ ID NO: 223727 - DNA, 13 bp, Artificial Sequence
  Oligonucleotide for detection of SNP TSC0054469
attagttttagtt

SEQ ID NO: 223728 - DNA, 13 bp, Artificial Sequence
  Oligonucleotide for detection of SNP TSC0054469
aactaaaactaat

SEQ ID NO: 223729 - DNA, 13 bp, Artificial Sequence
  Oligonucleotide for detection of SNP TSC0054470
taaataatttaty

SEQ ID NO: 223730 - DNA, 13 bp, Artificial Sequence
  Oligonucleotide for detection of SNP TSC0054470
rataaattattta

SEQ ID NO: 223731 - DNA, 13 bp, Artificial Sequence
  Oligonucleotide for detection of SNP TSC0054470
taaatattttaty

SEQ ID NO: 223732 - DNA, 13 bp, Artificial Sequence
  Oligonucleotide for detection of SNP TSC0054470
rataaaatattta

SEQ ID NO: 223733 - DNA, 13 bp, Artificial Sequence
  Oligonucleotide for detection of SNP TSC0054470
ggtggattattta

SEQ ID NO: 223734 - DNA, 13 bp, Artificial Sequence
  Oligonucleotide for detection of SNP TSC0054470
taaataatccacc

SEQ ID NO: 223735 - DNA, 13 bp, Artificial Sequence
  Oligonucleotide for detection of SNP TSC0054472
agtaatatggaag

SEQ ID NO: 223736 - DNA, 13 bp, Artificial Sequence
  Oligonucleotide for detection of SNP TSC0054472
cttccatattact

SEQ ID NO: 223737 - DNA, 13 bp, Artificial Sequence
  Oligonucleotide for detection of SNP TSC0054472
agtaatgtggaag

SEQ ID NO: 223738 - DNA, 13 bp, Artificial Sequence
  Oligonucleotide for detection of SNP TSC0054472
cttccacattact

SEQ ID NO: 223739 - DNA, 13 bp, Artificial Sequence
  Oligonucleotide for detection of SNP TSC0054473
atatatttgttga

SEQ ID NO: 223740 - DNA, 13 bp, Artificial Sequence
  Oligonucleotide for detection of SNP TSC0054473
tcaacaaatatat

SEQ ID NO: 223741 - DNA, 13 bp, Artificial Sequence
  Oligonucleotide for detection of SNP TSC0054473
atatatgtgttga

SEQ ID NO: 223742 - DNA, 13 bp, Artificial Sequence
  Oligonucleotide for detection of SNP TSC0054473
tcaacacatatat

SEQ ID NO: 223743 - DNA, 13 bp, Artificial Sequence
  Oligonucleotide for detection of SNP TSC0054473
ttaataaatatgt

SEQ ID NO: 223744 - DNA, 13 bp, Artificial Sequence
  Oligonucleotide for detection of SNP TSC0054473
acatatttattaa

SEQ ID NO: 223745 - DNA, 13 bp, Artificial Sequence
  Oligonucleotide for detection of SNP TSC0054473
ttaatatatatgt

SEQ ID NO: 223746 - DNA, 13 bp, Artificial Sequence
  Oligonucleotide for detection of SNP TSC0054473
acatatatattaa

SEQ ID NO: 223747 - DNA, 13 bp, Artificial Sequence
  Oligonucleotide for detection of SNP TSC0054475
ataaatttttcgt

SEQ ID NO: 223748 - DNA, 13 bp, Artificial Sequence
  Oligonucleotide for detection of SNP TSC0054475
acgaaaaatttat

SEQ ID NO: 223749 - DNA, 13 bp, Artificial Sequence
  Oligonucleotide for detection of SNP TSC0054475
ataaatgtttcgt

SEQ ID NO: 223750 - DNA, 13 bp, Artificial Sequence
  Oligonucleotide for detection of SNP TSC0054475
acgaaacatttat

SEQ ID NO: 223751 - DNA, 13 bp, Artificial Sequence
  Oligonucleotide for detection of SNP TSC0054475
atggggaatttgt

SEQ ID NO: 223752 - DNA, 13 bp, Artificial Sequence
  Oligonucleotide for detection of SNP TSC0054475
acaaattccccat

SEQ ID NO: 223753 - DNA, 13 bp, Artificial Sequence
  Oligonucleotide for detection of SNP TSC0054475
atggggtatttgt

SEQ ID NO: 223754 - DNA, 13 bp, Artificial Sequence
  Oligonucleotide for detection of SNP TSC0054475
acaaataccccat

SEQ ID NO: 223755 - DNA, 13 bp, Artificial Sequence
  Oligonucleotide for detection of SNP TSC0054475
acggggaatttgt

SEQ ID NO: 223756 - DNA, 13 bp, Artificial Sequence
  Oligonucleotide for detection of SNP TSC0054475
acaaattccccgt

SEQ ID NO: 223757 - DNA, 13 bp, Artificial Sequence
  Oligonucleotide for detection of SNP TSC0054475
acggggtatttgt

SEQ ID NO: 223758 - DNA, 13 bp, Artificial Sequence
  Oligonucleotide for detection of SNP TSC0054475
acaaataccccgt

SEQ ID NO: 223759 - DNA, 13 bp, Artificial Sequence
  Oligonucleotide for detection of SNP TSC0054478
ttttggaattaay

SEQ ID NO: 223760 - DNA, 13 bp, Artificial Sequence
  Oligonucleotide for detection of SNP TSC0054478
rttaattccaaaa

SEQ ID NO: 223761 - DNA, 13 bp, Artificial Sequence
  Oligonucleotide for detection of SNP TSC0054478
ttttggtattaay

SEQ ID NO: 223762 - DNA, 13 bp, Artificial Sequence
  Oligonucleotide for detection of SNP TSC0054478
rttaataccaaaa

SEQ ID NO: 223763 - DNA, 13 bp, Artificial Sequence
  Oligonucleotide for detection of SNP TSC0054478
gttagttttaaaa

SEQ ID NO: 223764 - DNA, 13 bp, Artificial Sequence
  Oligonucleotide for detection of SNP TSC0054478
ttttaaaactaac

SEQ ID NO: 223765 - DNA, 13 bp, Artificial Sequence
  Oligonucleotide for detection of SNP TSC0054478
gttagtattaaaa

SEQ ID NO: 223766 - DNA, 13 bp, Artificial Sequence
  Oligonucleotide for detection of SNP TSC0054478
ttttaatactaac

SEQ ID NO: 223767 - DNA, 13 bp, Artificial Sequence
  Oligonucleotide for detection of SNP TSC0054479
aattaatggattt

SEQ ID NO: 223768 - DNA, 13 bp, Artificial Sequence
  Oligonucleotide for detection of SNP TSC0054479
aaatccattaatt

SEQ ID NO: 223769 - DNA, 13 bp, Artificial Sequence
  Oligonucleotide for detection of SNP TSC0054479
aattaacggattt

SEQ ID NO: 223770 - DNA, 13 bp, Artificial Sequence
  Oligonucleotide for detection of SNP TSC0054479
aaatccgttaatt

SEQ ID NO: 223771 - DNA, 13 bp, Artificial Sequence
  Oligonucleotide for detection of SNP TSC0054479
aaatttgttagtt

SEQ ID NO: 223772 - DNA, 13 bp, Artificial Sequence
  Oligonucleotide for detection of SNP TSC0054479
aactaacaaattt

SEQ ID NO: 223773 - DNA, 13 bp, Artificial Sequence
  Oligonucleotide for detection of SNP TSC0054479
aaatttattagtt

SEQ ID NO: 223774 - DNA, 13 bp, Artificial Sequence
  Oligonucleotide for detection of SNP TSC0054479
aactaataaattt

SEQ ID NO: 223775 - DNA, 13 bp, Artificial Sequence
  Oligonucleotide for detection of SNP TSC0054479
aaattcgttagtt

SEQ ID NO: 223776 - DNA, 13 bp, Artificial Sequence
  Oligonucleotide for detection of SNP TSC0054479
aactaacgaattt

SEQ ID NO: 223777 - DNA, 13 bp, Artificial Sequence
  Oligonucleotide for detection of SNP TSC0054486
agtttttgttatg

SEQ ID NO: 223778 - DNA, 13 bp, Artificial Sequence
  Oligonucleotide for detection of SNP TSC0054486
cataacaaaaact

SEQ ID NO: 223779 - DNA, 13 bp, Artificial Sequence
  Oligonucleotide for detection of SNP TSC0054486
agttttcgttatg

SEQ ID NO: 223780 - DNA, 13 bp, Artificial Sequence
  Oligonucleotide for detection of SNP TSC0054486
cataacgaaaact

SEQ ID NO: 223781 - DNA, 13 bp, Artificial Sequence
  Oligonucleotide for detection of SNP TSC0054486
tatgatgagaatt

SEQ ID NO: 223782 - DNA, 13 bp, Artificial Sequence
  Oligonucleotide for detection of SNP TSC0054486
aattctcatcata

SEQ ID NO: 223783 - DNA, 13 bp, Artificial Sequence
  Oligonucleotide for detection of SNP TSC0054486
tatgataagaatt

SEQ ID NO: 223784 - DNA, 13 bp, Artificial Sequence
  Oligonucleotide for detection of SNP TSC0054486
aattcttatcata

SEQ ID NO: 223785 - DNA, 13 bp, Artificial Sequence
  Oligonucleotide for detection of SNP TSC0054486
tatgacgagaatt

SEQ ID NO: 223786 - DNA, 13 bp, Artificial Sequence
  Oligonucleotide for detection of SNP TSC0054486
aattctcgtcata

SEQ ID NO: 223787 - DNA, 13 bp, Artificial Sequence
  Oligonucleotide for detection of SNP TSC0054488
gaaggtgaatagg

SEQ ID NO: 223788 - DNA, 13 bp, Artificial Sequence
  Oligonucleotide for detection of SNP TSC0054488
cctattcaccttc

SEQ ID NO: 223789 - DNA, 13 bp, Artificial Sequence
  Oligonucleotide for detection of SNP TSC0054488
gaaggtaaatagg

SEQ ID NO: 223790 - DNA, 13 bp, Artificial Sequence
  Oligonucleotide for detection of SNP TSC0054488
cctatttaccttc

SEQ ID NO: 223791 - DNA, 13 bp, Artificial Sequence
  Oligonucleotide for detection of SNP TSC0054488
gaaggcgaatagg

SEQ ID NO: 223792 - DNA, 13 bp, Artificial Sequence
  Oligonucleotide for detection of SNP TSC0054488
cctattcgccttc

SEQ ID NO: 223793 - DNA, 13 bp, Artificial Sequence
  Oligonucleotide for detection of SNP TSC0054489
tgaaataaaaaty

SEQ ID NO: 223794 - DNA, 13 bp, Artificial Sequence
  Oligonucleotide for detection of SNP TSC0054489
ratttttatttca

SEQ ID NO: 223795 - DNA, 13 bp, Artificial Sequence
  Oligonucleotide for detection of SNP TSC0054489
tgaaattaaaaty

SEQ ID NO: 223796 - DNA, 13 bp, Artificial Sequence
  Oligonucleotide for detection of SNP TSC0054489
rattttaatttca

SEQ ID NO: 223797 - DNA, 13 bp, Artificial Sequence
  Oligonucleotide for detection of SNP TSC0054489
ggtttttgtttta

SEQ ID NO: 223798 - DNA, 13 bp, Artificial Sequence
  Oligonucleotide for detection of SNP TSC0054489
taaaacaaaaacc

SEQ ID NO: 223799 - DNA, 13 bp, Artificial Sequence
  Oligonucleotide for detection of SNP TSC0054489
ggttttggtttta

SEQ ID NO: 223800 - DNA, 13 bp, Artificial Sequence
  Oligonucleotide for detection of SNP TSC0054489
taaaaccaaaacc

SEQ ID NO: 223801 - DNA, 13 bp, Artificial Sequence
  Oligonucleotide for detection of SNP TSC0054492
gatagggatgttg

SEQ ID NO: 223802 - DNA, 13 bp, Artificial Sequence
  Oligonucleotide for detection of SNP TSC0054492
caacatccctatc

SEQ ID NO: 223803 - DNA, 13 bp, Artificial Sequence
  Oligonucleotide for detection of SNP TSC0054492
gataggaatgttg

SEQ ID NO: 223804 - DNA, 13 bp, Artificial Sequence
  Oligonucleotide for detection of SNP TSC0054492
caacattcctatc

SEQ ID NO: 223805 - DNA, 13 bp, Artificial Sequence
  Oligonucleotide for detection of SNP TSC0054493
ggggttagggtaa

SEQ ID NO: 223806 - DNA, 13 bp, Artificial Sequence
  Oligonucleotide for detection of SNP TSC0054493
ttaccctaacccc

SEQ ID NO: 223807 - DNA, 13 bp, Artificial Sequence
  Oligonucleotide for detection of SNP TSC0054493
ggggttggggtaa

SEQ ID NO: 223808 - DNA, 13 bp, Artificial Sequence
  Oligonucleotide for detection of SNP TSC0054493
ttaccccaacccc

SEQ ID NO: 223809 - DNA, 13 bp, Artificial Sequence
  Oligonucleotide for detection of SNP TSC0054493
ggggtcggggtaa

SEQ ID NO: 223810 - DNA, 13 bp, Artificial Sequence
  Oligonucleotide for detection of SNP TSC0054493
ttaccccgacccc

SEQ ID NO: 223811 - DNA, 13 bp, Artificial Sequence
  Oligonucleotide for detection of SNP TSC0054494
tatttgaattaty

SEQ ID NO: 223812 - DNA, 13 bp, Artificial Sequence
  Oligonucleotide for detection of SNP TSC0054494
rataattcaaata

SEQ ID NO: 223813 - DNA, 13 bp, Artificial Sequence
  Oligonucleotide for detection of SNP TSC0054494
tatttggattaty

SEQ ID NO: 223814 - DNA, 13 bp, Artificial Sequence
  Oligonucleotide for detection of SNP TSC0054494
rataatccaaata

SEQ ID NO: 223815 - DNA, 13 bp, Artificial Sequence
  Oligonucleotide for detection of SNP TSC0054498
tttttaggttgtg

SEQ ID NO: 223816 - DNA, 13 bp, Artificial Sequence
  Oligonucleotide for detection of SNP TSC0054498
cacaacctaaaaa

SEQ ID NO: 223817 - DNA, 13 bp, Artificial Sequence
  Oligonucleotide for detection of SNP TSC0054498
tataatgtgagag

SEQ ID NO: 223818 - DNA, 13 bp, Artificial Sequence
  Oligonucleotide for detection of SNP TSC0054498
ctctcacattata

SEQ ID NO: 223819 - DNA, 13 bp, Artificial Sequence
  Oligonucleotide for detection of SNP TSC0054498
tataatttgagag

SEQ ID NO: 223820 - DNA, 13 bp, Artificial Sequence
  Oligonucleotide for detection of SNP TSC0054498
ctctcaaattata

SEQ ID NO: 223821 - DNA, 13 bp, Artificial Sequence
  Oligonucleotide for detection of SNP TSC0054498
tataacgtgagag

SEQ ID NO: 223822 - DNA, 13 bp, Artificial Sequence
  Oligonucleotide for detection of SNP TSC0054498
ctctcacgttata

SEQ ID NO: 223823 - DNA, 13 bp, Artificial Sequence
  Oligonucleotide for detection of SNP TSC0054500
aattatggattgy

SEQ ID NO: 223824 - DNA, 13 bp, Artificial Sequence
  Oligonucleotide for detection of SNP TSC0054500
rcaatccataatt

SEQ ID NO: 223825 - DNA, 13 bp, Artificial Sequence
  Oligonucleotide for detection of SNP TSC0054500
aattatagattgy

SEQ ID NO: 223826 - DNA, 13 bp, Artificial Sequence
  Oligonucleotide for detection of SNP TSC0054500
rcaatctataatt

SEQ ID NO: 223827 - DNA, 13 bp, Artificial Sequence
  Oligonucleotide for detection of SNP TSC0054504
tgaaaaatgttat

SEQ ID NO: 223828 - DNA, 13 bp, Artificial Sequence
  Oligonucleotide for detection of SNP TSC0054504
ataacatttttca

SEQ ID NO: 223829 - DNA, 13 bp, Artificial Sequence
  Oligonucleotide for detection of SNP TSC0054504
tgaaaattgttat

SEQ ID NO: 223830 - DNA, 13 bp, Artificial Sequence
  Oligonucleotide for detection of SNP TSC0054504
ataacaattttca

SEQ ID NO: 223831 - DNA, 13 bp, Artificial Sequence
  Oligonucleotide for detection of SNP TSC0054504
ataatagttttta

SEQ ID NO: 223832 - DNA, 13 bp, Artificial Sequence
  Oligonucleotide for detection of SNP TSC0054504
taaaaactattat

SEQ ID NO: 223833 - DNA, 13 bp, Artificial Sequence
  Oligonucleotide for detection of SNP TSC0054505
atgtattgttatt

SEQ ID NO: 223834 - DNA, 13 bp, Artificial Sequence
  Oligonucleotide for detection of SNP TSC0054505
aataacaatacat

SEQ ID NO: 223835 - DNA, 13 bp, Artificial Sequence
  Oligonucleotide for detection of SNP TSC0054505
atgtatcgttatt

SEQ ID NO: 223836 - DNA, 13 bp, Artificial Sequence
  Oligonucleotide for detection of SNP TSC0054505
aataacgatacat

SEQ ID NO: 223837 - DNA, 13 bp, Artificial Sequence
  Oligonucleotide for detection of SNP TSC0054505
agtgatgatgtat

SEQ ID NO: 223838 - DNA, 13 bp, Artificial Sequence
  Oligonucleotide for detection of SNP TSC0054505
atacatcatcact

SEQ ID NO: 223839 - DNA, 13 bp, Artificial Sequence
  Oligonucleotide for detection of SNP TSC0054505
agtgataatgtat

SEQ ID NO: 223840 - DNA, 13 bp, Artificial Sequence
  Oligonucleotide for detection of SNP TSC0054505
atacattatcact

SEQ ID NO: 223841 - DNA, 13 bp, Artificial Sequence
  Oligonucleotide for detection of SNP TSC0054505
agtgacgatgtat

SEQ ID NO: 223842 - DNA, 13 bp, Artificial Sequence
  Oligonucleotide for detection of SNP TSC0054505
atacatcgtcact

SEQ ID NO: 223843 - DNA, 13 bp, Artificial Sequence
  Oligonucleotide for detection of SNP TSC0054506
tagtaaaattatt

SEQ ID NO: 223844 - DNA, 13 bp, Artificial Sequence
  Oligonucleotide for detection of SNP TSC0054506
aataattttacta

SEQ ID NO: 223845 - DNA, 13 bp, Artificial Sequence
  Oligonucleotide for detection of SNP TSC0054506
tagtaagattatt

SEQ ID NO: 223846 - DNA, 13 bp, Artificial Sequence
  Oligonucleotide for detection of SNP TSC0054506
aataatcttacta

SEQ ID NO: 223847 - DNA, 13 bp, Artificial Sequence
  Oligonucleotide for detection of SNP TSC0054514
aatttattgttta

SEQ ID NO: 223848 - DNA, 13 bp, Artificial Sequence
  Oligonucleotide for detection of SNP TSC0054514
taaacaataaatt

SEQ ID NO: 223849 - DNA, 13 bp, Artificial Sequence
  Oligonucleotide for detection of SNP TSC0054514
aatttagtgttta

SEQ ID NO: 223850 - DNA, 13 bp, Artificial Sequence
  Oligonucleotide for detection of SNP TSC0054514
taaacactaaatt

SEQ ID NO: 223851 - DNA, 13 bp, Artificial Sequence
  Oligonucleotide for detection of SNP TSC0054514
taggtaataagtt

SEQ ID NO: 223852 - DNA, 13 bp, Artificial Sequence
  Oligonucleotide for detection of SNP TSC0054514
aacttattaccta

SEQ ID NO: 223853 - DNA, 13 bp, Artificial Sequence
  Oligonucleotide for detection of SNP TSC0054514
taggtattaagtt

SEQ ID NO: 223854 - DNA, 13 bp, Artificial Sequence
  Oligonucleotide for detection of SNP TSC0054514
aacttaataccta

SEQ ID NO: 223855 - DNA, 13 bp, Artificial Sequence
  Oligonucleotide for detection of SNP TSC0054517
gttaagagaaaaa

SEQ ID NO: 223856 - DNA, 13 bp, Artificial Sequence
  Oligonucleotide for detection of SNP TSC0054517
tttttctcttaac

SEQ ID NO: 223857 - DNA, 13 bp, Artificial Sequence
  Oligonucleotide for detection of SNP TSC0054517
gttaagggaaaaa

SEQ ID NO: 223858 - DNA, 13 bp, Artificial Sequence
  Oligonucleotide for detection of SNP TSC0054517
tttttcccttaac

SEQ ID NO: 223859 - DNA, 13 bp, Artificial Sequence
  Oligonucleotide for detection of SNP TSC0054520
atagtagtaataa

SEQ ID NO: 223860 - DNA, 13 bp, Artificial Sequence
  Oligonucleotide for detection of SNP TSC0054520
ttattactactat

SEQ ID NO: 223861 - DNA, 13 bp, Artificial Sequence
  Oligonucleotide for detection of SNP TSC0054520
atagtaataataa

SEQ ID NO: 223862 - DNA, 13 bp, Artificial Sequence
  Oligonucleotide for detection of SNP TSC0054520
ttattattactat

SEQ ID NO: 223863 - DNA, 13 bp, Artificial Sequence
  Oligonucleotide for detection of SNP TSC0054524
aatgtgtataaag

SEQ ID NO: 223864 - DNA, 13 bp, Artificial Sequence
  Oligonucleotide for detection of SNP TSC0054524
ctttatacacatt

SEQ ID NO: 223865 - DNA, 13 bp, Artificial Sequence
  Oligonucleotide for detection of SNP TSC0054524
aatgtggataaag

SEQ ID NO: 223866 - DNA, 13 bp, Artificial Sequence
  Oligonucleotide for detection of SNP TSC0054524
ctttatccacatt

SEQ ID NO: 223867 - DNA, 13 bp, Artificial Sequence
  Oligonucleotide for detection of SNP TSC0054525
ttagaggaaaaag

SEQ ID NO: 223868 - DNA, 13 bp, Artificial Sequence
  Oligonucleotide for detection of SNP TSC0054525
ctttttcctctaa

SEQ ID NO: 223869 - DNA, 13 bp, Artificial Sequence
  Oligonucleotide for detection of SNP TSC0054525
ttagagaaaaaag

SEQ ID NO: 223870 - DNA, 13 bp, Artificial Sequence
  Oligonucleotide for detection of SNP TSC0054525
cttttttctctaa

SEQ ID NO: 223871 - DNA, 13 bp, Artificial Sequence
  Oligonucleotide for detection of SNP TSC0054527
attggaattttty

SEQ ID NO: 223872 - DNA, 13 bp, Artificial Sequence
  Oligonucleotide for detection of SNP TSC0054527
raaaaattccaat

SEQ ID NO: 223873 - DNA, 13 bp, Artificial Sequence
  Oligonucleotide for detection of SNP TSC0054527
attggagttttty

SEQ ID NO: 223874 - DNA, 13 bp, Artificial Sequence
  Oligonucleotide for detection of SNP TSC0054527
raaaaactccaat

SEQ ID NO: 223875 - DNA, 13 bp, Artificial Sequence
  Oligonucleotide for detection of SNP TSC0054529
tggaaataatatt

SEQ ID NO: 223876 - DNA, 13 bp, Artificial Sequence
  Oligonucleotide for detection of SNP TSC0054529
aatattatttcca

SEQ ID NO: 223877 - DNA, 13 bp, Artificial Sequence
  Oligonucleotide for detection of SNP TSC0054529
tggaaagaatatt

SEQ ID NO: 223878 - DNA, 13 bp, Artificial Sequence
  Oligonucleotide for detection of SNP TSC0054529
aatattctttcca

SEQ ID NO: 223879 - DNA, 13 bp, Artificial Sequence
  Oligonucleotide for detection of SNP TSC0054529
aatatttttttta

SEQ ID NO: 223880 - DNA, 13 bp, Artificial Sequence
  Oligonucleotide for detection of SNP TSC0054529
taaaaaaaatatt

SEQ ID NO: 223881 - DNA, 13 bp, Artificial Sequence
  Oligonucleotide for detection of SNP TSC0054530
gtttaggatatay

SEQ ID NO: 223882 - DNA, 13 bp, Artificial Sequence
  Oligonucleotide for detection of SNP TSC0054530
rtatatcctaaac

SEQ ID NO: 223883 - DNA, 13 bp, Artificial Sequence
  Oligonucleotide for detection of SNP TSC0054530
gtttagaatatay

SEQ ID NO: 223884 - DNA, 13 bp, Artificial Sequence
  Oligonucleotide for detection of SNP TSC0054530
rtatattctaaac

SEQ ID NO: 223885 - DNA, 13 bp, Artificial Sequence
  Oligonucleotide for detection of SNP TSC0054532
ggatgtgtatttt

SEQ ID NO: 223886 - DNA, 13 bp, Artificial Sequence
  Oligonucleotide for detection of SNP TSC0054532
aaaatacacatcc

SEQ ID NO: 223887 - DNA, 13 bp, Artificial Sequence
  Oligonucleotide for detection of SNP TSC0054532
ggatgtatatttt

SEQ ID NO: 223888 - DNA, 13 bp, Artificial Sequence
  Oligonucleotide for detection of SNP TSC0054532
aaaatatacatcc

SEQ ID NO: 223889 - DNA, 13 bp, Artificial Sequence
  Oligonucleotide for detection of SNP TSC0054533
aatggtatttgtt

SEQ ID NO: 223890 - DNA, 13 bp, Artificial Sequence
  Oligonucleotide for detection of SNP TSC0054533
aacaaataccatt

SEQ ID NO: 223891 - DNA, 13 bp, Artificial Sequence
  Oligonucleotide for detection of SNP TSC0054533
aatggtttttgtt

SEQ ID NO: 223892 - DNA, 13 bp, Artificial Sequence
  Oligonucleotide for detection of SNP TSC0054533
aacaaaaaccatt

SEQ ID NO: 223893 - DNA, 13 bp, Artificial Sequence
  Oligonucleotide for detection of SNP TSC0054533
aataggtgttatt

SEQ ID NO: 223894 - DNA, 13 bp, Artificial Sequence
  Oligonucleotide for detection of SNP TSC0054533
aataacacctatt

SEQ ID NO: 223895 - DNA, 13 bp, Artificial Sequence
  Oligonucleotide for detection of SNP TSC0054533
aataggggttatt

SEQ ID NO: 223896 - DNA, 13 bp, Artificial Sequence
  Oligonucleotide for detection of SNP TSC0054533
aataacccctatt

SEQ ID NO: 223897 - DNA, 13 bp, Artificial Sequence
  Oligonucleotide for detection of SNP TSC0054538
tttatatgttgtt

SEQ ID NO: 223898 - DNA, 13 bp, Artificial Sequence
  Oligonucleotide for detection of SNP TSC0054538
aacaacatataaa

SEQ ID NO: 223899 - DNA, 13 bp, Artificial Sequence
  Oligonucleotide for detection of SNP TSC0054538
tttatacgttgtt

SEQ ID NO: 223900 - DNA, 13 bp, Artificial Sequence
  Oligonucleotide for detection of SNP TSC0054538
aacaacgtataaa

SEQ ID NO: 223901 - DNA, 13 bp, Artificial Sequence
  Oligonucleotide for detection of SNP TSC0054538
agtaatgtgtgag

SEQ ID NO: 223902 - DNA, 13 bp, Artificial Sequence
  Oligonucleotide for detection of SNP TSC0054538
ctcacacattact

SEQ ID NO: 223903 - DNA, 13 bp, Artificial Sequence
  Oligonucleotide for detection of SNP TSC0054538
agtaatatgtgag

SEQ ID NO: 223904 - DNA, 13 bp, Artificial Sequence
  Oligonucleotide for detection of SNP TSC0054538
ctcacatattact

SEQ ID NO: 223905 - DNA, 13 bp, Artificial Sequence
  Oligonucleotide for detection of SNP TSC0054538
agtaacgtgtgag

SEQ ID NO: 223906 - DNA, 13 bp, Artificial Sequence
  Oligonucleotide for detection of SNP TSC0054538
ctcacacgttact

SEQ ID NO: 223907 - DNA, 13 bp, Artificial Sequence
  Oligonucleotide for detection of SNP TSC0054543
ttttggaatattt

SEQ ID NO: 223908 - DNA, 13 bp, Artificial Sequence
  Oligonucleotide for detection of SNP TSC0054543
aaatattccaaaa

SEQ ID NO: 223909 - DNA, 13 bp, Artificial Sequence
  Oligonucleotide for detection of SNP TSC0054543
ttttggtatattt

SEQ ID NO: 223910 - DNA, 13 bp, Artificial Sequence
  Oligonucleotide for detection of SNP TSC0054543
aaatataccaaaa

SEQ ID NO: 223911 - DNA, 13 bp, Artificial Sequence
  Oligonucleotide for detection of SNP TSC0054543
aaatattttaggg

SEQ ID NO: 223912 - DNA, 13 bp, Artificial Sequence
  Oligonucleotide for detection of SNP TSC0054543
ccctaaaatattt

SEQ ID NO: 223913 - DNA, 13 bp, Artificial Sequence
  Oligonucleotide for detection of SNP TSC0054543
aaatatattaggg

SEQ ID NO: 223914 - DNA, 13 bp, Artificial Sequence
  Oligonucleotide for detection of SNP TSC0054543
ccctaatatattt

SEQ ID NO: 223915 - DNA, 13 bp, Artificial Sequence
  Oligonucleotide for detection of SNP TSC0054546
gtataaagtatat

SEQ ID NO: 223916 - DNA, 13 bp, Artificial Sequence
  Oligonucleotide for detection of SNP TSC0054546
atatactttatac

SEQ ID NO: 223917 - DNA, 13 bp, Artificial Sequence
  Oligonucleotide for detection of SNP TSC0054546
gtataaggtatat

SEQ ID NO: 223918 - DNA, 13 bp, Artificial Sequence
  Oligonucleotide for detection of SNP TSC0054546
atataccttatac

SEQ ID NO: 223919 - DNA, 13 bp, Artificial Sequence
  Oligonucleotide for detection of SNP TSC0054547
aaaaaattataat

SEQ ID NO: 223920 - DNA, 13 bp, Artificial Sequence
  Oligonucleotide for detection of SNP TSC0054547
attataatttttt

SEQ ID NO: 223921 - DNA, 13 bp, Artificial Sequence
  Oligonucleotide for detection of SNP TSC0054549
aattatagaattt

SEQ ID NO: 223922 - DNA, 13 bp, Artificial Sequence
  Oligonucleotide for detection of SNP TSC0054549
aaattctataatt

SEQ ID NO: 223923 - DNA, 13 bp, Artificial Sequence
  Oligonucleotide for detection of SNP TSC0054549
aattattgaattt

SEQ ID NO: 223924 - DNA, 13 bp, Artificial Sequence
  Oligonucleotide for detection of SNP TSC0054549
aaattcaataatt

SEQ ID NO: 223925 - DNA, 13 bp, Artificial Sequence
  Oligonucleotide for detection of SNP TSC0054549
aattatcgaattt

SEQ ID NO: 223926 - DNA, 13 bp, Artificial Sequence
  Oligonucleotide for detection of SNP TSC0054549
aaattcgataatt

SEQ ID NO: 223927 - DNA, 13 bp, Artificial Sequence
  Oligonucleotide for detection of SNP TSC0054549
agattttatgatt

SEQ ID NO: 223928 - DNA, 13 bp, Artificial Sequence
  Oligonucleotide for detection of SNP TSC0054549
aatcataaaatct

SEQ ID NO: 223929 - DNA, 13 bp, Artificial Sequence
  Oligonucleotide for detection of SNP TSC0054549
agatttgatgatt

SEQ ID NO: 223930 - DNA, 13 bp, Artificial Sequence
  Oligonucleotide for detection of SNP TSC0054549
aatcatcaaatct

SEQ ID NO: 223931 - DNA, 13 bp, Artificial Sequence
  Oligonucleotide for detection of SNP TSC0054549
agattcgatgatt

SEQ ID NO: 223932 - DNA, 13 bp, Artificial Sequence
  Oligonucleotide for detection of SNP TSC0054549
aatcatcgaatct

SEQ ID NO: 223933 - DNA, 13 bp, Artificial Sequence
  Oligonucleotide for detection of SNP TSC0054553
tgtaaagaaggaa

SEQ ID NO: 223934 - DNA, 13 bp, Artificial Sequence
  Oligonucleotide for detection of SNP TSC0054553
ttccttctttaca

SEQ ID NO: 223935 - DNA, 13 bp, Artificial Sequence
  Oligonucleotide for detection of SNP TSC0054553
tgtaaaaaaggaa

SEQ ID NO: 223936 - DNA, 13 bp, Artificial Sequence
  Oligonucleotide for detection of SNP TSC0054553
ttccttttttaca

SEQ ID NO: 223937 - DNA, 13 bp, Artificial Sequence
  Oligonucleotide for detection of SNP TSC0054555
tgtgttgtaatty

SEQ ID NO: 223938 - DNA, 13 bp, Artificial Sequence
  Oligonucleotide for detection of SNP TSC0054555
raattacaacaca

SEQ ID NO: 223939 - DNA, 13 bp, Artificial Sequence
  Oligonucleotide for detection of SNP TSC0054555
tgtgttataatty

SEQ ID NO: 223940 - DNA, 13 bp, Artificial Sequence
  Oligonucleotide for detection of SNP TSC0054555
raattataacaca

SEQ ID NO: 223941 - DNA, 13 bp, Artificial Sequence
  Oligonucleotide for detection of SNP TSC0054557
atatatataataa

SEQ ID NO: 223942 - DNA, 13 bp, Artificial Sequence
  Oligonucleotide for detection of SNP TSC0054557
ttattatatatat

SEQ ID NO: 223943 - DNA, 13 bp, Artificial Sequence
  Oligonucleotide for detection of SNP TSC0054557
atatatgtaataa

SEQ ID NO: 223944 - DNA, 13 bp, Artificial Sequence
  Oligonucleotide for detection of SNP TSC0054557
ttattacatatat

SEQ ID NO: 223945 - DNA, 13 bp, Artificial Sequence
  Oligonucleotide for detection of SNP TSC0054557
atatacgtaataa

SEQ ID NO: 223946 - DNA, 13 bp, Artificial Sequence
  Oligonucleotide for detection of SNP TSC0054557
ttattacgtatat

SEQ ID NO: 223947 - DNA, 13 bp, Artificial Sequence
  Oligonucleotide for detection of SNP TSC0054557
ttattatgtatat

SEQ ID NO: 223948 - DNA, 13 bp, Artificial Sequence
  Oligonucleotide for detection of SNP TSC0054557
atatacataataa

SEQ ID NO: 223949 - DNA, 13 bp, Artificial Sequence
  Oligonucleotide for detection of SNP TSC0054558
aattttggaaaaa

SEQ ID NO: 223950 - DNA, 13 bp, Artificial Sequence
  Oligonucleotide for detection of SNP TSC0054558
tttttccaaaatt

SEQ ID NO: 223951 - DNA, 13 bp, Artificial Sequence
  Oligonucleotide for detection of SNP TSC0054558
aattttagaaaaa

SEQ ID NO: 223952 - DNA, 13 bp, Artificial Sequence
  Oligonucleotide for detection of SNP TSC0054558
tttttctaaaatt

SEQ ID NO: 223953 - DNA, 13 bp, Artificial Sequence
  Oligonucleotide for detection of SNP TSC0054558
aatttcggaaaaa

SEQ ID NO: 223954 - DNA, 13 bp, Artificial Sequence
  Oligonucleotide for detection of SNP TSC0054558
tttttccgaaatt

SEQ ID NO: 223955 - DNA, 13 bp, Artificial Sequence
  Oligonucleotide for detection of SNP TSC0054559
gtagaatattttt

SEQ ID NO: 223956 - DNA, 13 bp, Artificial Sequence
  Oligonucleotide for detection of SNP TSC0054559
aaaaatattctac

SEQ ID NO: 223957 - DNA, 13 bp, Artificial Sequence
  Oligonucleotide for detection of SNP TSC0054560
attagtttttaga

SEQ ID NO: 223958 - DNA, 13 bp, Artificial Sequence
  Oligonucleotide for detection of SNP TSC0054560
tctaaaaactaat

SEQ ID NO: 223959 - DNA, 13 bp, Artificial Sequence
  Oligonucleotide for detection of SNP TSC0054560
tttggatgttggt

SEQ ID NO: 223960 - DNA, 13 bp, Artificial Sequence
  Oligonucleotide for detection of SNP TSC0054560
accaacatccaaa

SEQ ID NO: 223961 - DNA, 13 bp, Artificial Sequence
  Oligonucleotide for detection of SNP TSC0054560
tttggaagttggt

SEQ ID NO: 223962 - DNA, 13 bp, Artificial Sequence
  Oligonucleotide for detection of SNP TSC0054560
accaacttccaaa

SEQ ID NO: 223963 - DNA, 13 bp, Artificial Sequence
  Oligonucleotide for detection of SNP TSC0054561
tggggtttggatt

SEQ ID NO: 223964 - DNA, 13 bp, Artificial Sequence
  Oligonucleotide for detection of SNP TSC0054561
aatccaaacccca

SEQ ID NO: 223965 - DNA, 13 bp, Artificial Sequence
  Oligonucleotide for detection of SNP TSC0054561
tggggtgtggatt

SEQ ID NO: 223966 - DNA, 13 bp, Artificial Sequence
  Oligonucleotide for detection of SNP TSC0054561
aatccacacccca

SEQ ID NO: 223967 - DNA, 13 bp, Artificial Sequence
  Oligonucleotide for detection of SNP TSC0054561
tggggcgtggatt

SEQ ID NO: 223968 - DNA, 13 bp, Artificial Sequence
  Oligonucleotide for detection of SNP TSC0054561
aatccacgcccca

SEQ ID NO: 223969 - DNA, 13 bp, Artificial Sequence
  Oligonucleotide for detection of SNP TSC0054561
aatttaggtttta

SEQ ID NO: 223970 - DNA, 13 bp, Artificial Sequence
  Oligonucleotide for detection of SNP TSC0054561
taaaacctaaatt

SEQ ID NO: 223971 - DNA, 13 bp, Artificial Sequence
  Oligonucleotide for detection of SNP TSC0054561
aatttatgtttta

SEQ ID NO: 223972 - DNA, 13 bp, Artificial Sequence
  Oligonucleotide for detection of SNP TSC0054561
taaaacataaatt

SEQ ID NO: 223973 - DNA, 13 bp, Artificial Sequence
  Oligonucleotide for detection of SNP TSC0054561
aatttacgtttta

SEQ ID NO: 223974 - DNA, 13 bp, Artificial Sequence
  Oligonucleotide for detection of SNP TSC0054561
taaaacgtaaatt

SEQ ID NO: 223975 - DNA, 13 bp, Artificial Sequence
  Oligonucleotide for detection of SNP TSC0005504
tatagacgtagag

SEQ ID NO: 223976 - DNA, 13 bp, Artificial Sequence
  Oligonucleotide for detection of SNP TSC0005504
ctctacgtctata

SEQ ID NO: 223977 - DNA, 13 bp, Artificial Sequence
  Oligonucleotide for detection of SNP TSC0005504
ttttatgtttata

SEQ ID NO: 223978 - DNA, 13 bp, Artificial Sequence
  Oligonucleotide for detection of SNP TSC0005504
tataaacataaaa

SEQ ID NO: 223979 - DNA, 13 bp, Artificial Sequence
  Oligonucleotide for detection of SNP TSC0005504
ttttacgtttata

SEQ ID NO: 223980 - DNA, 13 bp, Artificial Sequence
  Oligonucleotide for detection of SNP TSC0005504
tataaacgtaaaa

SEQ ID NO: 223981 - DNA, 13 bp, Artificial Sequence
  Oligonucleotide for detection of SNP TSC0054563
gatttgagtgggg

SEQ ID NO: 223982 - DNA, 13 bp, Artificial Sequence
  Oligonucleotide for detection of SNP TSC0054563
ccccactcaaatc

SEQ ID NO: 223983 - DNA, 13 bp, Artificial Sequence
  Oligonucleotide for detection of SNP TSC0054563
gatttgggtgggg

SEQ ID NO: 223984 - DNA, 13 bp, Artificial Sequence
  Oligonucleotide for detection of SNP TSC0054563
ccccacccaaatc

SEQ ID NO: 223985 - DNA, 13 bp, Artificial Sequence
  Oligonucleotide for detection of SNP TSC0054567
aaggtagatagta

SEQ ID NO: 223986 - DNA, 13 bp, Artificial Sequence
  Oligonucleotide for detection of SNP TSC0054567
tactatctacctt

SEQ ID NO: 223987 - DNA, 13 bp, Artificial Sequence
  Oligonucleotide for detection of SNP TSC0054567
aaggtaaatagta

SEQ ID NO: 223988 - DNA, 13 bp, Artificial Sequence
  Oligonucleotide for detection of SNP TSC0054567
tactatttacctt

SEQ ID NO: 223989 - DNA, 13 bp, Artificial Sequence
  Oligonucleotide for detection of SNP TSC0054569
ttggggtgttaty

SEQ ID NO: 223990 - DNA, 13 bp, Artificial Sequence
  Oligonucleotide for detection of SNP TSC0054569
rataacaccccaa

SEQ ID NO: 223991 - DNA, 13 bp, Artificial Sequence
  Oligonucleotide for detection of SNP TSC0054569
ttggggcgttaty

SEQ ID NO: 223992 - DNA, 13 bp, Artificial Sequence
  Oligonucleotide for detection of SNP TSC0054569
rataacgccccaa

SEQ ID NO: 223993 - DNA, 13 bp, Artificial Sequence
  Oligonucleotide for detection of SNP TSC0054569
gataatgttttaa

SEQ ID NO: 223994 - DNA, 13 bp, Artificial Sequence
  Oligonucleotide for detection of SNP TSC0054569
ttaaaacattatc

SEQ ID NO: 223995 - DNA, 13 bp, Artificial Sequence
  Oligonucleotide for detection of SNP TSC0054569
gataatattttaa

SEQ ID NO: 223996 - DNA, 13 bp, Artificial Sequence
  Oligonucleotide for detection of SNP TSC0054569
ttaaaatattatc

SEQ ID NO: 223997 - DNA, 13 bp, Artificial Sequence
  Oligonucleotide for detection of SNP TSC0054569
gataacgttttaa

SEQ ID NO: 223998 - DNA, 13 bp, Artificial Sequence
  Oligonucleotide for detection of SNP TSC0054569
ttaaaacgttatc

SEQ ID NO: 223999 - DNA, 13 bp, Artificial Sequence
  Oligonucleotide for detection of SNP TSC0054570
tgttatgtgaatg

SEQ ID NO: 224000 - DNA, 13 bp, Artificial Sequence
  Oligonucleotide for detection of SNP TSC0054570
cattcacataaca

SEQ ID NO: 224001 - DNA, 13 bp, Artificial Sequence
  Oligonucleotide for detection of SNP TSC0054570
tgttatatgaatg

SEQ ID NO: 224002 - DNA, 13 bp, Artificial Sequence
  Oligonucleotide for detection of SNP TSC0054570
cattcatataaca

SEQ ID NO: 224003 - DNA, 13 bp, Artificial Sequence
  Oligonucleotide for detection of SNP TSC0054572
agaatatgaaaay

SEQ ID NO: 224004 - DNA, 13 bp, Artificial Sequence
  Oligonucleotide for detection of SNP TSC0054572
rttttcatattct

SEQ ID NO: 224005 - DNA, 13 bp, Artificial Sequence
  Oligonucleotide for detection of SNP TSC0054572
agaatacgaaaay

SEQ ID NO: 224006 - DNA, 13 bp, Artificial Sequence
  Oligonucleotide for detection of SNP TSC0054572
rttttcgtattct

SEQ ID NO: 224007 - DNA, 13 bp, Artificial Sequence
  Oligonucleotide for detection of SNP TSC0054578
tattgaatttaaa

SEQ ID NO: 224008 - DNA, 13 bp, Artificial Sequence
  Oligonucleotide for detection of SNP TSC0054578
tttaaattcaata

SEQ ID NO: 224009 - DNA, 13 bp, Artificial Sequence
  Oligonucleotide for detection of SNP TSC0054578
tattgagtttaaa

SEQ ID NO: 224010 - DNA, 13 bp, Artificial Sequence
  Oligonucleotide for detection of SNP TSC0054578
tttaaactcaata

SEQ ID NO: 224011 - DNA, 13 bp, Artificial Sequence
  Oligonucleotide for detection of SNP TSC0054578
tatcgaatttaaa

SEQ ID NO: 224012 - DNA, 13 bp, Artificial Sequence
  Oligonucleotide for detection of SNP TSC0054578
tttaaattcgata

SEQ ID NO: 224013 - DNA, 13 bp, Artificial Sequence
  Oligonucleotide for detection of SNP TSC0054578
tatcgagtttaaa

SEQ ID NO: 224014 - DNA, 13 bp, Artificial Sequence
  Oligonucleotide for detection of SNP TSC0054578
tttaaactcgata

SEQ ID NO: 224015 - DNA, 13 bp, Artificial Sequence
  Oligonucleotide for detection of SNP TSC0054579
ttttatattgaat

SEQ ID NO: 224016 - DNA, 13 bp, Artificial Sequence
  Oligonucleotide for detection of SNP TSC0054579
attcaatataaaa

SEQ ID NO: 224017 - DNA, 13 bp, Artificial Sequence
  Oligonucleotide for detection of SNP TSC0054579
ttttattttgaat

SEQ ID NO: 224018 - DNA, 13 bp, Artificial Sequence
  Oligonucleotide for detection of SNP TSC0054579
attcaaaataaaa

SEQ ID NO: 224019 - DNA, 13 bp, Artificial Sequence
  Oligonucleotide for detection of SNP TSC0054579
atttaatatgaga

SEQ ID NO: 224020 - DNA, 13 bp, Artificial Sequence
  Oligonucleotide for detection of SNP TSC0054579
tctcatattaaat

SEQ ID NO: 224021 - DNA, 13 bp, Artificial Sequence
  Oligonucleotide for detection of SNP TSC0054579
atttaaaatgaga

SEQ ID NO: 224022 - DNA, 13 bp, Artificial Sequence
  Oligonucleotide for detection of SNP TSC0054579
tctcattttaaat

SEQ ID NO: 224023 - DNA, 13 bp, Artificial Sequence
  Oligonucleotide for detection of SNP TSC0054581
gaattgatataga

SEQ ID NO: 224024 - DNA, 13 bp, Artificial Sequence
  Oligonucleotide for detection of SNP TSC0054581
tctatatcaattc

SEQ ID NO: 224025 - DNA, 13 bp, Artificial Sequence
  Oligonucleotide for detection of SNP TSC0054581
gaattgttataga

SEQ ID NO: 224026 - DNA, 13 bp, Artificial Sequence
  Oligonucleotide for detection of SNP TSC0054581
tctataacaattc

SEQ ID NO: 224027 - DNA, 13 bp, Artificial Sequence
  Oligonucleotide for detection of SNP TSC0054581
tttatattaatty

SEQ ID NO: 224028 - DNA, 13 bp, Artificial Sequence
  Oligonucleotide for detection of SNP TSC0054581
raattaatataaa

SEQ ID NO: 224029 - DNA, 13 bp, Artificial Sequence
  Oligonucleotide for detection of SNP TSC0054581
tttataataatty

SEQ ID NO: 224030 - DNA, 13 bp, Artificial Sequence
  Oligonucleotide for detection of SNP TSC0054581
raattattataaa

SEQ ID NO: 224031 - DNA, 13 bp, Artificial Sequence
  Oligonucleotide for detection of SNP TSC0054585
tgagtgaggtggy

SEQ ID NO: 224032 - DNA, 13 bp, Artificial Sequence
  Oligonucleotide for detection of SNP TSC0054585
rccacctcactca

SEQ ID NO: 224033 - DNA, 13 bp, Artificial Sequence
  Oligonucleotide for detection of SNP TSC0054585
tgagtgtggtggy

SEQ ID NO: 224034 - DNA, 13 bp, Artificial Sequence
  Oligonucleotide for detection of SNP TSC0054585
rccaccacactca

SEQ ID NO: 224035 - DNA, 13 bp, Artificial Sequence
  Oligonucleotide for detection of SNP TSC0054585
tgagtggggtggy

SEQ ID NO: 224036 - DNA, 13 bp, Artificial Sequence
  Oligonucleotide for detection of SNP TSC0054585
rccaccccactca

SEQ ID NO: 224037 - DNA, 13 bp, Artificial Sequence
  Oligonucleotide for detection of SNP TSC0054585
tgagtgcggtggy

SEQ ID NO: 224038 - DNA, 13 bp, Artificial Sequence
  Oligonucleotide for detection of SNP TSC0054585
rccaccgcactca

SEQ ID NO: 224039 - DNA, 13 bp, Artificial Sequence
  Oligonucleotide for detection of SNP TSC0054585
gttattttattta

SEQ ID NO: 224040 - DNA, 13 bp, Artificial Sequence
  Oligonucleotide for detection of SNP TSC0054585
taaataaaataac

SEQ ID NO: 224041 - DNA, 13 bp, Artificial Sequence
  Oligonucleotide for detection of SNP TSC0054587
ttttgatagaata

SEQ ID NO: 224042 - DNA, 13 bp, Artificial Sequence
  Oligonucleotide for detection of SNP TSC0054587
tattctatcaaaa

SEQ ID NO: 224043 - DNA, 13 bp, Artificial Sequence
  Oligonucleotide for detection of SNP TSC0054587
ttttgagagaata

SEQ ID NO: 224044 - DNA, 13 bp, Artificial Sequence
  Oligonucleotide for detection of SNP TSC0054587
tattctctcaaaa

SEQ ID NO: 224045 - DNA, 13 bp, Artificial Sequence
  Oligonucleotide for detection of SNP TSC0054588
tgattaaaatatt

SEQ ID NO: 224046 - DNA, 13 bp, Artificial Sequence
  Oligonucleotide for detection of SNP TSC0054588
aatattttaatca

SEQ ID NO: 224047 - DNA, 13 bp, Artificial Sequence
  Oligonucleotide for detection of SNP TSC0054588
tgattagaatatt

SEQ ID NO: 224048 - DNA, 13 bp, Artificial Sequence
  Oligonucleotide for detection of SNP TSC0054588
aatattctaatca

SEQ ID NO: 224049 - DNA, 13 bp, Artificial Sequence
  Oligonucleotide for detection of SNP TSC0054589
gattagaatatta

SEQ ID NO: 224050 - DNA, 13 bp, Artificial Sequence
  Oligonucleotide for detection of SNP TSC0054589
taatattctaatc

SEQ ID NO: 224051 - DNA, 13 bp, Artificial Sequence
  Oligonucleotide for detection of SNP TSC0054589
gattagtatatta

SEQ ID NO: 224052 - DNA, 13 bp, Artificial Sequence
  Oligonucleotide for detection of SNP TSC0054589
taatatactaatc

SEQ ID NO: 224053 - DNA, 13 bp, Artificial Sequence
  Oligonucleotide for detection of SNP TSC0054589
taatgttttaaty

SEQ ID NO: 224054 - DNA, 13 bp, Artificial Sequence
  Oligonucleotide for detection of SNP TSC0054589
rattaaaacatta

SEQ ID NO: 224055 - DNA, 13 bp, Artificial Sequence
  Oligonucleotide for detection of SNP TSC0054589
taatgtgttaaty

SEQ ID NO: 224056 - DNA, 13 bp, Artificial Sequence
  Oligonucleotide for detection of SNP TSC0054589
rattaacacatta

SEQ ID NO: 224057 - DNA, 13 bp, Artificial Sequence
  Oligonucleotide for detection of SNP TSC0054590
attttagattaaa

SEQ ID NO: 224058 - DNA, 13 bp, Artificial Sequence
  Oligonucleotide for detection of SNP TSC0054590
tttaatctaaaat

SEQ ID NO: 224059 - DNA, 13 bp, Artificial Sequence
  Oligonucleotide for detection of SNP TSC0054590
attttaaattaaa

SEQ ID NO: 224060 - DNA, 13 bp, Artificial Sequence
  Oligonucleotide for detection of SNP TSC0054590
tttaatttaaaat

SEQ ID NO: 224061 - DNA, 13 bp, Artificial Sequence
  Oligonucleotide for detection of SNP TSC0054591
atatgaattggtg

SEQ ID NO: 224062 - DNA, 13 bp, Artificial Sequence
  Oligonucleotide for detection of SNP TSC0054591
caccaattcatat

SEQ ID NO: 224063 - DNA, 13 bp, Artificial Sequence
  Oligonucleotide for detection of SNP TSC0054591
atatgagttggtg

SEQ ID NO: 224064 - DNA, 13 bp, Artificial Sequence
  Oligonucleotide for detection of SNP TSC0054591
caccaactcatat

SEQ ID NO: 224065 - DNA, 13 bp, Artificial Sequence
  Oligonucleotide for detection of SNP TSC0054592
gttgagaggtaay

SEQ ID NO: 224066 - DNA, 13 bp, Artificial Sequence
  Oligonucleotide for detection of SNP TSC0054592
rttacctctcaac

SEQ ID NO: 224067 - DNA, 13 bp, Artificial Sequence
  Oligonucleotide for detection of SNP TSC0054592
gttgaggggtaay

SEQ ID NO: 224068 - DNA, 13 bp, Artificial Sequence
  Oligonucleotide for detection of SNP TSC0054592
rttacccctcaac

SEQ ID NO: 224069 - DNA, 13 bp, Artificial Sequence
  Oligonucleotide for detection of SNP TSC0054595
ttttgggttgtty

SEQ ID NO: 224070 - DNA, 13 bp, Artificial Sequence
  Oligonucleotide for detection of SNP TSC0054595
raacaacccaaaa

SEQ ID NO: 224071 - DNA, 13 bp, Artificial Sequence
  Oligonucleotide for detection of SNP TSC0054595
ttttggattgtty

SEQ ID NO: 224072 - DNA, 13 bp, Artificial Sequence
  Oligonucleotide for detection of SNP TSC0054595
raacaatccaaaa

SEQ ID NO: 224073 - DNA, 13 bp, Artificial Sequence
  Oligonucleotide for detection of SNP TSC0054596
tgggagtgtttga

SEQ ID NO: 224074 - DNA, 13 bp, Artificial Sequence
  Oligonucleotide for detection of SNP TSC0054596
tcaaacactccca

SEQ ID NO: 224075 - DNA, 13 bp, Artificial Sequence
  Oligonucleotide for detection of SNP TSC0054596
tgggagggtttga

SEQ ID NO: 224076 - DNA, 13 bp, Artificial Sequence
  Oligonucleotide for detection of SNP TSC0054596
tcaaaccctccca

SEQ ID NO: 224077 - DNA, 13 bp, Artificial Sequence
  Oligonucleotide for detection of SNP TSC0054600
tttagaattttgg

SEQ ID NO: 224078 - DNA, 13 bp, Artificial Sequence
  Oligonucleotide for detection of SNP TSC0054600
ccaaaattctaaa

SEQ ID NO: 224079 - DNA, 13 bp, Artificial Sequence
  Oligonucleotide for detection of SNP TSC0054600
tttagatttttgg

SEQ ID NO: 224080 - DNA, 13 bp, Artificial Sequence
  Oligonucleotide for detection of SNP TSC0054600
ccaaaaatctaaa

SEQ ID NO: 224081 - DNA, 13 bp, Artificial Sequence
  Oligonucleotide for detection of SNP TSC0054600
ttaagagtttggg

SEQ ID NO: 224082 - DNA, 13 bp, Artificial Sequence
  Oligonucleotide for detection of SNP TSC0054600
cccaaactcttaa

SEQ ID NO: 224083 - DNA, 13 bp, Artificial Sequence
  Oligonucleotide for detection of SNP TSC0054601
tttgtttggtata

SEQ ID NO: 224084 - DNA, 13 bp, Artificial Sequence
  Oligonucleotide for detection of SNP TSC0054601
tataccaaacaaa

SEQ ID NO: 224085 - DNA, 13 bp, Artificial Sequence
  Oligonucleotide for detection of SNP TSC0054601
tttgttcggtata

SEQ ID NO: 224086 - DNA, 13 bp, Artificial Sequence
  Oligonucleotide for detection of SNP TSC0054601
tataccgaacaaa

SEQ ID NO: 224087 - DNA, 13 bp, Artificial Sequence
  Oligonucleotide for detection of SNP TSC0054601
tatattgaataaa

SEQ ID NO: 224088 - DNA, 13 bp, Artificial Sequence
  Oligonucleotide for detection of SNP TSC0054601
tttattcaatata

SEQ ID NO: 224089 - DNA, 13 bp, Artificial Sequence
  Oligonucleotide for detection of SNP TSC0054601
tatattaaataaa

SEQ ID NO: 224090 - DNA, 13 bp, Artificial Sequence
  Oligonucleotide for detection of SNP TSC0054601
tttatttaatata

SEQ ID NO: 224091 - DNA, 13 bp, Artificial Sequence
  Oligonucleotide for detection of SNP TSC0054601
tatatcgaataaa

SEQ ID NO: 224092 - DNA, 13 bp, Artificial Sequence
  Oligonucleotide for detection of SNP TSC0054601
tttattcgatata

SEQ ID NO: 224093 - DNA, 13 bp, Artificial Sequence
  Oligonucleotide for detection of SNP TSC0054602
ttatagtagaaaa

SEQ ID NO: 224094 - DNA, 13 bp, Artificial Sequence
  Oligonucleotide for detection of SNP TSC0054602
ttttctactataa

SEQ ID NO: 224095 - DNA, 13 bp, Artificial Sequence
  Oligonucleotide for detection of SNP TSC0054602
ttataggagaaaa

SEQ ID NO: 224096 - DNA, 13 bp, Artificial Sequence
  Oligonucleotide for detection of SNP TSC0054602
ttttctcctataa

SEQ ID NO: 224097 - DNA, 13 bp, Artificial Sequence
  Oligonucleotide for detection of SNP TSC0054603
aaagtttagatga

SEQ ID NO: 224098 - DNA, 13 bp, Artificial Sequence
  Oligonucleotide for detection of SNP TSC0054603
tcatctaaacttt

SEQ ID NO: 224099 - DNA, 13 bp, Artificial Sequence
  Oligonucleotide for detection of SNP TSC0054603
aaagttgagatga

SEQ ID NO: 224100 - DNA, 13 bp, Artificial Sequence
  Oligonucleotide for detection of SNP TSC0054603
tcatctcaacttt

SEQ ID NO: 224101 - DNA, 13 bp, Artificial Sequence
  Oligonucleotide for detection of SNP TSC0054603
aaagtttagacga

SEQ ID NO: 224102 - DNA, 13 bp, Artificial Sequence
  Oligonucleotide for detection of SNP TSC0054603
tcgtctaaacttt

SEQ ID NO: 224103 - DNA, 13 bp, Artificial Sequence
  Oligonucleotide for detection of SNP TSC0054603
aaagtcgagatga

SEQ ID NO: 224104 - DNA, 13 bp, Artificial Sequence
  Oligonucleotide for detection of SNP TSC0054603
tcatctcgacttt

SEQ ID NO: 224105 - DNA, 13 bp, Artificial Sequence
  Oligonucleotide for detection of SNP TSC0054603
aaagttgagacga

SEQ ID NO: 224106 - DNA, 13 bp, Artificial Sequence
  Oligonucleotide for detection of SNP TSC0054603
tcgtctcaacttt

SEQ ID NO: 224107 - DNA, 13 bp, Artificial Sequence
  Oligonucleotide for detection of SNP TSC0054603
aaagtcgagacga

SEQ ID NO: 224108 - DNA, 13 bp, Artificial Sequence
  Oligonucleotide for detection of SNP TSC0054603
tcgtctcgacttt

SEQ ID NO: 224109 - DNA, 13 bp, Artificial Sequence
  Oligonucleotide for detection of SNP TSC0054603
tcgtttaggtttt

SEQ ID NO: 224110 - DNA, 13 bp, Artificial Sequence
  Oligonucleotide for detection of SNP TSC0054603
aaaacctaaacga

SEQ ID NO: 224111 - DNA, 13 bp, Artificial Sequence
  Oligonucleotide for detection of SNP TSC0054603
tcgttttggtttt

SEQ ID NO: 224112 - DNA, 13 bp, Artificial Sequence
  Oligonucleotide for detection of SNP TSC0054603
aaaaccaaaacga

SEQ ID NO: 224113 - DNA, 13 bp, Artificial Sequence
  Oligonucleotide for detection of SNP TSC0054603
tcgtttcggtttt

SEQ ID NO: 224114 - DNA, 13 bp, Artificial Sequence
  Oligonucleotide for detection of SNP TSC0054603
aaaaccgaaacga

SEQ ID NO: 224115 - DNA, 13 bp, Artificial Sequence
  Oligonucleotide for detection of SNP TSC0007151
tatattatagtta

SEQ ID NO: 224116 - DNA, 13 bp, Artificial Sequence
  Oligonucleotide for detection of SNP TSC0007151
taactataatata

SEQ ID NO: 224117 - DNA, 13 bp, Artificial Sequence
  Oligonucleotide for detection of SNP TSC0007151
taattgtggtgta

SEQ ID NO: 224118 - DNA, 13 bp, Artificial Sequence
  Oligonucleotide for detection of SNP TSC0007151
tacaccacaatta

SEQ ID NO: 224119 - DNA, 13 bp, Artificial Sequence
  Oligonucleotide for detection of SNP TSC0007151
taattggggtgta

SEQ ID NO: 224120 - DNA, 13 bp, Artificial Sequence
  Oligonucleotide for detection of SNP TSC0007151
tacaccccaatta

SEQ ID NO: 224121 - DNA, 13 bp, Artificial Sequence
  Oligonucleotide for detection of SNP TSC0007154
ttgagtgttagta

SEQ ID NO: 224122 - DNA, 13 bp, Artificial Sequence
  Oligonucleotide for detection of SNP TSC0007154
tactaacactcaa

SEQ ID NO: 224123 - DNA, 13 bp, Artificial Sequence
  Oligonucleotide for detection of SNP TSC0007154
ttgagtattagta

SEQ ID NO: 224124 - DNA, 13 bp, Artificial Sequence
  Oligonucleotide for detection of SNP TSC0007154
tactaatactcaa

SEQ ID NO: 224125 - DNA, 13 bp, Artificial Sequence
  Oligonucleotide for detection of SNP TSC0054606
atatgtagtaagt

SEQ ID NO: 224126 - DNA, 13 bp, Artificial Sequence
  Oligonucleotide for detection of SNP TSC0054606
acttactacatat

SEQ ID NO: 224127 - DNA, 13 bp, Artificial Sequence
  Oligonucleotide for detection of SNP TSC0054606
atatgtggtaagt

SEQ ID NO: 224128 - DNA, 13 bp, Artificial Sequence
  Oligonucleotide for detection of SNP TSC0054606
acttaccacatat

SEQ ID NO: 224129 - DNA, 13 bp, Artificial Sequence
  Oligonucleotide for detection of SNP TSC0054610
aagaagataaagy

SEQ ID NO: 224130 - DNA, 13 bp, Artificial Sequence
  Oligonucleotide for detection of SNP TSC0054610
rctttatcttctt

SEQ ID NO: 224131 - DNA, 13 bp, Artificial Sequence
  Oligonucleotide for detection of SNP TSC0054610
aagaagttaaagy

SEQ ID NO: 224132 - DNA, 13 bp, Artificial Sequence
  Oligonucleotide for detection of SNP TSC0054610
rctttaacttctt

SEQ ID NO: 224133 - DNA, 13 bp, Artificial Sequence
  Oligonucleotide for detection of SNP TSC0054612
tttttaatgatag

SEQ ID NO: 224134 - DNA, 13 bp, Artificial Sequence
  Oligonucleotide for detection of SNP TSC0054612
ctatcattaaaaa

SEQ ID NO: 224135 - DNA, 13 bp, Artificial Sequence
  Oligonucleotide for detection of SNP TSC0054612
tttttagtgatag

SEQ ID NO: 224136 - DNA, 13 bp, Artificial Sequence
  Oligonucleotide for detection of SNP TSC0054612
ctatcactaaaaa

SEQ ID NO: 224137 - DNA, 13 bp, Artificial Sequence
  Oligonucleotide for detection of SNP TSC0054613
tatttataaagay

SEQ ID NO: 224138 - DNA, 13 bp, Artificial Sequence
  Oligonucleotide for detection of SNP TSC0054613
rtctttataaata

SEQ ID NO: 224139 - DNA, 13 bp, Artificial Sequence
  Oligonucleotide for detection of SNP TSC0054613
tatttagaaagay

SEQ ID NO: 224140 - DNA, 13 bp, Artificial Sequence
  Oligonucleotide for detection of SNP TSC0054613
rtctttctaaata

SEQ ID NO: 224141 - DNA, 13 bp, Artificial Sequence
  Oligonucleotide for detection of SNP TSC0054614
ttaaaaaagagay

SEQ ID NO: 224142 - DNA, 13 bp, Artificial Sequence
  Oligonucleotide for detection of SNP TSC0054614
rtctcttttttaa

SEQ ID NO: 224143 - DNA, 13 bp, Artificial Sequence
  Oligonucleotide for detection of SNP TSC0054614
ttaaaatagagay

SEQ ID NO: 224144 - DNA, 13 bp, Artificial Sequence
  Oligonucleotide for detection of SNP TSC0054614
rtctctattttaa

SEQ ID NO: 224145 - DNA, 13 bp, Artificial Sequence
  Oligonucleotide for detection of SNP TSC0004811
tgttagtaggagt

SEQ ID NO: 224146 - DNA, 13 bp, Artificial Sequence
  Oligonucleotide for detection of SNP TSC0004811
actcctactaaca

SEQ ID NO: 224147 - DNA, 13 bp, Artificial Sequence
  Oligonucleotide for detection of SNP TSC0004811
tgttaggaggagt

SEQ ID NO: 224148 - DNA, 13 bp, Artificial Sequence
  Oligonucleotide for detection of SNP TSC0004811
actcctcctaaca

SEQ ID NO: 224149 - DNA, 13 bp, Artificial Sequence
  Oligonucleotide for detection of SNP TSC0006470
tggaaaattggta

SEQ ID NO: 224150 - DNA, 13 bp, Artificial Sequence
  Oligonucleotide for detection of SNP TSC0006470
taccaattttcca

SEQ ID NO: 224151 - DNA, 13 bp, Artificial Sequence
  Oligonucleotide for detection of SNP TSC0006470
tggaaagttggta

SEQ ID NO: 224152 - DNA, 13 bp, Artificial Sequence
  Oligonucleotide for detection of SNP TSC0006470
taccaactttcca

SEQ ID NO: 224153 - DNA, 13 bp, Artificial Sequence
  Oligonucleotide for detection of SNP TSC0054616
tagtgatggtttt

SEQ ID NO: 224154 - DNA, 13 bp, Artificial Sequence
  Oligonucleotide for detection of SNP TSC0054616
aaaaccatcacta

SEQ ID NO: 224155 - DNA, 13 bp, Artificial Sequence
  Oligonucleotide for detection of SNP TSC0054616
tagtgacggtttt

SEQ ID NO: 224156 - DNA, 13 bp, Artificial Sequence
  Oligonucleotide for detection of SNP TSC0054616
aaaaccgtcacta

SEQ ID NO: 224157 - DNA, 13 bp, Artificial Sequence
  Oligonucleotide for detection of SNP TSC0054616
agaattgttatta

SEQ ID NO: 224158 - DNA, 13 bp, Artificial Sequence
  Oligonucleotide for detection of SNP TSC0054616
taataacaattct

SEQ ID NO: 224159 - DNA, 13 bp, Artificial Sequence
  Oligonucleotide for detection of SNP TSC0054616
agaattattatta

SEQ ID NO: 224160 - DNA, 13 bp, Artificial Sequence
  Oligonucleotide for detection of SNP TSC0054616
taataataattct

SEQ ID NO: 224161 - DNA, 13 bp, Artificial Sequence
  Oligonucleotide for detection of SNP TSC0054616
agaatcgttatta

SEQ ID NO: 224162 - DNA, 13 bp, Artificial Sequence
  Oligonucleotide for detection of SNP TSC0054616
taataacgattct

SEQ ID NO: 224163 - DNA, 13 bp, Artificial Sequence
  Oligonucleotide for detection of SNP TSC0054619
tttgtgaagttty

SEQ ID NO: 224164 - DNA, 13 bp, Artificial Sequence
  Oligonucleotide for detection of SNP TSC0054619
raaacttcacaaa

SEQ ID NO: 224165 - DNA, 13 bp, Artificial Sequence
  Oligonucleotide for detection of SNP TSC0054619
tttgtgtagttty

SEQ ID NO: 224166 - DNA, 13 bp, Artificial Sequence
  Oligonucleotide for detection of SNP TSC0054619
raaactacacaaa

SEQ ID NO: 224167 - DNA, 13 bp, Artificial Sequence
  Oligonucleotide for detection of SNP TSC0054619
gaggttttataga

SEQ ID NO: 224168 - DNA, 13 bp, Artificial Sequence
  Oligonucleotide for detection of SNP TSC0054619
tctataaaacctc

SEQ ID NO: 224169 - DNA, 13 bp, Artificial Sequence
  Oligonucleotide for detection of SNP TSC0054621
atttagattgagg

SEQ ID NO: 224170 - DNA, 13 bp, Artificial Sequence
  Oligonucleotide for detection of SNP TSC0054621
cctcaatctaaat

SEQ ID NO: 224171 - DNA, 13 bp, Artificial Sequence
  Oligonucleotide for detection of SNP TSC0054621
atttaggttgagg

SEQ ID NO: 224172 - DNA, 13 bp, Artificial Sequence
  Oligonucleotide for detection of SNP TSC0054621
cctcaacctaaat

SEQ ID NO: 224173 - DNA, 13 bp, Artificial Sequence
  Oligonucleotide for detection of SNP TSC0054623
atagaagtattty

SEQ ID NO: 224174 - DNA, 13 bp, Artificial Sequence
  Oligonucleotide for detection of SNP TSC0054623
raaatacttctat

SEQ ID NO: 224175 - DNA, 13 bp, Artificial Sequence
  Oligonucleotide for detection of SNP TSC0054623
atagaaatattty

SEQ ID NO: 224176 - DNA, 13 bp, Artificial Sequence
  Oligonucleotide for detection of SNP TSC0054623
raaatatttctat

SEQ ID NO: 224177 - DNA, 13 bp, Artificial Sequence
  Oligonucleotide for detection of SNP TSC0054624
tatagggaaaata

SEQ ID NO: 224178 - DNA, 13 bp, Artificial Sequence
  Oligonucleotide for detection of SNP TSC0054624
tattttccctata

SEQ ID NO: 224179 - DNA, 13 bp, Artificial Sequence
  Oligonucleotide for detection of SNP TSC0054624
tataggaaaaata

SEQ ID NO: 224180 - DNA, 13 bp, Artificial Sequence
  Oligonucleotide for detection of SNP TSC0054624
tatttttcctata

SEQ ID NO: 224181 - DNA, 13 bp, Artificial Sequence
  Oligonucleotide for detection of SNP TSC0005622
atgaatgtaagtg

SEQ ID NO: 224182 - DNA, 13 bp, Artificial Sequence
  Oligonucleotide for detection of SNP TSC0005622
cacttacattcat

SEQ ID NO: 224183 - DNA, 13 bp, Artificial Sequence
  Oligonucleotide for detection of SNP TSC0005622
atgaatataagtg

SEQ ID NO: 224184 - DNA, 13 bp, Artificial Sequence
  Oligonucleotide for detection of SNP TSC0005622
cacttatattcat

SEQ ID NO: 224185 - DNA, 13 bp, Artificial Sequence
  Oligonucleotide for detection of SNP TSC0007775
taggggagtagta

SEQ ID NO: 224186 - DNA, 13 bp, Artificial Sequence
  Oligonucleotide for detection of SNP TSC0007775
tactactccccta

SEQ ID NO: 224187 - DNA, 13 bp, Artificial Sequence
  Oligonucleotide for detection of SNP TSC0007775
taggggggtagta

SEQ ID NO: 224188 - DNA, 13 bp, Artificial Sequence
  Oligonucleotide for detection of SNP TSC0007775
tactaccccccta

SEQ ID NO: 224189 - DNA, 13 bp, Artificial Sequence
  Oligonucleotide for detection of SNP TSC0054628
tttttatgaagga

SEQ ID NO: 224190 - DNA, 13 bp, Artificial Sequence
  Oligonucleotide for detection of SNP TSC0054628
tccttcataaaaa

SEQ ID NO: 224191 - DNA, 13 bp, Artificial Sequence
  Oligonucleotide for detection of SNP TSC0054628
tttttacgaagga

SEQ ID NO: 224192 - DNA, 13 bp, Artificial Sequence
  Oligonucleotide for detection of SNP TSC0054628
tccttcgtaaaaa

SEQ ID NO: 224193 - DNA, 13 bp, Artificial Sequence
  Oligonucleotide for detection of SNP TSC0054628
ttttttgtaaaag

SEQ ID NO: 224194 - DNA, 13 bp, Artificial Sequence
  Oligonucleotide for detection of SNP TSC0054628
cttttacaaaaaa

SEQ ID NO: 224195 - DNA, 13 bp, Artificial Sequence
  Oligonucleotide for detection of SNP TSC0054628
ttttttataaaag

SEQ ID NO: 224196 - DNA, 13 bp, Artificial Sequence
  Oligonucleotide for detection of SNP TSC0054628
cttttataaaaaa

SEQ ID NO: 224197 - DNA, 13 bp, Artificial Sequence
  Oligonucleotide for detection of SNP TSC0054628
tttttcgtaaaag

SEQ ID NO: 224198 - DNA, 13 bp, Artificial Sequence
  Oligonucleotide for detection of SNP TSC0054628
cttttacgaaaaa

SEQ ID NO: 224199 - DNA, 13 bp, Artificial Sequence
  Oligonucleotide for detection of SNP TSC0054629
agttgtatttttt

SEQ ID NO: 224200 - DNA, 13 bp, Artificial Sequence
  Oligonucleotide for detection of SNP TSC0054629
aaaaaatacaact

SEQ ID NO: 224201 - DNA, 13 bp, Artificial Sequence
  Oligonucleotide for detection of SNP TSC0054632
tttgggtgataag

SEQ ID NO: 224202 - DNA, 13 bp, Artificial Sequence
  Oligonucleotide for detection of SNP TSC0054632
cttatcacccaaa

SEQ ID NO: 224203 - DNA, 13 bp, Artificial Sequence
  Oligonucleotide for detection of SNP TSC0054632
tttgggcgataag

SEQ ID NO: 224204 - DNA, 13 bp, Artificial Sequence
  Oligonucleotide for detection of SNP TSC0054632
cttatcgcccaaa

SEQ ID NO: 224205 - DNA, 13 bp, Artificial Sequence
  Oligonucleotide for detection of SNP TSC0054633
ttagtggttttga

SEQ ID NO: 224206 - DNA, 13 bp, Artificial Sequence
  Oligonucleotide for detection of SNP TSC0054633
tcaaaaccactaa

SEQ ID NO: 224207 - DNA, 13 bp, Artificial Sequence
  Oligonucleotide for detection of SNP TSC0054633
ttagtgattttga

SEQ ID NO: 224208 - DNA, 13 bp, Artificial Sequence
  Oligonucleotide for detection of SNP TSC0054633
tcaaaatcactaa

SEQ ID NO: 224209 - DNA, 13 bp, Artificial Sequence
  Oligonucleotide for detection of SNP TSC0054633
ttagtggtttcga

SEQ ID NO: 224210 - DNA, 13 bp, Artificial Sequence
  Oligonucleotide for detection of SNP TSC0054633
tcgaaaccactaa

SEQ ID NO: 224211 - DNA, 13 bp, Artificial Sequence
  Oligonucleotide for detection of SNP TSC0054633
ttagtgatttcga

SEQ ID NO: 224212 - DNA, 13 bp, Artificial Sequence
  Oligonucleotide for detection of SNP TSC0054633
tcgaaatcactaa

SEQ ID NO: 224213 - DNA, 13 bp, Artificial Sequence
  Oligonucleotide for detection of SNP TSC0010325
ttaaagggttgag

SEQ ID NO: 224214 - DNA, 13 bp, Artificial Sequence
  Oligonucleotide for detection of SNP TSC0010325
ctcaaccctttaa

SEQ ID NO: 224215 - DNA, 13 bp, Artificial Sequence
  Oligonucleotide for detection of SNP TSC0010325
ttaaagagttgag

SEQ ID NO: 224216 - DNA, 13 bp, Artificial Sequence
  Oligonucleotide for detection of SNP TSC0010325
ctcaactctttaa

SEQ ID NO: 224217 - DNA, 13 bp, Artificial Sequence
  Oligonucleotide for detection of SNP TSC0054635
ttttttataatgy

SEQ ID NO: 224218 - DNA, 13 bp, Artificial Sequence
  Oligonucleotide for detection of SNP TSC0054635
rcattataaaaaa

SEQ ID NO: 224219 - DNA, 13 bp, Artificial Sequence
  Oligonucleotide for detection of SNP TSC0054635
ttttttgtaatgy

SEQ ID NO: 224220 - DNA, 13 bp, Artificial Sequence
  Oligonucleotide for detection of SNP TSC0054635
rcattacaaaaaa

SEQ ID NO: 224221 - DNA, 13 bp, Artificial Sequence
  Oligonucleotide for detection of SNP TSC0054636
aatgtatgtattt

SEQ ID NO: 224222 - DNA, 13 bp, Artificial Sequence
  Oligonucleotide for detection of SNP TSC0054636
aaatacatacatt

SEQ ID NO: 224223 - DNA, 13 bp, Artificial Sequence
  Oligonucleotide for detection of SNP TSC0054636
aatgtacgtattt

SEQ ID NO: 224224 - DNA, 13 bp, Artificial Sequence
  Oligonucleotide for detection of SNP TSC0054636
aaatacgtacatt

SEQ ID NO: 224225 - DNA, 13 bp, Artificial Sequence
  Oligonucleotide for detection of SNP TSC0054637
aaatggaatttaa

SEQ ID NO: 224226 - DNA, 13 bp, Artificial Sequence
  Oligonucleotide for detection of SNP TSC0054637
ttaaattccattt

SEQ ID NO: 224227 - DNA, 13 bp, Artificial Sequence
  Oligonucleotide for detection of SNP TSC0054637
aaatggtatttaa

SEQ ID NO: 224228 - DNA, 13 bp, Artificial Sequence
  Oligonucleotide for detection of SNP TSC0054637
ttaaataccattt

SEQ ID NO: 224229 - DNA, 13 bp, Artificial Sequence
  Oligonucleotide for detection of SNP TSC0054637
ttgagttttattt

SEQ ID NO: 224230 - DNA, 13 bp, Artificial Sequence
  Oligonucleotide for detection of SNP TSC0054637
aaataaaactcaa

SEQ ID NO: 224231 - DNA, 13 bp, Artificial Sequence
  Oligonucleotide for detection of SNP TSC0054640
gttttcgttggta

SEQ ID NO: 224232 - DNA, 13 bp, Artificial Sequence
  Oligonucleotide for detection of SNP TSC0054640
taccaacgaaaac

SEQ ID NO: 224233 - DNA, 13 bp, Artificial Sequence
  Oligonucleotide for detection of SNP TSC0054640
tgttagtgaaaay

SEQ ID NO: 224234 - DNA, 13 bp, Artificial Sequence
  Oligonucleotide for detection of SNP TSC0054640
rttttcactaaca

SEQ ID NO: 224235 - DNA, 13 bp, Artificial Sequence
  Oligonucleotide for detection of SNP TSC0054640
tgttagcgaaaay

SEQ ID NO: 224236 - DNA, 13 bp, Artificial Sequence
  Oligonucleotide for detection of SNP TSC0054640
rttttcgctaaca

SEQ ID NO: 224237 - DNA, 13 bp, Artificial Sequence
  Oligonucleotide for detection of SNP TSC0054641
gataatattgtgy

SEQ ID NO: 224238 - DNA, 13 bp, Artificial Sequence
  Oligonucleotide for detection of SNP TSC0054641
rcacaatattatc

SEQ ID NO: 224239 - DNA, 13 bp, Artificial Sequence
  Oligonucleotide for detection of SNP TSC0054641
gataatgttgtgy

SEQ ID NO: 224240 - DNA, 13 bp, Artificial Sequence
  Oligonucleotide for detection of SNP TSC0054641
rcacaacattatc

SEQ ID NO: 224241 - DNA, 13 bp, Artificial Sequence
  Oligonucleotide for detection of SNP TSC0054641
gataacgttgtgy

SEQ ID NO: 224242 - DNA, 13 bp, Artificial Sequence
  Oligonucleotide for detection of SNP TSC0054641
rcacaacgttatc

SEQ ID NO: 224243 - DNA, 13 bp, Artificial Sequence
  Oligonucleotide for detection of SNP TSC0054641
gtatagtgttaty

SEQ ID NO: 224244 - DNA, 13 bp, Artificial Sequence
  Oligonucleotide for detection of SNP TSC0054641
rataacactatac

SEQ ID NO: 224245 - DNA, 13 bp, Artificial Sequence
  Oligonucleotide for detection of SNP TSC0054641
gtatagcgttaty

SEQ ID NO: 224246 - DNA, 13 bp, Artificial Sequence
  Oligonucleotide for detection of SNP TSC0054641
rataacgctatac

SEQ ID NO: 224247 - DNA, 13 bp, Artificial Sequence
  Oligonucleotide for detection of SNP TSC0054642
gggagtgtgtaaa

SEQ ID NO: 224248 - DNA, 13 bp, Artificial Sequence
  Oligonucleotide for detection of SNP TSC0054642
tttacacactccc

SEQ ID NO: 224249 - DNA, 13 bp, Artificial Sequence
  Oligonucleotide for detection of SNP TSC0054642
gggagtatgtaaa

SEQ ID NO: 224250 - DNA, 13 bp, Artificial Sequence
  Oligonucleotide for detection of SNP TSC0054642
tttacatactccc

SEQ ID NO: 224251 - DNA, 13 bp, Artificial Sequence
  Oligonucleotide for detection of SNP TSC0054642
gggagcgtgtaaa

SEQ ID NO: 224252 - DNA, 13 bp, Artificial Sequence
  Oligonucleotide for detection of SNP TSC0054642
tttacacgctccc

SEQ ID NO: 224253 - DNA, 13 bp, Artificial Sequence
  Oligonucleotide for detection of SNP TSC0054643
tggtttataagta

SEQ ID NO: 224254 - DNA, 13 bp, Artificial Sequence
  Oligonucleotide for detection of SNP TSC0054643
tacttataaacca

SEQ ID NO: 224255 - DNA, 13 bp, Artificial Sequence
  Oligonucleotide for detection of SNP TSC0054643
tggtttgtaagta

SEQ ID NO: 224256 - DNA, 13 bp, Artificial Sequence
  Oligonucleotide for detection of SNP TSC0054643
tacttacaaacca

SEQ ID NO: 224257 - DNA, 13 bp, Artificial Sequence
  Oligonucleotide for detection of SNP TSC0054643
tggttcgtaagta

SEQ ID NO: 224258 - DNA, 13 bp, Artificial Sequence
  Oligonucleotide for detection of SNP TSC0054643
tacttacgaacca

SEQ ID NO: 224259 - DNA, 13 bp, Artificial Sequence
  Oligonucleotide for detection of SNP TSC0054643
tgtttatgagtta

SEQ ID NO: 224260 - DNA, 13 bp, Artificial Sequence
  Oligonucleotide for detection of SNP TSC0054643
taactcataaaca

SEQ ID NO: 224261 - DNA, 13 bp, Artificial Sequence
  Oligonucleotide for detection of SNP TSC0054643
tgtttacgagtta

SEQ ID NO: 224262 - DNA, 13 bp, Artificial Sequence
  Oligonucleotide for detection of SNP TSC0054643
taactcgtaaaca

SEQ ID NO: 224263 - DNA, 13 bp, Artificial Sequence
  Oligonucleotide for detection of SNP TSC0054645
ttttgtaaagggy

SEQ ID NO: 224264 - DNA, 13 bp, Artificial Sequence
  Oligonucleotide for detection of SNP TSC0054645
rccctttacaaaa

SEQ ID NO: 224265 - DNA, 13 bp, Artificial Sequence
  Oligonucleotide for detection of SNP TSC0054645
ttttgtgaagggy

SEQ ID NO: 224266 - DNA, 13 bp, Artificial Sequence
  Oligonucleotide for detection of SNP TSC0054645
rcccttcacaaaa

SEQ ID NO: 224267 - DNA, 13 bp, Artificial Sequence
  Oligonucleotide for detection of SNP TSC0054646
atggttgtgttaa

SEQ ID NO: 224268 - DNA, 13 bp, Artificial Sequence
  Oligonucleotide for detection of SNP TSC0054646
ttaacacaaccat

SEQ ID NO: 224269 - DNA, 13 bp, Artificial Sequence
  Oligonucleotide for detection of SNP TSC0054646
atggttatgttaa

SEQ ID NO: 224270 - DNA, 13 bp, Artificial Sequence
  Oligonucleotide for detection of SNP TSC0054646
ttaacataaccat

SEQ ID NO: 224271 - DNA, 13 bp, Artificial Sequence
  Oligonucleotide for detection of SNP TSC0054646
atggttgcgttaa

SEQ ID NO: 224272 - DNA, 13 bp, Artificial Sequence
  Oligonucleotide for detection of SNP TSC0054646
ttaacgcaaccat

SEQ ID NO: 224273 - DNA, 13 bp, Artificial Sequence
  Oligonucleotide for detection of SNP TSC0054646
atggttacgttaa

SEQ ID NO: 224274 - DNA, 13 bp, Artificial Sequence
  Oligonucleotide for detection of SNP TSC0054646
ttaacgtaaccat

SEQ ID NO: 224275 - DNA, 13 bp, Artificial Sequence
  Oligonucleotide for detection of SNP TSC0054647
aatattaaaggag

SEQ ID NO: 224276 - DNA, 13 bp, Artificial Sequence
  Oligonucleotide for detection of SNP TSC0054647
ctcctttaatatt

SEQ ID NO: 224277 - DNA, 13 bp, Artificial Sequence
  Oligonucleotide for detection of SNP TSC0054647
aatattgaaggag

SEQ ID NO: 224278 - DNA, 13 bp, Artificial Sequence
  Oligonucleotide for detection of SNP TSC0054647
ctccttcaatatt

SEQ ID NO: 224279 - DNA, 13 bp, Artificial Sequence
  Oligonucleotide for detection of SNP TSC0054648
ggtagtattgtgt

SEQ ID NO: 224280 - DNA, 13 bp, Artificial Sequence
  Oligonucleotide for detection of SNP TSC0054648
acacaatactacc

SEQ ID NO: 224281 - DNA, 13 bp, Artificial Sequence
  Oligonucleotide for detection of SNP TSC0054648
ggtagttttgtgt

SEQ ID NO: 224282 - DNA, 13 bp, Artificial Sequence
  Oligonucleotide for detection of SNP TSC0054648
acacaaaactacc

SEQ ID NO: 224283 - DNA, 13 bp, Artificial Sequence
  Oligonucleotide for detection of SNP TSC0054648
atataatgttaty

SEQ ID NO: 224284 - DNA, 13 bp, Artificial Sequence
  Oligonucleotide for detection of SNP TSC0054648
rataacattatat

SEQ ID NO: 224285 - DNA, 13 bp, Artificial Sequence
  Oligonucleotide for detection of SNP TSC0054648
atataaggttaty

SEQ ID NO: 224286 - DNA, 13 bp, Artificial Sequence
  Oligonucleotide for detection of SNP TSC0054648
rataaccttatat

SEQ ID NO: 224287 - DNA, 13 bp, Artificial Sequence
  Oligonucleotide for detection of SNP TSC0054649
gtattaatttatt

SEQ ID NO: 224288 - DNA, 13 bp, Artificial Sequence
  Oligonucleotide for detection of SNP TSC0054649
aataaattaatac

SEQ ID NO: 224289 - DNA, 13 bp, Artificial Sequence
  Oligonucleotide for detection of SNP TSC0054650
agatttagtattt

SEQ ID NO: 224290 - DNA, 13 bp, Artificial Sequence
  Oligonucleotide for detection of SNP TSC0054650
aaatactaaatct

SEQ ID NO: 224291 - DNA, 13 bp, Artificial Sequence
  Oligonucleotide for detection of SNP TSC0054650
agatttggtattt

SEQ ID NO: 224292 - DNA, 13 bp, Artificial Sequence
  Oligonucleotide for detection of SNP TSC0054650
aaataccaaatct

SEQ ID NO: 224293 - DNA, 13 bp, Artificial Sequence
  Oligonucleotide for detection of SNP TSC0054650
agattcggtattt

SEQ ID NO: 224294 - DNA, 13 bp, Artificial Sequence
  Oligonucleotide for detection of SNP TSC0054650
aaataccgaatct

SEQ ID NO: 224295 - DNA, 13 bp, Artificial Sequence
  Oligonucleotide for detection of SNP TSC0054650
aggtgttgggttt

SEQ ID NO: 224296 - DNA, 13 bp, Artificial Sequence
  Oligonucleotide for detection of SNP TSC0054650
aaacccaacacct

SEQ ID NO: 224297 - DNA, 13 bp, Artificial Sequence
  Oligonucleotide for detection of SNP TSC0054650
aggtgtcgggttt

SEQ ID NO: 224298 - DNA, 13 bp, Artificial Sequence
  Oligonucleotide for detection of SNP TSC0054650
aaacccgacacct

SEQ ID NO: 224299 - DNA, 13 bp, Artificial Sequence
  Oligonucleotide for detection of SNP TSC0054651
agaatataataat

SEQ ID NO: 224300 - DNA, 13 bp, Artificial Sequence
  Oligonucleotide for detection of SNP TSC0054651
attattatattct

SEQ ID NO: 224301 - DNA, 13 bp, Artificial Sequence
  Oligonucleotide for detection of SNP TSC0054651
agaatagaataat

SEQ ID NO: 224302 - DNA, 13 bp, Artificial Sequence
  Oligonucleotide for detection of SNP TSC0054651
attattctattct

SEQ ID NO: 224303 - DNA, 13 bp, Artificial Sequence
  Oligonucleotide for detection of SNP TSC0054651
attattgtatttt

SEQ ID NO: 224304 - DNA, 13 bp, Artificial Sequence
  Oligonucleotide for detection of SNP TSC0054651
aaaatacaataat

SEQ ID NO: 224305 - DNA, 13 bp, Artificial Sequence
  Oligonucleotide for detection of SNP TSC0054651
attattttatttt

SEQ ID NO: 224306 - DNA, 13 bp, Artificial Sequence
  Oligonucleotide for detection of SNP TSC0054651
aaaataaaataat

SEQ ID NO: 224307 - DNA, 13 bp, Artificial Sequence
  Oligonucleotide for detection of SNP TSC0054652
gaagagggaattt

SEQ ID NO: 224308 - DNA, 13 bp, Artificial Sequence
  Oligonucleotide for detection of SNP TSC0054652
aaattccctcttc

SEQ ID NO: 224309 - DNA, 13 bp, Artificial Sequence
  Oligonucleotide for detection of SNP TSC0054652
gaagagagaattt

SEQ ID NO: 224310 - DNA, 13 bp, Artificial Sequence
  Oligonucleotide for detection of SNP TSC0054652
aaattctctcttc

SEQ ID NO: 224311 - DNA, 13 bp, Artificial Sequence
  Oligonucleotide for detection of SNP TSC0054653
gtttaaaatttta

SEQ ID NO: 224312 - DNA, 13 bp, Artificial Sequence
  Oligonucleotide for detection of SNP TSC0054653
taaaattttaaac

SEQ ID NO: 224313 - DNA, 13 bp, Artificial Sequence
  Oligonucleotide for detection of SNP TSC0054653
gtttaagatttta

SEQ ID NO: 224314 - DNA, 13 bp, Artificial Sequence
  Oligonucleotide for detection of SNP TSC0054653
taaaatcttaaac

SEQ ID NO: 224315 - DNA, 13 bp, Artificial Sequence
  Oligonucleotide for detection of SNP TSC0054654
ttattagttgagg

SEQ ID NO: 224316 - DNA, 13 bp, Artificial Sequence
  Oligonucleotide for detection of SNP TSC0054654
cctcaactaataa

SEQ ID NO: 224317 - DNA, 13 bp, Artificial Sequence
  Oligonucleotide for detection of SNP TSC0054654
ttattaattgagg

SEQ ID NO: 224318 - DNA, 13 bp, Artificial Sequence
  Oligonucleotide for detection of SNP TSC0054654
cctcaattaataa

SEQ ID NO: 224319 - DNA, 13 bp, Artificial Sequence
  Oligonucleotide for detection of SNP TSC0054655
agaagtataaagg

SEQ ID NO: 224320 - DNA, 13 bp, Artificial Sequence
  Oligonucleotide for detection of SNP TSC0054655
cctttatacttct

SEQ ID NO: 224321 - DNA, 13 bp, Artificial Sequence
  Oligonucleotide for detection of SNP TSC0054655
agaagtttaaagg

SEQ ID NO: 224322 - DNA, 13 bp, Artificial Sequence
  Oligonucleotide for detection of SNP TSC0054655
cctttaaacttct

SEQ ID NO: 224323 - DNA, 13 bp, Artificial Sequence
  Oligonucleotide for detection of SNP TSC0054656
taaggtgaaggga

SEQ ID NO: 224324 - DNA, 13 bp, Artificial Sequence
  Oligonucleotide for detection of SNP TSC0054656
tcccttcacctta

SEQ ID NO: 224325 - DNA, 13 bp, Artificial Sequence
  Oligonucleotide for detection of SNP TSC0054656
taaggtaaaggga

SEQ ID NO: 224326 - DNA, 13 bp, Artificial Sequence
  Oligonucleotide for detection of SNP TSC0054656
tccctttacctta

SEQ ID NO: 224327 - DNA, 13 bp, Artificial Sequence
  Oligonucleotide for detection of SNP TSC0054660
agaaaaagttaay

SEQ ID NO: 224328 - DNA, 13 bp, Artificial Sequence
  Oligonucleotide for detection of SNP TSC0054660
rttaactttttct

SEQ ID NO: 224329 - DNA, 13 bp, Artificial Sequence
  Oligonucleotide for detection of SNP TSC0054660
agaaaatgttaay

SEQ ID NO: 224330 - DNA, 13 bp, Artificial Sequence
  Oligonucleotide for detection of SNP TSC0054660
rttaacattttct

SEQ ID NO: 224331 - DNA, 13 bp, Artificial Sequence
  Oligonucleotide for detection of SNP TSC0054660
agaaaacgttaay

SEQ ID NO: 224332 - DNA, 13 bp, Artificial Sequence
  Oligonucleotide for detection of SNP TSC0054660
rttaacgttttct

SEQ ID NO: 224333 - DNA, 13 bp, Artificial Sequence
  Oligonucleotide for detection of SNP TSC0054660
gttagtttttttt

SEQ ID NO: 224334 - DNA, 13 bp, Artificial Sequence
  Oligonucleotide for detection of SNP TSC0054660
aaaaaaaactaac

SEQ ID NO: 224335 - DNA, 13 bp, Artificial Sequence
  Oligonucleotide for detection of SNP TSC0054661
ttgagtaaaatay

SEQ ID NO: 224336 - DNA, 13 bp, Artificial Sequence
  Oligonucleotide for detection of SNP TSC0054661
rtattttactcaa

SEQ ID NO: 224337 - DNA, 13 bp, Artificial Sequence
  Oligonucleotide for detection of SNP TSC0054661
ttgagtgaaatay

SEQ ID NO: 224338 - DNA, 13 bp, Artificial Sequence
  Oligonucleotide for detection of SNP TSC0054661
rtatttcactcaa

SEQ ID NO: 224339 - DNA, 13 bp, Artificial Sequence
  Oligonucleotide for detection of SNP TSC0054661
ttgagcgaaatay

SEQ ID NO: 224340 - DNA, 13 bp, Artificial Sequence
  Oligonucleotide for detection of SNP TSC0054661
rtatttcgctcaa

SEQ ID NO: 224341 - DNA, 13 bp, Artificial Sequence
  Oligonucleotide for detection of SNP TSC0054661
gtattttgtttag

SEQ ID NO: 224342 - DNA, 13 bp, Artificial Sequence
  Oligonucleotide for detection of SNP TSC0054661
ctaaacaaaatac

SEQ ID NO: 224343 - DNA, 13 bp, Artificial Sequence
  Oligonucleotide for detection of SNP TSC0054661
gtatttcgtttag

SEQ ID NO: 224344 - DNA, 13 bp, Artificial Sequence
  Oligonucleotide for detection of SNP TSC0054661
ctaaacgaaatac

SEQ ID NO: 224345 - DNA, 13 bp, Artificial Sequence
  Oligonucleotide for detection of SNP TSC0054663
atttaatgagaaa

SEQ ID NO: 224346 - DNA, 13 bp, Artificial Sequence
  Oligonucleotide for detection of SNP TSC0054663
tttctcattaaat

SEQ ID NO: 224347 - DNA, 13 bp, Artificial Sequence
  Oligonucleotide for detection of SNP TSC0054663
atttaaggagaaa

SEQ ID NO: 224348 - DNA, 13 bp, Artificial Sequence
  Oligonucleotide for detection of SNP TSC0054663
tttctccttaaat

SEQ ID NO: 224349 - DNA, 13 bp, Artificial Sequence
  Oligonucleotide for detection of SNP TSC0054663
atttaacgagaaa

SEQ ID NO: 224350 - DNA, 13 bp, Artificial Sequence
  Oligonucleotide for detection of SNP TSC0054663
tttctcgttaaat

SEQ ID NO: 224351 - DNA, 13 bp, Artificial Sequence
  Oligonucleotide for detection of SNP TSC0054663
tttttttttaggt

SEQ ID NO: 224352 - DNA, 13 bp, Artificial Sequence
  Oligonucleotide for detection of SNP TSC0054663
acctaaaaaaaaa

SEQ ID NO: 224353 - DNA, 13 bp, Artificial Sequence
  Oligonucleotide for detection of SNP TSC0054665
taggtagtataay

SEQ ID NO: 224354 - DNA, 13 bp, Artificial Sequence
  Oligonucleotide for detection of SNP TSC0054665
rttatactaccta

SEQ ID NO: 224355 - DNA, 13 bp, Artificial Sequence
  Oligonucleotide for detection of SNP TSC0054665
taggtaatataay

SEQ ID NO: 224356 - DNA, 13 bp, Artificial Sequence
  Oligonucleotide for detection of SNP TSC0054665
rttatattaccta

SEQ ID NO: 224357 - DNA, 13 bp, Artificial Sequence
  Oligonucleotide for detection of SNP TSC0054666
tttagattatagy

SEQ ID NO: 224358 - DNA, 13 bp, Artificial Sequence
  Oligonucleotide for detection of SNP TSC0054666
rctataatctaaa

SEQ ID NO: 224359 - DNA, 13 bp, Artificial Sequence
  Oligonucleotide for detection of SNP TSC0054666
tttagagtatagy

SEQ ID NO: 224360 - DNA, 13 bp, Artificial Sequence
  Oligonucleotide for detection of SNP TSC0054666
rctatactctaaa

SEQ ID NO: 224361 - DNA, 13 bp, Artificial Sequence
  Oligonucleotide for detection of SNP TSC0054666
gttgtggtttgaa

SEQ ID NO: 224362 - DNA, 13 bp, Artificial Sequence
  Oligonucleotide for detection of SNP TSC0054666
ttcaaaccacaac

SEQ ID NO: 224363 - DNA, 13 bp, Artificial Sequence
  Oligonucleotide for detection of SNP TSC0054666
gttgtgttttgaa

SEQ ID NO: 224364 - DNA, 13 bp, Artificial Sequence
  Oligonucleotide for detection of SNP TSC0054666
ttcaaaacacaac

SEQ ID NO: 224365 - DNA, 13 bp, Artificial Sequence
  Oligonucleotide for detection of SNP TSC0054667
gtaaatgaaagaa

SEQ ID NO: 224366 - DNA, 13 bp, Artificial Sequence
  Oligonucleotide for detection of SNP TSC0054667
ttctttcatttac

SEQ ID NO: 224367 - DNA, 13 bp, Artificial Sequence
  Oligonucleotide for detection of SNP TSC0054667
gtaaataaaagaa

SEQ ID NO: 224368 - DNA, 13 bp, Artificial Sequence
  Oligonucleotide for detection of SNP TSC0054667
ttcttttatttac

SEQ ID NO: 224369 - DNA, 13 bp, Artificial Sequence
  Oligonucleotide for detection of SNP TSC0054668
tgttttgatgtaa

SEQ ID NO: 224370 - DNA, 13 bp, Artificial Sequence
  Oligonucleotide for detection of SNP TSC0054668
ttacatcaaaaca

SEQ ID NO: 224371 - DNA, 13 bp, Artificial Sequence
  Oligonucleotide for detection of SNP TSC0054668
tgttttaatgtaa

SEQ ID NO: 224372 - DNA, 13 bp, Artificial Sequence
  Oligonucleotide for detection of SNP TSC0054668
ttacattaaaaca

SEQ ID NO: 224373 - DNA, 13 bp, Artificial Sequence
  Oligonucleotide for detection of SNP TSC0054668
tgttttgacgtaa

SEQ ID NO: 224374 - DNA, 13 bp, Artificial Sequence
  Oligonucleotide for detection of SNP TSC0054668
ttacgtcaaaaca

SEQ ID NO: 224375 - DNA, 13 bp, Artificial Sequence
  Oligonucleotide for detection of SNP TSC0054668
tgttttaacgtaa

SEQ ID NO: 224376 - DNA, 13 bp, Artificial Sequence
  Oligonucleotide for detection of SNP TSC0054668
ttacgttaaaaca

SEQ ID NO: 224377 - DNA, 13 bp, Artificial Sequence
  Oligonucleotide for detection of SNP TSC0054670
ataattatatgat

SEQ ID NO: 224378 - DNA, 13 bp, Artificial Sequence
  Oligonucleotide for detection of SNP TSC0054670
atcatataattat

SEQ ID NO: 224379 - DNA, 13 bp, Artificial Sequence
  Oligonucleotide for detection of SNP TSC0054670
ataattgtatgat

SEQ ID NO: 224380 - DNA, 13 bp, Artificial Sequence
  Oligonucleotide for detection of SNP TSC0054670
atcatacaattat

SEQ ID NO: 224381 - DNA, 13 bp, Artificial Sequence
  Oligonucleotide for detection of SNP TSC0054673
tgtgtatatttgt

SEQ ID NO: 224382 - DNA, 13 bp, Artificial Sequence
  Oligonucleotide for detection of SNP TSC0054673
acaaatatacaca

SEQ ID NO: 224383 - DNA, 13 bp, Artificial Sequence
  Oligonucleotide for detection of SNP TSC0054673
tgtgtagatttgt

SEQ ID NO: 224384 - DNA, 13 bp, Artificial Sequence
  Oligonucleotide for detection of SNP TSC0054673
acaaatctacaca

SEQ ID NO: 224385 - DNA, 13 bp, Artificial Sequence
  Oligonucleotide for detection of SNP TSC0054677
taagtataagaay

SEQ ID NO: 224386 - DNA, 13 bp, Artificial Sequence
  Oligonucleotide for detection of SNP TSC0054677
rttcttatactta

SEQ ID NO: 224387 - DNA, 13 bp, Artificial Sequence
  Oligonucleotide for detection of SNP TSC0054677
taagtagaagaay

SEQ ID NO: 224388 - DNA, 13 bp, Artificial Sequence
  Oligonucleotide for detection of SNP TSC0054677
rttcttctactta

SEQ ID NO: 224389 - DNA, 13 bp, Artificial Sequence
  Oligonucleotide for detection of SNP TSC0054677
gtttttttgtttg

SEQ ID NO: 224390 - DNA, 13 bp, Artificial Sequence
  Oligonucleotide for detection of SNP TSC0054677
caaacaaaaaaac

SEQ ID NO: 224391 - DNA, 13 bp, Artificial Sequence
  Oligonucleotide for detection of SNP TSC0054678
agttgagattata

SEQ ID NO: 224392 - DNA, 13 bp, Artificial Sequence
  Oligonucleotide for detection of SNP TSC0054678
tataatctcaact

SEQ ID NO: 224393 - DNA, 13 bp, Artificial Sequence
  Oligonucleotide for detection of SNP TSC0054678
agttgaaattata

SEQ ID NO: 224394 - DNA, 13 bp, Artificial Sequence
  Oligonucleotide for detection of SNP TSC0054678
tataatttcaact

SEQ ID NO: 224395 - DNA, 13 bp, Artificial Sequence
  Oligonucleotide for detection of SNP TSC0054680
tgaggttgtgtag

SEQ ID NO: 224396 - DNA, 13 bp, Artificial Sequence
  Oligonucleotide for detection of SNP TSC0054680
ctacacaacctca

SEQ ID NO: 224397 - DNA, 13 bp, Artificial Sequence
  Oligonucleotide for detection of SNP TSC0054680
tgaggtcgtgtag

SEQ ID NO: 224398 - DNA, 13 bp, Artificial Sequence
  Oligonucleotide for detection of SNP TSC0054680
ctacacgacctca

SEQ ID NO: 224399 - DNA, 13 bp, Artificial Sequence
  Oligonucleotide for detection of SNP TSC0054680
ttgtatgatttta

SEQ ID NO: 224400 - DNA, 13 bp, Artificial Sequence
  Oligonucleotide for detection of SNP TSC0054680
taaaatcatacaa

SEQ ID NO: 224401 - DNA, 13 bp, Artificial Sequence
  Oligonucleotide for detection of SNP TSC0054680
ttgtataatttta

SEQ ID NO: 224402 - DNA, 13 bp, Artificial Sequence
  Oligonucleotide for detection of SNP TSC0054680
taaaattatacaa

SEQ ID NO: 224403 - DNA, 13 bp, Artificial Sequence
  Oligonucleotide for detection of SNP TSC0054680
ttgtacgatttta

SEQ ID NO: 224404 - DNA, 13 bp, Artificial Sequence
  Oligonucleotide for detection of SNP TSC0054680
taaaatcgtacaa

SEQ ID NO: 224405 - DNA, 13 bp, Artificial Sequence
  Oligonucleotide for detection of SNP TSC0054681
tatttggtattaa

SEQ ID NO: 224406 - DNA, 13 bp, Artificial Sequence
  Oligonucleotide for detection of SNP TSC0054681
ttaataccaaata

SEQ ID NO: 224407 - DNA, 13 bp, Artificial Sequence
  Oligonucleotide for detection of SNP TSC0054681
ttaatagtaagtg

SEQ ID NO: 224408 - DNA, 13 bp, Artificial Sequence
  Oligonucleotide for detection of SNP TSC0054681
cacttactattaa

SEQ ID NO: 224409 - DNA, 13 bp, Artificial Sequence
  Oligonucleotide for detection of SNP TSC0054681
ttaatattaagtg

SEQ ID NO: 224410 - DNA, 13 bp, Artificial Sequence
  Oligonucleotide for detection of SNP TSC0054681
cacttaatattaa

SEQ ID NO: 224411 - DNA, 13 bp, Artificial Sequence
  Oligonucleotide for detection of SNP TSC0054686
aaaaaaatttaag

SEQ ID NO: 224412 - DNA, 13 bp, Artificial Sequence
  Oligonucleotide for detection of SNP TSC0054686
cttaaattttttt

SEQ ID NO: 224413 - DNA, 13 bp, Artificial Sequence
  Oligonucleotide for detection of SNP TSC0054686
aaaaaattttaag

SEQ ID NO: 224414 - DNA, 13 bp, Artificial Sequence
  Oligonucleotide for detection of SNP TSC0054686
cttaaaatttttt

SEQ ID NO: 224415 - DNA, 13 bp, Artificial Sequence
  Oligonucleotide for detection of SNP TSC0054687
ggtgtatgtgttt

SEQ ID NO: 224416 - DNA, 13 bp, Artificial Sequence
  Oligonucleotide for detection of SNP TSC0054687
aaacacatacacc

SEQ ID NO: 224417 - DNA, 13 bp, Artificial Sequence
  Oligonucleotide for detection of SNP TSC0054687
ggtgtacgtgttt

SEQ ID NO: 224418 - DNA, 13 bp, Artificial Sequence
  Oligonucleotide for detection of SNP TSC0054687
aaacacgtacacc

SEQ ID NO: 224419 - DNA, 13 bp, Artificial Sequence
  Oligonucleotide for detection of SNP TSC0054687
aggtatgtgtaty

SEQ ID NO: 224420 - DNA, 13 bp, Artificial Sequence
  Oligonucleotide for detection of SNP TSC0054687
ratacacatacct

SEQ ID NO: 224421 - DNA, 13 bp, Artificial Sequence
  Oligonucleotide for detection of SNP TSC0054687
aggtatatgtaty

SEQ ID NO: 224422 - DNA, 13 bp, Artificial Sequence
  Oligonucleotide for detection of SNP TSC0054687
ratacatatacct

SEQ ID NO: 224423 - DNA, 13 bp, Artificial Sequence
  Oligonucleotide for detection of SNP TSC0054687
aggtacgtgtaty

SEQ ID NO: 224424 - DNA, 13 bp, Artificial Sequence
  Oligonucleotide for detection of SNP TSC0054687
ratacacgtacct

SEQ ID NO: 224425 - DNA, 13 bp, Artificial Sequence
  Oligonucleotide for detection of SNP TSC0054688
agtgtgtggtaga

SEQ ID NO: 224426 - DNA, 13 bp, Artificial Sequence
  Oligonucleotide for detection of SNP TSC0054688
tctaccacacact

SEQ ID NO: 224427 - DNA, 13 bp, Artificial Sequence
  Oligonucleotide for detection of SNP TSC0054688
agtgtgaggtaga

SEQ ID NO: 224428 - DNA, 13 bp, Artificial Sequence
  Oligonucleotide for detection of SNP TSC0054688
tctacctcacact

SEQ ID NO: 224429 - DNA, 13 bp, Artificial Sequence
  Oligonucleotide for detection of SNP TSC0054693
agtttatttggta

SEQ ID NO: 224430 - DNA, 13 bp, Artificial Sequence
  Oligonucleotide for detection of SNP TSC0054693
taccaaataaact

SEQ ID NO: 224431 - DNA, 13 bp, Artificial Sequence
  Oligonucleotide for detection of SNP TSC0054693
agtttagttggta

SEQ ID NO: 224432 - DNA, 13 bp, Artificial Sequence
  Oligonucleotide for detection of SNP TSC0054693
taccaactaaact

SEQ ID NO: 224433 - DNA, 13 bp, Artificial Sequence
  Oligonucleotide for detection of SNP TSC0054693
tgttagatgggtt

SEQ ID NO: 224434 - DNA, 13 bp, Artificial Sequence
  Oligonucleotide for detection of SNP TSC0054693
aacccatctaaca

SEQ ID NO: 224435 - DNA, 13 bp, Artificial Sequence
  Oligonucleotide for detection of SNP TSC0054693
tgttagttgggtt

SEQ ID NO: 224436 - DNA, 13 bp, Artificial Sequence
  Oligonucleotide for detection of SNP TSC0054693
aacccaactaaca

SEQ ID NO: 224437 - DNA, 13 bp, Artificial Sequence
  Oligonucleotide for detection of SNP TSC0054695
gtttatattttgg

SEQ ID NO: 224438 - DNA, 13 bp, Artificial Sequence
  Oligonucleotide for detection of SNP TSC0054695
ccaaaatataaac

SEQ ID NO: 224439 - DNA, 13 bp, Artificial Sequence
  Oligonucleotide for detection of SNP TSC0054695
gtttatgttttgg

SEQ ID NO: 224440 - DNA, 13 bp, Artificial Sequence
  Oligonucleotide for detection of SNP TSC0054695
ccaaaacataaac

SEQ ID NO: 224441 - DNA, 13 bp, Artificial Sequence
  Oligonucleotide for detection of SNP TSC0054696
tggttatttattt

SEQ ID NO: 224442 - DNA, 13 bp, Artificial Sequence
  Oligonucleotide for detection of SNP TSC0054696
aaataaataacca

SEQ ID NO: 224443 - DNA, 13 bp, Artificial Sequence
  Oligonucleotide for detection of SNP TSC0054696
agatagttgatta

SEQ ID NO: 224444 - DNA, 13 bp, Artificial Sequence
  Oligonucleotide for detection of SNP TSC0054696
taatcaactatct

SEQ ID NO: 224445 - DNA, 13 bp, Artificial Sequence
  Oligonucleotide for detection of SNP TSC0054696
agataggtgatta

SEQ ID NO: 224446 - DNA, 13 bp, Artificial Sequence
  Oligonucleotide for detection of SNP TSC0054696
taatcacctatct

SEQ ID NO: 224447 - DNA, 13 bp, Artificial Sequence
  Oligonucleotide for detection of SNP TSC0054697
atttttatttggg

SEQ ID NO: 224448 - DNA, 13 bp, Artificial Sequence
  Oligonucleotide for detection of SNP TSC0054697
cccaaataaaaat

SEQ ID NO: 224449 - DNA, 13 bp, Artificial Sequence
  Oligonucleotide for detection of SNP TSC0054698
aataaagaaataa

SEQ ID NO: 224450 - DNA, 13 bp, Artificial Sequence
  Oligonucleotide for detection of SNP TSC0054698
ttatttctttatt

SEQ ID NO: 224451 - DNA, 13 bp, Artificial Sequence
  Oligonucleotide for detection of SNP TSC0054699
tttttgtggtggt

SEQ ID NO: 224452 - DNA, 13 bp, Artificial Sequence
  Oligonucleotide for detection of SNP TSC0054699
accaccacaaaaa

SEQ ID NO: 224453 - DNA, 13 bp, Artificial Sequence
  Oligonucleotide for detection of SNP TSC0054699
tttttggggtggt

SEQ ID NO: 224454 - DNA, 13 bp, Artificial Sequence
  Oligonucleotide for detection of SNP TSC0054699
accaccccaaaaa

SEQ ID NO: 224455 - DNA, 13 bp, Artificial Sequence
  Oligonucleotide for detection of SNP TSC0054700
taattgtgttata

SEQ ID NO: 224456 - DNA, 13 bp, Artificial Sequence
  Oligonucleotide for detection of SNP TSC0054700
tataacacaatta

SEQ ID NO: 224457 - DNA, 13 bp, Artificial Sequence
  Oligonucleotide for detection of SNP TSC0054700
taattgggttata

SEQ ID NO: 224458 - DNA, 13 bp, Artificial Sequence
  Oligonucleotide for detection of SNP TSC0054700
tataacccaatta

SEQ ID NO: 224459 - DNA, 13 bp, Artificial Sequence
  Oligonucleotide for detection of SNP TSC0054700
tataatataatta

SEQ ID NO: 224460 - DNA, 13 bp, Artificial Sequence
  Oligonucleotide for detection of SNP TSC0054700
taattatattata

SEQ ID NO: 224461 - DNA, 13 bp, Artificial Sequence
  Oligonucleotide for detection of SNP TSC0054700
tataatttaatta

SEQ ID NO: 224462 - DNA, 13 bp, Artificial Sequence
  Oligonucleotide for detection of SNP TSC0054700
taattaaattata

SEQ ID NO: 224463 - DNA, 13 bp, Artificial Sequence
  Oligonucleotide for detection of SNP TSC0054704
gatggatttttgy

SEQ ID NO: 224464 - DNA, 13 bp, Artificial Sequence
  Oligonucleotide for detection of SNP TSC0054704
rcaaaaatccatc

SEQ ID NO: 224465 - DNA, 13 bp, Artificial Sequence
  Oligonucleotide for detection of SNP TSC0054704
gatggagttttgy

SEQ ID NO: 224466 - DNA, 13 bp, Artificial Sequence
  Oligonucleotide for detection of SNP TSC0054704
rcaaaactccatc

SEQ ID NO: 224467 - DNA, 13 bp, Artificial Sequence
  Oligonucleotide for detection of SNP TSC0054704
gtaaaattttaty

SEQ ID NO: 224468 - DNA, 13 bp, Artificial Sequence
  Oligonucleotide for detection of SNP TSC0054704
rataaaattttac

SEQ ID NO: 224469 - DNA, 13 bp, Artificial Sequence
  Oligonucleotide for detection of SNP TSC0054707
tgtgtaagtatta

SEQ ID NO: 224470 - DNA, 13 bp, Artificial Sequence
  Oligonucleotide for detection of SNP TSC0054707
taatacttacaca

SEQ ID NO: 224471 - DNA, 13 bp, Artificial Sequence
  Oligonucleotide for detection of SNP TSC0054707
tgtgtaggtatta

SEQ ID NO: 224472 - DNA, 13 bp, Artificial Sequence
  Oligonucleotide for detection of SNP TSC0054707
taatacctacaca

SEQ ID NO: 224473 - DNA, 13 bp, Artificial Sequence
  Oligonucleotide for detection of SNP TSC0054707
cgtgtaagtatta

SEQ ID NO: 224474 - DNA, 13 bp, Artificial Sequence
  Oligonucleotide for detection of SNP TSC0054707
taatacttacacg

SEQ ID NO: 224475 - DNA, 13 bp, Artificial Sequence
  Oligonucleotide for detection of SNP TSC0054707
cgtgtaggtatta

SEQ ID NO: 224476 - DNA, 13 bp, Artificial Sequence
  Oligonucleotide for detection of SNP TSC0054707
taatacctacacg

SEQ ID NO: 224477 - DNA, 13 bp, Artificial Sequence
  Oligonucleotide for detection of SNP TSC0054708
aattataaagatt

SEQ ID NO: 224478 - DNA, 13 bp, Artificial Sequence
  Oligonucleotide for detection of SNP TSC0054708
aatctttataatt

SEQ ID NO: 224479 - DNA, 13 bp, Artificial Sequence
  Oligonucleotide for detection of SNP TSC0054708
aattatgaagatt

SEQ ID NO: 224480 - DNA, 13 bp, Artificial Sequence
  Oligonucleotide for detection of SNP TSC0054708
aatcttcataatt

SEQ ID NO: 224481 - DNA, 13 bp, Artificial Sequence
  Oligonucleotide for detection of SNP TSC0054709
attgtaataaata

SEQ ID NO: 224482 - DNA, 13 bp, Artificial Sequence
  Oligonucleotide for detection of SNP TSC0054709
tatttattacaat

SEQ ID NO: 224483 - DNA, 13 bp, Artificial Sequence
  Oligonucleotide for detection of SNP TSC0054709
attgtagtaaata

SEQ ID NO: 224484 - DNA, 13 bp, Artificial Sequence
  Oligonucleotide for detection of SNP TSC0054709
tatttactacaat

SEQ ID NO: 224485 - DNA, 13 bp, Artificial Sequence
  Oligonucleotide for detection of SNP TSC0054710
aattgagaataag

SEQ ID NO: 224486 - DNA, 13 bp, Artificial Sequence
  Oligonucleotide for detection of SNP TSC0054710
cttattctcaatt

SEQ ID NO: 224487 - DNA, 13 bp, Artificial Sequence
  Oligonucleotide for detection of SNP TSC0054710
aattgaaaataag

SEQ ID NO: 224488 - DNA, 13 bp, Artificial Sequence
  Oligonucleotide for detection of SNP TSC0054710
cttattttcaatt

SEQ ID NO: 224489 - DNA, 13 bp, Artificial Sequence
  Oligonucleotide for detection of SNP TSC0054712
agatttattttat

SEQ ID NO: 224490 - DNA, 13 bp, Artificial Sequence
  Oligonucleotide for detection of SNP TSC0054712
ataaaataaatct

SEQ ID NO: 224491 - DNA, 13 bp, Artificial Sequence
  Oligonucleotide for detection of SNP TSC0054712
agattttttttat

SEQ ID NO: 224492 - DNA, 13 bp, Artificial Sequence
  Oligonucleotide for detection of SNP TSC0054712
ataaaaaaaatct

SEQ ID NO: 224493 - DNA, 13 bp, Artificial Sequence
  Oligonucleotide for detection of SNP TSC0054712
atggggtagattt

SEQ ID NO: 224494 - DNA, 13 bp, Artificial Sequence
  Oligonucleotide for detection of SNP TSC0054712
aaatctaccccat

SEQ ID NO: 224495 - DNA, 13 bp, Artificial Sequence
  Oligonucleotide for detection of SNP TSC0054712
atgggggagattt

SEQ ID NO: 224496 - DNA, 13 bp, Artificial Sequence
  Oligonucleotide for detection of SNP TSC0054712
aaatctcccccat

SEQ ID NO: 224497 - DNA, 13 bp, Artificial Sequence
  Oligonucleotide for detection of SNP TSC0054713
gaattatttaaaa

SEQ ID NO: 224498 - DNA, 13 bp, Artificial Sequence
  Oligonucleotide for detection of SNP TSC0054713
ttttaaataattc

SEQ ID NO: 224499 - DNA, 13 bp, Artificial Sequence
  Oligonucleotide for detection of SNP TSC0054713
gaattagttaaaa

SEQ ID NO: 224500 - DNA, 13 bp, Artificial Sequence
  Oligonucleotide for detection of SNP TSC0054713
ttttaactaattc

SEQ ID NO: 224501 - DNA, 13 bp, Artificial Sequence
  Oligonucleotide for detection of SNP TSC0054713
ttttaggtggtty

SEQ ID NO: 224502 - DNA, 13 bp, Artificial Sequence
  Oligonucleotide for detection of SNP TSC0054713
raaccacctaaaa

SEQ ID NO: 224503 - DNA, 13 bp, Artificial Sequence
  Oligonucleotide for detection of SNP TSC0054713
ttttagttggtty

SEQ ID NO: 224504 - DNA, 13 bp, Artificial Sequence
  Oligonucleotide for detection of SNP TSC0054713
raaccaactaaaa

SEQ ID NO: 224505 - DNA, 13 bp, Artificial Sequence
  Oligonucleotide for detection of SNP TSC0054714
aaaagtaggtttg

SEQ ID NO: 224506 - DNA, 13 bp, Artificial Sequence
  Oligonucleotide for detection of SNP TSC0054714
caaacctactttt

SEQ ID NO: 224507 - DNA, 13 bp, Artificial Sequence
  Oligonucleotide for detection of SNP TSC0054714
aaaagtgggtttg

SEQ ID NO: 224508 - DNA, 13 bp, Artificial Sequence
  Oligonucleotide for detection of SNP TSC0054714
caaacccactttt

SEQ ID NO: 224509 - DNA, 13 bp, Artificial Sequence
  Oligonucleotide for detection of SNP TSC0054714
aaaagcgggtttg

SEQ ID NO: 224510 - DNA, 13 bp, Artificial Sequence
  Oligonucleotide for detection of SNP TSC0054714
caaacccgctttt

SEQ ID NO: 224511 - DNA, 13 bp, Artificial Sequence
  Oligonucleotide for detection of SNP TSC0054714
tagatttgttttt

SEQ ID NO: 224512 - DNA, 13 bp, Artificial Sequence
  Oligonucleotide for detection of SNP TSC0054714
aaaaacaaatcta

SEQ ID NO: 224513 - DNA, 13 bp, Artificial Sequence
  Oligonucleotide for detection of SNP TSC0054714
tagattcgttttt

SEQ ID NO: 224514 - DNA, 13 bp, Artificial Sequence
  Oligonucleotide for detection of SNP TSC0054714
aaaaacgaatcta

SEQ ID NO: 224515 - DNA, 13 bp, Artificial Sequence
  Oligonucleotide for detection of SNP TSC0054722
tagtatatttggy

SEQ ID NO: 224516 - DNA, 13 bp, Artificial Sequence
  Oligonucleotide for detection of SNP TSC0054722
rccaaatatacta

SEQ ID NO: 224517 - DNA, 13 bp, Artificial Sequence
  Oligonucleotide for detection of SNP TSC0054722
tagtatttttggy

SEQ ID NO: 224518 - DNA, 13 bp, Artificial Sequence
  Oligonucleotide for detection of SNP TSC0054722
rccaaaaatacta

SEQ ID NO: 224519 - DNA, 13 bp, Artificial Sequence
  Oligonucleotide for detection of SNP TSC0054722
gttaggtgtgtta

SEQ ID NO: 224520 - DNA, 13 bp, Artificial Sequence
  Oligonucleotide for detection of SNP TSC0054722
taacacacctaac

SEQ ID NO: 224521 - DNA, 13 bp, Artificial Sequence
  Oligonucleotide for detection of SNP TSC0054722
gttaggggtgtta

SEQ ID NO: 224522 - DNA, 13 bp, Artificial Sequence
  Oligonucleotide for detection of SNP TSC0054722
taacacccctaac

SEQ ID NO: 224523 - DNA, 13 bp, Artificial Sequence
  Oligonucleotide for detection of SNP TSC0054723
atttatgtaaaaa

SEQ ID NO: 224524 - DNA, 13 bp, Artificial Sequence
  Oligonucleotide for detection of SNP TSC0054723
tttttacataaat

SEQ ID NO: 224525 - DNA, 13 bp, Artificial Sequence
  Oligonucleotide for detection of SNP TSC0054723
atttatataaaaa

SEQ ID NO: 224526 - DNA, 13 bp, Artificial Sequence
  Oligonucleotide for detection of SNP TSC0054723
tttttatataaat

SEQ ID NO: 224527 - DNA, 13 bp, Artificial Sequence
  Oligonucleotide for detection of SNP TSC0054723
atttacgtaaaaa

SEQ ID NO: 224528 - DNA, 13 bp, Artificial Sequence
  Oligonucleotide for detection of SNP TSC0054723
tttttacgtaaat

SEQ ID NO: 224529 - DNA, 13 bp, Artificial Sequence
  Oligonucleotide for detection of SNP TSC0054724
aaatggatgtttt

SEQ ID NO: 224530 - DNA, 13 bp, Artificial Sequence
  Oligonucleotide for detection of SNP TSC0054724
aaaacatccattt

SEQ ID NO: 224531 - DNA, 13 bp, Artificial Sequence
  Oligonucleotide for detection of SNP TSC0054724
aaatgggtgtttt

SEQ ID NO: 224532 - DNA, 13 bp, Artificial Sequence
  Oligonucleotide for detection of SNP TSC0054724
aaaacacccattt

SEQ ID NO: 224533 - DNA, 13 bp, Artificial Sequence
  Oligonucleotide for detection of SNP TSC0054728
ttaattattgaaa

SEQ ID NO: 224534 - DNA, 13 bp, Artificial Sequence
  Oligonucleotide for detection of SNP TSC0054728
tttcaataattaa

SEQ ID NO: 224535 - DNA, 13 bp, Artificial Sequence
  Oligonucleotide for detection of SNP TSC0054728
ttaatttttgaaa

SEQ ID NO: 224536 - DNA, 13 bp, Artificial Sequence
  Oligonucleotide for detection of SNP TSC0054728
tttcaaaaattaa

SEQ ID NO: 224537 - DNA, 13 bp, Artificial Sequence
  Oligonucleotide for detection of SNP TSC0054728
ttttagtaattaa

SEQ ID NO: 224538 - DNA, 13 bp, Artificial Sequence
  Oligonucleotide for detection of SNP TSC0054728
ttaattactaaaa

SEQ ID NO: 224539 - DNA, 13 bp, Artificial Sequence
  Oligonucleotide for detection of SNP TSC0054728
ttttagaaattaa

SEQ ID NO: 224540 - DNA, 13 bp, Artificial Sequence
  Oligonucleotide for detection of SNP TSC0054728
ttaatttctaaaa

SEQ ID NO: 224541 - DNA, 13 bp, Artificial Sequence
  Oligonucleotide for detection of SNP TSC0054730
tgttttatatggy

SEQ ID NO: 224542 - DNA, 13 bp, Artificial Sequence
  Oligonucleotide for detection of SNP TSC0054730
rccatataaaaca

SEQ ID NO: 224543 - DNA, 13 bp, Artificial Sequence
  Oligonucleotide for detection of SNP TSC0054730
tgttttttatggy

SEQ ID NO: 224544 - DNA, 13 bp, Artificial Sequence
  Oligonucleotide for detection of SNP TSC0054730
rccataaaaaaca

SEQ ID NO: 224545 - DNA, 13 bp, Artificial Sequence
  Oligonucleotide for detection of SNP TSC0054730
tgttttgtatggy

SEQ ID NO: 224546 - DNA, 13 bp, Artificial Sequence
  Oligonucleotide for detection of SNP TSC0054730
rccatacaaaaca

SEQ ID NO: 224547 - DNA, 13 bp, Artificial Sequence
  Oligonucleotide for detection of SNP TSC0054730
cgttttatatggy

SEQ ID NO: 224548 - DNA, 13 bp, Artificial Sequence
  Oligonucleotide for detection of SNP TSC0054730
rccatataaaacg

SEQ ID NO: 224549 - DNA, 13 bp, Artificial Sequence
  Oligonucleotide for detection of SNP TSC0054730
cgttttttatggy

SEQ ID NO: 224550 - DNA, 13 bp, Artificial Sequence
  Oligonucleotide for detection of SNP TSC0054730
rccataaaaaacg

SEQ ID NO: 224551 - DNA, 13 bp, Artificial Sequence
  Oligonucleotide for detection of SNP TSC0054730
cgttttgtatggy

SEQ ID NO: 224552 - DNA, 13 bp, Artificial Sequence
  Oligonucleotide for detection of SNP TSC0054730
rccatacaaaacg

SEQ ID NO: 224553 - DNA, 13 bp, Artificial Sequence
  Oligonucleotide for detection of SNP TSC0054730
gttatgtaagatg

SEQ ID NO: 224554 - DNA, 13 bp, Artificial Sequence
  Oligonucleotide for detection of SNP TSC0054730
catcttacataac

SEQ ID NO: 224555 - DNA, 13 bp, Artificial Sequence
  Oligonucleotide for detection of SNP TSC0054730
gttatgaaagatg

SEQ ID NO: 224556 - DNA, 13 bp, Artificial Sequence
  Oligonucleotide for detection of SNP TSC0054730
catctttcataac

SEQ ID NO: 224557 - DNA, 13 bp, Artificial Sequence
  Oligonucleotide for detection of SNP TSC0054730
gttatgtaagacg

SEQ ID NO: 224558 - DNA, 13 bp, Artificial Sequence
  Oligonucleotide for detection of SNP TSC0054730
cgtcttacataac

SEQ ID NO: 224559 - DNA, 13 bp, Artificial Sequence
  Oligonucleotide for detection of SNP TSC0054730
gttatgaaagacg

SEQ ID NO: 224560 - DNA, 13 bp, Artificial Sequence
  Oligonucleotide for detection of SNP TSC0054730
cgtctttcataac

SEQ ID NO: 224561 - DNA, 13 bp, Artificial Sequence
  Oligonucleotide for detection of SNP TSC0054731
atgatataaagta

SEQ ID NO: 224562 - DNA, 13 bp, Artificial Sequence
  Oligonucleotide for detection of SNP TSC0054731
tactttatatcat

SEQ ID NO: 224563 - DNA, 13 bp, Artificial Sequence
  Oligonucleotide for detection of SNP TSC0054731
atgatagaaagta

SEQ ID NO: 224564 - DNA, 13 bp, Artificial Sequence
  Oligonucleotide for detection of SNP TSC0054731
tactttctatcat

SEQ ID NO: 224565 - DNA, 13 bp, Artificial Sequence
  Oligonucleotide for detection of SNP TSC0054731
tgttttttgttat

SEQ ID NO: 224566 - DNA, 13 bp, Artificial Sequence
  Oligonucleotide for detection of SNP TSC0054731
ataacaaaaaaca

SEQ ID NO: 224567 - DNA, 13 bp, Artificial Sequence
  Oligonucleotide for detection of SNP TSC0054732
gggattaaaaggg

SEQ ID NO: 224568 - DNA, 13 bp, Artificial Sequence
  Oligonucleotide for detection of SNP TSC0054732
cccttttaatccc

SEQ ID NO: 224569 - DNA, 13 bp, Artificial Sequence
  Oligonucleotide for detection of SNP TSC0054732
gggattgaaaggg

SEQ ID NO: 224570 - DNA, 13 bp, Artificial Sequence
  Oligonucleotide for detection of SNP TSC0054732
ccctttcaatccc

SEQ ID NO: 224571 - DNA, 13 bp, Artificial Sequence
  Oligonucleotide for detection of SNP TSC0054733
ataattagttaaa

SEQ ID NO: 224572 - DNA, 13 bp, Artificial Sequence
  Oligonucleotide for detection of SNP TSC0054733
tttaactaattat

SEQ ID NO: 224573 - DNA, 13 bp, Artificial Sequence
  Oligonucleotide for detection of SNP TSC0054733
ataattggttaaa

SEQ ID NO: 224574 - DNA, 13 bp, Artificial Sequence
  Oligonucleotide for detection of SNP TSC0054733
tttaaccaattat

SEQ ID NO: 224575 - DNA, 13 bp, Artificial Sequence
  Oligonucleotide for detection of SNP TSC0054733
ataatcggttaaa

SEQ ID NO: 224576 - DNA, 13 bp, Artificial Sequence
  Oligonucleotide for detection of SNP TSC0054733
tttaaccgattat

SEQ ID NO: 224577 - DNA, 13 bp, Artificial Sequence
  Oligonucleotide for detection of SNP TSC0054733
tttggtcgattat

SEQ ID NO: 224578 - DNA, 13 bp, Artificial Sequence
  Oligonucleotide for detection of SNP TSC0054733
ataatcgaccaaa

SEQ ID NO: 224579 - DNA, 13 bp, Artificial Sequence
  Oligonucleotide for detection of SNP TSC0054734
tgaaatatattgy

SEQ ID NO: 224580 - DNA, 13 bp, Artificial Sequence
  Oligonucleotide for detection of SNP TSC0054734
rcaatatatttca

SEQ ID NO: 224581 - DNA, 13 bp, Artificial Sequence
  Oligonucleotide for detection of SNP TSC0054734
tgaaatgtattgy

SEQ ID NO: 224582 - DNA, 13 bp, Artificial Sequence
  Oligonucleotide for detection of SNP TSC0054734
rcaatacatttca

SEQ ID NO: 224583 - DNA, 13 bp, Artificial Sequence
  Oligonucleotide for detection of SNP TSC0054734
tgaaacgtattgy

SEQ ID NO: 224584 - DNA, 13 bp, Artificial Sequence
  Oligonucleotide for detection of SNP TSC0054734
rcaatacgtttca

SEQ ID NO: 224585 - DNA, 13 bp, Artificial Sequence
  Oligonucleotide for detection of SNP TSC0054734
gtaatgtgtttta

SEQ ID NO: 224586 - DNA, 13 bp, Artificial Sequence
  Oligonucleotide for detection of SNP TSC0054734
taaaacacattac

SEQ ID NO: 224587 - DNA, 13 bp, Artificial Sequence
  Oligonucleotide for detection of SNP TSC0054734
gtaatgcgtttta

SEQ ID NO: 224588 - DNA, 13 bp, Artificial Sequence
  Oligonucleotide for detection of SNP TSC0054734
taaaacgcattac

SEQ ID NO: 224589 - DNA, 13 bp, Artificial Sequence
  Oligonucleotide for detection of SNP TSC0054735
tatagtatggggt

SEQ ID NO: 224590 - DNA, 13 bp, Artificial Sequence
  Oligonucleotide for detection of SNP TSC0054735
accccatactata

SEQ ID NO: 224591 - DNA, 13 bp, Artificial Sequence
  Oligonucleotide for detection of SNP TSC0054735
tatagtgtggggt

SEQ ID NO: 224592 - DNA, 13 bp, Artificial Sequence
  Oligonucleotide for detection of SNP TSC0054735
accccacactata

SEQ ID NO: 224593 - DNA, 13 bp, Artificial Sequence
  Oligonucleotide for detection of SNP TSC0054736
ttatgtatgaata

SEQ ID NO: 224594 - DNA, 13 bp, Artificial Sequence
  Oligonucleotide for detection of SNP TSC0054736
tattcatacataa

SEQ ID NO: 224595 - DNA, 13 bp, Artificial Sequence
  Oligonucleotide for detection of SNP TSC0054736
ttatgtttgaata

SEQ ID NO: 224596 - DNA, 13 bp, Artificial Sequence
  Oligonucleotide for detection of SNP TSC0054736
tattcaaacataa

SEQ ID NO: 224597 - DNA, 13 bp, Artificial Sequence
  Oligonucleotide for detection of SNP TSC0054736
tgtttatatatga

SEQ ID NO: 224598 - DNA, 13 bp, Artificial Sequence
  Oligonucleotide for detection of SNP TSC0054736
tcatatataaaca

SEQ ID NO: 224599 - DNA, 13 bp, Artificial Sequence
  Oligonucleotide for detection of SNP TSC0054736
tgtttaaatatga

SEQ ID NO: 224600 - DNA, 13 bp, Artificial Sequence
  Oligonucleotide for detection of SNP TSC0054736
tcatatttaaaca

SEQ ID NO: 224601 - DNA, 13 bp, Artificial Sequence
  Oligonucleotide for detection of SNP TSC0054741
ttataagaaaaaa

SEQ ID NO: 224602 - DNA, 13 bp, Artificial Sequence
  Oligonucleotide for detection of SNP TSC0054741
ttttttcttataa

SEQ ID NO: 224603 - DNA, 13 bp, Artificial Sequence
  Oligonucleotide for detection of SNP TSC0054743
gtttatggttttg

SEQ ID NO: 224604 - DNA, 13 bp, Artificial Sequence
  Oligonucleotide for detection of SNP TSC0054743
caaaaccataaac

SEQ ID NO: 224605 - DNA, 13 bp, Artificial Sequence
  Oligonucleotide for detection of SNP TSC0054744
agagtagtgtttt

SEQ ID NO: 224606 - DNA, 13 bp, Artificial Sequence
  Oligonucleotide for detection of SNP TSC0054744
aaaacactactct

SEQ ID NO: 224607 - DNA, 13 bp, Artificial Sequence
  Oligonucleotide for detection of SNP TSC0054744
agagtaatgtttt

SEQ ID NO: 224608 - DNA, 13 bp, Artificial Sequence
  Oligonucleotide for detection of SNP TSC0054744
aaaacattactct

SEQ ID NO: 224609 - DNA, 13 bp, Artificial Sequence
  Oligonucleotide for detection of SNP TSC0054745
ggaggagaaatgg

SEQ ID NO: 224610 - DNA, 13 bp, Artificial Sequence
  Oligonucleotide for detection of SNP TSC0054745
ccatttctcctcc

SEQ ID NO: 224611 - DNA, 13 bp, Artificial Sequence
  Oligonucleotide for detection of SNP TSC0054745
ggaggaaaaatgg

SEQ ID NO: 224612 - DNA, 13 bp, Artificial Sequence
  Oligonucleotide for detection of SNP TSC0054745
ccatttttcctcc

SEQ ID NO: 224613 - DNA, 13 bp, Artificial Sequence
  Oligonucleotide for detection of SNP TSC0054746
ttggttgatttty

SEQ ID NO: 224614 - DNA, 13 bp, Artificial Sequence
  Oligonucleotide for detection of SNP TSC0054746
raaaatcaaccaa

SEQ ID NO: 224615 - DNA, 13 bp, Artificial Sequence
  Oligonucleotide for detection of SNP TSC0054746
ttggttaatttty

SEQ ID NO: 224616 - DNA, 13 bp, Artificial Sequence
  Oligonucleotide for detection of SNP TSC0054746
raaaattaaccaa

SEQ ID NO: 224617 - DNA, 13 bp, Artificial Sequence
  Oligonucleotide for detection of SNP TSC0054747
atagtttagttta

SEQ ID NO: 224618 - DNA, 13 bp, Artificial Sequence
  Oligonucleotide for detection of SNP TSC0054747
taaactaaactat

SEQ ID NO: 224619 - DNA, 13 bp, Artificial Sequence
  Oligonucleotide for detection of SNP TSC0054747
atagttgagttta

SEQ ID NO: 224620 - DNA, 13 bp, Artificial Sequence
  Oligonucleotide for detection of SNP TSC0054747
taaactcaactat

SEQ ID NO: 224621 - DNA, 13 bp, Artificial Sequence
  Oligonucleotide for detection of SNP TSC0054747
tgagttgagttat

SEQ ID NO: 224622 - DNA, 13 bp, Artificial Sequence
  Oligonucleotide for detection of SNP TSC0054747
ataactcaactca

SEQ ID NO: 224623 - DNA, 13 bp, Artificial Sequence
  Oligonucleotide for detection of SNP TSC0054747
tgagtttagttat

SEQ ID NO: 224624 - DNA, 13 bp, Artificial Sequence
  Oligonucleotide for detection of SNP TSC0054747
ataactaaactca

SEQ ID NO: 224625 - DNA, 13 bp, Artificial Sequence
  Oligonucleotide for detection of SNP TSC0054748
aaaggttaaagay

SEQ ID NO: 224626 - DNA, 13 bp, Artificial Sequence
  Oligonucleotide for detection of SNP TSC0054748
rtctttaaccttt

SEQ ID NO: 224627 - DNA, 13 bp, Artificial Sequence
  Oligonucleotide for detection of SNP TSC0054748
aaaggtgaaagay

SEQ ID NO: 224628 - DNA, 13 bp, Artificial Sequence
  Oligonucleotide for detection of SNP TSC0054748
rtctttcaccttt

SEQ ID NO: 224629 - DNA, 13 bp, Artificial Sequence
  Oligonucleotide for detection of SNP TSC0054750
gaatttgtgaaag

SEQ ID NO: 224630 - DNA, 13 bp, Artificial Sequence
  Oligonucleotide for detection of SNP TSC0054750
ctttcacaaattc

SEQ ID NO: 224631 - DNA, 13 bp, Artificial Sequence
  Oligonucleotide for detection of SNP TSC0054750
gaatttatgaaag

SEQ ID NO: 224632 - DNA, 13 bp, Artificial Sequence
  Oligonucleotide for detection of SNP TSC0054750
ctttcataaattc

SEQ ID NO: 224633 - DNA, 13 bp, Artificial Sequence
  Oligonucleotide for detection of SNP TSC0054753
ttaaatgaggtga

SEQ ID NO: 224634 - DNA, 13 bp, Artificial Sequence
  Oligonucleotide for detection of SNP TSC0054753
tcacctcatttaa

SEQ ID NO: 224635 - DNA, 13 bp, Artificial Sequence
  Oligonucleotide for detection of SNP TSC0054753
ttaaataaggtga

SEQ ID NO: 224636 - DNA, 13 bp, Artificial Sequence
  Oligonucleotide for detection of SNP TSC0054753
tcaccttatttaa

SEQ ID NO: 224637 - DNA, 13 bp, Artificial Sequence
  Oligonucleotide for detection of SNP TSC0054754
atagtagttatty

SEQ ID NO: 224638 - DNA, 13 bp, Artificial Sequence
  Oligonucleotide for detection of SNP TSC0054754
raataactactat

SEQ ID NO: 224639 - DNA, 13 bp, Artificial Sequence
  Oligonucleotide for detection of SNP TSC0054755
aatttatagaaag

SEQ ID NO: 224640 - DNA, 13 bp, Artificial Sequence
  Oligonucleotide for detection of SNP TSC0054755
ctttctataaatt

SEQ ID NO: 224641 - DNA, 13 bp, Artificial Sequence
  Oligonucleotide for detection of SNP TSC0054755
aatttagagaaag

SEQ ID NO: 224642 - DNA, 13 bp, Artificial Sequence
  Oligonucleotide for detection of SNP TSC0054755
ctttctctaaatt

SEQ ID NO: 224643 - DNA, 13 bp, Artificial Sequence
  Oligonucleotide for detection of SNP TSC0054755
ttttttttgggtt

SEQ ID NO: 224644 - DNA, 13 bp, Artificial Sequence
  Oligonucleotide for detection of SNP TSC0054755
aacccaaaaaaaa

SEQ ID NO: 224645 - DNA, 13 bp, Artificial Sequence
  Oligonucleotide for detection of SNP TSC0054756
agaaaaaatatty

SEQ ID NO: 224646 - DNA, 13 bp, Artificial Sequence
  Oligonucleotide for detection of SNP TSC0054756
raatattttttct

SEQ ID NO: 224647 - DNA, 13 bp, Artificial Sequence
  Oligonucleotide for detection of SNP TSC0054756
agaaaagatatty

SEQ ID NO: 224648 - DNA, 13 bp, Artificial Sequence
  Oligonucleotide for detection of SNP TSC0054756
raatatcttttct

SEQ ID NO: 224649 - DNA, 13 bp, Artificial Sequence
  Oligonucleotide for detection of SNP TSC0054757
aggtagggtttat

SEQ ID NO: 224650 - DNA, 13 bp, Artificial Sequence
  Oligonucleotide for detection of SNP TSC0054757
ataaaccctacct

SEQ ID NO: 224651 - DNA, 13 bp, Artificial Sequence
  Oligonucleotide for detection of SNP TSC0054757
aggtagagtttat

SEQ ID NO: 224652 - DNA, 13 bp, Artificial Sequence
  Oligonucleotide for detection of SNP TSC0054757
ataaactctacct

SEQ ID NO: 224653 - DNA, 13 bp, Artificial Sequence
  Oligonucleotide for detection of SNP TSC0054758
atgttgaaattay

SEQ ID NO: 224654 - DNA, 13 bp, Artificial Sequence
  Oligonucleotide for detection of SNP TSC0054758
rtaatttcaacat

SEQ ID NO: 224655 - DNA, 13 bp, Artificial Sequence
  Oligonucleotide for detection of SNP TSC0054758
atgttgtaattay

SEQ ID NO: 224656 - DNA, 13 bp, Artificial Sequence
  Oligonucleotide for detection of SNP TSC0054758
rtaattacaacat

SEQ ID NO: 224657 - DNA, 13 bp, Artificial Sequence
  Oligonucleotide for detection of SNP TSC0054760
aattgggggaaaa

SEQ ID NO: 224658 - DNA, 13 bp, Artificial Sequence
  Oligonucleotide for detection of SNP TSC0054760
ttttcccccaatt

SEQ ID NO: 224659 - DNA, 13 bp, Artificial Sequence
  Oligonucleotide for detection of SNP TSC0054760
aattggaggaaaa

SEQ ID NO: 224660 - DNA, 13 bp, Artificial Sequence
  Oligonucleotide for detection of SNP TSC0054760
ttttcctccaatt

SEQ ID NO: 224661 - DNA, 13 bp, Artificial Sequence
  Oligonucleotide for detection of SNP TSC0054763
agaatagtaataa

SEQ ID NO: 224662 - DNA, 13 bp, Artificial Sequence
  Oligonucleotide for detection of SNP TSC0054763
ttattactattct

SEQ ID NO: 224663 - DNA, 13 bp, Artificial Sequence
  Oligonucleotide for detection of SNP TSC0054765
agtgagaggtttg

SEQ ID NO: 224664 - DNA, 13 bp, Artificial Sequence
  Oligonucleotide for detection of SNP TSC0054765
caaacctctcact

SEQ ID NO: 224665 - DNA, 13 bp, Artificial Sequence
  Oligonucleotide for detection of SNP TSC0054765
agtgagtggtttg

SEQ ID NO: 224666 - DNA, 13 bp, Artificial Sequence
  Oligonucleotide for detection of SNP TSC0054765
caaaccactcact

SEQ ID NO: 224667 - DNA, 13 bp, Artificial Sequence
  Oligonucleotide for detection of SNP TSC0054765
agtgagcggtttg

SEQ ID NO: 224668 - DNA, 13 bp, Artificial Sequence
  Oligonucleotide for detection of SNP TSC0054765
caaaccgctcact

SEQ ID NO: 224669 - DNA, 13 bp, Artificial Sequence
  Oligonucleotide for detection of SNP TSC0054765
taagttttttatt

SEQ ID NO: 224670 - DNA, 13 bp, Artificial Sequence
  Oligonucleotide for detection of SNP TSC0054765
aataaaaaactta

SEQ ID NO: 224671 - DNA, 13 bp, Artificial Sequence
  Oligonucleotide for detection of SNP TSC0054765
taagttgtttatt

SEQ ID NO: 224672 - DNA, 13 bp, Artificial Sequence
  Oligonucleotide for detection of SNP TSC0054765
aataaacaactta

SEQ ID NO: 224673 - DNA, 13 bp, Artificial Sequence
  Oligonucleotide for detection of SNP TSC0054765
taagtcgtttatt

SEQ ID NO: 224674 - DNA, 13 bp, Artificial Sequence
  Oligonucleotide for detection of SNP TSC0054765
aataaacgactta

SEQ ID NO: 224675 - DNA, 13 bp, Artificial Sequence
  Oligonucleotide for detection of SNP TSC0054766
agtattgtggtta

SEQ ID NO: 224676 - DNA, 13 bp, Artificial Sequence
  Oligonucleotide for detection of SNP TSC0054766
taaccacaatact

SEQ ID NO: 224677 - DNA, 13 bp, Artificial Sequence
  Oligonucleotide for detection of SNP TSC0054766
agtattatggtta

SEQ ID NO: 224678 - DNA, 13 bp, Artificial Sequence
  Oligonucleotide for detection of SNP TSC0054766
taaccataatact

SEQ ID NO: 224679 - DNA, 13 bp, Artificial Sequence
  Oligonucleotide for detection of SNP TSC0054766
agtatcgtggtta

SEQ ID NO: 224680 - DNA, 13 bp, Artificial Sequence
  Oligonucleotide for detection of SNP TSC0054766
taaccacgatact

SEQ ID NO: 224681 - DNA, 13 bp, Artificial Sequence
  Oligonucleotide for detection of SNP TSC0054767
tttgggttaaata

SEQ ID NO: 224682 - DNA, 13 bp, Artificial Sequence
  Oligonucleotide for detection of SNP TSC0054767
tatttaacccaaa

SEQ ID NO: 224683 - DNA, 13 bp, Artificial Sequence
  Oligonucleotide for detection of SNP TSC0054767
tttgggataaata

SEQ ID NO: 224684 - DNA, 13 bp, Artificial Sequence
  Oligonucleotide for detection of SNP TSC0054767
tatttatcccaaa

SEQ ID NO: 224685 - DNA, 13 bp, Artificial Sequence
  Oligonucleotide for detection of SNP TSC0054768
aattttaaattat

SEQ ID NO: 224686 - DNA, 13 bp, Artificial Sequence
  Oligonucleotide for detection of SNP TSC0054768
ataatttaaaatt

SEQ ID NO: 224687 - DNA, 13 bp, Artificial Sequence
  Oligonucleotide for detection of SNP TSC0054768
aatttttaattat

SEQ ID NO: 224688 - DNA, 13 bp, Artificial Sequence
  Oligonucleotide for detection of SNP TSC0054768
ataattaaaaatt

SEQ ID NO: 224689 - DNA, 13 bp, Artificial Sequence
  Oligonucleotide for detection of SNP TSC0054768
ataatttaaagtt

SEQ ID NO: 224690 - DNA, 13 bp, Artificial Sequence
  Oligonucleotide for detection of SNP TSC0054768
aactttaaattat

SEQ ID NO: 224691 - DNA, 13 bp, Artificial Sequence
  Oligonucleotide for detection of SNP TSC0054768
ataattgaaagtt

SEQ ID NO: 224692 - DNA, 13 bp, Artificial Sequence
  Oligonucleotide for detection of SNP TSC0054768
aactttcaattat

SEQ ID NO: 224693 - DNA, 13 bp, Artificial Sequence
  Oligonucleotide for detection of SNP TSC0054769
agggtgaaagttt

SEQ ID NO: 224694 - DNA, 13 bp, Artificial Sequence
  Oligonucleotide for detection of SNP TSC0054769
aaactttcaccct

SEQ ID NO: 224695 - DNA, 13 bp, Artificial Sequence
  Oligonucleotide for detection of SNP TSC0054769
agggtggaagttt

SEQ ID NO: 224696 - DNA, 13 bp, Artificial Sequence
  Oligonucleotide for detection of SNP TSC0054769
aaacttccaccct

SEQ ID NO: 224697 - DNA, 13 bp, Artificial Sequence
  Oligonucleotide for detection of SNP TSC0054770
aaggaaatttgta

SEQ ID NO: 224698 - DNA, 13 bp, Artificial Sequence
  Oligonucleotide for detection of SNP TSC0054770
tacaaatttcctt

SEQ ID NO: 224699 - DNA, 13 bp, Artificial Sequence
  Oligonucleotide for detection of SNP TSC0054770
aaggaattttgta

SEQ ID NO: 224700 - DNA, 13 bp, Artificial Sequence
  Oligonucleotide for detection of SNP TSC0054770
tacaaaattcctt

SEQ ID NO: 224701 - DNA, 13 bp, Artificial Sequence
  Oligonucleotide for detection of SNP TSC0054770
tataagttttttt

SEQ ID NO: 224702 - DNA, 13 bp, Artificial Sequence
  Oligonucleotide for detection of SNP TSC0054770
aaaaaaacttata

SEQ ID NO: 224703 - DNA, 13 bp, Artificial Sequence
  Oligonucleotide for detection of SNP TSC0054770
tataaggtttttt

SEQ ID NO: 224704 - DNA, 13 bp, Artificial Sequence
  Oligonucleotide for detection of SNP TSC0054770
aaaaaaccttata

SEQ ID NO: 224705 - DNA, 13 bp, Artificial Sequence
  Oligonucleotide for detection of SNP TSC0054773
tttgttagagtat

SEQ ID NO: 224706 - DNA, 13 bp, Artificial Sequence
  Oligonucleotide for detection of SNP TSC0054773
atactctaacaaa

SEQ ID NO: 224707 - DNA, 13 bp, Artificial Sequence
  Oligonucleotide for detection of SNP TSC0054773
tttgtttgagtat

SEQ ID NO: 224708 - DNA, 13 bp, Artificial Sequence
  Oligonucleotide for detection of SNP TSC0054773
atactcaaacaaa

SEQ ID NO: 224709 - DNA, 13 bp, Artificial Sequence
  Oligonucleotide for detection of SNP TSC0054773
atatttaagtaaa

SEQ ID NO: 224710 - DNA, 13 bp, Artificial Sequence
  Oligonucleotide for detection of SNP TSC0054773
tttacttaaatat

SEQ ID NO: 224711 - DNA, 13 bp, Artificial Sequence
  Oligonucleotide for detection of SNP TSC0054774
gtggtatgaagta

SEQ ID NO: 224712 - DNA, 13 bp, Artificial Sequence
  Oligonucleotide for detection of SNP TSC0054774
tacttcataccac

SEQ ID NO: 224713 - DNA, 13 bp, Artificial Sequence
  Oligonucleotide for detection of SNP TSC0054774
gtggtacgaagta

SEQ ID NO: 224714 - DNA, 13 bp, Artificial Sequence
  Oligonucleotide for detection of SNP TSC0054774
tacttcgtaccac

SEQ ID NO: 224715 - DNA, 13 bp, Artificial Sequence
  Oligonucleotide for detection of SNP TSC0054778
aagggtagaatta

SEQ ID NO: 224716 - DNA, 13 bp, Artificial Sequence
  Oligonucleotide for detection of SNP TSC0054778
taattctaccctt

SEQ ID NO: 224717 - DNA, 13 bp, Artificial Sequence
  Oligonucleotide for detection of SNP TSC0054778
aagggtggaatta

SEQ ID NO: 224718 - DNA, 13 bp, Artificial Sequence
  Oligonucleotide for detection of SNP TSC0054778
taattccaccctt

SEQ ID NO: 224719 - DNA, 13 bp, Artificial Sequence
  Oligonucleotide for detection of SNP TSC0054781
gtattgtgaaaaa

SEQ ID NO: 224720 - DNA, 13 bp, Artificial Sequence
  Oligonucleotide for detection of SNP TSC0054781
tttttcacaatac

SEQ ID NO: 224721 - DNA, 13 bp, Artificial Sequence
  Oligonucleotide for detection of SNP TSC0054781
gtattgggaaaaa

SEQ ID NO: 224722 - DNA, 13 bp, Artificial Sequence
  Oligonucleotide for detection of SNP TSC0054781
tttttcccaatac

SEQ ID NO: 224723 - DNA, 13 bp, Artificial Sequence
  Oligonucleotide for detection of SNP TSC0054782
ggttatatatagt

SEQ ID NO: 224724 - DNA, 13 bp, Artificial Sequence
  Oligonucleotide for detection of SNP TSC0054782
actatatataacc

SEQ ID NO: 224725 - DNA, 13 bp, Artificial Sequence
  Oligonucleotide for detection of SNP TSC0054782
ggttatgtatagt

SEQ ID NO: 224726 - DNA, 13 bp, Artificial Sequence
  Oligonucleotide for detection of SNP TSC0054782
actatacataacc

SEQ ID NO: 224727 - DNA, 13 bp, Artificial Sequence
  Oligonucleotide for detection of SNP TSC0054783
aaagtgatggaat

SEQ ID NO: 224728 - DNA, 13 bp, Artificial Sequence
  Oligonucleotide for detection of SNP TSC0054783
attccatcacttt

SEQ ID NO: 224729 - DNA, 13 bp, Artificial Sequence
  Oligonucleotide for detection of SNP TSC0054783
aaagtgttggaat

SEQ ID NO: 224730 - DNA, 13 bp, Artificial Sequence
  Oligonucleotide for detection of SNP TSC0054783
attccaacacttt

SEQ ID NO: 224731 - DNA, 13 bp, Artificial Sequence
  Oligonucleotide for detection of SNP TSC0054784
ataaaatgatata

SEQ ID NO: 224732 - DNA, 13 bp, Artificial Sequence
  Oligonucleotide for detection of SNP TSC0054784
tatatcattttat

SEQ ID NO: 224733 - DNA, 13 bp, Artificial Sequence
  Oligonucleotide for detection of SNP TSC0054784
ataaaacgatata

SEQ ID NO: 224734 - DNA, 13 bp, Artificial Sequence
  Oligonucleotide for detection of SNP TSC0054784
tatatcgttttat

SEQ ID NO: 224735 - DNA, 13 bp, Artificial Sequence
  Oligonucleotide for detection of SNP TSC0054784
tgtattgttttat

SEQ ID NO: 224736 - DNA, 13 bp, Artificial Sequence
  Oligonucleotide for detection of SNP TSC0054784
ataaaacaataca

SEQ ID NO: 224737 - DNA, 13 bp, Artificial Sequence
  Oligonucleotide for detection of SNP TSC0054784
tgtattattttat

SEQ ID NO: 224738 - DNA, 13 bp, Artificial Sequence
  Oligonucleotide for detection of SNP TSC0054784
ataaaataataca

SEQ ID NO: 224739 - DNA, 13 bp, Artificial Sequence
  Oligonucleotide for detection of SNP TSC0054784
tgtatcgttttat

SEQ ID NO: 224740 - DNA, 13 bp, Artificial Sequence
  Oligonucleotide for detection of SNP TSC0054784
ataaaacgataca

SEQ ID NO: 224741 - DNA, 13 bp, Artificial Sequence
  Oligonucleotide for detection of SNP TSC0054785
ttaagagatttay

SEQ ID NO: 224742 - DNA, 13 bp, Artificial Sequence
  Oligonucleotide for detection of SNP TSC0054785
rtaaatctcttaa

SEQ ID NO: 224743 - DNA, 13 bp, Artificial Sequence
  Oligonucleotide for detection of SNP TSC0054785
ttaagaaatttay

SEQ ID NO: 224744 - DNA, 13 bp, Artificial Sequence
  Oligonucleotide for detection of SNP TSC0054785
rtaaatttcttaa

SEQ ID NO: 224745 - DNA, 13 bp, Artificial Sequence
  Oligonucleotide for detection of SNP TSC0054786
atagtattgtgag

SEQ ID NO: 224746 - DNA, 13 bp, Artificial Sequence
  Oligonucleotide for detection of SNP TSC0054786
ctcacaatactat

SEQ ID NO: 224747 - DNA, 13 bp, Artificial Sequence
  Oligonucleotide for detection of SNP TSC0054786
atagtagtgtgag

SEQ ID NO: 224748 - DNA, 13 bp, Artificial Sequence
  Oligonucleotide for detection of SNP TSC0054786
ctcacactactat

SEQ ID NO: 224749 - DNA, 13 bp, Artificial Sequence
  Oligonucleotide for detection of SNP TSC0054786
atagtatcgtgag

SEQ ID NO: 224750 - DNA, 13 bp, Artificial Sequence
  Oligonucleotide for detection of SNP TSC0054786
ctcacgatactat

SEQ ID NO: 224751 - DNA, 13 bp, Artificial Sequence
  Oligonucleotide for detection of SNP TSC0054786
atagtagcgtgag

SEQ ID NO: 224752 - DNA, 13 bp, Artificial Sequence
  Oligonucleotide for detection of SNP TSC0054786
ctcacgctactat

SEQ ID NO: 224753 - DNA, 13 bp, Artificial Sequence
  Oligonucleotide for detection of SNP TSC0054786
tttatgatgttat

SEQ ID NO: 224754 - DNA, 13 bp, Artificial Sequence
  Oligonucleotide for detection of SNP TSC0054786
ataacatcataaa

SEQ ID NO: 224755 - DNA, 13 bp, Artificial Sequence
  Oligonucleotide for detection of SNP TSC0054786
tttatgttgttat

SEQ ID NO: 224756 - DNA, 13 bp, Artificial Sequence
  Oligonucleotide for detection of SNP TSC0054786
ataacaacataaa

SEQ ID NO: 224757 - DNA, 13 bp, Artificial Sequence
  Oligonucleotide for detection of SNP TSC0054786
tttacgatgttat

SEQ ID NO: 224758 - DNA, 13 bp, Artificial Sequence
  Oligonucleotide for detection of SNP TSC0054786
ataacatcgtaaa

SEQ ID NO: 224759 - DNA, 13 bp, Artificial Sequence
  Oligonucleotide for detection of SNP TSC0054786
tttacgttgttat

SEQ ID NO: 224760 - DNA, 13 bp, Artificial Sequence
  Oligonucleotide for detection of SNP TSC0054786
ataacaacgtaaa

SEQ ID NO: 224761 - DNA, 13 bp, Artificial Sequence
  Oligonucleotide for detection of SNP TSC0054787
tggaaggtattgy

SEQ ID NO: 224762 - DNA, 13 bp, Artificial Sequence
  Oligonucleotide for detection of SNP TSC0054787
rcaataccttcca

SEQ ID NO: 224763 - DNA, 13 bp, Artificial Sequence
  Oligonucleotide for detection of SNP TSC0054787
tggaagatattgy

SEQ ID NO: 224764 - DNA, 13 bp, Artificial Sequence
  Oligonucleotide for detection of SNP TSC0054787
rcaatatcttcca

SEQ ID NO: 224765 - DNA, 13 bp, Artificial Sequence
  Oligonucleotide for detection of SNP TSC0054788
gggttttgttgtg

SEQ ID NO: 224766 - DNA, 13 bp, Artificial Sequence
  Oligonucleotide for detection of SNP TSC0054788
cacaacaaaaccc

SEQ ID NO: 224767 - DNA, 13 bp, Artificial Sequence
  Oligonucleotide for detection of SNP TSC0054788
gggtttcgttgtg

SEQ ID NO: 224768 - DNA, 13 bp, Artificial Sequence
  Oligonucleotide for detection of SNP TSC0054788
cacaacgaaaccc

SEQ ID NO: 224769 - DNA, 13 bp, Artificial Sequence
  Oligonucleotide for detection of SNP TSC0054788
gggttttgtcgtg

SEQ ID NO: 224770 - DNA, 13 bp, Artificial Sequence
  Oligonucleotide for detection of SNP TSC0054788
cacgacaaaaccc

SEQ ID NO: 224771 - DNA, 13 bp, Artificial Sequence
  Oligonucleotide for detection of SNP TSC0054788
gggtttcgtcgtg

SEQ ID NO: 224772 - DNA, 13 bp, Artificial Sequence
  Oligonucleotide for detection of SNP TSC0054788
cacgacgaaaccc

SEQ ID NO: 224773 - DNA, 13 bp, Artificial Sequence
  Oligonucleotide for detection of SNP TSC0054788
tacggcgaaatty

SEQ ID NO: 224774 - DNA, 13 bp, Artificial Sequence
  Oligonucleotide for detection of SNP TSC0054788
raatttcgccgta

SEQ ID NO: 224775 - DNA, 13 bp, Artificial Sequence
  Oligonucleotide for detection of SNP TSC0054789
tagggtgggtaaa

SEQ ID NO: 224776 - DNA, 13 bp, Artificial Sequence
  Oligonucleotide for detection of SNP TSC0054789
tttacccacccta

SEQ ID NO: 224777 - DNA, 13 bp, Artificial Sequence
  Oligonucleotide for detection of SNP TSC0054789
tagggtaggtaaa

SEQ ID NO: 224778 - DNA, 13 bp, Artificial Sequence
  Oligonucleotide for detection of SNP TSC0054789
tttacctacccta

SEQ ID NO: 224779 - DNA, 13 bp, Artificial Sequence
  Oligonucleotide for detection of SNP TSC0054789
tagggcgggtaaa

SEQ ID NO: 224780 - DNA, 13 bp, Artificial Sequence
  Oligonucleotide for detection of SNP TSC0054789
tttacccgcccta

SEQ ID NO: 224781 - DNA, 13 bp, Artificial Sequence
  Oligonucleotide for detection of SNP TSC0054794
agtgaatggaaga

SEQ ID NO: 224782 - DNA, 13 bp, Artificial Sequence
  Oligonucleotide for detection of SNP TSC0054794
tcttccattcact

SEQ ID NO: 224783 - DNA, 13 bp, Artificial Sequence
  Oligonucleotide for detection of SNP TSC0054794
agtgaacggaaga

SEQ ID NO: 224784 - DNA, 13 bp, Artificial Sequence
  Oligonucleotide for detection of SNP TSC0054794
tcttccgttcact

SEQ ID NO: 224785 - DNA, 13 bp, Artificial Sequence
  Oligonucleotide for detection of SNP TSC0009423
tgagttatagaaa

SEQ ID NO: 224786 - DNA, 13 bp, Artificial Sequence
  Oligonucleotide for detection of SNP TSC0009423
tttctataactca

SEQ ID NO: 224787 - DNA, 13 bp, Artificial Sequence
  Oligonucleotide for detection of SNP TSC0009423
tgagttgtagaaa

SEQ ID NO: 224788 - DNA, 13 bp, Artificial Sequence
  Oligonucleotide for detection of SNP TSC0009423
tttctacaactca

SEQ ID NO: 224789 - DNA, 13 bp, Artificial Sequence
  Oligonucleotide for detection of SNP TSC0009423
tgagtcgtagaaa

SEQ ID NO: 224790 - DNA, 13 bp, Artificial Sequence
  Oligonucleotide for detection of SNP TSC0009423
tttctacgactca

SEQ ID NO: 224791 - DNA, 13 bp, Artificial Sequence
  Oligonucleotide for detection of SNP TSC0009423
tttttgtggttta

SEQ ID NO: 224792 - DNA, 13 bp, Artificial Sequence
  Oligonucleotide for detection of SNP TSC0009423
taaaccacaaaaa

SEQ ID NO: 224793 - DNA, 13 bp, Artificial Sequence
  Oligonucleotide for detection of SNP TSC0009423
tttttgcggttta

SEQ ID NO: 224794 - DNA, 13 bp, Artificial Sequence
  Oligonucleotide for detection of SNP TSC0009423
taaaccgcaaaaa

SEQ ID NO: 224795 - DNA, 13 bp, Artificial Sequence
  Oligonucleotide for detection of SNP TSC0054799
tttgttatgtgaa

SEQ ID NO: 224796 - DNA, 13 bp, Artificial Sequence
  Oligonucleotide for detection of SNP TSC0054799
ttcacataacaaa

SEQ ID NO: 224797 - DNA, 13 bp, Artificial Sequence
  Oligonucleotide for detection of SNP TSC0054799
tttgttgtgtgaa

SEQ ID NO: 224798 - DNA, 13 bp, Artificial Sequence
  Oligonucleotide for detection of SNP TSC0054799
ttcacacaacaaa

SEQ ID NO: 224799 - DNA, 13 bp, Artificial Sequence
  Oligonucleotide for detection of SNP TSC0054799
tttgtcgtgtgaa

SEQ ID NO: 224800 - DNA, 13 bp, Artificial Sequence
  Oligonucleotide for detection of SNP TSC0054799
ttcacacgacaaa

SEQ ID NO: 224801 - DNA, 13 bp, Artificial Sequence
  Oligonucleotide for detection of SNP TSC0054799
tttatatggtaaa

SEQ ID NO: 224802 - DNA, 13 bp, Artificial Sequence
  Oligonucleotide for detection of SNP TSC0054799
tttaccatataaa

SEQ ID NO: 224803 - DNA, 13 bp, Artificial Sequence
  Oligonucleotide for detection of SNP TSC0054799
tttatacggtaaa

SEQ ID NO: 224804 - DNA, 13 bp, Artificial Sequence
  Oligonucleotide for detection of SNP TSC0054799
tttaccgtataaa

SEQ ID NO: 224805 - DNA, 13 bp, Artificial Sequence
  Oligonucleotide for detection of SNP TSC0054801
ttttaaatgttta

SEQ ID NO: 224806 - DNA, 13 bp, Artificial Sequence
  Oligonucleotide for detection of SNP TSC0054801
taaacatttaaaa

SEQ ID NO: 224807 - DNA, 13 bp, Artificial Sequence
  Oligonucleotide for detection of SNP TSC0054801
ttttaagtgttta

SEQ ID NO: 224808 - DNA, 13 bp, Artificial Sequence
  Oligonucleotide for detection of SNP TSC0054801
taaacacttaaaa

SEQ ID NO: 224809 - DNA, 13 bp, Artificial Sequence
  Oligonucleotide for detection of SNP TSC0054802
gatattattattg

SEQ ID NO: 224810 - DNA, 13 bp, Artificial Sequence
  Oligonucleotide for detection of SNP TSC0054802
caataataatatc

SEQ ID NO: 224811 - DNA, 13 bp, Artificial Sequence
  Oligonucleotide for detection of SNP TSC0054802
gatatttttattg

SEQ ID NO: 224812 - DNA, 13 bp, Artificial Sequence
  Oligonucleotide for detection of SNP TSC0054802
caataaaaatatc

SEQ ID NO: 224813 - DNA, 13 bp, Artificial Sequence
  Oligonucleotide for detection of SNP TSC0054802
taataatagtgty

SEQ ID NO: 224814 - DNA, 13 bp, Artificial Sequence
  Oligonucleotide for detection of SNP TSC0054802
racactattatta

SEQ ID NO: 224815 - DNA, 13 bp, Artificial Sequence
  Oligonucleotide for detection of SNP TSC0054802
taataaaagtgty

SEQ ID NO: 224816 - DNA, 13 bp, Artificial Sequence
  Oligonucleotide for detection of SNP TSC0054802
racacttttatta

SEQ ID NO: 224817 - DNA, 13 bp, Artificial Sequence
  Oligonucleotide for detection of SNP TSC0054806
tagataaaattag

SEQ ID NO: 224818 - DNA, 13 bp, Artificial Sequence
  Oligonucleotide for detection of SNP TSC0054806
ctaattttatcta

SEQ ID NO: 224819 - DNA, 13 bp, Artificial Sequence
  Oligonucleotide for detection of SNP TSC0054806
tagatataattag

SEQ ID NO: 224820 - DNA, 13 bp, Artificial Sequence
  Oligonucleotide for detection of SNP TSC0054806
ctaattatatcta

SEQ ID NO: 224821 - DNA, 13 bp, Artificial Sequence
  Oligonucleotide for detection of SNP TSC0054806
ttagttttatttg

SEQ ID NO: 224822 - DNA, 13 bp, Artificial Sequence
  Oligonucleotide for detection of SNP TSC0054806
caaataaaactaa

SEQ ID NO: 224823 - DNA, 13 bp, Artificial Sequence
  Oligonucleotide for detection of SNP TSC0054806
ttagttgtatttg

SEQ ID NO: 224824 - DNA, 13 bp, Artificial Sequence
  Oligonucleotide for detection of SNP TSC0054806
caaatacaactaa

SEQ ID NO: 224825 - DNA, 13 bp, Artificial Sequence
  Oligonucleotide for detection of SNP TSC0054807
tgatgtgaggtag

SEQ ID NO: 224826 - DNA, 13 bp, Artificial Sequence
  Oligonucleotide for detection of SNP TSC0054807
ctacctcacatca

SEQ ID NO: 224827 - DNA, 13 bp, Artificial Sequence
  Oligonucleotide for detection of SNP TSC0054807
tgatgtaaggtag

SEQ ID NO: 224828 - DNA, 13 bp, Artificial Sequence
  Oligonucleotide for detection of SNP TSC0054807
ctaccttacatca

SEQ ID NO: 224829 - DNA, 13 bp, Artificial Sequence
  Oligonucleotide for detection of SNP TSC0054807
tgacgtgaggtag

SEQ ID NO: 224830 - DNA, 13 bp, Artificial Sequence
  Oligonucleotide for detection of SNP TSC0054807
ctacctcacgtca

SEQ ID NO: 224831 - DNA, 13 bp, Artificial Sequence
  Oligonucleotide for detection of SNP TSC0054807
tgacgtaaggtag

SEQ ID NO: 224832 - DNA, 13 bp, Artificial Sequence
  Oligonucleotide for detection of SNP TSC0054807
ctaccttacgtca

SEQ ID NO: 224833 - DNA, 13 bp, Artificial Sequence
  Oligonucleotide for detection of SNP TSC0054808
aaagataaaaaag

SEQ ID NO: 224834 - DNA, 13 bp, Artificial Sequence
  Oligonucleotide for detection of SNP TSC0054808
cttttttatcttt

SEQ ID NO: 224835 - DNA, 13 bp, Artificial Sequence
  Oligonucleotide for detection of SNP TSC0054808
aaagatgaaaaag

SEQ ID NO: 224836 - DNA, 13 bp, Artificial Sequence
  Oligonucleotide for detection of SNP TSC0054808
ctttttcatcttt

SEQ ID NO: 224837 - DNA, 13 bp, Artificial Sequence
  Oligonucleotide for detection of SNP TSC0054808
aaagacgaaaaag

SEQ ID NO: 224838 - DNA, 13 bp, Artificial Sequence
  Oligonucleotide for detection of SNP TSC0054808
ctttttcgtcttt

SEQ ID NO: 224839 - DNA, 13 bp, Artificial Sequence
  Oligonucleotide for detection of SNP TSC0054811
tatgtagaatagt

SEQ ID NO: 224840 - DNA, 13 bp, Artificial Sequence
  Oligonucleotide for detection of SNP TSC0054811
actattctacata

SEQ ID NO: 224841 - DNA, 13 bp, Artificial Sequence
  Oligonucleotide for detection of SNP TSC0054811
tatgtaaaatagt

SEQ ID NO: 224842 - DNA, 13 bp, Artificial Sequence
  Oligonucleotide for detection of SNP TSC0054811
actattttacata

SEQ ID NO: 224843 - DNA, 13 bp, Artificial Sequence
  Oligonucleotide for detection of SNP TSC0054813
gagagatttgaaa

SEQ ID NO: 224844 - DNA, 13 bp, Artificial Sequence
  Oligonucleotide for detection of SNP TSC0054813
tttcaaatctctc

SEQ ID NO: 224845 - DNA, 13 bp, Artificial Sequence
  Oligonucleotide for detection of SNP TSC0054813
gagagaattgaaa

SEQ ID NO: 224846 - DNA, 13 bp, Artificial Sequence
  Oligonucleotide for detection of SNP TSC0054813
tttcaattctctc

SEQ ID NO: 224847 - DNA, 13 bp, Artificial Sequence
  Oligonucleotide for detection of SNP TSC0054814
agtttttgggggt

SEQ ID NO: 224848 - DNA, 13 bp, Artificial Sequence
  Oligonucleotide for detection of SNP TSC0054814
acccccaaaaact

SEQ ID NO: 224849 - DNA, 13 bp, Artificial Sequence
  Oligonucleotide for detection of SNP TSC0054814
agttttggggggt

SEQ ID NO: 224850 - DNA, 13 bp, Artificial Sequence
  Oligonucleotide for detection of SNP TSC0054814
accccccaaaact

SEQ ID NO: 224851 - DNA, 13 bp, Artificial Sequence
  Oligonucleotide for detection of SNP TSC0054815
ttatatatatagy

SEQ ID NO: 224852 - DNA, 13 bp, Artificial Sequence
  Oligonucleotide for detection of SNP TSC0054815
rctatatatataa

SEQ ID NO: 224853 - DNA, 13 bp, Artificial Sequence
  Oligonucleotide for detection of SNP TSC0054815
ttatatgtatagy

SEQ ID NO: 224854 - DNA, 13 bp, Artificial Sequence
  Oligonucleotide for detection of SNP TSC0054815
rctatacatataa

SEQ ID NO: 224855 - DNA, 13 bp, Artificial Sequence
  Oligonucleotide for detection of SNP TSC0054817
taagtaattaatt

SEQ ID NO: 224856 - DNA, 13 bp, Artificial Sequence
  Oligonucleotide for detection of SNP TSC0054817
aattaattactta

SEQ ID NO: 224857 - DNA, 13 bp, Artificial Sequence
  Oligonucleotide for detection of SNP TSC0054817
taagtatttaatt

SEQ ID NO: 224858 - DNA, 13 bp, Artificial Sequence
  Oligonucleotide for detection of SNP TSC0054817
aattaaatactta

SEQ ID NO: 224859 - DNA, 13 bp, Artificial Sequence
  Oligonucleotide for detection of SNP TSC0054817
agttggttattta

SEQ ID NO: 224860 - DNA, 13 bp, Artificial Sequence
  Oligonucleotide for detection of SNP TSC0054817
taaataaccaact

SEQ ID NO: 224861 - DNA, 13 bp, Artificial Sequence
  Oligonucleotide for detection of SNP TSC0054817
agttgggtattta

SEQ ID NO: 224862 - DNA, 13 bp, Artificial Sequence
  Oligonucleotide for detection of SNP TSC0054817
taaatacccaact

SEQ ID NO: 224863 - DNA, 13 bp, Artificial Sequence
  Oligonucleotide for detection of SNP TSC0054818
atatgagttttgt

SEQ ID NO: 224864 - DNA, 13 bp, Artificial Sequence
  Oligonucleotide for detection of SNP TSC0054818
acaaaactcatat

SEQ ID NO: 224865 - DNA, 13 bp, Artificial Sequence
  Oligonucleotide for detection of SNP TSC0054818
atatgaattttgt

SEQ ID NO: 224866 - DNA, 13 bp, Artificial Sequence
  Oligonucleotide for detection of SNP TSC0054818
acaaaattcatat

SEQ ID NO: 224867 - DNA, 13 bp, Artificial Sequence
  Oligonucleotide for detection of SNP TSC0054819
tgtgagttagtgg

SEQ ID NO: 224868 - DNA, 13 bp, Artificial Sequence
  Oligonucleotide for detection of SNP TSC0054819
ccactaactcaca

SEQ ID NO: 224869 - DNA, 13 bp, Artificial Sequence
  Oligonucleotide for detection of SNP TSC0054819
tgtgaggtagtgg

SEQ ID NO: 224870 - DNA, 13 bp, Artificial Sequence
  Oligonucleotide for detection of SNP TSC0054819
ccactacctcaca

SEQ ID NO: 224871 - DNA, 13 bp, Artificial Sequence
  Oligonucleotide for detection of SNP TSC0054819
ttattaatttata

SEQ ID NO: 224872 - DNA, 13 bp, Artificial Sequence
  Oligonucleotide for detection of SNP TSC0054819
tataaattaataa

SEQ ID NO: 224873 - DNA, 13 bp, Artificial Sequence
  Oligonucleotide for detection of SNP TSC0054819
ttattattttata

SEQ ID NO: 224874 - DNA, 13 bp, Artificial Sequence
  Oligonucleotide for detection of SNP TSC0054819
tataaaataataa

SEQ ID NO: 224875 - DNA, 13 bp, Artificial Sequence
  Oligonucleotide for detection of SNP TSC0005474
atttgtataattt

SEQ ID NO: 224876 - DNA, 13 bp, Artificial Sequence
  Oligonucleotide for detection of SNP TSC0005474
aaattatacaaat

SEQ ID NO: 224877 - DNA, 13 bp, Artificial Sequence
  Oligonucleotide for detection of SNP TSC0005474
atttgtgtaattt

SEQ ID NO: 224878 - DNA, 13 bp, Artificial Sequence
  Oligonucleotide for detection of SNP TSC0005474
aaattacacaaat

SEQ ID NO: 224879 - DNA, 13 bp, Artificial Sequence
  Oligonucleotide for detection of SNP TSC0005474
atttgcgtaattt

SEQ ID NO: 224880 - DNA, 13 bp, Artificial Sequence
  Oligonucleotide for detection of SNP TSC0005474
aaattacgcaaat

SEQ ID NO: 224881 - DNA, 13 bp, Artificial Sequence
  Oligonucleotide for detection of SNP TSC0005474
aagttatgtaggt

SEQ ID NO: 224882 - DNA, 13 bp, Artificial Sequence
  Oligonucleotide for detection of SNP TSC0005474
acctacataactt

SEQ ID NO: 224883 - DNA, 13 bp, Artificial Sequence
  Oligonucleotide for detection of SNP TSC0005474
aagttacgtaggt

SEQ ID NO: 224884 - DNA, 13 bp, Artificial Sequence
  Oligonucleotide for detection of SNP TSC0005474
acctacgtaactt

SEQ ID NO: 224885 - DNA, 13 bp, Artificial Sequence
  Oligonucleotide for detection of SNP TSC0005475
ttataaattttag

SEQ ID NO: 224886 - DNA, 13 bp, Artificial Sequence
  Oligonucleotide for detection of SNP TSC0005475
ctaaaatttataa

SEQ ID NO: 224887 - DNA, 13 bp, Artificial Sequence
  Oligonucleotide for detection of SNP TSC0005475
ttataatttttag

SEQ ID NO: 224888 - DNA, 13 bp, Artificial Sequence
  Oligonucleotide for detection of SNP TSC0005475
ctaaaaattataa

SEQ ID NO: 224889 - DNA, 13 bp, Artificial Sequence
  Oligonucleotide for detection of SNP TSC0005475
ttaaaatttatga

SEQ ID NO: 224890 - DNA, 13 bp, Artificial Sequence
  Oligonucleotide for detection of SNP TSC0005475
tcataaattttaa

SEQ ID NO: 224891 - DNA, 13 bp, Artificial Sequence
  Oligonucleotide for detection of SNP TSC0005475
ttaaaagttatga

SEQ ID NO: 224892 - DNA, 13 bp, Artificial Sequence
  Oligonucleotide for detection of SNP TSC0005475
tcataacttttaa

SEQ ID NO: 224893 - DNA, 13 bp, Artificial Sequence
  Oligonucleotide for detection of SNP TSC0005476
agtgataataatt

SEQ ID NO: 224894 - DNA, 13 bp, Artificial Sequence
  Oligonucleotide for detection of SNP TSC0005476
aattattatcact

SEQ ID NO: 224895 - DNA, 13 bp, Artificial Sequence
  Oligonucleotide for detection of SNP TSC0005476
agtgatgataatt

SEQ ID NO: 224896 - DNA, 13 bp, Artificial Sequence
  Oligonucleotide for detection of SNP TSC0005476
aattatcatcact

SEQ ID NO: 224897 - DNA, 13 bp, Artificial Sequence
  Oligonucleotide for detection of SNP TSC0005476
agtgacgataatt

SEQ ID NO: 224898 - DNA, 13 bp, Artificial Sequence
  Oligonucleotide for detection of SNP TSC0005476
aattatcgtcact

SEQ ID NO: 224899 - DNA, 13 bp, Artificial Sequence
  Oligonucleotide for detection of SNP TSC0005476
agttattgttatt

SEQ ID NO: 224900 - DNA, 13 bp, Artificial Sequence
  Oligonucleotide for detection of SNP TSC0005476
aataacaataact

SEQ ID NO: 224901 - DNA, 13 bp, Artificial Sequence
  Oligonucleotide for detection of SNP TSC0005476
agttatcgttatt

SEQ ID NO: 224902 - DNA, 13 bp, Artificial Sequence
  Oligonucleotide for detection of SNP TSC0005476
aataacgataact

SEQ ID NO: 224903 - DNA, 13 bp, Artificial Sequence
  Oligonucleotide for detection of SNP TSC0009036
atttgaaggtagg

SEQ ID NO: 224904 - DNA, 13 bp, Artificial Sequence
  Oligonucleotide for detection of SNP TSC0009036
cctaccttcaaat

SEQ ID NO: 224905 - DNA, 13 bp, Artificial Sequence
  Oligonucleotide for detection of SNP TSC0009036
atttgagggtagg

SEQ ID NO: 224906 - DNA, 13 bp, Artificial Sequence
  Oligonucleotide for detection of SNP TSC0009036
cctaccctcaaat

SEQ ID NO: 224907 - DNA, 13 bp, Artificial Sequence
  Oligonucleotide for detection of SNP TSC0054825
gatgttaataaay

SEQ ID NO: 224908 - DNA, 13 bp, Artificial Sequence
  Oligonucleotide for detection of SNP TSC0054825
rtttattaacatc

SEQ ID NO: 224909 - DNA, 13 bp, Artificial Sequence
  Oligonucleotide for detection of SNP TSC0054825
gatgtttataaay

SEQ ID NO: 224910 - DNA, 13 bp, Artificial Sequence
  Oligonucleotide for detection of SNP TSC0054825
rtttataaacatc

SEQ ID NO: 224911 - DNA, 13 bp, Artificial Sequence
  Oligonucleotide for detection of SNP TSC0054825
gtttattagtaty

SEQ ID NO: 224912 - DNA, 13 bp, Artificial Sequence
  Oligonucleotide for detection of SNP TSC0054825
ratactaataaac

SEQ ID NO: 224913 - DNA, 13 bp, Artificial Sequence
  Oligonucleotide for detection of SNP TSC0054825
gtttatgagtaty

SEQ ID NO: 224914 - DNA, 13 bp, Artificial Sequence
  Oligonucleotide for detection of SNP TSC0054825
ratactcataaac

SEQ ID NO: 224915 - DNA, 13 bp, Artificial Sequence
  Oligonucleotide for detection of SNP TSC0054826
aagaggaaaagaa

SEQ ID NO: 224916 - DNA, 13 bp, Artificial Sequence
  Oligonucleotide for detection of SNP TSC0054826
ttcttttcctctt

SEQ ID NO: 224917 - DNA, 13 bp, Artificial Sequence
  Oligonucleotide for detection of SNP TSC0054826
aagaggtaaagaa

SEQ ID NO: 224918 - DNA, 13 bp, Artificial Sequence
  Oligonucleotide for detection of SNP TSC0054826
ttctttacctctt

SEQ ID NO: 224919 - DNA, 13 bp, Artificial Sequence
  Oligonucleotide for detection of SNP TSC0054829
gtaaaagtatttt

SEQ ID NO: 224920 - DNA, 13 bp, Artificial Sequence
  Oligonucleotide for detection of SNP TSC0054829
aaaatacttttac

SEQ ID NO: 224921 - DNA, 13 bp, Artificial Sequence
  Oligonucleotide for detection of SNP TSC0054829
gtaaaaatatttt

SEQ ID NO: 224922 - DNA, 13 bp, Artificial Sequence
  Oligonucleotide for detection of SNP TSC0054829
aaaatatttttac

SEQ ID NO: 224923 - DNA, 13 bp, Artificial Sequence
  Oligonucleotide for detection of SNP TSC0054834
ggaggatggtttg

SEQ ID NO: 224924 - DNA, 13 bp, Artificial Sequence
  Oligonucleotide for detection of SNP TSC0054834
caaaccatcctcc

SEQ ID NO: 224925 - DNA, 13 bp, Artificial Sequence
  Oligonucleotide for detection of SNP TSC0054834
ggaggacggtttg

SEQ ID NO: 224926 - DNA, 13 bp, Artificial Sequence
  Oligonucleotide for detection of SNP TSC0054834
caaaccgtcctcc

SEQ ID NO: 224927 - DNA, 13 bp, Artificial Sequence
  Oligonucleotide for detection of SNP TSC0054835
gttaaatgtgaag

SEQ ID NO: 224928 - DNA, 13 bp, Artificial Sequence
  Oligonucleotide for detection of SNP TSC0054835
cttcacatttaac

SEQ ID NO: 224929 - DNA, 13 bp, Artificial Sequence
  Oligonucleotide for detection of SNP TSC0054835
gttaaaggtgaag

SEQ ID NO: 224930 - DNA, 13 bp, Artificial Sequence
  Oligonucleotide for detection of SNP TSC0054835
cttcacctttaac

SEQ ID NO: 224931 - DNA, 13 bp, Artificial Sequence
  Oligonucleotide for detection of SNP TSC0054836
gttttataaaaaa

SEQ ID NO: 224932 - DNA, 13 bp, Artificial Sequence
  Oligonucleotide for detection of SNP TSC0054836
ttttttataaaac

SEQ ID NO: 224933 - DNA, 13 bp, Artificial Sequence
  Oligonucleotide for detection of SNP TSC0054836
ttttttttgagay

SEQ ID NO: 224934 - DNA, 13 bp, Artificial Sequence
  Oligonucleotide for detection of SNP TSC0054836
rtctcaaaaaaaa

SEQ ID NO: 224935 - DNA, 13 bp, Artificial Sequence
  Oligonucleotide for detection of SNP TSC0054837
tggatgaaagtaa

SEQ ID NO: 224936 - DNA, 13 bp, Artificial Sequence
  Oligonucleotide for detection of SNP TSC0054837
ttactttcatcca

SEQ ID NO: 224937 - DNA, 13 bp, Artificial Sequence
  Oligonucleotide for detection of SNP TSC0054837
tggatgtaagtaa

SEQ ID NO: 224938 - DNA, 13 bp, Artificial Sequence
  Oligonucleotide for detection of SNP TSC0054837
ttacttacatcca

SEQ ID NO: 224939 - DNA, 13 bp, Artificial Sequence
  Oligonucleotide for detection of SNP TSC0054839
tattgaattgtaa

SEQ ID NO: 224940 - DNA, 13 bp, Artificial Sequence
  Oligonucleotide for detection of SNP TSC0054839
ttacaattcaata

SEQ ID NO: 224941 - DNA, 13 bp, Artificial Sequence
  Oligonucleotide for detection of SNP TSC0054839
tattgatttgtaa

SEQ ID NO: 224942 - DNA, 13 bp, Artificial Sequence
  Oligonucleotide for detection of SNP TSC0054839
ttacaaatcaata

SEQ ID NO: 224943 - DNA, 13 bp, Artificial Sequence
  Oligonucleotide for detection of SNP TSC0054839
ttataatttagtg

SEQ ID NO: 224944 - DNA, 13 bp, Artificial Sequence
  Oligonucleotide for detection of SNP TSC0054839
cactaaattataa

SEQ ID NO: 224945 - DNA, 13 bp, Artificial Sequence
  Oligonucleotide for detection of SNP TSC0054839
ttataaattagtg

SEQ ID NO: 224946 - DNA, 13 bp, Artificial Sequence
  Oligonucleotide for detection of SNP TSC0054839
cactaatttataa

SEQ ID NO: 224947 - DNA, 13 bp, Artificial Sequence
  Oligonucleotide for detection of SNP TSC0054841
agaatatgattgy

SEQ ID NO: 224948 - DNA, 13 bp, Artificial Sequence
  Oligonucleotide for detection of SNP TSC0054841
rcaatcatattct

SEQ ID NO: 224949 - DNA, 13 bp, Artificial Sequence
  Oligonucleotide for detection of SNP TSC0054841
agaatacgattgy

SEQ ID NO: 224950 - DNA, 13 bp, Artificial Sequence
  Oligonucleotide for detection of SNP TSC0054841
rcaatcgtattct

SEQ ID NO: 224951 - DNA, 13 bp, Artificial Sequence
  Oligonucleotide for detection of SNP TSC0054841
gtaattgtatttt

SEQ ID NO: 224952 - DNA, 13 bp, Artificial Sequence
  Oligonucleotide for detection of SNP TSC0054841
aaaatacaattac

SEQ ID NO: 224953 - DNA, 13 bp, Artificial Sequence
  Oligonucleotide for detection of SNP TSC0054841
gtaattatatttt

SEQ ID NO: 224954 - DNA, 13 bp, Artificial Sequence
  Oligonucleotide for detection of SNP TSC0054841
aaaatataattac

SEQ ID NO: 224955 - DNA, 13 bp, Artificial Sequence
  Oligonucleotide for detection of SNP TSC0054841
gtaatcgtatttt

SEQ ID NO: 224956 - DNA, 13 bp, Artificial Sequence
  Oligonucleotide for detection of SNP TSC0054841
aaaatacgattac

SEQ ID NO: 224957 - DNA, 13 bp, Artificial Sequence
  Oligonucleotide for detection of SNP TSC0054842
tatattatatatg

SEQ ID NO: 224958 - DNA, 13 bp, Artificial Sequence
  Oligonucleotide for detection of SNP TSC0054842
catatataatata

SEQ ID NO: 224959 - DNA, 13 bp, Artificial Sequence
  Oligonucleotide for detection of SNP TSC0054842
tatattgtatatg

SEQ ID NO: 224960 - DNA, 13 bp, Artificial Sequence
  Oligonucleotide for detection of SNP TSC0054842
catatacaatata

SEQ ID NO: 224961 - DNA, 13 bp, Artificial Sequence
  Oligonucleotide for detection of SNP TSC0054842
tatatcgtatatg

SEQ ID NO: 224962 - DNA, 13 bp, Artificial Sequence
  Oligonucleotide for detection of SNP TSC0054842
catatacgatata

SEQ ID NO: 224963 - DNA, 13 bp, Artificial Sequence
  Oligonucleotide for detection of SNP TSC0054842
tatgtgtggtgtg

SEQ ID NO: 224964 - DNA, 13 bp, Artificial Sequence
  Oligonucleotide for detection of SNP TSC0054842
cacaccacacata

SEQ ID NO: 224965 - DNA, 13 bp, Artificial Sequence
  Oligonucleotide for detection of SNP TSC0054842
tatgtgcggtgtg

SEQ ID NO: 224966 - DNA, 13 bp, Artificial Sequence
  Oligonucleotide for detection of SNP TSC0054842
cacaccgcacata

SEQ ID NO: 224967 - DNA, 13 bp, Artificial Sequence
  Oligonucleotide for detection of SNP TSC0054843
gaagtaatggaty

SEQ ID NO: 224968 - DNA, 13 bp, Artificial Sequence
  Oligonucleotide for detection of SNP TSC0054843
ratccattacttc

SEQ ID NO: 224969 - DNA, 13 bp, Artificial Sequence
  Oligonucleotide for detection of SNP TSC0054843
gaagtagtggaty

SEQ ID NO: 224970 - DNA, 13 bp, Artificial Sequence
  Oligonucleotide for detection of SNP TSC0054843
ratccactacttc

SEQ ID NO: 224971 - DNA, 13 bp, Artificial Sequence
  Oligonucleotide for detection of SNP TSC0054847
ttttatgtttagt

SEQ ID NO: 224972 - DNA, 13 bp, Artificial Sequence
  Oligonucleotide for detection of SNP TSC0054847
actaaacataaaa

SEQ ID NO: 224973 - DNA, 13 bp, Artificial Sequence
  Oligonucleotide for detection of SNP TSC0054847
ttttatatttagt

SEQ ID NO: 224974 - DNA, 13 bp, Artificial Sequence
  Oligonucleotide for detection of SNP TSC0054847
actaaatataaaa

SEQ ID NO: 224975 - DNA, 13 bp, Artificial Sequence
  Oligonucleotide for detection of SNP TSC0054848
ggaggtatagggg

SEQ ID NO: 224976 - DNA, 13 bp, Artificial Sequence
  Oligonucleotide for detection of SNP TSC0054848
cccctatacctcc

SEQ ID NO: 224977 - DNA, 13 bp, Artificial Sequence
  Oligonucleotide for detection of SNP TSC0054848
ggaggtttagggg

SEQ ID NO: 224978 - DNA, 13 bp, Artificial Sequence
  Oligonucleotide for detection of SNP TSC0054848
cccctaaacctcc

SEQ ID NO: 224979 - DNA, 13 bp, Artificial Sequence
  Oligonucleotide for detection of SNP TSC0054850
tggtaggaaaatt

SEQ ID NO: 224980 - DNA, 13 bp, Artificial Sequence
  Oligonucleotide for detection of SNP TSC0054850
aattttcctacca

SEQ ID NO: 224981 - DNA, 13 bp, Artificial Sequence
  Oligonucleotide for detection of SNP TSC0054850
tggtagaaaaatt

SEQ ID NO: 224982 - DNA, 13 bp, Artificial Sequence
  Oligonucleotide for detection of SNP TSC0054850
aatttttctacca

SEQ ID NO: 224983 - DNA, 13 bp, Artificial Sequence
  Oligonucleotide for detection of SNP TSC0054850
cggtaggaaaatt

SEQ ID NO: 224984 - DNA, 13 bp, Artificial Sequence
  Oligonucleotide for detection of SNP TSC0054850
aattttcctaccg

SEQ ID NO: 224985 - DNA, 13 bp, Artificial Sequence
  Oligonucleotide for detection of SNP TSC0054850
cggtagaaaaatt

SEQ ID NO: 224986 - DNA, 13 bp, Artificial Sequence
  Oligonucleotide for detection of SNP TSC0054850
aatttttctaccg

SEQ ID NO: 224987 - DNA, 13 bp, Artificial Sequence
  Oligonucleotide for detection of SNP TSC0054851
attatagtaaata

SEQ ID NO: 224988 - DNA, 13 bp, Artificial Sequence
  Oligonucleotide for detection of SNP TSC0054851
tatttactataat

SEQ ID NO: 224989 - DNA, 13 bp, Artificial Sequence
  Oligonucleotide for detection of SNP TSC0054852
tggatagaaattt

SEQ ID NO: 224990 - DNA, 13 bp, Artificial Sequence
  Oligonucleotide for detection of SNP TSC0054852
aaatttctatcca

SEQ ID NO: 224991 - DNA, 13 bp, Artificial Sequence
  Oligonucleotide for detection of SNP TSC0054852
tggataaaaattt

SEQ ID NO: 224992 - DNA, 13 bp, Artificial Sequence
  Oligonucleotide for detection of SNP TSC0054852
aaatttttatcca

SEQ ID NO: 224993 - DNA, 13 bp, Artificial Sequence
  Oligonucleotide for detection of SNP TSC0007478
ttgtataatttgg

SEQ ID NO: 224994 - DNA, 13 bp, Artificial Sequence
  Oligonucleotide for detection of SNP TSC0007478
ccaaattatacaa

SEQ ID NO: 224995 - DNA, 13 bp, Artificial Sequence
  Oligonucleotide for detection of SNP TSC0007478
ttgtatgatttgg

SEQ ID NO: 224996 - DNA, 13 bp, Artificial Sequence
  Oligonucleotide for detection of SNP TSC0007478
ccaaatcatacaa

SEQ ID NO: 224997 - DNA, 13 bp, Artificial Sequence
  Oligonucleotide for detection of SNP TSC0005221
gatttatgagagy

SEQ ID NO: 224998 - DNA, 13 bp, Artificial Sequence
  Oligonucleotide for detection of SNP TSC0005221
rctctcataaatc

SEQ ID NO: 224999 - DNA, 13 bp, Artificial Sequence
  Oligonucleotide for detection of SNP TSC0005221
gatttacgagagy

SEQ ID NO: 225000 - DNA, 13 bp, Artificial Sequence
  Oligonucleotide for detection of SNP TSC0005221
rctctcgtaaatc

SEQ ID NO: 225001 - DNA, 13 bp, Artificial Sequence
  Oligonucleotide for detection of SNP TSC0005221
gtttttgtaagty

SEQ ID NO: 225002 - DNA, 13 bp, Artificial Sequence
  Oligonucleotide for detection of SNP TSC0005221
racttacaaaaac

SEQ ID NO: 225003 - DNA, 13 bp, Artificial Sequence
  Oligonucleotide for detection of SNP TSC0005221
gtttttataagty

SEQ ID NO: 225004 - DNA, 13 bp, Artificial Sequence
  Oligonucleotide for detection of SNP TSC0005221
racttataaaaac

SEQ ID NO: 225005 - DNA, 13 bp, Artificial Sequence
  Oligonucleotide for detection of SNP TSC0005221
gttttcgtaagty

SEQ ID NO: 225006 - DNA, 13 bp, Artificial Sequence
  Oligonucleotide for detection of SNP TSC0005221
racttacgaaaac

SEQ ID NO: 225007 - DNA, 13 bp, Artificial Sequence
  Oligonucleotide for detection of SNP TSC0054860
ttgaaagtagaga

SEQ ID NO: 225008 - DNA, 13 bp, Artificial Sequence
  Oligonucleotide for detection of SNP TSC0054860
tctctactttcaa

SEQ ID NO: 225009 - DNA, 13 bp, Artificial Sequence
  Oligonucleotide for detection of SNP TSC0054860
ttgaaaatagaga

SEQ ID NO: 225010 - DNA, 13 bp, Artificial Sequence
  Oligonucleotide for detection of SNP TSC0054860
tctctattttcaa

SEQ ID NO: 225011 - DNA, 13 bp, Artificial Sequence
  Oligonucleotide for detection of SNP TSC0007576
ggtgataaaatag

SEQ ID NO: 225012 - DNA, 13 bp, Artificial Sequence
  Oligonucleotide for detection of SNP TSC0007576
ctattttatcacc

SEQ ID NO: 225013 - DNA, 13 bp, Artificial Sequence
  Oligonucleotide for detection of SNP TSC0007576
ggtgatgaaatag

SEQ ID NO: 225014 - DNA, 13 bp, Artificial Sequence
  Oligonucleotide for detection of SNP TSC0007576
ctatttcatcacc

SEQ ID NO: 225015 - DNA, 13 bp, Artificial Sequence
  Oligonucleotide for detection of SNP TSC0007577
tttttaaagtgga

SEQ ID NO: 225016 - DNA, 13 bp, Artificial Sequence
  Oligonucleotide for detection of SNP TSC0007577
tccactttaaaaa

SEQ ID NO: 225017 - DNA, 13 bp, Artificial Sequence
  Oligonucleotide for detection of SNP TSC0007577
tttttagagtgga

SEQ ID NO: 225018 - DNA, 13 bp, Artificial Sequence
  Oligonucleotide for detection of SNP TSC0007577
tccactctaaaaa

SEQ ID NO: 225019 - DNA, 13 bp, Artificial Sequence
  Oligonucleotide for detection of SNP TSC0054862
tattaaaagagtt

SEQ ID NO: 225020 - DNA, 13 bp, Artificial Sequence
  Oligonucleotide for detection of SNP TSC0054862
aactcttttaata

SEQ ID NO: 225021 - DNA, 13 bp, Artificial Sequence
  Oligonucleotide for detection of SNP TSC0054862
tattaatagagtt

SEQ ID NO: 225022 - DNA, 13 bp, Artificial Sequence
  Oligonucleotide for detection of SNP TSC0054862
aactctattaata

SEQ ID NO: 225023 - DNA, 13 bp, Artificial Sequence
  Oligonucleotide for detection of SNP TSC0054862
aatttttttaata

SEQ ID NO: 225024 - DNA, 13 bp, Artificial Sequence
  Oligonucleotide for detection of SNP TSC0054862
tattaaaaaaatt

SEQ ID NO: 225025 - DNA, 13 bp, Artificial Sequence
  Oligonucleotide for detection of SNP TSC0054862
aattttgttaata

SEQ ID NO: 225026 - DNA, 13 bp, Artificial Sequence
  Oligonucleotide for detection of SNP TSC0054862
tattaacaaaatt

SEQ ID NO: 225027 - DNA, 13 bp, Artificial Sequence
  Oligonucleotide for detection of SNP TSC0054863
aagaatataggay

SEQ ID NO: 225028 - DNA, 13 bp, Artificial Sequence
  Oligonucleotide for detection of SNP TSC0054863
rtcctatattctt

SEQ ID NO: 225029 - DNA, 13 bp, Artificial Sequence
  Oligonucleotide for detection of SNP TSC0054863
aagaatgtaggay

SEQ ID NO: 225030 - DNA, 13 bp, Artificial Sequence
  Oligonucleotide for detection of SNP TSC0054863
rtcctacattctt

SEQ ID NO: 225031 - DNA, 13 bp, Artificial Sequence
  Oligonucleotide for detection of SNP TSC0054863
aagaacgtaggay

SEQ ID NO: 225032 - DNA, 13 bp, Artificial Sequence
  Oligonucleotide for detection of SNP TSC0054863
rtcctacgttctt

SEQ ID NO: 225033 - DNA, 13 bp, Artificial Sequence
  Oligonucleotide for detection of SNP TSC0054864
tgtttgatgaaaa

SEQ ID NO: 225034 - DNA, 13 bp, Artificial Sequence
  Oligonucleotide for detection of SNP TSC0054864
ttttcatcaaaca

SEQ ID NO: 225035 - DNA, 13 bp, Artificial Sequence
  Oligonucleotide for detection of SNP TSC0054864
tgtttgttgaaaa

SEQ ID NO: 225036 - DNA, 13 bp, Artificial Sequence
  Oligonucleotide for detection of SNP TSC0054864
ttttcaacaaaca

SEQ ID NO: 225037 - DNA, 13 bp, Artificial Sequence
  Oligonucleotide for detection of SNP TSC0054864
tttttattaagta

SEQ ID NO: 225038 - DNA, 13 bp, Artificial Sequence
  Oligonucleotide for detection of SNP TSC0054864
tacttaataaaaa

SEQ ID NO: 225039 - DNA, 13 bp, Artificial Sequence
  Oligonucleotide for detection of SNP TSC0054864
tttttagtaagta

SEQ ID NO: 225040 - DNA, 13 bp, Artificial Sequence
  Oligonucleotide for detection of SNP TSC0054864
tacttactaaaaa

SEQ ID NO: 225041 - DNA, 13 bp, Artificial Sequence
  Oligonucleotide for detection of SNP TSC0054867
aggtttaagtagy

SEQ ID NO: 225042 - DNA, 13 bp, Artificial Sequence
  Oligonucleotide for detection of SNP TSC0054867
rctacttaaacct

SEQ ID NO: 225043 - DNA, 13 bp, Artificial Sequence
  Oligonucleotide for detection of SNP TSC0054867
aggtttgagtagy

SEQ ID NO: 225044 - DNA, 13 bp, Artificial Sequence
  Oligonucleotide for detection of SNP TSC0054867
rctactcaaacct

SEQ ID NO: 225045 - DNA, 13 bp, Artificial Sequence
  Oligonucleotide for detection of SNP TSC0054867
aggttcgagtagy

SEQ ID NO: 225046 - DNA, 13 bp, Artificial Sequence
  Oligonucleotide for detection of SNP TSC0054867
rctactcgaacct

SEQ ID NO: 225047 - DNA, 13 bp, Artificial Sequence
  Oligonucleotide for detection of SNP TSC0054867
gttgtttgaattt

SEQ ID NO: 225048 - DNA, 13 bp, Artificial Sequence
  Oligonucleotide for detection of SNP TSC0054867
aaattcaaacaac

SEQ ID NO: 225049 - DNA, 13 bp, Artificial Sequence
  Oligonucleotide for detection of SNP TSC0054867
gttgttcgaattt

SEQ ID NO: 225050 - DNA, 13 bp, Artificial Sequence
  Oligonucleotide for detection of SNP TSC0054867
aaattcgaacaac

SEQ ID NO: 225051 - DNA, 13 bp, Artificial Sequence
  Oligonucleotide for detection of SNP TSC0054874
gtattttttttty

SEQ ID NO: 225052 - DNA, 13 bp, Artificial Sequence
  Oligonucleotide for detection of SNP TSC0054874
raaaaaaaaatac

SEQ ID NO: 225053 - DNA, 13 bp, Artificial Sequence
  Oligonucleotide for detection of SNP TSC0054874
ggagaatagatay

SEQ ID NO: 225054 - DNA, 13 bp, Artificial Sequence
  Oligonucleotide for detection of SNP TSC0054874
rtatctattctcc

SEQ ID NO: 225055 - DNA, 13 bp, Artificial Sequence
  Oligonucleotide for detection of SNP TSC0054874
ggagaagagatay

SEQ ID NO: 225056 - DNA, 13 bp, Artificial Sequence
  Oligonucleotide for detection of SNP TSC0054874
rtatctcttctcc

SEQ ID NO: 225057 - DNA, 13 bp, Artificial Sequence
  Oligonucleotide for detection of SNP TSC0054875
aaagtgagatgtg

SEQ ID NO: 225058 - DNA, 13 bp, Artificial Sequence
  Oligonucleotide for detection of SNP TSC0054875
cacatctcacttt

SEQ ID NO: 225059 - DNA, 13 bp, Artificial Sequence
  Oligonucleotide for detection of SNP TSC0054875
aaagtgtgatgtg

SEQ ID NO: 225060 - DNA, 13 bp, Artificial Sequence
  Oligonucleotide for detection of SNP TSC0054875
cacatcacacttt

SEQ ID NO: 225061 - DNA, 13 bp, Artificial Sequence
  Oligonucleotide for detection of SNP TSC0054875
tatattttatttt

SEQ ID NO: 225062 - DNA, 13 bp, Artificial Sequence
  Oligonucleotide for detection of SNP TSC0054875
aaaataaaatata

SEQ ID NO: 225063 - DNA, 13 bp, Artificial Sequence
  Oligonucleotide for detection of SNP TSC0054876
ggtagttataatt

SEQ ID NO: 225064 - DNA, 13 bp, Artificial Sequence
  Oligonucleotide for detection of SNP TSC0054876
aattataactacc

SEQ ID NO: 225065 - DNA, 13 bp, Artificial Sequence
  Oligonucleotide for detection of SNP TSC0054876
ggtagtgataatt

SEQ ID NO: 225066 - DNA, 13 bp, Artificial Sequence
  Oligonucleotide for detection of SNP TSC0054876
aattatcactacc

SEQ ID NO: 225067 - DNA, 13 bp, Artificial Sequence
  Oligonucleotide for detection of SNP TSC0054876
ggtagcgataatt

SEQ ID NO: 225068 - DNA, 13 bp, Artificial Sequence
  Oligonucleotide for detection of SNP TSC0054876
aattatcgctacc

SEQ ID NO: 225069 - DNA, 13 bp, Artificial Sequence
  Oligonucleotide for detection of SNP TSC0054877
gtattatttagtg

SEQ ID NO: 225070 - DNA, 13 bp, Artificial Sequence
  Oligonucleotide for detection of SNP TSC0054877
cactaaataatac

SEQ ID NO: 225071 - DNA, 13 bp, Artificial Sequence
  Oligonucleotide for detection of SNP TSC0054877
gtattagttagtg

SEQ ID NO: 225072 - DNA, 13 bp, Artificial Sequence
  Oligonucleotide for detection of SNP TSC0054877
cactaactaatac

SEQ ID NO: 225073 - DNA, 13 bp, Artificial Sequence
  Oligonucleotide for detection of SNP TSC0054877
tattaagtggtay

SEQ ID NO: 225074 - DNA, 13 bp, Artificial Sequence
  Oligonucleotide for detection of SNP TSC0054877
rtaccacttaata

SEQ ID NO: 225075 - DNA, 13 bp, Artificial Sequence
  Oligonucleotide for detection of SNP TSC0054877
tattaattggtay

SEQ ID NO: 225076 - DNA, 13 bp, Artificial Sequence
  Oligonucleotide for detection of SNP TSC0054877
rtaccaattaata

SEQ ID NO: 225077 - DNA, 13 bp, Artificial Sequence
  Oligonucleotide for detection of SNP TSC0054878
tataatatatagy

SEQ ID NO: 225078 - DNA, 13 bp, Artificial Sequence
  Oligonucleotide for detection of SNP TSC0054878
rctatatattata

SEQ ID NO: 225079 - DNA, 13 bp, Artificial Sequence
  Oligonucleotide for detection of SNP TSC0054878
tataatgtatagy

SEQ ID NO: 225080 - DNA, 13 bp, Artificial Sequence
  Oligonucleotide for detection of SNP TSC0054878
rctatacattata

SEQ ID NO: 225081 - DNA, 13 bp, Artificial Sequence
  Oligonucleotide for detection of SNP TSC0054878
tataacgtatagy

SEQ ID NO: 225082 - DNA, 13 bp, Artificial Sequence
  Oligonucleotide for detection of SNP TSC0054878
rctatacgttata

SEQ ID NO: 225083 - DNA, 13 bp, Artificial Sequence
  Oligonucleotide for detection of SNP TSC0054878
gttatatgttata

SEQ ID NO: 225084 - DNA, 13 bp, Artificial Sequence
  Oligonucleotide for detection of SNP TSC0054878
tataacatataac

SEQ ID NO: 225085 - DNA, 13 bp, Artificial Sequence
  Oligonucleotide for detection of SNP TSC0054878
gttatacgttata

SEQ ID NO: 225086 - DNA, 13 bp, Artificial Sequence
  Oligonucleotide for detection of SNP TSC0054878
tataacgtataac

SEQ ID NO: 225087 - DNA, 13 bp, Artificial Sequence
  Oligonucleotide for detection of SNP TSC0054880
ttttagtgtattt

SEQ ID NO: 225088 - DNA, 13 bp, Artificial Sequence
  Oligonucleotide for detection of SNP TSC0054880
aaatacactaaaa

SEQ ID NO: 225089 - DNA, 13 bp, Artificial Sequence
  Oligonucleotide for detection of SNP TSC0054880
aagtattttggaa

SEQ ID NO: 225090 - DNA, 13 bp, Artificial Sequence
  Oligonucleotide for detection of SNP TSC0054880
ttccaaaatactt

SEQ ID NO: 225091 - DNA, 13 bp, Artificial Sequence
  Oligonucleotide for detection of SNP TSC0054880
aagtatattggaa

SEQ ID NO: 225092 - DNA, 13 bp, Artificial Sequence
  Oligonucleotide for detection of SNP TSC0054880
ttccaatatactt

SEQ ID NO: 225093 - DNA, 13 bp, Artificial Sequence
  Oligonucleotide for detection of SNP TSC0054881
gaaggtgatttaa

SEQ ID NO: 225094 - DNA, 13 bp, Artificial Sequence
  Oligonucleotide for detection of SNP TSC0054881
ttaaatcaccttc

SEQ ID NO: 225095 - DNA, 13 bp, Artificial Sequence
  Oligonucleotide for detection of SNP TSC0054881
gaaggtaatttaa

SEQ ID NO: 225096 - DNA, 13 bp, Artificial Sequence
  Oligonucleotide for detection of SNP TSC0054881
ttaaattaccttc

SEQ ID NO: 225097 - DNA, 13 bp, Artificial Sequence
  Oligonucleotide for detection of SNP TSC0054882
gaatagatggttt

SEQ ID NO: 225098 - DNA, 13 bp, Artificial Sequence
  Oligonucleotide for detection of SNP TSC0054882
aaaccatctattc

SEQ ID NO: 225099 - DNA, 13 bp, Artificial Sequence
  Oligonucleotide for detection of SNP TSC0054882
gaataggtggttt

SEQ ID NO: 225100 - DNA, 13 bp, Artificial Sequence
  Oligonucleotide for detection of SNP TSC0054882
aaaccacctattc

SEQ ID NO: 225101 - DNA, 13 bp, Artificial Sequence
  Oligonucleotide for detection of SNP TSC0054882
gaatagacggttt

SEQ ID NO: 225102 - DNA, 13 bp, Artificial Sequence
  Oligonucleotide for detection of SNP TSC0054882
aaaccgtctattc

SEQ ID NO: 225103 - DNA, 13 bp, Artificial Sequence
  Oligonucleotide for detection of SNP TSC0054882
gaataggcggttt

SEQ ID NO: 225104 - DNA, 13 bp, Artificial Sequence
  Oligonucleotide for detection of SNP TSC0054882
aaaccgcctattc

SEQ ID NO: 225105 - DNA, 13 bp, Artificial Sequence
  Oligonucleotide for detection of SNP TSC0054884
aataatatatagt

SEQ ID NO: 225106 - DNA, 13 bp, Artificial Sequence
  Oligonucleotide for detection of SNP TSC0054884
actatatattatt

SEQ ID NO: 225107 - DNA, 13 bp, Artificial Sequence
  Oligonucleotide for detection of SNP TSC0054884
aataatgtatagt

SEQ ID NO: 225108 - DNA, 13 bp, Artificial Sequence
  Oligonucleotide for detection of SNP TSC0054884
actatacattatt

SEQ ID NO: 225109 - DNA, 13 bp, Artificial Sequence
  Oligonucleotide for detection of SNP TSC0054884
aataacgtatagt

SEQ ID NO: 225110 - DNA, 13 bp, Artificial Sequence
  Oligonucleotide for detection of SNP TSC0054884
actatacgttatt

SEQ ID NO: 225111 - DNA, 13 bp, Artificial Sequence
  Oligonucleotide for detection of SNP TSC0054884
attatatgttgtt

SEQ ID NO: 225112 - DNA, 13 bp, Artificial Sequence
  Oligonucleotide for detection of SNP TSC0054884
aacaacatataat

SEQ ID NO: 225113 - DNA, 13 bp, Artificial Sequence
  Oligonucleotide for detection of SNP TSC0054884
attatacgttgtt

SEQ ID NO: 225114 - DNA, 13 bp, Artificial Sequence
  Oligonucleotide for detection of SNP TSC0054884
aacaacgtataat

SEQ ID NO: 225115 - DNA, 13 bp, Artificial Sequence
  Oligonucleotide for detection of SNP TSC0054885
tatattatttagy

SEQ ID NO: 225116 - DNA, 13 bp, Artificial Sequence
  Oligonucleotide for detection of SNP TSC0054885
rctaaataatata

SEQ ID NO: 225117 - DNA, 13 bp, Artificial Sequence
  Oligonucleotide for detection of SNP TSC0054885
tatattttttagy

SEQ ID NO: 225118 - DNA, 13 bp, Artificial Sequence
  Oligonucleotide for detection of SNP TSC0054885
rctaaaaaatata

SEQ ID NO: 225119 - DNA, 13 bp, Artificial Sequence
  Oligonucleotide for detection of SNP TSC0054885
gttaaataatata

SEQ ID NO: 225120 - DNA, 13 bp, Artificial Sequence
  Oligonucleotide for detection of SNP TSC0054885
tatattatttaac

SEQ ID NO: 225121 - DNA, 13 bp, Artificial Sequence
  Oligonucleotide for detection of SNP TSC0054885
gttaaagaatata

SEQ ID NO: 225122 - DNA, 13 bp, Artificial Sequence
  Oligonucleotide for detection of SNP TSC0054885
tatattctttaac

SEQ ID NO: 225123 - DNA, 13 bp, Artificial Sequence
  Oligonucleotide for detection of SNP TSC0054886
gtattatatatgt

SEQ ID NO: 225124 - DNA, 13 bp, Artificial Sequence
  Oligonucleotide for detection of SNP TSC0054886
acatatataatac

SEQ ID NO: 225125 - DNA, 13 bp, Artificial Sequence
  Oligonucleotide for detection of SNP TSC0054886
gtattagatatgt

SEQ ID NO: 225126 - DNA, 13 bp, Artificial Sequence
  Oligonucleotide for detection of SNP TSC0054886
acatatctaatac

SEQ ID NO: 225127 - DNA, 13 bp, Artificial Sequence
  Oligonucleotide for detection of SNP TSC0054886
atatgtgtaatgy

SEQ ID NO: 225128 - DNA, 13 bp, Artificial Sequence
  Oligonucleotide for detection of SNP TSC0054886
rcattacacatat

SEQ ID NO: 225129 - DNA, 13 bp, Artificial Sequence
  Oligonucleotide for detection of SNP TSC0054886
atatgtttaatgy

SEQ ID NO: 225130 - DNA, 13 bp, Artificial Sequence
  Oligonucleotide for detection of SNP TSC0054886
rcattaaacatat

SEQ ID NO: 225131 - DNA, 13 bp, Artificial Sequence
  Oligonucleotide for detection of SNP TSC0054887
gattaaattttaa

SEQ ID NO: 225132 - DNA, 13 bp, Artificial Sequence
  Oligonucleotide for detection of SNP TSC0054887
ttaaaatttaatc

SEQ ID NO: 225133 - DNA, 13 bp, Artificial Sequence
  Oligonucleotide for detection of SNP TSC0054887
gattaagttttaa

SEQ ID NO: 225134 - DNA, 13 bp, Artificial Sequence
  Oligonucleotide for detection of SNP TSC0054887
ttaaaacttaatc

SEQ ID NO: 225135 - DNA, 13 bp, Artificial Sequence
  Oligonucleotide for detection of SNP TSC0054888
aatttaattgata

SEQ ID NO: 225136 - DNA, 13 bp, Artificial Sequence
  Oligonucleotide for detection of SNP TSC0054888
tatcaattaaatt

SEQ ID NO: 225137 - DNA, 13 bp, Artificial Sequence
  Oligonucleotide for detection of SNP TSC0054888
aatttagttgata

SEQ ID NO: 225138 - DNA, 13 bp, Artificial Sequence
  Oligonucleotide for detection of SNP TSC0054888
tatcaactaaatt

SEQ ID NO: 225139 - DNA, 13 bp, Artificial Sequence
  Oligonucleotide for detection of SNP TSC0054889
gtgaatataaaat

SEQ ID NO: 225140 - DNA, 13 bp, Artificial Sequence
  Oligonucleotide for detection of SNP TSC0054889
attttatattcac

SEQ ID NO: 225141 - DNA, 13 bp, Artificial Sequence
  Oligonucleotide for detection of SNP TSC0054889
gtgaatgtaaaat

SEQ ID NO: 225142 - DNA, 13 bp, Artificial Sequence
  Oligonucleotide for detection of SNP TSC0054889
attttacattcac

SEQ ID NO: 225143 - DNA, 13 bp, Artificial Sequence
  Oligonucleotide for detection of SNP TSC0054889
gtgaacgtaaaat

SEQ ID NO: 225144 - DNA, 13 bp, Artificial Sequence
  Oligonucleotide for detection of SNP TSC0054889
attttacgttcac

SEQ ID NO: 225145 - DNA, 13 bp, Artificial Sequence
  Oligonucleotide for detection of SNP TSC0054889
attttatgtttay

SEQ ID NO: 225146 - DNA, 13 bp, Artificial Sequence
  Oligonucleotide for detection of SNP TSC0054889
rtaaacataaaat

SEQ ID NO: 225147 - DNA, 13 bp, Artificial Sequence
  Oligonucleotide for detection of SNP TSC0054889
attttacgtttay

SEQ ID NO: 225148 - DNA, 13 bp, Artificial Sequence
  Oligonucleotide for detection of SNP TSC0054889
rtaaacgtaaaat

SEQ ID NO: 225149 - DNA, 13 bp, Artificial Sequence
  Oligonucleotide for detection of SNP TSC0054890
aataatataatgg

SEQ ID NO: 225150 - DNA, 13 bp, Artificial Sequence
  Oligonucleotide for detection of SNP TSC0054890
ccattatattatt

SEQ ID NO: 225151 - DNA, 13 bp, Artificial Sequence
  Oligonucleotide for detection of SNP TSC0054890
aataatgtaatgg

SEQ ID NO: 225152 - DNA, 13 bp, Artificial Sequence
  Oligonucleotide for detection of SNP TSC0054890
ccattacattatt

SEQ ID NO: 225153 - DNA, 13 bp, Artificial Sequence
  Oligonucleotide for detection of SNP TSC0054890
aataacgtaatgg

SEQ ID NO: 225154 - DNA, 13 bp, Artificial Sequence
  Oligonucleotide for detection of SNP TSC0054890
ccattacgttatt

SEQ ID NO: 225155 - DNA, 13 bp, Artificial Sequence
  Oligonucleotide for detection of SNP TSC0054891
ataataatataat

SEQ ID NO: 225156 - DNA, 13 bp, Artificial Sequence
  Oligonucleotide for detection of SNP TSC0054891
attatattattat

SEQ ID NO: 225157 - DNA, 13 bp, Artificial Sequence
  Oligonucleotide for detection of SNP TSC0054891
ataatattataat

SEQ ID NO: 225158 - DNA, 13 bp, Artificial Sequence
  Oligonucleotide for detection of SNP TSC0054891
attataatattat

SEQ ID NO: 225159 - DNA, 13 bp, Artificial Sequence
  Oligonucleotide for detection of SNP TSC0054891
attatgttattgt

SEQ ID NO: 225160 - DNA, 13 bp, Artificial Sequence
  Oligonucleotide for detection of SNP TSC0054891
acaataacataat

SEQ ID NO: 225161 - DNA, 13 bp, Artificial Sequence
  Oligonucleotide for detection of SNP TSC0054891
attatggtattgt

SEQ ID NO: 225162 - DNA, 13 bp, Artificial Sequence
  Oligonucleotide for detection of SNP TSC0054891
acaataccataat

SEQ ID NO: 225163 - DNA, 13 bp, Artificial Sequence
  Oligonucleotide for detection of SNP TSC0054894
ttaataatattty

SEQ ID NO: 225164 - DNA, 13 bp, Artificial Sequence
  Oligonucleotide for detection of SNP TSC0054894
raaatattattaa

SEQ ID NO: 225165 - DNA, 13 bp, Artificial Sequence
  Oligonucleotide for detection of SNP TSC0054894
ttaatagtattty

SEQ ID NO: 225166 - DNA, 13 bp, Artificial Sequence
  Oligonucleotide for detection of SNP TSC0054894
raaatactattaa

SEQ ID NO: 225167 - DNA, 13 bp, Artificial Sequence
  Oligonucleotide for detection of SNP TSC0054896
taagttaaataty

SEQ ID NO: 225168 - DNA, 13 bp, Artificial Sequence
  Oligonucleotide for detection of SNP TSC0054896
ratatttaactta

SEQ ID NO: 225169 - DNA, 13 bp, Artificial Sequence
  Oligonucleotide for detection of SNP TSC0054896
taagtttaataty

SEQ ID NO: 225170 - DNA, 13 bp, Artificial Sequence
  Oligonucleotide for detection of SNP TSC0054896
ratattaaactta

SEQ ID NO: 225171 - DNA, 13 bp, Artificial Sequence
  Oligonucleotide for detection of SNP TSC0054896
ggtatttggtttg

SEQ ID NO: 225172 - DNA, 13 bp, Artificial Sequence
  Oligonucleotide for detection of SNP TSC0054896
caaaccaaatacc

SEQ ID NO: 225173 - DNA, 13 bp, Artificial Sequence
  Oligonucleotide for detection of SNP TSC0054896
ggtattgggtttg

SEQ ID NO: 225174 - DNA, 13 bp, Artificial Sequence
  Oligonucleotide for detection of SNP TSC0054896
caaacccaatacc

SEQ ID NO: 225175 - DNA, 13 bp, Artificial Sequence
  Oligonucleotide for detection of SNP TSC0007801
attagtagtatta

SEQ ID NO: 225176 - DNA, 13 bp, Artificial Sequence
  Oligonucleotide for detection of SNP TSC0007801
taatactactaat

SEQ ID NO: 225177 - DNA, 13 bp, Artificial Sequence
  Oligonucleotide for detection of SNP TSC0007801
attagtggtatta

SEQ ID NO: 225178 - DNA, 13 bp, Artificial Sequence
  Oligonucleotide for detection of SNP TSC0007801
taataccactaat

SEQ ID NO: 225179 - DNA, 13 bp, Artificial Sequence
  Oligonucleotide for detection of SNP TSC0007801
attagcggtatta

SEQ ID NO: 225180 - DNA, 13 bp, Artificial Sequence
  Oligonucleotide for detection of SNP TSC0007801
taataccgctaat

SEQ ID NO: 225181 - DNA, 13 bp, Artificial Sequence
  Oligonucleotide for detection of SNP TSC0007801
tggtgttgttgat

SEQ ID NO: 225182 - DNA, 13 bp, Artificial Sequence
  Oligonucleotide for detection of SNP TSC0007801
atcaacaacacca

SEQ ID NO: 225183 - DNA, 13 bp, Artificial Sequence
  Oligonucleotide for detection of SNP TSC0007801
tggtgtcgttgat

SEQ ID NO: 225184 - DNA, 13 bp, Artificial Sequence
  Oligonucleotide for detection of SNP TSC0007801
atcaacgacacca

SEQ ID NO: 225185 - DNA, 13 bp, Artificial Sequence
  Oligonucleotide for detection of SNP TSC0054900
tatatagaaaata

SEQ ID NO: 225186 - DNA, 13 bp, Artificial Sequence
  Oligonucleotide for detection of SNP TSC0054900
tattttctatata

SEQ ID NO: 225187 - DNA, 13 bp, Artificial Sequence
  Oligonucleotide for detection of SNP TSC0054900
tgttttgtatatg

SEQ ID NO: 225188 - DNA, 13 bp, Artificial Sequence
  Oligonucleotide for detection of SNP TSC0054900
catatacaaaaca

SEQ ID NO: 225189 - DNA, 13 bp, Artificial Sequence
  Oligonucleotide for detection of SNP TSC0054900
tgttttttatatg

SEQ ID NO: 225190 - DNA, 13 bp, Artificial Sequence
  Oligonucleotide for detection of SNP TSC0054900
catataaaaaaca

SEQ ID NO: 225191 - DNA, 13 bp, Artificial Sequence
  Oligonucleotide for detection of SNP TSC0054901
taaggtttgtaga

SEQ ID NO: 225192 - DNA, 13 bp, Artificial Sequence
  Oligonucleotide for detection of SNP TSC0054901
tctacaaacctta

SEQ ID NO: 225193 - DNA, 13 bp, Artificial Sequence
  Oligonucleotide for detection of SNP TSC0054901
taaggtgtgtaga

SEQ ID NO: 225194 - DNA, 13 bp, Artificial Sequence
  Oligonucleotide for detection of SNP TSC0054901
tctacacacctta

SEQ ID NO: 225195 - DNA, 13 bp, Artificial Sequence
  Oligonucleotide for detection of SNP TSC0054901
taaggcgtgtaga

SEQ ID NO: 225196 - DNA, 13 bp, Artificial Sequence
  Oligonucleotide for detection of SNP TSC0054901
tctacacgcctta

SEQ ID NO: 225197 - DNA, 13 bp, Artificial Sequence
  Oligonucleotide for detection of SNP TSC0054901
tttgtaggttttg

SEQ ID NO: 225198 - DNA, 13 bp, Artificial Sequence
  Oligonucleotide for detection of SNP TSC0054901
caaaacctacaaa

SEQ ID NO: 225199 - DNA, 13 bp, Artificial Sequence
  Oligonucleotide for detection of SNP TSC0054902
aataatgtttggg

SEQ ID NO: 225200 - DNA, 13 bp, Artificial Sequence
  Oligonucleotide for detection of SNP TSC0054902
cccaaacattatt

SEQ ID NO: 225201 - DNA, 13 bp, Artificial Sequence
  Oligonucleotide for detection of SNP TSC0054902
aataatatttggg

SEQ ID NO: 225202 - DNA, 13 bp, Artificial Sequence
  Oligonucleotide for detection of SNP TSC0054902
cccaaatattatt

SEQ ID NO: 225203 - DNA, 13 bp, Artificial Sequence
  Oligonucleotide for detection of SNP TSC0054904
aattatagagtta

SEQ ID NO: 225204 - DNA, 13 bp, Artificial Sequence
  Oligonucleotide for detection of SNP TSC0054904
taactctataatt

SEQ ID NO: 225205 - DNA, 13 bp, Artificial Sequence
  Oligonucleotide for detection of SNP TSC0054904
aattatggagtta

SEQ ID NO: 225206 - DNA, 13 bp, Artificial Sequence
  Oligonucleotide for detection of SNP TSC0054904
taactccataatt

SEQ ID NO: 225207 - DNA, 13 bp, Artificial Sequence
  Oligonucleotide for detection of SNP TSC0054906
agggtgatttatt

SEQ ID NO: 225208 - DNA, 13 bp, Artificial Sequence
  Oligonucleotide for detection of SNP TSC0054906
aataaatcaccct

SEQ ID NO: 225209 - DNA, 13 bp, Artificial Sequence
  Oligonucleotide for detection of SNP TSC0054906
agggtgttttatt

SEQ ID NO: 225210 - DNA, 13 bp, Artificial Sequence
  Oligonucleotide for detection of SNP TSC0054906
aataaaacaccct

SEQ ID NO: 225211 - DNA, 13 bp, Artificial Sequence
  Oligonucleotide for detection of SNP TSC0054906
agtgggttatttt

SEQ ID NO: 225212 - DNA, 13 bp, Artificial Sequence
  Oligonucleotide for detection of SNP TSC0054906
aaaataacccact

SEQ ID NO: 225213 - DNA, 13 bp, Artificial Sequence
  Oligonucleotide for detection of SNP TSC0054906
agtggggtatttt

SEQ ID NO: 225214 - DNA, 13 bp, Artificial Sequence
  Oligonucleotide for detection of SNP TSC0054906
aaaataccccact

SEQ ID NO: 225215 - DNA, 13 bp, Artificial Sequence
  Oligonucleotide for detection of SNP TSC0054907
ggttgatgatgga

SEQ ID NO: 225216 - DNA, 13 bp, Artificial Sequence
  Oligonucleotide for detection of SNP TSC0054907
tccatcatcaacc

SEQ ID NO: 225217 - DNA, 13 bp, Artificial Sequence
  Oligonucleotide for detection of SNP TSC0054907
ggttgaggatgga

SEQ ID NO: 225218 - DNA, 13 bp, Artificial Sequence
  Oligonucleotide for detection of SNP TSC0054907
tccatcctcaacc

SEQ ID NO: 225219 - DNA, 13 bp, Artificial Sequence
  Oligonucleotide for detection of SNP TSC0054907
tttatttttaaty

SEQ ID NO: 225220 - DNA, 13 bp, Artificial Sequence
  Oligonucleotide for detection of SNP TSC0054907
rattaaaaataaa

SEQ ID NO: 225221 - DNA, 13 bp, Artificial Sequence
  Oligonucleotide for detection of SNP TSC0054908
aaaagtatatagt

SEQ ID NO: 225222 - DNA, 13 bp, Artificial Sequence
  Oligonucleotide for detection of SNP TSC0054908
actatatactttt

SEQ ID NO: 225223 - DNA, 13 bp, Artificial Sequence
  Oligonucleotide for detection of SNP TSC0054908
aaaagtgtatagt

SEQ ID NO: 225224 - DNA, 13 bp, Artificial Sequence
  Oligonucleotide for detection of SNP TSC0054908
actatacactttt

SEQ ID NO: 225225 - DNA, 13 bp, Artificial Sequence
  Oligonucleotide for detection of SNP TSC0054908
aaaagcgtatagt

SEQ ID NO: 225226 - DNA, 13 bp, Artificial Sequence
  Oligonucleotide for detection of SNP TSC0054908
actatacgctttt

SEQ ID NO: 225227 - DNA, 13 bp, Artificial Sequence
  Oligonucleotide for detection of SNP TSC0054908
attatatgttttt

SEQ ID NO: 225228 - DNA, 13 bp, Artificial Sequence
  Oligonucleotide for detection of SNP TSC0054908
aaaaacatataat

SEQ ID NO: 225229 - DNA, 13 bp, Artificial Sequence
  Oligonucleotide for detection of SNP TSC0054908
attatacgttttt

SEQ ID NO: 225230 - DNA, 13 bp, Artificial Sequence
  Oligonucleotide for detection of SNP TSC0054908
aaaaacgtataat

SEQ ID NO: 225231 - DNA, 13 bp, Artificial Sequence
  Oligonucleotide for detection of SNP TSC0054909
aatagtatgttga

SEQ ID NO: 225232 - DNA, 13 bp, Artificial Sequence
  Oligonucleotide for detection of SNP TSC0054909
tcaacatactatt

SEQ ID NO: 225233 - DNA, 13 bp, Artificial Sequence
  Oligonucleotide for detection of SNP TSC0054909
aatagtttgttga

SEQ ID NO: 225234 - DNA, 13 bp, Artificial Sequence
  Oligonucleotide for detection of SNP TSC0054909
tcaacaaactatt

SEQ ID NO: 225235 - DNA, 13 bp, Artificial Sequence
  Oligonucleotide for detection of SNP TSC0054909
ttagtatgttgtt

SEQ ID NO: 225236 - DNA, 13 bp, Artificial Sequence
  Oligonucleotide for detection of SNP TSC0054909
aacaacatactaa

SEQ ID NO: 225237 - DNA, 13 bp, Artificial Sequence
  Oligonucleotide for detection of SNP TSC0054909
ttagtaagttgtt

SEQ ID NO: 225238 - DNA, 13 bp, Artificial Sequence
  Oligonucleotide for detection of SNP TSC0054909
aacaacttactaa

SEQ ID NO: 225239 - DNA, 13 bp, Artificial Sequence
  Oligonucleotide for detection of SNP TSC0054910
gagtgtggggaag

SEQ ID NO: 225240 - DNA, 13 bp, Artificial Sequence
  Oligonucleotide for detection of SNP TSC0054910
cttccccacactc

SEQ ID NO: 225241 - DNA, 13 bp, Artificial Sequence
  Oligonucleotide for detection of SNP TSC0054910
gagtgtagggaag

SEQ ID NO: 225242 - DNA, 13 bp, Artificial Sequence
  Oligonucleotide for detection of SNP TSC0054910
cttccctacactc

SEQ ID NO: 225243 - DNA, 13 bp, Artificial Sequence
  Oligonucleotide for detection of SNP TSC0054911
ggtatgatggggt

SEQ ID NO: 225244 - DNA, 13 bp, Artificial Sequence
  Oligonucleotide for detection of SNP TSC0054911
accccatcatacc

SEQ ID NO: 225245 - DNA, 13 bp, Artificial Sequence
  Oligonucleotide for detection of SNP TSC0054911
ggtatggtggggt

SEQ ID NO: 225246 - DNA, 13 bp, Artificial Sequence
  Oligonucleotide for detection of SNP TSC0054911
accccaccatacc

SEQ ID NO: 225247 - DNA, 13 bp, Artificial Sequence
  Oligonucleotide for detection of SNP TSC0054912
atgatgagaaaga

SEQ ID NO: 225248 - DNA, 13 bp, Artificial Sequence
  Oligonucleotide for detection of SNP TSC0054912
tctttctcatcat

SEQ ID NO: 225249 - DNA, 13 bp, Artificial Sequence
  Oligonucleotide for detection of SNP TSC0054912
atgatgggaaaga

SEQ ID NO: 225250 - DNA, 13 bp, Artificial Sequence
  Oligonucleotide for detection of SNP TSC0054912
tctttcccatcat

SEQ ID NO: 225251 - DNA, 13 bp, Artificial Sequence
  Oligonucleotide for detection of SNP TSC0054913
tacgtgatatggt

SEQ ID NO: 225252 - DNA, 13 bp, Artificial Sequence
  Oligonucleotide for detection of SNP TSC0054913
accatatcacgta

SEQ ID NO: 225253 - DNA, 13 bp, Artificial Sequence
  Oligonucleotide for detection of SNP TSC0054913
tacgtgttatggt

SEQ ID NO: 225254 - DNA, 13 bp, Artificial Sequence
  Oligonucleotide for detection of SNP TSC0054913
accataacacgta

SEQ ID NO: 225255 - DNA, 13 bp, Artificial Sequence
  Oligonucleotide for detection of SNP TSC0054913
attatgttatgtg

SEQ ID NO: 225256 - DNA, 13 bp, Artificial Sequence
  Oligonucleotide for detection of SNP TSC0054913
cacataacataat

SEQ ID NO: 225257 - DNA, 13 bp, Artificial Sequence
  Oligonucleotide for detection of SNP TSC0054913
attatggtatgtg

SEQ ID NO: 225258 - DNA, 13 bp, Artificial Sequence
  Oligonucleotide for detection of SNP TSC0054913
cacataccataat

SEQ ID NO: 225259 - DNA, 13 bp, Artificial Sequence
  Oligonucleotide for detection of SNP TSC0054913
attatgttacgtg

SEQ ID NO: 225260 - DNA, 13 bp, Artificial Sequence
  Oligonucleotide for detection of SNP TSC0054913
cacgtaacataat

SEQ ID NO: 225261 - DNA, 13 bp, Artificial Sequence
  Oligonucleotide for detection of SNP TSC0054913
attatggtacgtg

SEQ ID NO: 225262 - DNA, 13 bp, Artificial Sequence
  Oligonucleotide for detection of SNP TSC0054913
cacgtaccataat

SEQ ID NO: 225263 - DNA, 13 bp, Artificial Sequence
  Oligonucleotide for detection of SNP TSC0054916
gtaagtatggaag

SEQ ID NO: 225264 - DNA, 13 bp, Artificial Sequence
  Oligonucleotide for detection of SNP TSC0054916
cttccatacttac

SEQ ID NO: 225265 - DNA, 13 bp, Artificial Sequence
  Oligonucleotide for detection of SNP TSC0054916
gtaagtgtggaag

SEQ ID NO: 225266 - DNA, 13 bp, Artificial Sequence
  Oligonucleotide for detection of SNP TSC0054916
cttccacacttac

SEQ ID NO: 225267 - DNA, 13 bp, Artificial Sequence
  Oligonucleotide for detection of SNP TSC0054916
gtaagcgtggaag

SEQ ID NO: 225268 - DNA, 13 bp, Artificial Sequence
  Oligonucleotide for detection of SNP TSC0054916
cttccacgcttac

SEQ ID NO: 225269 - DNA, 13 bp, Artificial Sequence
  Oligonucleotide for detection of SNP TSC0054917
aatatcgtttatt

SEQ ID NO: 225270 - DNA, 13 bp, Artificial Sequence
  Oligonucleotide for detection of SNP TSC0054917
aataaacgatatt

SEQ ID NO: 225271 - DNA, 13 bp, Artificial Sequence
  Oligonucleotide for detection of SNP TSC0054917
aataagtgatgtt

SEQ ID NO: 225272 - DNA, 13 bp, Artificial Sequence
  Oligonucleotide for detection of SNP TSC0054917
aacatcacttatt

SEQ ID NO: 225273 - DNA, 13 bp, Artificial Sequence
  Oligonucleotide for detection of SNP TSC0054917
aataagcgatgtt

SEQ ID NO: 225274 - DNA, 13 bp, Artificial Sequence
  Oligonucleotide for detection of SNP TSC0054917
aacatcgcttatt

SEQ ID NO: 225275 - DNA, 13 bp, Artificial Sequence
  Oligonucleotide for detection of SNP TSC0054920
gtattaattgagy

SEQ ID NO: 225276 - DNA, 13 bp, Artificial Sequence
  Oligonucleotide for detection of SNP TSC0054920
rctcaattaatac

SEQ ID NO: 225277 - DNA, 13 bp, Artificial Sequence
  Oligonucleotide for detection of SNP TSC0054920
gtattagttgagy

SEQ ID NO: 225278 - DNA, 13 bp, Artificial Sequence
  Oligonucleotide for detection of SNP TSC0054920
rctcaactaatac

SEQ ID NO: 225279 - DNA, 13 bp, Artificial Sequence
  Oligonucleotide for detection of SNP TSC0054920
gtattaatcgagy

SEQ ID NO: 225280 - DNA, 13 bp, Artificial Sequence
  Oligonucleotide for detection of SNP TSC0054920
rctcgattaatac

SEQ ID NO: 225281 - DNA, 13 bp, Artificial Sequence
  Oligonucleotide for detection of SNP TSC0054920
gtattagtcgagy

SEQ ID NO: 225282 - DNA, 13 bp, Artificial Sequence
  Oligonucleotide for detection of SNP TSC0054920
rctcgactaatac

SEQ ID NO: 225283 - DNA, 13 bp, Artificial Sequence
  Oligonucleotide for detection of SNP TSC0054921
aggagtatatttt

SEQ ID NO: 225284 - DNA, 13 bp, Artificial Sequence
  Oligonucleotide for detection of SNP TSC0054921
aaaatatactcct

SEQ ID NO: 225285 - DNA, 13 bp, Artificial Sequence
  Oligonucleotide for detection of SNP TSC0054921
aggagtgtatttt

SEQ ID NO: 225286 - DNA, 13 bp, Artificial Sequence
  Oligonucleotide for detection of SNP TSC0054921
aaaatacactcct

SEQ ID NO: 225287 - DNA, 13 bp, Artificial Sequence
  Oligonucleotide for detection of SNP TSC0054922
ggttttagtaaat

SEQ ID NO: 225288 - DNA, 13 bp, Artificial Sequence
  Oligonucleotide for detection of SNP TSC0054922
atttactaaaacc

SEQ ID NO: 225289 - DNA, 13 bp, Artificial Sequence
  Oligonucleotide for detection of SNP TSC0054922
ggttttggtaaat

SEQ ID NO: 225290 - DNA, 13 bp, Artificial Sequence
  Oligonucleotide for detection of SNP TSC0054922
atttaccaaaacc

SEQ ID NO: 225291 - DNA, 13 bp, Artificial Sequence
  Oligonucleotide for detection of SNP TSC0054922
ggtttcggtaaat

SEQ ID NO: 225292 - DNA, 13 bp, Artificial Sequence
  Oligonucleotide for detection of SNP TSC0054922
atttaccgaaacc

SEQ ID NO: 225293 - DNA, 13 bp, Artificial Sequence
  Oligonucleotide for detection of SNP TSC0054922
atttattgaagty

SEQ ID NO: 225294 - DNA, 13 bp, Artificial Sequence
  Oligonucleotide for detection of SNP TSC0054922
racttcaataaat

SEQ ID NO: 225295 - DNA, 13 bp, Artificial Sequence
  Oligonucleotide for detection of SNP TSC0054922
atttatcgaagty

SEQ ID NO: 225296 - DNA, 13 bp, Artificial Sequence
  Oligonucleotide for detection of SNP TSC0054922
racttcgataaat

SEQ ID NO: 225297 - DNA, 13 bp, Artificial Sequence
  Oligonucleotide for detection of SNP TSC0054923
gtttaggtgtttt

SEQ ID NO: 225298 - DNA, 13 bp, Artificial Sequence
  Oligonucleotide for detection of SNP TSC0054923
aaaacacctaaac

SEQ ID NO: 225299 - DNA, 13 bp, Artificial Sequence
  Oligonucleotide for detection of SNP TSC0054923
gtttagatgtttt

SEQ ID NO: 225300 - DNA, 13 bp, Artificial Sequence
  Oligonucleotide for detection of SNP TSC0054923
aaaacatctaaac

SEQ ID NO: 225301 - DNA, 13 bp, Artificial Sequence
  Oligonucleotide for detection of SNP TSC0054924
tttttggtggaay

SEQ ID NO: 225302 - DNA, 13 bp, Artificial Sequence
  Oligonucleotide for detection of SNP TSC0054924
rttccaccaaaaa

SEQ ID NO: 225303 - DNA, 13 bp, Artificial Sequence
  Oligonucleotide for detection of SNP TSC0054925
aataatgaaatgg

SEQ ID NO: 225304 - DNA, 13 bp, Artificial Sequence
  Oligonucleotide for detection of SNP TSC0054925
ccatttcattatt

SEQ ID NO: 225305 - DNA, 13 bp, Artificial Sequence
  Oligonucleotide for detection of SNP TSC0054925
aataataaaatgg

SEQ ID NO: 225306 - DNA, 13 bp, Artificial Sequence
  Oligonucleotide for detection of SNP TSC0054925
ccattttattatt

SEQ ID NO: 225307 - DNA, 13 bp, Artificial Sequence
  Oligonucleotide for detection of SNP TSC0054927
ttttatatagaay

SEQ ID NO: 225308 - DNA, 13 bp, Artificial Sequence
  Oligonucleotide for detection of SNP TSC0054927
rttctatataaaa

SEQ ID NO: 225309 - DNA, 13 bp, Artificial Sequence
  Oligonucleotide for detection of SNP TSC0054927
ttttatgtagaay

SEQ ID NO: 225310 - DNA, 13 bp, Artificial Sequence
  Oligonucleotide for detection of SNP TSC0054927
rttctacataaaa

SEQ ID NO: 225311 - DNA, 13 bp, Artificial Sequence
  Oligonucleotide for detection of SNP TSC0054927
ttttacgtagaay

SEQ ID NO: 225312 - DNA, 13 bp, Artificial Sequence
  Oligonucleotide for detection of SNP TSC0054927
rttctacgtaaaa

SEQ ID NO: 225313 - DNA, 13 bp, Artificial Sequence
  Oligonucleotide for detection of SNP TSC0054928
tagaagaaagtga

SEQ ID NO: 225314 - DNA, 13 bp, Artificial Sequence
  Oligonucleotide for detection of SNP TSC0054928
tcactttcttcta

SEQ ID NO: 225315 - DNA, 13 bp, Artificial Sequence
  Oligonucleotide for detection of SNP TSC0054928
tagaaggaagtga

SEQ ID NO: 225316 - DNA, 13 bp, Artificial Sequence
  Oligonucleotide for detection of SNP TSC0054928
tcacttccttcta

SEQ ID NO: 225317 - DNA, 13 bp, Artificial Sequence
  Oligonucleotide for detection of SNP TSC0054930
agtaggataaatt

SEQ ID NO: 225318 - DNA, 13 bp, Artificial Sequence
  Oligonucleotide for detection of SNP TSC0054930
aatttatcctact

SEQ ID NO: 225319 - DNA, 13 bp, Artificial Sequence
  Oligonucleotide for detection of SNP TSC0054930
agtagggtaaatt

SEQ ID NO: 225320 - DNA, 13 bp, Artificial Sequence
  Oligonucleotide for detection of SNP TSC0054930
aatttaccctact

SEQ ID NO: 225321 - DNA, 13 bp, Artificial Sequence
  Oligonucleotide for detection of SNP TSC0054931
tattatgaaatta

SEQ ID NO: 225322 - DNA, 13 bp, Artificial Sequence
  Oligonucleotide for detection of SNP TSC0054931
taatttcataata

SEQ ID NO: 225323 - DNA, 13 bp, Artificial Sequence
  Oligonucleotide for detection of SNP TSC0054932
gggttagatatta

SEQ ID NO: 225324 - DNA, 13 bp, Artificial Sequence
  Oligonucleotide for detection of SNP TSC0054932
taatatctaaccc

SEQ ID NO: 225325 - DNA, 13 bp, Artificial Sequence
  Oligonucleotide for detection of SNP TSC0054933
ggattagtatatt

SEQ ID NO: 225326 - DNA, 13 bp, Artificial Sequence
  Oligonucleotide for detection of SNP TSC0054933
aatatactaatcc

SEQ ID NO: 225327 - DNA, 13 bp, Artificial Sequence
  Oligonucleotide for detection of SNP TSC0054933
ggattaatatatt

SEQ ID NO: 225328 - DNA, 13 bp, Artificial Sequence
  Oligonucleotide for detection of SNP TSC0054933
aatatattaatcc

SEQ ID NO: 225329 - DNA, 13 bp, Artificial Sequence
  Oligonucleotide for detection of SNP TSC0054934
attattaatgtgy

SEQ ID NO: 225330 - DNA, 13 bp, Artificial Sequence
  Oligonucleotide for detection of SNP TSC0054934
rcacattaataat

SEQ ID NO: 225331 - DNA, 13 bp, Artificial Sequence
  Oligonucleotide for detection of SNP TSC0054934
attatttatgtgy

SEQ ID NO: 225332 - DNA, 13 bp, Artificial Sequence
  Oligonucleotide for detection of SNP TSC0054934
rcacataaataat

SEQ ID NO: 225333 - DNA, 13 bp, Artificial Sequence
  Oligonucleotide for detection of SNP TSC0054934
gtatattagtaat

SEQ ID NO: 225334 - DNA, 13 bp, Artificial Sequence
  Oligonucleotide for detection of SNP TSC0054934
attactaatatac

SEQ ID NO: 225335 - DNA, 13 bp, Artificial Sequence
  Oligonucleotide for detection of SNP TSC0054934
gtatataagtaat

SEQ ID NO: 225336 - DNA, 13 bp, Artificial Sequence
  Oligonucleotide for detection of SNP TSC0054934
attacttatatac

SEQ ID NO: 225337 - DNA, 13 bp, Artificial Sequence
  Oligonucleotide for detection of SNP TSC0054935
attaaatgtatay

SEQ ID NO: 225338 - DNA, 13 bp, Artificial Sequence
  Oligonucleotide for detection of SNP TSC0054935
rtatacatttaat

SEQ ID NO: 225339 - DNA, 13 bp, Artificial Sequence
  Oligonucleotide for detection of SNP TSC0054935
attaaaggtatay

SEQ ID NO: 225340 - DNA, 13 bp, Artificial Sequence
  Oligonucleotide for detection of SNP TSC0054935
rtatacctttaat

SEQ ID NO: 225341 - DNA, 13 bp, Artificial Sequence
  Oligonucleotide for detection of SNP TSC0054935
gtatgtatttgat

SEQ ID NO: 225342 - DNA, 13 bp, Artificial Sequence
  Oligonucleotide for detection of SNP TSC0054935
atcaaatacatac

SEQ ID NO: 225343 - DNA, 13 bp, Artificial Sequence
  Oligonucleotide for detection of SNP TSC0054935
gtatgtttttgat

SEQ ID NO: 225344 - DNA, 13 bp, Artificial Sequence
  Oligonucleotide for detection of SNP TSC0054935
atcaaaaacatac

SEQ ID NO: 225345 - DNA, 13 bp, Artificial Sequence
  Oligonucleotide for detection of SNP TSC0054938
gttttaagggtay

SEQ ID NO: 225346 - DNA, 13 bp, Artificial Sequence
  Oligonucleotide for detection of SNP TSC0054938
rtacccttaaaac

SEQ ID NO: 225347 - DNA, 13 bp, Artificial Sequence
  Oligonucleotide for detection of SNP TSC0054938
gttttaggggtay

SEQ ID NO: 225348 - DNA, 13 bp, Artificial Sequence
  Oligonucleotide for detection of SNP TSC0054938
rtacccctaaaac

SEQ ID NO: 225349 - DNA, 13 bp, Artificial Sequence
  Oligonucleotide for detection of SNP TSC0054939
ttgttttgtttat

SEQ ID NO: 225350 - DNA, 13 bp, Artificial Sequence
  Oligonucleotide for detection of SNP TSC0054939
ataaacaaaacaa

SEQ ID NO: 225351 - DNA, 13 bp, Artificial Sequence
  Oligonucleotide for detection of SNP TSC0054939
tcgttttgtttat

SEQ ID NO: 225352 - DNA, 13 bp, Artificial Sequence
  Oligonucleotide for detection of SNP TSC0054939
ataaacaaaacga

SEQ ID NO: 225353 - DNA, 13 bp, Artificial Sequence
  Oligonucleotide for detection of SNP TSC0054939
ttgtttcgtttat

SEQ ID NO: 225354 - DNA, 13 bp, Artificial Sequence
  Oligonucleotide for detection of SNP TSC0054939
ataaacgaaacaa

SEQ ID NO: 225355 - DNA, 13 bp, Artificial Sequence
  Oligonucleotide for detection of SNP TSC0054939
tcgtttcgtttat

SEQ ID NO: 225356 - DNA, 13 bp, Artificial Sequence
  Oligonucleotide for detection of SNP TSC0054939
ataaacgaaacga

SEQ ID NO: 225357 - DNA, 13 bp, Artificial Sequence
  Oligonucleotide for detection of SNP TSC0054939
atggatggagtga

SEQ ID NO: 225358 - DNA, 13 bp, Artificial Sequence
  Oligonucleotide for detection of SNP TSC0054939
tcactccatccat

SEQ ID NO: 225359 - DNA, 13 bp, Artificial Sequence
  Oligonucleotide for detection of SNP TSC0054939
atggatagagtga

SEQ ID NO: 225360 - DNA, 13 bp, Artificial Sequence
  Oligonucleotide for detection of SNP TSC0054939
tcactctatccat

SEQ ID NO: 225361 - DNA, 13 bp, Artificial Sequence
  Oligonucleotide for detection of SNP TSC0054939
atggacggagtga

SEQ ID NO: 225362 - DNA, 13 bp, Artificial Sequence
  Oligonucleotide for detection of SNP TSC0054939
tcactccgtccat

SEQ ID NO: 225363 - DNA, 13 bp, Artificial Sequence
  Oligonucleotide for detection of SNP TSC0054939
atggatagagcga

SEQ ID NO: 225364 - DNA, 13 bp, Artificial Sequence
  Oligonucleotide for detection of SNP TSC0054939
tcgctctatccat

SEQ ID NO: 225365 - DNA, 13 bp, Artificial Sequence
  Oligonucleotide for detection of SNP TSC0054939
atggatggagcga

SEQ ID NO: 225366 - DNA, 13 bp, Artificial Sequence
  Oligonucleotide for detection of SNP TSC0054939
tcgctccatccat

SEQ ID NO: 225367 - DNA, 13 bp, Artificial Sequence
  Oligonucleotide for detection of SNP TSC0054939
atggacggagcga

SEQ ID NO: 225368 - DNA, 13 bp, Artificial Sequence
  Oligonucleotide for detection of SNP TSC0054939
tcgctccgtccat

SEQ ID NO: 225369 - DNA, 13 bp, Artificial Sequence
  Oligonucleotide for detection of SNP TSC0054940
tgtgttataaatt

SEQ ID NO: 225370 - DNA, 13 bp, Artificial Sequence
  Oligonucleotide for detection of SNP TSC0054940
aatttataacaca

SEQ ID NO: 225371 - DNA, 13 bp, Artificial Sequence
  Oligonucleotide for detection of SNP TSC0054940
tgtgttgtaaatt

SEQ ID NO: 225372 - DNA, 13 bp, Artificial Sequence
  Oligonucleotide for detection of SNP TSC0054940
aatttacaacaca

SEQ ID NO: 225373 - DNA, 13 bp, Artificial Sequence
  Oligonucleotide for detection of SNP TSC0054940
tgtgtcgtaaatt

SEQ ID NO: 225374 - DNA, 13 bp, Artificial Sequence
  Oligonucleotide for detection of SNP TSC0054940
aatttacgacaca

SEQ ID NO: 225375 - DNA, 13 bp, Artificial Sequence
  Oligonucleotide for detection of SNP TSC0054940
agtttgtggtata

SEQ ID NO: 225376 - DNA, 13 bp, Artificial Sequence
  Oligonucleotide for detection of SNP TSC0054940
tataccacaaact

SEQ ID NO: 225377 - DNA, 13 bp, Artificial Sequence
  Oligonucleotide for detection of SNP TSC0054940
agtttgcggtata

SEQ ID NO: 225378 - DNA, 13 bp, Artificial Sequence
  Oligonucleotide for detection of SNP TSC0054940
tataccgcaaact

SEQ ID NO: 225379 - DNA, 13 bp, Artificial Sequence
  Oligonucleotide for detection of SNP TSC0009496
ggttttaggaatt

SEQ ID NO: 225380 - DNA, 13 bp, Artificial Sequence
  Oligonucleotide for detection of SNP TSC0009496
aattcctaaaacc

SEQ ID NO: 225381 - DNA, 13 bp, Artificial Sequence
  Oligonucleotide for detection of SNP TSC0009496
ggttttgggaatt

SEQ ID NO: 225382 - DNA, 13 bp, Artificial Sequence
  Oligonucleotide for detection of SNP TSC0009496
aattcccaaaacc

SEQ ID NO: 225383 - DNA, 13 bp, Artificial Sequence
  Oligonucleotide for detection of SNP TSC0009496
ggtttcgggaatt

SEQ ID NO: 225384 - DNA, 13 bp, Artificial Sequence
  Oligonucleotide for detection of SNP TSC0009496
aattcccgaaacc

SEQ ID NO: 225385 - DNA, 13 bp, Artificial Sequence
  Oligonucleotide for detection of SNP TSC0009496
agtttttggaaty

SEQ ID NO: 225386 - DNA, 13 bp, Artificial Sequence
  Oligonucleotide for detection of SNP TSC0009496
rattccaaaaact

SEQ ID NO: 225387 - DNA, 13 bp, Artificial Sequence
  Oligonucleotide for detection of SNP TSC0009496
agttttcggaaty

SEQ ID NO: 225388 - DNA, 13 bp, Artificial Sequence
  Oligonucleotide for detection of SNP TSC0009496
rattccgaaaact

SEQ ID NO: 225389 - DNA, 13 bp, Artificial Sequence
  Oligonucleotide for detection of SNP TSC0054942
gagttatttataa

SEQ ID NO: 225390 - DNA, 13 bp, Artificial Sequence
  Oligonucleotide for detection of SNP TSC0054942
ttataaataactc

SEQ ID NO: 225391 - DNA, 13 bp, Artificial Sequence
  Oligonucleotide for detection of SNP TSC0054942
gagttagttataa

SEQ ID NO: 225392 - DNA, 13 bp, Artificial Sequence
  Oligonucleotide for detection of SNP TSC0054942
ttataactaactc

SEQ ID NO: 225393 - DNA, 13 bp, Artificial Sequence
  Oligonucleotide for detection of SNP TSC0054942
ttgtaaatagtty

SEQ ID NO: 225394 - DNA, 13 bp, Artificial Sequence
  Oligonucleotide for detection of SNP TSC0054942
raactatttacaa

SEQ ID NO: 225395 - DNA, 13 bp, Artificial Sequence
  Oligonucleotide for detection of SNP TSC0054942
ttgtaattagtty

SEQ ID NO: 225396 - DNA, 13 bp, Artificial Sequence
  Oligonucleotide for detection of SNP TSC0054942
raactaattacaa

SEQ ID NO: 225397 - DNA, 13 bp, Artificial Sequence
  Oligonucleotide for detection of SNP TSC0054945
tggtgtatgggaa

SEQ ID NO: 225398 - DNA, 13 bp, Artificial Sequence
  Oligonucleotide for detection of SNP TSC0054945
ttcccatacacca

SEQ ID NO: 225399 - DNA, 13 bp, Artificial Sequence
  Oligonucleotide for detection of SNP TSC0054945
tggtgtttgggaa

SEQ ID NO: 225400 - DNA, 13 bp, Artificial Sequence
  Oligonucleotide for detection of SNP TSC0054945
ttcccaaacacca

SEQ ID NO: 225401 - DNA, 13 bp, Artificial Sequence
  Oligonucleotide for detection of SNP TSC0054945
tttttaggtatta

SEQ ID NO: 225402 - DNA, 13 bp, Artificial Sequence
  Oligonucleotide for detection of SNP TSC0054945
taatacctaaaaa

SEQ ID NO: 225403 - DNA, 13 bp, Artificial Sequence
  Oligonucleotide for detection of SNP TSC0054946
ttttttgtagtga

SEQ ID NO: 225404 - DNA, 13 bp, Artificial Sequence
  Oligonucleotide for detection of SNP TSC0054946
tcactacaaaaaa

SEQ ID NO: 225405 - DNA, 13 bp, Artificial Sequence
  Oligonucleotide for detection of SNP TSC0054948
ttagttattattt

SEQ ID NO: 225406 - DNA, 13 bp, Artificial Sequence
  Oligonucleotide for detection of SNP TSC0054948
aaataataactaa

SEQ ID NO: 225407 - DNA, 13 bp, Artificial Sequence
  Oligonucleotide for detection of SNP TSC0054948
ttagtcgttattt

SEQ ID NO: 225408 - DNA, 13 bp, Artificial Sequence
  Oligonucleotide for detection of SNP TSC0054948
aaataacgactaa

SEQ ID NO: 225409 - DNA, 13 bp, Artificial Sequence
  Oligonucleotide for detection of SNP TSC0054948
aggtgatgattga

SEQ ID NO: 225410 - DNA, 13 bp, Artificial Sequence
  Oligonucleotide for detection of SNP TSC0054948
tcaatcatcacct

SEQ ID NO: 225411 - DNA, 13 bp, Artificial Sequence
  Oligonucleotide for detection of SNP TSC0054948
aggtgacgattga

SEQ ID NO: 225412 - DNA, 13 bp, Artificial Sequence
  Oligonucleotide for detection of SNP TSC0054948
tcaatcgtcacct

SEQ ID NO: 225413 - DNA, 13 bp, Artificial Sequence
  Oligonucleotide for detection of SNP TSC0054949
gtgtgtatgtacg

SEQ ID NO: 225414 - DNA, 13 bp, Artificial Sequence
  Oligonucleotide for detection of SNP TSC0054949
cgtacatacacac

SEQ ID NO: 225415 - DNA, 13 bp, Artificial Sequence
  Oligonucleotide for detection of SNP TSC0054949
gtgtgtacgtacg

SEQ ID NO: 225416 - DNA, 13 bp, Artificial Sequence
  Oligonucleotide for detection of SNP TSC0054949
cgtacgtacacac

SEQ ID NO: 225417 - DNA, 13 bp, Artificial Sequence
  Oligonucleotide for detection of SNP TSC0054949
gtgtgtgtgtacg

SEQ ID NO: 225418 - DNA, 13 bp, Artificial Sequence
  Oligonucleotide for detection of SNP TSC0054949
cgtacacacacac

SEQ ID NO: 225419 - DNA, 13 bp, Artificial Sequence
  Oligonucleotide for detection of SNP TSC0054949
gtgtgcgcgtatg

SEQ ID NO: 225420 - DNA, 13 bp, Artificial Sequence
  Oligonucleotide for detection of SNP TSC0054949
catacgcgcacac

SEQ ID NO: 225421 - DNA, 13 bp, Artificial Sequence
  Oligonucleotide for detection of SNP TSC0054949
gtgtgcgtgtacg

SEQ ID NO: 225422 - DNA, 13 bp, Artificial Sequence
  Oligonucleotide for detection of SNP TSC0054949
cgtacacgcacac

SEQ ID NO: 225423 - DNA, 13 bp, Artificial Sequence
  Oligonucleotide for detection of SNP TSC0054949
gtgtgtgcgtacg

SEQ ID NO: 225424 - DNA, 13 bp, Artificial Sequence
  Oligonucleotide for detection of SNP TSC0054949
cgtacgcacacac

SEQ ID NO: 225425 - DNA, 13 bp, Artificial Sequence
  Oligonucleotide for detection of SNP TSC0054949
gtgtgcgcgtacg

SEQ ID NO: 225426 - DNA, 13 bp, Artificial Sequence
  Oligonucleotide for detection of SNP TSC0054949
cgtacgcgcacac

SEQ ID NO: 225427 - DNA, 13 bp, Artificial Sequence
  Oligonucleotide for detection of SNP TSC0054949
tgtgtgtgtatay

SEQ ID NO: 225428 - DNA, 13 bp, Artificial Sequence
  Oligonucleotide for detection of SNP TSC0054949
rtatacacacaca

SEQ ID NO: 225429 - DNA, 13 bp, Artificial Sequence
  Oligonucleotide for detection of SNP TSC0054949
cgtgtgtgtatay

SEQ ID NO: 225430 - DNA, 13 bp, Artificial Sequence
  Oligonucleotide for detection of SNP TSC0054949
rtatacacacacg

SEQ ID NO: 225431 - DNA, 13 bp, Artificial Sequence
  Oligonucleotide for detection of SNP TSC0054949
tgtgcgtgtatay

SEQ ID NO: 225432 - DNA, 13 bp, Artificial Sequence
  Oligonucleotide for detection of SNP TSC0054949
rtatacacgcaca

SEQ ID NO: 225433 - DNA, 13 bp, Artificial Sequence
  Oligonucleotide for detection of SNP TSC0054949
cgtgcgtgtatay

SEQ ID NO: 225434 - DNA, 13 bp, Artificial Sequence
  Oligonucleotide for detection of SNP TSC0054949
rtatacacgcacg

SEQ ID NO: 225435 - DNA, 13 bp, Artificial Sequence
  Oligonucleotide for detection of SNP TSC0054949
tgtgtgcgtatay

SEQ ID NO: 225436 - DNA, 13 bp, Artificial Sequence
  Oligonucleotide for detection of SNP TSC0054949
rtatacgcacaca

SEQ ID NO: 225437 - DNA, 13 bp, Artificial Sequence
  Oligonucleotide for detection of SNP TSC0054949
cgtgtgcgtatay

SEQ ID NO: 225438 - DNA, 13 bp, Artificial Sequence
  Oligonucleotide for detection of SNP TSC0054949
rtatacgcacacg

SEQ ID NO: 225439 - DNA, 13 bp, Artificial Sequence
  Oligonucleotide for detection of SNP TSC0054949
tgtgcgcgtatay

SEQ ID NO: 225440 - DNA, 13 bp, Artificial Sequence
  Oligonucleotide for detection of SNP TSC0054949
rtatacgcgcaca

SEQ ID NO: 225441 - DNA, 13 bp, Artificial Sequence
  Oligonucleotide for detection of SNP TSC0054949
cgtgcgcgtatay

SEQ ID NO: 225442 - DNA, 13 bp, Artificial Sequence
  Oligonucleotide for detection of SNP TSC0054949
rtatacgcgcacg

SEQ ID NO: 225443 - DNA, 13 bp, Artificial Sequence
  Oligonucleotide for detection of SNP TSC0054950
aataaaaagattt

SEQ ID NO: 225444 - DNA, 13 bp, Artificial Sequence
  Oligonucleotide for detection of SNP TSC0054950
aaatctttttatt

SEQ ID NO: 225445 - DNA, 13 bp, Artificial Sequence
  Oligonucleotide for detection of SNP TSC0054950
aataaatagattt

SEQ ID NO: 225446 - DNA, 13 bp, Artificial Sequence
  Oligonucleotide for detection of SNP TSC0054950
aaatctatttatt

SEQ ID NO: 225447 - DNA, 13 bp, Artificial Sequence
  Oligonucleotide for detection of SNP TSC0054950
aaatttttttatt

SEQ ID NO: 225448 - DNA, 13 bp, Artificial Sequence
  Oligonucleotide for detection of SNP TSC0054950
aataaaaaaattt

SEQ ID NO: 225449 - DNA, 13 bp, Artificial Sequence
  Oligonucleotide for detection of SNP TSC0054952
gtgtgtatttata

SEQ ID NO: 225450 - DNA, 13 bp, Artificial Sequence
  Oligonucleotide for detection of SNP TSC0054952
tataaatacacac

SEQ ID NO: 225451 - DNA, 13 bp, Artificial Sequence
  Oligonucleotide for detection of SNP TSC0054952
gtgtgtgtttata

SEQ ID NO: 225452 - DNA, 13 bp, Artificial Sequence
  Oligonucleotide for detection of SNP TSC0054952
tataaacacacac

SEQ ID NO: 225453 - DNA, 13 bp, Artificial Sequence
  Oligonucleotide for detection of SNP TSC0054952
gcgtgtatttata

SEQ ID NO: 225454 - DNA, 13 bp, Artificial Sequence
  Oligonucleotide for detection of SNP TSC0054952
tataaatacacgc

SEQ ID NO: 225455 - DNA, 13 bp, Artificial Sequence
  Oligonucleotide for detection of SNP TSC0054952
gcgtgtgtttata

SEQ ID NO: 225456 - DNA, 13 bp, Artificial Sequence
  Oligonucleotide for detection of SNP TSC0054952
tataaacacacgc

SEQ ID NO: 225457 - DNA, 13 bp, Artificial Sequence
  Oligonucleotide for detection of SNP TSC0054953
ggttatagtggat

SEQ ID NO: 225458 - DNA, 13 bp, Artificial Sequence
  Oligonucleotide for detection of SNP TSC0054953
atccactataacc

SEQ ID NO: 225459 - DNA, 13 bp, Artificial Sequence
  Oligonucleotide for detection of SNP TSC0054953
ggttattgtggat

SEQ ID NO: 225460 - DNA, 13 bp, Artificial Sequence
  Oligonucleotide for detection of SNP TSC0054953
atccacaataacc

SEQ ID NO: 225461 - DNA, 13 bp, Artificial Sequence
  Oligonucleotide for detection of SNP TSC0054953
atttattatgaty

SEQ ID NO: 225462 - DNA, 13 bp, Artificial Sequence
  Oligonucleotide for detection of SNP TSC0054953
ratcataataaat

SEQ ID NO: 225463 - DNA, 13 bp, Artificial Sequence
  Oligonucleotide for detection of SNP TSC0054953
atttataatgaty

SEQ ID NO: 225464 - DNA, 13 bp, Artificial Sequence
  Oligonucleotide for detection of SNP TSC0054953
ratcattataaat

SEQ ID NO: 225465 - DNA, 13 bp, Artificial Sequence
  Oligonucleotide for detection of SNP TSC0054954
atattatagttga

SEQ ID NO: 225466 - DNA, 13 bp, Artificial Sequence
  Oligonucleotide for detection of SNP TSC0054954
tcaactataatat

SEQ ID NO: 225467 - DNA, 13 bp, Artificial Sequence
  Oligonucleotide for detection of SNP TSC0054954
atattagagttga

SEQ ID NO: 225468 - DNA, 13 bp, Artificial Sequence
  Oligonucleotide for detection of SNP TSC0054954
tcaactctaatat

SEQ ID NO: 225469 - DNA, 13 bp, Artificial Sequence
  Oligonucleotide for detection of SNP TSC0054954
ttaattatgatat

SEQ ID NO: 225470 - DNA, 13 bp, Artificial Sequence
  Oligonucleotide for detection of SNP TSC0054954
atatcataattaa

SEQ ID NO: 225471 - DNA, 13 bp, Artificial Sequence
  Oligonucleotide for detection of SNP TSC0054954
ttaattttgatat

SEQ ID NO: 225472 - DNA, 13 bp, Artificial Sequence
  Oligonucleotide for detection of SNP TSC0054954
atatcaaaattaa

SEQ ID NO: 225473 - DNA, 13 bp, Artificial Sequence
  Oligonucleotide for detection of SNP TSC0054955
gattgtaagagag

SEQ ID NO: 225474 - DNA, 13 bp, Artificial Sequence
  Oligonucleotide for detection of SNP TSC0054955
ctctcttacaatc

SEQ ID NO: 225475 - DNA, 13 bp, Artificial Sequence
  Oligonucleotide for detection of SNP TSC0054955
gattgttagagag

SEQ ID NO: 225476 - DNA, 13 bp, Artificial Sequence
  Oligonucleotide for detection of SNP TSC0054955
ctctctaacaatc

SEQ ID NO: 225477 - DNA, 13 bp, Artificial Sequence
  Oligonucleotide for detection of SNP TSC0054956
ggatgtagtgatt

SEQ ID NO: 225478 - DNA, 13 bp, Artificial Sequence
  Oligonucleotide for detection of SNP TSC0054956
aatcactacatcc

SEQ ID NO: 225479 - DNA, 13 bp, Artificial Sequence
  Oligonucleotide for detection of SNP TSC0054956
ggatgtggtgatt

SEQ ID NO: 225480 - DNA, 13 bp, Artificial Sequence
  Oligonucleotide for detection of SNP TSC0054956
aatcaccacatcc

SEQ ID NO: 225481 - DNA, 13 bp, Artificial Sequence
  Oligonucleotide for detection of SNP TSC0054956
ggacgtagtgatt

SEQ ID NO: 225482 - DNA, 13 bp, Artificial Sequence
  Oligonucleotide for detection of SNP TSC0054956
aatcactacgtcc

SEQ ID NO: 225483 - DNA, 13 bp, Artificial Sequence
  Oligonucleotide for detection of SNP TSC0054956
ggacgtggtgatt

SEQ ID NO: 225484 - DNA, 13 bp, Artificial Sequence
  Oligonucleotide for detection of SNP TSC0054956
aatcaccacgtcc

SEQ ID NO: 225485 - DNA, 13 bp, Artificial Sequence
  Oligonucleotide for detection of SNP TSC0054956
ggatgcggtgatt

SEQ ID NO: 225486 - DNA, 13 bp, Artificial Sequence
  Oligonucleotide for detection of SNP TSC0054956
aatcaccgcatcc

SEQ ID NO: 225487 - DNA, 13 bp, Artificial Sequence
  Oligonucleotide for detection of SNP TSC0054956
ggacgcggtgatt

SEQ ID NO: 225488 - DNA, 13 bp, Artificial Sequence
  Oligonucleotide for detection of SNP TSC0054956
aatcaccgcgtcc

SEQ ID NO: 225489 - DNA, 13 bp, Artificial Sequence
  Oligonucleotide for detection of SNP TSC0054958
taggtagtgttgy

SEQ ID NO: 225490 - DNA, 13 bp, Artificial Sequence
  Oligonucleotide for detection of SNP TSC0054958
rcaacactaccta

SEQ ID NO: 225491 - DNA, 13 bp, Artificial Sequence
  Oligonucleotide for detection of SNP TSC0054958
taggtaatgttgy

SEQ ID NO: 225492 - DNA, 13 bp, Artificial Sequence
  Oligonucleotide for detection of SNP TSC0054958
rcaacattaccta

SEQ ID NO: 225493 - DNA, 13 bp, Artificial Sequence
  Oligonucleotide for detection of SNP TSC0054966
taagtttttatat

SEQ ID NO: 225494 - DNA, 13 bp, Artificial Sequence
  Oligonucleotide for detection of SNP TSC0054966
atataaaaactta

SEQ ID NO: 225495 - DNA, 13 bp, Artificial Sequence
  Oligonucleotide for detection of SNP TSC0054966
taagttgttatat

SEQ ID NO: 225496 - DNA, 13 bp, Artificial Sequence
  Oligonucleotide for detection of SNP TSC0054966
atataacaactta

SEQ ID NO: 225497 - DNA, 13 bp, Artificial Sequence
  Oligonucleotide for detection of SNP TSC0054966
atatgaaaattta

SEQ ID NO: 225498 - DNA, 13 bp, Artificial Sequence
  Oligonucleotide for detection of SNP TSC0054966
taaattttcatat

SEQ ID NO: 225499 - DNA, 13 bp, Artificial Sequence
  Oligonucleotide for detection of SNP TSC0054966
atatgataattta

SEQ ID NO: 225500 - DNA, 13 bp, Artificial Sequence
  Oligonucleotide for detection of SNP TSC0054966
taaattatcatat

SEQ ID NO: 225501 - DNA, 13 bp, Artificial Sequence
  Oligonucleotide for detection of SNP TSC0054967
ttaattttttgta

SEQ ID NO: 225502 - DNA, 13 bp, Artificial Sequence
  Oligonucleotide for detection of SNP TSC0054967
tacaaaaaattaa

SEQ ID NO: 225503 - DNA, 13 bp, Artificial Sequence
  Oligonucleotide for detection of SNP TSC0054967
tatagggaattaa

SEQ ID NO: 225504 - DNA, 13 bp, Artificial Sequence
  Oligonucleotide for detection of SNP TSC0054967
ttaattccctata

SEQ ID NO: 225505 - DNA, 13 bp, Artificial Sequence
  Oligonucleotide for detection of SNP TSC0054967
tataggtaattaa

SEQ ID NO: 225506 - DNA, 13 bp, Artificial Sequence
  Oligonucleotide for detection of SNP TSC0054967
ttaattacctata

SEQ ID NO: 225507 - DNA, 13 bp, Artificial Sequence
  Oligonucleotide for detection of SNP TSC0054968
tgtatagtgtgtt

SEQ ID NO: 225508 - DNA, 13 bp, Artificial Sequence
  Oligonucleotide for detection of SNP TSC0054968
aacacactataca

SEQ ID NO: 225509 - DNA, 13 bp, Artificial Sequence
  Oligonucleotide for detection of SNP TSC0054968
tgtataatgtgtt

SEQ ID NO: 225510 - DNA, 13 bp, Artificial Sequence
  Oligonucleotide for detection of SNP TSC0054968
aacacattataca

SEQ ID NO: 225511 - DNA, 13 bp, Artificial Sequence
  Oligonucleotide for detection of SNP TSC0054969
tattttatttagg

SEQ ID NO: 225512 - DNA, 13 bp, Artificial Sequence
  Oligonucleotide for detection of SNP TSC0054969
cctaaataaaata

SEQ ID NO: 225513 - DNA, 13 bp, Artificial Sequence
  Oligonucleotide for detection of SNP TSC0054970
gttgataattggt

SEQ ID NO: 225514 - DNA, 13 bp, Artificial Sequence
  Oligonucleotide for detection of SNP TSC0054970
accaattatcaac

SEQ ID NO: 225515 - DNA, 13 bp, Artificial Sequence
  Oligonucleotide for detection of SNP TSC0054970
gttgatgattggt

SEQ ID NO: 225516 - DNA, 13 bp, Artificial Sequence
  Oligonucleotide for detection of SNP TSC0054970
accaatcatcaac

SEQ ID NO: 225517 - DNA, 13 bp, Artificial Sequence
  Oligonucleotide for detection of SNP TSC0054970
gttgacgattggt

SEQ ID NO: 225518 - DNA, 13 bp, Artificial Sequence
  Oligonucleotide for detection of SNP TSC0054970
accaatcgtcaac

SEQ ID NO: 225519 - DNA, 13 bp, Artificial Sequence
  Oligonucleotide for detection of SNP TSC0054970
attagttgttaay

SEQ ID NO: 225520 - DNA, 13 bp, Artificial Sequence
  Oligonucleotide for detection of SNP TSC0054970
rttaacaactaat

SEQ ID NO: 225521 - DNA, 13 bp, Artificial Sequence
  Oligonucleotide for detection of SNP TSC0054970
attagtcgttaay

SEQ ID NO: 225522 - DNA, 13 bp, Artificial Sequence
  Oligonucleotide for detection of SNP TSC0054970
rttaacgactaat

SEQ ID NO: 225523 - DNA, 13 bp, Artificial Sequence
  Oligonucleotide for detection of SNP TSC0054971
tataggataagag

SEQ ID NO: 225524 - DNA, 13 bp, Artificial Sequence
  Oligonucleotide for detection of SNP TSC0054971
ctcttatcctata

SEQ ID NO: 225525 - DNA, 13 bp, Artificial Sequence
  Oligonucleotide for detection of SNP TSC0054971
tatagggtaagag

SEQ ID NO: 225526 - DNA, 13 bp, Artificial Sequence
  Oligonucleotide for detection of SNP TSC0054971
ctcttaccctata

SEQ ID NO: 225527 - DNA, 13 bp, Artificial Sequence
  Oligonucleotide for detection of SNP TSC0054973
tttatagtaaaat

SEQ ID NO: 225528 - DNA, 13 bp, Artificial Sequence
  Oligonucleotide for detection of SNP TSC0054973
attttactataaa

SEQ ID NO: 225529 - DNA, 13 bp, Artificial Sequence
  Oligonucleotide for detection of SNP TSC0054973
tttataataaaat

SEQ ID NO: 225530 - DNA, 13 bp, Artificial Sequence
  Oligonucleotide for detection of SNP TSC0054973
attttattataaa

SEQ ID NO: 225531 - DNA, 13 bp, Artificial Sequence
  Oligonucleotide for detection of SNP TSC0054975
tgaagtataatta

SEQ ID NO: 225532 - DNA, 13 bp, Artificial Sequence
  Oligonucleotide for detection of SNP TSC0054975
taattatacttca

SEQ ID NO: 225533 - DNA, 13 bp, Artificial Sequence
  Oligonucleotide for detection of SNP TSC0054975
tgaagtgtaatta

SEQ ID NO: 225534 - DNA, 13 bp, Artificial Sequence
  Oligonucleotide for detection of SNP TSC0054975
taattacacttca

SEQ ID NO: 225535 - DNA, 13 bp, Artificial Sequence
  Oligonucleotide for detection of SNP TSC0054975
tgaagcgtaatta

SEQ ID NO: 225536 - DNA, 13 bp, Artificial Sequence
  Oligonucleotide for detection of SNP TSC0054975
taattacgcttca

SEQ ID NO: 225537 - DNA, 13 bp, Artificial Sequence
  Oligonucleotide for detection of SNP TSC0054977
taggagtgtatta

SEQ ID NO: 225538 - DNA, 13 bp, Artificial Sequence
  Oligonucleotide for detection of SNP TSC0054977
taatacactccta

SEQ ID NO: 225539 - DNA, 13 bp, Artificial Sequence
  Oligonucleotide for detection of SNP TSC0054977
taggagggtatta

SEQ ID NO: 225540 - DNA, 13 bp, Artificial Sequence
  Oligonucleotide for detection of SNP TSC0054977
taataccctccta

SEQ ID NO: 225541 - DNA, 13 bp, Artificial Sequence
  Oligonucleotide for detection of SNP TSC0054977
taggagcgtatta

SEQ ID NO: 225542 - DNA, 13 bp, Artificial Sequence
  Oligonucleotide for detection of SNP TSC0054977
taatacgctccta

SEQ ID NO: 225543 - DNA, 13 bp, Artificial Sequence
  Oligonucleotide for detection of SNP TSC0054977
tgatgcgtttttg

SEQ ID NO: 225544 - DNA, 13 bp, Artificial Sequence
  Oligonucleotide for detection of SNP TSC0054977
caaaaacgcatca

SEQ ID NO: 225545 - DNA, 13 bp, Artificial Sequence
  Oligonucleotide for detection of SNP TSC0054978
atgtatataatgy

SEQ ID NO: 225546 - DNA, 13 bp, Artificial Sequence
  Oligonucleotide for detection of SNP TSC0054978
rcattatatacat

SEQ ID NO: 225547 - DNA, 13 bp, Artificial Sequence
  Oligonucleotide for detection of SNP TSC0054978
atgtatgtaatgy

SEQ ID NO: 225548 - DNA, 13 bp, Artificial Sequence
  Oligonucleotide for detection of SNP TSC0054978
rcattacatacat

SEQ ID NO: 225549 - DNA, 13 bp, Artificial Sequence
  Oligonucleotide for detection of SNP TSC0054979
gagatttttgtga

SEQ ID NO: 225550 - DNA, 13 bp, Artificial Sequence
  Oligonucleotide for detection of SNP TSC0054979
tcacaaaaatctc

SEQ ID NO: 225551 - DNA, 13 bp, Artificial Sequence
  Oligonucleotide for detection of SNP TSC0054979
gagattgttgtga

SEQ ID NO: 225552 - DNA, 13 bp, Artificial Sequence
  Oligonucleotide for detection of SNP TSC0054979
tcacaacaatctc

SEQ ID NO: 225553 - DNA, 13 bp, Artificial Sequence
  Oligonucleotide for detection of SNP TSC0054979
ttataggagttty

SEQ ID NO: 225554 - DNA, 13 bp, Artificial Sequence
  Oligonucleotide for detection of SNP TSC0054979
raaactcctataa

SEQ ID NO: 225555 - DNA, 13 bp, Artificial Sequence
  Oligonucleotide for detection of SNP TSC0054980
tagagttggtgty

SEQ ID NO: 225556 - DNA, 13 bp, Artificial Sequence
  Oligonucleotide for detection of SNP TSC0054980
racaccaactcta

SEQ ID NO: 225557 - DNA, 13 bp, Artificial Sequence
  Oligonucleotide for detection of SNP TSC0054980
tagagtgggtgty

SEQ ID NO: 225558 - DNA, 13 bp, Artificial Sequence
  Oligonucleotide for detection of SNP TSC0054980
racacccactcta

SEQ ID NO: 225559 - DNA, 13 bp, Artificial Sequence
  Oligonucleotide for detection of SNP TSC0054980
tagagtcggtgty

SEQ ID NO: 225560 - DNA, 13 bp, Artificial Sequence
  Oligonucleotide for detection of SNP TSC0054980
racaccgactcta

SEQ ID NO: 225561 - DNA, 13 bp, Artificial Sequence
  Oligonucleotide for detection of SNP TSC0054981
tattgtatatatt

SEQ ID NO: 225562 - DNA, 13 bp, Artificial Sequence
  Oligonucleotide for detection of SNP TSC0054981
aatatatacaata

SEQ ID NO: 225563 - DNA, 13 bp, Artificial Sequence
  Oligonucleotide for detection of SNP TSC0054981
tattgtttatatt

SEQ ID NO: 225564 - DNA, 13 bp, Artificial Sequence
  Oligonucleotide for detection of SNP TSC0054981
aatataaacaata

SEQ ID NO: 225565 - DNA, 13 bp, Artificial Sequence
  Oligonucleotide for detection of SNP TSC0054981
aatatatatagta

SEQ ID NO: 225566 - DNA, 13 bp, Artificial Sequence
  Oligonucleotide for detection of SNP TSC0054981
tactatatatatt

SEQ ID NO: 225567 - DNA, 13 bp, Artificial Sequence
  Oligonucleotide for detection of SNP TSC0054981
aatatagatagta

SEQ ID NO: 225568 - DNA, 13 bp, Artificial Sequence
  Oligonucleotide for detection of SNP TSC0054981
tactatctatatt

SEQ ID NO: 225569 - DNA, 13 bp, Artificial Sequence
  Oligonucleotide for detection of SNP TSC0054982
tggtaggtgttta

SEQ ID NO: 225570 - DNA, 13 bp, Artificial Sequence
  Oligonucleotide for detection of SNP TSC0054982
taaacacctacca

SEQ ID NO: 225571 - DNA, 13 bp, Artificial Sequence
  Oligonucleotide for detection of SNP TSC0054982
tggtagatgttta

SEQ ID NO: 225572 - DNA, 13 bp, Artificial Sequence
  Oligonucleotide for detection of SNP TSC0054982
taaacatctacca

SEQ ID NO: 225573 - DNA, 13 bp, Artificial Sequence
  Oligonucleotide for detection of SNP TSC0054982
cggtaggtgttta

SEQ ID NO: 225574 - DNA, 13 bp, Artificial Sequence
  Oligonucleotide for detection of SNP TSC0054982
taaacacctaccg

SEQ ID NO: 225575 - DNA, 13 bp, Artificial Sequence
  Oligonucleotide for detection of SNP TSC0054982
cggtagatgttta

SEQ ID NO: 225576 - DNA, 13 bp, Artificial Sequence
  Oligonucleotide for detection of SNP TSC0054982
taaacatctaccg

SEQ ID NO: 225577 - DNA, 13 bp, Artificial Sequence
  Oligonucleotide for detection of SNP TSC0054986
taatgaagtttgy

SEQ ID NO: 225578 - DNA, 13 bp, Artificial Sequence
  Oligonucleotide for detection of SNP TSC0054986
rcaaacttcatta

SEQ ID NO: 225579 - DNA, 13 bp, Artificial Sequence
  Oligonucleotide for detection of SNP TSC0054986
taatgaggtttgy

SEQ ID NO: 225580 - DNA, 13 bp, Artificial Sequence
  Oligonucleotide for detection of SNP TSC0054986
rcaaacctcatta

SEQ ID NO: 225581 - DNA, 13 bp, Artificial Sequence
  Oligonucleotide for detection of SNP TSC0054990
aatagtagtagag

SEQ ID NO: 225582 - DNA, 13 bp, Artificial Sequence
  Oligonucleotide for detection of SNP TSC0054990
ctctactactatt

SEQ ID NO: 225583 - DNA, 13 bp, Artificial Sequence
  Oligonucleotide for detection of SNP TSC0054990
aatagttgtagag

SEQ ID NO: 225584 - DNA, 13 bp, Artificial Sequence
  Oligonucleotide for detection of SNP TSC0054990
ctctacaactatt

SEQ ID NO: 225585 - DNA, 13 bp, Artificial Sequence
  Oligonucleotide for detection of SNP TSC0054990
aatagtggtagag

SEQ ID NO: 225586 - DNA, 13 bp, Artificial Sequence
  Oligonucleotide for detection of SNP TSC0054990
ctctaccactatt

SEQ ID NO: 225587 - DNA, 13 bp, Artificial Sequence
  Oligonucleotide for detection of SNP TSC0054990
aatagtcgtagag

SEQ ID NO: 225588 - DNA, 13 bp, Artificial Sequence
  Oligonucleotide for detection of SNP TSC0054990
ctctacgactatt

SEQ ID NO: 225589 - DNA, 13 bp, Artificial Sequence
  Oligonucleotide for detection of SNP TSC0054990
ttttattattatt

SEQ ID NO: 225590 - DNA, 13 bp, Artificial Sequence
  Oligonucleotide for detection of SNP TSC0054990
aataataataaaa

SEQ ID NO: 225591 - DNA, 13 bp, Artificial Sequence
  Oligonucleotide for detection of SNP TSC0054990
ttttatgattatt

SEQ ID NO: 225592 - DNA, 13 bp, Artificial Sequence
  Oligonucleotide for detection of SNP TSC0054990
aataatcataaaa

SEQ ID NO: 225593 - DNA, 13 bp, Artificial Sequence
  Oligonucleotide for detection of SNP TSC0054990
ttttacgattatt

SEQ ID NO: 225594 - DNA, 13 bp, Artificial Sequence
  Oligonucleotide for detection of SNP TSC0054990
aataatcgtaaaa

SEQ ID NO: 225595 - DNA, 13 bp, Artificial Sequence
  Oligonucleotide for detection of SNP TSC0054991
ttgataaaataat

SEQ ID NO: 225596 - DNA, 13 bp, Artificial Sequence
  Oligonucleotide for detection of SNP TSC0054991
attattttatcaa

SEQ ID NO: 225597 - DNA, 13 bp, Artificial Sequence
  Oligonucleotide for detection of SNP TSC0054991
ttgatagaataat

SEQ ID NO: 225598 - DNA, 13 bp, Artificial Sequence
  Oligonucleotide for detection of SNP TSC0054991
attattctatcaa

SEQ ID NO: 225599 - DNA, 13 bp, Artificial Sequence
  Oligonucleotide for detection of SNP TSC0054992
attaaagggttty

SEQ ID NO: 225600 - DNA, 13 bp, Artificial Sequence
  Oligonucleotide for detection of SNP TSC0054992
raaaccctttaat

SEQ ID NO: 225601 - DNA, 13 bp, Artificial Sequence
  Oligonucleotide for detection of SNP TSC0054992
gaagttgtttggt

SEQ ID NO: 225602 - DNA, 13 bp, Artificial Sequence
  Oligonucleotide for detection of SNP TSC0054992
accaaacaacttc

SEQ ID NO: 225603 - DNA, 13 bp, Artificial Sequence
  Oligonucleotide for detection of SNP TSC0054992
gaagttttttggt

SEQ ID NO: 225604 - DNA, 13 bp, Artificial Sequence
  Oligonucleotide for detection of SNP TSC0054992
accaaaaaacttc

SEQ ID NO: 225605 - DNA, 13 bp, Artificial Sequence
  Oligonucleotide for detection of SNP TSC0054992
gaagtcgtttggt

SEQ ID NO: 225606 - DNA, 13 bp, Artificial Sequence
  Oligonucleotide for detection of SNP TSC0054992
accaaacgacttc

SEQ ID NO: 225607 - DNA, 13 bp, Artificial Sequence
  Oligonucleotide for detection of SNP TSC0054993
ttttattaggttg

SEQ ID NO: 225608 - DNA, 13 bp, Artificial Sequence
  Oligonucleotide for detection of SNP TSC0054993
caacctaataaaa

SEQ ID NO: 225609 - DNA, 13 bp, Artificial Sequence
  Oligonucleotide for detection of SNP TSC0054993
ttttatgaggttg

SEQ ID NO: 225610 - DNA, 13 bp, Artificial Sequence
  Oligonucleotide for detection of SNP TSC0054993
caacctcataaaa

SEQ ID NO: 225611 - DNA, 13 bp, Artificial Sequence
  Oligonucleotide for detection of SNP TSC0054993
tagtttgatgagg

SEQ ID NO: 225612 - DNA, 13 bp, Artificial Sequence
  Oligonucleotide for detection of SNP TSC0054993
cctcatcaaacta

SEQ ID NO: 225613 - DNA, 13 bp, Artificial Sequence
  Oligonucleotide for detection of SNP TSC0054993
tagttttatgagg

SEQ ID NO: 225614 - DNA, 13 bp, Artificial Sequence
  Oligonucleotide for detection of SNP TSC0054993
cctcataaaacta

SEQ ID NO: 225615 - DNA, 13 bp, Artificial Sequence
  Oligonucleotide for detection of SNP TSC0054996
tatatattattgt

SEQ ID NO: 225616 - DNA, 13 bp, Artificial Sequence
  Oligonucleotide for detection of SNP TSC0054996
acaataatatata

SEQ ID NO: 225617 - DNA, 13 bp, Artificial Sequence
  Oligonucleotide for detection of SNP TSC0054996
tatatagtattgt

SEQ ID NO: 225618 - DNA, 13 bp, Artificial Sequence
  Oligonucleotide for detection of SNP TSC0054996
acaatactatata

SEQ ID NO: 225619 - DNA, 13 bp, Artificial Sequence
  Oligonucleotide for detection of SNP TSC0054997
gtattagttttty

SEQ ID NO: 225620 - DNA, 13 bp, Artificial Sequence
  Oligonucleotide for detection of SNP TSC0054997
raaaaactaatac

SEQ ID NO: 225621 - DNA, 13 bp, Artificial Sequence
  Oligonucleotide for detection of SNP TSC0054997
gaaagagtgatgy

SEQ ID NO: 225622 - DNA, 13 bp, Artificial Sequence
  Oligonucleotide for detection of SNP TSC0054997
rcatcactctttc

SEQ ID NO: 225623 - DNA, 13 bp, Artificial Sequence
  Oligonucleotide for detection of SNP TSC0054997
gaaagattgatgy

SEQ ID NO: 225624 - DNA, 13 bp, Artificial Sequence
  Oligonucleotide for detection of SNP TSC0054997
rcatcaatctttc

SEQ ID NO: 225625 - DNA, 13 bp, Artificial Sequence
  Oligonucleotide for detection of SNP TSC0055001
tagtttattgtga

SEQ ID NO: 225626 - DNA, 13 bp, Artificial Sequence
  Oligonucleotide for detection of SNP TSC0055001
tcacaataaacta

SEQ ID NO: 225627 - DNA, 13 bp, Artificial Sequence
  Oligonucleotide for detection of SNP TSC0055001
tagtttgttgtga

SEQ ID NO: 225628 - DNA, 13 bp, Artificial Sequence
  Oligonucleotide for detection of SNP TSC0055001
tcacaacaaacta

SEQ ID NO: 225629 - DNA, 13 bp, Artificial Sequence
  Oligonucleotide for detection of SNP TSC0055001
tagttcgttgtga

SEQ ID NO: 225630 - DNA, 13 bp, Artificial Sequence
  Oligonucleotide for detection of SNP TSC0055001
tcacaacgaacta

SEQ ID NO: 225631 - DNA, 13 bp, Artificial Sequence
  Oligonucleotide for detection of SNP TSC0055001
ttataatgagtta

SEQ ID NO: 225632 - DNA, 13 bp, Artificial Sequence
  Oligonucleotide for detection of SNP TSC0055001
taactcattataa

SEQ ID NO: 225633 - DNA, 13 bp, Artificial Sequence
  Oligonucleotide for detection of SNP TSC0055001
ttataacgagtta

SEQ ID NO: 225634 - DNA, 13 bp, Artificial Sequence
  Oligonucleotide for detection of SNP TSC0055001
taactcgttataa

SEQ ID NO: 225635 - DNA, 13 bp, Artificial Sequence
  Oligonucleotide for detection of SNP TSC0055002
tttaggtgagaty

SEQ ID NO: 225636 - DNA, 13 bp, Artificial Sequence
  Oligonucleotide for detection of SNP TSC0055002
ratctcacctaaa

SEQ ID NO: 225637 - DNA, 13 bp, Artificial Sequence
  Oligonucleotide for detection of SNP TSC0055002
tttaggcgagaty

SEQ ID NO: 225638 - DNA, 13 bp, Artificial Sequence
  Oligonucleotide for detection of SNP TSC0055002
ratctcgcctaaa

SEQ ID NO: 225639 - DNA, 13 bp, Artificial Sequence
  Oligonucleotide for detection of SNP TSC0055003
atataatattata

SEQ ID NO: 225640 - DNA, 13 bp, Artificial Sequence
  Oligonucleotide for detection of SNP TSC0055003
tataatattatat

SEQ ID NO: 225641 - DNA, 13 bp, Artificial Sequence
  Oligonucleotide for detection of SNP TSC0055003
atataagattata

SEQ ID NO: 225642 - DNA, 13 bp, Artificial Sequence
  Oligonucleotide for detection of SNP TSC0055003
tataatcttatat

SEQ ID NO: 225643 - DNA, 13 bp, Artificial Sequence
  Oligonucleotide for detection of SNP TSC0055003
tataatattgtgt

SEQ ID NO: 225644 - DNA, 13 bp, Artificial Sequence
  Oligonucleotide for detection of SNP TSC0055003
acacaatattata

SEQ ID NO: 225645 - DNA, 13 bp, Artificial Sequence
  Oligonucleotide for detection of SNP TSC0055003
tataattttgtgt

SEQ ID NO: 225646 - DNA, 13 bp, Artificial Sequence
  Oligonucleotide for detection of SNP TSC0055003
acacaaaattata

SEQ ID NO: 225647 - DNA, 13 bp, Artificial Sequence
  Oligonucleotide for detection of SNP TSC0055004
gggtaagtttgty

SEQ ID NO: 225648 - DNA, 13 bp, Artificial Sequence
  Oligonucleotide for detection of SNP TSC0055004
racaaacttaccc

SEQ ID NO: 225649 - DNA, 13 bp, Artificial Sequence
  Oligonucleotide for detection of SNP TSC0055004
gggtaaatttgty

SEQ ID NO: 225650 - DNA, 13 bp, Artificial Sequence
  Oligonucleotide for detection of SNP TSC0055004
racaaatttaccc

SEQ ID NO: 225651 - DNA, 13 bp, Artificial Sequence
  Oligonucleotide for detection of SNP TSC0055005
tatattaggtaaa

SEQ ID NO: 225652 - DNA, 13 bp, Artificial Sequence
  Oligonucleotide for detection of SNP TSC0055005
tttacctaatata

SEQ ID NO: 225653 - DNA, 13 bp, Artificial Sequence
  Oligonucleotide for detection of SNP TSC0055005
tatatttggtaaa

SEQ ID NO: 225654 - DNA, 13 bp, Artificial Sequence
  Oligonucleotide for detection of SNP TSC0055005
tttaccaaatata

SEQ ID NO: 225655 - DNA, 13 bp, Artificial Sequence
  Oligonucleotide for detection of SNP TSC0055005
tttgtttaatata

SEQ ID NO: 225656 - DNA, 13 bp, Artificial Sequence
  Oligonucleotide for detection of SNP TSC0055005
tatattaaacaaa

SEQ ID NO: 225657 - DNA, 13 bp, Artificial Sequence
  Oligonucleotide for detection of SNP TSC0055005
tttgttaaatata

SEQ ID NO: 225658 - DNA, 13 bp, Artificial Sequence
  Oligonucleotide for detection of SNP TSC0055005
tatatttaacaaa

SEQ ID NO: 225659 - DNA, 13 bp, Artificial Sequence
  Oligonucleotide for detection of SNP TSC0055006
aaaaatgaaaatt

SEQ ID NO: 225660 - DNA, 13 bp, Artificial Sequence
  Oligonucleotide for detection of SNP TSC0055006
aattttcattttt

SEQ ID NO: 225661 - DNA, 13 bp, Artificial Sequence
  Oligonucleotide for detection of SNP TSC0000472
tgttgtaagaagy

SEQ ID NO: 225662 - DNA, 13 bp, Artificial Sequence
  Oligonucleotide for detection of SNP TSC0000472
rcttcttacaaca

SEQ ID NO: 225663 - DNA, 13 bp, Artificial Sequence
  Oligonucleotide for detection of SNP TSC0000472
tgttgtgagaagy

SEQ ID NO: 225664 - DNA, 13 bp, Artificial Sequence
  Oligonucleotide for detection of SNP TSC0000472
rcttctcacaaca

SEQ ID NO: 225665 - DNA, 13 bp, Artificial Sequence
  Oligonucleotide for detection of SNP TSC0000472
tgttgcgagaagy

SEQ ID NO: 225666 - DNA, 13 bp, Artificial Sequence
  Oligonucleotide for detection of SNP TSC0000472
rcttctcgcaaca

SEQ ID NO: 225667 - DNA, 13 bp, Artificial Sequence
  Oligonucleotide for detection of SNP TSC0055008
taaaattagatty

SEQ ID NO: 225668 - DNA, 13 bp, Artificial Sequence
  Oligonucleotide for detection of SNP TSC0055008
raatctaatttta

SEQ ID NO: 225669 - DNA, 13 bp, Artificial Sequence
  Oligonucleotide for detection of SNP TSC0055008
taaaataagatty

SEQ ID NO: 225670 - DNA, 13 bp, Artificial Sequence
  Oligonucleotide for detection of SNP TSC0055008
raatcttatttta

SEQ ID NO: 225671 - DNA, 13 bp, Artificial Sequence
  Oligonucleotide for detection of SNP TSC0055012
attataaaaatat

SEQ ID NO: 225672 - DNA, 13 bp, Artificial Sequence
  Oligonucleotide for detection of SNP TSC0055012
atatttttataat

SEQ ID NO: 225673 - DNA, 13 bp, Artificial Sequence
  Oligonucleotide for detection of SNP TSC0055012
attatagaaatat

SEQ ID NO: 225674 - DNA, 13 bp, Artificial Sequence
  Oligonucleotide for detection of SNP TSC0055012
atatttctataat

SEQ ID NO: 225675 - DNA, 13 bp, Artificial Sequence
  Oligonucleotide for detection of SNP TSC0008432
agtgttttttttg

SEQ ID NO: 225676 - DNA, 13 bp, Artificial Sequence
  Oligonucleotide for detection of SNP TSC0008432
caaaaaaaacact

SEQ ID NO: 225677 - DNA, 13 bp, Artificial Sequence
  Oligonucleotide for detection of SNP TSC0008432
agtgttgtttttg

SEQ ID NO: 225678 - DNA, 13 bp, Artificial Sequence
  Oligonucleotide for detection of SNP TSC0008432
caaaaacaacact

SEQ ID NO: 225679 - DNA, 13 bp, Artificial Sequence
  Oligonucleotide for detection of SNP TSC0008432
taggaggaatatt

SEQ ID NO: 225680 - DNA, 13 bp, Artificial Sequence
  Oligonucleotide for detection of SNP TSC0008432
aatattcctccta

SEQ ID NO: 225681 - DNA, 13 bp, Artificial Sequence
  Oligonucleotide for detection of SNP TSC0008432
taggagtaatatt

SEQ ID NO: 225682 - DNA, 13 bp, Artificial Sequence
  Oligonucleotide for detection of SNP TSC0008432
aatattactccta

SEQ ID NO: 225683 - DNA, 13 bp, Artificial Sequence
  Oligonucleotide for detection of SNP TSC0055017
tttaatgtttata

SEQ ID NO: 225684 - DNA, 13 bp, Artificial Sequence
  Oligonucleotide for detection of SNP TSC0055017
tataaacattaaa

SEQ ID NO: 225685 - DNA, 13 bp, Artificial Sequence
  Oligonucleotide for detection of SNP TSC0055018
ttttttaattgga

SEQ ID NO: 225686 - DNA, 13 bp, Artificial Sequence
  Oligonucleotide for detection of SNP TSC0055018
tccaattaaaaaa

SEQ ID NO: 225687 - DNA, 13 bp, Artificial Sequence
  Oligonucleotide for detection of SNP TSC0055018
ttttttgattgga

SEQ ID NO: 225688 - DNA, 13 bp, Artificial Sequence
  Oligonucleotide for detection of SNP TSC0055018
tccaatcaaaaaa

SEQ ID NO: 225689 - DNA, 13 bp, Artificial Sequence
  Oligonucleotide for detection of SNP TSC0055019
aagtattgtatgy

SEQ ID NO: 225690 - DNA, 13 bp, Artificial Sequence
  Oligonucleotide for detection of SNP TSC0055019
rcatacaatactt

SEQ ID NO: 225691 - DNA, 13 bp, Artificial Sequence
  Oligonucleotide for detection of SNP TSC0055019
aagtatcgtatgy

SEQ ID NO: 225692 - DNA, 13 bp, Artificial Sequence
  Oligonucleotide for detection of SNP TSC0055019
rcatacgatactt

SEQ ID NO: 225693 - DNA, 13 bp, Artificial Sequence
  Oligonucleotide for detection of SNP TSC0055019
gtatatgatattt

SEQ ID NO: 225694 - DNA, 13 bp, Artificial Sequence
  Oligonucleotide for detection of SNP TSC0055019
aaatatcatatac

SEQ ID NO: 225695 - DNA, 13 bp, Artificial Sequence
  Oligonucleotide for detection of SNP TSC0055019
gtatataatattt

SEQ ID NO: 225696 - DNA, 13 bp, Artificial Sequence
  Oligonucleotide for detection of SNP TSC0055019
aaatattatatac

SEQ ID NO: 225697 - DNA, 13 bp, Artificial Sequence
  Oligonucleotide for detection of SNP TSC0055019
gtatacgatattt

SEQ ID NO: 225698 - DNA, 13 bp, Artificial Sequence
  Oligonucleotide for detection of SNP TSC0055019
aaatatcgtatac

SEQ ID NO: 225699 - DNA, 13 bp, Artificial Sequence
  Oligonucleotide for detection of SNP TSC0055020
agtttattattgt

SEQ ID NO: 225700 - DNA, 13 bp, Artificial Sequence
  Oligonucleotide for detection of SNP TSC0055020
acaataataaact

SEQ ID NO: 225701 - DNA, 13 bp, Artificial Sequence
  Oligonucleotide for detection of SNP TSC0055020
agtttagtattgt

SEQ ID NO: 225702 - DNA, 13 bp, Artificial Sequence
  Oligonucleotide for detection of SNP TSC0055020
acaatactaaact

SEQ ID NO: 225703 - DNA, 13 bp, Artificial Sequence
  Oligonucleotide for detection of SNP TSC0055020
ataatagtggatt

SEQ ID NO: 225704 - DNA, 13 bp, Artificial Sequence
  Oligonucleotide for detection of SNP TSC0055020
aatccactattat

SEQ ID NO: 225705 - DNA, 13 bp, Artificial Sequence
  Oligonucleotide for detection of SNP TSC0055020
ataatattggatt

SEQ ID NO: 225706 - DNA, 13 bp, Artificial Sequence
  Oligonucleotide for detection of SNP TSC0055020
aatccaatattat

SEQ ID NO: 225707 - DNA, 13 bp, Artificial Sequence
  Oligonucleotide for detection of SNP TSC0055021
agggggcgggagg

SEQ ID NO: 225708 - DNA, 13 bp, Artificial Sequence
  Oligonucleotide for detection of SNP TSC0055021
cctcccgccccct

SEQ ID NO: 225709 - DNA, 13 bp, Artificial Sequence
  Oligonucleotide for detection of SNP TSC0055022
ttatgtattggty

SEQ ID NO: 225710 - DNA, 13 bp, Artificial Sequence
  Oligonucleotide for detection of SNP TSC0055022
raccaatacataa

SEQ ID NO: 225711 - DNA, 13 bp, Artificial Sequence
  Oligonucleotide for detection of SNP TSC0055022
ttatgttttggty

SEQ ID NO: 225712 - DNA, 13 bp, Artificial Sequence
  Oligonucleotide for detection of SNP TSC0055022
raccaaaacataa

SEQ ID NO: 225713 - DNA, 13 bp, Artificial Sequence
  Oligonucleotide for detection of SNP TSC0055022
gattaatatataa

SEQ ID NO: 225714 - DNA, 13 bp, Artificial Sequence
  Oligonucleotide for detection of SNP TSC0055022
ttatatattaatc

SEQ ID NO: 225715 - DNA, 13 bp, Artificial Sequence
  Oligonucleotide for detection of SNP TSC0055022
gattaagatataa

SEQ ID NO: 225716 - DNA, 13 bp, Artificial Sequence
  Oligonucleotide for detection of SNP TSC0055022
ttatatcttaatc

SEQ ID NO: 225717 - DNA, 13 bp, Artificial Sequence
  Oligonucleotide for detection of SNP TSC0055023
ttatatgttaaat

SEQ ID NO: 225718 - DNA, 13 bp, Artificial Sequence
  Oligonucleotide for detection of SNP TSC0055023
atttaacatataa

SEQ ID NO: 225719 - DNA, 13 bp, Artificial Sequence
  Oligonucleotide for detection of SNP TSC0055023
ttatatattaaat

SEQ ID NO: 225720 - DNA, 13 bp, Artificial Sequence
  Oligonucleotide for detection of SNP TSC0055023
atttaatatataa

SEQ ID NO: 225721 - DNA, 13 bp, Artificial Sequence
  Oligonucleotide for detection of SNP TSC0055024
ttgataatatgag

SEQ ID NO: 225722 - DNA, 13 bp, Artificial Sequence
  Oligonucleotide for detection of SNP TSC0055024
ctcatattatcaa

SEQ ID NO: 225723 - DNA, 13 bp, Artificial Sequence
  Oligonucleotide for detection of SNP TSC0055024
ttgatagtatgag

SEQ ID NO: 225724 - DNA, 13 bp, Artificial Sequence
  Oligonucleotide for detection of SNP TSC0055024
ctcatactatcaa

SEQ ID NO: 225725 - DNA, 13 bp, Artificial Sequence
  Oligonucleotide for detection of SNP TSC0055025
atgaagaattata

SEQ ID NO: 225726 - DNA, 13 bp, Artificial Sequence
  Oligonucleotide for detection of SNP TSC0055025
tataattcttcat

SEQ ID NO: 225727 - DNA, 13 bp, Artificial Sequence
  Oligonucleotide for detection of SNP TSC0055025
atgaagtattata

SEQ ID NO: 225728 - DNA, 13 bp, Artificial Sequence
  Oligonucleotide for detection of SNP TSC0055025
tataatacttcat

SEQ ID NO: 225729 - DNA, 13 bp, Artificial Sequence
  Oligonucleotide for detection of SNP TSC0055025
tataattttttat

SEQ ID NO: 225730 - DNA, 13 bp, Artificial Sequence
  Oligonucleotide for detection of SNP TSC0055025
ataaaaaattata

SEQ ID NO: 225731 - DNA, 13 bp, Artificial Sequence
  Oligonucleotide for detection of SNP TSC0006261
taagaagtaaaga

SEQ ID NO: 225732 - DNA, 13 bp, Artificial Sequence
  Oligonucleotide for detection of SNP TSC0006261
tctttacttctta

SEQ ID NO: 225733 - DNA, 13 bp, Artificial Sequence
  Oligonucleotide for detection of SNP TSC0006261
taagaattaaaga

SEQ ID NO: 225734 - DNA, 13 bp, Artificial Sequence
  Oligonucleotide for detection of SNP TSC0006261
tctttaattctta

SEQ ID NO: 225735 - DNA, 13 bp, Artificial Sequence
  Oligonucleotide for detection of SNP TSC0055030
gttattataaaga

SEQ ID NO: 225736 - DNA, 13 bp, Artificial Sequence
  Oligonucleotide for detection of SNP TSC0055030
tctttataataac

SEQ ID NO: 225737 - DNA, 13 bp, Artificial Sequence
  Oligonucleotide for detection of SNP TSC0055030
gttattgtaaaga

SEQ ID NO: 225738 - DNA, 13 bp, Artificial Sequence
  Oligonucleotide for detection of SNP TSC0055030
tctttacaataac

SEQ ID NO: 225739 - DNA, 13 bp, Artificial Sequence
  Oligonucleotide for detection of SNP TSC0055030
gttatcgtaaaga

SEQ ID NO: 225740 - DNA, 13 bp, Artificial Sequence
  Oligonucleotide for detection of SNP TSC0055030
tctttacgataac

SEQ ID NO: 225741 - DNA, 13 bp, Artificial Sequence
  Oligonucleotide for detection of SNP TSC0055030
tttttgcgatagy

SEQ ID NO: 225742 - DNA, 13 bp, Artificial Sequence
  Oligonucleotide for detection of SNP TSC0055030
rctatcgcaaaaa

SEQ ID NO: 225743 - DNA, 13 bp, Artificial Sequence
  Oligonucleotide for detection of SNP TSC0055031
ttattgtagatgg

SEQ ID NO: 225744 - DNA, 13 bp, Artificial Sequence
  Oligonucleotide for detection of SNP TSC0055031
ccatctacaataa

SEQ ID NO: 225745 - DNA, 13 bp, Artificial Sequence
  Oligonucleotide for detection of SNP TSC0055031
ttattggagatgg

SEQ ID NO: 225746 - DNA, 13 bp, Artificial Sequence
  Oligonucleotide for detection of SNP TSC0055031
ccatctccaataa

SEQ ID NO: 225747 - DNA, 13 bp, Artificial Sequence
  Oligonucleotide for detection of SNP TSC0055031
ttatttataatga

SEQ ID NO: 225748 - DNA, 13 bp, Artificial Sequence
  Oligonucleotide for detection of SNP TSC0055031
tcattataaataa

SEQ ID NO: 225749 - DNA, 13 bp, Artificial Sequence
  Oligonucleotide for detection of SNP TSC0055031
ttatttttaatga

SEQ ID NO: 225750 - DNA, 13 bp, Artificial Sequence
  Oligonucleotide for detection of SNP TSC0055031
tcattaaaaataa

SEQ ID NO: 225751 - DNA, 13 bp, Artificial Sequence
  Oligonucleotide for detection of SNP TSC0055032
ttgaaaattgaga

SEQ ID NO: 225752 - DNA, 13 bp, Artificial Sequence
  Oligonucleotide for detection of SNP TSC0055032
tctcaattttcaa

SEQ ID NO: 225753 - DNA, 13 bp, Artificial Sequence
  Oligonucleotide for detection of SNP TSC0055032
ttgaaagttgaga

SEQ ID NO: 225754 - DNA, 13 bp, Artificial Sequence
  Oligonucleotide for detection of SNP TSC0055032
tctcaactttcaa

SEQ ID NO: 225755 - DNA, 13 bp, Artificial Sequence
  Oligonucleotide for detection of SNP TSC0055032
tcgaaaattgaga

SEQ ID NO: 225756 - DNA, 13 bp, Artificial Sequence
  Oligonucleotide for detection of SNP TSC0055032
tctcaattttcga

SEQ ID NO: 225757 - DNA, 13 bp, Artificial Sequence
  Oligonucleotide for detection of SNP TSC0055032
tcgaaagttgaga

SEQ ID NO: 225758 - DNA, 13 bp, Artificial Sequence
  Oligonucleotide for detection of SNP TSC0055032
tctcaactttcga

SEQ ID NO: 225759 - DNA, 13 bp, Artificial Sequence
  Oligonucleotide for detection of SNP TSC0010378
aagtgtattgttt

SEQ ID NO: 225760 - DNA, 13 bp, Artificial Sequence
  Oligonucleotide for detection of SNP TSC0010378
aaacaatacactt

SEQ ID NO: 225761 - DNA, 13 bp, Artificial Sequence
  Oligonucleotide for detection of SNP TSC0010378
aagtgtgttgttt

SEQ ID NO: 225762 - DNA, 13 bp, Artificial Sequence
  Oligonucleotide for detection of SNP TSC0010378
aaacaacacactt

SEQ ID NO: 225763 - DNA, 13 bp, Artificial Sequence
  Oligonucleotide for detection of SNP TSC0010378
aagtgcgttgttt

SEQ ID NO: 225764 - DNA, 13 bp, Artificial Sequence
  Oligonucleotide for detection of SNP TSC0010378
aaacaacgcactt

SEQ ID NO: 225765 - DNA, 13 bp, Artificial Sequence
  Oligonucleotide for detection of SNP TSC0055033
taaagatgtattt

SEQ ID NO: 225766 - DNA, 13 bp, Artificial Sequence
  Oligonucleotide for detection of SNP TSC0055033
aaatacatcttta

SEQ ID NO: 225767 - DNA, 13 bp, Artificial Sequence
  Oligonucleotide for detection of SNP TSC0055033
taaagaggtattt

SEQ ID NO: 225768 - DNA, 13 bp, Artificial Sequence
  Oligonucleotide for detection of SNP TSC0055033
aaatacctcttta

SEQ ID NO: 225769 - DNA, 13 bp, Artificial Sequence
  Oligonucleotide for detection of SNP TSC0055033
aaatgtatttttg

SEQ ID NO: 225770 - DNA, 13 bp, Artificial Sequence
  Oligonucleotide for detection of SNP TSC0055033
caaaaatacattt

SEQ ID NO: 225771 - DNA, 13 bp, Artificial Sequence
  Oligonucleotide for detection of SNP TSC0055033
aaatgtttttttg

SEQ ID NO: 225772 - DNA, 13 bp, Artificial Sequence
  Oligonucleotide for detection of SNP TSC0055033
caaaaaaacattt

SEQ ID NO: 225773 - DNA, 13 bp, Artificial Sequence
  Oligonucleotide for detection of SNP TSC0055034
atttaagggaaga

SEQ ID NO: 225774 - DNA, 13 bp, Artificial Sequence
  Oligonucleotide for detection of SNP TSC0055034
tcttcccttaaat

SEQ ID NO: 225775 - DNA, 13 bp, Artificial Sequence
  Oligonucleotide for detection of SNP TSC0055034
atttaaaggaaga

SEQ ID NO: 225776 - DNA, 13 bp, Artificial Sequence
  Oligonucleotide for detection of SNP TSC0055034
tcttcctttaaat

SEQ ID NO: 225777 - DNA, 13 bp, Artificial Sequence
  Oligonucleotide for detection of SNP TSC0004700
aaaaaagaatatt

SEQ ID NO: 225778 - DNA, 13 bp, Artificial Sequence
  Oligonucleotide for detection of SNP TSC0004700
aatattctttttt

SEQ ID NO: 225779 - DNA, 13 bp, Artificial Sequence
  Oligonucleotide for detection of SNP TSC0055038
agaggaattataa

SEQ ID NO: 225780 - DNA, 13 bp, Artificial Sequence
  Oligonucleotide for detection of SNP TSC0055038
ttataattcctct

SEQ ID NO: 225781 - DNA, 13 bp, Artificial Sequence
  Oligonucleotide for detection of SNP TSC0055038
agaggatttataa

SEQ ID NO: 225782 - DNA, 13 bp, Artificial Sequence
  Oligonucleotide for detection of SNP TSC0055038
ttataaatcctct

SEQ ID NO: 225783 - DNA, 13 bp, Artificial Sequence
  Oligonucleotide for detection of SNP TSC0055038
ttataattttttt

SEQ ID NO: 225784 - DNA, 13 bp, Artificial Sequence
  Oligonucleotide for detection of SNP TSC0055038
aaaaaaattataa

SEQ ID NO: 225785 - DNA, 13 bp, Artificial Sequence
  Oligonucleotide for detection of SNP TSC0055039
ttgtagagaaaty

SEQ ID NO: 225786 - DNA, 13 bp, Artificial Sequence
  Oligonucleotide for detection of SNP TSC0055039
ratttctctacaa

SEQ ID NO: 225787 - DNA, 13 bp, Artificial Sequence
  Oligonucleotide for detection of SNP TSC0055039
ttgtagggaaaty

SEQ ID NO: 225788 - DNA, 13 bp, Artificial Sequence
  Oligonucleotide for detection of SNP TSC0055039
ratttccctacaa

SEQ ID NO: 225789 - DNA, 13 bp, Artificial Sequence
  Oligonucleotide for detection of SNP TSC0055040
taagtaaggttgt

SEQ ID NO: 225790 - DNA, 13 bp, Artificial Sequence
  Oligonucleotide for detection of SNP TSC0055040
acaaccttactta

SEQ ID NO: 225791 - DNA, 13 bp, Artificial Sequence
  Oligonucleotide for detection of SNP TSC0055040
taagtagggttgt

SEQ ID NO: 225792 - DNA, 13 bp, Artificial Sequence
  Oligonucleotide for detection of SNP TSC0055040
acaaccctactta

SEQ ID NO: 225793 - DNA, 13 bp, Artificial Sequence
  Oligonucleotide for detection of SNP TSC0055041
ttaaataaagtta

SEQ ID NO: 225794 - DNA, 13 bp, Artificial Sequence
  Oligonucleotide for detection of SNP TSC0055041
taactttatttaa

SEQ ID NO: 225795 - DNA, 13 bp, Artificial Sequence
  Oligonucleotide for detection of SNP TSC0055041
ttaaattaagtta

SEQ ID NO: 225796 - DNA, 13 bp, Artificial Sequence
  Oligonucleotide for detection of SNP TSC0055041
taacttaatttaa

SEQ ID NO: 225797 - DNA, 13 bp, Artificial Sequence
  Oligonucleotide for detection of SNP TSC0055041
tagttttatttgg

SEQ ID NO: 225798 - DNA, 13 bp, Artificial Sequence
  Oligonucleotide for detection of SNP TSC0055041
ccaaataaaacta

SEQ ID NO: 225799 - DNA, 13 bp, Artificial Sequence
  Oligonucleotide for detection of SNP TSC0055041
tagtttaatttgg

SEQ ID NO: 225800 - DNA, 13 bp, Artificial Sequence
  Oligonucleotide for detection of SNP TSC0055041
ccaaattaaacta

SEQ ID NO: 225801 - DNA, 13 bp, Artificial Sequence
  Oligonucleotide for detection of SNP TSC0055042
gtttaaggtaggy

SEQ ID NO: 225802 - DNA, 13 bp, Artificial Sequence
  Oligonucleotide for detection of SNP TSC0055042
rcctaccttaaac

SEQ ID NO: 225803 - DNA, 13 bp, Artificial Sequence
  Oligonucleotide for detection of SNP TSC0055042
gtttaaagtaggy

SEQ ID NO: 225804 - DNA, 13 bp, Artificial Sequence
  Oligonucleotide for detection of SNP TSC0055042
rcctactttaaac

SEQ ID NO: 225805 - DNA, 13 bp, Artificial Sequence
  Oligonucleotide for detection of SNP TSC0055043
ttatttggtggtg

SEQ ID NO: 225806 - DNA, 13 bp, Artificial Sequence
  Oligonucleotide for detection of SNP TSC0055043
caccaccaaataa

SEQ ID NO: 225807 - DNA, 13 bp, Artificial Sequence
  Oligonucleotide for detection of SNP TSC0055043
ttatttagtggtg

SEQ ID NO: 225808 - DNA, 13 bp, Artificial Sequence
  Oligonucleotide for detection of SNP TSC0055043
caccactaaataa

SEQ ID NO: 225809 - DNA, 13 bp, Artificial Sequence
  Oligonucleotide for detection of SNP TSC0006340
gggaagtgtagtg

SEQ ID NO: 225810 - DNA, 13 bp, Artificial Sequence
  Oligonucleotide for detection of SNP TSC0006340
cactacacttccc

SEQ ID NO: 225811 - DNA, 13 bp, Artificial Sequence
  Oligonucleotide for detection of SNP TSC0006340
gggaagcgtagtg

SEQ ID NO: 225812 - DNA, 13 bp, Artificial Sequence
  Oligonucleotide for detection of SNP TSC0006340
cactacgcttccc

SEQ ID NO: 225813 - DNA, 13 bp, Artificial Sequence
  Oligonucleotide for detection of SNP TSC0055044
aaataaggatatg

SEQ ID NO: 225814 - DNA, 13 bp, Artificial Sequence
  Oligonucleotide for detection of SNP TSC0055044
catatccttattt

SEQ ID NO: 225815 - DNA, 13 bp, Artificial Sequence
  Oligonucleotide for detection of SNP TSC0055044
aaataaagatatg

SEQ ID NO: 225816 - DNA, 13 bp, Artificial Sequence
  Oligonucleotide for detection of SNP TSC0055044
catatctttattt

SEQ ID NO: 225817 - DNA, 13 bp, Artificial Sequence
  Oligonucleotide for detection of SNP TSC0055044
aaataaggatacg

SEQ ID NO: 225818 - DNA, 13 bp, Artificial Sequence
  Oligonucleotide for detection of SNP TSC0055044
cgtatccttattt

SEQ ID NO: 225819 - DNA, 13 bp, Artificial Sequence
  Oligonucleotide for detection of SNP TSC0055044
aaataaagatacg

SEQ ID NO: 225820 - DNA, 13 bp, Artificial Sequence
  Oligonucleotide for detection of SNP TSC0055044
cgtatctttattt

SEQ ID NO: 225821 - DNA, 13 bp, Artificial Sequence
  Oligonucleotide for detection of SNP TSC0055048
tgtggtatatgty

SEQ ID NO: 225822 - DNA, 13 bp, Artificial Sequence
  Oligonucleotide for detection of SNP TSC0055048
racatataccaca

SEQ ID NO: 225823 - DNA, 13 bp, Artificial Sequence
  Oligonucleotide for detection of SNP TSC0055048
tgtggtatacgty

SEQ ID NO: 225824 - DNA, 13 bp, Artificial Sequence
  Oligonucleotide for detection of SNP TSC0055048
racgtataccaca

SEQ ID NO: 225825 - DNA, 13 bp, Artificial Sequence
  Oligonucleotide for detection of SNP TSC0055048
tgtggcgtatgty

SEQ ID NO: 225826 - DNA, 13 bp, Artificial Sequence
  Oligonucleotide for detection of SNP TSC0055048
racatacgccaca

SEQ ID NO: 225827 - DNA, 13 bp, Artificial Sequence
  Oligonucleotide for detection of SNP TSC0055048
tgtggtgtacgty

SEQ ID NO: 225828 - DNA, 13 bp, Artificial Sequence
  Oligonucleotide for detection of SNP TSC0055048
racgtacaccaca

SEQ ID NO: 225829 - DNA, 13 bp, Artificial Sequence
  Oligonucleotide for detection of SNP TSC0055048
tgtggcgtacgty

SEQ ID NO: 225830 - DNA, 13 bp, Artificial Sequence
  Oligonucleotide for detection of SNP TSC0055048
racgtacgccaca

SEQ ID NO: 225831 - DNA, 13 bp, Artificial Sequence
  Oligonucleotide for detection of SNP TSC0055048
ggtgtgtgttata

SEQ ID NO: 225832 - DNA, 13 bp, Artificial Sequence
  Oligonucleotide for detection of SNP TSC0055048
tataacacacacc

SEQ ID NO: 225833 - DNA, 13 bp, Artificial Sequence
  Oligonucleotide for detection of SNP TSC0055048
ggcgtgtgttata

SEQ ID NO: 225834 - DNA, 13 bp, Artificial Sequence
  Oligonucleotide for detection of SNP TSC0055048
tataacacacgcc

SEQ ID NO: 225835 - DNA, 13 bp, Artificial Sequence
  Oligonucleotide for detection of SNP TSC0055048
ggtgtgcgttata

SEQ ID NO: 225836 - DNA, 13 bp, Artificial Sequence
  Oligonucleotide for detection of SNP TSC0055048
tataacgcacacc

SEQ ID NO: 225837 - DNA, 13 bp, Artificial Sequence
  Oligonucleotide for detection of SNP TSC0055048
ggcgtgcgttata

SEQ ID NO: 225838 - DNA, 13 bp, Artificial Sequence
  Oligonucleotide for detection of SNP TSC0055048
tataacgcacgcc

SEQ ID NO: 225839 - DNA, 13 bp, Artificial Sequence
  Oligonucleotide for detection of SNP TSC0055049
aaaaaaaagaaat

SEQ ID NO: 225840 - DNA, 13 bp, Artificial Sequence
  Oligonucleotide for detection of SNP TSC0055049
atttctttttttt

SEQ ID NO: 225841 - DNA, 13 bp, Artificial Sequence
  Oligonucleotide for detection of SNP TSC0055049
aaaaaagagaaat

SEQ ID NO: 225842 - DNA, 13 bp, Artificial Sequence
  Oligonucleotide for detection of SNP TSC0055049
atttctctttttt

SEQ ID NO: 225843 - DNA, 13 bp, Artificial Sequence
  Oligonucleotide for detection of SNP TSC0055052
gttgtagaaatgt

SEQ ID NO: 225844 - DNA, 13 bp, Artificial Sequence
  Oligonucleotide for detection of SNP TSC0055052
acatttctacaac

SEQ ID NO: 225845 - DNA, 13 bp, Artificial Sequence
  Oligonucleotide for detection of SNP TSC0055052
gttgtaaaaatgt

SEQ ID NO: 225846 - DNA, 13 bp, Artificial Sequence
  Oligonucleotide for detection of SNP TSC0055052
acatttttacaac

SEQ ID NO: 225847 - DNA, 13 bp, Artificial Sequence
  Oligonucleotide for detection of SNP TSC0055052
gtcgtagaaatgt

SEQ ID NO: 225848 - DNA, 13 bp, Artificial Sequence
  Oligonucleotide for detection of SNP TSC0055052
acatttctacgac

SEQ ID NO: 225849 - DNA, 13 bp, Artificial Sequence
  Oligonucleotide for detection of SNP TSC0055052
gtcgtaaaaatgt

SEQ ID NO: 225850 - DNA, 13 bp, Artificial Sequence
  Oligonucleotide for detection of SNP TSC0055052
acatttttacgac

SEQ ID NO: 225851 - DNA, 13 bp, Artificial Sequence
  Oligonucleotide for detection of SNP TSC0055052
gttgtagaaacgt

SEQ ID NO: 225852 - DNA, 13 bp, Artificial Sequence
  Oligonucleotide for detection of SNP TSC0055052
acgtttctacaac

SEQ ID NO: 225853 - DNA, 13 bp, Artificial Sequence
  Oligonucleotide for detection of SNP TSC0055052
gttgtaaaaacgt

SEQ ID NO: 225854 - DNA, 13 bp, Artificial Sequence
  Oligonucleotide for detection of SNP TSC0055052
acgtttttacaac

SEQ ID NO: 225855 - DNA, 13 bp, Artificial Sequence
  Oligonucleotide for detection of SNP TSC0055052
gtcgtagaaacgt

SEQ ID NO: 225856 - DNA, 13 bp, Artificial Sequence
  Oligonucleotide for detection of SNP TSC0055052
acgtttctacgac

SEQ ID NO: 225857 - DNA, 13 bp, Artificial Sequence
  Oligonucleotide for detection of SNP TSC0055052
gtcgtaaaaacgt

SEQ ID NO: 225858 - DNA, 13 bp, Artificial Sequence
  Oligonucleotide for detection of SNP TSC0055052
acgtttttacgac

SEQ ID NO: 225859 - DNA, 13 bp, Artificial Sequence
  Oligonucleotide for detection of SNP TSC0055053
tttttagaatgag

SEQ ID NO: 225860 - DNA, 13 bp, Artificial Sequence
  Oligonucleotide for detection of SNP TSC0055053
ctcattctaaaaa

SEQ ID NO: 225861 - DNA, 13 bp, Artificial Sequence
  Oligonucleotide for detection of SNP TSC0055053
tttttaaaatgag

SEQ ID NO: 225862 - DNA, 13 bp, Artificial Sequence
  Oligonucleotide for detection of SNP TSC0055053
ctcattttaaaaa

SEQ ID NO: 225863 - DNA, 13 bp, Artificial Sequence
  Oligonucleotide for detection of SNP TSC0055054
ggtgaaagtggtg

SEQ ID NO: 225864 - DNA, 13 bp, Artificial Sequence
  Oligonucleotide for detection of SNP TSC0055054
caccactttcacc

SEQ ID NO: 225865 - DNA, 13 bp, Artificial Sequence
  Oligonucleotide for detection of SNP TSC0055054
ggtgaaggtggtg

SEQ ID NO: 225866 - DNA, 13 bp, Artificial Sequence
  Oligonucleotide for detection of SNP TSC0055054
caccaccttcacc

SEQ ID NO: 225867 - DNA, 13 bp, Artificial Sequence
  Oligonucleotide for detection of SNP TSC0055057
gatttttttttta

SEQ ID NO: 225868 - DNA, 13 bp, Artificial Sequence
  Oligonucleotide for detection of SNP TSC0055057
taaaaaaaaaatc

SEQ ID NO: 225869 - DNA, 13 bp, Artificial Sequence
  Oligonucleotide for detection of SNP TSC0055057
taaagataaggty

SEQ ID NO: 225870 - DNA, 13 bp, Artificial Sequence
  Oligonucleotide for detection of SNP TSC0055057
raccttatcttta

SEQ ID NO: 225871 - DNA, 13 bp, Artificial Sequence
  Oligonucleotide for detection of SNP TSC0055057
taaagagaaggty

SEQ ID NO: 225872 - DNA, 13 bp, Artificial Sequence
  Oligonucleotide for detection of SNP TSC0055057
raccttctcttta

SEQ ID NO: 225873 - DNA, 13 bp, Artificial Sequence
  Oligonucleotide for detection of SNP TSC0055062
ggtagagaagaga

SEQ ID NO: 225874 - DNA, 13 bp, Artificial Sequence
  Oligonucleotide for detection of SNP TSC0055062
tctcttctctacc

SEQ ID NO: 225875 - DNA, 13 bp, Artificial Sequence
  Oligonucleotide for detection of SNP TSC0055062
ggtagaaaagaga

SEQ ID NO: 225876 - DNA, 13 bp, Artificial Sequence
  Oligonucleotide for detection of SNP TSC0055062
tctcttttctacc

SEQ ID NO: 225877 - DNA, 13 bp, Artificial Sequence
  Oligonucleotide for detection of SNP TSC0055063
taaagtatggata

SEQ ID NO: 225878 - DNA, 13 bp, Artificial Sequence
  Oligonucleotide for detection of SNP TSC0055063
tatccatacttta

SEQ ID NO: 225879 - DNA, 13 bp, Artificial Sequence
  Oligonucleotide for detection of SNP TSC0055063
taaagtgtggata

SEQ ID NO: 225880 - DNA, 13 bp, Artificial Sequence
  Oligonucleotide for detection of SNP TSC0055063
tatccacacttta

SEQ ID NO: 225881 - DNA, 13 bp, Artificial Sequence
  Oligonucleotide for detection of SNP TSC0055063
taaagcgtggata

SEQ ID NO: 225882 - DNA, 13 bp, Artificial Sequence
  Oligonucleotide for detection of SNP TSC0055063
tatccacgcttta

SEQ ID NO: 225883 - DNA, 13 bp, Artificial Sequence
  Oligonucleotide for detection of SNP TSC0055065
aaaagagaagtat

SEQ ID NO: 225884 - DNA, 13 bp, Artificial Sequence
  Oligonucleotide for detection of SNP TSC0055065
atacttctctttt

SEQ ID NO: 225885 - DNA, 13 bp, Artificial Sequence
  Oligonucleotide for detection of SNP TSC0055065
aaaagaaaagtat

SEQ ID NO: 225886 - DNA, 13 bp, Artificial Sequence
  Oligonucleotide for detection of SNP TSC0055065
atacttttctttt

SEQ ID NO: 225887 - DNA, 13 bp, Artificial Sequence
  Oligonucleotide for detection of SNP TSC0055066
tgatgcgtttgty

SEQ ID NO: 225888 - DNA, 13 bp, Artificial Sequence
  Oligonucleotide for detection of SNP TSC0055066
racaaacgcatca

SEQ ID NO: 225889 - DNA, 13 bp, Artificial Sequence
  Oligonucleotide for detection of SNP TSC0055066
ggtaggtgtatta

SEQ ID NO: 225890 - DNA, 13 bp, Artificial Sequence
  Oligonucleotide for detection of SNP TSC0055066
taatacacctacc

SEQ ID NO: 225891 - DNA, 13 bp, Artificial Sequence
  Oligonucleotide for detection of SNP TSC0055066
ggtaggcgtatta

SEQ ID NO: 225892 - DNA, 13 bp, Artificial Sequence
  Oligonucleotide for detection of SNP TSC0055066
taatacgcctacc

SEQ ID NO: 225893 - DNA, 13 bp, Artificial Sequence
  Oligonucleotide for detection of SNP TSC0055067
tatttttatttat

SEQ ID NO: 225894 - DNA, 13 bp, Artificial Sequence
  Oligonucleotide for detection of SNP TSC0055067
ataaataaaaata

SEQ ID NO: 225895 - DNA, 13 bp, Artificial Sequence
  Oligonucleotide for detection of SNP TSC0055067
tattttgatttat

SEQ ID NO: 225896 - DNA, 13 bp, Artificial Sequence
  Oligonucleotide for detection of SNP TSC0055067
ataaatcaaaata

SEQ ID NO: 225897 - DNA, 13 bp, Artificial Sequence
  Oligonucleotide for detection of SNP TSC0055067
ataaatgaaaata

SEQ ID NO: 225898 - DNA, 13 bp, Artificial Sequence
  Oligonucleotide for detection of SNP TSC0055067
tattttcatttat

SEQ ID NO: 225899 - DNA, 13 bp, Artificial Sequence
  Oligonucleotide for detection of SNP TSC0055067
ataaattaaaata

SEQ ID NO: 225900 - DNA, 13 bp, Artificial Sequence
  Oligonucleotide for detection of SNP TSC0055067
tattttaatttat

SEQ ID NO: 225901 - DNA, 13 bp, Artificial Sequence
  Oligonucleotide for detection of SNP TSC0055070
tttttagatggay

SEQ ID NO: 225902 - DNA, 13 bp, Artificial Sequence
  Oligonucleotide for detection of SNP TSC0055070
rtccatctaaaaa

SEQ ID NO: 225903 - DNA, 13 bp, Artificial Sequence
  Oligonucleotide for detection of SNP TSC0055070
tttttaaatggay

SEQ ID NO: 225904 - DNA, 13 bp, Artificial Sequence
  Oligonucleotide for detection of SNP TSC0055070
rtccatttaaaaa

SEQ ID NO: 225905 - DNA, 13 bp, Artificial Sequence
  Oligonucleotide for detection of SNP TSC0055071
ttgggtatttgat

SEQ ID NO: 225906 - DNA, 13 bp, Artificial Sequence
  Oligonucleotide for detection of SNP TSC0055071
atcaaatacccaa

SEQ ID NO: 225907 - DNA, 13 bp, Artificial Sequence
  Oligonucleotide for detection of SNP TSC0055071
ttgggtgtttgat

SEQ ID NO: 225908 - DNA, 13 bp, Artificial Sequence
  Oligonucleotide for detection of SNP TSC0055071
atcaaacacccaa

SEQ ID NO: 225909 - DNA, 13 bp, Artificial Sequence
  Oligonucleotide for detection of SNP TSC0055071
tcgggtatttgat

SEQ ID NO: 225910 - DNA, 13 bp, Artificial Sequence
  Oligonucleotide for detection of SNP TSC0055071
atcaaatacccga

SEQ ID NO: 225911 - DNA, 13 bp, Artificial Sequence
  Oligonucleotide for detection of SNP TSC0055071
tcgggtgtttgat

SEQ ID NO: 225912 - DNA, 13 bp, Artificial Sequence
  Oligonucleotide for detection of SNP TSC0055071
atcaaacacccga

SEQ ID NO: 225913 - DNA, 13 bp, Artificial Sequence
  Oligonucleotide for detection of SNP TSC0055071
ttgggtattcgat

SEQ ID NO: 225914 - DNA, 13 bp, Artificial Sequence
  Oligonucleotide for detection of SNP TSC0055071
atcgaatacccaa

SEQ ID NO: 225915 - DNA, 13 bp, Artificial Sequence
  Oligonucleotide for detection of SNP TSC0055071
ttgggcgtttgat

SEQ ID NO: 225916 - DNA, 13 bp, Artificial Sequence
  Oligonucleotide for detection of SNP TSC0055071
atcaaacgcccaa

SEQ ID NO: 225917 - DNA, 13 bp, Artificial Sequence
  Oligonucleotide for detection of SNP TSC0055071
tcgggtattcgat

SEQ ID NO: 225918 - DNA, 13 bp, Artificial Sequence
  Oligonucleotide for detection of SNP TSC0055071
atcgaatacccga

SEQ ID NO: 225919 - DNA, 13 bp, Artificial Sequence
  Oligonucleotide for detection of SNP TSC0055071
ttgggtgttcgat

SEQ ID NO: 225920 - DNA, 13 bp, Artificial Sequence
  Oligonucleotide for detection of SNP TSC0055071
atcgaacacccaa

SEQ ID NO: 225921 - DNA, 13 bp, Artificial Sequence
  Oligonucleotide for detection of SNP TSC0055071
tcgggcgtttgat

SEQ ID NO: 225922 - DNA, 13 bp, Artificial Sequence
  Oligonucleotide for detection of SNP TSC0055071
atcaaacgcccga

SEQ ID NO: 225923 - DNA, 13 bp, Artificial Sequence
  Oligonucleotide for detection of SNP TSC0055071
tcgggtgttcgat

SEQ ID NO: 225924 - DNA, 13 bp, Artificial Sequence
  Oligonucleotide for detection of SNP TSC0055071
atcgaacacccga

SEQ ID NO: 225925 - DNA, 13 bp, Artificial Sequence
  Oligonucleotide for detection of SNP TSC0055071
ttgggcgttcgat

SEQ ID NO: 225926 - DNA, 13 bp, Artificial Sequence
  Oligonucleotide for detection of SNP TSC0055071
atcgaacgcccaa

SEQ ID NO: 225927 - DNA, 13 bp, Artificial Sequence
  Oligonucleotide for detection of SNP TSC0055071
tcgggcgttcgat

SEQ ID NO: 225928 - DNA, 13 bp, Artificial Sequence
  Oligonucleotide for detection of SNP TSC0055071
atcgaacgcccga

SEQ ID NO: 225929 - DNA, 13 bp, Artificial Sequence
  Oligonucleotide for detection of SNP TSC0055071
attgggtgtttgg

SEQ ID NO: 225930 - DNA, 13 bp, Artificial Sequence
  Oligonucleotide for detection of SNP TSC0055071
ccaaacacccaat

SEQ ID NO: 225931 - DNA, 13 bp, Artificial Sequence
  Oligonucleotide for detection of SNP TSC0055071
atcgggtgtttgg

SEQ ID NO: 225932 - DNA, 13 bp, Artificial Sequence
  Oligonucleotide for detection of SNP TSC0055071
ccaaacacccgat

SEQ ID NO: 225933 - DNA, 13 bp, Artificial Sequence
  Oligonucleotide for detection of SNP TSC0055071
attgggtgttcgg

SEQ ID NO: 225934 - DNA, 13 bp, Artificial Sequence
  Oligonucleotide for detection of SNP TSC0055071
ccgaacacccaat

SEQ ID NO: 225935 - DNA, 13 bp, Artificial Sequence
  Oligonucleotide for detection of SNP TSC0055071
attgggcgtttgg

SEQ ID NO: 225936 - DNA, 13 bp, Artificial Sequence
  Oligonucleotide for detection of SNP TSC0055071
ccaaacgcccaat

SEQ ID NO: 225937 - DNA, 13 bp, Artificial Sequence
  Oligonucleotide for detection of SNP TSC0055071
atcgggtgttcgg

SEQ ID NO: 225938 - DNA, 13 bp, Artificial Sequence
  Oligonucleotide for detection of SNP TSC0055071
ccgaacacccgat

SEQ ID NO: 225939 - DNA, 13 bp, Artificial Sequence
  Oligonucleotide for detection of SNP TSC0055071
atcgggcgtttgg

SEQ ID NO: 225940 - DNA, 13 bp, Artificial Sequence
  Oligonucleotide for detection of SNP TSC0055071
ccaaacgcccgat

SEQ ID NO: 225941 - DNA, 13 bp, Artificial Sequence
  Oligonucleotide for detection of SNP TSC0055071
attgggcgttcgg

SEQ ID NO: 225942 - DNA, 13 bp, Artificial Sequence
  Oligonucleotide for detection of SNP TSC0055071
ccgaacgcccaat

SEQ ID NO: 225943 - DNA, 13 bp, Artificial Sequence
  Oligonucleotide for detection of SNP TSC0055071
atcgggcgttcgg

SEQ ID NO: 225944 - DNA, 13 bp, Artificial Sequence
  Oligonucleotide for detection of SNP TSC0055071
ccgaacgcccgat

SEQ ID NO: 225945 - DNA, 13 bp, Artificial Sequence
  Oligonucleotide for detection of SNP TSC0055072
tttgataattgta

SEQ ID NO: 225946 - DNA, 13 bp, Artificial Sequence
  Oligonucleotide for detection of SNP TSC0055072
tacaattatcaaa

SEQ ID NO: 225947 - DNA, 13 bp, Artificial Sequence
  Oligonucleotide for detection of SNP TSC0055072
tttgatgattgta

SEQ ID NO: 225948 - DNA, 13 bp, Artificial Sequence
  Oligonucleotide for detection of SNP TSC0055072
tacaatcatcaaa

SEQ ID NO: 225949 - DNA, 13 bp, Artificial Sequence
  Oligonucleotide for detection of SNP TSC0055072
ttcgataattgta

SEQ ID NO: 225950 - DNA, 13 bp, Artificial Sequence
  Oligonucleotide for detection of SNP TSC0055072
tacaattatcgaa

SEQ ID NO: 225951 - DNA, 13 bp, Artificial Sequence
  Oligonucleotide for detection of SNP TSC0055072
ttcgatgattgta

SEQ ID NO: 225952 - DNA, 13 bp, Artificial Sequence
  Oligonucleotide for detection of SNP TSC0055072
tacaatcatcgaa

SEQ ID NO: 225953 - DNA, 13 bp, Artificial Sequence
  Oligonucleotide for detection of SNP TSC0055072
tttgataatcgta

SEQ ID NO: 225954 - DNA, 13 bp, Artificial Sequence
  Oligonucleotide for detection of SNP TSC0055072
tacgattatcaaa

SEQ ID NO: 225955 - DNA, 13 bp, Artificial Sequence
  Oligonucleotide for detection of SNP TSC0055072
tttgatgatcgta

SEQ ID NO: 225956 - DNA, 13 bp, Artificial Sequence
  Oligonucleotide for detection of SNP TSC0055072
tacgatcatcaaa

SEQ ID NO: 225957 - DNA, 13 bp, Artificial Sequence
  Oligonucleotide for detection of SNP TSC0055072
ttcgataatcgta

SEQ ID NO: 225958 - DNA, 13 bp, Artificial Sequence
  Oligonucleotide for detection of SNP TSC0055072
tacgattatcgaa

SEQ ID NO: 225959 - DNA, 13 bp, Artificial Sequence
  Oligonucleotide for detection of SNP TSC0055072
ttcgatgatcgta

SEQ ID NO: 225960 - DNA, 13 bp, Artificial Sequence
  Oligonucleotide for detection of SNP TSC0055072
tacgatcatcgaa

SEQ ID NO: 225961 - DNA, 13 bp, Artificial Sequence
  Oligonucleotide for detection of SNP TSC0008358
atattgatttgay

SEQ ID NO: 225962 - DNA, 13 bp, Artificial Sequence
  Oligonucleotide for detection of SNP TSC0008358
rtcaaatcaatat

SEQ ID NO: 225963 - DNA, 13 bp, Artificial Sequence
  Oligonucleotide for detection of SNP TSC0008358
gttagattaatat

SEQ ID NO: 225964 - DNA, 13 bp, Artificial Sequence
  Oligonucleotide for detection of SNP TSC0008358
atattaatctaac

SEQ ID NO: 225965 - DNA, 13 bp, Artificial Sequence
  Oligonucleotide for detection of SNP TSC0008358
gttagaataatat

SEQ ID NO: 225966 - DNA, 13 bp, Artificial Sequence
  Oligonucleotide for detection of SNP TSC0008358
atattattctaac

SEQ ID NO: 225967 - DNA, 13 bp, Artificial Sequence
  Oligonucleotide for detection of SNP TSC0055075
aatgaagtagaaa

SEQ ID NO: 225968 - DNA, 13 bp, Artificial Sequence
  Oligonucleotide for detection of SNP TSC0055075
tttctacttcatt

SEQ ID NO: 225969 - DNA, 13 bp, Artificial Sequence
  Oligonucleotide for detection of SNP TSC0055075
aatgaaatagaaa

SEQ ID NO: 225970 - DNA, 13 bp, Artificial Sequence
  Oligonucleotide for detection of SNP TSC0055075
tttctatttcatt

SEQ ID NO: 225971 - DNA, 13 bp, Artificial Sequence
  Oligonucleotide for detection of SNP TSC0055076
gaaatgggaaaga

SEQ ID NO: 225972 - DNA, 13 bp, Artificial Sequence
  Oligonucleotide for detection of SNP TSC0055076
tctttcccatttc

SEQ ID NO: 225973 - DNA, 13 bp, Artificial Sequence
  Oligonucleotide for detection of SNP TSC0055076
gaaatgagaaaga

SEQ ID NO: 225974 - DNA, 13 bp, Artificial Sequence
  Oligonucleotide for detection of SNP TSC0055076
tctttctcatttc

SEQ ID NO: 225975 - DNA, 13 bp, Artificial Sequence
  Oligonucleotide for detection of SNP TSC0055077
ggtgggatttagg

SEQ ID NO: 225976 - DNA, 13 bp, Artificial Sequence
  Oligonucleotide for detection of SNP TSC0055077
cctaaatcccacc

SEQ ID NO: 225977 - DNA, 13 bp, Artificial Sequence
  Oligonucleotide for detection of SNP TSC0055077
ggtggggtttagg

SEQ ID NO: 225978 - DNA, 13 bp, Artificial Sequence
  Oligonucleotide for detection of SNP TSC0055077
cctaaaccccacc

SEQ ID NO: 225979 - DNA, 13 bp, Artificial Sequence
  Oligonucleotide for detection of SNP TSC0055078
tgaggggtattay

SEQ ID NO: 225980 - DNA, 13 bp, Artificial Sequence
  Oligonucleotide for detection of SNP TSC0055078
rtaatacccctca

SEQ ID NO: 225981 - DNA, 13 bp, Artificial Sequence
  Oligonucleotide for detection of SNP TSC0055078
tgagggatattay

SEQ ID NO: 225982 - DNA, 13 bp, Artificial Sequence
  Oligonucleotide for detection of SNP TSC0055078
rtaatatccctca

SEQ ID NO: 225983 - DNA, 13 bp, Artificial Sequence
  Oligonucleotide for detection of SNP TSC0055080
gtaagtggattay

SEQ ID NO: 225984 - DNA, 13 bp, Artificial Sequence
  Oligonucleotide for detection of SNP TSC0055080
rtaatccacttac

SEQ ID NO: 225985 - DNA, 13 bp, Artificial Sequence
  Oligonucleotide for detection of SNP TSC0055080
gtaagtagattay

SEQ ID NO: 225986 - DNA, 13 bp, Artificial Sequence
  Oligonucleotide for detection of SNP TSC0055080
rtaatctacttac

SEQ ID NO: 225987 - DNA, 13 bp, Artificial Sequence
  Oligonucleotide for detection of SNP TSC0055080
gtaagcggattay

SEQ ID NO: 225988 - DNA, 13 bp, Artificial Sequence
  Oligonucleotide for detection of SNP TSC0055080
rtaatccgcttac

SEQ ID NO: 225989 - DNA, 13 bp, Artificial Sequence
  Oligonucleotide for detection of SNP TSC0055081
ttattagagttgt

SEQ ID NO: 225990 - DNA, 13 bp, Artificial Sequence
  Oligonucleotide for detection of SNP TSC0055081
acaactctaataa

SEQ ID NO: 225991 - DNA, 13 bp, Artificial Sequence
  Oligonucleotide for detection of SNP TSC0055081
ttattaaagttgt

SEQ ID NO: 225992 - DNA, 13 bp, Artificial Sequence
  Oligonucleotide for detection of SNP TSC0055081
acaactttaataa

SEQ ID NO: 225993 - DNA, 13 bp, Artificial Sequence
  Oligonucleotide for detection of SNP TSC0055082
gttttttgatagy

SEQ ID NO: 225994 - DNA, 13 bp, Artificial Sequence
  Oligonucleotide for detection of SNP TSC0055082
rctatcaaaaaac

SEQ ID NO: 225995 - DNA, 13 bp, Artificial Sequence
  Oligonucleotide for detection of SNP TSC0055082
gtttttcgatagy

SEQ ID NO: 225996 - DNA, 13 bp, Artificial Sequence
  Oligonucleotide for detection of SNP TSC0055082
rctatcgaaaaac

SEQ ID NO: 225997 - DNA, 13 bp, Artificial Sequence
  Oligonucleotide for detection of SNP TSC0055082
gttattggaaagy

SEQ ID NO: 225998 - DNA, 13 bp, Artificial Sequence
  Oligonucleotide for detection of SNP TSC0055082
rctttccaataac

SEQ ID NO: 225999 - DNA, 13 bp, Artificial Sequence
  Oligonucleotide for detection of SNP TSC0055082
gttattagaaagy

SEQ ID NO: 226000 - DNA, 13 bp, Artificial Sequence
  Oligonucleotide for detection of SNP TSC0055082
rctttctaataac

SEQ ID NO: 226001 - DNA, 13 bp, Artificial Sequence
  Oligonucleotide for detection of SNP TSC0055082
gttatcggaaagy

SEQ ID NO: 226002 - DNA, 13 bp, Artificial Sequence
  Oligonucleotide for detection of SNP TSC0055082
rctttccgataac

SEQ ID NO: 226003 - DNA, 13 bp, Artificial Sequence
  Oligonucleotide for detection of SNP TSC0055083
aaaaatgattttt

SEQ ID NO: 226004 - DNA, 13 bp, Artificial Sequence
  Oligonucleotide for detection of SNP TSC0055083
aaaaatcattttt

SEQ ID NO: 226005 - DNA, 13 bp, Artificial Sequence
  Oligonucleotide for detection of SNP TSC0055084
gatagatgggagy

SEQ ID NO: 226006 - DNA, 13 bp, Artificial Sequence
  Oligonucleotide for detection of SNP TSC0055084
rctcccatctatc

SEQ ID NO: 226007 - DNA, 13 bp, Artificial Sequence
  Oligonucleotide for detection of SNP TSC0055084
gatagaggggagy

SEQ ID NO: 226008 - DNA, 13 bp, Artificial Sequence
  Oligonucleotide for detection of SNP TSC0055084
rctcccctctatc

SEQ ID NO: 226009 - DNA, 13 bp, Artificial Sequence
  Oligonucleotide for detection of SNP TSC0055084
gatagacgggagy

SEQ ID NO: 226010 - DNA, 13 bp, Artificial Sequence
  Oligonucleotide for detection of SNP TSC0055084
rctcccgtctatc

SEQ ID NO: 226011 - DNA, 13 bp, Artificial Sequence
  Oligonucleotide for detection of SNP TSC0055085
taatattgtattg

SEQ ID NO: 226012 - DNA, 13 bp, Artificial Sequence
  Oligonucleotide for detection of SNP TSC0055085
caatacaatatta

SEQ ID NO: 226013 - DNA, 13 bp, Artificial Sequence
  Oligonucleotide for detection of SNP TSC0055085
taatatcgtattg

SEQ ID NO: 226014 - DNA, 13 bp, Artificial Sequence
  Oligonucleotide for detection of SNP TSC0055085
caatacgatatta

SEQ ID NO: 226015 - DNA, 13 bp, Artificial Sequence
  Oligonucleotide for detection of SNP TSC0055085
taatatgatatta

SEQ ID NO: 226016 - DNA, 13 bp, Artificial Sequence
  Oligonucleotide for detection of SNP TSC0055085
taatatcatatta

SEQ ID NO: 226017 - DNA, 13 bp, Artificial Sequence
  Oligonucleotide for detection of SNP TSC0055085
taatataatatta

SEQ ID NO: 226018 - DNA, 13 bp, Artificial Sequence
  Oligonucleotide for detection of SNP TSC0055085
taatattatatta

SEQ ID NO: 226019 - DNA, 13 bp, Artificial Sequence
  Oligonucleotide for detection of SNP TSC0055085
taatacgatatta

SEQ ID NO: 226020 - DNA, 13 bp, Artificial Sequence
  Oligonucleotide for detection of SNP TSC0055085
taatatcgtatta

SEQ ID NO: 226021 - DNA, 13 bp, Artificial Sequence
  Oligonucleotide for detection of SNP TSC0055086
aggataaatatay

SEQ ID NO: 226022 - DNA, 13 bp, Artificial Sequence
  Oligonucleotide for detection of SNP TSC0055086
rtatatttatcct

SEQ ID NO: 226023 - DNA, 13 bp, Artificial Sequence
  Oligonucleotide for detection of SNP TSC0055086
aggatatatatay

SEQ ID NO: 226024 - DNA, 13 bp, Artificial Sequence
  Oligonucleotide for detection of SNP TSC0055086
rtatatatatcct

SEQ ID NO: 226025 - DNA, 13 bp, Artificial Sequence
  Oligonucleotide for detection of SNP TSC0055086
gtgtgtttatttt

SEQ ID NO: 226026 - DNA, 13 bp, Artificial Sequence
  Oligonucleotide for detection of SNP TSC0055086
aaaataaacacac

SEQ ID NO: 226027 - DNA, 13 bp, Artificial Sequence
  Oligonucleotide for detection of SNP TSC0055086
gtgtgtatatttt

SEQ ID NO: 226028 - DNA, 13 bp, Artificial Sequence
  Oligonucleotide for detection of SNP TSC0055086
aaaatatacacac

SEQ ID NO: 226029 - DNA, 13 bp, Artificial Sequence
  Oligonucleotide for detection of SNP TSC0055090
aatgtttgttatg

SEQ ID NO: 226030 - DNA, 13 bp, Artificial Sequence
  Oligonucleotide for detection of SNP TSC0055090
cataacaaacatt

SEQ ID NO: 226031 - DNA, 13 bp, Artificial Sequence
  Oligonucleotide for detection of SNP TSC0055090
aatgttcgttatg

SEQ ID NO: 226032 - DNA, 13 bp, Artificial Sequence
  Oligonucleotide for detection of SNP TSC0055090
cataacgaacatt

SEQ ID NO: 226033 - DNA, 13 bp, Artificial Sequence
  Oligonucleotide for detection of SNP TSC0055090
tatggtgggtatt

SEQ ID NO: 226034 - DNA, 13 bp, Artificial Sequence
  Oligonucleotide for detection of SNP TSC0055090
aatacccaccata

SEQ ID NO: 226035 - DNA, 13 bp, Artificial Sequence
  Oligonucleotide for detection of SNP TSC0055090
tatggtaggtatt

SEQ ID NO: 226036 - DNA, 13 bp, Artificial Sequence
  Oligonucleotide for detection of SNP TSC0055090
aatacctaccata

SEQ ID NO: 226037 - DNA, 13 bp, Artificial Sequence
  Oligonucleotide for detection of SNP TSC0055090
tatggcgggtatt

SEQ ID NO: 226038 - DNA, 13 bp, Artificial Sequence
  Oligonucleotide for detection of SNP TSC0055090
aatacccgccata

SEQ ID NO: 226039 - DNA, 13 bp, Artificial Sequence
  Oligonucleotide for detection of SNP TSC0055093
gtagtcgtatata

SEQ ID NO: 226040 - DNA, 13 bp, Artificial Sequence
  Oligonucleotide for detection of SNP TSC0055093
tatatacgactac

SEQ ID NO: 226041 - DNA, 13 bp, Artificial Sequence
  Oligonucleotide for detection of SNP TSC0055093
tatatatggttgy

SEQ ID NO: 226042 - DNA, 13 bp, Artificial Sequence
  Oligonucleotide for detection of SNP TSC0055093
rcaaccatatata

SEQ ID NO: 226043 - DNA, 13 bp, Artificial Sequence
  Oligonucleotide for detection of SNP TSC0055093
tatatacggttgy

SEQ ID NO: 226044 - DNA, 13 bp, Artificial Sequence
  Oligonucleotide for detection of SNP TSC0055093
rcaaccgtatata

SEQ ID NO: 226045 - DNA, 13 bp, Artificial Sequence
  Oligonucleotide for detection of SNP TSC0006069
ggtgagattttgg

SEQ ID NO: 226046 - DNA, 13 bp, Artificial Sequence
  Oligonucleotide for detection of SNP TSC0006069
ccaaaatctcacc

SEQ ID NO: 226047 - DNA, 13 bp, Artificial Sequence
  Oligonucleotide for detection of SNP TSC0006069
ggtgaggttttgg

SEQ ID NO: 226048 - DNA, 13 bp, Artificial Sequence
  Oligonucleotide for detection of SNP TSC0006069
ccaaaacctcacc

SEQ ID NO: 226049 - DNA, 13 bp, Artificial Sequence
  Oligonucleotide for detection of SNP TSC0055096
ataataataaata

SEQ ID NO: 226050 - DNA, 13 bp, Artificial Sequence
  Oligonucleotide for detection of SNP TSC0055096
tatttattattat

SEQ ID NO: 226051 - DNA, 13 bp, Artificial Sequence
  Oligonucleotide for detection of SNP TSC0055096
ataatattaaata

SEQ ID NO: 226052 - DNA, 13 bp, Artificial Sequence
  Oligonucleotide for detection of SNP TSC0055096
tatttaatattat

SEQ ID NO: 226053 - DNA, 13 bp, Artificial Sequence
  Oligonucleotide for detection of SNP TSC0055096
tatttagtattat

SEQ ID NO: 226054 - DNA, 13 bp, Artificial Sequence
  Oligonucleotide for detection of SNP TSC0055096
ataatactaaata

SEQ ID NO: 226055 - DNA, 13 bp, Artificial Sequence
  Oligonucleotide for detection of SNP TSC0055097
ttgtatgtgaaty

SEQ ID NO: 226056 - DNA, 13 bp, Artificial Sequence
  Oligonucleotide for detection of SNP TSC0055097
rattcacatacaa

SEQ ID NO: 226057 - DNA, 13 bp, Artificial Sequence
  Oligonucleotide for detection of SNP TSC0055097
ttgtatatgaaty

SEQ ID NO: 226058 - DNA, 13 bp, Artificial Sequence
  Oligonucleotide for detection of SNP TSC0055097
rattcatatacaa

SEQ ID NO: 226059 - DNA, 13 bp, Artificial Sequence
  Oligonucleotide for detection of SNP TSC0055099
aataattgtaaaa

SEQ ID NO: 226060 - DNA, 13 bp, Artificial Sequence
  Oligonucleotide for detection of SNP TSC0055099
ttttacaattatt

SEQ ID NO: 226061 - DNA, 13 bp, Artificial Sequence
  Oligonucleotide for detection of SNP TSC0055099
ttttatggttatt

SEQ ID NO: 226062 - DNA, 13 bp, Artificial Sequence
  Oligonucleotide for detection of SNP TSC0055099
aataaccataaaa

SEQ ID NO: 226063 - DNA, 13 bp, Artificial Sequence
  Oligonucleotide for detection of SNP TSC0055099
ttttatagttatt

SEQ ID NO: 226064 - DNA, 13 bp, Artificial Sequence
  Oligonucleotide for detection of SNP TSC0055099
aataactataaaa

SEQ ID NO: 226065 - DNA, 13 bp, Artificial Sequence
  Oligonucleotide for detection of SNP TSC0055099
ttttacggttatt

SEQ ID NO: 226066 - DNA, 13 bp, Artificial Sequence
  Oligonucleotide for detection of SNP TSC0055099
aataaccgtaaaa

SEQ ID NO: 226067 - DNA, 13 bp, Artificial Sequence
  Oligonucleotide for detection of SNP TSC0055100
atatatgtgaaaa

SEQ ID NO: 226068 - DNA, 13 bp, Artificial Sequence
  Oligonucleotide for detection of SNP TSC0055100
ttttcacatatat

SEQ ID NO: 226069 - DNA, 13 bp, Artificial Sequence
  Oligonucleotide for detection of SNP TSC0055102
tattatatgtgtt

SEQ ID NO: 226070 - DNA, 13 bp, Artificial Sequence
  Oligonucleotide for detection of SNP TSC0055102
aacacatataata

SEQ ID NO: 226071 - DNA, 13 bp, Artificial Sequence
  Oligonucleotide for detection of SNP TSC0055102
tattatgtgtgtt

SEQ ID NO: 226072 - DNA, 13 bp, Artificial Sequence
  Oligonucleotide for detection of SNP TSC0055102
aacacacataata

SEQ ID NO: 226073 - DNA, 13 bp, Artificial Sequence
  Oligonucleotide for detection of SNP TSC0055102
tattacgtgtgtt

SEQ ID NO: 226074 - DNA, 13 bp, Artificial Sequence
  Oligonucleotide for detection of SNP TSC0055102
aacacacgtaata

SEQ ID NO: 226075 - DNA, 13 bp, Artificial Sequence
  Oligonucleotide for detection of SNP TSC0055102
agtatatgtagta

SEQ ID NO: 226076 - DNA, 13 bp, Artificial Sequence
  Oligonucleotide for detection of SNP TSC0055102
tactacatatact

SEQ ID NO: 226077 - DNA, 13 bp, Artificial Sequence
  Oligonucleotide for detection of SNP TSC0055102
agtatacgtagta

SEQ ID NO: 226078 - DNA, 13 bp, Artificial Sequence
  Oligonucleotide for detection of SNP TSC0055102
tactacgtatact

SEQ ID NO: 226079 - DNA, 13 bp, Artificial Sequence
  Oligonucleotide for detection of SNP TSC0055103
ttataaaaaatag

SEQ ID NO: 226080 - DNA, 13 bp, Artificial Sequence
  Oligonucleotide for detection of SNP TSC0055103
ctattttttataa

SEQ ID NO: 226081 - DNA, 13 bp, Artificial Sequence
  Oligonucleotide for detection of SNP TSC0055103
ttataagaaatag

SEQ ID NO: 226082 - DNA, 13 bp, Artificial Sequence
  Oligonucleotide for detection of SNP TSC0055103
ctatttcttataa

SEQ ID NO: 226083 - DNA, 13 bp, Artificial Sequence
  Oligonucleotide for detection of SNP TSC0055104
agaagttggatat

SEQ ID NO: 226084 - DNA, 13 bp, Artificial Sequence
  Oligonucleotide for detection of SNP TSC0055104
atatccaacttct

SEQ ID NO: 226085 - DNA, 13 bp, Artificial Sequence
  Oligonucleotide for detection of SNP TSC0055104
agaagtcggatat

SEQ ID NO: 226086 - DNA, 13 bp, Artificial Sequence
  Oligonucleotide for detection of SNP TSC0055104
atatccgacttct

SEQ ID NO: 226087 - DNA, 13 bp, Artificial Sequence
  Oligonucleotide for detection of SNP TSC0055108
taagtaggatttt

SEQ ID NO: 226088 - DNA, 13 bp, Artificial Sequence
  Oligonucleotide for detection of SNP TSC0055108
aaaatcctactta

SEQ ID NO: 226089 - DNA, 13 bp, Artificial Sequence
  Oligonucleotide for detection of SNP TSC0055108
taagtaagatttt

SEQ ID NO: 226090 - DNA, 13 bp, Artificial Sequence
  Oligonucleotide for detection of SNP TSC0055108
aaaatcttactta

SEQ ID NO: 226091 - DNA, 13 bp, Artificial Sequence
  Oligonucleotide for detection of SNP TSC0055110
agaaatttttgag

SEQ ID NO: 226092 - DNA, 13 bp, Artificial Sequence
  Oligonucleotide for detection of SNP TSC0055110
ctcaaaaatttct

SEQ ID NO: 226093 - DNA, 13 bp, Artificial Sequence
  Oligonucleotide for detection of SNP TSC0055110
agaaatatttgag

SEQ ID NO: 226094 - DNA, 13 bp, Artificial Sequence
  Oligonucleotide for detection of SNP TSC0055110
ctcaaatatttct

SEQ ID NO: 226095 - DNA, 13 bp, Artificial Sequence
  Oligonucleotide for detection of SNP TSC0055111
gtggtttgtttta

SEQ ID NO: 226096 - DNA, 13 bp, Artificial Sequence
  Oligonucleotide for detection of SNP TSC0055111
taaaacaaaccac

SEQ ID NO: 226097 - DNA, 13 bp, Artificial Sequence
  Oligonucleotide for detection of SNP TSC0055111
gtggttcgtttta

SEQ ID NO: 226098 - DNA, 13 bp, Artificial Sequence
  Oligonucleotide for detection of SNP TSC0055111
taaaacgaaccac

SEQ ID NO: 226099 - DNA, 13 bp, Artificial Sequence
  Oligonucleotide for detection of SNP TSC0055111
taagatgggttay

SEQ ID NO: 226100 - DNA, 13 bp, Artificial Sequence
  Oligonucleotide for detection of SNP TSC0055111
rtaacccatctta

SEQ ID NO: 226101 - DNA, 13 bp, Artificial Sequence
  Oligonucleotide for detection of SNP TSC0055111
taagataggttay

SEQ ID NO: 226102 - DNA, 13 bp, Artificial Sequence
  Oligonucleotide for detection of SNP TSC0055111
rtaacctatctta

SEQ ID NO: 226103 - DNA, 13 bp, Artificial Sequence
  Oligonucleotide for detection of SNP TSC0055111
taagacgggttay

SEQ ID NO: 226104 - DNA, 13 bp, Artificial Sequence
  Oligonucleotide for detection of SNP TSC0055111
rtaacccgtctta

SEQ ID NO: 226105 - DNA, 13 bp, Artificial Sequence
  Oligonucleotide for detection of SNP TSC0055112
gatggtgttgttt

SEQ ID NO: 226106 - DNA, 13 bp, Artificial Sequence
  Oligonucleotide for detection of SNP TSC0055112
aaacaacaccatc

SEQ ID NO: 226107 - DNA, 13 bp, Artificial Sequence
  Oligonucleotide for detection of SNP TSC0055112
gatggtattgttt

SEQ ID NO: 226108 - DNA, 13 bp, Artificial Sequence
  Oligonucleotide for detection of SNP TSC0055112
aaacaataccatc

SEQ ID NO: 226109 - DNA, 13 bp, Artificial Sequence
  Oligonucleotide for detection of SNP TSC0055113
atttatataattt

SEQ ID NO: 226110 - DNA, 13 bp, Artificial Sequence
  Oligonucleotide for detection of SNP TSC0055113
aaattatataaat

SEQ ID NO: 226111 - DNA, 13 bp, Artificial Sequence
  Oligonucleotide for detection of SNP TSC0055113
atttatgtaattt

SEQ ID NO: 226112 - DNA, 13 bp, Artificial Sequence
  Oligonucleotide for detection of SNP TSC0055113
aaattacataaat

SEQ ID NO: 226113 - DNA, 13 bp, Artificial Sequence
  Oligonucleotide for detection of SNP TSC0055114
ttatttaaaatta

SEQ ID NO: 226114 - DNA, 13 bp, Artificial Sequence
  Oligonucleotide for detection of SNP TSC0055114
taattttaaataa

SEQ ID NO: 226115 - DNA, 13 bp, Artificial Sequence
  Oligonucleotide for detection of SNP TSC0055114
ttatttgaaatta

SEQ ID NO: 226116 - DNA, 13 bp, Artificial Sequence
  Oligonucleotide for detection of SNP TSC0055114
taatttcaaataa

SEQ ID NO: 226117 - DNA, 13 bp, Artificial Sequence
  Oligonucleotide for detection of SNP TSC0055114
ttattcgaaatta

SEQ ID NO: 226118 - DNA, 13 bp, Artificial Sequence
  Oligonucleotide for detection of SNP TSC0055114
taatttcgaataa

SEQ ID NO: 226119 - DNA, 13 bp, Artificial Sequence
  Oligonucleotide for detection of SNP TSC0055114
taattttgagtaa

SEQ ID NO: 226120 - DNA, 13 bp, Artificial Sequence
  Oligonucleotide for detection of SNP TSC0055114
ttactcaaaatta

SEQ ID NO: 226121 - DNA, 13 bp, Artificial Sequence
  Oligonucleotide for detection of SNP TSC0055114
taatttcgagtaa

SEQ ID NO: 226122 - DNA, 13 bp, Artificial Sequence
  Oligonucleotide for detection of SNP TSC0055114
ttactcgaaatta

SEQ ID NO: 226123 - DNA, 13 bp, Artificial Sequence
  Oligonucleotide for detection of SNP TSC0055116
atggtttttttga

SEQ ID NO: 226124 - DNA, 13 bp, Artificial Sequence
  Oligonucleotide for detection of SNP TSC0055116
tcaaaaaaaccat

SEQ ID NO: 226125 - DNA, 13 bp, Artificial Sequence
  Oligonucleotide for detection of SNP TSC0055116
atggttgttttga

SEQ ID NO: 226126 - DNA, 13 bp, Artificial Sequence
  Oligonucleotide for detection of SNP TSC0055116
tcaaaacaaccat

SEQ ID NO: 226127 - DNA, 13 bp, Artificial Sequence
  Oligonucleotide for detection of SNP TSC0055116
ttaaaagagttat

SEQ ID NO: 226128 - DNA, 13 bp, Artificial Sequence
  Oligonucleotide for detection of SNP TSC0055116
ataactcttttaa

SEQ ID NO: 226129 - DNA, 13 bp, Artificial Sequence
  Oligonucleotide for detection of SNP TSC0055116
ttaaaatagttat

SEQ ID NO: 226130 - DNA, 13 bp, Artificial Sequence
  Oligonucleotide for detection of SNP TSC0055116
ataactattttaa

SEQ ID NO: 226131 - DNA, 13 bp, Artificial Sequence
  Oligonucleotide for detection of SNP TSC0055119
aggggaaaaatgg

SEQ ID NO: 226132 - DNA, 13 bp, Artificial Sequence
  Oligonucleotide for detection of SNP TSC0055119
ccatttttcccct

SEQ ID NO: 226133 - DNA, 13 bp, Artificial Sequence
  Oligonucleotide for detection of SNP TSC0055119
aggggataaatgg

SEQ ID NO: 226134 - DNA, 13 bp, Artificial Sequence
  Oligonucleotide for detection of SNP TSC0055119
ccatttatcccct

SEQ ID NO: 226135 - DNA, 13 bp, Artificial Sequence
  Oligonucleotide for detection of SNP TSC0055120
gaattagttttgt

SEQ ID NO: 226136 - DNA, 13 bp, Artificial Sequence
  Oligonucleotide for detection of SNP TSC0055120
acaaaactaattc

SEQ ID NO: 226137 - DNA, 13 bp, Artificial Sequence
  Oligonucleotide for detection of SNP TSC0055120
gaattaattttgt

SEQ ID NO: 226138 - DNA, 13 bp, Artificial Sequence
  Oligonucleotide for detection of SNP TSC0055120
acaaaattaattc

SEQ ID NO: 226139 - DNA, 13 bp, Artificial Sequence
  Oligonucleotide for detection of SNP TSC0055121
tttttagaggaay

SEQ ID NO: 226140 - DNA, 13 bp, Artificial Sequence
  Oligonucleotide for detection of SNP TSC0055121
rttcctctaaaaa

SEQ ID NO: 226141 - DNA, 13 bp, Artificial Sequence
  Oligonucleotide for detection of SNP TSC0055121
tttttaaaggaay

SEQ ID NO: 226142 - DNA, 13 bp, Artificial Sequence
  Oligonucleotide for detection of SNP TSC0055121
rttcctttaaaaa

SEQ ID NO: 226143 - DNA, 13 bp, Artificial Sequence
  Oligonucleotide for detection of SNP TSC0055122
atttttatttggy

SEQ ID NO: 226144 - DNA, 13 bp, Artificial Sequence
  Oligonucleotide for detection of SNP TSC0055122
rccaaataaaaat

SEQ ID NO: 226145 - DNA, 13 bp, Artificial Sequence
  Oligonucleotide for detection of SNP TSC0055122
gttagataaaggt

SEQ ID NO: 226146 - DNA, 13 bp, Artificial Sequence
  Oligonucleotide for detection of SNP TSC0055122
acctttatctaac

SEQ ID NO: 226147 - DNA, 13 bp, Artificial Sequence
  Oligonucleotide for detection of SNP TSC0055122
gttagaaaaaggt

SEQ ID NO: 226148 - DNA, 13 bp, Artificial Sequence
  Oligonucleotide for detection of SNP TSC0055122
acctttttctaac

SEQ ID NO: 226149 - DNA, 13 bp, Artificial Sequence
  Oligonucleotide for detection of SNP TSC0055123
gggtttaagtgat

SEQ ID NO: 226150 - DNA, 13 bp, Artificial Sequence
  Oligonucleotide for detection of SNP TSC0055123
atcacttaaaccc

SEQ ID NO: 226151 - DNA, 13 bp, Artificial Sequence
  Oligonucleotide for detection of SNP TSC0055123
gggtttgagtgat

SEQ ID NO: 226152 - DNA, 13 bp, Artificial Sequence
  Oligonucleotide for detection of SNP TSC0055123
atcactcaaaccc

SEQ ID NO: 226153 - DNA, 13 bp, Artificial Sequence
  Oligonucleotide for detection of SNP TSC0055123
gggttcgagtgat

SEQ ID NO: 226154 - DNA, 13 bp, Artificial Sequence
  Oligonucleotide for detection of SNP TSC0055123
atcactcgaaccc

SEQ ID NO: 226155 - DNA, 13 bp, Artificial Sequence
  Oligonucleotide for detection of SNP TSC0055123
attatttgaatty

SEQ ID NO: 226156 - DNA, 13 bp, Artificial Sequence
  Oligonucleotide for detection of SNP TSC0055123
raattcaaataat

SEQ ID NO: 226157 - DNA, 13 bp, Artificial Sequence
  Oligonucleotide for detection of SNP TSC0055123
attattcgaatty

SEQ ID NO: 226158 - DNA, 13 bp, Artificial Sequence
  Oligonucleotide for detection of SNP TSC0055123
raattcgaataat

SEQ ID NO: 226159 - DNA, 13 bp, Artificial Sequence
  Oligonucleotide for detection of SNP TSC0055124
ttgtttatggtta

SEQ ID NO: 226160 - DNA, 13 bp, Artificial Sequence
  Oligonucleotide for detection of SNP TSC0055124
taaccataaacaa

SEQ ID NO: 226161 - DNA, 13 bp, Artificial Sequence
  Oligonucleotide for detection of SNP TSC0055124
ttgtttgtggtta

SEQ ID NO: 226162 - DNA, 13 bp, Artificial Sequence
  Oligonucleotide for detection of SNP TSC0055124
taaccacaaacaa

SEQ ID NO: 226163 - DNA, 13 bp, Artificial Sequence
  Oligonucleotide for detection of SNP TSC0055125
atatagtggtgag

SEQ ID NO: 226164 - DNA, 13 bp, Artificial Sequence
  Oligonucleotide for detection of SNP TSC0055125
ctcaccactatat

SEQ ID NO: 226165 - DNA, 13 bp, Artificial Sequence
  Oligonucleotide for detection of SNP TSC0055125
atatagcggtgag

SEQ ID NO: 226166 - DNA, 13 bp, Artificial Sequence
  Oligonucleotide for detection of SNP TSC0055125
ctcaccgctatat

SEQ ID NO: 226167 - DNA, 13 bp, Artificial Sequence
  Oligonucleotide for detection of SNP TSC0055126
gaatatatgagaa

SEQ ID NO: 226168 - DNA, 13 bp, Artificial Sequence
  Oligonucleotide for detection of SNP TSC0055126
ttctcatatattc

SEQ ID NO: 226169 - DNA, 13 bp, Artificial Sequence
  Oligonucleotide for detection of SNP TSC0055126
gaatatttgagaa

SEQ ID NO: 226170 - DNA, 13 bp, Artificial Sequence
  Oligonucleotide for detection of SNP TSC0055126
ttctcaaatattc

SEQ ID NO: 226171 - DNA, 13 bp, Artificial Sequence
  Oligonucleotide for detection of SNP TSC0055126
tttttatatatty

SEQ ID NO: 226172 - DNA, 13 bp, Artificial Sequence
  Oligonucleotide for detection of SNP TSC0055126
raatatataaaaa

SEQ ID NO: 226173 - DNA, 13 bp, Artificial Sequence
  Oligonucleotide for detection of SNP TSC0055127
gttgaataattgg

SEQ ID NO: 226174 - DNA, 13 bp, Artificial Sequence
  Oligonucleotide for detection of SNP TSC0055127
ccaattattcaac

SEQ ID NO: 226175 - DNA, 13 bp, Artificial Sequence
  Oligonucleotide for detection of SNP TSC0055127
gttgaagaattgg

SEQ ID NO: 226176 - DNA, 13 bp, Artificial Sequence
  Oligonucleotide for detection of SNP TSC0055127
ccaattcttcaac

SEQ ID NO: 226177 - DNA, 13 bp, Artificial Sequence
  Oligonucleotide for detection of SNP TSC0055127
gtcgaataattgg

SEQ ID NO: 226178 - DNA, 13 bp, Artificial Sequence
  Oligonucleotide for detection of SNP TSC0055127
ccaattattcgac

SEQ ID NO: 226179 - DNA, 13 bp, Artificial Sequence
  Oligonucleotide for detection of SNP TSC0055127
gtcgaagaattgg

SEQ ID NO: 226180 - DNA, 13 bp, Artificial Sequence
  Oligonucleotide for detection of SNP TSC0055127
ccaattcttcgac

SEQ ID NO: 226181 - DNA, 13 bp, Artificial Sequence
  Oligonucleotide for detection of SNP TSC0055127
ttaattatttgay

SEQ ID NO: 226182 - DNA, 13 bp, Artificial Sequence
  Oligonucleotide for detection of SNP TSC0055127
rtcaaataattaa

SEQ ID NO: 226183 - DNA, 13 bp, Artificial Sequence
  Oligonucleotide for detection of SNP TSC0055127
ttaattttttgay

SEQ ID NO: 226184 - DNA, 13 bp, Artificial Sequence
  Oligonucleotide for detection of SNP TSC0055127
rtcaaaaaattaa

SEQ ID NO: 226185 - DNA, 13 bp, Artificial Sequence
  Oligonucleotide for detection of SNP TSC0055127
ttaattattcgay

SEQ ID NO: 226186 - DNA, 13 bp, Artificial Sequence
  Oligonucleotide for detection of SNP TSC0055127
rtcgaataattaa

SEQ ID NO: 226187 - DNA, 13 bp, Artificial Sequence
  Oligonucleotide for detection of SNP TSC0055127
ttaatttttcgay

SEQ ID NO: 226188 - DNA, 13 bp, Artificial Sequence
  Oligonucleotide for detection of SNP TSC0055127
rtcgaaaaattaa

SEQ ID NO: 226189 - DNA, 13 bp, Artificial Sequence
  Oligonucleotide for detection of SNP TSC0055128
gttttgaaatatt

SEQ ID NO: 226190 - DNA, 13 bp, Artificial Sequence
  Oligonucleotide for detection of SNP TSC0055128
aatatttcaaaac

SEQ ID NO: 226191 - DNA, 13 bp, Artificial Sequence
  Oligonucleotide for detection of SNP TSC0055128
gttttggaatatt

SEQ ID NO: 226192 - DNA, 13 bp, Artificial Sequence
  Oligonucleotide for detection of SNP TSC0055128
aatattccaaaac

SEQ ID NO: 226193 - DNA, 13 bp, Artificial Sequence
  Oligonucleotide for detection of SNP TSC0055129
tttatataattaa

SEQ ID NO: 226194 - DNA, 13 bp, Artificial Sequence
  Oligonucleotide for detection of SNP TSC0055129
ttaattatataaa

SEQ ID NO: 226195 - DNA, 13 bp, Artificial Sequence
  Oligonucleotide for detection of SNP TSC0055129
tttatagaattaa

SEQ ID NO: 226196 - DNA, 13 bp, Artificial Sequence
  Oligonucleotide for detection of SNP TSC0055129
ttaattctataaa

SEQ ID NO: 226197 - DNA, 13 bp, Artificial Sequence
  Oligonucleotide for detection of SNP TSC0055129
ttgattatatgaa

SEQ ID NO: 226198 - DNA, 13 bp, Artificial Sequence
  Oligonucleotide for detection of SNP TSC0055129
ttcatataatcaa

SEQ ID NO: 226199 - DNA, 13 bp, Artificial Sequence
  Oligonucleotide for detection of SNP TSC0055129
ttgattttatgaa

SEQ ID NO: 226200 - DNA, 13 bp, Artificial Sequence
  Oligonucleotide for detection of SNP TSC0055129
ttcataaaatcaa

SEQ ID NO: 226201 - DNA, 13 bp, Artificial Sequence
  Oligonucleotide for detection of SNP TSC0055131
tgtgatatttttt

SEQ ID NO: 226202 - DNA, 13 bp, Artificial Sequence
  Oligonucleotide for detection of SNP TSC0055131
aaaaaatatcaca

SEQ ID NO: 226203 - DNA, 13 bp, Artificial Sequence
  Oligonucleotide for detection of SNP TSC0055131
tgtgatgtttttt

SEQ ID NO: 226204 - DNA, 13 bp, Artificial Sequence
  Oligonucleotide for detection of SNP TSC0055131
aaaaaacatcaca

SEQ ID NO: 226205 - DNA, 13 bp, Artificial Sequence
  Oligonucleotide for detection of SNP TSC0055131
tgtgacgtttttt

SEQ ID NO: 226206 - DNA, 13 bp, Artificial Sequence
  Oligonucleotide for detection of SNP TSC0055131
aaaaaacgtcaca

SEQ ID NO: 226207 - DNA, 13 bp, Artificial Sequence
  Oligonucleotide for detection of SNP TSC0055131
agggagtgttata

SEQ ID NO: 226208 - DNA, 13 bp, Artificial Sequence
  Oligonucleotide for detection of SNP TSC0055131
tataacactccct

SEQ ID NO: 226209 - DNA, 13 bp, Artificial Sequence
  Oligonucleotide for detection of SNP TSC0055131
agggagcgttata

SEQ ID NO: 226210 - DNA, 13 bp, Artificial Sequence
  Oligonucleotide for detection of SNP TSC0055131
tataacgctccct

SEQ ID NO: 226211 - DNA, 13 bp, Artificial Sequence
  Oligonucleotide for detection of SNP TSC0055132
ttgggtaattttg

SEQ ID NO: 226212 - DNA, 13 bp, Artificial Sequence
  Oligonucleotide for detection of SNP TSC0055132
caaaattacccaa

SEQ ID NO: 226213 - DNA, 13 bp, Artificial Sequence
  Oligonucleotide for detection of SNP TSC0055132
ttgggtgattttg

SEQ ID NO: 226214 - DNA, 13 bp, Artificial Sequence
  Oligonucleotide for detection of SNP TSC0055132
caaaatcacccaa

SEQ ID NO: 226215 - DNA, 13 bp, Artificial Sequence
  Oligonucleotide for detection of SNP TSC0055132
ttgggtaatttcg

SEQ ID NO: 226216 - DNA, 13 bp, Artificial Sequence
  Oligonucleotide for detection of SNP TSC0055132
cgaaattacccaa

SEQ ID NO: 226217 - DNA, 13 bp, Artificial Sequence
  Oligonucleotide for detection of SNP TSC0055132
ttgggtgatttcg

SEQ ID NO: 226218 - DNA, 13 bp, Artificial Sequence
  Oligonucleotide for detection of SNP TSC0055132
cgaaatcacccaa

SEQ ID NO: 226219 - DNA, 13 bp, Artificial Sequence
  Oligonucleotide for detection of SNP TSC0055139
gatatagtattat

SEQ ID NO: 226220 - DNA, 13 bp, Artificial Sequence
  Oligonucleotide for detection of SNP TSC0055139
ataatactatatc

SEQ ID NO: 226221 - DNA, 13 bp, Artificial Sequence
  Oligonucleotide for detection of SNP TSC0055139
gatataatattat

SEQ ID NO: 226222 - DNA, 13 bp, Artificial Sequence
  Oligonucleotide for detection of SNP TSC0055139
ataatattatatc

SEQ ID NO: 226223 - DNA, 13 bp, Artificial Sequence
  Oligonucleotide for detection of SNP TSC0055141
tttttaattatgg

SEQ ID NO: 226224 - DNA, 13 bp, Artificial Sequence
  Oligonucleotide for detection of SNP TSC0055141
ccataattaaaaa

SEQ ID NO: 226225 - DNA, 13 bp, Artificial Sequence
  Oligonucleotide for detection of SNP TSC0055141
tttttagttatgg

SEQ ID NO: 226226 - DNA, 13 bp, Artificial Sequence
  Oligonucleotide for detection of SNP TSC0055141
ccataactaaaaa

SEQ ID NO: 226227 - DNA, 13 bp, Artificial Sequence
  Oligonucleotide for detection of SNP TSC0055145
ataatttatattg

SEQ ID NO: 226228 - DNA, 13 bp, Artificial Sequence
  Oligonucleotide for detection of SNP TSC0055145
caatataaattat

SEQ ID NO: 226229 - DNA, 13 bp, Artificial Sequence
  Oligonucleotide for detection of SNP TSC0055145
ataattgatattg

SEQ ID NO: 226230 - DNA, 13 bp, Artificial Sequence
  Oligonucleotide for detection of SNP TSC0055145
caatatcaattat

SEQ ID NO: 226231 - DNA, 13 bp, Artificial Sequence
  Oligonucleotide for detection of SNP TSC0055145
ataatttatatcg

SEQ ID NO: 226232 - DNA, 13 bp, Artificial Sequence
  Oligonucleotide for detection of SNP TSC0055145
cgatataaattat

SEQ ID NO: 226233 - DNA, 13 bp, Artificial Sequence
  Oligonucleotide for detection of SNP TSC0055145
ataattgatatcg

SEQ ID NO: 226234 - DNA, 13 bp, Artificial Sequence
  Oligonucleotide for detection of SNP TSC0055145
cgatatcaattat

SEQ ID NO: 226235 - DNA, 13 bp, Artificial Sequence
  Oligonucleotide for detection of SNP TSC0055145
tggtgtgaattgt

SEQ ID NO: 226236 - DNA, 13 bp, Artificial Sequence
  Oligonucleotide for detection of SNP TSC0055145
acaattcacacca

SEQ ID NO: 226237 - DNA, 13 bp, Artificial Sequence
  Oligonucleotide for detection of SNP TSC0055145
tggtgttaattgt

SEQ ID NO: 226238 - DNA, 13 bp, Artificial Sequence
  Oligonucleotide for detection of SNP TSC0055145
acaattaacacca

SEQ ID NO: 226239 - DNA, 13 bp, Artificial Sequence
  Oligonucleotide for detection of SNP TSC0055145
cggtgtgaattgt

SEQ ID NO: 226240 - DNA, 13 bp, Artificial Sequence
  Oligonucleotide for detection of SNP TSC0055145
acaattcacaccg

SEQ ID NO: 226241 - DNA, 13 bp, Artificial Sequence
  Oligonucleotide for detection of SNP TSC0055145
cggtgttaattgt

SEQ ID NO: 226242 - DNA, 13 bp, Artificial Sequence
  Oligonucleotide for detection of SNP TSC0055145
acaattaacaccg

SEQ ID NO: 226243 - DNA, 13 bp, Artificial Sequence
  Oligonucleotide for detection of SNP TSC0055147
tataatgtttagt

SEQ ID NO: 226244 - DNA, 13 bp, Artificial Sequence
  Oligonucleotide for detection of SNP TSC0055147
actaaacattata

SEQ ID NO: 226245 - DNA, 13 bp, Artificial Sequence
  Oligonucleotide for detection of SNP TSC0055147
attgggaattgta

SEQ ID NO: 226246 - DNA, 13 bp, Artificial Sequence
  Oligonucleotide for detection of SNP TSC0055147
tacaattcccaat

SEQ ID NO: 226247 - DNA, 13 bp, Artificial Sequence
  Oligonucleotide for detection of SNP TSC0055147
attgggtattgta

SEQ ID NO: 226248 - DNA, 13 bp, Artificial Sequence
  Oligonucleotide for detection of SNP TSC0055147
tacaatacccaat

SEQ ID NO: 226249 - DNA, 13 bp, Artificial Sequence
  Oligonucleotide for detection of SNP TSC0055149
attttgtgaggty

SEQ ID NO: 226250 - DNA, 13 bp, Artificial Sequence
  Oligonucleotide for detection of SNP TSC0055149
racctcacaaaat

SEQ ID NO: 226251 - DNA, 13 bp, Artificial Sequence
  Oligonucleotide for detection of SNP TSC0055149
attttgcgaggty

SEQ ID NO: 226252 - DNA, 13 bp, Artificial Sequence
  Oligonucleotide for detection of SNP TSC0055149
racctcgcaaaat

SEQ ID NO: 226253 - DNA, 13 bp, Artificial Sequence
  Oligonucleotide for detection of SNP TSC0055149
ggttttgtagagt

SEQ ID NO: 226254 - DNA, 13 bp, Artificial Sequence
  Oligonucleotide for detection of SNP TSC0055149
actctacaaaacc

SEQ ID NO: 226255 - DNA, 13 bp, Artificial Sequence
  Oligonucleotide for detection of SNP TSC0055149
ggttttttagagt

SEQ ID NO: 226256 - DNA, 13 bp, Artificial Sequence
  Oligonucleotide for detection of SNP TSC0055149
actctaaaaaacc

SEQ ID NO: 226257 - DNA, 13 bp, Artificial Sequence
  Oligonucleotide for detection of SNP TSC0055149
ggtttcgtagagt

SEQ ID NO: 226258 - DNA, 13 bp, Artificial Sequence
  Oligonucleotide for detection of SNP TSC0055149
actctacgaaacc

SEQ ID NO: 226259 - DNA, 13 bp, Artificial Sequence
  Oligonucleotide for detection of SNP TSC0055150
tttagaggaatta

SEQ ID NO: 226260 - DNA, 13 bp, Artificial Sequence
  Oligonucleotide for detection of SNP TSC0055150
taattcctctaaa

SEQ ID NO: 226261 - DNA, 13 bp, Artificial Sequence
  Oligonucleotide for detection of SNP TSC0055150
tttagaagaatta

SEQ ID NO: 226262 - DNA, 13 bp, Artificial Sequence
  Oligonucleotide for detection of SNP TSC0055150
taattcttctaaa

SEQ ID NO: 226263 - DNA, 13 bp, Artificial Sequence
  Oligonucleotide for detection of SNP TSC0055155
tgagtattagggg

SEQ ID NO: 226264 - DNA, 13 bp, Artificial Sequence
  Oligonucleotide for detection of SNP TSC0055155
cccctaatactca

SEQ ID NO: 226265 - DNA, 13 bp, Artificial Sequence
  Oligonucleotide for detection of SNP TSC0055155
tgagtagtagggg

SEQ ID NO: 226266 - DNA, 13 bp, Artificial Sequence
  Oligonucleotide for detection of SNP TSC0055155
cccctactactca

SEQ ID NO: 226267 - DNA, 13 bp, Artificial Sequence
  Oligonucleotide for detection of SNP TSC0055155
tttttgatattta

SEQ ID NO: 226268 - DNA, 13 bp, Artificial Sequence
  Oligonucleotide for detection of SNP TSC0055155
taaatatcaaaaa

SEQ ID NO: 226269 - DNA, 13 bp, Artificial Sequence
  Oligonucleotide for detection of SNP TSC0055155
tttttgttattta

SEQ ID NO: 226270 - DNA, 13 bp, Artificial Sequence
  Oligonucleotide for detection of SNP TSC0055155
taaataacaaaaa

SEQ ID NO: 226271 - DNA, 13 bp, Artificial Sequence
  Oligonucleotide for detection of SNP TSC0055159
gggtttattttgy

SEQ ID NO: 226272 - DNA, 13 bp, Artificial Sequence
  Oligonucleotide for detection of SNP TSC0055159
rcaaaataaaccc

SEQ ID NO: 226273 - DNA, 13 bp, Artificial Sequence
  Oligonucleotide for detection of SNP TSC0055159
gggttttttttgy

SEQ ID NO: 226274 - DNA, 13 bp, Artificial Sequence
  Oligonucleotide for detection of SNP TSC0055159
rcaaaaaaaaccc

SEQ ID NO: 226275 - DNA, 13 bp, Artificial Sequence
  Oligonucleotide for detection of SNP TSC0055159
gtaaggtagatty

SEQ ID NO: 226276 - DNA, 13 bp, Artificial Sequence
  Oligonucleotide for detection of SNP TSC0055159
raatctaccttac

SEQ ID NO: 226277 - DNA, 13 bp, Artificial Sequence
  Oligonucleotide for detection of SNP TSC0055159
gtaagggagatty

SEQ ID NO: 226278 - DNA, 13 bp, Artificial Sequence
  Oligonucleotide for detection of SNP TSC0055159
raatctcccttac

SEQ ID NO: 226279 - DNA, 13 bp, Artificial Sequence
  Oligonucleotide for detection of SNP TSC0055160
tgtttaagttggg

SEQ ID NO: 226280 - DNA, 13 bp, Artificial Sequence
  Oligonucleotide for detection of SNP TSC0055160
cccaacttaaaca

SEQ ID NO: 226281 - DNA, 13 bp, Artificial Sequence
  Oligonucleotide for detection of SNP TSC0055160
tgtttaggttggg

SEQ ID NO: 226282 - DNA, 13 bp, Artificial Sequence
  Oligonucleotide for detection of SNP TSC0055160
cccaacctaaaca

SEQ ID NO: 226283 - DNA, 13 bp, Artificial Sequence
  Oligonucleotide for detection of SNP TSC0055161
gttttttgaggta

SEQ ID NO: 226284 - DNA, 13 bp, Artificial Sequence
  Oligonucleotide for detection of SNP TSC0055161
tacctcaaaaaac

SEQ ID NO: 226285 - DNA, 13 bp, Artificial Sequence
  Oligonucleotide for detection of SNP TSC0055161
gtttttcgaggta

SEQ ID NO: 226286 - DNA, 13 bp, Artificial Sequence
  Oligonucleotide for detection of SNP TSC0055161
tacctcgaaaaac

SEQ ID NO: 226287 - DNA, 13 bp, Artificial Sequence
  Oligonucleotide for detection of SNP TSC0055161
tgttttgaaaagy

SEQ ID NO: 226288 - DNA, 13 bp, Artificial Sequence
  Oligonucleotide for detection of SNP TSC0055161
rcttttcaaaaca

SEQ ID NO: 226289 - DNA, 13 bp, Artificial Sequence
  Oligonucleotide for detection of SNP TSC0055161
tgttttaaaaagy

SEQ ID NO: 226290 - DNA, 13 bp, Artificial Sequence
  Oligonucleotide for detection of SNP TSC0055161
rctttttaaaaca

SEQ ID NO: 226291 - DNA, 13 bp, Artificial Sequence
  Oligonucleotide for detection of SNP TSC0055161
tgtttcgaaaagy

SEQ ID NO: 226292 - DNA, 13 bp, Artificial Sequence
  Oligonucleotide for detection of SNP TSC0055161
rcttttcgaaaca

SEQ ID NO: 226293 - DNA, 13 bp, Artificial Sequence
  Oligonucleotide for detection of SNP TSC0055162
tgtaggaaggaag

SEQ ID NO: 226294 - DNA, 13 bp, Artificial Sequence
  Oligonucleotide for detection of SNP TSC0055162
cttccttcctaca

SEQ ID NO: 226295 - DNA, 13 bp, Artificial Sequence
  Oligonucleotide for detection of SNP TSC0055162
tgtagggaggaag

SEQ ID NO: 226296 - DNA, 13 bp, Artificial Sequence
  Oligonucleotide for detection of SNP TSC0055162
cttcctccctaca

SEQ ID NO: 226297 - DNA, 13 bp, Artificial Sequence
  Oligonucleotide for detection of SNP TSC0055163
agtgtatggagga

SEQ ID NO: 226298 - DNA, 13 bp, Artificial Sequence
  Oligonucleotide for detection of SNP TSC0055163
tcctccatacact

SEQ ID NO: 226299 - DNA, 13 bp, Artificial Sequence
  Oligonucleotide for detection of SNP TSC0055163
agtgtagggagga

SEQ ID NO: 226300 - DNA, 13 bp, Artificial Sequence
  Oligonucleotide for detection of SNP TSC0055163
tcctccctacact

SEQ ID NO: 226301 - DNA, 13 bp, Artificial Sequence
  Oligonucleotide for detection of SNP TSC0055163
agtgtacggagga

SEQ ID NO: 226302 - DNA, 13 bp, Artificial Sequence
  Oligonucleotide for detection of SNP TSC0055163
tcctccgtacact

SEQ ID NO: 226303 - DNA, 13 bp, Artificial Sequence
  Oligonucleotide for detection of SNP TSC0055163
tttttcgtgtatt

SEQ ID NO: 226304 - DNA, 13 bp, Artificial Sequence
  Oligonucleotide for detection of SNP TSC0055163
aatacacgaaaaa

SEQ ID NO: 226305 - DNA, 13 bp, Artificial Sequence
  Oligonucleotide for detection of SNP TSC0055166
ttagattttggtt

SEQ ID NO: 226306 - DNA, 13 bp, Artificial Sequence
  Oligonucleotide for detection of SNP TSC0055166
aaccaaaatctaa

SEQ ID NO: 226307 - DNA, 13 bp, Artificial Sequence
  Oligonucleotide for detection of SNP TSC0055166
ttagatttcggtt

SEQ ID NO: 226308 - DNA, 13 bp, Artificial Sequence
  Oligonucleotide for detection of SNP TSC0055166
aaccgaaatctaa

SEQ ID NO: 226309 - DNA, 13 bp, Artificial Sequence
  Oligonucleotide for detection of SNP TSC0055166
ttagacgttggtt

SEQ ID NO: 226310 - DNA, 13 bp, Artificial Sequence
  Oligonucleotide for detection of SNP TSC0055166
aaccaacgtctaa

SEQ ID NO: 226311 - DNA, 13 bp, Artificial Sequence
  Oligonucleotide for detection of SNP TSC0055166
ttagatgtcggtt

SEQ ID NO: 226312 - DNA, 13 bp, Artificial Sequence
  Oligonucleotide for detection of SNP TSC0055166
aaccgacatctaa

SEQ ID NO: 226313 - DNA, 13 bp, Artificial Sequence
  Oligonucleotide for detection of SNP TSC0055166
ttagacgtcggtt

SEQ ID NO: 226314 - DNA, 13 bp, Artificial Sequence
  Oligonucleotide for detection of SNP TSC0055166
aaccgacgtctaa

SEQ ID NO: 226315 - DNA, 13 bp, Artificial Sequence
  Oligonucleotide for detection of SNP TSC0055166
aattgaggtttaa

SEQ ID NO: 226316 - DNA, 13 bp, Artificial Sequence
  Oligonucleotide for detection of SNP TSC0055166
ttaaacctcaatt

SEQ ID NO: 226317 - DNA, 13 bp, Artificial Sequence
  Oligonucleotide for detection of SNP TSC0055166
aattgatgtttaa

SEQ ID NO: 226318 - DNA, 13 bp, Artificial Sequence
  Oligonucleotide for detection of SNP TSC0055166
ttaaacatcaatt

SEQ ID NO: 226319 - DNA, 13 bp, Artificial Sequence
  Oligonucleotide for detection of SNP TSC0055166
aatcgaggtttaa

SEQ ID NO: 226320 - DNA, 13 bp, Artificial Sequence
  Oligonucleotide for detection of SNP TSC0055166
ttaaacctcgatt

SEQ ID NO: 226321 - DNA, 13 bp, Artificial Sequence
  Oligonucleotide for detection of SNP TSC0055166
aatcgatgtttaa

SEQ ID NO: 226322 - DNA, 13 bp, Artificial Sequence
  Oligonucleotide for detection of SNP TSC0055166
ttaaacatcgatt

SEQ ID NO: 226323 - DNA, 13 bp, Artificial Sequence
  Oligonucleotide for detection of SNP TSC0055166
aattgacgtttaa

SEQ ID NO: 226324 - DNA, 13 bp, Artificial Sequence
  Oligonucleotide for detection of SNP TSC0055166
ttaaacgtcaatt

SEQ ID NO: 226325 - DNA, 13 bp, Artificial Sequence
  Oligonucleotide for detection of SNP TSC0055166
aatcgacgtttaa

SEQ ID NO: 226326 - DNA, 13 bp, Artificial Sequence
  Oligonucleotide for detection of SNP TSC0055166
ttaaacgtcgatt

SEQ ID NO: 226327 - DNA, 13 bp, Artificial Sequence
  Oligonucleotide for detection of SNP TSC0055170
tgggatatagttg

SEQ ID NO: 226328 - DNA, 13 bp, Artificial Sequence
  Oligonucleotide for detection of SNP TSC0055170
caactatatccca

SEQ ID NO: 226329 - DNA, 13 bp, Artificial Sequence
  Oligonucleotide for detection of SNP TSC0055170
tgggatttagttg

SEQ ID NO: 226330 - DNA, 13 bp, Artificial Sequence
  Oligonucleotide for detection of SNP TSC0055170
caactaaatccca

SEQ ID NO: 226331 - DNA, 13 bp, Artificial Sequence
  Oligonucleotide for detection of SNP TSC0055170
taattgtatttta

SEQ ID NO: 226332 - DNA, 13 bp, Artificial Sequence
  Oligonucleotide for detection of SNP TSC0055170
taaaatacaatta

SEQ ID NO: 226333 - DNA, 13 bp, Artificial Sequence
  Oligonucleotide for detection of SNP TSC0055170
taattggatttta

SEQ ID NO: 226334 - DNA, 13 bp, Artificial Sequence
  Oligonucleotide for detection of SNP TSC0055170
taaaatccaatta

SEQ ID NO: 226335 - DNA, 13 bp, Artificial Sequence
  Oligonucleotide for detection of SNP TSC0055173
ttagtttgtattg

SEQ ID NO: 226336 - DNA, 13 bp, Artificial Sequence
  Oligonucleotide for detection of SNP TSC0055173
caatacaaactaa

SEQ ID NO: 226337 - DNA, 13 bp, Artificial Sequence
  Oligonucleotide for detection of SNP TSC0055173
ttagttggtattg

SEQ ID NO: 226338 - DNA, 13 bp, Artificial Sequence
  Oligonucleotide for detection of SNP TSC0055173
caataccaactaa

SEQ ID NO: 226339 - DNA, 13 bp, Artificial Sequence
  Oligonucleotide for detection of SNP TSC0055173
ttagttcgtattg

SEQ ID NO: 226340 - DNA, 13 bp, Artificial Sequence
  Oligonucleotide for detection of SNP TSC0055173
caatacgaactaa

SEQ ID NO: 226341 - DNA, 13 bp, Artificial Sequence
  Oligonucleotide for detection of SNP TSC0055173
tagtatgagttgg

SEQ ID NO: 226342 - DNA, 13 bp, Artificial Sequence
  Oligonucleotide for detection of SNP TSC0055173
ccaactcatacta

SEQ ID NO: 226343 - DNA, 13 bp, Artificial Sequence
  Oligonucleotide for detection of SNP TSC0055173
tagtattagttgg

SEQ ID NO: 226344 - DNA, 13 bp, Artificial Sequence
  Oligonucleotide for detection of SNP TSC0055173
ccaactaatacta

SEQ ID NO: 226345 - DNA, 13 bp, Artificial Sequence
  Oligonucleotide for detection of SNP TSC0055173
tagtacgagttgg

SEQ ID NO: 226346 - DNA, 13 bp, Artificial Sequence
  Oligonucleotide for detection of SNP TSC0055173
ccaactcgtacta

SEQ ID NO: 226347 - DNA, 13 bp, Artificial Sequence
  Oligonucleotide for detection of SNP TSC0055179
attatttggggga

SEQ ID NO: 226348 - DNA, 13 bp, Artificial Sequence
  Oligonucleotide for detection of SNP TSC0055179
tcccccaaataat

SEQ ID NO: 226349 - DNA, 13 bp, Artificial Sequence
  Oligonucleotide for detection of SNP TSC0055179
attattcggggga

SEQ ID NO: 226350 - DNA, 13 bp, Artificial Sequence
  Oligonucleotide for detection of SNP TSC0055179
tcccccgaataat

SEQ ID NO: 226351 - DNA, 13 bp, Artificial Sequence
  Oligonucleotide for detection of SNP TSC0055179
ttttttggataat

SEQ ID NO: 226352 - DNA, 13 bp, Artificial Sequence
  Oligonucleotide for detection of SNP TSC0055179
attatccaaaaaa

SEQ ID NO: 226353 - DNA, 13 bp, Artificial Sequence
  Oligonucleotide for detection of SNP TSC0055179
ttttttagataat

SEQ ID NO: 226354 - DNA, 13 bp, Artificial Sequence
  Oligonucleotide for detection of SNP TSC0055179
attatctaaaaaa

SEQ ID NO: 226355 - DNA, 13 bp, Artificial Sequence
  Oligonucleotide for detection of SNP TSC0055179
tttttcggataat

SEQ ID NO: 226356 - DNA, 13 bp, Artificial Sequence
  Oligonucleotide for detection of SNP TSC0055179
attatccgaaaaa

SEQ ID NO: 226357 - DNA, 13 bp, Artificial Sequence
  Oligonucleotide for detection of SNP TSC0055180
tgttatagagatt

SEQ ID NO: 226358 - DNA, 13 bp, Artificial Sequence
  Oligonucleotide for detection of SNP TSC0055180
aatctctataaca

SEQ ID NO: 226359 - DNA, 13 bp, Artificial Sequence
  Oligonucleotide for detection of SNP TSC0055180
tgttatggagatt

SEQ ID NO: 226360 - DNA, 13 bp, Artificial Sequence
  Oligonucleotide for detection of SNP TSC0055180
aatctccataaca

SEQ ID NO: 226361 - DNA, 13 bp, Artificial Sequence
  Oligonucleotide for detection of SNP TSC0055180
tgttacggagatt

SEQ ID NO: 226362 - DNA, 13 bp, Artificial Sequence
  Oligonucleotide for detection of SNP TSC0055180
aatctccgtaaca

SEQ ID NO: 226363 - DNA, 13 bp, Artificial Sequence
  Oligonucleotide for detection of SNP TSC0055180
aatttttgtgata

SEQ ID NO: 226364 - DNA, 13 bp, Artificial Sequence
  Oligonucleotide for detection of SNP TSC0055180
tatcacaaaaatt

SEQ ID NO: 226365 - DNA, 13 bp, Artificial Sequence
  Oligonucleotide for detection of SNP TSC0055180
aattttcgtgata

SEQ ID NO: 226366 - DNA, 13 bp, Artificial Sequence
  Oligonucleotide for detection of SNP TSC0055180
tatcacgaaaatt

SEQ ID NO: 226367 - DNA, 13 bp, Artificial Sequence
  Oligonucleotide for detection of SNP TSC0055182
ttaaaagaatata

SEQ ID NO: 226368 - DNA, 13 bp, Artificial Sequence
  Oligonucleotide for detection of SNP TSC0055182
tatattcttttaa

SEQ ID NO: 226369 - DNA, 13 bp, Artificial Sequence
  Oligonucleotide for detection of SNP TSC0055182
tatattattttga

SEQ ID NO: 226370 - DNA, 13 bp, Artificial Sequence
  Oligonucleotide for detection of SNP TSC0055182
tcaaaataatata

SEQ ID NO: 226371 - DNA, 13 bp, Artificial Sequence
  Oligonucleotide for detection of SNP TSC0055183
gaaagaatataga

SEQ ID NO: 226372 - DNA, 13 bp, Artificial Sequence
  Oligonucleotide for detection of SNP TSC0055183
tctatattctttc

SEQ ID NO: 226373 - DNA, 13 bp, Artificial Sequence
  Oligonucleotide for detection of SNP TSC0055183
gaaagattataga

SEQ ID NO: 226374 - DNA, 13 bp, Artificial Sequence
  Oligonucleotide for detection of SNP TSC0055183
tctataatctttc

SEQ ID NO: 226375 - DNA, 13 bp, Artificial Sequence
  Oligonucleotide for detection of SNP TSC0055184
tttttaaattttg

SEQ ID NO: 226376 - DNA, 13 bp, Artificial Sequence
  Oligonucleotide for detection of SNP TSC0055184
caaaatttaaaaa

SEQ ID NO: 226377 - DNA, 13 bp, Artificial Sequence
  Oligonucleotide for detection of SNP TSC0055185
gtgtttgttagta

SEQ ID NO: 226378 - DNA, 13 bp, Artificial Sequence
  Oligonucleotide for detection of SNP TSC0055185
tactaacaaacac

SEQ ID NO: 226379 - DNA, 13 bp, Artificial Sequence
  Oligonucleotide for detection of SNP TSC0055185
gtgtttattagta

SEQ ID NO: 226380 - DNA, 13 bp, Artificial Sequence
  Oligonucleotide for detection of SNP TSC0055185
tactaataaacac

SEQ ID NO: 226381 - DNA, 13 bp, Artificial Sequence
  Oligonucleotide for detection of SNP TSC0055186
aatttaatggtaa

SEQ ID NO: 226382 - DNA, 13 bp, Artificial Sequence
  Oligonucleotide for detection of SNP TSC0055186
ttaccattaaatt

SEQ ID NO: 226383 - DNA, 13 bp, Artificial Sequence
  Oligonucleotide for detection of SNP TSC0055186
aatttagtggtaa

SEQ ID NO: 226384 - DNA, 13 bp, Artificial Sequence
  Oligonucleotide for detection of SNP TSC0055186
ttaccactaaatt

SEQ ID NO: 226385 - DNA, 13 bp, Artificial Sequence
  Oligonucleotide for detection of SNP TSC0055187
gtatttattataa

SEQ ID NO: 226386 - DNA, 13 bp, Artificial Sequence
  Oligonucleotide for detection of SNP TSC0055187
ttataataaatac

SEQ ID NO: 226387 - DNA, 13 bp, Artificial Sequence
  Oligonucleotide for detection of SNP TSC0055187
gtatttgttataa

SEQ ID NO: 226388 - DNA, 13 bp, Artificial Sequence
  Oligonucleotide for detection of SNP TSC0055187
ttataacaaatac

SEQ ID NO: 226389 - DNA, 13 bp, Artificial Sequence
  Oligonucleotide for detection of SNP TSC0055187
gtattcgttataa

SEQ ID NO: 226390 - DNA, 13 bp, Artificial Sequence
  Oligonucleotide for detection of SNP TSC0055187
ttataacgaatac

SEQ ID NO: 226391 - DNA, 13 bp, Artificial Sequence
  Oligonucleotide for detection of SNP TSC0055187
ttgtgatgggtay

SEQ ID NO: 226392 - DNA, 13 bp, Artificial Sequence
  Oligonucleotide for detection of SNP TSC0055187
rtacccatcacaa

SEQ ID NO: 226393 - DNA, 13 bp, Artificial Sequence
  Oligonucleotide for detection of SNP TSC0055187
ttgtgacgggtay

SEQ ID NO: 226394 - DNA, 13 bp, Artificial Sequence
  Oligonucleotide for detection of SNP TSC0055187
rtacccgtcacaa

SEQ ID NO: 226395 - DNA, 13 bp, Artificial Sequence
  Oligonucleotide for detection of SNP TSC0055188
taaaaaatttagg

SEQ ID NO: 226396 - DNA, 13 bp, Artificial Sequence
  Oligonucleotide for detection of SNP TSC0055188
cctaaatttttta

SEQ ID NO: 226397 - DNA, 13 bp, Artificial Sequence
  Oligonucleotide for detection of SNP TSC0055188
taaaaagtttagg

SEQ ID NO: 226398 - DNA, 13 bp, Artificial Sequence
  Oligonucleotide for detection of SNP TSC0055188
cctaaacttttta

SEQ ID NO: 226399 - DNA, 13 bp, Artificial Sequence
  Oligonucleotide for detection of SNP TSC0055189
attgggattgtga

SEQ ID NO: 226400 - DNA, 13 bp, Artificial Sequence
  Oligonucleotide for detection of SNP TSC0055189
tcacaatcccaat

SEQ ID NO: 226401 - DNA, 13 bp, Artificial Sequence
  Oligonucleotide for detection of SNP TSC0055189
attggggttgtga

SEQ ID NO: 226402 - DNA, 13 bp, Artificial Sequence
  Oligonucleotide for detection of SNP TSC0055189
tcacaaccccaat

SEQ ID NO: 226403 - DNA, 13 bp, Artificial Sequence
  Oligonucleotide for detection of SNP TSC0055190
atggtagtattaa

SEQ ID NO: 226404 - DNA, 13 bp, Artificial Sequence
  Oligonucleotide for detection of SNP TSC0055190
ttaatactaccat

SEQ ID NO: 226405 - DNA, 13 bp, Artificial Sequence
  Oligonucleotide for detection of SNP TSC0055190
atggtaatattaa

SEQ ID NO: 226406 - DNA, 13 bp, Artificial Sequence
  Oligonucleotide for detection of SNP TSC0055190
ttaatattaccat

SEQ ID NO: 226407 - DNA, 13 bp, Artificial Sequence
  Oligonucleotide for detection of SNP TSC0055191
ttattaagaattt

SEQ ID NO: 226408 - DNA, 13 bp, Artificial Sequence
  Oligonucleotide for detection of SNP TSC0055191
aaattcttaataa

SEQ ID NO: 226409 - DNA, 13 bp, Artificial Sequence
  Oligonucleotide for detection of SNP TSC0055191
aaatttttgatgg

SEQ ID NO: 226410 - DNA, 13 bp, Artificial Sequence
  Oligonucleotide for detection of SNP TSC0055191
ccatcaaaaattt

SEQ ID NO: 226411 - DNA, 13 bp, Artificial Sequence
  Oligonucleotide for detection of SNP TSC0055191
aaatttatgatgg

SEQ ID NO: 226412 - DNA, 13 bp, Artificial Sequence
  Oligonucleotide for detection of SNP TSC0055191
ccatcataaattt

SEQ ID NO: 226413 - DNA, 13 bp, Artificial Sequence
  Oligonucleotide for detection of SNP TSC0009808
ataggagtataga

SEQ ID NO: 226414 - DNA, 13 bp, Artificial Sequence
  Oligonucleotide for detection of SNP TSC0009808
tctatactcctat

SEQ ID NO: 226415 - DNA, 13 bp, Artificial Sequence
  Oligonucleotide for detection of SNP TSC0009809
aggaaaagttgaa

SEQ ID NO: 226416 - DNA, 13 bp, Artificial Sequence
  Oligonucleotide for detection of SNP TSC0009809
ttcaacttttcct

SEQ ID NO: 226417 - DNA, 13 bp, Artificial Sequence
  Oligonucleotide for detection of SNP TSC0009809
aggaaaggttgaa

SEQ ID NO: 226418 - DNA, 13 bp, Artificial Sequence
  Oligonucleotide for detection of SNP TSC0009809
ttcaacctttcct

SEQ ID NO: 226419 - DNA, 13 bp, Artificial Sequence
  Oligonucleotide for detection of SNP TSC0055194
gagtagatgggat

SEQ ID NO: 226420 - DNA, 13 bp, Artificial Sequence
  Oligonucleotide for detection of SNP TSC0055194
atcccatctactc

SEQ ID NO: 226421 - DNA, 13 bp, Artificial Sequence
  Oligonucleotide for detection of SNP TSC0055194
gagtagttgggat

SEQ ID NO: 226422 - DNA, 13 bp, Artificial Sequence
  Oligonucleotide for detection of SNP TSC0055194
atcccaactactc

SEQ ID NO: 226423 - DNA, 13 bp, Artificial Sequence
  Oligonucleotide for detection of SNP TSC0055195
atttttgggtaaa

SEQ ID NO: 226424 - DNA, 13 bp, Artificial Sequence
  Oligonucleotide for detection of SNP TSC0055195
tttacccaaaaat

SEQ ID NO: 226425 - DNA, 13 bp, Artificial Sequence
  Oligonucleotide for detection of SNP TSC0055195
atttttaggtaaa

SEQ ID NO: 226426 - DNA, 13 bp, Artificial Sequence
  Oligonucleotide for detection of SNP TSC0055195
tttacctaaaaat

SEQ ID NO: 226427 - DNA, 13 bp, Artificial Sequence
  Oligonucleotide for detection of SNP TSC0055196
attattttttatt

SEQ ID NO: 226428 - DNA, 13 bp, Artificial Sequence
  Oligonucleotide for detection of SNP TSC0055196
aataaaaaataat

SEQ ID NO: 226429 - DNA, 13 bp, Artificial Sequence
  Oligonucleotide for detection of SNP TSC0055196
aataaagaataat

SEQ ID NO: 226430 - DNA, 13 bp, Artificial Sequence
  Oligonucleotide for detection of SNP TSC0055196
attattctttatt

SEQ ID NO: 226431 - DNA, 13 bp, Artificial Sequence
  Oligonucleotide for detection of SNP TSC0004870
atttatatagaat

SEQ ID NO: 226432 - DNA, 13 bp, Artificial Sequence
  Oligonucleotide for detection of SNP TSC0004870
attctatataaat

SEQ ID NO: 226433 - DNA, 13 bp, Artificial Sequence
  Oligonucleotide for detection of SNP TSC0004870
atttatgtagaat

SEQ ID NO: 226434 - DNA, 13 bp, Artificial Sequence
  Oligonucleotide for detection of SNP TSC0004870
attctacataaat

SEQ ID NO: 226435 - DNA, 13 bp, Artificial Sequence
  Oligonucleotide for detection of SNP TSC0004870
atttacgtagaat

SEQ ID NO: 226436 - DNA, 13 bp, Artificial Sequence
  Oligonucleotide for detection of SNP TSC0004870
attctacgtaaat

SEQ ID NO: 226437 - DNA, 13 bp, Artificial Sequence
  Oligonucleotide for detection of SNP TSC0004870
attttatgtaaat

SEQ ID NO: 226438 - DNA, 13 bp, Artificial Sequence
  Oligonucleotide for detection of SNP TSC0004870
atttacataaaat

SEQ ID NO: 226439 - DNA, 13 bp, Artificial Sequence
  Oligonucleotide for detection of SNP TSC0004870
attttacgtaaat

SEQ ID NO: 226440 - DNA, 13 bp, Artificial Sequence
  Oligonucleotide for detection of SNP TSC0004870
atttacgtaaaat

SEQ ID NO: 226441 - DNA, 13 bp, Artificial Sequence
  Oligonucleotide for detection of SNP TSC0055197
gttgattaaagaa

SEQ ID NO: 226442 - DNA, 13 bp, Artificial Sequence
  Oligonucleotide for detection of SNP TSC0055197
ttctttaatcaac

SEQ ID NO: 226443 - DNA, 13 bp, Artificial Sequence
  Oligonucleotide for detection of SNP TSC0055197
gttgatgaaagaa

SEQ ID NO: 226444 - DNA, 13 bp, Artificial Sequence
  Oligonucleotide for detection of SNP TSC0055197
ttctttcatcaac

SEQ ID NO: 226445 - DNA, 13 bp, Artificial Sequence
  Oligonucleotide for detection of SNP TSC0055197
ttttttgattagy

SEQ ID NO: 226446 - DNA, 13 bp, Artificial Sequence
  Oligonucleotide for detection of SNP TSC0055197
rctaatcaaaaaa

SEQ ID NO: 226447 - DNA, 13 bp, Artificial Sequence
  Oligonucleotide for detection of SNP TSC0055197
tttttttattagy

SEQ ID NO: 226448 - DNA, 13 bp, Artificial Sequence
  Oligonucleotide for detection of SNP TSC0055197
rctaataaaaaaa

SEQ ID NO: 226449 - DNA, 13 bp, Artificial Sequence
  Oligonucleotide for detection of SNP TSC0055198
aattgtattattt

SEQ ID NO: 226450 - DNA, 13 bp, Artificial Sequence
  Oligonucleotide for detection of SNP TSC0055198
aaataatacaatt

SEQ ID NO: 226451 - DNA, 13 bp, Artificial Sequence
  Oligonucleotide for detection of SNP TSC0055198
aattgttttattt

SEQ ID NO: 226452 - DNA, 13 bp, Artificial Sequence
  Oligonucleotide for detection of SNP TSC0055198
aaataaaacaatt

SEQ ID NO: 226453 - DNA, 13 bp, Artificial Sequence
  Oligonucleotide for detection of SNP TSC0055198
aaataatgtagtt

SEQ ID NO: 226454 - DNA, 13 bp, Artificial Sequence
  Oligonucleotide for detection of SNP TSC0055198
aactacattattt

SEQ ID NO: 226455 - DNA, 13 bp, Artificial Sequence
  Oligonucleotide for detection of SNP TSC0055198
aaataaggtagtt

SEQ ID NO: 226456 - DNA, 13 bp, Artificial Sequence
  Oligonucleotide for detection of SNP TSC0055198
aactaccttattt

SEQ ID NO: 226457 - DNA, 13 bp, Artificial Sequence
  Oligonucleotide for detection of SNP TSC0055199
tgaagtattaaay

SEQ ID NO: 226458 - DNA, 13 bp, Artificial Sequence
  Oligonucleotide for detection of SNP TSC0055199
rtttaatacttca

SEQ ID NO: 226459 - DNA, 13 bp, Artificial Sequence
  Oligonucleotide for detection of SNP TSC0055199
tgaagtgttaaay

SEQ ID NO: 226460 - DNA, 13 bp, Artificial Sequence
  Oligonucleotide for detection of SNP TSC0055199
rtttaacacttca

SEQ ID NO: 226461 - DNA, 13 bp, Artificial Sequence
  Oligonucleotide for detection of SNP TSC0055199
tgaagcgttaaay

SEQ ID NO: 226462 - DNA, 13 bp, Artificial Sequence
  Oligonucleotide for detection of SNP TSC0055199
rtttaacgcttca

SEQ ID NO: 226463 - DNA, 13 bp, Artificial Sequence
  Oligonucleotide for detection of SNP TSC0055199
gtttaatgtttta

SEQ ID NO: 226464 - DNA, 13 bp, Artificial Sequence
  Oligonucleotide for detection of SNP TSC0055199
taaaacattaaac

SEQ ID NO: 226465 - DNA, 13 bp, Artificial Sequence
  Oligonucleotide for detection of SNP TSC0055199
gtttaacgtttta

SEQ ID NO: 226466 - DNA, 13 bp, Artificial Sequence
  Oligonucleotide for detection of SNP TSC0055199
taaaacgttaaac

SEQ ID NO: 226467 - DNA, 13 bp, Artificial Sequence
  Oligonucleotide for detection of SNP TSC0055201
taatatatttaaa

SEQ ID NO: 226468 - DNA, 13 bp, Artificial Sequence
  Oligonucleotide for detection of SNP TSC0055201
tttaaatatatta

SEQ ID NO: 226469 - DNA, 13 bp, Artificial Sequence
  Oligonucleotide for detection of SNP TSC0055201
taatatttttaaa

SEQ ID NO: 226470 - DNA, 13 bp, Artificial Sequence
  Oligonucleotide for detection of SNP TSC0055201
tttaaaaatatta

SEQ ID NO: 226471 - DNA, 13 bp, Artificial Sequence
  Oligonucleotide for detection of SNP TSC0055201
tttgggtgtgtta

SEQ ID NO: 226472 - DNA, 13 bp, Artificial Sequence
  Oligonucleotide for detection of SNP TSC0055201
taacacacccaaa

SEQ ID NO: 226473 - DNA, 13 bp, Artificial Sequence
  Oligonucleotide for detection of SNP TSC0055201
tttgggggtgtta

SEQ ID NO: 226474 - DNA, 13 bp, Artificial Sequence
  Oligonucleotide for detection of SNP TSC0055201
taacacccccaaa

SEQ ID NO: 226475 - DNA, 13 bp, Artificial Sequence
  Oligonucleotide for detection of SNP TSC0055202
aggataaatggta

SEQ ID NO: 226476 - DNA, 13 bp, Artificial Sequence
  Oligonucleotide for detection of SNP TSC0055202
taccatttatcct

SEQ ID NO: 226477 - DNA, 13 bp, Artificial Sequence
  Oligonucleotide for detection of SNP TSC0055202
aggatagatggta

SEQ ID NO: 226478 - DNA, 13 bp, Artificial Sequence
  Oligonucleotide for detection of SNP TSC0055202
taccatctatcct

SEQ ID NO: 226479 - DNA, 13 bp, Artificial Sequence
  Oligonucleotide for detection of SNP TSC0055205
aggaggaaatggg

SEQ ID NO: 226480 - DNA, 13 bp, Artificial Sequence
  Oligonucleotide for detection of SNP TSC0055205
cccatttcctcct

SEQ ID NO: 226481 - DNA, 13 bp, Artificial Sequence
  Oligonucleotide for detection of SNP TSC0055205
aggaggtaatggg

SEQ ID NO: 226482 - DNA, 13 bp, Artificial Sequence
  Oligonucleotide for detection of SNP TSC0055205
cccattacctcct

SEQ ID NO: 226483 - DNA, 13 bp, Artificial Sequence
  Oligonucleotide for detection of SNP TSC0055206
gatttatagttta

SEQ ID NO: 226484 - DNA, 13 bp, Artificial Sequence
  Oligonucleotide for detection of SNP TSC0055206
taaactataaatc

SEQ ID NO: 226485 - DNA, 13 bp, Artificial Sequence
  Oligonucleotide for detection of SNP TSC0055206
gatttagagttta

SEQ ID NO: 226486 - DNA, 13 bp, Artificial Sequence
  Oligonucleotide for detection of SNP TSC0055206
taaactctaaatc

SEQ ID NO: 226487 - DNA, 13 bp, Artificial Sequence
  Oligonucleotide for detection of SNP TSC0055206
tgaattgtaaaty

SEQ ID NO: 226488 - DNA, 13 bp, Artificial Sequence
  Oligonucleotide for detection of SNP TSC0055206
ratttacaattca

SEQ ID NO: 226489 - DNA, 13 bp, Artificial Sequence
  Oligonucleotide for detection of SNP TSC0055206
tgaattttaaaty

SEQ ID NO: 226490 - DNA, 13 bp, Artificial Sequence
  Oligonucleotide for detection of SNP TSC0055206
ratttaaaattca

SEQ ID NO: 226491 - DNA, 13 bp, Artificial Sequence
  Oligonucleotide for detection of SNP TSC0055208
atgtaaaggttta

SEQ ID NO: 226492 - DNA, 13 bp, Artificial Sequence
  Oligonucleotide for detection of SNP TSC0055208
taaacctttacat

SEQ ID NO: 226493 - DNA, 13 bp, Artificial Sequence
  Oligonucleotide for detection of SNP TSC0055208
atgtaagggttta

SEQ ID NO: 226494 - DNA, 13 bp, Artificial Sequence
  Oligonucleotide for detection of SNP TSC0055208
taaacccttacat

SEQ ID NO: 226495 - DNA, 13 bp, Artificial Sequence
  Oligonucleotide for detection of SNP TSC0055210
tgtagtgttagtt

SEQ ID NO: 226496 - DNA, 13 bp, Artificial Sequence
  Oligonucleotide for detection of SNP TSC0055210
aactaacactaca

SEQ ID NO: 226497 - DNA, 13 bp, Artificial Sequence
  Oligonucleotide for detection of SNP TSC0055210
tgtagcgttagtt

SEQ ID NO: 226498 - DNA, 13 bp, Artificial Sequence
  Oligonucleotide for detection of SNP TSC0055210
aactaacgctaca

SEQ ID NO: 226499 - DNA, 13 bp, Artificial Sequence
  Oligonucleotide for detection of SNP TSC0055210
aattgatgttgta

SEQ ID NO: 226500 - DNA, 13 bp, Artificial Sequence
  Oligonucleotide for detection of SNP TSC0055210
tacaacatcaatt

SEQ ID NO: 226501 - DNA, 13 bp, Artificial Sequence
  Oligonucleotide for detection of SNP TSC0055210
aattgacgttgta

SEQ ID NO: 226502 - DNA, 13 bp, Artificial Sequence
  Oligonucleotide for detection of SNP TSC0055210
tacaacgtcaatt

SEQ ID NO: 226503 - DNA, 13 bp, Artificial Sequence
  Oligonucleotide for detection of SNP TSC0055211
gttaataagttty

SEQ ID NO: 226504 - DNA, 13 bp, Artificial Sequence
  Oligonucleotide for detection of SNP TSC0055211
raaacttattaac

SEQ ID NO: 226505 - DNA, 13 bp, Artificial Sequence
  Oligonucleotide for detection of SNP TSC0055211
gttaattagttty

SEQ ID NO: 226506 - DNA, 13 bp, Artificial Sequence
  Oligonucleotide for detection of SNP TSC0055211
raaactaattaac

SEQ ID NO: 226507 - DNA, 13 bp, Artificial Sequence
  Oligonucleotide for detection of SNP TSC0055211
ggggtttattagy

SEQ ID NO: 226508 - DNA, 13 bp, Artificial Sequence
  Oligonucleotide for detection of SNP TSC0055211
rctaataaacccc

SEQ ID NO: 226509 - DNA, 13 bp, Artificial Sequence
  Oligonucleotide for detection of SNP TSC0055211
ggggttaattagy

SEQ ID NO: 226510 - DNA, 13 bp, Artificial Sequence
  Oligonucleotide for detection of SNP TSC0055211
rctaattaacccc

SEQ ID NO: 226511 - DNA, 13 bp, Artificial Sequence
  Oligonucleotide for detection of SNP TSC0055213
ataggtgtgaaty

SEQ ID NO: 226512 - DNA, 13 bp, Artificial Sequence
  Oligonucleotide for detection of SNP TSC0055213
rattcacacctat

SEQ ID NO: 226513 - DNA, 13 bp, Artificial Sequence
  Oligonucleotide for detection of SNP TSC0055213
ataggtatgaaty

SEQ ID NO: 226514 - DNA, 13 bp, Artificial Sequence
  Oligonucleotide for detection of SNP TSC0055213
rattcatacctat

SEQ ID NO: 226515 - DNA, 13 bp, Artificial Sequence
  Oligonucleotide for detection of SNP TSC0055213
ataggcgtgaaty

SEQ ID NO: 226516 - DNA, 13 bp, Artificial Sequence
  Oligonucleotide for detection of SNP TSC0055213
rattcacgcctat

SEQ ID NO: 226517 - DNA, 13 bp, Artificial Sequence
  Oligonucleotide for detection of SNP TSC0055214
gttatttaggagg

SEQ ID NO: 226518 - DNA, 13 bp, Artificial Sequence
  Oligonucleotide for detection of SNP TSC0055214
cctcctaaataac

SEQ ID NO: 226519 - DNA, 13 bp, Artificial Sequence
  Oligonucleotide for detection of SNP TSC0055214
gttattgaggagg

SEQ ID NO: 226520 - DNA, 13 bp, Artificial Sequence
  Oligonucleotide for detection of SNP TSC0055214
cctcctcaataac

SEQ ID NO: 226521 - DNA, 13 bp, Artificial Sequence
  Oligonucleotide for detection of SNP TSC0055215
ataataataatat

SEQ ID NO: 226522 - DNA, 13 bp, Artificial Sequence
  Oligonucleotide for detection of SNP TSC0055215
atattattattat

SEQ ID NO: 226523 - DNA, 13 bp, Artificial Sequence
  Oligonucleotide for detection of SNP TSC0055215
ataatagtaatat

SEQ ID NO: 226524 - DNA, 13 bp, Artificial Sequence
  Oligonucleotide for detection of SNP TSC0055215
atattactattat

SEQ ID NO: 226525 - DNA, 13 bp, Artificial Sequence
  Oligonucleotide for detection of SNP TSC0055216
ttgatgggtgtaa

SEQ ID NO: 226526 - DNA, 13 bp, Artificial Sequence
  Oligonucleotide for detection of SNP TSC0055216
ttacacccatcaa

SEQ ID NO: 226527 - DNA, 13 bp, Artificial Sequence
  Oligonucleotide for detection of SNP TSC0055216
ttgatgagtgtaa

SEQ ID NO: 226528 - DNA, 13 bp, Artificial Sequence
  Oligonucleotide for detection of SNP TSC0055216
ttacactcatcaa

SEQ ID NO: 226529 - DNA, 13 bp, Artificial Sequence
  Oligonucleotide for detection of SNP TSC0055216
ttgacgggtgtaa

SEQ ID NO: 226530 - DNA, 13 bp, Artificial Sequence
  Oligonucleotide for detection of SNP TSC0055216
ttacacccgtcaa

SEQ ID NO: 226531 - DNA, 13 bp, Artificial Sequence
  Oligonucleotide for detection of SNP TSC0055216
ttgacgagtgtaa

SEQ ID NO: 226532 - DNA, 13 bp, Artificial Sequence
  Oligonucleotide for detection of SNP TSC0055216
ttacactcgtcaa

SEQ ID NO: 226533 - DNA, 13 bp, Artificial Sequence
  Oligonucleotide for detection of SNP TSC0055217
agaattattggtt

SEQ ID NO: 226534 - DNA, 13 bp, Artificial Sequence
  Oligonucleotide for detection of SNP TSC0055217
aaccaataattct

SEQ ID NO: 226535 - DNA, 13 bp, Artificial Sequence
  Oligonucleotide for detection of SNP TSC0055217
agaattgttggtt

SEQ ID NO: 226536 - DNA, 13 bp, Artificial Sequence
  Oligonucleotide for detection of SNP TSC0055217
aaccaacaattct

SEQ ID NO: 226537 - DNA, 13 bp, Artificial Sequence
  Oligonucleotide for detection of SNP TSC0055217
agaatcgttggtt

SEQ ID NO: 226538 - DNA, 13 bp, Artificial Sequence
  Oligonucleotide for detection of SNP TSC0055217
aaccaacgattct

SEQ ID NO: 226539 - DNA, 13 bp, Artificial Sequence
  Oligonucleotide for detection of SNP TSC0055217
aattagtggtttt

SEQ ID NO: 226540 - DNA, 13 bp, Artificial Sequence
  Oligonucleotide for detection of SNP TSC0055217
aaaaccactaatt

SEQ ID NO: 226541 - DNA, 13 bp, Artificial Sequence
  Oligonucleotide for detection of SNP TSC0055217
aattagcggtttt

SEQ ID NO: 226542 - DNA, 13 bp, Artificial Sequence
  Oligonucleotide for detection of SNP TSC0055217
aaaaccgctaatt

SEQ ID NO: 226543 - DNA, 13 bp, Artificial Sequence
  Oligonucleotide for detection of SNP TSC0055218
tgtagattttttg

SEQ ID NO: 226544 - DNA, 13 bp, Artificial Sequence
  Oligonucleotide for detection of SNP TSC0055218
caaaaaatctaca

SEQ ID NO: 226545 - DNA, 13 bp, Artificial Sequence
  Oligonucleotide for detection of SNP TSC0055218
tgtagagtttttg

SEQ ID NO: 226546 - DNA, 13 bp, Artificial Sequence
  Oligonucleotide for detection of SNP TSC0055218
caaaaactctaca

SEQ ID NO: 226547 - DNA, 13 bp, Artificial Sequence
  Oligonucleotide for detection of SNP TSC0055218
taggaggtttgta

SEQ ID NO: 226548 - DNA, 13 bp, Artificial Sequence
  Oligonucleotide for detection of SNP TSC0055218
tacaaacctccta

SEQ ID NO: 226549 - DNA, 13 bp, Artificial Sequence
  Oligonucleotide for detection of SNP TSC0055218
taggagttttgta

SEQ ID NO: 226550 - DNA, 13 bp, Artificial Sequence
  Oligonucleotide for detection of SNP TSC0055218
tacaaaactccta

SEQ ID NO: 226551 - DNA, 13 bp, Artificial Sequence
  Oligonucleotide for detection of SNP TSC0055219
tgaaatgggtgay

SEQ ID NO: 226552 - DNA, 13 bp, Artificial Sequence
  Oligonucleotide for detection of SNP TSC0055219
rtcacccatttca

SEQ ID NO: 226553 - DNA, 13 bp, Artificial Sequence
  Oligonucleotide for detection of SNP TSC0055219
tgaaataggtgay

SEQ ID NO: 226554 - DNA, 13 bp, Artificial Sequence
  Oligonucleotide for detection of SNP TSC0055219
rtcacctatttca

SEQ ID NO: 226555 - DNA, 13 bp, Artificial Sequence
  Oligonucleotide for detection of SNP TSC0055220
ataatggattgta

SEQ ID NO: 226556 - DNA, 13 bp, Artificial Sequence
  Oligonucleotide for detection of SNP TSC0055220
tacaatccattat

SEQ ID NO: 226557 - DNA, 13 bp, Artificial Sequence
  Oligonucleotide for detection of SNP TSC0055220
ataatgaattgta

SEQ ID NO: 226558 - DNA, 13 bp, Artificial Sequence
  Oligonucleotide for detection of SNP TSC0055220
tacaattcattat

SEQ ID NO: 226559 - DNA, 13 bp, Artificial Sequence
  Oligonucleotide for detection of SNP TSC0055221
aggattatttaay

SEQ ID NO: 226560 - DNA, 13 bp, Artificial Sequence
  Oligonucleotide for detection of SNP TSC0055221
rttaaataatcct

SEQ ID NO: 226561 - DNA, 13 bp, Artificial Sequence
  Oligonucleotide for detection of SNP TSC0055221
aggattttttaay

SEQ ID NO: 226562 - DNA, 13 bp, Artificial Sequence
  Oligonucleotide for detection of SNP TSC0055221
rttaaaaaatcct

SEQ ID NO: 226563 - DNA, 13 bp, Artificial Sequence
  Oligonucleotide for detection of SNP TSC0055221
gttaaaagatttt

SEQ ID NO: 226564 - DNA, 13 bp, Artificial Sequence
  Oligonucleotide for detection of SNP TSC0055221
aaaatcttttaac

SEQ ID NO: 226565 - DNA, 13 bp, Artificial Sequence
  Oligonucleotide for detection of SNP TSC0055222
ggaggtattttga

SEQ ID NO: 226566 - DNA, 13 bp, Artificial Sequence
  Oligonucleotide for detection of SNP TSC0055222
tcaaaatacctcc

SEQ ID NO: 226567 - DNA, 13 bp, Artificial Sequence
  Oligonucleotide for detection of SNP TSC0055222
ggaggttttttga

SEQ ID NO: 226568 - DNA, 13 bp, Artificial Sequence
  Oligonucleotide for detection of SNP TSC0055222
tcaaaaaacctcc

SEQ ID NO: 226569 - DNA, 13 bp, Artificial Sequence
  Oligonucleotide for detection of SNP TSC0055226
agtaatgtattta

SEQ ID NO: 226570 - DNA, 13 bp, Artificial Sequence
  Oligonucleotide for detection of SNP TSC0055226
taaatacattact

SEQ ID NO: 226571 - DNA, 13 bp, Artificial Sequence
  Oligonucleotide for detection of SNP TSC0055226
agtaatatattta

SEQ ID NO: 226572 - DNA, 13 bp, Artificial Sequence
  Oligonucleotide for detection of SNP TSC0055226
taaatatattact

SEQ ID NO: 226573 - DNA, 13 bp, Artificial Sequence
  Oligonucleotide for detection of SNP TSC0005023
ggataagtgattg

SEQ ID NO: 226574 - DNA, 13 bp, Artificial Sequence
  Oligonucleotide for detection of SNP TSC0005023
caatcacttatcc

SEQ ID NO: 226575 - DNA, 13 bp, Artificial Sequence
  Oligonucleotide for detection of SNP TSC0005023
ggataaatgattg

SEQ ID NO: 226576 - DNA, 13 bp, Artificial Sequence
  Oligonucleotide for detection of SNP TSC0005023
caatcatttatcc

SEQ ID NO: 226577 - DNA, 13 bp, Artificial Sequence
  Oligonucleotide for detection of SNP TSC0055228
taatttgaggtty

SEQ ID NO: 226578 - DNA, 13 bp, Artificial Sequence
  Oligonucleotide for detection of SNP TSC0055228
raacctcaaatta

SEQ ID NO: 226579 - DNA, 13 bp, Artificial Sequence
  Oligonucleotide for detection of SNP TSC0055228
taatttaaggtty

SEQ ID NO: 226580 - DNA, 13 bp, Artificial Sequence
  Oligonucleotide for detection of SNP TSC0055228
raaccttaaatta

SEQ ID NO: 226581 - DNA, 13 bp, Artificial Sequence
  Oligonucleotide for detection of SNP TSC0055229
ataagtggaaaat

SEQ ID NO: 226582 - DNA, 13 bp, Artificial Sequence
  Oligonucleotide for detection of SNP TSC0055229
attttccacttat

SEQ ID NO: 226583 - DNA, 13 bp, Artificial Sequence
  Oligonucleotide for detection of SNP TSC0055229
ataagtagaaaat

SEQ ID NO: 226584 - DNA, 13 bp, Artificial Sequence
  Oligonucleotide for detection of SNP TSC0055229
attttctacttat

SEQ ID NO: 226585 - DNA, 13 bp, Artificial Sequence
  Oligonucleotide for detection of SNP TSC0055230
agatatgttttty

SEQ ID NO: 226586 - DNA, 13 bp, Artificial Sequence
  Oligonucleotide for detection of SNP TSC0055230
raaaaacatatct

SEQ ID NO: 226587 - DNA, 13 bp, Artificial Sequence
  Oligonucleotide for detection of SNP TSC0055230
agatatattttty

SEQ ID NO: 226588 - DNA, 13 bp, Artificial Sequence
  Oligonucleotide for detection of SNP TSC0055230
raaaaatatatct

SEQ ID NO: 226589 - DNA, 13 bp, Artificial Sequence
  Oligonucleotide for detection of SNP TSC0055231
tttttaaggttty

SEQ ID NO: 226590 - DNA, 13 bp, Artificial Sequence
  Oligonucleotide for detection of SNP TSC0055231
raaaccttaaaaa

SEQ ID NO: 226591 - DNA, 13 bp, Artificial Sequence
  Oligonucleotide for detection of SNP TSC0055232
attattatgaagy

SEQ ID NO: 226592 - DNA, 13 bp, Artificial Sequence
  Oligonucleotide for detection of SNP TSC0055232
rcttcataataat

SEQ ID NO: 226593 - DNA, 13 bp, Artificial Sequence
  Oligonucleotide for detection of SNP TSC0055232
attattgtgaagy

SEQ ID NO: 226594 - DNA, 13 bp, Artificial Sequence
  Oligonucleotide for detection of SNP TSC0055232
rcttcacaataat

SEQ ID NO: 226595 - DNA, 13 bp, Artificial Sequence
  Oligonucleotide for detection of SNP TSC0055233
tgaaaatggtgtt

SEQ ID NO: 226596 - DNA, 13 bp, Artificial Sequence
  Oligonucleotide for detection of SNP TSC0055233
aacaccattttca

SEQ ID NO: 226597 - DNA, 13 bp, Artificial Sequence
  Oligonucleotide for detection of SNP TSC0055233
tgaaaacggtgtt

SEQ ID NO: 226598 - DNA, 13 bp, Artificial Sequence
  Oligonucleotide for detection of SNP TSC0055233
aacaccgttttca

SEQ ID NO: 226599 - DNA, 13 bp, Artificial Sequence
  Oligonucleotide for detection of SNP TSC0055235
tttagtataggtg

SEQ ID NO: 226600 - DNA, 13 bp, Artificial Sequence
  Oligonucleotide for detection of SNP TSC0055235
cacctatactaaa

SEQ ID NO: 226601 - DNA, 13 bp, Artificial Sequence
  Oligonucleotide for detection of SNP TSC0055236
gatagtatatgga

SEQ ID NO: 226602 - DNA, 13 bp, Artificial Sequence
  Oligonucleotide for detection of SNP TSC0055236
tccatatactatc

SEQ ID NO: 226603 - DNA, 13 bp, Artificial Sequence
  Oligonucleotide for detection of SNP TSC0055236
gatagtttatgga

SEQ ID NO: 226604 - DNA, 13 bp, Artificial Sequence
  Oligonucleotide for detection of SNP TSC0055236
tccataaactatc

SEQ ID NO: 226605 - DNA, 13 bp, Artificial Sequence
  Oligonucleotide for detection of SNP TSC0055236
tttataggttgty

SEQ ID NO: 226606 - DNA, 13 bp, Artificial Sequence
  Oligonucleotide for detection of SNP TSC0055236
racaacctataaa

SEQ ID NO: 226607 - DNA, 13 bp, Artificial Sequence
  Oligonucleotide for detection of SNP TSC0055237
atttttttagtgg

SEQ ID NO: 226608 - DNA, 13 bp, Artificial Sequence
  Oligonucleotide for detection of SNP TSC0055237
ccactaaaaaaat

SEQ ID NO: 226609 - DNA, 13 bp, Artificial Sequence
  Oligonucleotide for detection of SNP TSC0055237
atttttatagtgg

SEQ ID NO: 226610 - DNA, 13 bp, Artificial Sequence
  Oligonucleotide for detection of SNP TSC0055237
ccactataaaaat

SEQ ID NO: 226611 - DNA, 13 bp, Artificial Sequence
  Oligonucleotide for detection of SNP TSC0055237
ttattagaaaaat

SEQ ID NO: 226612 - DNA, 13 bp, Artificial Sequence
  Oligonucleotide for detection of SNP TSC0055237
atttttctaataa

SEQ ID NO: 226613 - DNA, 13 bp, Artificial Sequence
  Oligonucleotide for detection of SNP TSC0055238
agttttttgaggy

SEQ ID NO: 226614 - DNA, 13 bp, Artificial Sequence
  Oligonucleotide for detection of SNP TSC0055238
rcctcaaaaaact

SEQ ID NO: 226615 - DNA, 13 bp, Artificial Sequence
  Oligonucleotide for detection of SNP TSC0055238
agttttgtgaggy

SEQ ID NO: 226616 - DNA, 13 bp, Artificial Sequence
  Oligonucleotide for detection of SNP TSC0055238
rcctcacaaaact

SEQ ID NO: 226617 - DNA, 13 bp, Artificial Sequence
  Oligonucleotide for detection of SNP TSC0055238
gttttagaaaatt

SEQ ID NO: 226618 - DNA, 13 bp, Artificial Sequence
  Oligonucleotide for detection of SNP TSC0055238
aattttctaaaac

SEQ ID NO: 226619 - DNA, 13 bp, Artificial Sequence
  Oligonucleotide for detection of SNP TSC0055238
gttttataaaatt

SEQ ID NO: 226620 - DNA, 13 bp, Artificial Sequence
  Oligonucleotide for detection of SNP TSC0055238
aattttataaaac

SEQ ID NO: 226621 - DNA, 13 bp, Artificial Sequence
  Oligonucleotide for detection of SNP TSC0055239
tgtttattaataa

SEQ ID NO: 226622 - DNA, 13 bp, Artificial Sequence
  Oligonucleotide for detection of SNP TSC0055239
ttattaataaaca

SEQ ID NO: 226623 - DNA, 13 bp, Artificial Sequence
  Oligonucleotide for detection of SNP TSC0055239
ttattaataggta

SEQ ID NO: 226624 - DNA, 13 bp, Artificial Sequence
  Oligonucleotide for detection of SNP TSC0055239
tacctattaataa

SEQ ID NO: 226625 - DNA, 13 bp, Artificial Sequence
  Oligonucleotide for detection of SNP TSC0055239
ttattattaggta

SEQ ID NO: 226626 - DNA, 13 bp, Artificial Sequence
  Oligonucleotide for detection of SNP TSC0055239
tacctaataataa

SEQ ID NO: 226627 - DNA, 13 bp, Artificial Sequence
  Oligonucleotide for detection of SNP TSC0055240
tagttgtgaatat

SEQ ID NO: 226628 - DNA, 13 bp, Artificial Sequence
  Oligonucleotide for detection of SNP TSC0055240
atattcacaacta

SEQ ID NO: 226629 - DNA, 13 bp, Artificial Sequence
  Oligonucleotide for detection of SNP TSC0055240
tagttgcgaatat

SEQ ID NO: 226630 - DNA, 13 bp, Artificial Sequence
  Oligonucleotide for detection of SNP TSC0055240
atattcgcaacta

SEQ ID NO: 226631 - DNA, 13 bp, Artificial Sequence
  Oligonucleotide for detection of SNP TSC0055240
atatttgtagttg

SEQ ID NO: 226632 - DNA, 13 bp, Artificial Sequence
  Oligonucleotide for detection of SNP TSC0055240
caactacaaatat

SEQ ID NO: 226633 - DNA, 13 bp, Artificial Sequence
  Oligonucleotide for detection of SNP TSC0055240
atatttatagttg

SEQ ID NO: 226634 - DNA, 13 bp, Artificial Sequence
  Oligonucleotide for detection of SNP TSC0055240
caactataaatat

SEQ ID NO: 226635 - DNA, 13 bp, Artificial Sequence
  Oligonucleotide for detection of SNP TSC0055240
atattcgtagttg

SEQ ID NO: 226636 - DNA, 13 bp, Artificial Sequence
  Oligonucleotide for detection of SNP TSC0055240
caactacgaatat

SEQ ID NO: 226637 - DNA, 13 bp, Artificial Sequence
  Oligonucleotide for detection of SNP TSC0055241
tttttttaagtty

SEQ ID NO: 226638 - DNA, 13 bp, Artificial Sequence
  Oligonucleotide for detection of SNP TSC0055241
raacttaaaaaaa

SEQ ID NO: 226639 - DNA, 13 bp, Artificial Sequence
  Oligonucleotide for detection of SNP TSC0055241
tttttcgaagtty

SEQ ID NO: 226640 - DNA, 13 bp, Artificial Sequence
  Oligonucleotide for detection of SNP TSC0055241
raacttcgaaaaa

SEQ ID NO: 226641 - DNA, 13 bp, Artificial Sequence
  Oligonucleotide for detection of SNP TSC0055241
gaatttaggggaa

SEQ ID NO: 226642 - DNA, 13 bp, Artificial Sequence
  Oligonucleotide for detection of SNP TSC0055241
ttcccctaaattc

SEQ ID NO: 226643 - DNA, 13 bp, Artificial Sequence
  Oligonucleotide for detection of SNP TSC0055241
gaattttggggaa

SEQ ID NO: 226644 - DNA, 13 bp, Artificial Sequence
  Oligonucleotide for detection of SNP TSC0055241
ttccccaaaattc

SEQ ID NO: 226645 - DNA, 13 bp, Artificial Sequence
  Oligonucleotide for detection of SNP TSC0055241
gaatttcggggaa

SEQ ID NO: 226646 - DNA, 13 bp, Artificial Sequence
  Oligonucleotide for detection of SNP TSC0055241
ttccccgaaattc

SEQ ID NO: 226647 - DNA, 13 bp, Artificial Sequence
  Oligonucleotide for detection of SNP TSC0055242
ttatgagataatt

SEQ ID NO: 226648 - DNA, 13 bp, Artificial Sequence
  Oligonucleotide for detection of SNP TSC0055242
aattatctcataa

SEQ ID NO: 226649 - DNA, 13 bp, Artificial Sequence
  Oligonucleotide for detection of SNP TSC0055246
gattttagttaag

SEQ ID NO: 226650 - DNA, 13 bp, Artificial Sequence
  Oligonucleotide for detection of SNP TSC0055246
cttaactaaaatc

SEQ ID NO: 226651 - DNA, 13 bp, Artificial Sequence
  Oligonucleotide for detection of SNP TSC0055246
gattttggttaag

SEQ ID NO: 226652 - DNA, 13 bp, Artificial Sequence
  Oligonucleotide for detection of SNP TSC0055246
cttaaccaaaatc

SEQ ID NO: 226653 - DNA, 13 bp, Artificial Sequence
  Oligonucleotide for detection of SNP TSC0055247
taaagtaattgag

SEQ ID NO: 226654 - DNA, 13 bp, Artificial Sequence
  Oligonucleotide for detection of SNP TSC0055247
ctcaattacttta

SEQ ID NO: 226655 - DNA, 13 bp, Artificial Sequence
  Oligonucleotide for detection of SNP TSC0055247
taaagtgattgag

SEQ ID NO: 226656 - DNA, 13 bp, Artificial Sequence
  Oligonucleotide for detection of SNP TSC0055247
ctcaatcacttta

SEQ ID NO: 226657 - DNA, 13 bp, Artificial Sequence
  Oligonucleotide for detection of SNP TSC0055248
ttttatgaagggy

SEQ ID NO: 226658 - DNA, 13 bp, Artificial Sequence
  Oligonucleotide for detection of SNP TSC0055248
rcccttcataaaa

SEQ ID NO: 226659 - DNA, 13 bp, Artificial Sequence
  Oligonucleotide for detection of SNP TSC0055248
ttttataaagggy

SEQ ID NO: 226660 - DNA, 13 bp, Artificial Sequence
  Oligonucleotide for detection of SNP TSC0055248
rccctttataaaa

SEQ ID NO: 226661 - DNA, 13 bp, Artificial Sequence
  Oligonucleotide for detection of SNP TSC0055249
ttttggtttgggg

SEQ ID NO: 226662 - DNA, 13 bp, Artificial Sequence
  Oligonucleotide for detection of SNP TSC0055249
ccccaaaccaaaa

SEQ ID NO: 226663 - DNA, 13 bp, Artificial Sequence
  Oligonucleotide for detection of SNP TSC0055249
ttttgggttgggg

SEQ ID NO: 226664 - DNA, 13 bp, Artificial Sequence
  Oligonucleotide for detection of SNP TSC0055249
ccccaacccaaaa

SEQ ID NO: 226665 - DNA, 13 bp, Artificial Sequence
  Oligonucleotide for detection of SNP TSC0055249
ttttaggttagag

SEQ ID NO: 226666 - DNA, 13 bp, Artificial Sequence
  Oligonucleotide for detection of SNP TSC0055249
ctctaacctaaaa

SEQ ID NO: 226667 - DNA, 13 bp, Artificial Sequence
  Oligonucleotide for detection of SNP TSC0055251
tttagtatagttg

SEQ ID NO: 226668 - DNA, 13 bp, Artificial Sequence
  Oligonucleotide for detection of SNP TSC0055251
caactatactaaa

SEQ ID NO: 226669 - DNA, 13 bp, Artificial Sequence
  Oligonucleotide for detection of SNP TSC0055251
tttagtttagttg

SEQ ID NO: 226670 - DNA, 13 bp, Artificial Sequence
  Oligonucleotide for detection of SNP TSC0055251
caactaaactaaa

SEQ ID NO: 226671 - DNA, 13 bp, Artificial Sequence
  Oligonucleotide for detection of SNP TSC0055251
tagttgtgttgga

SEQ ID NO: 226672 - DNA, 13 bp, Artificial Sequence
  Oligonucleotide for detection of SNP TSC0055251
tccaacacaacta

SEQ ID NO: 226673 - DNA, 13 bp, Artificial Sequence
  Oligonucleotide for detection of SNP TSC0055251
tagttgggttgga

SEQ ID NO: 226674 - DNA, 13 bp, Artificial Sequence
  Oligonucleotide for detection of SNP TSC0055251
tccaacccaacta

SEQ ID NO: 226675 - DNA, 13 bp, Artificial Sequence
  Oligonucleotide for detection of SNP TSC0055252
gttgatattaggg

SEQ ID NO: 226676 - DNA, 13 bp, Artificial Sequence
  Oligonucleotide for detection of SNP TSC0055252
ccctaatatcaac

SEQ ID NO: 226677 - DNA, 13 bp, Artificial Sequence
  Oligonucleotide for detection of SNP TSC0055252
gttgatgttaggg

SEQ ID NO: 226678 - DNA, 13 bp, Artificial Sequence
  Oligonucleotide for detection of SNP TSC0055252
ccctaacatcaac

SEQ ID NO: 226679 - DNA, 13 bp, Artificial Sequence
  Oligonucleotide for detection of SNP TSC0055252
gttgacgttaggg

SEQ ID NO: 226680 - DNA, 13 bp, Artificial Sequence
  Oligonucleotide for detection of SNP TSC0055252
ccctaacgtcaac

SEQ ID NO: 226681 - DNA, 13 bp, Artificial Sequence
  Oligonucleotide for detection of SNP TSC0055252
ttttgatgttagy

SEQ ID NO: 226682 - DNA, 13 bp, Artificial Sequence
  Oligonucleotide for detection of SNP TSC0055252
rctaacatcaaaa

SEQ ID NO: 226683 - DNA, 13 bp, Artificial Sequence
  Oligonucleotide for detection of SNP TSC0055252
ttttgacgttagy

SEQ ID NO: 226684 - DNA, 13 bp, Artificial Sequence
  Oligonucleotide for detection of SNP TSC0055252
rctaacgtcaaaa

SEQ ID NO: 226685 - DNA, 13 bp, Artificial Sequence
  Oligonucleotide for detection of SNP TSC0055253
ttgttagtattta

SEQ ID NO: 226686 - DNA, 13 bp, Artificial Sequence
  Oligonucleotide for detection of SNP TSC0055253
taaatactaacaa

SEQ ID NO: 226687 - DNA, 13 bp, Artificial Sequence
  Oligonucleotide for detection of SNP TSC0055253
ttgttaatattta

SEQ ID NO: 226688 - DNA, 13 bp, Artificial Sequence
  Oligonucleotide for detection of SNP TSC0055253
taaatattaacaa

SEQ ID NO: 226689 - DNA, 13 bp, Artificial Sequence
  Oligonucleotide for detection of SNP TSC0055254
tatatggattata

SEQ ID NO: 226690 - DNA, 13 bp, Artificial Sequence
  Oligonucleotide for detection of SNP TSC0055254
tataatccatata

SEQ ID NO: 226691 - DNA, 13 bp, Artificial Sequence
  Oligonucleotide for detection of SNP TSC0055254
tatatgaattata

SEQ ID NO: 226692 - DNA, 13 bp, Artificial Sequence
  Oligonucleotide for detection of SNP TSC0055254
tataattcatata

SEQ ID NO: 226693 - DNA, 13 bp, Artificial Sequence
  Oligonucleotide for detection of SNP TSC0055255
aattttatagtta

SEQ ID NO: 226694 - DNA, 13 bp, Artificial Sequence
  Oligonucleotide for detection of SNP TSC0055255
taactataaaatt

SEQ ID NO: 226695 - DNA, 13 bp, Artificial Sequence
  Oligonucleotide for detection of SNP TSC0005389
ggagttatttaat

SEQ ID NO: 226696 - DNA, 13 bp, Artificial Sequence
  Oligonucleotide for detection of SNP TSC0005389
attaaataactcc

SEQ ID NO: 226697 - DNA, 13 bp, Artificial Sequence
  Oligonucleotide for detection of SNP TSC0005389
ggagttgtttaat

SEQ ID NO: 226698 - DNA, 13 bp, Artificial Sequence
  Oligonucleotide for detection of SNP TSC0005389
attaaacaactcc

SEQ ID NO: 226699 - DNA, 13 bp, Artificial Sequence
  Oligonucleotide for detection of SNP TSC0055256
agaattatgagaa

SEQ ID NO: 226700 - DNA, 13 bp, Artificial Sequence
  Oligonucleotide for detection of SNP TSC0055256
ttctcataattct

SEQ ID NO: 226701 - DNA, 13 bp, Artificial Sequence
  Oligonucleotide for detection of SNP TSC0055256
agaattgtgagaa

SEQ ID NO: 226702 - DNA, 13 bp, Artificial Sequence
  Oligonucleotide for detection of SNP TSC0055256
ttctcacaattct

SEQ ID NO: 226703 - DNA, 13 bp, Artificial Sequence
  Oligonucleotide for detection of SNP TSC0055257
tatagtatataaa

SEQ ID NO: 226704 - DNA, 13 bp, Artificial Sequence
  Oligonucleotide for detection of SNP TSC0055257
tttatatactata

SEQ ID NO: 226705 - DNA, 13 bp, Artificial Sequence
  Oligonucleotide for detection of SNP TSC0055257
tatagtgtataaa

SEQ ID NO: 226706 - DNA, 13 bp, Artificial Sequence
  Oligonucleotide for detection of SNP TSC0055257
tttatacactata

SEQ ID NO: 226707 - DNA, 13 bp, Artificial Sequence
  Oligonucleotide for detection of SNP TSC0055257
tatagcgtataaa

SEQ ID NO: 226708 - DNA, 13 bp, Artificial Sequence
  Oligonucleotide for detection of SNP TSC0055257
tttatacgctata

SEQ ID NO: 226709 - DNA, 13 bp, Artificial Sequence
  Oligonucleotide for detection of SNP TSC0055257
tttgtatgttgta

SEQ ID NO: 226710 - DNA, 13 bp, Artificial Sequence
  Oligonucleotide for detection of SNP TSC0055257
tacaacatacaaa

SEQ ID NO: 226711 - DNA, 13 bp, Artificial Sequence
  Oligonucleotide for detection of SNP TSC0055257
tttgtacgttgta

SEQ ID NO: 226712 - DNA, 13 bp, Artificial Sequence
  Oligonucleotide for detection of SNP TSC0055257
tacaacgtacaaa

SEQ ID NO: 226713 - DNA, 13 bp, Artificial Sequence
  Oligonucleotide for detection of SNP TSC0055259
gttggttgtgggy

SEQ ID NO: 226714 - DNA, 13 bp, Artificial Sequence
  Oligonucleotide for detection of SNP TSC0055259
rcccacaaccaac

SEQ ID NO: 226715 - DNA, 13 bp, Artificial Sequence
  Oligonucleotide for detection of SNP TSC0055259
gttggtggtgggy

SEQ ID NO: 226716 - DNA, 13 bp, Artificial Sequence
  Oligonucleotide for detection of SNP TSC0055259
rcccaccaccaac

SEQ ID NO: 226717 - DNA, 13 bp, Artificial Sequence
  Oligonucleotide for detection of SNP TSC0055259
gtttataattagy

SEQ ID NO: 226718 - DNA, 13 bp, Artificial Sequence
  Oligonucleotide for detection of SNP TSC0055259
rctaattataaac

SEQ ID NO: 226719 - DNA, 13 bp, Artificial Sequence
  Oligonucleotide for detection of SNP TSC0055260
atgtttaagtttg

SEQ ID NO: 226720 - DNA, 13 bp, Artificial Sequence
  Oligonucleotide for detection of SNP TSC0055260
caaacttaaacat

SEQ ID NO: 226721 - DNA, 13 bp, Artificial Sequence
  Oligonucleotide for detection of SNP TSC0055260
atgtttgagtttg

SEQ ID NO: 226722 - DNA, 13 bp, Artificial Sequence
  Oligonucleotide for detection of SNP TSC0055260
caaactcaaacat

SEQ ID NO: 226723 - DNA, 13 bp, Artificial Sequence
  Oligonucleotide for detection of SNP TSC0055260
atgttcgagtttg

SEQ ID NO: 226724 - DNA, 13 bp, Artificial Sequence
  Oligonucleotide for detection of SNP TSC0055260
caaactcgaacat

SEQ ID NO: 226725 - DNA, 13 bp, Artificial Sequence
  Oligonucleotide for detection of SNP TSC0055260
taggtttgggtat

SEQ ID NO: 226726 - DNA, 13 bp, Artificial Sequence
  Oligonucleotide for detection of SNP TSC0055260
atacccaaaccta

SEQ ID NO: 226727 - DNA, 13 bp, Artificial Sequence
  Oligonucleotide for detection of SNP TSC0055260
taggttcgggtat

SEQ ID NO: 226728 - DNA, 13 bp, Artificial Sequence
  Oligonucleotide for detection of SNP TSC0055260
atacccgaaccta

SEQ ID NO: 226729 - DNA, 13 bp, Artificial Sequence
  Oligonucleotide for detection of SNP TSC0055261
ttttatatttaga

SEQ ID NO: 226730 - DNA, 13 bp, Artificial Sequence
  Oligonucleotide for detection of SNP TSC0055261
tctaaatataaaa

SEQ ID NO: 226731 - DNA, 13 bp, Artificial Sequence
  Oligonucleotide for detection of SNP TSC0055261
ttttatttttaga

SEQ ID NO: 226732 - DNA, 13 bp, Artificial Sequence
  Oligonucleotide for detection of SNP TSC0055261
tctaaaaataaaa

SEQ ID NO: 226733 - DNA, 13 bp, Artificial Sequence
  Oligonucleotide for detection of SNP TSC0055261
tttgggtatgagg

SEQ ID NO: 226734 - DNA, 13 bp, Artificial Sequence
  Oligonucleotide for detection of SNP TSC0055261
cctcatacccaaa

SEQ ID NO: 226735 - DNA, 13 bp, Artificial Sequence
  Oligonucleotide for detection of SNP TSC0055261
tttggggatgagg

SEQ ID NO: 226736 - DNA, 13 bp, Artificial Sequence
  Oligonucleotide for detection of SNP TSC0055261
cctcatccccaaa

SEQ ID NO: 226737 - DNA, 13 bp, Artificial Sequence
  Oligonucleotide for detection of SNP TSC0055262
agtaaagttaatt

SEQ ID NO: 226738 - DNA, 13 bp, Artificial Sequence
  Oligonucleotide for detection of SNP TSC0055262
aattaactttact

SEQ ID NO: 226739 - DNA, 13 bp, Artificial Sequence
  Oligonucleotide for detection of SNP TSC0055262
agtaaatttaatt

SEQ ID NO: 226740 - DNA, 13 bp, Artificial Sequence
  Oligonucleotide for detection of SNP TSC0055262
aattaaatttact

SEQ ID NO: 226741 - DNA, 13 bp, Artificial Sequence
  Oligonucleotide for detection of SNP TSC0055270
tagaatttttttt

SEQ ID NO: 226742 - DNA, 13 bp, Artificial Sequence
  Oligonucleotide for detection of SNP TSC0055270
aaaaaaaattcta

SEQ ID NO: 226743 - DNA, 13 bp, Artificial Sequence
  Oligonucleotide for detection of SNP TSC0055270
tagaatgtttttt

SEQ ID NO: 226744 - DNA, 13 bp, Artificial Sequence
  Oligonucleotide for detection of SNP TSC0055270
aaaaaacattcta

SEQ ID NO: 226745 - DNA, 13 bp, Artificial Sequence
  Oligonucleotide for detection of SNP TSC0055270
aaggggaatttta

SEQ ID NO: 226746 - DNA, 13 bp, Artificial Sequence
  Oligonucleotide for detection of SNP TSC0055270
taaaattcccctt

SEQ ID NO: 226747 - DNA, 13 bp, Artificial Sequence
  Oligonucleotide for detection of SNP TSC0055270
aaggggtatttta

SEQ ID NO: 226748 - DNA, 13 bp, Artificial Sequence
  Oligonucleotide for detection of SNP TSC0055270
taaaatacccctt

SEQ ID NO: 226749 - DNA, 13 bp, Artificial Sequence
  Oligonucleotide for detection of SNP TSC0055272
aatggtatgaaty

SEQ ID NO: 226750 - DNA, 13 bp, Artificial Sequence
  Oligonucleotide for detection of SNP TSC0055272
rattcataccatt

SEQ ID NO: 226751 - DNA, 13 bp, Artificial Sequence
  Oligonucleotide for detection of SNP TSC0055272
aatggtgtgaaty

SEQ ID NO: 226752 - DNA, 13 bp, Artificial Sequence
  Oligonucleotide for detection of SNP TSC0055272
rattcacaccatt

SEQ ID NO: 226753 - DNA, 13 bp, Artificial Sequence
  Oligonucleotide for detection of SNP TSC0055272
aatggcgtgaaty

SEQ ID NO: 226754 - DNA, 13 bp, Artificial Sequence
  Oligonucleotide for detection of SNP TSC0055272
rattcacgccatt

SEQ ID NO: 226755 - DNA, 13 bp, Artificial Sequence
  Oligonucleotide for detection of SNP TSC0055272
ggtttatgttatt

SEQ ID NO: 226756 - DNA, 13 bp, Artificial Sequence
  Oligonucleotide for detection of SNP TSC0055272
aataacataaacc

SEQ ID NO: 226757 - DNA, 13 bp, Artificial Sequence
  Oligonucleotide for detection of SNP TSC0055272
ggtttacgttatt

SEQ ID NO: 226758 - DNA, 13 bp, Artificial Sequence
  Oligonucleotide for detection of SNP TSC0055272
aataacgtaaacc

SEQ ID NO: 226759 - DNA, 13 bp, Artificial Sequence
  Oligonucleotide for detection of SNP TSC0055273
ttgttttaaaata

SEQ ID NO: 226760 - DNA, 13 bp, Artificial Sequence
  Oligonucleotide for detection of SNP TSC0055273
tattttaaaacaa

SEQ ID NO: 226761 - DNA, 13 bp, Artificial Sequence
  Oligonucleotide for detection of SNP TSC0055273
tgttttgagatag

SEQ ID NO: 226762 - DNA, 13 bp, Artificial Sequence
  Oligonucleotide for detection of SNP TSC0055273
ctatctcaaaaca

SEQ ID NO: 226763 - DNA, 13 bp, Artificial Sequence
  Oligonucleotide for detection of SNP TSC0055273
tgtttttagatag

SEQ ID NO: 226764 - DNA, 13 bp, Artificial Sequence
  Oligonucleotide for detection of SNP TSC0055273
ctatctaaaaaca

SEQ ID NO: 226765 - DNA, 13 bp, Artificial Sequence
  Oligonucleotide for detection of SNP TSC0055275
agtttagtagtgg

SEQ ID NO: 226766 - DNA, 13 bp, Artificial Sequence
  Oligonucleotide for detection of SNP TSC0055275
ccactactaaact

SEQ ID NO: 226767 - DNA, 13 bp, Artificial Sequence
  Oligonucleotide for detection of SNP TSC0055275
agtttaatagtgg

SEQ ID NO: 226768 - DNA, 13 bp, Artificial Sequence
  Oligonucleotide for detection of SNP TSC0055275
ccactattaaact

SEQ ID NO: 226769 - DNA, 13 bp, Artificial Sequence
  Oligonucleotide for detection of SNP TSC0055282
aagaataagttty

SEQ ID NO: 226770 - DNA, 13 bp, Artificial Sequence
  Oligonucleotide for detection of SNP TSC0055282
raaacttattctt

SEQ ID NO: 226771 - DNA, 13 bp, Artificial Sequence
  Oligonucleotide for detection of SNP TSC0055282
aagaatgagttty

SEQ ID NO: 226772 - DNA, 13 bp, Artificial Sequence
  Oligonucleotide for detection of SNP TSC0055282
raaactcattctt

SEQ ID NO: 226773 - DNA, 13 bp, Artificial Sequence
  Oligonucleotide for detection of SNP TSC0055285
tttgtagatagty

SEQ ID NO: 226774 - DNA, 13 bp, Artificial Sequence
  Oligonucleotide for detection of SNP TSC0055285
ractatctacaaa

SEQ ID NO: 226775 - DNA, 13 bp, Artificial Sequence
  Oligonucleotide for detection of SNP TSC0055285
tttgtaaatagty

SEQ ID NO: 226776 - DNA, 13 bp, Artificial Sequence
  Oligonucleotide for detection of SNP TSC0055285
ractatttacaaa

SEQ ID NO: 226777 - DNA, 13 bp, Artificial Sequence
  Oligonucleotide for detection of SNP TSC0055286
tgaagtaatagat

SEQ ID NO: 226778 - DNA, 13 bp, Artificial Sequence
  Oligonucleotide for detection of SNP TSC0055286
atctattacttca

SEQ ID NO: 226779 - DNA, 13 bp, Artificial Sequence
  Oligonucleotide for detection of SNP TSC0055286
tgaagtgatagat

SEQ ID NO: 226780 - DNA, 13 bp, Artificial Sequence
  Oligonucleotide for detection of SNP TSC0055286
atctatcacttca

SEQ ID NO: 226781 - DNA, 13 bp, Artificial Sequence
  Oligonucleotide for detection of SNP TSC0055287
gtttagtttttgg

SEQ ID NO: 226782 - DNA, 13 bp, Artificial Sequence
  Oligonucleotide for detection of SNP TSC0055287
ccaaaaactaaac

SEQ ID NO: 226783 - DNA, 13 bp, Artificial Sequence
  Oligonucleotide for detection of SNP TSC0055287
gtttaggttttgg

SEQ ID NO: 226784 - DNA, 13 bp, Artificial Sequence
  Oligonucleotide for detection of SNP TSC0055287
ccaaaacctaaac

SEQ ID NO: 226785 - DNA, 13 bp, Artificial Sequence
  Oligonucleotide for detection of SNP TSC0055287
ttaaagattgggy

SEQ ID NO: 226786 - DNA, 13 bp, Artificial Sequence
  Oligonucleotide for detection of SNP TSC0055287
rcccaatctttaa

SEQ ID NO: 226787 - DNA, 13 bp, Artificial Sequence
  Oligonucleotide for detection of SNP TSC0055287
ttaaagtttgggy

SEQ ID NO: 226788 - DNA, 13 bp, Artificial Sequence
  Oligonucleotide for detection of SNP TSC0055287
rcccaaactttaa

SEQ ID NO: 226789 - DNA, 13 bp, Artificial Sequence
  Oligonucleotide for detection of SNP TSC0055288
gagtaaaatatta

SEQ ID NO: 226790 - DNA, 13 bp, Artificial Sequence
  Oligonucleotide for detection of SNP TSC0055288
taatattttactc

SEQ ID NO: 226791 - DNA, 13 bp, Artificial Sequence
  Oligonucleotide for detection of SNP TSC0055288
gagtaatatatta

SEQ ID NO: 226792 - DNA, 13 bp, Artificial Sequence
  Oligonucleotide for detection of SNP TSC0055288
taatatattactc

SEQ ID NO: 226793 - DNA, 13 bp, Artificial Sequence
  Oligonucleotide for detection of SNP TSC0055288
tgatgttttatty

SEQ ID NO: 226794 - DNA, 13 bp, Artificial Sequence
  Oligonucleotide for detection of SNP TSC0055288
raataaaacatca

SEQ ID NO: 226795 - DNA, 13 bp, Artificial Sequence
  Oligonucleotide for detection of SNP TSC0055288
tgatgtgttatty

SEQ ID NO: 226796 - DNA, 13 bp, Artificial Sequence
  Oligonucleotide for detection of SNP TSC0055288
raataacacatca

SEQ ID NO: 226797 - DNA, 13 bp, Artificial Sequence
  Oligonucleotide for detection of SNP TSC0055290
ttttaagtaatta

SEQ ID NO: 226798 - DNA, 13 bp, Artificial Sequence
  Oligonucleotide for detection of SNP TSC0055290
taattacttaaaa

SEQ ID NO: 226799 - DNA, 13 bp, Artificial Sequence
  Oligonucleotide for detection of SNP TSC0055291
atttttatgaaaa

SEQ ID NO: 226800 - DNA, 13 bp, Artificial Sequence
  Oligonucleotide for detection of SNP TSC0055291
ttttcataaaaat

SEQ ID NO: 226801 - DNA, 13 bp, Artificial Sequence
  Oligonucleotide for detection of SNP TSC0055291
atttttgtgaaaa

SEQ ID NO: 226802 - DNA, 13 bp, Artificial Sequence
  Oligonucleotide for detection of SNP TSC0055291
ttttcacaaaaat

SEQ ID NO: 226803 - DNA, 13 bp, Artificial Sequence
  Oligonucleotide for detection of SNP TSC0055292
agttgattttatg

SEQ ID NO: 226804 - DNA, 13 bp, Artificial Sequence
  Oligonucleotide for detection of SNP TSC0055292
cataaaatcaact

SEQ ID NO: 226805 - DNA, 13 bp, Artificial Sequence
  Oligonucleotide for detection of SNP TSC0055292
agttgagtttatg

SEQ ID NO: 226806 - DNA, 13 bp, Artificial Sequence
  Oligonucleotide for detection of SNP TSC0055292
cataaactcaact

SEQ ID NO: 226807 - DNA, 13 bp, Artificial Sequence
  Oligonucleotide for detection of SNP TSC0055292
tatgaaattaatt

SEQ ID NO: 226808 - DNA, 13 bp, Artificial Sequence
  Oligonucleotide for detection of SNP TSC0055292
aattaatttcata

SEQ ID NO: 226809 - DNA, 13 bp, Artificial Sequence
  Oligonucleotide for detection of SNP TSC0055292
tatgaatttaatt

SEQ ID NO: 226810 - DNA, 13 bp, Artificial Sequence
  Oligonucleotide for detection of SNP TSC0055292
aattaaattcata

SEQ ID NO: 226811 - DNA, 13 bp, Artificial Sequence
  Oligonucleotide for detection of SNP TSC0055293
agtttatgagtty

SEQ ID NO: 226812 - DNA, 13 bp, Artificial Sequence
  Oligonucleotide for detection of SNP TSC0055293
raactcataaact

SEQ ID NO: 226813 - DNA, 13 bp, Artificial Sequence
  Oligonucleotide for detection of SNP TSC0055293
agtttaggagtty

SEQ ID NO: 226814 - DNA, 13 bp, Artificial Sequence
  Oligonucleotide for detection of SNP TSC0055293
raactcctaaact

SEQ ID NO: 226815 - DNA, 13 bp, Artificial Sequence
  Oligonucleotide for detection of SNP TSC0055293
gaatttatgagtt

SEQ ID NO: 226816 - DNA, 13 bp, Artificial Sequence
  Oligonucleotide for detection of SNP TSC0055293
aactcataaattc

SEQ ID NO: 226817 - DNA, 13 bp, Artificial Sequence
  Oligonucleotide for detection of SNP TSC0055293
gaatttttgagtt

SEQ ID NO: 226818 - DNA, 13 bp, Artificial Sequence
  Oligonucleotide for detection of SNP TSC0055293
aactcaaaaattc

SEQ ID NO: 226819 - DNA, 13 bp, Artificial Sequence
  Oligonucleotide for detection of SNP TSC0055295
tatttttggataa

SEQ ID NO: 226820 - DNA, 13 bp, Artificial Sequence
  Oligonucleotide for detection of SNP TSC0055295
ttatccaaaaata

SEQ ID NO: 226821 - DNA, 13 bp, Artificial Sequence
  Oligonucleotide for detection of SNP TSC0055295
tattttgggataa

SEQ ID NO: 226822 - DNA, 13 bp, Artificial Sequence
  Oligonucleotide for detection of SNP TSC0055295
ttatcccaaaata

SEQ ID NO: 226823 - DNA, 13 bp, Artificial Sequence
  Oligonucleotide for detection of SNP TSC0055296
attttatattatg

SEQ ID NO: 226824 - DNA, 13 bp, Artificial Sequence
  Oligonucleotide for detection of SNP TSC0055296
cataatataaaat

SEQ ID NO: 226825 - DNA, 13 bp, Artificial Sequence
  Oligonucleotide for detection of SNP TSC0055296
attttagattatg

SEQ ID NO: 226826 - DNA, 13 bp, Artificial Sequence
  Oligonucleotide for detection of SNP TSC0055296
cataatctaaaat

SEQ ID NO: 226827 - DNA, 13 bp, Artificial Sequence
  Oligonucleotide for detection of SNP TSC0055296
tatggtatgaagt

SEQ ID NO: 226828 - DNA, 13 bp, Artificial Sequence
  Oligonucleotide for detection of SNP TSC0055296
acttcataccata

SEQ ID NO: 226829 - DNA, 13 bp, Artificial Sequence
  Oligonucleotide for detection of SNP TSC0055296
tatggtttgaagt

SEQ ID NO: 226830 - DNA, 13 bp, Artificial Sequence
  Oligonucleotide for detection of SNP TSC0055296
acttcaaaccata

SEQ ID NO: 226831 - DNA, 13 bp, Artificial Sequence
  Oligonucleotide for detection of SNP TSC0005220
tatattaagttgt

SEQ ID NO: 226832 - DNA, 13 bp, Artificial Sequence
  Oligonucleotide for detection of SNP TSC0005220
acaacttaatata

SEQ ID NO: 226833 - DNA, 13 bp, Artificial Sequence
  Oligonucleotide for detection of SNP TSC0005220
tatattgagttgt

SEQ ID NO: 226834 - DNA, 13 bp, Artificial Sequence
  Oligonucleotide for detection of SNP TSC0005220
acaactcaatata

SEQ ID NO: 226835 - DNA, 13 bp, Artificial Sequence
  Oligonucleotide for detection of SNP TSC0005559
atagagtgtattt

SEQ ID NO: 226836 - DNA, 13 bp, Artificial Sequence
  Oligonucleotide for detection of SNP TSC0005559
aaatacactctat

SEQ ID NO: 226837 - DNA, 13 bp, Artificial Sequence
  Oligonucleotide for detection of SNP TSC0005559
atagagcgtattt

SEQ ID NO: 226838 - DNA, 13 bp, Artificial Sequence
  Oligonucleotide for detection of SNP TSC0005559
aaatacgctctat

SEQ ID NO: 226839 - DNA, 13 bp, Artificial Sequence
  Oligonucleotide for detection of SNP TSC0005559
aagtgtgttttat

SEQ ID NO: 226840 - DNA, 13 bp, Artificial Sequence
  Oligonucleotide for detection of SNP TSC0005559
ataaaacacactt

SEQ ID NO: 226841 - DNA, 13 bp, Artificial Sequence
  Oligonucleotide for detection of SNP TSC0005559
aagtgtattttat

SEQ ID NO: 226842 - DNA, 13 bp, Artificial Sequence
  Oligonucleotide for detection of SNP TSC0005559
ataaaatacactt

SEQ ID NO: 226843 - DNA, 13 bp, Artificial Sequence
  Oligonucleotide for detection of SNP TSC0005559
aagtgcgttttat

SEQ ID NO: 226844 - DNA, 13 bp, Artificial Sequence
  Oligonucleotide for detection of SNP TSC0005559
ataaaacgcactt

SEQ ID NO: 226845 - DNA, 13 bp, Artificial Sequence
  Oligonucleotide for detection of SNP TSC0055297
gtttttagataty

SEQ ID NO: 226846 - DNA, 13 bp, Artificial Sequence
  Oligonucleotide for detection of SNP TSC0055297
ratatctaaaaac

SEQ ID NO: 226847 - DNA, 13 bp, Artificial Sequence
  Oligonucleotide for detection of SNP TSC0055297
gtttttggataty

SEQ ID NO: 226848 - DNA, 13 bp, Artificial Sequence
  Oligonucleotide for detection of SNP TSC0055297
ratatccaaaaac

SEQ ID NO: 226849 - DNA, 13 bp, Artificial Sequence
  Oligonucleotide for detection of SNP TSC0055297
gttttcggataty

SEQ ID NO: 226850 - DNA, 13 bp, Artificial Sequence
  Oligonucleotide for detection of SNP TSC0055297
ratatccgaaaac

SEQ ID NO: 226851 - DNA, 13 bp, Artificial Sequence
  Oligonucleotide for detection of SNP TSC0055297
ggtgtttgaaggy

SEQ ID NO: 226852 - DNA, 13 bp, Artificial Sequence
  Oligonucleotide for detection of SNP TSC0055297
rccttcaaacacc

SEQ ID NO: 226853 - DNA, 13 bp, Artificial Sequence
  Oligonucleotide for detection of SNP TSC0055297
ggtgttcgaaggy

SEQ ID NO: 226854 - DNA, 13 bp, Artificial Sequence
  Oligonucleotide for detection of SNP TSC0055297
rccttcgaacacc

SEQ ID NO: 226855 - DNA, 13 bp, Artificial Sequence
  Oligonucleotide for detection of SNP TSC0055298
tgtgtatgtttgt

SEQ ID NO: 226856 - DNA, 13 bp, Artificial Sequence
  Oligonucleotide for detection of SNP TSC0055298
acaaacatacaca

SEQ ID NO: 226857 - DNA, 13 bp, Artificial Sequence
  Oligonucleotide for detection of SNP TSC0055298
tgtgtacgtttgt

SEQ ID NO: 226858 - DNA, 13 bp, Artificial Sequence
  Oligonucleotide for detection of SNP TSC0055298
acaaacgtacaca

SEQ ID NO: 226859 - DNA, 13 bp, Artificial Sequence
  Oligonucleotide for detection of SNP TSC0055300
aaaagtaagatty

SEQ ID NO: 226860 - DNA, 13 bp, Artificial Sequence
  Oligonucleotide for detection of SNP TSC0055300
raatcttactttt

SEQ ID NO: 226861 - DNA, 13 bp, Artificial Sequence
  Oligonucleotide for detection of SNP TSC0055300
aaaagtgagatty

SEQ ID NO: 226862 - DNA, 13 bp, Artificial Sequence
  Oligonucleotide for detection of SNP TSC0055300
raatctcactttt

SEQ ID NO: 226863 - DNA, 13 bp, Artificial Sequence
  Oligonucleotide for detection of SNP TSC0055301
atattggtagaga

SEQ ID NO: 226864 - DNA, 13 bp, Artificial Sequence
  Oligonucleotide for detection of SNP TSC0055301
tctctaccaatat

SEQ ID NO: 226865 - DNA, 13 bp, Artificial Sequence
  Oligonucleotide for detection of SNP TSC0055301
atattgatagaga

SEQ ID NO: 226866 - DNA, 13 bp, Artificial Sequence
  Oligonucleotide for detection of SNP TSC0055301
tctctatcaatat

SEQ ID NO: 226867 - DNA, 13 bp, Artificial Sequence
  Oligonucleotide for detection of SNP TSC0055307
gaaagatatgtay

SEQ ID NO: 226868 - DNA, 13 bp, Artificial Sequence
  Oligonucleotide for detection of SNP TSC0055307
rtacatatctttc

SEQ ID NO: 226869 - DNA, 13 bp, Artificial Sequence
  Oligonucleotide for detection of SNP TSC0055307
gaaagagatgtay

SEQ ID NO: 226870 - DNA, 13 bp, Artificial Sequence
  Oligonucleotide for detection of SNP TSC0055307
rtacatctctttc

SEQ ID NO: 226871 - DNA, 13 bp, Artificial Sequence
  Oligonucleotide for detection of SNP TSC0055308
agatgtaaaagtg

SEQ ID NO: 226872 - DNA, 13 bp, Artificial Sequence
  Oligonucleotide for detection of SNP TSC0055308
cacttttacatct

SEQ ID NO: 226873 - DNA, 13 bp, Artificial Sequence
  Oligonucleotide for detection of SNP TSC0055308
agatgtgaaagtg

SEQ ID NO: 226874 - DNA, 13 bp, Artificial Sequence
  Oligonucleotide for detection of SNP TSC0055308
cactttcacatct

SEQ ID NO: 226875 - DNA, 13 bp, Artificial Sequence
  Oligonucleotide for detection of SNP TSC0055308
agatgcgaaagtg

SEQ ID NO: 226876 - DNA, 13 bp, Artificial Sequence
  Oligonucleotide for detection of SNP TSC0055308
cactttcgcatct

SEQ ID NO: 226877 - DNA, 13 bp, Artificial Sequence
  Oligonucleotide for detection of SNP TSC0055309
attttatggtatg

SEQ ID NO: 226878 - DNA, 13 bp, Artificial Sequence
  Oligonucleotide for detection of SNP TSC0055309
cataccataaaat

SEQ ID NO: 226879 - DNA, 13 bp, Artificial Sequence
  Oligonucleotide for detection of SNP TSC0055309
attttacggtatg

SEQ ID NO: 226880 - DNA, 13 bp, Artificial Sequence
  Oligonucleotide for detection of SNP TSC0055309
cataccgtaaaat

SEQ ID NO: 226881 - DNA, 13 bp, Artificial Sequence
  Oligonucleotide for detection of SNP TSC0055309
tatgttgtgggat

SEQ ID NO: 226882 - DNA, 13 bp, Artificial Sequence
  Oligonucleotide for detection of SNP TSC0055309
atcccacaacata

SEQ ID NO: 226883 - DNA, 13 bp, Artificial Sequence
  Oligonucleotide for detection of SNP TSC0055309
tatgttatgggat

SEQ ID NO: 226884 - DNA, 13 bp, Artificial Sequence
  Oligonucleotide for detection of SNP TSC0055309
atcccataacata

SEQ ID NO: 226885 - DNA, 13 bp, Artificial Sequence
  Oligonucleotide for detection of SNP TSC0055309
tatgtcgtgggat

SEQ ID NO: 226886 - DNA, 13 bp, Artificial Sequence
  Oligonucleotide for detection of SNP TSC0055309
atcccacgacata

SEQ ID NO: 226887 - DNA, 13 bp, Artificial Sequence
  Oligonucleotide for detection of SNP TSC0055310
aataggaatatgt

SEQ ID NO: 226888 - DNA, 13 bp, Artificial Sequence
  Oligonucleotide for detection of SNP TSC0055310
acatattcctatt

SEQ ID NO: 226889 - DNA, 13 bp, Artificial Sequence
  Oligonucleotide for detection of SNP TSC0055310
aataggtatatgt

SEQ ID NO: 226890 - DNA, 13 bp, Artificial Sequence
  Oligonucleotide for detection of SNP TSC0055310
acatatacctatt

SEQ ID NO: 226891 - DNA, 13 bp, Artificial Sequence
  Oligonucleotide for detection of SNP TSC0055310
atatatttttgtt

SEQ ID NO: 226892 - DNA, 13 bp, Artificial Sequence
  Oligonucleotide for detection of SNP TSC0055310
aacaaaaatatat

SEQ ID NO: 226893 - DNA, 13 bp, Artificial Sequence
  Oligonucleotide for detection of SNP TSC0055310
atatatgtttgtt

SEQ ID NO: 226894 - DNA, 13 bp, Artificial Sequence
  Oligonucleotide for detection of SNP TSC0055310
aacaaacatatat

SEQ ID NO: 226895 - DNA, 13 bp, Artificial Sequence
  Oligonucleotide for detection of SNP TSC0055311
ttatcgagtttaa

SEQ ID NO: 226896 - DNA, 13 bp, Artificial Sequence
  Oligonucleotide for detection of SNP TSC0055311
ttaaactcgataa

SEQ ID NO: 226897 - DNA, 13 bp, Artificial Sequence
  Oligonucleotide for detection of SNP TSC0055311
ttatcgtgtttaa

SEQ ID NO: 226898 - DNA, 13 bp, Artificial Sequence
  Oligonucleotide for detection of SNP TSC0055311
ttaaacacgataa

SEQ ID NO: 226899 - DNA, 13 bp, Artificial Sequence
  Oligonucleotide for detection of SNP TSC0055313
ttttgtaaaggty

SEQ ID NO: 226900 - DNA, 13 bp, Artificial Sequence
  Oligonucleotide for detection of SNP TSC0055313
racctttacaaaa

SEQ ID NO: 226901 - DNA, 13 bp, Artificial Sequence
  Oligonucleotide for detection of SNP TSC0055313
ttttgtgaaggty

SEQ ID NO: 226902 - DNA, 13 bp, Artificial Sequence
  Oligonucleotide for detection of SNP TSC0055313
raccttcacaaaa

SEQ ID NO: 226903 - DNA, 13 bp, Artificial Sequence
  Oligonucleotide for detection of SNP TSC0055315
tattatttttggy

SEQ ID NO: 226904 - DNA, 13 bp, Artificial Sequence
  Oligonucleotide for detection of SNP TSC0055315
rccaaaaataata

SEQ ID NO: 226905 - DNA, 13 bp, Artificial Sequence
  Oligonucleotide for detection of SNP TSC0055315
gttagatatggtg

SEQ ID NO: 226906 - DNA, 13 bp, Artificial Sequence
  Oligonucleotide for detection of SNP TSC0055315
caccatatctaac

SEQ ID NO: 226907 - DNA, 13 bp, Artificial Sequence
  Oligonucleotide for detection of SNP TSC0055315
gttagaaatggtg

SEQ ID NO: 226908 - DNA, 13 bp, Artificial Sequence
  Oligonucleotide for detection of SNP TSC0055315
caccatttctaac

SEQ ID NO: 226909 - DNA, 13 bp, Artificial Sequence
  Oligonucleotide for detection of SNP TSC0055316
ttagttttggata

SEQ ID NO: 226910 - DNA, 13 bp, Artificial Sequence
  Oligonucleotide for detection of SNP TSC0055316
tatccaaaactaa

SEQ ID NO: 226911 - DNA, 13 bp, Artificial Sequence
  Oligonucleotide for detection of SNP TSC0055316
ttagttgtggata

SEQ ID NO: 226912 - DNA, 13 bp, Artificial Sequence
  Oligonucleotide for detection of SNP TSC0055316
tatccacaactaa

SEQ ID NO: 226913 - DNA, 13 bp, Artificial Sequence
  Oligonucleotide for detection of SNP TSC0055316
ttagtcgtggata

SEQ ID NO: 226914 - DNA, 13 bp, Artificial Sequence
  Oligonucleotide for detection of SNP TSC0055316
tatccacgactaa

SEQ ID NO: 226915 - DNA, 13 bp, Artificial Sequence
  Oligonucleotide for detection of SNP TSC0055316
tgtttaaggttga

SEQ ID NO: 226916 - DNA, 13 bp, Artificial Sequence
  Oligonucleotide for detection of SNP TSC0055316
tcaaccttaaaca

SEQ ID NO: 226917 - DNA, 13 bp, Artificial Sequence
  Oligonucleotide for detection of SNP TSC0055316
tgtttatggttga

SEQ ID NO: 226918 - DNA, 13 bp, Artificial Sequence
  Oligonucleotide for detection of SNP TSC0055316
tcaaccataaaca

SEQ ID NO: 226919 - DNA, 13 bp, Artificial Sequence
  Oligonucleotide for detection of SNP TSC0055316
tgtttacggttga

SEQ ID NO: 226920 - DNA, 13 bp, Artificial Sequence
  Oligonucleotide for detection of SNP TSC0055316
tcaaccgtaaaca

SEQ ID NO: 226921 - DNA, 13 bp, Artificial Sequence
  Oligonucleotide for detection of SNP TSC0055318
tagttgtgattty

SEQ ID NO: 226922 - DNA, 13 bp, Artificial Sequence
  Oligonucleotide for detection of SNP TSC0055318
raaatcacaacta

SEQ ID NO: 226923 - DNA, 13 bp, Artificial Sequence
  Oligonucleotide for detection of SNP TSC0055318
tagttgggattty

SEQ ID NO: 226924 - DNA, 13 bp, Artificial Sequence
  Oligonucleotide for detection of SNP TSC0055318
raaatcccaacta

SEQ ID NO: 226925 - DNA, 13 bp, Artificial Sequence
  Oligonucleotide for detection of SNP TSC0055318
tagttgcgattty

SEQ ID NO: 226926 - DNA, 13 bp, Artificial Sequence
  Oligonucleotide for detection of SNP TSC0055318
raaatcgcaacta

SEQ ID NO: 226927 - DNA, 13 bp, Artificial Sequence
  Oligonucleotide for detection of SNP TSC0055318
gaggttttaattg

SEQ ID NO: 226928 - DNA, 13 bp, Artificial Sequence
  Oligonucleotide for detection of SNP TSC0055318
caattaaaacctc

SEQ ID NO: 226929 - DNA, 13 bp, Artificial Sequence
  Oligonucleotide for detection of SNP TSC0055318
gaggtcgtaattg

SEQ ID NO: 226930 - DNA, 13 bp, Artificial Sequence
  Oligonucleotide for detection of SNP TSC0055318
caattacgacctc

SEQ ID NO: 226931 - DNA, 13 bp, Artificial Sequence
  Oligonucleotide for detection of SNP TSC0055321
attgtaggtaaat

SEQ ID NO: 226932 - DNA, 13 bp, Artificial Sequence
  Oligonucleotide for detection of SNP TSC0055321
atttacctacaat

SEQ ID NO: 226933 - DNA, 13 bp, Artificial Sequence
  Oligonucleotide for detection of SNP TSC0055321
attgtaagtaaat

SEQ ID NO: 226934 - DNA, 13 bp, Artificial Sequence
  Oligonucleotide for detection of SNP TSC0055321
atttacttacaat

SEQ ID NO: 226935 - DNA, 13 bp, Artificial Sequence
  Oligonucleotide for detection of SNP TSC0055322
ttgattgttttta

SEQ ID NO: 226936 - DNA, 13 bp, Artificial Sequence
  Oligonucleotide for detection of SNP TSC0055322
taaaaacaatcaa

SEQ ID NO: 226937 - DNA, 13 bp, Artificial Sequence
  Oligonucleotide for detection of SNP TSC0055323
gttttaatgtaag

SEQ ID NO: 226938 - DNA, 13 bp, Artificial Sequence
  Oligonucleotide for detection of SNP TSC0055323
cttacattaaaac

SEQ ID NO: 226939 - DNA, 13 bp, Artificial Sequence
  Oligonucleotide for detection of SNP TSC0055323
gttttagtgtaag

SEQ ID NO: 226940 - DNA, 13 bp, Artificial Sequence
  Oligonucleotide for detection of SNP TSC0055323
cttacactaaaac

SEQ ID NO: 226941 - DNA, 13 bp, Artificial Sequence
  Oligonucleotide for detection of SNP TSC0055324
agggataagaaat

SEQ ID NO: 226942 - DNA, 13 bp, Artificial Sequence
  Oligonucleotide for detection of SNP TSC0055324
atttcttatccct

SEQ ID NO: 226943 - DNA, 13 bp, Artificial Sequence
  Oligonucleotide for detection of SNP TSC0055324
agggatgagaaat

SEQ ID NO: 226944 - DNA, 13 bp, Artificial Sequence
  Oligonucleotide for detection of SNP TSC0055324
atttctcatccct

SEQ ID NO: 226945 - DNA, 13 bp, Artificial Sequence
  Oligonucleotide for detection of SNP TSC0055324
agggacgagaaat

SEQ ID NO: 226946 - DNA, 13 bp, Artificial Sequence
  Oligonucleotide for detection of SNP TSC0055324
atttctcgtccct

SEQ ID NO: 226947 - DNA, 13 bp, Artificial Sequence
  Oligonucleotide for detection of SNP TSC0055325
tgtagcgtagttt

SEQ ID NO: 226948 - DNA, 13 bp, Artificial Sequence
  Oligonucleotide for detection of SNP TSC0055325
aaactacgctaca

SEQ ID NO: 226949 - DNA, 13 bp, Artificial Sequence
  Oligonucleotide for detection of SNP TSC0055325
agattgtgttgta

SEQ ID NO: 226950 - DNA, 13 bp, Artificial Sequence
  Oligonucleotide for detection of SNP TSC0055325
tacaacacaatct

SEQ ID NO: 226951 - DNA, 13 bp, Artificial Sequence
  Oligonucleotide for detection of SNP TSC0055325
agattgcgttgta

SEQ ID NO: 226952 - DNA, 13 bp, Artificial Sequence
  Oligonucleotide for detection of SNP TSC0055325
tacaacgcaatct

SEQ ID NO: 226953 - DNA, 13 bp, Artificial Sequence
  Oligonucleotide for detection of SNP TSC0055326
gaaaaatgttatt

SEQ ID NO: 226954 - DNA, 13 bp, Artificial Sequence
  Oligonucleotide for detection of SNP TSC0055326
aataacatttttc

SEQ ID NO: 226955 - DNA, 13 bp, Artificial Sequence
  Oligonucleotide for detection of SNP TSC0055326
gaaaaaggttatt

SEQ ID NO: 226956 - DNA, 13 bp, Artificial Sequence
  Oligonucleotide for detection of SNP TSC0055326
aataacctttttc

SEQ ID NO: 226957 - DNA, 13 bp, Artificial Sequence
  Oligonucleotide for detection of SNP TSC0055326
gaaaaacgttatt

SEQ ID NO: 226958 - DNA, 13 bp, Artificial Sequence
  Oligonucleotide for detection of SNP TSC0055326
aataacgtttttc

SEQ ID NO: 226959 - DNA, 13 bp, Artificial Sequence
  Oligonucleotide for detection of SNP TSC0055326
aatggcgttttty

SEQ ID NO: 226960 - DNA, 13 bp, Artificial Sequence
  Oligonucleotide for detection of SNP TSC0055326
raaaaacgccatt

SEQ ID NO: 226961 - DNA, 13 bp, Artificial Sequence
  Oligonucleotide for detection of SNP TSC0055335
gaaattgttatat

SEQ ID NO: 226962 - DNA, 13 bp, Artificial Sequence
  Oligonucleotide for detection of SNP TSC0055335
atataacaatttc

SEQ ID NO: 226963 - DNA, 13 bp, Artificial Sequence
  Oligonucleotide for detection of SNP TSC0055335
gaaattattatat

SEQ ID NO: 226964 - DNA, 13 bp, Artificial Sequence
  Oligonucleotide for detection of SNP TSC0055335
atataataatttc

SEQ ID NO: 226965 - DNA, 13 bp, Artificial Sequence
  Oligonucleotide for detection of SNP TSC0055337
taaaaagaagaga

SEQ ID NO: 226966 - DNA, 13 bp, Artificial Sequence
  Oligonucleotide for detection of SNP TSC0055337
tctcttcttttta

SEQ ID NO: 226967 - DNA, 13 bp, Artificial Sequence
  Oligonucleotide for detection of SNP TSC0055337
taaaaaaaagaga

SEQ ID NO: 226968 - DNA, 13 bp, Artificial Sequence
  Oligonucleotide for detection of SNP TSC0055337
tctctttttttta

SEQ ID NO: 226969 - DNA, 13 bp, Artificial Sequence
  Oligonucleotide for detection of SNP TSC0055338
gtaaaaaaaaatt

SEQ ID NO: 226970 - DNA, 13 bp, Artificial Sequence
  Oligonucleotide for detection of SNP TSC0055338
aatttttttttac

SEQ ID NO: 226971 - DNA, 13 bp, Artificial Sequence
  Oligonucleotide for detection of SNP TSC0055338
gtaaaagaaaatt

SEQ ID NO: 226972 - DNA, 13 bp, Artificial Sequence
  Oligonucleotide for detection of SNP TSC0055338
aattttcttttac

SEQ ID NO: 226973 - DNA, 13 bp, Artificial Sequence
  Oligonucleotide for detection of SNP TSC0055341
tgttttatgaagg

SEQ ID NO: 226974 - DNA, 13 bp, Artificial Sequence
  Oligonucleotide for detection of SNP TSC0055341
ccttcataaaaca

SEQ ID NO: 226975 - DNA, 13 bp, Artificial Sequence
  Oligonucleotide for detection of SNP TSC0055341
tgttttgtgaagg

SEQ ID NO: 226976 - DNA, 13 bp, Artificial Sequence
  Oligonucleotide for detection of SNP TSC0055341
ccttcacaaaaca

SEQ ID NO: 226977 - DNA, 13 bp, Artificial Sequence
  Oligonucleotide for detection of SNP TSC0055347
aaatggtgagttt

SEQ ID NO: 226978 - DNA, 13 bp, Artificial Sequence
  Oligonucleotide for detection of SNP TSC0055347
aaactcaccattt

SEQ ID NO: 226979 - DNA, 13 bp, Artificial Sequence
  Oligonucleotide for detection of SNP TSC0055347
aaatggcgagttt

SEQ ID NO: 226980 - DNA, 13 bp, Artificial Sequence
  Oligonucleotide for detection of SNP TSC0055347
aaactcgccattt

SEQ ID NO: 226981 - DNA, 13 bp, Artificial Sequence
  Oligonucleotide for detection of SNP TSC0055347
aagtttgttattt

SEQ ID NO: 226982 - DNA, 13 bp, Artificial Sequence
  Oligonucleotide for detection of SNP TSC0055347
aaataacaaactt

SEQ ID NO: 226983 - DNA, 13 bp, Artificial Sequence
  Oligonucleotide for detection of SNP TSC0055347
aagtttattattt

SEQ ID NO: 226984 - DNA, 13 bp, Artificial Sequence
  Oligonucleotide for detection of SNP TSC0055347
aaataataaactt

SEQ ID NO: 226985 - DNA, 13 bp, Artificial Sequence
  Oligonucleotide for detection of SNP TSC0055347
aagttcgttattt

SEQ ID NO: 226986 - DNA, 13 bp, Artificial Sequence
  Oligonucleotide for detection of SNP TSC0055347
aaataacgaactt

SEQ ID NO: 226987 - DNA, 13 bp, Artificial Sequence
  Oligonucleotide for detection of SNP TSC0055348
ttggttatgaatt

SEQ ID NO: 226988 - DNA, 13 bp, Artificial Sequence
  Oligonucleotide for detection of SNP TSC0055348
aattcataaccaa

SEQ ID NO: 226989 - DNA, 13 bp, Artificial Sequence
  Oligonucleotide for detection of SNP TSC0055351
ttaataagttaty

SEQ ID NO: 226990 - DNA, 13 bp, Artificial Sequence
  Oligonucleotide for detection of SNP TSC0055351
rataacttattaa

SEQ ID NO: 226991 - DNA, 13 bp, Artificial Sequence
  Oligonucleotide for detection of SNP TSC0055351
ttaataggttaty

SEQ ID NO: 226992 - DNA, 13 bp, Artificial Sequence
  Oligonucleotide for detection of SNP TSC0055351
rataacctattaa

SEQ ID NO: 226993 - DNA, 13 bp, Artificial Sequence
  Oligonucleotide for detection of SNP TSC0055353
tttttaagttgaa

SEQ ID NO: 226994 - DNA, 13 bp, Artificial Sequence
  Oligonucleotide for detection of SNP TSC0055353
ttcaacttaaaaa

SEQ ID NO: 226995 - DNA, 13 bp, Artificial Sequence
  Oligonucleotide for detection of SNP TSC0055353
tttttaggttgaa

SEQ ID NO: 226996 - DNA, 13 bp, Artificial Sequence
  Oligonucleotide for detection of SNP TSC0055353
ttcaacctaaaaa

SEQ ID NO: 226997 - DNA, 13 bp, Artificial Sequence
  Oligonucleotide for detection of SNP TSC0055354
tgtgaagtattta

SEQ ID NO: 226998 - DNA, 13 bp, Artificial Sequence
  Oligonucleotide for detection of SNP TSC0055354
taaatacttcaca

SEQ ID NO: 226999 - DNA, 13 bp, Artificial Sequence
  Oligonucleotide for detection of SNP TSC0055355
aattgtatgattt

SEQ ID NO: 227000 - DNA, 13 bp, Artificial Sequence
  Oligonucleotide for detection of SNP TSC0055355
aaatcatacaatt

SEQ ID NO: 227001 - DNA, 13 bp, Artificial Sequence
  Oligonucleotide for detection of SNP TSC0055355
aattgtgtgattt

SEQ ID NO: 227002 - DNA, 13 bp, Artificial Sequence
  Oligonucleotide for detection of SNP TSC0055355
aaatcacacaatt

SEQ ID NO: 227003 - DNA, 13 bp, Artificial Sequence
  Oligonucleotide for detection of SNP TSC0055355
aattgcgtgattt

SEQ ID NO: 227004 - DNA, 13 bp, Artificial Sequence
  Oligonucleotide for detection of SNP TSC0055355
aaatcacgcaatt

SEQ ID NO: 227005 - DNA, 13 bp, Artificial Sequence
  Oligonucleotide for detection of SNP TSC0055355
agattatgtaatt

SEQ ID NO: 227006 - DNA, 13 bp, Artificial Sequence
  Oligonucleotide for detection of SNP TSC0055355
aattacataatct

SEQ ID NO: 227007 - DNA, 13 bp, Artificial Sequence
  Oligonucleotide for detection of SNP TSC0055355
agattacgtaatt

SEQ ID NO: 227008 - DNA, 13 bp, Artificial Sequence
  Oligonucleotide for detection of SNP TSC0055355
aattacgtaatct

SEQ ID NO: 227009 - DNA, 13 bp, Artificial Sequence
  Oligonucleotide for detection of SNP TSC0004817
ttgattgttttty

SEQ ID NO: 227010 - DNA, 13 bp, Artificial Sequence
  Oligonucleotide for detection of SNP TSC0004817
raaaaacaatcaa

SEQ ID NO: 227011 - DNA, 13 bp, Artificial Sequence
  Oligonucleotide for detection of SNP TSC0004817
ttgattattttty

SEQ ID NO: 227012 - DNA, 13 bp, Artificial Sequence
  Oligonucleotide for detection of SNP TSC0004817
raaaaataatcaa

SEQ ID NO: 227013 - DNA, 13 bp, Artificial Sequence
  Oligonucleotide for detection of SNP TSC0055357
ttattaatagaat

SEQ ID NO: 227014 - DNA, 13 bp, Artificial Sequence
  Oligonucleotide for detection of SNP TSC0055357
attctattaataa

SEQ ID NO: 227015 - DNA, 13 bp, Artificial Sequence
  Oligonucleotide for detection of SNP TSC0055357
ttattagtagaat

SEQ ID NO: 227016 - DNA, 13 bp, Artificial Sequence
  Oligonucleotide for detection of SNP TSC0055357
attctactaataa

SEQ ID NO: 227017 - DNA, 13 bp, Artificial Sequence
  Oligonucleotide for detection of SNP TSC0055359
ttagttaggagta

SEQ ID NO: 227018 - DNA, 13 bp, Artificial Sequence
  Oligonucleotide for detection of SNP TSC0055359
tactcctaactaa

SEQ ID NO: 227019 - DNA, 13 bp, Artificial Sequence
  Oligonucleotide for detection of SNP TSC0055359
ttagttgggagta

SEQ ID NO: 227020 - DNA, 13 bp, Artificial Sequence
  Oligonucleotide for detection of SNP TSC0055359
tactcccaactaa

SEQ ID NO: 227021 - DNA, 13 bp, Artificial Sequence
  Oligonucleotide for detection of SNP TSC0055360
ttatgaaaaaata

SEQ ID NO: 227022 - DNA, 13 bp, Artificial Sequence
  Oligonucleotide for detection of SNP TSC0055360
tattttttcataa

SEQ ID NO: 227023 - DNA, 13 bp, Artificial Sequence
  Oligonucleotide for detection of SNP TSC0055360
ttatgagaaaata

SEQ ID NO: 227024 - DNA, 13 bp, Artificial Sequence
  Oligonucleotide for detection of SNP TSC0055360
tattttctcataa

SEQ ID NO: 227025 - DNA, 13 bp, Artificial Sequence
  Oligonucleotide for detection of SNP TSC0055361
aggattaggtaty

SEQ ID NO: 227026 - DNA, 13 bp, Artificial Sequence
  Oligonucleotide for detection of SNP TSC0055361
ratacctaatcct

SEQ ID NO: 227027 - DNA, 13 bp, Artificial Sequence
  Oligonucleotide for detection of SNP TSC0055361
aggattgggtaty

SEQ ID NO: 227028 - DNA, 13 bp, Artificial Sequence
  Oligonucleotide for detection of SNP TSC0055361
ratacccaatcct

SEQ ID NO: 227029 - DNA, 13 bp, Artificial Sequence
  Oligonucleotide for detection of SNP TSC0055362
tagagttggagag

SEQ ID NO: 227030 - DNA, 13 bp, Artificial Sequence
  Oligonucleotide for detection of SNP TSC0055362
ctctccaactcta

SEQ ID NO: 227031 - DNA, 13 bp, Artificial Sequence
  Oligonucleotide for detection of SNP TSC0055362
tagagtcggagag

SEQ ID NO: 227032 - DNA, 13 bp, Artificial Sequence
  Oligonucleotide for detection of SNP TSC0055362
ctctccgactcta

SEQ ID NO: 227033 - DNA, 13 bp, Artificial Sequence
  Oligonucleotide for detection of SNP TSC0055363
ttaataatatgtt

SEQ ID NO: 227034 - DNA, 13 bp, Artificial Sequence
  Oligonucleotide for detection of SNP TSC0055363
aacatattattaa

SEQ ID NO: 227035 - DNA, 13 bp, Artificial Sequence
  Oligonucleotide for detection of SNP TSC0055363
ttaatattatgtt

SEQ ID NO: 227036 - DNA, 13 bp, Artificial Sequence
  Oligonucleotide for detection of SNP TSC0055363
aacataatattaa

SEQ ID NO: 227037 - DNA, 13 bp, Artificial Sequence
  Oligonucleotide for detection of SNP TSC0055363
aatatattgttaa

SEQ ID NO: 227038 - DNA, 13 bp, Artificial Sequence
  Oligonucleotide for detection of SNP TSC0055363
ttaacaatatatt

SEQ ID NO: 227039 - DNA, 13 bp, Artificial Sequence
  Oligonucleotide for detection of SNP TSC0055363
aatatagtgttaa

SEQ ID NO: 227040 - DNA, 13 bp, Artificial Sequence
  Oligonucleotide for detection of SNP TSC0055363
ttaacactatatt

SEQ ID NO: 227041 - DNA, 13 bp, Artificial Sequence
  Oligonucleotide for detection of SNP TSC0007260
taaagtattagay

SEQ ID NO: 227042 - DNA, 13 bp, Artificial Sequence
  Oligonucleotide for detection of SNP TSC0007260
rtctaatacttta

SEQ ID NO: 227043 - DNA, 13 bp, Artificial Sequence
  Oligonucleotide for detection of SNP TSC0007260
taaagttttagay

SEQ ID NO: 227044 - DNA, 13 bp, Artificial Sequence
  Oligonucleotide for detection of SNP TSC0007260
rtctaaaacttta

SEQ ID NO: 227045 - DNA, 13 bp, Artificial Sequence
  Oligonucleotide for detection of SNP TSC0007260
gtttgatattttg

SEQ ID NO: 227046 - DNA, 13 bp, Artificial Sequence
  Oligonucleotide for detection of SNP TSC0007260
caaaatatcaaac

SEQ ID NO: 227047 - DNA, 13 bp, Artificial Sequence
  Oligonucleotide for detection of SNP TSC0007260
gtttgagattttg

SEQ ID NO: 227048 - DNA, 13 bp, Artificial Sequence
  Oligonucleotide for detection of SNP TSC0007260
caaaatctcaaac

SEQ ID NO: 227049 - DNA, 13 bp, Artificial Sequence
  Oligonucleotide for detection of SNP TSC0007261
ttgaataatagag

SEQ ID NO: 227050 - DNA, 13 bp, Artificial Sequence
  Oligonucleotide for detection of SNP TSC0007261
ctctattattcaa

SEQ ID NO: 227051 - DNA, 13 bp, Artificial Sequence
  Oligonucleotide for detection of SNP TSC0007261
ttgaatgatagag

SEQ ID NO: 227052 - DNA, 13 bp, Artificial Sequence
  Oligonucleotide for detection of SNP TSC0007261
ctctatcattcaa

SEQ ID NO: 227053 - DNA, 13 bp, Artificial Sequence
  Oligonucleotide for detection of SNP TSC0007261
ttgaacgatagag

SEQ ID NO: 227054 - DNA, 13 bp, Artificial Sequence
  Oligonucleotide for detection of SNP TSC0007261
ctctatcgttcaa

SEQ ID NO: 227055 - DNA, 13 bp, Artificial Sequence
  Oligonucleotide for detection of SNP TSC0055366
ggatatgaaggaa

SEQ ID NO: 227056 - DNA, 13 bp, Artificial Sequence
  Oligonucleotide for detection of SNP TSC0055366
ttccttcatatcc

SEQ ID NO: 227057 - DNA, 13 bp, Artificial Sequence
  Oligonucleotide for detection of SNP TSC0055366
ggatataaaggaa

SEQ ID NO: 227058 - DNA, 13 bp, Artificial Sequence
  Oligonucleotide for detection of SNP TSC0055366
ttcctttatatcc

SEQ ID NO: 227059 - DNA, 13 bp, Artificial Sequence
  Oligonucleotide for detection of SNP TSC0055366
ggatacgaaggaa

SEQ ID NO: 227060 - DNA, 13 bp, Artificial Sequence
  Oligonucleotide for detection of SNP TSC0055366
ttccttcgtatcc

SEQ ID NO: 227061 - DNA, 13 bp, Artificial Sequence
  Oligonucleotide for detection of SNP TSC0055367
gttagtatgagtt

SEQ ID NO: 227062 - DNA, 13 bp, Artificial Sequence
  Oligonucleotide for detection of SNP TSC0055367
aactcatactaac

SEQ ID NO: 227063 - DNA, 13 bp, Artificial Sequence
  Oligonucleotide for detection of SNP TSC0055367
gttagtttgagtt

SEQ ID NO: 227064 - DNA, 13 bp, Artificial Sequence
  Oligonucleotide for detection of SNP TSC0055367
aactcaaactaac

SEQ ID NO: 227065 - DNA, 13 bp, Artificial Sequence
  Oligonucleotide for detection of SNP TSC0055367
aatttatattagy

SEQ ID NO: 227066 - DNA, 13 bp, Artificial Sequence
  Oligonucleotide for detection of SNP TSC0055367
rctaatataaatt

SEQ ID NO: 227067 - DNA, 13 bp, Artificial Sequence
  Oligonucleotide for detection of SNP TSC0055367
aatttagattagy

SEQ ID NO: 227068 - DNA, 13 bp, Artificial Sequence
  Oligonucleotide for detection of SNP TSC0055367
rctaatctaaatt

SEQ ID NO: 227069 - DNA, 13 bp, Artificial Sequence
  Oligonucleotide for detection of SNP TSC0055368
taagggttttttt

SEQ ID NO: 227070 - DNA, 13 bp, Artificial Sequence
  Oligonucleotide for detection of SNP TSC0055368
aaaaaaaccctta

SEQ ID NO: 227071 - DNA, 13 bp, Artificial Sequence
  Oligonucleotide for detection of SNP TSC0055368
taaggggtttttt

SEQ ID NO: 227072 - DNA, 13 bp, Artificial Sequence
  Oligonucleotide for detection of SNP TSC0055368
aaaaaacccctta

SEQ ID NO: 227073 - DNA, 13 bp, Artificial Sequence
  Oligonucleotide for detection of SNP TSC0055375
agggaaggaggay

SEQ ID NO: 227074 - DNA, 13 bp, Artificial Sequence
  Oligonucleotide for detection of SNP TSC0055375
rtcctccttccct

SEQ ID NO: 227075 - DNA, 13 bp, Artificial Sequence
  Oligonucleotide for detection of SNP TSC0055375
agggaaagaggay

SEQ ID NO: 227076 - DNA, 13 bp, Artificial Sequence
  Oligonucleotide for detection of SNP TSC0055375
rtcctctttccct

SEQ ID NO: 227077 - DNA, 13 bp, Artificial Sequence
  Oligonucleotide for detection of SNP TSC0055376
aaagtaagtttgt

SEQ ID NO: 227078 - DNA, 13 bp, Artificial Sequence
  Oligonucleotide for detection of SNP TSC0055376
acaaacttacttt

SEQ ID NO: 227079 - DNA, 13 bp, Artificial Sequence
  Oligonucleotide for detection of SNP TSC0055376
aaagtatgtttgt

SEQ ID NO: 227080 - DNA, 13 bp, Artificial Sequence
  Oligonucleotide for detection of SNP TSC0055376
acaaacatacttt

SEQ ID NO: 227081 - DNA, 13 bp, Artificial Sequence
  Oligonucleotide for detection of SNP TSC0055376
aaagtacgtttgt

SEQ ID NO: 227082 - DNA, 13 bp, Artificial Sequence
  Oligonucleotide for detection of SNP TSC0055376
acaaacgtacttt

SEQ ID NO: 227083 - DNA, 13 bp, Artificial Sequence
  Oligonucleotide for detection of SNP TSC0055376
ataggtttgtttt

SEQ ID NO: 227084 - DNA, 13 bp, Artificial Sequence
  Oligonucleotide for detection of SNP TSC0055376
aaaacaaacctat

SEQ ID NO: 227085 - DNA, 13 bp, Artificial Sequence
  Oligonucleotide for detection of SNP TSC0055376
ataggtgtgtttt

SEQ ID NO: 227086 - DNA, 13 bp, Artificial Sequence
  Oligonucleotide for detection of SNP TSC0055376
aaaacacacctat

SEQ ID NO: 227087 - DNA, 13 bp, Artificial Sequence
  Oligonucleotide for detection of SNP TSC0055376
ataggcgtgtttt

SEQ ID NO: 227088 - DNA, 13 bp, Artificial Sequence
  Oligonucleotide for detection of SNP TSC0055376
aaaacacgcctat

SEQ ID NO: 227089 - DNA, 13 bp, Artificial Sequence
  Oligonucleotide for detection of SNP TSC0055378
ttagaatttttaa

SEQ ID NO: 227090 - DNA, 13 bp, Artificial Sequence
  Oligonucleotide for detection of SNP TSC0055378
ttaaaaattctaa

SEQ ID NO: 227091 - DNA, 13 bp, Artificial Sequence
  Oligonucleotide for detection of SNP TSC0055378
ttgagggttttaa

SEQ ID NO: 227092 - DNA, 13 bp, Artificial Sequence
  Oligonucleotide for detection of SNP TSC0055378
ttaaaaccctcaa

SEQ ID NO: 227093 - DNA, 13 bp, Artificial Sequence
  Oligonucleotide for detection of SNP TSC0055378
ttgaggtttttaa

SEQ ID NO: 227094 - DNA, 13 bp, Artificial Sequence
  Oligonucleotide for detection of SNP TSC0055378
ttaaaaacctcaa

SEQ ID NO: 227095 - DNA, 13 bp, Artificial Sequence
  Oligonucleotide for detection of SNP TSC0055379
agaataaggagtt

SEQ ID NO: 227096 - DNA, 13 bp, Artificial Sequence
  Oligonucleotide for detection of SNP TSC0055379
aactccttattct

SEQ ID NO: 227097 - DNA, 13 bp, Artificial Sequence
  Oligonucleotide for detection of SNP TSC0055379
agaatagggagtt

SEQ ID NO: 227098 - DNA, 13 bp, Artificial Sequence
  Oligonucleotide for detection of SNP TSC0055379
aactccctattct

SEQ ID NO: 227099 - DNA, 13 bp, Artificial Sequence
  Oligonucleotide for detection of SNP TSC0055386
tatttagatttaa

SEQ ID NO: 227100 - DNA, 13 bp, Artificial Sequence
  Oligonucleotide for detection of SNP TSC0055386
ttaaatctaaata

SEQ ID NO: 227101 - DNA, 13 bp, Artificial Sequence
  Oligonucleotide for detection of SNP TSC0055386
ttaagtgtagata

SEQ ID NO: 227102 - DNA, 13 bp, Artificial Sequence
  Oligonucleotide for detection of SNP TSC0055386
tatctacacttaa

SEQ ID NO: 227103 - DNA, 13 bp, Artificial Sequence
  Oligonucleotide for detection of SNP TSC0055386
ttaagtttagata

SEQ ID NO: 227104 - DNA, 13 bp, Artificial Sequence
  Oligonucleotide for detection of SNP TSC0055386
tatctaaacttaa

SEQ ID NO: 227105 - DNA, 13 bp, Artificial Sequence
  Oligonucleotide for detection of SNP TSC0055387
agtaaaagaaggt

SEQ ID NO: 227106 - DNA, 13 bp, Artificial Sequence
  Oligonucleotide for detection of SNP TSC0055387
accttcttttact

SEQ ID NO: 227107 - DNA, 13 bp, Artificial Sequence
  Oligonucleotide for detection of SNP TSC0055387
agtaaaggaaggt

SEQ ID NO: 227108 - DNA, 13 bp, Artificial Sequence
  Oligonucleotide for detection of SNP TSC0055387
accttcctttact

SEQ ID NO: 227109 - DNA, 13 bp, Artificial Sequence
  Oligonucleotide for detection of SNP TSC0055388
atttggagaatty

SEQ ID NO: 227110 - DNA, 13 bp, Artificial Sequence
  Oligonucleotide for detection of SNP TSC0055388
raattctccaaat

SEQ ID NO: 227111 - DNA, 13 bp, Artificial Sequence
  Oligonucleotide for detection of SNP TSC0055388
atttggggaatty

SEQ ID NO: 227112 - DNA, 13 bp, Artificial Sequence
  Oligonucleotide for detection of SNP TSC0055388
raattccccaaat

SEQ ID NO: 227113 - DNA, 13 bp, Artificial Sequence
  Oligonucleotide for detection of SNP TSC0055389
aggaataagattt

SEQ ID NO: 227114 - DNA, 13 bp, Artificial Sequence
  Oligonucleotide for detection of SNP TSC0055389
aaatcttattcct

SEQ ID NO: 227115 - DNA, 13 bp, Artificial Sequence
  Oligonucleotide for detection of SNP TSC0055389
aggaattagattt

SEQ ID NO: 227116 - DNA, 13 bp, Artificial Sequence
  Oligonucleotide for detection of SNP TSC0055389
aaatctaattcct

SEQ ID NO: 227117 - DNA, 13 bp, Artificial Sequence
  Oligonucleotide for detection of SNP TSC0055389
aaatttggttttt

SEQ ID NO: 227118 - DNA, 13 bp, Artificial Sequence
  Oligonucleotide for detection of SNP TSC0055389
aaaaaccaaattt

SEQ ID NO: 227119 - DNA, 13 bp, Artificial Sequence
  Oligonucleotide for detection of SNP TSC0055390
aagaagagtaata

SEQ ID NO: 227120 - DNA, 13 bp, Artificial Sequence
  Oligonucleotide for detection of SNP TSC0055390
tattactcttctt

SEQ ID NO: 227121 - DNA, 13 bp, Artificial Sequence
  Oligonucleotide for detection of SNP TSC0055390
aagaagtgtaata

SEQ ID NO: 227122 - DNA, 13 bp, Artificial Sequence
  Oligonucleotide for detection of SNP TSC0055390
tattacacttctt

SEQ ID NO: 227123 - DNA, 13 bp, Artificial Sequence
  Oligonucleotide for detection of SNP TSC0055391
atttaaatttatt

SEQ ID NO: 227124 - DNA, 13 bp, Artificial Sequence
  Oligonucleotide for detection of SNP TSC0055391
aataaatttaaat

SEQ ID NO: 227125 - DNA, 13 bp, Artificial Sequence
  Oligonucleotide for detection of SNP TSC0055391
atttaagtttatt

SEQ ID NO: 227126 - DNA, 13 bp, Artificial Sequence
  Oligonucleotide for detection of SNP TSC0055391
aataaacttaaat

SEQ ID NO: 227127 - DNA, 13 bp, Artificial Sequence
  Oligonucleotide for detection of SNP TSC0055393
taaaagtgatatt

SEQ ID NO: 227128 - DNA, 13 bp, Artificial Sequence
  Oligonucleotide for detection of SNP TSC0055393
aatatcactttta

SEQ ID NO: 227129 - DNA, 13 bp, Artificial Sequence
  Oligonucleotide for detection of SNP TSC0055393
taaaagcgatatt

SEQ ID NO: 227130 - DNA, 13 bp, Artificial Sequence
  Oligonucleotide for detection of SNP TSC0055393
aatatcgctttta

SEQ ID NO: 227131 - DNA, 13 bp, Artificial Sequence
  Oligonucleotide for detection of SNP TSC0055396
ggagttattagta

SEQ ID NO: 227132 - DNA, 13 bp, Artificial Sequence
  Oligonucleotide for detection of SNP TSC0055396
tactaataactcc

SEQ ID NO: 227133 - DNA, 13 bp, Artificial Sequence
  Oligonucleotide for detection of SNP TSC0055396
ggagttgttagta

SEQ ID NO: 227134 - DNA, 13 bp, Artificial Sequence
  Oligonucleotide for detection of SNP TSC0055396
tactaacaactcc

SEQ ID NO: 227135 - DNA, 13 bp, Artificial Sequence
  Oligonucleotide for detection of SNP TSC0055396
ggagtcgttagta

SEQ ID NO: 227136 - DNA, 13 bp, Artificial Sequence
  Oligonucleotide for detection of SNP TSC0055396
tactaacgactcc

SEQ ID NO: 227137 - DNA, 13 bp, Artificial Sequence
  Oligonucleotide for detection of SNP TSC0055396
tgttggtggttty

SEQ ID NO: 227138 - DNA, 13 bp, Artificial Sequence
  Oligonucleotide for detection of SNP TSC0055396
raaaccaccaaca

SEQ ID NO: 227139 - DNA, 13 bp, Artificial Sequence
  Oligonucleotide for detection of SNP TSC0055396
tgttggcggttty

SEQ ID NO: 227140 - DNA, 13 bp, Artificial Sequence
  Oligonucleotide for detection of SNP TSC0055396
raaaccgccaaca

SEQ ID NO: 227141 - DNA, 13 bp, Artificial Sequence
  Oligonucleotide for detection of SNP TSC0055397
ttgttttttaggg

SEQ ID NO: 227142 - DNA, 13 bp, Artificial Sequence
  Oligonucleotide for detection of SNP TSC0055397
ccctaaaaaacaa

SEQ ID NO: 227143 - DNA, 13 bp, Artificial Sequence
  Oligonucleotide for detection of SNP TSC0055397
ttgtttgttaggg

SEQ ID NO: 227144 - DNA, 13 bp, Artificial Sequence
  Oligonucleotide for detection of SNP TSC0055397
ccctaacaaacaa

SEQ ID NO: 227145 - DNA, 13 bp, Artificial Sequence
  Oligonucleotide for detection of SNP TSC0055397
ttttgggagatag

SEQ ID NO: 227146 - DNA, 13 bp, Artificial Sequence
  Oligonucleotide for detection of SNP TSC0055397
ctatctcccaaaa

SEQ ID NO: 227147 - DNA, 13 bp, Artificial Sequence
  Oligonucleotide for detection of SNP TSC0055397
ttttggtagatag

SEQ ID NO: 227148 - DNA, 13 bp, Artificial Sequence
  Oligonucleotide for detection of SNP TSC0055397
ctatctaccaaaa

SEQ ID NO: 227149 - DNA, 13 bp, Artificial Sequence
  Oligonucleotide for detection of SNP TSC0055407
ttttaagtaatty

SEQ ID NO: 227150 - DNA, 13 bp, Artificial Sequence
  Oligonucleotide for detection of SNP TSC0055407
raattacttaaaa

SEQ ID NO: 227151 - DNA, 13 bp, Artificial Sequence
  Oligonucleotide for detection of SNP TSC0055407
ttttaaataatty

SEQ ID NO: 227152 - DNA, 13 bp, Artificial Sequence
  Oligonucleotide for detection of SNP TSC0055407
raattatttaaaa

SEQ ID NO: 227153 - DNA, 13 bp, Artificial Sequence
  Oligonucleotide for detection of SNP TSC0055408
tgtgtggagtagt

SEQ ID NO: 227154 - DNA, 13 bp, Artificial Sequence
  Oligonucleotide for detection of SNP TSC0055408
actactccacaca

SEQ ID NO: 227155 - DNA, 13 bp, Artificial Sequence
  Oligonucleotide for detection of SNP TSC0055408
tgtgtgaagtagt

SEQ ID NO: 227156 - DNA, 13 bp, Artificial Sequence
  Oligonucleotide for detection of SNP TSC0055408
actacttcacaca

SEQ ID NO: 227157 - DNA, 13 bp, Artificial Sequence
  Oligonucleotide for detection of SNP TSC0006409
ttgagaggtggtt

SEQ ID NO: 227158 - DNA, 13 bp, Artificial Sequence
  Oligonucleotide for detection of SNP TSC0006409
aaccacctctcaa

SEQ ID NO: 227159 - DNA, 13 bp, Artificial Sequence
  Oligonucleotide for detection of SNP TSC0006409
ttgagaagtggtt

SEQ ID NO: 227160 - DNA, 13 bp, Artificial Sequence
  Oligonucleotide for detection of SNP TSC0006409
aaccacttctcaa

SEQ ID NO: 227161 - DNA, 13 bp, Artificial Sequence
  Oligonucleotide for detection of SNP TSC0006410
agtgttatttgta

SEQ ID NO: 227162 - DNA, 13 bp, Artificial Sequence
  Oligonucleotide for detection of SNP TSC0006410
tacaaataacact

SEQ ID NO: 227163 - DNA, 13 bp, Artificial Sequence
  Oligonucleotide for detection of SNP TSC0006410
agtgttgtttgta

SEQ ID NO: 227164 - DNA, 13 bp, Artificial Sequence
  Oligonucleotide for detection of SNP TSC0006410
tacaaacaacact

SEQ ID NO: 227165 - DNA, 13 bp, Artificial Sequence
  Oligonucleotide for detection of SNP TSC0006410
agtgttattcgta

SEQ ID NO: 227166 - DNA, 13 bp, Artificial Sequence
  Oligonucleotide for detection of SNP TSC0006410
tacgaataacact

SEQ ID NO: 227167 - DNA, 13 bp, Artificial Sequence
  Oligonucleotide for detection of SNP TSC0006410
agtgtcgtttgta

SEQ ID NO: 227168 - DNA, 13 bp, Artificial Sequence
  Oligonucleotide for detection of SNP TSC0006410
tacaaacgacact

SEQ ID NO: 227169 - DNA, 13 bp, Artificial Sequence
  Oligonucleotide for detection of SNP TSC0006410
agtgttgttcgta

SEQ ID NO: 227170 - DNA, 13 bp, Artificial Sequence
  Oligonucleotide for detection of SNP TSC0006410
tacgaacaacact

SEQ ID NO: 227171 - DNA, 13 bp, Artificial Sequence
  Oligonucleotide for detection of SNP TSC0006410
agtgtcgttcgta

SEQ ID NO: 227172 - DNA, 13 bp, Artificial Sequence
  Oligonucleotide for detection of SNP TSC0006410
tacgaacgacact

SEQ ID NO: 227173 - DNA, 13 bp, Artificial Sequence
  Oligonucleotide for detection of SNP TSC0006410
tgtgggtggtatt

SEQ ID NO: 227174 - DNA, 13 bp, Artificial Sequence
  Oligonucleotide for detection of SNP TSC0006410
aataccacccaca

SEQ ID NO: 227175 - DNA, 13 bp, Artificial Sequence
  Oligonucleotide for detection of SNP TSC0006410
tgcgggtggtatt

SEQ ID NO: 227176 - DNA, 13 bp, Artificial Sequence
  Oligonucleotide for detection of SNP TSC0006410
aataccacccgca

SEQ ID NO: 227177 - DNA, 13 bp, Artificial Sequence
  Oligonucleotide for detection of SNP TSC0006410
tgtgggcggtatt

SEQ ID NO: 227178 - DNA, 13 bp, Artificial Sequence
  Oligonucleotide for detection of SNP TSC0006410
aataccgcccaca

SEQ ID NO: 227179 - DNA, 13 bp, Artificial Sequence
  Oligonucleotide for detection of SNP TSC0006410
tgcgggcggtatt

SEQ ID NO: 227180 - DNA, 13 bp, Artificial Sequence
  Oligonucleotide for detection of SNP TSC0006410
aataccgcccgca

SEQ ID NO: 227181 - DNA, 13 bp, Artificial Sequence
  Oligonucleotide for detection of SNP TSC0055412
gtggtaggtttgt

SEQ ID NO: 227182 - DNA, 13 bp, Artificial Sequence
  Oligonucleotide for detection of SNP TSC0055412
acaaacctaccac

SEQ ID NO: 227183 - DNA, 13 bp, Artificial Sequence
  Oligonucleotide for detection of SNP TSC0055412
gtggtaagtttgt

SEQ ID NO: 227184 - DNA, 13 bp, Artificial Sequence
  Oligonucleotide for detection of SNP TSC0055412
acaaacttaccac

SEQ ID NO: 227185 - DNA, 13 bp, Artificial Sequence
  Oligonucleotide for detection of SNP TSC0055413
gttagggtaggag

SEQ ID NO: 227186 - DNA, 13 bp, Artificial Sequence
  Oligonucleotide for detection of SNP TSC0055413
ctcctaccctaac

SEQ ID NO: 227187 - DNA, 13 bp, Artificial Sequence
  Oligonucleotide for detection of SNP TSC0055413
gttaggataggag

SEQ ID NO: 227188 - DNA, 13 bp, Artificial Sequence
  Oligonucleotide for detection of SNP TSC0055413
ctcctatcctaac

SEQ ID NO: 227189 - DNA, 13 bp, Artificial Sequence
  Oligonucleotide for detection of SNP TSC0055414
ttaaaatgtttgt

SEQ ID NO: 227190 - DNA, 13 bp, Artificial Sequence
  Oligonucleotide for detection of SNP TSC0055414
acaaacattttaa

SEQ ID NO: 227191 - DNA, 13 bp, Artificial Sequence
  Oligonucleotide for detection of SNP TSC0055414
ttaaaacgtttgt

SEQ ID NO: 227192 - DNA, 13 bp, Artificial Sequence
  Oligonucleotide for detection of SNP TSC0055414
acaaacgttttaa

SEQ ID NO: 227193 - DNA, 13 bp, Artificial Sequence
  Oligonucleotide for detection of SNP TSC0055414
ataagtgttttga

SEQ ID NO: 227194 - DNA, 13 bp, Artificial Sequence
  Oligonucleotide for detection of SNP TSC0055414
tcaaaacacttat

SEQ ID NO: 227195 - DNA, 13 bp, Artificial Sequence
  Oligonucleotide for detection of SNP TSC0055414
ataagtattttga

SEQ ID NO: 227196 - DNA, 13 bp, Artificial Sequence
  Oligonucleotide for detection of SNP TSC0055414
tcaaaatacttat

SEQ ID NO: 227197 - DNA, 13 bp, Artificial Sequence
  Oligonucleotide for detection of SNP TSC0055414
ataagcgttttga

SEQ ID NO: 227198 - DNA, 13 bp, Artificial Sequence
  Oligonucleotide for detection of SNP TSC0055414
tcaaaacgcttat

SEQ ID NO: 227199 - DNA, 13 bp, Artificial Sequence
  Oligonucleotide for detection of SNP TSC0055416
gttgtaagattta

SEQ ID NO: 227200 - DNA, 13 bp, Artificial Sequence
  Oligonucleotide for detection of SNP TSC0055416
taaatcttacaac

SEQ ID NO: 227201 - DNA, 13 bp, Artificial Sequence
  Oligonucleotide for detection of SNP TSC0055416
gttgtatgattta

SEQ ID NO: 227202 - DNA, 13 bp, Artificial Sequence
  Oligonucleotide for detection of SNP TSC0055416
taaatcatacaac

SEQ ID NO: 227203 - DNA, 13 bp, Artificial Sequence
  Oligonucleotide for detection of SNP TSC0055416
taggttttataay

SEQ ID NO: 227204 - DNA, 13 bp, Artificial Sequence
  Oligonucleotide for detection of SNP TSC0055416
rttataaaaccta

SEQ ID NO: 227205 - DNA, 13 bp, Artificial Sequence
  Oligonucleotide for detection of SNP TSC0055416
taggttatataay

SEQ ID NO: 227206 - DNA, 13 bp, Artificial Sequence
  Oligonucleotide for detection of SNP TSC0055416
rttatataaccta

SEQ ID NO: 227207 - DNA, 13 bp, Artificial Sequence
  Oligonucleotide for detection of SNP TSC0055417
tatttcggaaaaa

SEQ ID NO: 227208 - DNA, 13 bp, Artificial Sequence
  Oligonucleotide for detection of SNP TSC0055417
tttttccgaaata

SEQ ID NO: 227209 - DNA, 13 bp, Artificial Sequence
  Oligonucleotide for detection of SNP TSC0055421
ttaagtggtaata

SEQ ID NO: 227210 - DNA, 13 bp, Artificial Sequence
  Oligonucleotide for detection of SNP TSC0055421
tattaccacttaa

SEQ ID NO: 227211 - DNA, 13 bp, Artificial Sequence
  Oligonucleotide for detection of SNP TSC0055421
ttaagtagtaata

SEQ ID NO: 227212 - DNA, 13 bp, Artificial Sequence
  Oligonucleotide for detection of SNP TSC0055421
tattactacttaa

SEQ ID NO: 227213 - DNA, 13 bp, Artificial Sequence
  Oligonucleotide for detection of SNP TSC0055424
gatttaagattga

SEQ ID NO: 227214 - DNA, 13 bp, Artificial Sequence
  Oligonucleotide for detection of SNP TSC0055424
tcaatcttaaatc

SEQ ID NO: 227215 - DNA, 13 bp, Artificial Sequence
  Oligonucleotide for detection of SNP TSC0055424
gatttatgattga

SEQ ID NO: 227216 - DNA, 13 bp, Artificial Sequence
  Oligonucleotide for detection of SNP TSC0055424
tcaatcataaatc

SEQ ID NO: 227217 - DNA, 13 bp, Artificial Sequence
  Oligonucleotide for detection of SNP TSC0055424
gatttacgattga

SEQ ID NO: 227218 - DNA, 13 bp, Artificial Sequence
  Oligonucleotide for detection of SNP TSC0055424
tcaatcgtaaatc

SEQ ID NO: 227219 - DNA, 13 bp, Artificial Sequence
  Oligonucleotide for detection of SNP TSC0055424
ttaattttggaty

SEQ ID NO: 227220 - DNA, 13 bp, Artificial Sequence
  Oligonucleotide for detection of SNP TSC0055424
ratccaaaattaa

SEQ ID NO: 227221 - DNA, 13 bp, Artificial Sequence
  Oligonucleotide for detection of SNP TSC0055424
ttaattgtggaty

SEQ ID NO: 227222 - DNA, 13 bp, Artificial Sequence
  Oligonucleotide for detection of SNP TSC0055424
ratccacaattaa

SEQ ID NO: 227223 - DNA, 13 bp, Artificial Sequence
  Oligonucleotide for detection of SNP TSC0055424
ttaatcgtggaty

SEQ ID NO: 227224 - DNA, 13 bp, Artificial Sequence
  Oligonucleotide for detection of SNP TSC0055424
ratccacgattaa

SEQ ID NO: 227225 - DNA, 13 bp, Artificial Sequence
  Oligonucleotide for detection of SNP TSC0055425
aattgtttgttty

SEQ ID NO: 227226 - DNA, 13 bp, Artificial Sequence
  Oligonucleotide for detection of SNP TSC0055425
raaacaaacaatt

SEQ ID NO: 227227 - DNA, 13 bp, Artificial Sequence
  Oligonucleotide for detection of SNP TSC0055425
ggagtaaatagtt

SEQ ID NO: 227228 - DNA, 13 bp, Artificial Sequence
  Oligonucleotide for detection of SNP TSC0055425
aactatttactcc

SEQ ID NO: 227229 - DNA, 13 bp, Artificial Sequence
  Oligonucleotide for detection of SNP TSC0055425
ggagtatatagtt

SEQ ID NO: 227230 - DNA, 13 bp, Artificial Sequence
  Oligonucleotide for detection of SNP TSC0055425
aactatatactcc

SEQ ID NO: 227231 - DNA, 13 bp, Artificial Sequence
  Oligonucleotide for detection of SNP TSC0055428
tttaatgaataaa

SEQ ID NO: 227232 - DNA, 13 bp, Artificial Sequence
  Oligonucleotide for detection of SNP TSC0055428
tttattcattaaa

SEQ ID NO: 227233 - DNA, 13 bp, Artificial Sequence
  Oligonucleotide for detection of SNP TSC0055428
tttaacgaataaa

SEQ ID NO: 227234 - DNA, 13 bp, Artificial Sequence
  Oligonucleotide for detection of SNP TSC0055428
tttattcgttaaa

SEQ ID NO: 227235 - DNA, 13 bp, Artificial Sequence
  Oligonucleotide for detection of SNP TSC0055429
aaagttgtagtta

SEQ ID NO: 227236 - DNA, 13 bp, Artificial Sequence
  Oligonucleotide for detection of SNP TSC0055429
taactacaacttt

SEQ ID NO: 227237 - DNA, 13 bp, Artificial Sequence
  Oligonucleotide for detection of SNP TSC0055429
aaagttatagtta

SEQ ID NO: 227238 - DNA, 13 bp, Artificial Sequence
  Oligonucleotide for detection of SNP TSC0055429
taactataacttt

SEQ ID NO: 227239 - DNA, 13 bp, Artificial Sequence
  Oligonucleotide for detection of SNP TSC0055429
aaagtcgtagtta

SEQ ID NO: 227240 - DNA, 13 bp, Artificial Sequence
  Oligonucleotide for detection of SNP TSC0055429
taactacgacttt

SEQ ID NO: 227241 - DNA, 13 bp, Artificial Sequence
  Oligonucleotide for detection of SNP TSC0055432
tgtattataaaga

SEQ ID NO: 227242 - DNA, 13 bp, Artificial Sequence
  Oligonucleotide for detection of SNP TSC0055432
tctttataataca

SEQ ID NO: 227243 - DNA, 13 bp, Artificial Sequence
  Oligonucleotide for detection of SNP TSC0055432
tgtattgtaaaga

SEQ ID NO: 227244 - DNA, 13 bp, Artificial Sequence
  Oligonucleotide for detection of SNP TSC0055432
tctttacaataca

SEQ ID NO: 227245 - DNA, 13 bp, Artificial Sequence
  Oligonucleotide for detection of SNP TSC0055433
agggtgaaatgaa

SEQ ID NO: 227246 - DNA, 13 bp, Artificial Sequence
  Oligonucleotide for detection of SNP TSC0055433
ttcatttcaccct

SEQ ID NO: 227247 - DNA, 13 bp, Artificial Sequence
  Oligonucleotide for detection of SNP TSC0055433
agggtggaatgaa

SEQ ID NO: 227248 - DNA, 13 bp, Artificial Sequence
  Oligonucleotide for detection of SNP TSC0055433
ttcattccaccct

SEQ ID NO: 227249 - DNA, 13 bp, Artificial Sequence
  Oligonucleotide for detection of SNP TSC0055434
tttatgggatatt

SEQ ID NO: 227250 - DNA, 13 bp, Artificial Sequence
  Oligonucleotide for detection of SNP TSC0055434
aatatcccataaa

SEQ ID NO: 227251 - DNA, 13 bp, Artificial Sequence
  Oligonucleotide for detection of SNP TSC0055434
tttatgagatatt

SEQ ID NO: 227252 - DNA, 13 bp, Artificial Sequence
  Oligonucleotide for detection of SNP TSC0055434
aatatctcataaa

SEQ ID NO: 227253 - DNA, 13 bp, Artificial Sequence
  Oligonucleotide for detection of SNP TSC0055436
tttttttggtggg

SEQ ID NO: 227254 - DNA, 13 bp, Artificial Sequence
  Oligonucleotide for detection of SNP TSC0055436
cccaccaaaaaaa

SEQ ID NO: 227255 - DNA, 13 bp, Artificial Sequence
  Oligonucleotide for detection of SNP TSC0055436
ttttttcggtggg

SEQ ID NO: 227256 - DNA, 13 bp, Artificial Sequence
  Oligonucleotide for detection of SNP TSC0055436
cccaccgaaaaaa

SEQ ID NO: 227257 - DNA, 13 bp, Artificial Sequence
  Oligonucleotide for detection of SNP TSC0055436
tttattggagagg

SEQ ID NO: 227258 - DNA, 13 bp, Artificial Sequence
  Oligonucleotide for detection of SNP TSC0055436
cctctccaataaa

SEQ ID NO: 227259 - DNA, 13 bp, Artificial Sequence
  Oligonucleotide for detection of SNP TSC0055436
tttattagagagg

SEQ ID NO: 227260 - DNA, 13 bp, Artificial Sequence
  Oligonucleotide for detection of SNP TSC0055436
cctctctaataaa

SEQ ID NO: 227261 - DNA, 13 bp, Artificial Sequence
  Oligonucleotide for detection of SNP TSC0055436
tttatcggagagg

SEQ ID NO: 227262 - DNA, 13 bp, Artificial Sequence
  Oligonucleotide for detection of SNP TSC0055436
cctctccgataaa

SEQ ID NO: 227263 - DNA, 13 bp, Artificial Sequence
  Oligonucleotide for detection of SNP TSC0055437
taattaaggtggy

SEQ ID NO: 227264 - DNA, 13 bp, Artificial Sequence
  Oligonucleotide for detection of SNP TSC0055437
rccaccttaatta

SEQ ID NO: 227265 - DNA, 13 bp, Artificial Sequence
  Oligonucleotide for detection of SNP TSC0055437
taattagggtggy

SEQ ID NO: 227266 - DNA, 13 bp, Artificial Sequence
  Oligonucleotide for detection of SNP TSC0055437
rccaccctaatta

SEQ ID NO: 227267 - DNA, 13 bp, Artificial Sequence
  Oligonucleotide for detection of SNP TSC0055438
gaaagagaatgag

SEQ ID NO: 227268 - DNA, 13 bp, Artificial Sequence
  Oligonucleotide for detection of SNP TSC0055438
ctcattctctttc

SEQ ID NO: 227269 - DNA, 13 bp, Artificial Sequence
  Oligonucleotide for detection of SNP TSC0055438
gaaagataatgag

SEQ ID NO: 227270 - DNA, 13 bp, Artificial Sequence
  Oligonucleotide for detection of SNP TSC0055438
ctcattatctttc

SEQ ID NO: 227271 - DNA, 13 bp, Artificial Sequence
  Oligonucleotide for detection of SNP TSC0055439
aagaggatttatg

SEQ ID NO: 227272 - DNA, 13 bp, Artificial Sequence
  Oligonucleotide for detection of SNP TSC0055439
cataaatcctctt

SEQ ID NO: 227273 - DNA, 13 bp, Artificial Sequence
  Oligonucleotide for detection of SNP TSC0055439
aagagggtttatg

SEQ ID NO: 227274 - DNA, 13 bp, Artificial Sequence
  Oligonucleotide for detection of SNP TSC0055439
cataaaccctctt

SEQ ID NO: 227275 - DNA, 13 bp, Artificial Sequence
  Oligonucleotide for detection of SNP TSC0055439
aagaggatttacg

SEQ ID NO: 227276 - DNA, 13 bp, Artificial Sequence
  Oligonucleotide for detection of SNP TSC0055439
cgtaaatcctctt

SEQ ID NO: 227277 - DNA, 13 bp, Artificial Sequence
  Oligonucleotide for detection of SNP TSC0055439
aagagggtttacg

SEQ ID NO: 227278 - DNA, 13 bp, Artificial Sequence
  Oligonucleotide for detection of SNP TSC0055439
cgtaaaccctctt

SEQ ID NO: 227279 - DNA, 13 bp, Artificial Sequence
  Oligonucleotide for detection of SNP TSC0009921
ttagttaataaat

SEQ ID NO: 227280 - DNA, 13 bp, Artificial Sequence
  Oligonucleotide for detection of SNP TSC0009921
atttattaactaa

SEQ ID NO: 227281 - DNA, 13 bp, Artificial Sequence
  Oligonucleotide for detection of SNP TSC0009921
ttagtttataaat

SEQ ID NO: 227282 - DNA, 13 bp, Artificial Sequence
  Oligonucleotide for detection of SNP TSC0009921
atttataaactaa

SEQ ID NO: 227283 - DNA, 13 bp, Artificial Sequence
  Oligonucleotide for detection of SNP TSC0009921
atttgttggttgg

SEQ ID NO: 227284 - DNA, 13 bp, Artificial Sequence
  Oligonucleotide for detection of SNP TSC0009921
ccaaccaacaaat

SEQ ID NO: 227285 - DNA, 13 bp, Artificial Sequence
  Oligonucleotide for detection of SNP TSC0009921
atttgtgggttgg

SEQ ID NO: 227286 - DNA, 13 bp, Artificial Sequence
  Oligonucleotide for detection of SNP TSC0009921
ccaacccacaaat

SEQ ID NO: 227287 - DNA, 13 bp, Artificial Sequence
  Oligonucleotide for detection of SNP TSC0055443
gttaaggaaggga

SEQ ID NO: 227288 - DNA, 13 bp, Artificial Sequence
  Oligonucleotide for detection of SNP TSC0055443
tcccttccttaac

SEQ ID NO: 227289 - DNA, 13 bp, Artificial Sequence
  Oligonucleotide for detection of SNP TSC0055443
gttaagaaaggga

SEQ ID NO: 227290 - DNA, 13 bp, Artificial Sequence
  Oligonucleotide for detection of SNP TSC0055443
tccctttcttaac

SEQ ID NO: 227291 - DNA, 13 bp, Artificial Sequence
  Oligonucleotide for detection of SNP TSC0055445
gggtgatggagtg

SEQ ID NO: 227292 - DNA, 13 bp, Artificial Sequence
  Oligonucleotide for detection of SNP TSC0055445
cactccatcaccc

SEQ ID NO: 227293 - DNA, 13 bp, Artificial Sequence
  Oligonucleotide for detection of SNP TSC0055445
gggtgacggagtg

SEQ ID NO: 227294 - DNA, 13 bp, Artificial Sequence
  Oligonucleotide for detection of SNP TSC0055445
cactccgtcaccc

SEQ ID NO: 227295 - DNA, 13 bp, Artificial Sequence
  Oligonucleotide for detection of SNP TSC0055447
aagtaaaatattg

SEQ ID NO: 227296 - DNA, 13 bp, Artificial Sequence
  Oligonucleotide for detection of SNP TSC0055447
caatattttactt

SEQ ID NO: 227297 - DNA, 13 bp, Artificial Sequence
  Oligonucleotide for detection of SNP TSC0055447
aagtaatatattg

SEQ ID NO: 227298 - DNA, 13 bp, Artificial Sequence
  Oligonucleotide for detection of SNP TSC0055447
caatatattactt

SEQ ID NO: 227299 - DNA, 13 bp, Artificial Sequence
  Oligonucleotide for detection of SNP TSC0055447
tagtgttttattt

SEQ ID NO: 227300 - DNA, 13 bp, Artificial Sequence
  Oligonucleotide for detection of SNP TSC0055447
aaataaaacacta

SEQ ID NO: 227301 - DNA, 13 bp, Artificial Sequence
  Oligonucleotide for detection of SNP TSC0055447
tagtgtattattt

SEQ ID NO: 227302 - DNA, 13 bp, Artificial Sequence
  Oligonucleotide for detection of SNP TSC0055447
aaataatacacta

SEQ ID NO: 227303 - DNA, 13 bp, Artificial Sequence
  Oligonucleotide for detection of SNP TSC0055448
agatttatatgty

SEQ ID NO: 227304 - DNA, 13 bp, Artificial Sequence
  Oligonucleotide for detection of SNP TSC0055448
racatataaatct

SEQ ID NO: 227305 - DNA, 13 bp, Artificial Sequence
  Oligonucleotide for detection of SNP TSC0055448
agatttttatgty

SEQ ID NO: 227306 - DNA, 13 bp, Artificial Sequence
  Oligonucleotide for detection of SNP TSC0055448
racataaaaatct

SEQ ID NO: 227307 - DNA, 13 bp, Artificial Sequence
  Oligonucleotide for detection of SNP TSC0055448
ggtatatggattt

SEQ ID NO: 227308 - DNA, 13 bp, Artificial Sequence
  Oligonucleotide for detection of SNP TSC0055448
aaatccatatacc

SEQ ID NO: 227309 - DNA, 13 bp, Artificial Sequence
  Oligonucleotide for detection of SNP TSC0055448
ggtatagggattt

SEQ ID NO: 227310 - DNA, 13 bp, Artificial Sequence
  Oligonucleotide for detection of SNP TSC0055448
aaatccctatacc

SEQ ID NO: 227311 - DNA, 13 bp, Artificial Sequence
  Oligonucleotide for detection of SNP TSC0055449
ttttttaattgaa

SEQ ID NO: 227312 - DNA, 13 bp, Artificial Sequence
  Oligonucleotide for detection of SNP TSC0055449
ttcaattaaaaaa

SEQ ID NO: 227313 - DNA, 13 bp, Artificial Sequence
  Oligonucleotide for detection of SNP TSC0055449
ttttttgattgaa

SEQ ID NO: 227314 - DNA, 13 bp, Artificial Sequence
  Oligonucleotide for detection of SNP TSC0055449
ttcaatcaaaaaa

SEQ ID NO: 227315 - DNA, 13 bp, Artificial Sequence
  Oligonucleotide for detection of SNP TSC0055449
tttttcgattgaa

SEQ ID NO: 227316 - DNA, 13 bp, Artificial Sequence
  Oligonucleotide for detection of SNP TSC0055449
ttcaatcgaaaaa

SEQ ID NO: 227317 - DNA, 13 bp, Artificial Sequence
  Oligonucleotide for detection of SNP TSC0055449
tttagttggaaaa

SEQ ID NO: 227318 - DNA, 13 bp, Artificial Sequence
  Oligonucleotide for detection of SNP TSC0055449
ttttccaactaaa

SEQ ID NO: 227319 - DNA, 13 bp, Artificial Sequence
  Oligonucleotide for detection of SNP TSC0055449
tttagtcggaaaa

SEQ ID NO: 227320 - DNA, 13 bp, Artificial Sequence
  Oligonucleotide for detection of SNP TSC0055449
ttttccgactaaa

SEQ ID NO: 227321 - DNA, 13 bp, Artificial Sequence
  Oligonucleotide for detection of SNP TSC0055452
tttgaggatgaat

SEQ ID NO: 227322 - DNA, 13 bp, Artificial Sequence
  Oligonucleotide for detection of SNP TSC0055452
attcatcctcaaa

SEQ ID NO: 227323 - DNA, 13 bp, Artificial Sequence
  Oligonucleotide for detection of SNP TSC0055452
tttgagaatgaat

SEQ ID NO: 227324 - DNA, 13 bp, Artificial Sequence
  Oligonucleotide for detection of SNP TSC0055452
attcattctcaaa

SEQ ID NO: 227325 - DNA, 13 bp, Artificial Sequence
  Oligonucleotide for detection of SNP TSC0004949
tggtttgttatay

SEQ ID NO: 227326 - DNA, 13 bp, Artificial Sequence
  Oligonucleotide for detection of SNP TSC0004949
rtataacaaacca

SEQ ID NO: 227327 - DNA, 13 bp, Artificial Sequence
  Oligonucleotide for detection of SNP TSC0004949
tggtttattatay

SEQ ID NO: 227328 - DNA, 13 bp, Artificial Sequence
  Oligonucleotide for detection of SNP TSC0004949
rtataataaacca

SEQ ID NO: 227329 - DNA, 13 bp, Artificial Sequence
  Oligonucleotide for detection of SNP TSC0004949
cggtttgttatay

SEQ ID NO: 227330 - DNA, 13 bp, Artificial Sequence
  Oligonucleotide for detection of SNP TSC0004949
rtataacaaaccg

SEQ ID NO: 227331 - DNA, 13 bp, Artificial Sequence
  Oligonucleotide for detection of SNP TSC0004949
cggtttattatay

SEQ ID NO: 227332 - DNA, 13 bp, Artificial Sequence
  Oligonucleotide for detection of SNP TSC0004949
rtataataaaccg

SEQ ID NO: 227333 - DNA, 13 bp, Artificial Sequence
  Oligonucleotide for detection of SNP TSC0055454
aatgtaagtatag

SEQ ID NO: 227334 - DNA, 13 bp, Artificial Sequence
  Oligonucleotide for detection of SNP TSC0055454
ctatacttacatt

SEQ ID NO: 227335 - DNA, 13 bp, Artificial Sequence
  Oligonucleotide for detection of SNP TSC0055454
aatgtatgtatag

SEQ ID NO: 227336 - DNA, 13 bp, Artificial Sequence
  Oligonucleotide for detection of SNP TSC0055454
ctatacatacatt

SEQ ID NO: 227337 - DNA, 13 bp, Artificial Sequence
  Oligonucleotide for detection of SNP TSC0055454
aatgtaggtatag

SEQ ID NO: 227338 - DNA, 13 bp, Artificial Sequence
  Oligonucleotide for detection of SNP TSC0055454
ctatacctacatt

SEQ ID NO: 227339 - DNA, 13 bp, Artificial Sequence
  Oligonucleotide for detection of SNP TSC0055454
aatgtacgtatag

SEQ ID NO: 227340 - DNA, 13 bp, Artificial Sequence
  Oligonucleotide for detection of SNP TSC0055454
ctatacgtacatt

SEQ ID NO: 227341 - DNA, 13 bp, Artificial Sequence
  Oligonucleotide for detection of SNP TSC0055454
ttgtgtttgtatt

SEQ ID NO: 227342 - DNA, 13 bp, Artificial Sequence
  Oligonucleotide for detection of SNP TSC0055454
aatacaaacacaa

SEQ ID NO: 227343 - DNA, 13 bp, Artificial Sequence
  Oligonucleotide for detection of SNP TSC0055454
ttgtgtgtgtatt

SEQ ID NO: 227344 - DNA, 13 bp, Artificial Sequence
  Oligonucleotide for detection of SNP TSC0055454
aatacacacacaa

SEQ ID NO: 227345 - DNA, 13 bp, Artificial Sequence
  Oligonucleotide for detection of SNP TSC0055454
ttgtgtatgtatt

SEQ ID NO: 227346 - DNA, 13 bp, Artificial Sequence
  Oligonucleotide for detection of SNP TSC0055454
aatacatacacaa

SEQ ID NO: 227347 - DNA, 13 bp, Artificial Sequence
  Oligonucleotide for detection of SNP TSC0055454
ttgtgcgtgtatt

SEQ ID NO: 227348 - DNA, 13 bp, Artificial Sequence
  Oligonucleotide for detection of SNP TSC0055454
aatacacgcacaa

SEQ ID NO: 227349 - DNA, 13 bp, Artificial Sequence
  Oligonucleotide for detection of SNP TSC0055455
aaggtaagatgtg

SEQ ID NO: 227350 - DNA, 13 bp, Artificial Sequence
  Oligonucleotide for detection of SNP TSC0055455
cacatcttacctt

SEQ ID NO: 227351 - DNA, 13 bp, Artificial Sequence
  Oligonucleotide for detection of SNP TSC0055455
aaggtatgatgtg

SEQ ID NO: 227352 - DNA, 13 bp, Artificial Sequence
  Oligonucleotide for detection of SNP TSC0055455
cacatcatacctt

SEQ ID NO: 227353 - DNA, 13 bp, Artificial Sequence
  Oligonucleotide for detection of SNP TSC0055455
aaggtaggatgtg

SEQ ID NO: 227354 - DNA, 13 bp, Artificial Sequence
  Oligonucleotide for detection of SNP TSC0055455
cacatcctacctt

SEQ ID NO: 227355 - DNA, 13 bp, Artificial Sequence
  Oligonucleotide for detection of SNP TSC0055455
aaggtacgatgtg

SEQ ID NO: 227356 - DNA, 13 bp, Artificial Sequence
  Oligonucleotide for detection of SNP TSC0055455
cacatcgtacctt

SEQ ID NO: 227357 - DNA, 13 bp, Artificial Sequence
  Oligonucleotide for detection of SNP TSC0055455
tatattttgtttt

SEQ ID NO: 227358 - DNA, 13 bp, Artificial Sequence
  Oligonucleotide for detection of SNP TSC0055455
aaaacaaaatata

SEQ ID NO: 227359 - DNA, 13 bp, Artificial Sequence
  Oligonucleotide for detection of SNP TSC0055455
tatatcgtgtttt

SEQ ID NO: 227360 - DNA, 13 bp, Artificial Sequence
  Oligonucleotide for detection of SNP TSC0055455
aaaacacgatata

SEQ ID NO: 227361 - DNA, 13 bp, Artificial Sequence
  Oligonucleotide for detection of SNP TSC0055456
taggagtgttagy

SEQ ID NO: 227362 - DNA, 13 bp, Artificial Sequence
  Oligonucleotide for detection of SNP TSC0055456
rctaacactccta

SEQ ID NO: 227363 - DNA, 13 bp, Artificial Sequence
  Oligonucleotide for detection of SNP TSC0055456
taggagggttagy

SEQ ID NO: 227364 - DNA, 13 bp, Artificial Sequence
  Oligonucleotide for detection of SNP TSC0055456
rctaaccctccta

SEQ ID NO: 227365 - DNA, 13 bp, Artificial Sequence
  Oligonucleotide for detection of SNP TSC0055456
taggagcgttagy

SEQ ID NO: 227366 - DNA, 13 bp, Artificial Sequence
  Oligonucleotide for detection of SNP TSC0055456
rctaacgctccta

SEQ ID NO: 227367 - DNA, 13 bp, Artificial Sequence
  Oligonucleotide for detection of SNP TSC0055456
gttgatgtttttg

SEQ ID NO: 227368 - DNA, 13 bp, Artificial Sequence
  Oligonucleotide for detection of SNP TSC0055456
caaaaacatcaac

SEQ ID NO: 227369 - DNA, 13 bp, Artificial Sequence
  Oligonucleotide for detection of SNP TSC0055456
gttgatatttttg

SEQ ID NO: 227370 - DNA, 13 bp, Artificial Sequence
  Oligonucleotide for detection of SNP TSC0055456
caaaaatatcaac

SEQ ID NO: 227371 - DNA, 13 bp, Artificial Sequence
  Oligonucleotide for detection of SNP TSC0055456
gttgatttttttg

SEQ ID NO: 227372 - DNA, 13 bp, Artificial Sequence
  Oligonucleotide for detection of SNP TSC0055456
caaaaaaatcaac

SEQ ID NO: 227373 - DNA, 13 bp, Artificial Sequence
  Oligonucleotide for detection of SNP TSC0055456
gttgacgtttttg

SEQ ID NO: 227374 - DNA, 13 bp, Artificial Sequence
  Oligonucleotide for detection of SNP TSC0055456
caaaaacgtcaac

SEQ ID NO: 227375 - DNA, 13 bp, Artificial Sequence
  Oligonucleotide for detection of SNP TSC0055457
tggggtgagttat

SEQ ID NO: 227376 - DNA, 13 bp, Artificial Sequence
  Oligonucleotide for detection of SNP TSC0055457
ataactcacccca

SEQ ID NO: 227377 - DNA, 13 bp, Artificial Sequence
  Oligonucleotide for detection of SNP TSC0055457
tggggtaagttat

SEQ ID NO: 227378 - DNA, 13 bp, Artificial Sequence
  Oligonucleotide for detection of SNP TSC0055457
ataacttacccca

SEQ ID NO: 227379 - DNA, 13 bp, Artificial Sequence
  Oligonucleotide for detection of SNP TSC0055458
atagttttattay

SEQ ID NO: 227380 - DNA, 13 bp, Artificial Sequence
  Oligonucleotide for detection of SNP TSC0055458
rtaataaaactat

SEQ ID NO: 227381 - DNA, 13 bp, Artificial Sequence
  Oligonucleotide for detection of SNP TSC0055458
atagttgtattay

SEQ ID NO: 227382 - DNA, 13 bp, Artificial Sequence
  Oligonucleotide for detection of SNP TSC0055458
rtaatacaactat

SEQ ID NO: 227383 - DNA, 13 bp, Artificial Sequence
  Oligonucleotide for detection of SNP TSC0055458
atagtcgtattay

SEQ ID NO: 227384 - DNA, 13 bp, Artificial Sequence
  Oligonucleotide for detection of SNP TSC0055458
rtaatacgactat

SEQ ID NO: 227385 - DNA, 13 bp, Artificial Sequence
  Oligonucleotide for detection of SNP TSC0055458
gtgatggggttat

SEQ ID NO: 227386 - DNA, 13 bp, Artificial Sequence
  Oligonucleotide for detection of SNP TSC0055458
ataaccccatcac

SEQ ID NO: 227387 - DNA, 13 bp, Artificial Sequence
  Oligonucleotide for detection of SNP TSC0055458
gtgatgtggttat

SEQ ID NO: 227388 - DNA, 13 bp, Artificial Sequence
  Oligonucleotide for detection of SNP TSC0055458
ataaccacatcac

SEQ ID NO: 227389 - DNA, 13 bp, Artificial Sequence
  Oligonucleotide for detection of SNP TSC0055458
gtgatgcggttat

SEQ ID NO: 227390 - DNA, 13 bp, Artificial Sequence
  Oligonucleotide for detection of SNP TSC0055458
ataaccgcatcac

SEQ ID NO: 227391 - DNA, 13 bp, Artificial Sequence
  Oligonucleotide for detection of SNP TSC0055459
attttaattgtgt

SEQ ID NO: 227392 - DNA, 13 bp, Artificial Sequence
  Oligonucleotide for detection of SNP TSC0055459
acacaattaaaat

SEQ ID NO: 227393 - DNA, 13 bp, Artificial Sequence
  Oligonucleotide for detection of SNP TSC0055459
attttagttgtgt

SEQ ID NO: 227394 - DNA, 13 bp, Artificial Sequence
  Oligonucleotide for detection of SNP TSC0055459
acacaactaaaat

SEQ ID NO: 227395 - DNA, 13 bp, Artificial Sequence
  Oligonucleotide for detection of SNP TSC0055460
tagatgttgaata

SEQ ID NO: 227396 - DNA, 13 bp, Artificial Sequence
  Oligonucleotide for detection of SNP TSC0055460
tattcaacatcta

SEQ ID NO: 227397 - DNA, 13 bp, Artificial Sequence
  Oligonucleotide for detection of SNP TSC0055460
tagatggtgaata

SEQ ID NO: 227398 - DNA, 13 bp, Artificial Sequence
  Oligonucleotide for detection of SNP TSC0055460
tattcaccatcta

SEQ ID NO: 227399 - DNA, 13 bp, Artificial Sequence
  Oligonucleotide for detection of SNP TSC0055460
tagatgtcgaata

SEQ ID NO: 227400 - DNA, 13 bp, Artificial Sequence
  Oligonucleotide for detection of SNP TSC0055460
tattcgacatcta

SEQ ID NO: 227401 - DNA, 13 bp, Artificial Sequence
  Oligonucleotide for detection of SNP TSC0055460
tagatggcgaata

SEQ ID NO: 227402 - DNA, 13 bp, Artificial Sequence
  Oligonucleotide for detection of SNP TSC0055460
tattcgccatcta

SEQ ID NO: 227403 - DNA, 13 bp, Artificial Sequence
  Oligonucleotide for detection of SNP TSC0055460
tgtttggtattta

SEQ ID NO: 227404 - DNA, 13 bp, Artificial Sequence
  Oligonucleotide for detection of SNP TSC0055460
taaataccaaaca

SEQ ID NO: 227405 - DNA, 13 bp, Artificial Sequence
  Oligonucleotide for detection of SNP TSC0055460
tgttcggtattta

SEQ ID NO: 227406 - DNA, 13 bp, Artificial Sequence
  Oligonucleotide for detection of SNP TSC0055460
taaataccgaaca

SEQ ID NO: 227407 - DNA, 13 bp, Artificial Sequence
  Oligonucleotide for detection of SNP TSC0055460
tgttcgttattta

SEQ ID NO: 227408 - DNA, 13 bp, Artificial Sequence
  Oligonucleotide for detection of SNP TSC0055460
taaataacgaaca

SEQ ID NO: 227409 - DNA, 13 bp, Artificial Sequence
  Oligonucleotide for detection of SNP TSC0055461
gtggtaaatgttg

SEQ ID NO: 227410 - DNA, 13 bp, Artificial Sequence
  Oligonucleotide for detection of SNP TSC0055461
caacatttaccac

SEQ ID NO: 227411 - DNA, 13 bp, Artificial Sequence
  Oligonucleotide for detection of SNP TSC0055461
gtggtagatgttg

SEQ ID NO: 227412 - DNA, 13 bp, Artificial Sequence
  Oligonucleotide for detection of SNP TSC0055461
caacatctaccac

SEQ ID NO: 227413 - DNA, 13 bp, Artificial Sequence
  Oligonucleotide for detection of SNP TSC0055461
gcggtaaatgttg

SEQ ID NO: 227414 - DNA, 13 bp, Artificial Sequence
  Oligonucleotide for detection of SNP TSC0055461
caacatttaccgc

SEQ ID NO: 227415 - DNA, 13 bp, Artificial Sequence
  Oligonucleotide for detection of SNP TSC0055461
gcggtagatgttg

SEQ ID NO: 227416 - DNA, 13 bp, Artificial Sequence
  Oligonucleotide for detection of SNP TSC0055461
caacatctaccgc

SEQ ID NO: 227417 - DNA, 13 bp, Artificial Sequence
  Oligonucleotide for detection of SNP TSC0055461
gtggtaaatgtcg

SEQ ID NO: 227418 - DNA, 13 bp, Artificial Sequence
  Oligonucleotide for detection of SNP TSC0055461
cgacatttaccac

SEQ ID NO: 227419 - DNA, 13 bp, Artificial Sequence
  Oligonucleotide for detection of SNP TSC0055461
gtggtagatgtcg

SEQ ID NO: 227420 - DNA, 13 bp, Artificial Sequence
  Oligonucleotide for detection of SNP TSC0055461
cgacatctaccac

SEQ ID NO: 227421 - DNA, 13 bp, Artificial Sequence
  Oligonucleotide for detection of SNP TSC0055461
gcggtaaatgtcg

SEQ ID NO: 227422 - DNA, 13 bp, Artificial Sequence
  Oligonucleotide for detection of SNP TSC0055461
cgacatttaccgc

SEQ ID NO: 227423 - DNA, 13 bp, Artificial Sequence
  Oligonucleotide for detection of SNP TSC0055461
gcggtagatgtcg

SEQ ID NO: 227424 - DNA, 13 bp, Artificial Sequence
  Oligonucleotide for detection of SNP TSC0055461
cgacatctaccgc

SEQ ID NO: 227425 - DNA, 13 bp, Artificial Sequence
  Oligonucleotide for detection of SNP TSC0055462
attatatggatag

SEQ ID NO: 227426 - DNA, 13 bp, Artificial Sequence
  Oligonucleotide for detection of SNP TSC0055462
ctatccatataat

SEQ ID NO: 227427 - DNA, 13 bp, Artificial Sequence
  Oligonucleotide for detection of SNP TSC0055462
attatacggatag

SEQ ID NO: 227428 - DNA, 13 bp, Artificial Sequence
  Oligonucleotide for detection of SNP TSC0055462
ctatccgtataat

SEQ ID NO: 227429 - DNA, 13 bp, Artificial Sequence
  Oligonucleotide for detection of SNP TSC0055464
aagatatggattt

SEQ ID NO: 227430 - DNA, 13 bp, Artificial Sequence
  Oligonucleotide for detection of SNP TSC0055464
aaatccatatctt

SEQ ID NO: 227431 - DNA, 13 bp, Artificial Sequence
  Oligonucleotide for detection of SNP TSC0055464
aagatacggattt

SEQ ID NO: 227432 - DNA, 13 bp, Artificial Sequence
  Oligonucleotide for detection of SNP TSC0055464
aaatccgtatctt

SEQ ID NO: 227433 - DNA, 13 bp, Artificial Sequence
  Oligonucleotide for detection of SNP TSC0055464
aaatttgtatttt

SEQ ID NO: 227434 - DNA, 13 bp, Artificial Sequence
  Oligonucleotide for detection of SNP TSC0055464
aaaatacaaattt

SEQ ID NO: 227435 - DNA, 13 bp, Artificial Sequence
  Oligonucleotide for detection of SNP TSC0055464
aaattcgtatttt

SEQ ID NO: 227436 - DNA, 13 bp, Artificial Sequence
  Oligonucleotide for detection of SNP TSC0055464
aaaatacgaattt

SEQ ID NO: 227437 - DNA, 13 bp, Artificial Sequence
  Oligonucleotide for detection of SNP TSC0055465
ttgtagttttgga

SEQ ID NO: 227438 - DNA, 13 bp, Artificial Sequence
  Oligonucleotide for detection of SNP TSC0055465
tccaaaactacaa

SEQ ID NO: 227439 - DNA, 13 bp, Artificial Sequence
  Oligonucleotide for detection of SNP TSC0055465
ttgtaggtttgga

SEQ ID NO: 227440 - DNA, 13 bp, Artificial Sequence
  Oligonucleotide for detection of SNP TSC0055465
tccaaacctacaa

SEQ ID NO: 227441 - DNA, 13 bp, Artificial Sequence
  Oligonucleotide for detection of SNP TSC0055465
tcgtagttttgga

SEQ ID NO: 227442 - DNA, 13 bp, Artificial Sequence
  Oligonucleotide for detection of SNP TSC0055465
tccaaaactacga

SEQ ID NO: 227443 - DNA, 13 bp, Artificial Sequence
  Oligonucleotide for detection of SNP TSC0055465
tcgtaggtttgga

SEQ ID NO: 227444 - DNA, 13 bp, Artificial Sequence
  Oligonucleotide for detection of SNP TSC0055465
tccaaacctacga

SEQ ID NO: 227445 - DNA, 13 bp, Artificial Sequence
  Oligonucleotide for detection of SNP TSC0055465
tttagaattgtga

SEQ ID NO: 227446 - DNA, 13 bp, Artificial Sequence
  Oligonucleotide for detection of SNP TSC0055465
tcacaattctaaa

SEQ ID NO: 227447 - DNA, 13 bp, Artificial Sequence
  Oligonucleotide for detection of SNP TSC0055465
tttagatttgtga

SEQ ID NO: 227448 - DNA, 13 bp, Artificial Sequence
  Oligonucleotide for detection of SNP TSC0055465
tcacaaatctaaa

SEQ ID NO: 227449 - DNA, 13 bp, Artificial Sequence
  Oligonucleotide for detection of SNP TSC0055465
tttagaattgcga

SEQ ID NO: 227450 - DNA, 13 bp, Artificial Sequence
  Oligonucleotide for detection of SNP TSC0055465
tcgcaattctaaa

SEQ ID NO: 227451 - DNA, 13 bp, Artificial Sequence
  Oligonucleotide for detection of SNP TSC0055465
tttagatttgcga

SEQ ID NO: 227452 - DNA, 13 bp, Artificial Sequence
  Oligonucleotide for detection of SNP TSC0055465
tcgcaaatctaaa

SEQ ID NO: 227453 - DNA, 13 bp, Artificial Sequence
  Oligonucleotide for detection of SNP TSC0055466
tatattgtaatta

SEQ ID NO: 227454 - DNA, 13 bp, Artificial Sequence
  Oligonucleotide for detection of SNP TSC0055466
taattacaatata

SEQ ID NO: 227455 - DNA, 13 bp, Artificial Sequence
  Oligonucleotide for detection of SNP TSC0055468
taagggaaattag

SEQ ID NO: 227456 - DNA, 13 bp, Artificial Sequence
  Oligonucleotide for detection of SNP TSC0055468
ctaatttccctta

SEQ ID NO: 227457 - DNA, 13 bp, Artificial Sequence
  Oligonucleotide for detection of SNP TSC0055468
taagggtaattag

SEQ ID NO: 227458 - DNA, 13 bp, Artificial Sequence
  Oligonucleotide for detection of SNP TSC0055468
ctaattaccctta

SEQ ID NO: 227459 - DNA, 13 bp, Artificial Sequence
  Oligonucleotide for detection of SNP TSC0055469
tttttatgttatg

SEQ ID NO: 227460 - DNA, 13 bp, Artificial Sequence
  Oligonucleotide for detection of SNP TSC0055469
cataacataaaaa

SEQ ID NO: 227461 - DNA, 13 bp, Artificial Sequence
  Oligonucleotide for detection of SNP TSC0055469
tttttaggttatg

SEQ ID NO: 227462 - DNA, 13 bp, Artificial Sequence
  Oligonucleotide for detection of SNP TSC0055469
cataacctaaaaa

SEQ ID NO: 227463 - DNA, 13 bp, Artificial Sequence
  Oligonucleotide for detection of SNP TSC0055469
tttttatgttacg

SEQ ID NO: 227464 - DNA, 13 bp, Artificial Sequence
  Oligonucleotide for detection of SNP TSC0055469
cgtaacataaaaa

SEQ ID NO: 227465 - DNA, 13 bp, Artificial Sequence
  Oligonucleotide for detection of SNP TSC0055469
tttttaggttacg

SEQ ID NO: 227466 - DNA, 13 bp, Artificial Sequence
  Oligonucleotide for detection of SNP TSC0055469
cgtaacctaaaaa

SEQ ID NO: 227467 - DNA, 13 bp, Artificial Sequence
  Oligonucleotide for detection of SNP TSC0055469
tgtagtataggga

SEQ ID NO: 227468 - DNA, 13 bp, Artificial Sequence
  Oligonucleotide for detection of SNP TSC0055469
tccctatactaca

SEQ ID NO: 227469 - DNA, 13 bp, Artificial Sequence
  Oligonucleotide for detection of SNP TSC0055469
tgtagtttaggga

SEQ ID NO: 227470 - DNA, 13 bp, Artificial Sequence
  Oligonucleotide for detection of SNP TSC0055469
tccctaaactaca

SEQ ID NO: 227471 - DNA, 13 bp, Artificial Sequence
  Oligonucleotide for detection of SNP TSC0055469
cgtagtataggga

SEQ ID NO: 227472 - DNA, 13 bp, Artificial Sequence
  Oligonucleotide for detection of SNP TSC0055469
tccctatactacg

SEQ ID NO: 227473 - DNA, 13 bp, Artificial Sequence
  Oligonucleotide for detection of SNP TSC0055469
cgtagtttaggga

SEQ ID NO: 227474 - DNA, 13 bp, Artificial Sequence
  Oligonucleotide for detection of SNP TSC0055469
tccctaaactacg

SEQ ID NO: 227475 - DNA, 13 bp, Artificial Sequence
  Oligonucleotide for detection of SNP TSC0055471
tttaggtgtatag

SEQ ID NO: 227476 - DNA, 13 bp, Artificial Sequence
  Oligonucleotide for detection of SNP TSC0055471
ctatacacctaaa

SEQ ID NO: 227477 - DNA, 13 bp, Artificial Sequence
  Oligonucleotide for detection of SNP TSC0055471
ttgtatatttagg

SEQ ID NO: 227478 - DNA, 13 bp, Artificial Sequence
  Oligonucleotide for detection of SNP TSC0055471
cctaaatatacaa

SEQ ID NO: 227479 - DNA, 13 bp, Artificial Sequence
  Oligonucleotide for detection of SNP TSC0055471
ttgtatttttagg

SEQ ID NO: 227480 - DNA, 13 bp, Artificial Sequence
  Oligonucleotide for detection of SNP TSC0055471
cctaaaaatacaa

SEQ ID NO: 227481 - DNA, 13 bp, Artificial Sequence
  Oligonucleotide for detection of SNP TSC0055476
gggaatgaataga

SEQ ID NO: 227482 - DNA, 13 bp, Artificial Sequence
  Oligonucleotide for detection of SNP TSC0055476
tctattcattccc

SEQ ID NO: 227483 - DNA, 13 bp, Artificial Sequence
  Oligonucleotide for detection of SNP TSC0055476
gggaataaataga

SEQ ID NO: 227484 - DNA, 13 bp, Artificial Sequence
  Oligonucleotide for detection of SNP TSC0055476
tctatttattccc

SEQ ID NO: 227485 - DNA, 13 bp, Artificial Sequence
  Oligonucleotide for detection of SNP TSC0055479
tttttttttagga

SEQ ID NO: 227486 - DNA, 13 bp, Artificial Sequence
  Oligonucleotide for detection of SNP TSC0055479
tcctaaaaaaaaa

SEQ ID NO: 227487 - DNA, 13 bp, Artificial Sequence
  Oligonucleotide for detection of SNP TSC0055479
ttttaaagggaaa

SEQ ID NO: 227488 - DNA, 13 bp, Artificial Sequence
  Oligonucleotide for detection of SNP TSC0055479
tttccctttaaaa

SEQ ID NO: 227489 - DNA, 13 bp, Artificial Sequence
  Oligonucleotide for detection of SNP TSC0055481
gaaggtattaagg

SEQ ID NO: 227490 - DNA, 13 bp, Artificial Sequence
  Oligonucleotide for detection of SNP TSC0055481
ccttaataccttc

SEQ ID NO: 227491 - DNA, 13 bp, Artificial Sequence
  Oligonucleotide for detection of SNP TSC0055481
gaaggttttaagg

SEQ ID NO: 227492 - DNA, 13 bp, Artificial Sequence
  Oligonucleotide for detection of SNP TSC0055481
ccttaaaaccttc

SEQ ID NO: 227493 - DNA, 13 bp, Artificial Sequence
  Oligonucleotide for detection of SNP TSC0055481
ttttggagtttty

SEQ ID NO: 227494 - DNA, 13 bp, Artificial Sequence
  Oligonucleotide for detection of SNP TSC0055481
raaaactccaaaa

SEQ ID NO: 227495 - DNA, 13 bp, Artificial Sequence
  Oligonucleotide for detection of SNP TSC0055483
gtgttaagtattt

SEQ ID NO: 227496 - DNA, 13 bp, Artificial Sequence
  Oligonucleotide for detection of SNP TSC0055483
aaatacttaacac

SEQ ID NO: 227497 - DNA, 13 bp, Artificial Sequence
  Oligonucleotide for detection of SNP TSC0055484
tattatgtatttg

SEQ ID NO: 227498 - DNA, 13 bp, Artificial Sequence
  Oligonucleotide for detection of SNP TSC0055484
caaatacataata

SEQ ID NO: 227499 - DNA, 13 bp, Artificial Sequence
  Oligonucleotide for detection of SNP TSC0055484
tattatatatttg

SEQ ID NO: 227500 - DNA, 13 bp, Artificial Sequence
  Oligonucleotide for detection of SNP TSC0055484
caaatatataata

SEQ ID NO: 227501 - DNA, 13 bp, Artificial Sequence
  Oligonucleotide for detection of SNP TSC0009518
aattatttatgty

SEQ ID NO: 227502 - DNA, 13 bp, Artificial Sequence
  Oligonucleotide for detection of SNP TSC0009518
racataaataatt

SEQ ID NO: 227503 - DNA, 13 bp, Artificial Sequence
  Oligonucleotide for detection of SNP TSC0009518
gatatgtgtgatt

SEQ ID NO: 227504 - DNA, 13 bp, Artificial Sequence
  Oligonucleotide for detection of SNP TSC0009518
aatcacacatatc

SEQ ID NO: 227505 - DNA, 13 bp, Artificial Sequence
  Oligonucleotide for detection of SNP TSC0009518
gatatgagtgatt

SEQ ID NO: 227506 - DNA, 13 bp, Artificial Sequence
  Oligonucleotide for detection of SNP TSC0009518
aatcactcatatc

SEQ ID NO: 227507 - DNA, 13 bp, Artificial Sequence
  Oligonucleotide for detection of SNP TSC0055485
gttggggatgggy

SEQ ID NO: 227508 - DNA, 13 bp, Artificial Sequence
  Oligonucleotide for detection of SNP TSC0055485
rcccatccccaac

SEQ ID NO: 227509 - DNA, 13 bp, Artificial Sequence
  Oligonucleotide for detection of SNP TSC0055485
gttgggaatgggy

SEQ ID NO: 227510 - DNA, 13 bp, Artificial Sequence
  Oligonucleotide for detection of SNP TSC0055485
rcccattcccaac

SEQ ID NO: 227511 - DNA, 13 bp, Artificial Sequence
  Oligonucleotide for detection of SNP TSC0010430
ttgttagaaatat

SEQ ID NO: 227512 - DNA, 13 bp, Artificial Sequence
  Oligonucleotide for detection of SNP TSC0010430
atatttctaacaa

SEQ ID NO: 227513 - DNA, 13 bp, Artificial Sequence
  Oligonucleotide for detection of SNP TSC0010430
ttgttaaaaatat

SEQ ID NO: 227514 - DNA, 13 bp, Artificial Sequence
  Oligonucleotide for detection of SNP TSC0010430
atatttttaacaa

SEQ ID NO: 227515 - DNA, 13 bp, Artificial Sequence
  Oligonucleotide for detection of SNP TSC0055486
aaattatggtaat

SEQ ID NO: 227516 - DNA, 13 bp, Artificial Sequence
  Oligonucleotide for detection of SNP TSC0055486
attaccataattt

SEQ ID NO: 227517 - DNA, 13 bp, Artificial Sequence
  Oligonucleotide for detection of SNP TSC0055486
aaattagggtaat

SEQ ID NO: 227518 - DNA, 13 bp, Artificial Sequence
  Oligonucleotide for detection of SNP TSC0055486
attaccctaattt

SEQ ID NO: 227519 - DNA, 13 bp, Artificial Sequence
  Oligonucleotide for detection of SNP TSC0055486
aaattacggtaat

SEQ ID NO: 227520 - DNA, 13 bp, Artificial Sequence
  Oligonucleotide for detection of SNP TSC0055486
attaccgtaattt

SEQ ID NO: 227521 - DNA, 13 bp, Artificial Sequence
  Oligonucleotide for detection of SNP TSC0055486
attattttgattt

SEQ ID NO: 227522 - DNA, 13 bp, Artificial Sequence
  Oligonucleotide for detection of SNP TSC0055486
aaatcaaaataat

SEQ ID NO: 227523 - DNA, 13 bp, Artificial Sequence
  Oligonucleotide for detection of SNP TSC0055486
attatcgtgattt

SEQ ID NO: 227524 - DNA, 13 bp, Artificial Sequence
  Oligonucleotide for detection of SNP TSC0055486
aaatcacgataat

SEQ ID NO: 227525 - DNA, 13 bp, Artificial Sequence
  Oligonucleotide for detection of SNP TSC0055487
atttatatagtat

SEQ ID NO: 227526 - DNA, 13 bp, Artificial Sequence
  Oligonucleotide for detection of SNP TSC0055487
atactatataaat

SEQ ID NO: 227527 - DNA, 13 bp, Artificial Sequence
  Oligonucleotide for detection of SNP TSC0055487
atttatgtagtat

SEQ ID NO: 227528 - DNA, 13 bp, Artificial Sequence
  Oligonucleotide for detection of SNP TSC0055487
atactacataaat

SEQ ID NO: 227529 - DNA, 13 bp, Artificial Sequence
  Oligonucleotide for detection of SNP TSC0055487
atttacgtagtat

SEQ ID NO: 227530 - DNA, 13 bp, Artificial Sequence
  Oligonucleotide for detection of SNP TSC0055487
atactacgtaaat

SEQ ID NO: 227531 - DNA, 13 bp, Artificial Sequence
  Oligonucleotide for detection of SNP TSC0055487
atattatgtgaat

SEQ ID NO: 227532 - DNA, 13 bp, Artificial Sequence
  Oligonucleotide for detection of SNP TSC0055487
attcacataatat

SEQ ID NO: 227533 - DNA, 13 bp, Artificial Sequence
  Oligonucleotide for detection of SNP TSC0055487
atattacgtgaat

SEQ ID NO: 227534 - DNA, 13 bp, Artificial Sequence
  Oligonucleotide for detection of SNP TSC0055487
attcacgtaatat

SEQ ID NO: 227535 - DNA, 13 bp, Artificial Sequence
  Oligonucleotide for detection of SNP TSC0055490
tatgtgttggtay

SEQ ID NO: 227536 - DNA, 13 bp, Artificial Sequence
  Oligonucleotide for detection of SNP TSC0055490
rtaccaacacata

SEQ ID NO: 227537 - DNA, 13 bp, Artificial Sequence
  Oligonucleotide for detection of SNP TSC0055490
tatgtggtggtay

SEQ ID NO: 227538 - DNA, 13 bp, Artificial Sequence
  Oligonucleotide for detection of SNP TSC0055490
rtaccaccacata

SEQ ID NO: 227539 - DNA, 13 bp, Artificial Sequence
  Oligonucleotide for detection of SNP TSC0055490
gtattaatatata

SEQ ID NO: 227540 - DNA, 13 bp, Artificial Sequence
  Oligonucleotide for detection of SNP TSC0055490
tatatattaatac

SEQ ID NO: 227541 - DNA, 13 bp, Artificial Sequence
  Oligonucleotide for detection of SNP TSC0055490
gtattattatata

SEQ ID NO: 227542 - DNA, 13 bp, Artificial Sequence
  Oligonucleotide for detection of SNP TSC0055490
tatataataatac

SEQ ID NO: 227543 - DNA, 13 bp, Artificial Sequence
  Oligonucleotide for detection of SNP TSC0055491
atttaaggaatgt

SEQ ID NO: 227544 - DNA, 13 bp, Artificial Sequence
  Oligonucleotide for detection of SNP TSC0055491
acattccttaaat

SEQ ID NO: 227545 - DNA, 13 bp, Artificial Sequence
  Oligonucleotide for detection of SNP TSC0055491
atttaaagaatgt

SEQ ID NO: 227546 - DNA, 13 bp, Artificial Sequence
  Oligonucleotide for detection of SNP TSC0055491
acattctttaaat

SEQ ID NO: 227547 - DNA, 13 bp, Artificial Sequence
  Oligonucleotide for detection of SNP TSC0055492
gttaatatgtatg

SEQ ID NO: 227548 - DNA, 13 bp, Artificial Sequence
  Oligonucleotide for detection of SNP TSC0055492
catacatattaac

SEQ ID NO: 227549 - DNA, 13 bp, Artificial Sequence
  Oligonucleotide for detection of SNP TSC0055492
gttaatttgtatg

SEQ ID NO: 227550 - DNA, 13 bp, Artificial Sequence
  Oligonucleotide for detection of SNP TSC0055492
catacaaattaac

SEQ ID NO: 227551 - DNA, 13 bp, Artificial Sequence
  Oligonucleotide for detection of SNP TSC0055492
gttaatatgtacg

SEQ ID NO: 227552 - DNA, 13 bp, Artificial Sequence
  Oligonucleotide for detection of SNP TSC0055492
cgtacatattaac

SEQ ID NO: 227553 - DNA, 13 bp, Artificial Sequence
  Oligonucleotide for detection of SNP TSC0055492
gttaatttgtacg

SEQ ID NO: 227554 - DNA, 13 bp, Artificial Sequence
  Oligonucleotide for detection of SNP TSC0055492
cgtacaaattaac

SEQ ID NO: 227555 - DNA, 13 bp, Artificial Sequence
  Oligonucleotide for detection of SNP TSC0055492
tgtatatgttagy

SEQ ID NO: 227556 - DNA, 13 bp, Artificial Sequence
  Oligonucleotide for detection of SNP TSC0055492
rctaacatataca

SEQ ID NO: 227557 - DNA, 13 bp, Artificial Sequence
  Oligonucleotide for detection of SNP TSC0055492
tgtataagttagy

SEQ ID NO: 227558 - DNA, 13 bp, Artificial Sequence
  Oligonucleotide for detection of SNP TSC0055492
rctaacttataca

SEQ ID NO: 227559 - DNA, 13 bp, Artificial Sequence
  Oligonucleotide for detection of SNP TSC0055492
cgtatatgttagy

SEQ ID NO: 227560 - DNA, 13 bp, Artificial Sequence
  Oligonucleotide for detection of SNP TSC0055492
rctaacatatacg

SEQ ID NO: 227561 - DNA, 13 bp, Artificial Sequence
  Oligonucleotide for detection of SNP TSC0055492
cgtataagttagy

SEQ ID NO: 227562 - DNA, 13 bp, Artificial Sequence
  Oligonucleotide for detection of SNP TSC0055492
rctaacttatacg

SEQ ID NO: 227563 - DNA, 13 bp, Artificial Sequence
  Oligonucleotide for detection of SNP TSC0055493
ttgagggtttttg

SEQ ID NO: 227564 - DNA, 13 bp, Artificial Sequence
  Oligonucleotide for detection of SNP TSC0055493
caaaaaccctcaa

SEQ ID NO: 227565 - DNA, 13 bp, Artificial Sequence
  Oligonucleotide for detection of SNP TSC0055493
ttgaggatttttg

SEQ ID NO: 227566 - DNA, 13 bp, Artificial Sequence
  Oligonucleotide for detection of SNP TSC0055493
caaaaatcctcaa

SEQ ID NO: 227567 - DNA, 13 bp, Artificial Sequence
  Oligonucleotide for detection of SNP TSC0055496
gatttatatggga

SEQ ID NO: 227568 - DNA, 13 bp, Artificial Sequence
  Oligonucleotide for detection of SNP TSC0055496
tcccatataaatc

SEQ ID NO: 227569 - DNA, 13 bp, Artificial Sequence
  Oligonucleotide for detection of SNP TSC0055496
gatttagatggga

SEQ ID NO: 227570 - DNA, 13 bp, Artificial Sequence
  Oligonucleotide for detection of SNP TSC0055496
tcccatctaaatc

SEQ ID NO: 227571 - DNA, 13 bp, Artificial Sequence
  Oligonucleotide for detection of SNP TSC0055496
ttttatataggty

SEQ ID NO: 227572 - DNA, 13 bp, Artificial Sequence
  Oligonucleotide for detection of SNP TSC0055496
racctatataaaa

SEQ ID NO: 227573 - DNA, 13 bp, Artificial Sequence
  Oligonucleotide for detection of SNP TSC0055496
ttttatttaggty

SEQ ID NO: 227574 - DNA, 13 bp, Artificial Sequence
  Oligonucleotide for detection of SNP TSC0055496
racctaaataaaa

SEQ ID NO: 227575 - DNA, 13 bp, Artificial Sequence
  Oligonucleotide for detection of SNP TSC0055497
agtgttagaggta

SEQ ID NO: 227576 - DNA, 13 bp, Artificial Sequence
  Oligonucleotide for detection of SNP TSC0055497
tacctctaacact

SEQ ID NO: 227577 - DNA, 13 bp, Artificial Sequence
  Oligonucleotide for detection of SNP TSC0055497
agtgttggaggta

SEQ ID NO: 227578 - DNA, 13 bp, Artificial Sequence
  Oligonucleotide for detection of SNP TSC0055497
tacctccaacact

SEQ ID NO: 227579 - DNA, 13 bp, Artificial Sequence
  Oligonucleotide for detection of SNP TSC0055497
agtgtcggaggta

SEQ ID NO: 227580 - DNA, 13 bp, Artificial Sequence
  Oligonucleotide for detection of SNP TSC0055497
tacctccgacact

SEQ ID NO: 227581 - DNA, 13 bp, Artificial Sequence
  Oligonucleotide for detection of SNP TSC0055498
aattttatggggt

SEQ ID NO: 227582 - DNA, 13 bp, Artificial Sequence
  Oligonucleotide for detection of SNP TSC0055498
accccataaaatt

SEQ ID NO: 227583 - DNA, 13 bp, Artificial Sequence
  Oligonucleotide for detection of SNP TSC0055498
aattttgtggggt

SEQ ID NO: 227584 - DNA, 13 bp, Artificial Sequence
  Oligonucleotide for detection of SNP TSC0055498
accccacaaaatt

SEQ ID NO: 227585 - DNA, 13 bp, Artificial Sequence
  Oligonucleotide for detection of SNP TSC0055498
aatttcgtggggt

SEQ ID NO: 227586 - DNA, 13 bp, Artificial Sequence
  Oligonucleotide for detection of SNP TSC0055498
accccacgaaatt

SEQ ID NO: 227587 - DNA, 13 bp, Artificial Sequence
  Oligonucleotide for detection of SNP TSC0055498
attttatgaggtt

SEQ ID NO: 227588 - DNA, 13 bp, Artificial Sequence
  Oligonucleotide for detection of SNP TSC0055498
aacctcataaaat

SEQ ID NO: 227589 - DNA, 13 bp, Artificial Sequence
  Oligonucleotide for detection of SNP TSC0055498
attttacgaggtt

SEQ ID NO: 227590 - DNA, 13 bp, Artificial Sequence
  Oligonucleotide for detection of SNP TSC0055498
aacctcgtaaaat

SEQ ID NO: 227591 - DNA, 13 bp, Artificial Sequence
  Oligonucleotide for detection of SNP TSC0055499
tagtagtagatag

SEQ ID NO: 227592 - DNA, 13 bp, Artificial Sequence
  Oligonucleotide for detection of SNP TSC0055499
ctatctactacta

SEQ ID NO: 227593 - DNA, 13 bp, Artificial Sequence
  Oligonucleotide for detection of SNP TSC0055499
tagtaggagatag

SEQ ID NO: 227594 - DNA, 13 bp, Artificial Sequence
  Oligonucleotide for detection of SNP TSC0055499
ctatctcctacta

SEQ ID NO: 227595 - DNA, 13 bp, Artificial Sequence
  Oligonucleotide for detection of SNP TSC0055500
tataagattaaay

SEQ ID NO: 227596 - DNA, 13 bp, Artificial Sequence
  Oligonucleotide for detection of SNP TSC0055500
rtttaatcttata

SEQ ID NO: 227597 - DNA, 13 bp, Artificial Sequence
  Oligonucleotide for detection of SNP TSC0055500
tataagtttaaay

SEQ ID NO: 227598 - DNA, 13 bp, Artificial Sequence
  Oligonucleotide for detection of SNP TSC0055500
rtttaaacttata

SEQ ID NO: 227599 - DNA, 13 bp, Artificial Sequence
  Oligonucleotide for detection of SNP TSC0055501
taatatattttat

SEQ ID NO: 227600 - DNA, 13 bp, Artificial Sequence
  Oligonucleotide for detection of SNP TSC0055501
ataaaatatatta

SEQ ID NO: 227601 - DNA, 13 bp, Artificial Sequence
  Oligonucleotide for detection of SNP TSC0055501
ataaagtgtgtta

SEQ ID NO: 227602 - DNA, 13 bp, Artificial Sequence
  Oligonucleotide for detection of SNP TSC0055501
taacacactttat

SEQ ID NO: 227603 - DNA, 13 bp, Artificial Sequence
  Oligonucleotide for detection of SNP TSC0055501
ataaagagtgtta

SEQ ID NO: 227604 - DNA, 13 bp, Artificial Sequence
  Oligonucleotide for detection of SNP TSC0055501
taacactctttat

SEQ ID NO: 227605 - DNA, 13 bp, Artificial Sequence
  Oligonucleotide for detection of SNP TSC0055502
aagtgtaatgtaa

SEQ ID NO: 227606 - DNA, 13 bp, Artificial Sequence
  Oligonucleotide for detection of SNP TSC0055502
ttacattacactt

SEQ ID NO: 227607 - DNA, 13 bp, Artificial Sequence
  Oligonucleotide for detection of SNP TSC0055502
aagtgtgatgtaa

SEQ ID NO: 227608 - DNA, 13 bp, Artificial Sequence
  Oligonucleotide for detection of SNP TSC0055502
ttacatcacactt

SEQ ID NO: 227609 - DNA, 13 bp, Artificial Sequence
  Oligonucleotide for detection of SNP TSC0055502
aagcgtaatgtaa

SEQ ID NO: 227610 - DNA, 13 bp, Artificial Sequence
  Oligonucleotide for detection of SNP TSC0055502
ttacattacgctt

SEQ ID NO: 227611 - DNA, 13 bp, Artificial Sequence
  Oligonucleotide for detection of SNP TSC0055502
aagcgtgatgtaa

SEQ ID NO: 227612 - DNA, 13 bp, Artificial Sequence
  Oligonucleotide for detection of SNP TSC0055502
ttacatcacgctt

SEQ ID NO: 227613 - DNA, 13 bp, Artificial Sequence
  Oligonucleotide for detection of SNP TSC0055502
aagtgcgatgtaa

SEQ ID NO: 227614 - DNA, 13 bp, Artificial Sequence
  Oligonucleotide for detection of SNP TSC0055502
ttacatcgcactt

SEQ ID NO: 227615 - DNA, 13 bp, Artificial Sequence
  Oligonucleotide for detection of SNP TSC0055502
aagcgcgatgtaa

SEQ ID NO: 227616 - DNA, 13 bp, Artificial Sequence
  Oligonucleotide for detection of SNP TSC0055502
ttacatcgcgctt

SEQ ID NO: 227617 - DNA, 13 bp, Artificial Sequence
  Oligonucleotide for detection of SNP TSC0055502
ttatattgcgttt

SEQ ID NO: 227618 - DNA, 13 bp, Artificial Sequence
  Oligonucleotide for detection of SNP TSC0055502
aaacgcaatataa

SEQ ID NO: 227619 - DNA, 13 bp, Artificial Sequence
  Oligonucleotide for detection of SNP TSC0055502
ttatatcgcgttt

SEQ ID NO: 227620 - DNA, 13 bp, Artificial Sequence
  Oligonucleotide for detection of SNP TSC0055502
aaacgcgatataa

SEQ ID NO: 227621 - DNA, 13 bp, Artificial Sequence
  Oligonucleotide for detection of SNP TSC0055503
tttaaaatatttt

SEQ ID NO: 227622 - DNA, 13 bp, Artificial Sequence
  Oligonucleotide for detection of SNP TSC0055503
aaaatattttaaa

SEQ ID NO: 227623 - DNA, 13 bp, Artificial Sequence
  Oligonucleotide for detection of SNP TSC0055504
tttaatgtttaty

SEQ ID NO: 227624 - DNA, 13 bp, Artificial Sequence
  Oligonucleotide for detection of SNP TSC0055504
rataaacattaaa

SEQ ID NO: 227625 - DNA, 13 bp, Artificial Sequence
  Oligonucleotide for detection of SNP TSC0055504
tttaatatttaty

SEQ ID NO: 227626 - DNA, 13 bp, Artificial Sequence
  Oligonucleotide for detection of SNP TSC0055504
rataaatattaaa

SEQ ID NO: 227627 - DNA, 13 bp, Artificial Sequence
  Oligonucleotide for detection of SNP TSC0005989
tttgattaaattt

SEQ ID NO: 227628 - DNA, 13 bp, Artificial Sequence
  Oligonucleotide for detection of SNP TSC0005989
aaatttaatcaaa

SEQ ID NO: 227629 - DNA, 13 bp, Artificial Sequence
  Oligonucleotide for detection of SNP TSC0005989
tttgatgaaattt

SEQ ID NO: 227630 - DNA, 13 bp, Artificial Sequence
  Oligonucleotide for detection of SNP TSC0005989
aaatttcatcaaa

SEQ ID NO: 227631 - DNA, 13 bp, Artificial Sequence
  Oligonucleotide for detection of SNP TSC0005989
agatttaattaag

SEQ ID NO: 227632 - DNA, 13 bp, Artificial Sequence
  Oligonucleotide for detection of SNP TSC0005989
cttaattaaatct

SEQ ID NO: 227633 - DNA, 13 bp, Artificial Sequence
  Oligonucleotide for detection of SNP TSC0005989
agattttattaag

SEQ ID NO: 227634 - DNA, 13 bp, Artificial Sequence
  Oligonucleotide for detection of SNP TSC0005989
cttaataaaatct

SEQ ID NO: 227635 - DNA, 13 bp, Artificial Sequence
  Oligonucleotide for detection of SNP TSC0055505
attagagtaatty

SEQ ID NO: 227636 - DNA, 13 bp, Artificial Sequence
  Oligonucleotide for detection of SNP TSC0055505
raattactctaat

SEQ ID NO: 227637 - DNA, 13 bp, Artificial Sequence
  Oligonucleotide for detection of SNP TSC0055505
attagaataatty

SEQ ID NO: 227638 - DNA, 13 bp, Artificial Sequence
  Oligonucleotide for detection of SNP TSC0055505
raattattctaat

SEQ ID NO: 227639 - DNA, 13 bp, Artificial Sequence
  Oligonucleotide for detection of SNP TSC0055506
ttttatattttay

SEQ ID NO: 227640 - DNA, 13 bp, Artificial Sequence
  Oligonucleotide for detection of SNP TSC0055506
rtaaaatataaaa

SEQ ID NO: 227641 - DNA, 13 bp, Artificial Sequence
  Oligonucleotide for detection of SNP TSC0055506
gtggaatgtaggg

SEQ ID NO: 227642 - DNA, 13 bp, Artificial Sequence
  Oligonucleotide for detection of SNP TSC0055506
ccctacattccac

SEQ ID NO: 227643 - DNA, 13 bp, Artificial Sequence
  Oligonucleotide for detection of SNP TSC0055506
gtggaaagtaggg

SEQ ID NO: 227644 - DNA, 13 bp, Artificial Sequence
  Oligonucleotide for detection of SNP TSC0055506
ccctactttccac

SEQ ID NO: 227645 - DNA, 13 bp, Artificial Sequence
  Oligonucleotide for detection of SNP TSC0055514
ttttatgtaaata

SEQ ID NO: 227646 - DNA, 13 bp, Artificial Sequence
  Oligonucleotide for detection of SNP TSC0055514
tatttacataaaa

SEQ ID NO: 227647 - DNA, 13 bp, Artificial Sequence
  Oligonucleotide for detection of SNP TSC0055515
tggaaaaataaaa

SEQ ID NO: 227648 - DNA, 13 bp, Artificial Sequence
  Oligonucleotide for detection of SNP TSC0055515
ttttatttttcca

SEQ ID NO: 227649 - DNA, 13 bp, Artificial Sequence
  Oligonucleotide for detection of SNP TSC0055515
tggaaatataaaa

SEQ ID NO: 227650 - DNA, 13 bp, Artificial Sequence
  Oligonucleotide for detection of SNP TSC0055515
ttttatatttcca

SEQ ID NO: 227651 - DNA, 13 bp, Artificial Sequence
  Oligonucleotide for detection of SNP TSC0055517
gatgagtgggtta

SEQ ID NO: 227652 - DNA, 13 bp, Artificial Sequence
  Oligonucleotide for detection of SNP TSC0055517
taacccactcatc

SEQ ID NO: 227653 - DNA, 13 bp, Artificial Sequence
  Oligonucleotide for detection of SNP TSC0055517
gatgagggggtta

SEQ ID NO: 227654 - DNA, 13 bp, Artificial Sequence
  Oligonucleotide for detection of SNP TSC0055517
taaccccctcatc

SEQ ID NO: 227655 - DNA, 13 bp, Artificial Sequence
  Oligonucleotide for detection of SNP TSC0055518
ttatatatgtggg

SEQ ID NO: 227656 - DNA, 13 bp, Artificial Sequence
  Oligonucleotide for detection of SNP TSC0055518
cccacatatataa

SEQ ID NO: 227657 - DNA, 13 bp, Artificial Sequence
  Oligonucleotide for detection of SNP TSC0055518
ttatatttgtggg

SEQ ID NO: 227658 - DNA, 13 bp, Artificial Sequence
  Oligonucleotide for detection of SNP TSC0055518
cccacaaatataa

SEQ ID NO: 227659 - DNA, 13 bp, Artificial Sequence
  Oligonucleotide for detection of SNP TSC0055518
ttatatacgtggg

SEQ ID NO: 227660 - DNA, 13 bp, Artificial Sequence
  Oligonucleotide for detection of SNP TSC0055518
cccacgtatataa

SEQ ID NO: 227661 - DNA, 13 bp, Artificial Sequence
  Oligonucleotide for detection of SNP TSC0055518
ttatattcgtggg

SEQ ID NO: 227662 - DNA, 13 bp, Artificial Sequence
  Oligonucleotide for detection of SNP TSC0055518
cccacgaatataa

SEQ ID NO: 227663 - DNA, 13 bp, Artificial Sequence
  Oligonucleotide for detection of SNP TSC0055518
tttatgtgtgtgg

SEQ ID NO: 227664 - DNA, 13 bp, Artificial Sequence
  Oligonucleotide for detection of SNP TSC0055518
ccacacacataaa

SEQ ID NO: 227665 - DNA, 13 bp, Artificial Sequence
  Oligonucleotide for detection of SNP TSC0055518
tttatgggtgtgg

SEQ ID NO: 227666 - DNA, 13 bp, Artificial Sequence
  Oligonucleotide for detection of SNP TSC0055518
ccacacccataaa

SEQ ID NO: 227667 - DNA, 13 bp, Artificial Sequence
  Oligonucleotide for detection of SNP TSC0055518
tttacgtgtgtgg

SEQ ID NO: 227668 - DNA, 13 bp, Artificial Sequence
  Oligonucleotide for detection of SNP TSC0055518
ccacacacgtaaa

SEQ ID NO: 227669 - DNA, 13 bp, Artificial Sequence
  Oligonucleotide for detection of SNP TSC0055518
tttacgggtgtgg

SEQ ID NO: 227670 - DNA, 13 bp, Artificial Sequence
  Oligonucleotide for detection of SNP TSC0055518
ccacacccgtaaa

SEQ ID NO: 227671 - DNA, 13 bp, Artificial Sequence
  Oligonucleotide for detection of SNP TSC0055519
tttcgagttttag

SEQ ID NO: 227672 - DNA, 13 bp, Artificial Sequence
  Oligonucleotide for detection of SNP TSC0055519
ctaaaactcgaaa

SEQ ID NO: 227673 - DNA, 13 bp, Artificial Sequence
  Oligonucleotide for detection of SNP TSC0055519
tttcgaattttag

SEQ ID NO: 227674 - DNA, 13 bp, Artificial Sequence
  Oligonucleotide for detection of SNP TSC0055519
ctaaaattcgaaa

SEQ ID NO: 227675 - DNA, 13 bp, Artificial Sequence
  Oligonucleotide for detection of SNP TSC0055520
gaggtgaaggtta

SEQ ID NO: 227676 - DNA, 13 bp, Artificial Sequence
  Oligonucleotide for detection of SNP TSC0055520
taaccttcacctc

SEQ ID NO: 227677 - DNA, 13 bp, Artificial Sequence
  Oligonucleotide for detection of SNP TSC0055520
gaggtggaggtta

SEQ ID NO: 227678 - DNA, 13 bp, Artificial Sequence
  Oligonucleotide for detection of SNP TSC0055520
taacctccacctc

SEQ ID NO: 227679 - DNA, 13 bp, Artificial Sequence
  Oligonucleotide for detection of SNP TSC0055520
gaggcgaaggtta

SEQ ID NO: 227680 - DNA, 13 bp, Artificial Sequence
  Oligonucleotide for detection of SNP TSC0055520
taaccttcgcctc

SEQ ID NO: 227681 - DNA, 13 bp, Artificial Sequence
  Oligonucleotide for detection of SNP TSC0055520
gaggcggaggtta

SEQ ID NO: 227682 - DNA, 13 bp, Artificial Sequence
  Oligonucleotide for detection of SNP TSC0055520
taacctccgcctc

SEQ ID NO: 227683 - DNA, 13 bp, Artificial Sequence
  Oligonucleotide for detection of SNP TSC0055521
tattgatttaaag

SEQ ID NO: 227684 - DNA, 13 bp, Artificial Sequence
  Oligonucleotide for detection of SNP TSC0055521
ctttaaatcaata

SEQ ID NO: 227685 - DNA, 13 bp, Artificial Sequence
  Oligonucleotide for detection of SNP TSC0055521
tattgagttaaag

SEQ ID NO: 227686 - DNA, 13 bp, Artificial Sequence
  Oligonucleotide for detection of SNP TSC0055521
ctttaactcaata

SEQ ID NO: 227687 - DNA, 13 bp, Artificial Sequence
  Oligonucleotide for detection of SNP TSC0055521
tatcgatttaaag

SEQ ID NO: 227688 - DNA, 13 bp, Artificial Sequence
  Oligonucleotide for detection of SNP TSC0055521
ctttaaatcgata

SEQ ID NO: 227689 - DNA, 13 bp, Artificial Sequence
  Oligonucleotide for detection of SNP TSC0055521
tatcgagttaaag

SEQ ID NO: 227690 - DNA, 13 bp, Artificial Sequence
  Oligonucleotide for detection of SNP TSC0055521
ctttaactcgata

SEQ ID NO: 227691 - DNA, 13 bp, Artificial Sequence
  Oligonucleotide for detection of SNP TSC0055521
ttttggtttggtg

SEQ ID NO: 227692 - DNA, 13 bp, Artificial Sequence
  Oligonucleotide for detection of SNP TSC0055521
caccaaaccaaaa

SEQ ID NO: 227693 - DNA, 13 bp, Artificial Sequence
  Oligonucleotide for detection of SNP TSC0055521
ttttggatcggtg

SEQ ID NO: 227694 - DNA, 13 bp, Artificial Sequence
  Oligonucleotide for detection of SNP TSC0055521
caccgatccaaaa

SEQ ID NO: 227695 - DNA, 13 bp, Artificial Sequence
  Oligonucleotide for detection of SNP TSC0055521
ttttggttcggtg

SEQ ID NO: 227696 - DNA, 13 bp, Artificial Sequence
  Oligonucleotide for detection of SNP TSC0055521
caccgaaccaaaa

SEQ ID NO: 227697 - DNA, 13 bp, Artificial Sequence
  Oligonucleotide for detection of SNP TSC0008113
attatttaaatag

SEQ ID NO: 227698 - DNA, 13 bp, Artificial Sequence
  Oligonucleotide for detection of SNP TSC0008113
ctatttaaataat

SEQ ID NO: 227699 - DNA, 13 bp, Artificial Sequence
  Oligonucleotide for detection of SNP TSC0008113
attattgaaatag

SEQ ID NO: 227700 - DNA, 13 bp, Artificial Sequence
  Oligonucleotide for detection of SNP TSC0008113
ctatttcaataat

SEQ ID NO: 227701 - DNA, 13 bp, Artificial Sequence
  Oligonucleotide for detection of SNP TSC0008113
attatcgaaatag

SEQ ID NO: 227702 - DNA, 13 bp, Artificial Sequence
  Oligonucleotide for detection of SNP TSC0008113
ctatttcgataat

SEQ ID NO: 227703 - DNA, 13 bp, Artificial Sequence
  Oligonucleotide for detection of SNP TSC0008113
ttatttgggtgat

SEQ ID NO: 227704 - DNA, 13 bp, Artificial Sequence
  Oligonucleotide for detection of SNP TSC0008113
atcacccaaataa

SEQ ID NO: 227705 - DNA, 13 bp, Artificial Sequence
  Oligonucleotide for detection of SNP TSC0008113
ttattttggtgat

SEQ ID NO: 227706 - DNA, 13 bp, Artificial Sequence
  Oligonucleotide for detection of SNP TSC0008113
atcaccaaaataa

SEQ ID NO: 227707 - DNA, 13 bp, Artificial Sequence
  Oligonucleotide for detection of SNP TSC0008113
ttatttcggtgat

SEQ ID NO: 227708 - DNA, 13 bp, Artificial Sequence
  Oligonucleotide for detection of SNP TSC0008113
atcaccgaaataa

SEQ ID NO: 227709 - DNA, 13 bp, Artificial Sequence
  Oligonucleotide for detection of SNP TSC0008114
ttgtataaaatty

SEQ ID NO: 227710 - DNA, 13 bp, Artificial Sequence
  Oligonucleotide for detection of SNP TSC0008114
raattttatacaa

SEQ ID NO: 227711 - DNA, 13 bp, Artificial Sequence
  Oligonucleotide for detection of SNP TSC0008114
ttgtattaaatty

SEQ ID NO: 227712 - DNA, 13 bp, Artificial Sequence
  Oligonucleotide for detection of SNP TSC0008114
raatttaatacaa

SEQ ID NO: 227713 - DNA, 13 bp, Artificial Sequence
  Oligonucleotide for detection of SNP TSC0008114
gaattttgtgtaa

SEQ ID NO: 227714 - DNA, 13 bp, Artificial Sequence
  Oligonucleotide for detection of SNP TSC0008114
ttacacaaaattc

SEQ ID NO: 227715 - DNA, 13 bp, Artificial Sequence
  Oligonucleotide for detection of SNP TSC0008114
gaatttggtgtaa

SEQ ID NO: 227716 - DNA, 13 bp, Artificial Sequence
  Oligonucleotide for detection of SNP TSC0008114
ttacaccaaattc

SEQ ID NO: 227717 - DNA, 13 bp, Artificial Sequence
  Oligonucleotide for detection of SNP TSC0004765
attttaaaaaatg

SEQ ID NO: 227718 - DNA, 13 bp, Artificial Sequence
  Oligonucleotide for detection of SNP TSC0004765
cattttttaaaat

SEQ ID NO: 227719 - DNA, 13 bp, Artificial Sequence
  Oligonucleotide for detection of SNP TSC0004765
attttataaaatg

SEQ ID NO: 227720 - DNA, 13 bp, Artificial Sequence
  Oligonucleotide for detection of SNP TSC0004765
cattttataaaat

SEQ ID NO: 227721 - DNA, 13 bp, Artificial Sequence
  Oligonucleotide for detection of SNP TSC0010641
aatagggattata

SEQ ID NO: 227722 - DNA, 13 bp, Artificial Sequence
  Oligonucleotide for detection of SNP TSC0010641
tataatccctatt

SEQ ID NO: 227723 - DNA, 13 bp, Artificial Sequence
  Oligonucleotide for detection of SNP TSC0055533
tgggagtgggaat

SEQ ID NO: 227724 - DNA, 13 bp, Artificial Sequence
  Oligonucleotide for detection of SNP TSC0055533
attcccactccca

SEQ ID NO: 227725 - DNA, 13 bp, Artificial Sequence
  Oligonucleotide for detection of SNP TSC0055533
tgggagcgggaat

SEQ ID NO: 227726 - DNA, 13 bp, Artificial Sequence
  Oligonucleotide for detection of SNP TSC0055533
attcccgctccca

SEQ ID NO: 227727 - DNA, 13 bp, Artificial Sequence
  Oligonucleotide for detection of SNP TSC0055534
ttaagtatgtttt

SEQ ID NO: 227728 - DNA, 13 bp, Artificial Sequence
  Oligonucleotide for detection of SNP TSC0055534
aaaacatacttaa

SEQ ID NO: 227729 - DNA, 13 bp, Artificial Sequence
  Oligonucleotide for detection of SNP TSC0055534
ttaagtttgtttt

SEQ ID NO: 227730 - DNA, 13 bp, Artificial Sequence
  Oligonucleotide for detection of SNP TSC0055534
aaaacaaacttaa

SEQ ID NO: 227731 - DNA, 13 bp, Artificial Sequence
  Oligonucleotide for detection of SNP TSC0055534
agggtatgtttga

SEQ ID NO: 227732 - DNA, 13 bp, Artificial Sequence
  Oligonucleotide for detection of SNP TSC0055534
tcaaacataccct

SEQ ID NO: 227733 - DNA, 13 bp, Artificial Sequence
  Oligonucleotide for detection of SNP TSC0055534
agggtaggtttga

SEQ ID NO: 227734 - DNA, 13 bp, Artificial Sequence
  Oligonucleotide for detection of SNP TSC0055534
tcaaacctaccct

SEQ ID NO: 227735 - DNA, 13 bp, Artificial Sequence
  Oligonucleotide for detection of SNP TSC0005372
ttaataaatattt

SEQ ID NO: 227736 - DNA, 13 bp, Artificial Sequence
  Oligonucleotide for detection of SNP TSC0005372
aaatatttattaa

SEQ ID NO: 227737 - DNA, 13 bp, Artificial Sequence
  Oligonucleotide for detection of SNP TSC0005372
ttaatagatattt

SEQ ID NO: 227738 - DNA, 13 bp, Artificial Sequence
  Oligonucleotide for detection of SNP TSC0005372
aaatatctattaa

SEQ ID NO: 227739 - DNA, 13 bp, Artificial Sequence
  Oligonucleotide for detection of SNP TSC0055542
gtttttggatttt

SEQ ID NO: 227740 - DNA, 13 bp, Artificial Sequence
  Oligonucleotide for detection of SNP TSC0055542
aaaatccaaaaac

SEQ ID NO: 227741 - DNA, 13 bp, Artificial Sequence
  Oligonucleotide for detection of SNP TSC0055542
aagattaaggagy

SEQ ID NO: 227742 - DNA, 13 bp, Artificial Sequence
  Oligonucleotide for detection of SNP TSC0055542
rctccttaatctt

SEQ ID NO: 227743 - DNA, 13 bp, Artificial Sequence
  Oligonucleotide for detection of SNP TSC0055542
aagatttaggagy

SEQ ID NO: 227744 - DNA, 13 bp, Artificial Sequence
  Oligonucleotide for detection of SNP TSC0055542
rctcctaaatctt

SEQ ID NO: 227745 - DNA, 13 bp, Artificial Sequence
  Oligonucleotide for detection of SNP TSC0055543
ttttgaatttagy

SEQ ID NO: 227746 - DNA, 13 bp, Artificial Sequence
  Oligonucleotide for detection of SNP TSC0055543
rctaaattcaaaa

SEQ ID NO: 227747 - DNA, 13 bp, Artificial Sequence
  Oligonucleotide for detection of SNP TSC0055543
ttttgagtttagy

SEQ ID NO: 227748 - DNA, 13 bp, Artificial Sequence
  Oligonucleotide for detection of SNP TSC0055543
rctaaactcaaaa

SEQ ID NO: 227749 - DNA, 13 bp, Artificial Sequence
  Oligonucleotide for detection of SNP TSC0010825
atttttaaaattg

SEQ ID NO: 227750 - DNA, 13 bp, Artificial Sequence
  Oligonucleotide for detection of SNP TSC0010825
caattttaaaaat

SEQ ID NO: 227751 - DNA, 13 bp, Artificial Sequence
  Oligonucleotide for detection of SNP TSC0010825
atttttgaaattg

SEQ ID NO: 227752 - DNA, 13 bp, Artificial Sequence
  Oligonucleotide for detection of SNP TSC0010825
caatttcaaaaat

SEQ ID NO: 227753 - DNA, 13 bp, Artificial Sequence
  Oligonucleotide for detection of SNP TSC0010825
attttcgaaattg

SEQ ID NO: 227754 - DNA, 13 bp, Artificial Sequence
  Oligonucleotide for detection of SNP TSC0010825
caatttcgaaaat

SEQ ID NO: 227755 - DNA, 13 bp, Artificial Sequence
  Oligonucleotide for detection of SNP TSC0010825
tagttttggaagt

SEQ ID NO: 227756 - DNA, 13 bp, Artificial Sequence
  Oligonucleotide for detection of SNP TSC0010825
acttccaaaacta

SEQ ID NO: 227757 - DNA, 13 bp, Artificial Sequence
  Oligonucleotide for detection of SNP TSC0010825
tagtttcggaagt

SEQ ID NO: 227758 - DNA, 13 bp, Artificial Sequence
  Oligonucleotide for detection of SNP TSC0010825
acttccgaaacta

SEQ ID NO: 227759 - DNA, 13 bp, Artificial Sequence
  Oligonucleotide for detection of SNP TSC0009902
ttttagtgtatta

SEQ ID NO: 227760 - DNA, 13 bp, Artificial Sequence
  Oligonucleotide for detection of SNP TSC0009902
taatacactaaaa

SEQ ID NO: 227761 - DNA, 13 bp, Artificial Sequence
  Oligonucleotide for detection of SNP TSC0009902
ttttagcgtatta

SEQ ID NO: 227762 - DNA, 13 bp, Artificial Sequence
  Oligonucleotide for detection of SNP TSC0009902
taatacgctaaaa

SEQ ID NO: 227763 - DNA, 13 bp, Artificial Sequence
  Oligonucleotide for detection of SNP TSC0009902
tagtgtgttaggg

SEQ ID NO: 227764 - DNA, 13 bp, Artificial Sequence
  Oligonucleotide for detection of SNP TSC0009902
ccctaacacacta

SEQ ID NO: 227765 - DNA, 13 bp, Artificial Sequence
  Oligonucleotide for detection of SNP TSC0009902
tagtgtattaggg

SEQ ID NO: 227766 - DNA, 13 bp, Artificial Sequence
  Oligonucleotide for detection of SNP TSC0009902
ccctaatacacta

SEQ ID NO: 227767 - DNA, 13 bp, Artificial Sequence
  Oligonucleotide for detection of SNP TSC0009902
tagtgcgttaggg

SEQ ID NO: 227768 - DNA, 13 bp, Artificial Sequence
  Oligonucleotide for detection of SNP TSC0009902
ccctaacgcacta

SEQ ID NO: 227769 - DNA, 13 bp, Artificial Sequence
  Oligonucleotide for detection of SNP TSC0055545
aatattttttaay

SEQ ID NO: 227770 - DNA, 13 bp, Artificial Sequence
  Oligonucleotide for detection of SNP TSC0055545
rttaaaaaatatt

SEQ ID NO: 227771 - DNA, 13 bp, Artificial Sequence
  Oligonucleotide for detection of SNP TSC0055545
aatattgtttaay

SEQ ID NO: 227772 - DNA, 13 bp, Artificial Sequence
  Oligonucleotide for detection of SNP TSC0055545
rttaaacaatatt

SEQ ID NO: 227773 - DNA, 13 bp, Artificial Sequence
  Oligonucleotide for detection of SNP TSC0055545
gttggaaaatgtt

SEQ ID NO: 227774 - DNA, 13 bp, Artificial Sequence
  Oligonucleotide for detection of SNP TSC0055545
aacattttccaac

SEQ ID NO: 227775 - DNA, 13 bp, Artificial Sequence
  Oligonucleotide for detection of SNP TSC0055545
gttggataatgtt

SEQ ID NO: 227776 - DNA, 13 bp, Artificial Sequence
  Oligonucleotide for detection of SNP TSC0055545
aacattatccaac

SEQ ID NO: 227777 - DNA, 13 bp, Artificial Sequence
  Oligonucleotide for detection of SNP TSC0055546
tgtagatgttaga

SEQ ID NO: 227778 - DNA, 13 bp, Artificial Sequence
  Oligonucleotide for detection of SNP TSC0055546
tctaacatctaca

SEQ ID NO: 227779 - DNA, 13 bp, Artificial Sequence
  Oligonucleotide for detection of SNP TSC0055546
tgtagacgttaga

SEQ ID NO: 227780 - DNA, 13 bp, Artificial Sequence
  Oligonucleotide for detection of SNP TSC0055546
tctaacgtctaca

SEQ ID NO: 227781 - DNA, 13 bp, Artificial Sequence
  Oligonucleotide for detection of SNP TSC0055548
tgatataatgaat

SEQ ID NO: 227782 - DNA, 13 bp, Artificial Sequence
  Oligonucleotide for detection of SNP TSC0055548
attcattatatca

SEQ ID NO: 227783 - DNA, 13 bp, Artificial Sequence
  Oligonucleotide for detection of SNP TSC0055548
tgatatgatgaat

SEQ ID NO: 227784 - DNA, 13 bp, Artificial Sequence
  Oligonucleotide for detection of SNP TSC0055548
attcatcatatca

SEQ ID NO: 227785 - DNA, 13 bp, Artificial Sequence
  Oligonucleotide for detection of SNP TSC0055549
tatgtttaaagay

SEQ ID NO: 227786 - DNA, 13 bp, Artificial Sequence
  Oligonucleotide for detection of SNP TSC0055549
rtctttaaacata

SEQ ID NO: 227787 - DNA, 13 bp, Artificial Sequence
  Oligonucleotide for detection of SNP TSC0055549
tatgttgaaagay

SEQ ID NO: 227788 - DNA, 13 bp, Artificial Sequence
  Oligonucleotide for detection of SNP TSC0055549
rtctttcaacata

SEQ ID NO: 227789 - DNA, 13 bp, Artificial Sequence
  Oligonucleotide for detection of SNP TSC0055549
tatgtcgaaagay

SEQ ID NO: 227790 - DNA, 13 bp, Artificial Sequence
  Oligonucleotide for detection of SNP TSC0055549
rtctttcgacata

SEQ ID NO: 227791 - DNA, 13 bp, Artificial Sequence
  Oligonucleotide for detection of SNP TSC0055549
gttttttgatatg

SEQ ID NO: 227792 - DNA, 13 bp, Artificial Sequence
  Oligonucleotide for detection of SNP TSC0055549
catatcaaaaaac

SEQ ID NO: 227793 - DNA, 13 bp, Artificial Sequence
  Oligonucleotide for detection of SNP TSC0055549
gtttttcgatatg

SEQ ID NO: 227794 - DNA, 13 bp, Artificial Sequence
  Oligonucleotide for detection of SNP TSC0055549
catatcgaaaaac

SEQ ID NO: 227795 - DNA, 13 bp, Artificial Sequence
  Oligonucleotide for detection of SNP TSC0055550
gtgttaattgaaa

SEQ ID NO: 227796 - DNA, 13 bp, Artificial Sequence
  Oligonucleotide for detection of SNP TSC0055550
tttcaattaacac

SEQ ID NO: 227797 - DNA, 13 bp, Artificial Sequence
  Oligonucleotide for detection of SNP TSC0055550
gtgttagttgaaa

SEQ ID NO: 227798 - DNA, 13 bp, Artificial Sequence
  Oligonucleotide for detection of SNP TSC0055550
tttcaactaacac

SEQ ID NO: 227799 - DNA, 13 bp, Artificial Sequence
  Oligonucleotide for detection of SNP TSC0055551
aaatgaattattt

SEQ ID NO: 227800 - DNA, 13 bp, Artificial Sequence
  Oligonucleotide for detection of SNP TSC0055551
aaataattcattt

SEQ ID NO: 227801 - DNA, 13 bp, Artificial Sequence
  Oligonucleotide for detection of SNP TSC0055551
aaatgagttattt

SEQ ID NO: 227802 - DNA, 13 bp, Artificial Sequence
  Oligonucleotide for detection of SNP TSC0055551
aaataactcattt

SEQ ID NO: 227803 - DNA, 13 bp, Artificial Sequence
  Oligonucleotide for detection of SNP TSC0055552
tttggtatgttay

SEQ ID NO: 227804 - DNA, 13 bp, Artificial Sequence
  Oligonucleotide for detection of SNP TSC0055552
rtaacataccaaa

SEQ ID NO: 227805 - DNA, 13 bp, Artificial Sequence
  Oligonucleotide for detection of SNP TSC0055552
tttggtgtgttay

SEQ ID NO: 227806 - DNA, 13 bp, Artificial Sequence
  Oligonucleotide for detection of SNP TSC0055552
rtaacacaccaaa

SEQ ID NO: 227807 - DNA, 13 bp, Artificial Sequence
  Oligonucleotide for detection of SNP TSC0055552
tttggcgtgttay

SEQ ID NO: 227808 - DNA, 13 bp, Artificial Sequence
  Oligonucleotide for detection of SNP TSC0055552
rtaacacgccaaa

SEQ ID NO: 227809 - DNA, 13 bp, Artificial Sequence
  Oligonucleotide for detection of SNP TSC0055552
gtgatatgttagg

SEQ ID NO: 227810 - DNA, 13 bp, Artificial Sequence
  Oligonucleotide for detection of SNP TSC0055552
cctaacatatcac

SEQ ID NO: 227811 - DNA, 13 bp, Artificial Sequence
  Oligonucleotide for detection of SNP TSC0055552
gtgatacgttagg

SEQ ID NO: 227812 - DNA, 13 bp, Artificial Sequence
  Oligonucleotide for detection of SNP TSC0055552
cctaacgtatcac

SEQ ID NO: 227813 - DNA, 13 bp, Artificial Sequence
  Oligonucleotide for detection of SNP TSC0055553
ttatgaatttaty

SEQ ID NO: 227814 - DNA, 13 bp, Artificial Sequence
  Oligonucleotide for detection of SNP TSC0055553
rataaattcataa

SEQ ID NO: 227815 - DNA, 13 bp, Artificial Sequence
  Oligonucleotide for detection of SNP TSC0055553
ttatgattttaty

SEQ ID NO: 227816 - DNA, 13 bp, Artificial Sequence
  Oligonucleotide for detection of SNP TSC0055553
rataaaatcataa

SEQ ID NO: 227817 - DNA, 13 bp, Artificial Sequence
  Oligonucleotide for detection of SNP TSC0055553
gatgagtttatgg

SEQ ID NO: 227818 - DNA, 13 bp, Artificial Sequence
  Oligonucleotide for detection of SNP TSC0055553
ccataaactcatc

SEQ ID NO: 227819 - DNA, 13 bp, Artificial Sequence
  Oligonucleotide for detection of SNP TSC0055553
gatgagattatgg

SEQ ID NO: 227820 - DNA, 13 bp, Artificial Sequence
  Oligonucleotide for detection of SNP TSC0055553
ccataatctcatc

SEQ ID NO: 227821 - DNA, 13 bp, Artificial Sequence
  Oligonucleotide for detection of SNP TSC0055554
tgtaggtggggty

SEQ ID NO: 227822 - DNA, 13 bp, Artificial Sequence
  Oligonucleotide for detection of SNP TSC0055554
raccccacctaca

SEQ ID NO: 227823 - DNA, 13 bp, Artificial Sequence
  Oligonucleotide for detection of SNP TSC0055554
tgtaggcggggty

SEQ ID NO: 227824 - DNA, 13 bp, Artificial Sequence
  Oligonucleotide for detection of SNP TSC0055554
raccccgcctaca

SEQ ID NO: 227825 - DNA, 13 bp, Artificial Sequence
  Oligonucleotide for detection of SNP TSC0055555
aataaatgtagta

SEQ ID NO: 227826 - DNA, 13 bp, Artificial Sequence
  Oligonucleotide for detection of SNP TSC0055555
tactacatttatt

SEQ ID NO: 227827 - DNA, 13 bp, Artificial Sequence
  Oligonucleotide for detection of SNP TSC0055555
aataaacgtagta

SEQ ID NO: 227828 - DNA, 13 bp, Artificial Sequence
  Oligonucleotide for detection of SNP TSC0055555
tactacgtttatt

SEQ ID NO: 227829 - DNA, 13 bp, Artificial Sequence
  Oligonucleotide for detection of SNP TSC0055556
agtggagggatty

SEQ ID NO: 227830 - DNA, 13 bp, Artificial Sequence
  Oligonucleotide for detection of SNP TSC0055556
raatccctccact

SEQ ID NO: 227831 - DNA, 13 bp, Artificial Sequence
  Oligonucleotide for detection of SNP TSC0055556
agtggaaggatty

SEQ ID NO: 227832 - DNA, 13 bp, Artificial Sequence
  Oligonucleotide for detection of SNP TSC0055556
raatccttccact

SEQ ID NO: 227833 - DNA, 13 bp, Artificial Sequence
  Oligonucleotide for detection of SNP TSC0055556
agcggagggatty

SEQ ID NO: 227834 - DNA, 13 bp, Artificial Sequence
  Oligonucleotide for detection of SNP TSC0055556
raatccctccgct

SEQ ID NO: 227835 - DNA, 13 bp, Artificial Sequence
  Oligonucleotide for detection of SNP TSC0055556
agcggaaggatty

SEQ ID NO: 227836 - DNA, 13 bp, Artificial Sequence
  Oligonucleotide for detection of SNP TSC0055556
raatccttccgct

SEQ ID NO: 227837 - DNA, 13 bp, Artificial Sequence
  Oligonucleotide for detection of SNP TSC0055557
tttaagattatga

SEQ ID NO: 227838 - DNA, 13 bp, Artificial Sequence
  Oligonucleotide for detection of SNP TSC0055557
tcataatcttaaa

SEQ ID NO: 227839 - DNA, 13 bp, Artificial Sequence
  Oligonucleotide for detection of SNP TSC0055557
tttaagtttatga

SEQ ID NO: 227840 - DNA, 13 bp, Artificial Sequence
  Oligonucleotide for detection of SNP TSC0055557
tcataaacttaaa

SEQ ID NO: 227841 - DNA, 13 bp, Artificial Sequence
  Oligonucleotide for detection of SNP TSC0055557
tttaagattacga

SEQ ID NO: 227842 - DNA, 13 bp, Artificial Sequence
  Oligonucleotide for detection of SNP TSC0055557
tcgtaatcttaaa

SEQ ID NO: 227843 - DNA, 13 bp, Artificial Sequence
  Oligonucleotide for detection of SNP TSC0055557
tttaagtttacga

SEQ ID NO: 227844 - DNA, 13 bp, Artificial Sequence
  Oligonucleotide for detection of SNP TSC0055557
tcgtaaacttaaa

SEQ ID NO: 227845 - DNA, 13 bp, Artificial Sequence
  Oligonucleotide for detection of SNP TSC0055557
ttgtggttttaag

SEQ ID NO: 227846 - DNA, 13 bp, Artificial Sequence
  Oligonucleotide for detection of SNP TSC0055557
cttaaaaccacaa

SEQ ID NO: 227847 - DNA, 13 bp, Artificial Sequence
  Oligonucleotide for detection of SNP TSC0055557
ttgtgggtttaag

SEQ ID NO: 227848 - DNA, 13 bp, Artificial Sequence
  Oligonucleotide for detection of SNP TSC0055557
cttaaacccacaa

SEQ ID NO: 227849 - DNA, 13 bp, Artificial Sequence
  Oligonucleotide for detection of SNP TSC0055557
tcgtggttttaag

SEQ ID NO: 227850 - DNA, 13 bp, Artificial Sequence
  Oligonucleotide for detection of SNP TSC0055557
cttaaaaccacga

SEQ ID NO: 227851 - DNA, 13 bp, Artificial Sequence
  Oligonucleotide for detection of SNP TSC0055557
tcgtgggtttaag

SEQ ID NO: 227852 - DNA, 13 bp, Artificial Sequence
  Oligonucleotide for detection of SNP TSC0055557
cttaaacccacga

SEQ ID NO: 227853 - DNA, 13 bp, Artificial Sequence
  Oligonucleotide for detection of SNP TSC0055558
attattgatttty

SEQ ID NO: 227854 - DNA, 13 bp, Artificial Sequence
  Oligonucleotide for detection of SNP TSC0055558
raaaatcaataat

SEQ ID NO: 227855 - DNA, 13 bp, Artificial Sequence
  Oligonucleotide for detection of SNP TSC0055558
attattaatttty

SEQ ID NO: 227856 - DNA, 13 bp, Artificial Sequence
  Oligonucleotide for detection of SNP TSC0055558
raaaattaataat

SEQ ID NO: 227857 - DNA, 13 bp, Artificial Sequence
  Oligonucleotide for detection of SNP TSC0055561
ttttgatgtttag

SEQ ID NO: 227858 - DNA, 13 bp, Artificial Sequence
  Oligonucleotide for detection of SNP TSC0055561
ctaaacatcaaaa

SEQ ID NO: 227859 - DNA, 13 bp, Artificial Sequence
  Oligonucleotide for detection of SNP TSC0055561
ttttgaggtttag

SEQ ID NO: 227860 - DNA, 13 bp, Artificial Sequence
  Oligonucleotide for detection of SNP TSC0055561
ctaaacctcaaaa

SEQ ID NO: 227861 - DNA, 13 bp, Artificial Sequence
  Oligonucleotide for detection of SNP TSC0055561
ttggatattaaaa

SEQ ID NO: 227862 - DNA, 13 bp, Artificial Sequence
  Oligonucleotide for detection of SNP TSC0055561
ttttaatatccaa

SEQ ID NO: 227863 - DNA, 13 bp, Artificial Sequence
  Oligonucleotide for detection of SNP TSC0055561
ttggattttaaaa

SEQ ID NO: 227864 - DNA, 13 bp, Artificial Sequence
  Oligonucleotide for detection of SNP TSC0055561
ttttaaaatccaa

SEQ ID NO: 227865 - DNA, 13 bp, Artificial Sequence
  Oligonucleotide for detection of SNP TSC0055562
tggataaatagty

SEQ ID NO: 227866 - DNA, 13 bp, Artificial Sequence
  Oligonucleotide for detection of SNP TSC0055562
ractatttatcca

SEQ ID NO: 227867 - DNA, 13 bp, Artificial Sequence
  Oligonucleotide for detection of SNP TSC0055562
tggatatatagty

SEQ ID NO: 227868 - DNA, 13 bp, Artificial Sequence
  Oligonucleotide for detection of SNP TSC0055562
ractatatatcca

SEQ ID NO: 227869 - DNA, 13 bp, Artificial Sequence
  Oligonucleotide for detection of SNP TSC0055562
gattatttattta

SEQ ID NO: 227870 - DNA, 13 bp, Artificial Sequence
  Oligonucleotide for detection of SNP TSC0055562
taaataaataatc

SEQ ID NO: 227871 - DNA, 13 bp, Artificial Sequence
  Oligonucleotide for detection of SNP TSC0055562
gattatatattta

SEQ ID NO: 227872 - DNA, 13 bp, Artificial Sequence
  Oligonucleotide for detection of SNP TSC0055562
taaatatataatc

SEQ ID NO: 227873 - DNA, 13 bp, Artificial Sequence
  Oligonucleotide for detection of SNP TSC0055563
ttttttaaagtag

SEQ ID NO: 227874 - DNA, 13 bp, Artificial Sequence
  Oligonucleotide for detection of SNP TSC0055563
ctactttaaaaaa

SEQ ID NO: 227875 - DNA, 13 bp, Artificial Sequence
  Oligonucleotide for detection of SNP TSC0055564
aaggataatatgy

SEQ ID NO: 227876 - DNA, 13 bp, Artificial Sequence
  Oligonucleotide for detection of SNP TSC0055564
rcatattatcctt

SEQ ID NO: 227877 - DNA, 13 bp, Artificial Sequence
  Oligonucleotide for detection of SNP TSC0055564
aaggatgatatgy

SEQ ID NO: 227878 - DNA, 13 bp, Artificial Sequence
  Oligonucleotide for detection of SNP TSC0055564
rcatatcatcctt

SEQ ID NO: 227879 - DNA, 13 bp, Artificial Sequence
  Oligonucleotide for detection of SNP TSC0055565
taaaatgagttta

SEQ ID NO: 227880 - DNA, 13 bp, Artificial Sequence
  Oligonucleotide for detection of SNP TSC0055565
taaactcatttta

SEQ ID NO: 227881 - DNA, 13 bp, Artificial Sequence
  Oligonucleotide for detection of SNP TSC0055565
taaaataagttta

SEQ ID NO: 227882 - DNA, 13 bp, Artificial Sequence
  Oligonucleotide for detection of SNP TSC0055565
taaacttatttta

SEQ ID NO: 227883 - DNA, 13 bp, Artificial Sequence
  Oligonucleotide for detection of SNP TSC0055566
gaagttgtaaaat

SEQ ID NO: 227884 - DNA, 13 bp, Artificial Sequence
  Oligonucleotide for detection of SNP TSC0055566
attttacaacttc

SEQ ID NO: 227885 - DNA, 13 bp, Artificial Sequence
  Oligonucleotide for detection of SNP TSC0055566
gaagttataaaat

SEQ ID NO: 227886 - DNA, 13 bp, Artificial Sequence
  Oligonucleotide for detection of SNP TSC0055566
attttataacttc

SEQ ID NO: 227887 - DNA, 13 bp, Artificial Sequence
  Oligonucleotide for detection of SNP TSC0055567
gagaggtgaagtt

SEQ ID NO: 227888 - DNA, 13 bp, Artificial Sequence
  Oligonucleotide for detection of SNP TSC0055567
aacttcacctctc

SEQ ID NO: 227889 - DNA, 13 bp, Artificial Sequence
  Oligonucleotide for detection of SNP TSC0055567
gagaggcgaagtt

SEQ ID NO: 227890 - DNA, 13 bp, Artificial Sequence
  Oligonucleotide for detection of SNP TSC0055567
aacttcgcctctc

SEQ ID NO: 227891 - DNA, 13 bp, Artificial Sequence
  Oligonucleotide for detection of SNP TSC0055568
tgatatagattta

SEQ ID NO: 227892 - DNA, 13 bp, Artificial Sequence
  Oligonucleotide for detection of SNP TSC0055568
taaatctatatca

SEQ ID NO: 227893 - DNA, 13 bp, Artificial Sequence
  Oligonucleotide for detection of SNP TSC0055568
tgatatggattta

SEQ ID NO: 227894 - DNA, 13 bp, Artificial Sequence
  Oligonucleotide for detection of SNP TSC0055568
taaatccatatca

SEQ ID NO: 227895 - DNA, 13 bp, Artificial Sequence
  Oligonucleotide for detection of SNP TSC0055568
tgatacggattta

SEQ ID NO: 227896 - DNA, 13 bp, Artificial Sequence
  Oligonucleotide for detection of SNP TSC0055568
taaatccgtatca

SEQ ID NO: 227897 - DNA, 13 bp, Artificial Sequence
  Oligonucleotide for detection of SNP TSC0055568
taagtttgtatta

SEQ ID NO: 227898 - DNA, 13 bp, Artificial Sequence
  Oligonucleotide for detection of SNP TSC0055568
taatacaaactta

SEQ ID NO: 227899 - DNA, 13 bp, Artificial Sequence
  Oligonucleotide for detection of SNP TSC0055568
taagttcgtatta

SEQ ID NO: 227900 - DNA, 13 bp, Artificial Sequence
  Oligonucleotide for detection of SNP TSC0055568
taatacgaactta

SEQ ID NO: 227901 - DNA, 13 bp, Artificial Sequence
  Oligonucleotide for detection of SNP TSC0055569
ttttatagtatty

SEQ ID NO: 227902 - DNA, 13 bp, Artificial Sequence
  Oligonucleotide for detection of SNP TSC0055569
raatactataaaa

SEQ ID NO: 227903 - DNA, 13 bp, Artificial Sequence
  Oligonucleotide for detection of SNP TSC0055569
ttttatggtatty

SEQ ID NO: 227904 - DNA, 13 bp, Artificial Sequence
  Oligonucleotide for detection of SNP TSC0055569
raataccataaaa

SEQ ID NO: 227905 - DNA, 13 bp, Artificial Sequence
  Oligonucleotide for detection of SNP TSC0055569
ttttacggtatty

SEQ ID NO: 227906 - DNA, 13 bp, Artificial Sequence
  Oligonucleotide for detection of SNP TSC0055569
raataccgtaaaa

SEQ ID NO: 227907 - DNA, 13 bp, Artificial Sequence
  Oligonucleotide for detection of SNP TSC0055569
gagtattgtgagg

SEQ ID NO: 227908 - DNA, 13 bp, Artificial Sequence
  Oligonucleotide for detection of SNP TSC0055569
cctcacaatactc

SEQ ID NO: 227909 - DNA, 13 bp, Artificial Sequence
  Oligonucleotide for detection of SNP TSC0055569
gagtatcgtgagg

SEQ ID NO: 227910 - DNA, 13 bp, Artificial Sequence
  Oligonucleotide for detection of SNP TSC0055569
cctcacgatactc

SEQ ID NO: 227911 - DNA, 13 bp, Artificial Sequence
  Oligonucleotide for detection of SNP TSC0055573
agaggattgatag

SEQ ID NO: 227912 - DNA, 13 bp, Artificial Sequence
  Oligonucleotide for detection of SNP TSC0055573
ctatcaatcctct

SEQ ID NO: 227913 - DNA, 13 bp, Artificial Sequence
  Oligonucleotide for detection of SNP TSC0055573
agaggagtgatag

SEQ ID NO: 227914 - DNA, 13 bp, Artificial Sequence
  Oligonucleotide for detection of SNP TSC0055573
ctatcactcctct

SEQ ID NO: 227915 - DNA, 13 bp, Artificial Sequence
  Oligonucleotide for detection of SNP TSC0055577
ggagtataagagt

SEQ ID NO: 227916 - DNA, 13 bp, Artificial Sequence
  Oligonucleotide for detection of SNP TSC0055577
actcttatactcc

SEQ ID NO: 227917 - DNA, 13 bp, Artificial Sequence
  Oligonucleotide for detection of SNP TSC0055577
ggagtagaagagt

SEQ ID NO: 227918 - DNA, 13 bp, Artificial Sequence
  Oligonucleotide for detection of SNP TSC0055577
actcttctactcc

SEQ ID NO: 227919 - DNA, 13 bp, Artificial Sequence
  Oligonucleotide for detection of SNP TSC0055581
gagattgtaattt

SEQ ID NO: 227920 - DNA, 13 bp, Artificial Sequence
  Oligonucleotide for detection of SNP TSC0055581
aaattacaatctc

SEQ ID NO: 227921 - DNA, 13 bp, Artificial Sequence
  Oligonucleotide for detection of SNP TSC0055581
aaattagagttty

SEQ ID NO: 227922 - DNA, 13 bp, Artificial Sequence
  Oligonucleotide for detection of SNP TSC0055581
raaactctaattt

SEQ ID NO: 227923 - DNA, 13 bp, Artificial Sequence
  Oligonucleotide for detection of SNP TSC0055581
aaattatagttty

SEQ ID NO: 227924 - DNA, 13 bp, Artificial Sequence
  Oligonucleotide for detection of SNP TSC0055581
raaactataattt

SEQ ID NO: 227925 - DNA, 13 bp, Artificial Sequence
  Oligonucleotide for detection of SNP TSC0055589
atagaagttgttt

SEQ ID NO: 227926 - DNA, 13 bp, Artificial Sequence
  Oligonucleotide for detection of SNP TSC0055589
aaacaacttctat

SEQ ID NO: 227927 - DNA, 13 bp, Artificial Sequence
  Oligonucleotide for detection of SNP TSC0055590
tatatatggggaa

SEQ ID NO: 227928 - DNA, 13 bp, Artificial Sequence
  Oligonucleotide for detection of SNP TSC0055590
ttccccatatata

SEQ ID NO: 227929 - DNA, 13 bp, Artificial Sequence
  Oligonucleotide for detection of SNP TSC0055590
tatatacggggaa

SEQ ID NO: 227930 - DNA, 13 bp, Artificial Sequence
  Oligonucleotide for detection of SNP TSC0055590
ttccccgtatata

SEQ ID NO: 227931 - DNA, 13 bp, Artificial Sequence
  Oligonucleotide for detection of SNP TSC0055591
ttagttagaaatt

SEQ ID NO: 227932 - DNA, 13 bp, Artificial Sequence
  Oligonucleotide for detection of SNP TSC0055591
aatttctaactaa

SEQ ID NO: 227933 - DNA, 13 bp, Artificial Sequence
  Oligonucleotide for detection of SNP TSC0055591
ttagttggaaatt

SEQ ID NO: 227934 - DNA, 13 bp, Artificial Sequence
  Oligonucleotide for detection of SNP TSC0055591
aatttccaactaa

SEQ ID NO: 227935 - DNA, 13 bp, Artificial Sequence
  Oligonucleotide for detection of SNP TSC0055591
ttagtcggaaatt

SEQ ID NO: 227936 - DNA, 13 bp, Artificial Sequence
  Oligonucleotide for detection of SNP TSC0055591
aatttccgactaa

SEQ ID NO: 227937 - DNA, 13 bp, Artificial Sequence
  Oligonucleotide for detection of SNP TSC0055591
agtttttgattaa

SEQ ID NO: 227938 - DNA, 13 bp, Artificial Sequence
  Oligonucleotide for detection of SNP TSC0055591
ttaatcaaaaact

SEQ ID NO: 227939 - DNA, 13 bp, Artificial Sequence
  Oligonucleotide for detection of SNP TSC0055591
agttttcgattaa

SEQ ID NO: 227940 - DNA, 13 bp, Artificial Sequence
  Oligonucleotide for detection of SNP TSC0055591
ttaatcgaaaact

SEQ ID NO: 227941 - DNA, 13 bp, Artificial Sequence
  Oligonucleotide for detection of SNP TSC0055592
agaatgatgtgaa

SEQ ID NO: 227942 - DNA, 13 bp, Artificial Sequence
  Oligonucleotide for detection of SNP TSC0055592
ttcacatcattct

SEQ ID NO: 227943 - DNA, 13 bp, Artificial Sequence
  Oligonucleotide for detection of SNP TSC0055592
agaatggtgtgaa

SEQ ID NO: 227944 - DNA, 13 bp, Artificial Sequence
  Oligonucleotide for detection of SNP TSC0055592
ttcacaccattct

SEQ ID NO: 227945 - DNA, 13 bp, Artificial Sequence
  Oligonucleotide for detection of SNP TSC0055592
agaatgacgtgaa

SEQ ID NO: 227946 - DNA, 13 bp, Artificial Sequence
  Oligonucleotide for detection of SNP TSC0055592
ttcacgtcattct

SEQ ID NO: 227947 - DNA, 13 bp, Artificial Sequence
  Oligonucleotide for detection of SNP TSC0055592
agaatggcgtgaa

SEQ ID NO: 227948 - DNA, 13 bp, Artificial Sequence
  Oligonucleotide for detection of SNP TSC0055592
ttcacgccattct

SEQ ID NO: 227949 - DNA, 13 bp, Artificial Sequence
  Oligonucleotide for detection of SNP TSC0055594
ggtaaaaatgggg

SEQ ID NO: 227950 - DNA, 13 bp, Artificial Sequence
  Oligonucleotide for detection of SNP TSC0055594
ccccatttttacc

SEQ ID NO: 227951 - DNA, 13 bp, Artificial Sequence
  Oligonucleotide for detection of SNP TSC0055594
ggtaaagatgggg

SEQ ID NO: 227952 - DNA, 13 bp, Artificial Sequence
  Oligonucleotide for detection of SNP TSC0055594
ccccatctttacc

SEQ ID NO: 227953 - DNA, 13 bp, Artificial Sequence
  Oligonucleotide for detection of SNP TSC0055596
aatatagaatatt

SEQ ID NO: 227954 - DNA, 13 bp, Artificial Sequence
  Oligonucleotide for detection of SNP TSC0055596
aatattctatatt

SEQ ID NO: 227955 - DNA, 13 bp, Artificial Sequence
  Oligonucleotide for detection of SNP TSC0055596
aatataaaatatt

SEQ ID NO: 227956 - DNA, 13 bp, Artificial Sequence
  Oligonucleotide for detection of SNP TSC0055596
aatattttatatt

SEQ ID NO: 227957 - DNA, 13 bp, Artificial Sequence
  Oligonucleotide for detection of SNP TSC0055597
atatgtatgtaty

SEQ ID NO: 227958 - DNA, 13 bp, Artificial Sequence
  Oligonucleotide for detection of SNP TSC0055597
ratacatacatat

SEQ ID NO: 227959 - DNA, 13 bp, Artificial Sequence
  Oligonucleotide for detection of SNP TSC0055597
atatgtttgtaty

SEQ ID NO: 227960 - DNA, 13 bp, Artificial Sequence
  Oligonucleotide for detection of SNP TSC0055597
ratacaaacatat

SEQ ID NO: 227961 - DNA, 13 bp, Artificial Sequence
  Oligonucleotide for detection of SNP TSC0055597
gatatatgtatgt

SEQ ID NO: 227962 - DNA, 13 bp, Artificial Sequence
  Oligonucleotide for detection of SNP TSC0055597
acatacatatatc

SEQ ID NO: 227963 - DNA, 13 bp, Artificial Sequence
  Oligonucleotide for detection of SNP TSC0055597
gatataagtatgt

SEQ ID NO: 227964 - DNA, 13 bp, Artificial Sequence
  Oligonucleotide for detection of SNP TSC0055597
acatacttatatc

SEQ ID NO: 227965 - DNA, 13 bp, Artificial Sequence
  Oligonucleotide for detection of SNP TSC0055598
atataaatttttg

SEQ ID NO: 227966 - DNA, 13 bp, Artificial Sequence
  Oligonucleotide for detection of SNP TSC0055598
caaaaatttatat

SEQ ID NO: 227967 - DNA, 13 bp, Artificial Sequence
  Oligonucleotide for detection of SNP TSC0055599
aatttagttatgg

SEQ ID NO: 227968 - DNA, 13 bp, Artificial Sequence
  Oligonucleotide for detection of SNP TSC0055599
ccataactaaatt

SEQ ID NO: 227969 - DNA, 13 bp, Artificial Sequence
  Oligonucleotide for detection of SNP TSC0055599
aatttaattatgg

SEQ ID NO: 227970 - DNA, 13 bp, Artificial Sequence
  Oligonucleotide for detection of SNP TSC0055599
ccataattaaatt

SEQ ID NO: 227971 - DNA, 13 bp, Artificial Sequence
  Oligonucleotide for detection of SNP TSC0055600
tattgaggattaa

SEQ ID NO: 227972 - DNA, 13 bp, Artificial Sequence
  Oligonucleotide for detection of SNP TSC0055600
ttaatcctcaata

SEQ ID NO: 227973 - DNA, 13 bp, Artificial Sequence
  Oligonucleotide for detection of SNP TSC0055600
tattgaagattaa

SEQ ID NO: 227974 - DNA, 13 bp, Artificial Sequence
  Oligonucleotide for detection of SNP TSC0055600
ttaatcttcaata

SEQ ID NO: 227975 - DNA, 13 bp, Artificial Sequence
  Oligonucleotide for detection of SNP TSC0055601
gttgagatataag

SEQ ID NO: 227976 - DNA, 13 bp, Artificial Sequence
  Oligonucleotide for detection of SNP TSC0055601
cttatatctcaac

SEQ ID NO: 227977 - DNA, 13 bp, Artificial Sequence
  Oligonucleotide for detection of SNP TSC0055601
gttgaggtataag

SEQ ID NO: 227978 - DNA, 13 bp, Artificial Sequence
  Oligonucleotide for detection of SNP TSC0055601
cttatacctcaac

SEQ ID NO: 227979 - DNA, 13 bp, Artificial Sequence
  Oligonucleotide for detection of SNP TSC0055602
agagattaattga

SEQ ID NO: 227980 - DNA, 13 bp, Artificial Sequence
  Oligonucleotide for detection of SNP TSC0055602
tcaattaatctct

SEQ ID NO: 227981 - DNA, 13 bp, Artificial Sequence
  Oligonucleotide for detection of SNP TSC0055602
agagatgaattga

SEQ ID NO: 227982 - DNA, 13 bp, Artificial Sequence
  Oligonucleotide for detection of SNP TSC0055602
tcaattcatctct

SEQ ID NO: 227983 - DNA, 13 bp, Artificial Sequence
  Oligonucleotide for detection of SNP TSC0055602
agagacgaattga

SEQ ID NO: 227984 - DNA, 13 bp, Artificial Sequence
  Oligonucleotide for detection of SNP TSC0055602
tcaattcgtctct

SEQ ID NO: 227985 - DNA, 13 bp, Artificial Sequence
  Oligonucleotide for detection of SNP TSC0005610
tataaaatttatg

SEQ ID NO: 227986 - DNA, 13 bp, Artificial Sequence
  Oligonucleotide for detection of SNP TSC0005610
cataaattttata

SEQ ID NO: 227987 - DNA, 13 bp, Artificial Sequence
  Oligonucleotide for detection of SNP TSC0005610
tataaattttatg

SEQ ID NO: 227988 - DNA, 13 bp, Artificial Sequence
  Oligonucleotide for detection of SNP TSC0005610
cataaaatttata

SEQ ID NO: 227989 - DNA, 13 bp, Artificial Sequence
  Oligonucleotide for detection of SNP TSC0005610
tataagttttata

SEQ ID NO: 227990 - DNA, 13 bp, Artificial Sequence
  Oligonucleotide for detection of SNP TSC0005610
tataaaacttata

SEQ ID NO: 227991 - DNA, 13 bp, Artificial Sequence
  Oligonucleotide for detection of SNP TSC0005610
tataaggtttata

SEQ ID NO: 227992 - DNA, 13 bp, Artificial Sequence
  Oligonucleotide for detection of SNP TSC0005610
tataaaccttata

SEQ ID NO: 227993 - DNA, 13 bp, Artificial Sequence
  Oligonucleotide for detection of SNP TSC0055604
tttattattaaat

SEQ ID NO: 227994 - DNA, 13 bp, Artificial Sequence
  Oligonucleotide for detection of SNP TSC0055604
atttaataataaa

SEQ ID NO: 227995 - DNA, 13 bp, Artificial Sequence
  Oligonucleotide for detection of SNP TSC0055604
tttattgttaaat

SEQ ID NO: 227996 - DNA, 13 bp, Artificial Sequence
  Oligonucleotide for detection of SNP TSC0055604
atttaacaataaa

SEQ ID NO: 227997 - DNA, 13 bp, Artificial Sequence
  Oligonucleotide for detection of SNP TSC0055604
tttatcgttaaat

SEQ ID NO: 227998 - DNA, 13 bp, Artificial Sequence
  Oligonucleotide for detection of SNP TSC0055604
atttaacgataaa

SEQ ID NO: 227999 - DNA, 13 bp, Artificial Sequence
  Oligonucleotide for detection of SNP TSC0055604
atttgatgataaa

SEQ ID NO: 228000 - DNA, 13 bp, Artificial Sequence
  Oligonucleotide for detection of SNP TSC0055604
tttatcatcaaat

SEQ ID NO: 228001 - DNA, 13 bp, Artificial Sequence
  Oligonucleotide for detection of SNP TSC0055604
atttgacgataaa

SEQ ID NO: 228002 - DNA, 13 bp, Artificial Sequence
  Oligonucleotide for detection of SNP TSC0055604
tttatcgtcaaat

SEQ ID NO: 228003 - DNA, 13 bp, Artificial Sequence
  Oligonucleotide for detection of SNP TSC0055605
ggattaaaataat

SEQ ID NO: 228004 - DNA, 13 bp, Artificial Sequence
  Oligonucleotide for detection of SNP TSC0055605
attattttaatcc

SEQ ID NO: 228005 - DNA, 13 bp, Artificial Sequence
  Oligonucleotide for detection of SNP TSC0055605
ggattagaataat

SEQ ID NO: 228006 - DNA, 13 bp, Artificial Sequence
  Oligonucleotide for detection of SNP TSC0055605
attattctaatcc

SEQ ID NO: 228007 - DNA, 13 bp, Artificial Sequence
  Oligonucleotide for detection of SNP TSC0055606
gtttaggtaagaa

SEQ ID NO: 228008 - DNA, 13 bp, Artificial Sequence
  Oligonucleotide for detection of SNP TSC0055606
ttcttacctaaac

SEQ ID NO: 228009 - DNA, 13 bp, Artificial Sequence
  Oligonucleotide for detection of SNP TSC0055606
gtttagataagaa

SEQ ID NO: 228010 - DNA, 13 bp, Artificial Sequence
  Oligonucleotide for detection of SNP TSC0055606
ttcttatctaaac

SEQ ID NO: 228011 - DNA, 13 bp, Artificial Sequence
  Oligonucleotide for detection of SNP TSC0055607
aaattaaaaaaag

SEQ ID NO: 228012 - DNA, 13 bp, Artificial Sequence
  Oligonucleotide for detection of SNP TSC0055607
ctttttttaattt

SEQ ID NO: 228013 - DNA, 13 bp, Artificial Sequence
  Oligonucleotide for detection of SNP TSC0055607
aaattagaaaaag

SEQ ID NO: 228014 - DNA, 13 bp, Artificial Sequence
  Oligonucleotide for detection of SNP TSC0055607
ctttttctaattt

SEQ ID NO: 228015 - DNA, 13 bp, Artificial Sequence
  Oligonucleotide for detection of SNP TSC0055608
aggttaggttttg

SEQ ID NO: 228016 - DNA, 13 bp, Artificial Sequence
  Oligonucleotide for detection of SNP TSC0055608
caaaacctaacct

SEQ ID NO: 228017 - DNA, 13 bp, Artificial Sequence
  Oligonucleotide for detection of SNP TSC0055609
ttatggtgggatg

SEQ ID NO: 228018 - DNA, 13 bp, Artificial Sequence
  Oligonucleotide for detection of SNP TSC0055609
catcccaccataa

SEQ ID NO: 228019 - DNA, 13 bp, Artificial Sequence
  Oligonucleotide for detection of SNP TSC0055609
ttatggcgggatg

SEQ ID NO: 228020 - DNA, 13 bp, Artificial Sequence
  Oligonucleotide for detection of SNP TSC0055609
catcccgccataa

SEQ ID NO: 228021 - DNA, 13 bp, Artificial Sequence
  Oligonucleotide for detection of SNP TSC0055609
tattttgttatag

SEQ ID NO: 228022 - DNA, 13 bp, Artificial Sequence
  Oligonucleotide for detection of SNP TSC0055609
ctataacaaaata

SEQ ID NO: 228023 - DNA, 13 bp, Artificial Sequence
  Oligonucleotide for detection of SNP TSC0055609
tatttcgttatag

SEQ ID NO: 228024 - DNA, 13 bp, Artificial Sequence
  Oligonucleotide for detection of SNP TSC0055609
ctataacgaaata

SEQ ID NO: 228025 - DNA, 13 bp, Artificial Sequence
  Oligonucleotide for detection of SNP TSC0055610
ggaattatgatat

SEQ ID NO: 228026 - DNA, 13 bp, Artificial Sequence
  Oligonucleotide for detection of SNP TSC0055610
atatcataattcc

SEQ ID NO: 228027 - DNA, 13 bp, Artificial Sequence
  Oligonucleotide for detection of SNP TSC0055610
ggaattgtgatat

SEQ ID NO: 228028 - DNA, 13 bp, Artificial Sequence
  Oligonucleotide for detection of SNP TSC0055610
atatcacaattcc

SEQ ID NO: 228029 - DNA, 13 bp, Artificial Sequence
  Oligonucleotide for detection of SNP TSC0055610
ggaatcgtgatat

SEQ ID NO: 228030 - DNA, 13 bp, Artificial Sequence
  Oligonucleotide for detection of SNP TSC0055610
atatcacgattcc

SEQ ID NO: 228031 - DNA, 13 bp, Artificial Sequence
  Oligonucleotide for detection of SNP TSC0055610
atattatgattty

SEQ ID NO: 228032 - DNA, 13 bp, Artificial Sequence
  Oligonucleotide for detection of SNP TSC0055610
raaatcataatat

SEQ ID NO: 228033 - DNA, 13 bp, Artificial Sequence
  Oligonucleotide for detection of SNP TSC0055610
atattacgattty

SEQ ID NO: 228034 - DNA, 13 bp, Artificial Sequence
  Oligonucleotide for detection of SNP TSC0055610
raaatcgtaatat

SEQ ID NO: 228035 - DNA, 13 bp, Artificial Sequence
  Oligonucleotide for detection of SNP TSC0055611
aaatgttgaatta

SEQ ID NO: 228036 - DNA, 13 bp, Artificial Sequence
  Oligonucleotide for detection of SNP TSC0055611
taattcaacattt

SEQ ID NO: 228037 - DNA, 13 bp, Artificial Sequence
  Oligonucleotide for detection of SNP TSC0055611
aaatgtcgaatta

SEQ ID NO: 228038 - DNA, 13 bp, Artificial Sequence
  Oligonucleotide for detection of SNP TSC0055611
taattcgacattt

SEQ ID NO: 228039 - DNA, 13 bp, Artificial Sequence
  Oligonucleotide for detection of SNP TSC0055611
taatttggtattt

SEQ ID NO: 228040 - DNA, 13 bp, Artificial Sequence
  Oligonucleotide for detection of SNP TSC0055611
aaataccaaatta

SEQ ID NO: 228041 - DNA, 13 bp, Artificial Sequence
  Oligonucleotide for detection of SNP TSC0055611
taatttagtattt

SEQ ID NO: 228042 - DNA, 13 bp, Artificial Sequence
  Oligonucleotide for detection of SNP TSC0055611
aaatactaaatta

SEQ ID NO: 228043 - DNA, 13 bp, Artificial Sequence
  Oligonucleotide for detection of SNP TSC0055611
taattcggtattt

SEQ ID NO: 228044 - DNA, 13 bp, Artificial Sequence
  Oligonucleotide for detection of SNP TSC0055611
aaataccgaatta

SEQ ID NO: 228045 - DNA, 13 bp, Artificial Sequence
  Oligonucleotide for detection of SNP TSC0055612
agggttagtttty

SEQ ID NO: 228046 - DNA, 13 bp, Artificial Sequence
  Oligonucleotide for detection of SNP TSC0055612
raaaactaaccct

SEQ ID NO: 228047 - DNA, 13 bp, Artificial Sequence
  Oligonucleotide for detection of SNP TSC0055612
agggttggtttty

SEQ ID NO: 228048 - DNA, 13 bp, Artificial Sequence
  Oligonucleotide for detection of SNP TSC0055612
raaaaccaaccct

SEQ ID NO: 228049 - DNA, 13 bp, Artificial Sequence
  Oligonucleotide for detection of SNP TSC0055613
ttgtgtattgtag

SEQ ID NO: 228050 - DNA, 13 bp, Artificial Sequence
  Oligonucleotide for detection of SNP TSC0055613
ctacaatacacaa

SEQ ID NO: 228051 - DNA, 13 bp, Artificial Sequence
  Oligonucleotide for detection of SNP TSC0055613
ttgtgtgttgtag

SEQ ID NO: 228052 - DNA, 13 bp, Artificial Sequence
  Oligonucleotide for detection of SNP TSC0055613
ctacaacacacaa

SEQ ID NO: 228053 - DNA, 13 bp, Artificial Sequence
  Oligonucleotide for detection of SNP TSC0055613
ttgtgcgttgtag

SEQ ID NO: 228054 - DNA, 13 bp, Artificial Sequence
  Oligonucleotide for detection of SNP TSC0055613
ctacaacgcacaa

SEQ ID NO: 228055 - DNA, 13 bp, Artificial Sequence
  Oligonucleotide for detection of SNP TSC0055613
ttgtaatgtatag

SEQ ID NO: 228056 - DNA, 13 bp, Artificial Sequence
  Oligonucleotide for detection of SNP TSC0055613
ctatacattacaa

SEQ ID NO: 228057 - DNA, 13 bp, Artificial Sequence
  Oligonucleotide for detection of SNP TSC0055613
ttgtaacgtatag

SEQ ID NO: 228058 - DNA, 13 bp, Artificial Sequence
  Oligonucleotide for detection of SNP TSC0055613
ctatacgttacaa

SEQ ID NO: 228059 - DNA, 13 bp, Artificial Sequence
  Oligonucleotide for detection of SNP TSC0055614
gtttgttattttt

SEQ ID NO: 228060 - DNA, 13 bp, Artificial Sequence
  Oligonucleotide for detection of SNP TSC0055614
aaaaataacaaac

SEQ ID NO: 228061 - DNA, 13 bp, Artificial Sequence
  Oligonucleotide for detection of SNP TSC0055614
aaaaatgatagay

SEQ ID NO: 228062 - DNA, 13 bp, Artificial Sequence
  Oligonucleotide for detection of SNP TSC0055614
rtctatcattttt

SEQ ID NO: 228063 - DNA, 13 bp, Artificial Sequence
  Oligonucleotide for detection of SNP TSC0055614
aaaaattatagay

SEQ ID NO: 228064 - DNA, 13 bp, Artificial Sequence
  Oligonucleotide for detection of SNP TSC0055614
rtctataattttt

SEQ ID NO: 228065 - DNA, 13 bp, Artificial Sequence
  Oligonucleotide for detection of SNP TSC0055616
gggtttaatagtg

SEQ ID NO: 228066 - DNA, 13 bp, Artificial Sequence
  Oligonucleotide for detection of SNP TSC0055616
cactattaaaccc

SEQ ID NO: 228067 - DNA, 13 bp, Artificial Sequence
  Oligonucleotide for detection of SNP TSC0055616
gggtttgatagtg

SEQ ID NO: 228068 - DNA, 13 bp, Artificial Sequence
  Oligonucleotide for detection of SNP TSC0055616
cactatcaaaccc

SEQ ID NO: 228069 - DNA, 13 bp, Artificial Sequence
  Oligonucleotide for detection of SNP TSC0055616
gggttcgatagtg

SEQ ID NO: 228070 - DNA, 13 bp, Artificial Sequence
  Oligonucleotide for detection of SNP TSC0055616
cactatcgaaccc

SEQ ID NO: 228071 - DNA, 13 bp, Artificial Sequence
  Oligonucleotide for detection of SNP TSC0055616
tattgttgggtty

SEQ ID NO: 228072 - DNA, 13 bp, Artificial Sequence
  Oligonucleotide for detection of SNP TSC0055616
raacccaacaata

SEQ ID NO: 228073 - DNA, 13 bp, Artificial Sequence
  Oligonucleotide for detection of SNP TSC0055616
tattgtcgggtty

SEQ ID NO: 228074 - DNA, 13 bp, Artificial Sequence
  Oligonucleotide for detection of SNP TSC0055616
raacccgacaata

SEQ ID NO: 228075 - DNA, 13 bp, Artificial Sequence
  Oligonucleotide for detection of SNP TSC0055618
gtaggaataaggt

SEQ ID NO: 228076 - DNA, 13 bp, Artificial Sequence
  Oligonucleotide for detection of SNP TSC0055618
accttattcctac

SEQ ID NO: 228077 - DNA, 13 bp, Artificial Sequence
  Oligonucleotide for detection of SNP TSC0055618
gtaggagtaaggt

SEQ ID NO: 228078 - DNA, 13 bp, Artificial Sequence
  Oligonucleotide for detection of SNP TSC0055618
accttactcctac

SEQ ID NO: 228079 - DNA, 13 bp, Artificial Sequence
  Oligonucleotide for detection of SNP TSC0055620
attaatataaaat

SEQ ID NO: 228080 - DNA, 13 bp, Artificial Sequence
  Oligonucleotide for detection of SNP TSC0055620
attttatattaat

SEQ ID NO: 228081 - DNA, 13 bp, Artificial Sequence
  Oligonucleotide for detection of SNP TSC0055620
attaatttaaaat

SEQ ID NO: 228082 - DNA, 13 bp, Artificial Sequence
  Oligonucleotide for detection of SNP TSC0055620
attttaaattaat

SEQ ID NO: 228083 - DNA, 13 bp, Artificial Sequence
  Oligonucleotide for detection of SNP TSC0055620
attttgtgttaat

SEQ ID NO: 228084 - DNA, 13 bp, Artificial Sequence
  Oligonucleotide for detection of SNP TSC0055620
attaacacaaaat

SEQ ID NO: 228085 - DNA, 13 bp, Artificial Sequence
  Oligonucleotide for detection of SNP TSC0055622
atatggttttaat

SEQ ID NO: 228086 - DNA, 13 bp, Artificial Sequence
  Oligonucleotide for detection of SNP TSC0055622
attaaaaccatat

SEQ ID NO: 228087 - DNA, 13 bp, Artificial Sequence
  Oligonucleotide for detection of SNP TSC0055622
atatgggtttaat

SEQ ID NO: 228088 - DNA, 13 bp, Artificial Sequence
  Oligonucleotide for detection of SNP TSC0055622
attaaacccatat

SEQ ID NO: 228089 - DNA, 13 bp, Artificial Sequence
  Oligonucleotide for detection of SNP TSC0055622
attgaaattatgt

SEQ ID NO: 228090 - DNA, 13 bp, Artificial Sequence
  Oligonucleotide for detection of SNP TSC0055622
acataatttcaat

SEQ ID NO: 228091 - DNA, 13 bp, Artificial Sequence
  Oligonucleotide for detection of SNP TSC0055622
attgaatttatgt

SEQ ID NO: 228092 - DNA, 13 bp, Artificial Sequence
  Oligonucleotide for detection of SNP TSC0055622
acataaattcaat

SEQ ID NO: 228093 - DNA, 13 bp, Artificial Sequence
  Oligonucleotide for detection of SNP TSC0055623
atatagaaagttt

SEQ ID NO: 228094 - DNA, 13 bp, Artificial Sequence
  Oligonucleotide for detection of SNP TSC0055623
aaactttctatat

SEQ ID NO: 228095 - DNA, 13 bp, Artificial Sequence
  Oligonucleotide for detection of SNP TSC0055623
atatagtaagttt

SEQ ID NO: 228096 - DNA, 13 bp, Artificial Sequence
  Oligonucleotide for detection of SNP TSC0055623
aaacttactatat

SEQ ID NO: 228097 - DNA, 13 bp, Artificial Sequence
  Oligonucleotide for detection of SNP TSC0055623
aaattttttgtgt

SEQ ID NO: 228098 - DNA, 13 bp, Artificial Sequence
  Oligonucleotide for detection of SNP TSC0055623
acacaaaaaattt

SEQ ID NO: 228099 - DNA, 13 bp, Artificial Sequence
  Oligonucleotide for detection of SNP TSC0055623
aaatttgttgtgt

SEQ ID NO: 228100 - DNA, 13 bp, Artificial Sequence
  Oligonucleotide for detection of SNP TSC0055623
acacaacaaattt

SEQ ID NO: 228101 - DNA, 13 bp, Artificial Sequence
  Oligonucleotide for detection of SNP TSC0055624
gagtggtgaggtt

SEQ ID NO: 228102 - DNA, 13 bp, Artificial Sequence
  Oligonucleotide for detection of SNP TSC0055624
aacctcaccactc

SEQ ID NO: 228103 - DNA, 13 bp, Artificial Sequence
  Oligonucleotide for detection of SNP TSC0055624
gagtggcgaggtt

SEQ ID NO: 228104 - DNA, 13 bp, Artificial Sequence
  Oligonucleotide for detection of SNP TSC0055624
aacctcgccactc

SEQ ID NO: 228105 - DNA, 13 bp, Artificial Sequence
  Oligonucleotide for detection of SNP TSC0055624
aattttgttatty

SEQ ID NO: 228106 - DNA, 13 bp, Artificial Sequence
  Oligonucleotide for detection of SNP TSC0055624
raataacaaaatt

SEQ ID NO: 228107 - DNA, 13 bp, Artificial Sequence
  Oligonucleotide for detection of SNP TSC0055624
aattttattatty

SEQ ID NO: 228108 - DNA, 13 bp, Artificial Sequence
  Oligonucleotide for detection of SNP TSC0055624
raataataaaatt

SEQ ID NO: 228109 - DNA, 13 bp, Artificial Sequence
  Oligonucleotide for detection of SNP TSC0055624
aatttcgttatty

SEQ ID NO: 228110 - DNA, 13 bp, Artificial Sequence
  Oligonucleotide for detection of SNP TSC0055624
raataacgaaatt

SEQ ID NO: 228111 - DNA, 13 bp, Artificial Sequence
  Oligonucleotide for detection of SNP TSC0055626
tttgttgtgtgtt

SEQ ID NO: 228112 - DNA, 13 bp, Artificial Sequence
  Oligonucleotide for detection of SNP TSC0055626
aacacacaacaaa

SEQ ID NO: 228113 - DNA, 13 bp, Artificial Sequence
  Oligonucleotide for detection of SNP TSC0055627
attgatatttttt

SEQ ID NO: 228114 - DNA, 13 bp, Artificial Sequence
  Oligonucleotide for detection of SNP TSC0055627
aaaaaatatcaat

SEQ ID NO: 228115 - DNA, 13 bp, Artificial Sequence
  Oligonucleotide for detection of SNP TSC0055627
attgatgtttttt

SEQ ID NO: 228116 - DNA, 13 bp, Artificial Sequence
  Oligonucleotide for detection of SNP TSC0055627
aaaaaacatcaat

SEQ ID NO: 228117 - DNA, 13 bp, Artificial Sequence
  Oligonucleotide for detection of SNP TSC0055627
attgacgtttttt

SEQ ID NO: 228118 - DNA, 13 bp, Artificial Sequence
  Oligonucleotide for detection of SNP TSC0055627
aaaaaacgtcaat

SEQ ID NO: 228119 - DNA, 13 bp, Artificial Sequence
  Oligonucleotide for detection of SNP TSC0055627
aggaagtgttaat

SEQ ID NO: 228120 - DNA, 13 bp, Artificial Sequence
  Oligonucleotide for detection of SNP TSC0055627
attaacacttcct

SEQ ID NO: 228121 - DNA, 13 bp, Artificial Sequence
  Oligonucleotide for detection of SNP TSC0055627
aggaagcgttaat

SEQ ID NO: 228122 - DNA, 13 bp, Artificial Sequence
  Oligonucleotide for detection of SNP TSC0055627
attaacgcttcct

SEQ ID NO: 228123 - DNA, 13 bp, Artificial Sequence
  Oligonucleotide for detection of SNP TSC0055628
gggattaatatat

SEQ ID NO: 228124 - DNA, 13 bp, Artificial Sequence
  Oligonucleotide for detection of SNP TSC0055628
atatattaatccc

SEQ ID NO: 228125 - DNA, 13 bp, Artificial Sequence
  Oligonucleotide for detection of SNP TSC0055628
gggatttatatat

SEQ ID NO: 228126 - DNA, 13 bp, Artificial Sequence
  Oligonucleotide for detection of SNP TSC0055628
atatataaatccc

SEQ ID NO: 228127 - DNA, 13 bp, Artificial Sequence
  Oligonucleotide for detection of SNP TSC0055628
atatattagttty

SEQ ID NO: 228128 - DNA, 13 bp, Artificial Sequence
  Oligonucleotide for detection of SNP TSC0055628
raaactaatatat

SEQ ID NO: 228129 - DNA, 13 bp, Artificial Sequence
  Oligonucleotide for detection of SNP TSC0055628
atatatgagttty

SEQ ID NO: 228130 - DNA, 13 bp, Artificial Sequence
  Oligonucleotide for detection of SNP TSC0055628
raaactcatatat

SEQ ID NO: 228131 - DNA, 13 bp, Artificial Sequence
  Oligonucleotide for detection of SNP TSC0055630
tgttaagtttatt

SEQ ID NO: 228132 - DNA, 13 bp, Artificial Sequence
  Oligonucleotide for detection of SNP TSC0055630
aataaacttaaca

SEQ ID NO: 228133 - DNA, 13 bp, Artificial Sequence
  Oligonucleotide for detection of SNP TSC0055630
tgttaaatttatt

SEQ ID NO: 228134 - DNA, 13 bp, Artificial Sequence
  Oligonucleotide for detection of SNP TSC0055630
aataaatttaaca

SEQ ID NO: 228135 - DNA, 13 bp, Artificial Sequence
  Oligonucleotide for detection of SNP TSC0055633
tggatagtattaa

SEQ ID NO: 228136 - DNA, 13 bp, Artificial Sequence
  Oligonucleotide for detection of SNP TSC0055633
ttaatactatcca

SEQ ID NO: 228137 - DNA, 13 bp, Artificial Sequence
  Oligonucleotide for detection of SNP TSC0055633
tggataatattaa

SEQ ID NO: 228138 - DNA, 13 bp, Artificial Sequence
  Oligonucleotide for detection of SNP TSC0055633
ttaatattatcca

SEQ ID NO: 228139 - DNA, 13 bp, Artificial Sequence
  Oligonucleotide for detection of SNP TSC0055636
tttgttagtgatg

SEQ ID NO: 228140 - DNA, 13 bp, Artificial Sequence
  Oligonucleotide for detection of SNP TSC0055636
catcactaacaaa

SEQ ID NO: 228141 - DNA, 13 bp, Artificial Sequence
  Oligonucleotide for detection of SNP TSC0055636
tttgttggtgatg

SEQ ID NO: 228142 - DNA, 13 bp, Artificial Sequence
  Oligonucleotide for detection of SNP TSC0055636
catcaccaacaaa

SEQ ID NO: 228143 - DNA, 13 bp, Artificial Sequence
  Oligonucleotide for detection of SNP TSC0055636
ttcgttagtgatg

SEQ ID NO: 228144 - DNA, 13 bp, Artificial Sequence
  Oligonucleotide for detection of SNP TSC0055636
catcactaacgaa

SEQ ID NO: 228145 - DNA, 13 bp, Artificial Sequence
  Oligonucleotide for detection of SNP TSC0055636
ttcgttggtgatg

SEQ ID NO: 228146 - DNA, 13 bp, Artificial Sequence
  Oligonucleotide for detection of SNP TSC0055636
catcaccaacgaa

SEQ ID NO: 228147 - DNA, 13 bp, Artificial Sequence
  Oligonucleotide for detection of SNP TSC0055636
tttgtcggtgatg

SEQ ID NO: 228148 - DNA, 13 bp, Artificial Sequence
  Oligonucleotide for detection of SNP TSC0055636
catcaccgacaaa

SEQ ID NO: 228149 - DNA, 13 bp, Artificial Sequence
  Oligonucleotide for detection of SNP TSC0055636
ttcgtcggtgatg

SEQ ID NO: 228150 - DNA, 13 bp, Artificial Sequence
  Oligonucleotide for detection of SNP TSC0055636
catcaccgacgaa

SEQ ID NO: 228151 - DNA, 13 bp, Artificial Sequence
  Oligonucleotide for detection of SNP TSC0055636
tattattgatgaa

SEQ ID NO: 228152 - DNA, 13 bp, Artificial Sequence
  Oligonucleotide for detection of SNP TSC0055636
ttcatcaataata

SEQ ID NO: 228153 - DNA, 13 bp, Artificial Sequence
  Oligonucleotide for detection of SNP TSC0055636
tattattgacgaa

SEQ ID NO: 228154 - DNA, 13 bp, Artificial Sequence
  Oligonucleotide for detection of SNP TSC0055636
ttcgtcaataata

SEQ ID NO: 228155 - DNA, 13 bp, Artificial Sequence
  Oligonucleotide for detection of SNP TSC0055636
tattatcgatgaa

SEQ ID NO: 228156 - DNA, 13 bp, Artificial Sequence
  Oligonucleotide for detection of SNP TSC0055636
ttcatcgataata

SEQ ID NO: 228157 - DNA, 13 bp, Artificial Sequence
  Oligonucleotide for detection of SNP TSC0055636
tattatcgacgaa

SEQ ID NO: 228158 - DNA, 13 bp, Artificial Sequence
  Oligonucleotide for detection of SNP TSC0055636
ttcgtcgataata

SEQ ID NO: 228159 - DNA, 13 bp, Artificial Sequence
  Oligonucleotide for detection of SNP TSC0055641
gttatgtggatga

SEQ ID NO: 228160 - DNA, 13 bp, Artificial Sequence
  Oligonucleotide for detection of SNP TSC0055641
tcatccacataac

SEQ ID NO: 228161 - DNA, 13 bp, Artificial Sequence
  Oligonucleotide for detection of SNP TSC0055641
gttacgtggatga

SEQ ID NO: 228162 - DNA, 13 bp, Artificial Sequence
  Oligonucleotide for detection of SNP TSC0055641
tcatccacgtaac

SEQ ID NO: 228163 - DNA, 13 bp, Artificial Sequence
  Oligonucleotide for detection of SNP TSC0055641
gttatgcggatga

SEQ ID NO: 228164 - DNA, 13 bp, Artificial Sequence
  Oligonucleotide for detection of SNP TSC0055641
tcatccgcataac

SEQ ID NO: 228165 - DNA, 13 bp, Artificial Sequence
  Oligonucleotide for detection of SNP TSC0055641
gttacgcggatga

SEQ ID NO: 228166 - DNA, 13 bp, Artificial Sequence
  Oligonucleotide for detection of SNP TSC0055641
tcatccgcgtaac

SEQ ID NO: 228167 - DNA, 13 bp, Artificial Sequence
  Oligonucleotide for detection of SNP TSC0055641
ttatttgtgtggy

SEQ ID NO: 228168 - DNA, 13 bp, Artificial Sequence
  Oligonucleotide for detection of SNP TSC0055641
rccacacaaataa

SEQ ID NO: 228169 - DNA, 13 bp, Artificial Sequence
  Oligonucleotide for detection of SNP TSC0055641
ttatttatgtggy

SEQ ID NO: 228170 - DNA, 13 bp, Artificial Sequence
  Oligonucleotide for detection of SNP TSC0055641
rccacataaataa

SEQ ID NO: 228171 - DNA, 13 bp, Artificial Sequence
  Oligonucleotide for detection of SNP TSC0055641
ttattcgtgtggy

SEQ ID NO: 228172 - DNA, 13 bp, Artificial Sequence
  Oligonucleotide for detection of SNP TSC0055641
rccacacgaataa

SEQ ID NO: 228173 - DNA, 13 bp, Artificial Sequence
  Oligonucleotide for detection of SNP TSC0055641
ttatttacgtggy

SEQ ID NO: 228174 - DNA, 13 bp, Artificial Sequence
  Oligonucleotide for detection of SNP TSC0055641
rccacgtaaataa

SEQ ID NO: 228175 - DNA, 13 bp, Artificial Sequence
  Oligonucleotide for detection of SNP TSC0055641
ttatttgcgtggy

SEQ ID NO: 228176 - DNA, 13 bp, Artificial Sequence
  Oligonucleotide for detection of SNP TSC0055641
rccacgcaaataa

SEQ ID NO: 228177 - DNA, 13 bp, Artificial Sequence
  Oligonucleotide for detection of SNP TSC0055641
ttattcgcgtggy

SEQ ID NO: 228178 - DNA, 13 bp, Artificial Sequence
  Oligonucleotide for detection of SNP TSC0055641
rccacgcgaataa

SEQ ID NO: 228179 - DNA, 13 bp, Artificial Sequence
  Oligonucleotide for detection of SNP TSC0055642
gtgtatattaatt

SEQ ID NO: 228180 - DNA, 13 bp, Artificial Sequence
  Oligonucleotide for detection of SNP TSC0055642
aattaatatacac

SEQ ID NO: 228181 - DNA, 13 bp, Artificial Sequence
  Oligonucleotide for detection of SNP TSC0055642
gtgtattttaatt

SEQ ID NO: 228182 - DNA, 13 bp, Artificial Sequence
  Oligonucleotide for detection of SNP TSC0055642
aattaaaatacac

SEQ ID NO: 228183 - DNA, 13 bp, Artificial Sequence
  Oligonucleotide for detection of SNP TSC0055642
gcgtatattaatt

SEQ ID NO: 228184 - DNA, 13 bp, Artificial Sequence
  Oligonucleotide for detection of SNP TSC0055642
aattaatatacgc

SEQ ID NO: 228185 - DNA, 13 bp, Artificial Sequence
  Oligonucleotide for detection of SNP TSC0055642
gcgtattttaatt

SEQ ID NO: 228186 - DNA, 13 bp, Artificial Sequence
  Oligonucleotide for detection of SNP TSC0055642
aattaaaatacgc

SEQ ID NO: 228187 - DNA, 13 bp, Artificial Sequence
  Oligonucleotide for detection of SNP TSC0055642
agttggtatatgy

SEQ ID NO: 228188 - DNA, 13 bp, Artificial Sequence
  Oligonucleotide for detection of SNP TSC0055642
rcatataccaact

SEQ ID NO: 228189 - DNA, 13 bp, Artificial Sequence
  Oligonucleotide for detection of SNP TSC0055642
agttggaatatgy

SEQ ID NO: 228190 - DNA, 13 bp, Artificial Sequence
  Oligonucleotide for detection of SNP TSC0055642
rcatattccaact

SEQ ID NO: 228191 - DNA, 13 bp, Artificial Sequence
  Oligonucleotide for detection of SNP TSC0055642
agttggtatacgy

SEQ ID NO: 228192 - DNA, 13 bp, Artificial Sequence
  Oligonucleotide for detection of SNP TSC0055642
rcgtataccaact

SEQ ID NO: 228193 - DNA, 13 bp, Artificial Sequence
  Oligonucleotide for detection of SNP TSC0055642
agttggaatacgy

SEQ ID NO: 228194 - DNA, 13 bp, Artificial Sequence
  Oligonucleotide for detection of SNP TSC0055642
rcgtattccaact

SEQ ID NO: 228195 - DNA, 13 bp, Artificial Sequence
  Oligonucleotide for detection of SNP TSC0055643
tattatattgagg

SEQ ID NO: 228196 - DNA, 13 bp, Artificial Sequence
  Oligonucleotide for detection of SNP TSC0055643
cctcaatataata

SEQ ID NO: 228197 - DNA, 13 bp, Artificial Sequence
  Oligonucleotide for detection of SNP TSC0055643
tattattttgagg

SEQ ID NO: 228198 - DNA, 13 bp, Artificial Sequence
  Oligonucleotide for detection of SNP TSC0055643
cctcaaaataata

SEQ ID NO: 228199 - DNA, 13 bp, Artificial Sequence
  Oligonucleotide for detection of SNP TSC0055643
ttttagtatggta

SEQ ID NO: 228200 - DNA, 13 bp, Artificial Sequence
  Oligonucleotide for detection of SNP TSC0055643
taccatactaaaa

SEQ ID NO: 228201 - DNA, 13 bp, Artificial Sequence
  Oligonucleotide for detection of SNP TSC0055643
ttttagaatggta

SEQ ID NO: 228202 - DNA, 13 bp, Artificial Sequence
  Oligonucleotide for detection of SNP TSC0055643
taccattctaaaa

SEQ ID NO: 228203 - DNA, 13 bp, Artificial Sequence
  Oligonucleotide for detection of SNP TSC0055644
ggggtgttaggtg

SEQ ID NO: 228204 - DNA, 13 bp, Artificial Sequence
  Oligonucleotide for detection of SNP TSC0055644
cacctaacacccc

SEQ ID NO: 228205 - DNA, 13 bp, Artificial Sequence
  Oligonucleotide for detection of SNP TSC0055644
ggggtggtaggtg

SEQ ID NO: 228206 - DNA, 13 bp, Artificial Sequence
  Oligonucleotide for detection of SNP TSC0055644
cacctaccacccc

SEQ ID NO: 228207 - DNA, 13 bp, Artificial Sequence
  Oligonucleotide for detection of SNP TSC0055644
tatttggtattty

SEQ ID NO: 228208 - DNA, 13 bp, Artificial Sequence
  Oligonucleotide for detection of SNP TSC0055644
raaataccaaata

SEQ ID NO: 228209 - DNA, 13 bp, Artificial Sequence
  Oligonucleotide for detection of SNP TSC0055644
tatttgttattty

SEQ ID NO: 228210 - DNA, 13 bp, Artificial Sequence
  Oligonucleotide for detection of SNP TSC0055644
raaataacaaata

SEQ ID NO: 228211 - DNA, 13 bp, Artificial Sequence
  Oligonucleotide for detection of SNP TSC0004626
tgaatattttttt

SEQ ID NO: 228212 - DNA, 13 bp, Artificial Sequence
  Oligonucleotide for detection of SNP TSC0004626
aaaaaaatattca

SEQ ID NO: 228213 - DNA, 13 bp, Artificial Sequence
  Oligonucleotide for detection of SNP TSC0004626
cgaataatttttt

SEQ ID NO: 228214 - DNA, 13 bp, Artificial Sequence
  Oligonucleotide for detection of SNP TSC0004626
aaaaaattattcg

SEQ ID NO: 228215 - DNA, 13 bp, Artificial Sequence
  Oligonucleotide for detection of SNP TSC0004626
cgaatattttttt

SEQ ID NO: 228216 - DNA, 13 bp, Artificial Sequence
  Oligonucleotide for detection of SNP TSC0004626
aaaaaaatattcg

SEQ ID NO: 228217 - DNA, 13 bp, Artificial Sequence
  Oligonucleotide for detection of SNP TSC0004626
aaaaaattgtttg

SEQ ID NO: 228218 - DNA, 13 bp, Artificial Sequence
  Oligonucleotide for detection of SNP TSC0004626
caaacaatttttt

SEQ ID NO: 228219 - DNA, 13 bp, Artificial Sequence
  Oligonucleotide for detection of SNP TSC0004626
aaaaaaatgtttg

SEQ ID NO: 228220 - DNA, 13 bp, Artificial Sequence
  Oligonucleotide for detection of SNP TSC0004626
caaacattttttt

SEQ ID NO: 228221 - DNA, 13 bp, Artificial Sequence
  Oligonucleotide for detection of SNP TSC0004626
aaaaaattgttcg

SEQ ID NO: 228222 - DNA, 13 bp, Artificial Sequence
  Oligonucleotide for detection of SNP TSC0004626
cgaacaatttttt

SEQ ID NO: 228223 - DNA, 13 bp, Artificial Sequence
  Oligonucleotide for detection of SNP TSC0004626
aaaaaaatgttcg

SEQ ID NO: 228224 - DNA, 13 bp, Artificial Sequence
  Oligonucleotide for detection of SNP TSC0004626
cgaacattttttt

SEQ ID NO: 228225 - DNA, 13 bp, Artificial Sequence
  Oligonucleotide for detection of SNP TSC0008394
ttgaagaaaggga

SEQ ID NO: 228226 - DNA, 13 bp, Artificial Sequence
  Oligonucleotide for detection of SNP TSC0008394
tccctttcttcaa

SEQ ID NO: 228227 - DNA, 13 bp, Artificial Sequence
  Oligonucleotide for detection of SNP TSC0008394
ttgaaggaaggga

SEQ ID NO: 228228 - DNA, 13 bp, Artificial Sequence
  Oligonucleotide for detection of SNP TSC0008394
tcccttccttcaa

SEQ ID NO: 228229 - DNA, 13 bp, Artificial Sequence
  Oligonucleotide for detection of SNP TSC0055649
tagttttttattt

SEQ ID NO: 228230 - DNA, 13 bp, Artificial Sequence
  Oligonucleotide for detection of SNP TSC0055649
aaataaaaaacta

SEQ ID NO: 228231 - DNA, 13 bp, Artificial Sequence
  Oligonucleotide for detection of SNP TSC0055649
agatgaaagattg

SEQ ID NO: 228232 - DNA, 13 bp, Artificial Sequence
  Oligonucleotide for detection of SNP TSC0055649
caatctttcatct

SEQ ID NO: 228233 - DNA, 13 bp, Artificial Sequence
  Oligonucleotide for detection of SNP TSC0055649
agatgatagattg

SEQ ID NO: 228234 - DNA, 13 bp, Artificial Sequence
  Oligonucleotide for detection of SNP TSC0055649
caatctatcatct

SEQ ID NO: 228235 - DNA, 13 bp, Artificial Sequence
  Oligonucleotide for detection of SNP TSC0055651
attgtagttattg

SEQ ID NO: 228236 - DNA, 13 bp, Artificial Sequence
  Oligonucleotide for detection of SNP TSC0055651
caataactacaat

SEQ ID NO: 228237 - DNA, 13 bp, Artificial Sequence
  Oligonucleotide for detection of SNP TSC0055651
attgtaattattg

SEQ ID NO: 228238 - DNA, 13 bp, Artificial Sequence
  Oligonucleotide for detection of SNP TSC0055651
caataattacaat

SEQ ID NO: 228239 - DNA, 13 bp, Artificial Sequence
  Oligonucleotide for detection of SNP TSC0055655
agaatgatgttaa

SEQ ID NO: 228240 - DNA, 13 bp, Artificial Sequence
  Oligonucleotide for detection of SNP TSC0055655
ttaacatcattct

SEQ ID NO: 228241 - DNA, 13 bp, Artificial Sequence
  Oligonucleotide for detection of SNP TSC0055655
agaatgttgttaa

SEQ ID NO: 228242 - DNA, 13 bp, Artificial Sequence
  Oligonucleotide for detection of SNP TSC0055655
ttaacaacattct

SEQ ID NO: 228243 - DNA, 13 bp, Artificial Sequence
  Oligonucleotide for detection of SNP TSC0055655
ttaatattatttt

SEQ ID NO: 228244 - DNA, 13 bp, Artificial Sequence
  Oligonucleotide for detection of SNP TSC0055655
aaaataatattaa

SEQ ID NO: 228245 - DNA, 13 bp, Artificial Sequence
  Oligonucleotide for detection of SNP TSC0055655
ttaataatatttt

SEQ ID NO: 228246 - DNA, 13 bp, Artificial Sequence
  Oligonucleotide for detection of SNP TSC0055655
aaaatattattaa

SEQ ID NO: 228247 - DNA, 13 bp, Artificial Sequence
  Oligonucleotide for detection of SNP TSC0055657
agttaatgtttgg

SEQ ID NO: 228248 - DNA, 13 bp, Artificial Sequence
  Oligonucleotide for detection of SNP TSC0055657
ccaaacattaact

SEQ ID NO: 228249 - DNA, 13 bp, Artificial Sequence
  Oligonucleotide for detection of SNP TSC0055657
agttaacgtttgg

SEQ ID NO: 228250 - DNA, 13 bp, Artificial Sequence
  Oligonucleotide for detection of SNP TSC0055657
ccaaacgttaact

SEQ ID NO: 228251 - DNA, 13 bp, Artificial Sequence
  Oligonucleotide for detection of SNP TSC0055657
ttaggtgttgatt

SEQ ID NO: 228252 - DNA, 13 bp, Artificial Sequence
  Oligonucleotide for detection of SNP TSC0055657
aatcaacacctaa

SEQ ID NO: 228253 - DNA, 13 bp, Artificial Sequence
  Oligonucleotide for detection of SNP TSC0055657
ttaggtattgatt

SEQ ID NO: 228254 - DNA, 13 bp, Artificial Sequence
  Oligonucleotide for detection of SNP TSC0055657
aatcaatacctaa

SEQ ID NO: 228255 - DNA, 13 bp, Artificial Sequence
  Oligonucleotide for detection of SNP TSC0055657
ttaggcgttgatt

SEQ ID NO: 228256 - DNA, 13 bp, Artificial Sequence
  Oligonucleotide for detection of SNP TSC0055657
aatcaacgcctaa

SEQ ID NO: 228257 - DNA, 13 bp, Artificial Sequence
  Oligonucleotide for detection of SNP TSC0055658
tgtaaatggtata

SEQ ID NO: 228258 - DNA, 13 bp, Artificial Sequence
  Oligonucleotide for detection of SNP TSC0055658
tataccatttaca

SEQ ID NO: 228259 - DNA, 13 bp, Artificial Sequence
  Oligonucleotide for detection of SNP TSC0055658
tgtaaagggtata

SEQ ID NO: 228260 - DNA, 13 bp, Artificial Sequence
  Oligonucleotide for detection of SNP TSC0055658
tataccctttaca

SEQ ID NO: 228261 - DNA, 13 bp, Artificial Sequence
  Oligonucleotide for detection of SNP TSC0055659
gtttataatagta

SEQ ID NO: 228262 - DNA, 13 bp, Artificial Sequence
  Oligonucleotide for detection of SNP TSC0055659
tactattataaac

SEQ ID NO: 228263 - DNA, 13 bp, Artificial Sequence
  Oligonucleotide for detection of SNP TSC0055659
gtttattatagta

SEQ ID NO: 228264 - DNA, 13 bp, Artificial Sequence
  Oligonucleotide for detection of SNP TSC0055659
tactataataaac

SEQ ID NO: 228265 - DNA, 13 bp, Artificial Sequence
  Oligonucleotide for detection of SNP TSC0055659
tgttattataaay

SEQ ID NO: 228266 - DNA, 13 bp, Artificial Sequence
  Oligonucleotide for detection of SNP TSC0055659
rtttataataaca

SEQ ID NO: 228267 - DNA, 13 bp, Artificial Sequence
  Oligonucleotide for detection of SNP TSC0055659
tgttataataaay

SEQ ID NO: 228268 - DNA, 13 bp, Artificial Sequence
  Oligonucleotide for detection of SNP TSC0055659
rtttattataaca

SEQ ID NO: 228269 - DNA, 13 bp, Artificial Sequence
  Oligonucleotide for detection of SNP TSC0055660
aatttagtattat

SEQ ID NO: 228270 - DNA, 13 bp, Artificial Sequence
  Oligonucleotide for detection of SNP TSC0055660
ataatactaaatt

SEQ ID NO: 228271 - DNA, 13 bp, Artificial Sequence
  Oligonucleotide for detection of SNP TSC0055660
aatttaatattat

SEQ ID NO: 228272 - DNA, 13 bp, Artificial Sequence
  Oligonucleotide for detection of SNP TSC0055660
ataatattaaatt

SEQ ID NO: 228273 - DNA, 13 bp, Artificial Sequence
  Oligonucleotide for detection of SNP TSC0055661
ggatgaataagty

SEQ ID NO: 228274 - DNA, 13 bp, Artificial Sequence
  Oligonucleotide for detection of SNP TSC0055661
racttattcatcc

SEQ ID NO: 228275 - DNA, 13 bp, Artificial Sequence
  Oligonucleotide for detection of SNP TSC0055661
ggatgattaagty

SEQ ID NO: 228276 - DNA, 13 bp, Artificial Sequence
  Oligonucleotide for detection of SNP TSC0055661
racttaatcatcc

SEQ ID NO: 228277 - DNA, 13 bp, Artificial Sequence
  Oligonucleotide for detection of SNP TSC0055661
gatttatttatty

SEQ ID NO: 228278 - DNA, 13 bp, Artificial Sequence
  Oligonucleotide for detection of SNP TSC0055661
raataaataaatc

SEQ ID NO: 228279 - DNA, 13 bp, Artificial Sequence
  Oligonucleotide for detection of SNP TSC0055661
gatttaattatty

SEQ ID NO: 228280 - DNA, 13 bp, Artificial Sequence
  Oligonucleotide for detection of SNP TSC0055661
raataattaaatc

SEQ ID NO: 228281 - DNA, 13 bp, Artificial Sequence
  Oligonucleotide for detection of SNP TSC0055666
agatatgtttttt

SEQ ID NO: 228282 - DNA, 13 bp, Artificial Sequence
  Oligonucleotide for detection of SNP TSC0055666
aaaaaacatatct

SEQ ID NO: 228283 - DNA, 13 bp, Artificial Sequence
  Oligonucleotide for detection of SNP TSC0055666
agatacgtttttt

SEQ ID NO: 228284 - DNA, 13 bp, Artificial Sequence
  Oligonucleotide for detection of SNP TSC0055666
aaaaaacgtatct

SEQ ID NO: 228285 - DNA, 13 bp, Artificial Sequence
  Oligonucleotide for detection of SNP TSC0055666
aaaaaaggtattt

SEQ ID NO: 228286 - DNA, 13 bp, Artificial Sequence
  Oligonucleotide for detection of SNP TSC0055666
aaatacctttttt

SEQ ID NO: 228287 - DNA, 13 bp, Artificial Sequence
  Oligonucleotide for detection of SNP TSC0055666
aaaaaaagtattt

SEQ ID NO: 228288 - DNA, 13 bp, Artificial Sequence
  Oligonucleotide for detection of SNP TSC0055666
aaatacttttttt

SEQ ID NO: 228289 - DNA, 13 bp, Artificial Sequence
  Oligonucleotide for detection of SNP TSC0055666
aaaaaatgtattt

SEQ ID NO: 228290 - DNA, 13 bp, Artificial Sequence
  Oligonucleotide for detection of SNP TSC0055666
aaatacatttttt

SEQ ID NO: 228291 - DNA, 13 bp, Artificial Sequence
  Oligonucleotide for detection of SNP TSC0055666
aaaaaacgtattt

SEQ ID NO: 228292 - DNA, 13 bp, Artificial Sequence
  Oligonucleotide for detection of SNP TSC0055666
aaatacgtttttt

SEQ ID NO: 228293 - DNA, 13 bp, Artificial Sequence
  Oligonucleotide for detection of SNP TSC0055667
tgatttattagtt

SEQ ID NO: 228294 - DNA, 13 bp, Artificial Sequence
  Oligonucleotide for detection of SNP TSC0055667
aactaataaatca

SEQ ID NO: 228295 - DNA, 13 bp, Artificial Sequence
  Oligonucleotide for detection of SNP TSC0055667
tgattttttagtt

SEQ ID NO: 228296 - DNA, 13 bp, Artificial Sequence
  Oligonucleotide for detection of SNP TSC0055667
aactaaaaaatca

SEQ ID NO: 228297 - DNA, 13 bp, Artificial Sequence
  Oligonucleotide for detection of SNP TSC0055667
aattgataaatta

SEQ ID NO: 228298 - DNA, 13 bp, Artificial Sequence
  Oligonucleotide for detection of SNP TSC0055667
taatttatcaatt

SEQ ID NO: 228299 - DNA, 13 bp, Artificial Sequence
  Oligonucleotide for detection of SNP TSC0055667
aattgagaaatta

SEQ ID NO: 228300 - DNA, 13 bp, Artificial Sequence
  Oligonucleotide for detection of SNP TSC0055667
taatttctcaatt

SEQ ID NO: 228301 - DNA, 13 bp, Artificial Sequence
  Oligonucleotide for detection of SNP TSC0055667
aattgaaaaatta

SEQ ID NO: 228302 - DNA, 13 bp, Artificial Sequence
  Oligonucleotide for detection of SNP TSC0055667
taatttttcaatt

SEQ ID NO: 228303 - DNA, 13 bp, Artificial Sequence
  Oligonucleotide for detection of SNP TSC0055669
atagagtgaggtt

SEQ ID NO: 228304 - DNA, 13 bp, Artificial Sequence
  Oligonucleotide for detection of SNP TSC0055669
aacctcactctat

SEQ ID NO: 228305 - DNA, 13 bp, Artificial Sequence
  Oligonucleotide for detection of SNP TSC0055669
atagagcgaggtt

SEQ ID NO: 228306 - DNA, 13 bp, Artificial Sequence
  Oligonucleotide for detection of SNP TSC0055669
aacctcgctctat

SEQ ID NO: 228307 - DNA, 13 bp, Artificial Sequence
  Oligonucleotide for detection of SNP TSC0055671
agttatgtaaaay

SEQ ID NO: 228308 - DNA, 13 bp, Artificial Sequence
  Oligonucleotide for detection of SNP TSC0055671
rttttacataact

SEQ ID NO: 228309 - DNA, 13 bp, Artificial Sequence
  Oligonucleotide for detection of SNP TSC0055671
agttatataaaay

SEQ ID NO: 228310 - DNA, 13 bp, Artificial Sequence
  Oligonucleotide for detection of SNP TSC0055671
rttttatataact

SEQ ID NO: 228311 - DNA, 13 bp, Artificial Sequence
  Oligonucleotide for detection of SNP TSC0055673
agaaaaaaatatg

SEQ ID NO: 228312 - DNA, 13 bp, Artificial Sequence
  Oligonucleotide for detection of SNP TSC0055673
catatttttttct

SEQ ID NO: 228313 - DNA, 13 bp, Artificial Sequence
  Oligonucleotide for detection of SNP TSC0055673
agaaaagaatatg

SEQ ID NO: 228314 - DNA, 13 bp, Artificial Sequence
  Oligonucleotide for detection of SNP TSC0055673
catattcttttct

SEQ ID NO: 228315 - DNA, 13 bp, Artificial Sequence
  Oligonucleotide for detection of SNP TSC0055674
gattgatatggat

SEQ ID NO: 228316 - DNA, 13 bp, Artificial Sequence
  Oligonucleotide for detection of SNP TSC0055674
atccatatcaatc

SEQ ID NO: 228317 - DNA, 13 bp, Artificial Sequence
  Oligonucleotide for detection of SNP TSC0055674
gattgagatggat

SEQ ID NO: 228318 - DNA, 13 bp, Artificial Sequence
  Oligonucleotide for detection of SNP TSC0055674
atccatctcaatc

SEQ ID NO: 228319 - DNA, 13 bp, Artificial Sequence
  Oligonucleotide for detection of SNP TSC0055674
atttatattagty

SEQ ID NO: 228320 - DNA, 13 bp, Artificial Sequence
  Oligonucleotide for detection of SNP TSC0055674
ractaatataaat

SEQ ID NO: 228321 - DNA, 13 bp, Artificial Sequence
  Oligonucleotide for detection of SNP TSC0055674
atttattttagty

SEQ ID NO: 228322 - DNA, 13 bp, Artificial Sequence
  Oligonucleotide for detection of SNP TSC0055674
ractaaaataaat

SEQ ID NO: 228323 - DNA, 13 bp, Artificial Sequence
  Oligonucleotide for detection of SNP TSC0055677
atattgtaaggta

SEQ ID NO: 228324 - DNA, 13 bp, Artificial Sequence
  Oligonucleotide for detection of SNP TSC0055677
taccttacaatat

SEQ ID NO: 228325 - DNA, 13 bp, Artificial Sequence
  Oligonucleotide for detection of SNP TSC0055677
atattggaaggta

SEQ ID NO: 228326 - DNA, 13 bp, Artificial Sequence
  Oligonucleotide for detection of SNP TSC0055677
taccttccaatat

SEQ ID NO: 228327 - DNA, 13 bp, Artificial Sequence
  Oligonucleotide for detection of SNP TSC0055677
tattttataatgt

SEQ ID NO: 228328 - DNA, 13 bp, Artificial Sequence
  Oligonucleotide for detection of SNP TSC0055677
acattataaaata

SEQ ID NO: 228329 - DNA, 13 bp, Artificial Sequence
  Oligonucleotide for detection of SNP TSC0055677
tattttttaatgt

SEQ ID NO: 228330 - DNA, 13 bp, Artificial Sequence
  Oligonucleotide for detection of SNP TSC0055677
acattaaaaaata

SEQ ID NO: 228331 - DNA, 13 bp, Artificial Sequence
  Oligonucleotide for detection of SNP TSC0009567
gtttttatagaga

SEQ ID NO: 228332 - DNA, 13 bp, Artificial Sequence
  Oligonucleotide for detection of SNP TSC0009567
tctctataaaaac

SEQ ID NO: 228333 - DNA, 13 bp, Artificial Sequence
  Oligonucleotide for detection of SNP TSC0009567
gtttttgtagaga

SEQ ID NO: 228334 - DNA, 13 bp, Artificial Sequence
  Oligonucleotide for detection of SNP TSC0009567
tctctacaaaaac

SEQ ID NO: 228335 - DNA, 13 bp, Artificial Sequence
  Oligonucleotide for detection of SNP TSC0009567
gttttcgtagaga

SEQ ID NO: 228336 - DNA, 13 bp, Artificial Sequence
  Oligonucleotide for detection of SNP TSC0009567
tctctacgaaaac

SEQ ID NO: 228337 - DNA, 13 bp, Artificial Sequence
  Oligonucleotide for detection of SNP TSC0009567
tttttatggaagy

SEQ ID NO: 228338 - DNA, 13 bp, Artificial Sequence
  Oligonucleotide for detection of SNP TSC0009567
rcttccataaaaa

SEQ ID NO: 228339 - DNA, 13 bp, Artificial Sequence
  Oligonucleotide for detection of SNP TSC0009567
tttttacggaagy

SEQ ID NO: 228340 - DNA, 13 bp, Artificial Sequence
  Oligonucleotide for detection of SNP TSC0009567
rcttccgtaaaaa

SEQ ID NO: 228341 - DNA, 13 bp, Artificial Sequence
  Oligonucleotide for detection of SNP TSC0055680
tgttggataattg

SEQ ID NO: 228342 - DNA, 13 bp, Artificial Sequence
  Oligonucleotide for detection of SNP TSC0055680
caattatccaaca

SEQ ID NO: 228343 - DNA, 13 bp, Artificial Sequence
  Oligonucleotide for detection of SNP TSC0055680
tgttggttaattg

SEQ ID NO: 228344 - DNA, 13 bp, Artificial Sequence
  Oligonucleotide for detection of SNP TSC0055680
caattaaccaaca

SEQ ID NO: 228345 - DNA, 13 bp, Artificial Sequence
  Oligonucleotide for detection of SNP TSC0055680
taattatttagta

SEQ ID NO: 228346 - DNA, 13 bp, Artificial Sequence
  Oligonucleotide for detection of SNP TSC0055680
tactaaataatta

SEQ ID NO: 228347 - DNA, 13 bp, Artificial Sequence
  Oligonucleotide for detection of SNP TSC0055683
attataggtgtay

SEQ ID NO: 228348 - DNA, 13 bp, Artificial Sequence
  Oligonucleotide for detection of SNP TSC0055683
rtacacctataat

SEQ ID NO: 228349 - DNA, 13 bp, Artificial Sequence
  Oligonucleotide for detection of SNP TSC0055683
attataagtgtay

SEQ ID NO: 228350 - DNA, 13 bp, Artificial Sequence
  Oligonucleotide for detection of SNP TSC0055683
rtacacttataat

SEQ ID NO: 228351 - DNA, 13 bp, Artificial Sequence
  Oligonucleotide for detection of SNP TSC0055684
ttaaaaataaaay

SEQ ID NO: 228352 - DNA, 13 bp, Artificial Sequence
  Oligonucleotide for detection of SNP TSC0055684
rttttatttttaa

SEQ ID NO: 228353 - DNA, 13 bp, Artificial Sequence
  Oligonucleotide for detection of SNP TSC0055684
ttaaaattaaaay

SEQ ID NO: 228354 - DNA, 13 bp, Artificial Sequence
  Oligonucleotide for detection of SNP TSC0055684
rttttaattttaa

SEQ ID NO: 228355 - DNA, 13 bp, Artificial Sequence
  Oligonucleotide for detection of SNP TSC0004658
aattttgtttaga

SEQ ID NO: 228356 - DNA, 13 bp, Artificial Sequence
  Oligonucleotide for detection of SNP TSC0004658
tctaaacaaaatt

SEQ ID NO: 228357 - DNA, 13 bp, Artificial Sequence
  Oligonucleotide for detection of SNP TSC0004658
aattttatttaga

SEQ ID NO: 228358 - DNA, 13 bp, Artificial Sequence
  Oligonucleotide for detection of SNP TSC0004658
tctaaataaaatt

SEQ ID NO: 228359 - DNA, 13 bp, Artificial Sequence
  Oligonucleotide for detection of SNP TSC0055689
tttaaagtttaga

SEQ ID NO: 228360 - DNA, 13 bp, Artificial Sequence
  Oligonucleotide for detection of SNP TSC0055689
tctaaactttaaa

SEQ ID NO: 228361 - DNA, 13 bp, Artificial Sequence
  Oligonucleotide for detection of SNP TSC0055689
tttaaaatttaga

SEQ ID NO: 228362 - DNA, 13 bp, Artificial Sequence
  Oligonucleotide for detection of SNP TSC0055689
tctaaattttaaa

SEQ ID NO: 228363 - DNA, 13 bp, Artificial Sequence
  Oligonucleotide for detection of SNP TSC0055692
aattttattaagg

SEQ ID NO: 228364 - DNA, 13 bp, Artificial Sequence
  Oligonucleotide for detection of SNP TSC0055692
ccttaataaaatt

SEQ ID NO: 228365 - DNA, 13 bp, Artificial Sequence
  Oligonucleotide for detection of SNP TSC0055692
aatttttttaagg

SEQ ID NO: 228366 - DNA, 13 bp, Artificial Sequence
  Oligonucleotide for detection of SNP TSC0055692
ccttaaaaaaatt

SEQ ID NO: 228367 - DNA, 13 bp, Artificial Sequence
  Oligonucleotide for detection of SNP TSC0055692
ttttggtggagtt

SEQ ID NO: 228368 - DNA, 13 bp, Artificial Sequence
  Oligonucleotide for detection of SNP TSC0055692
aactccaccaaaa

SEQ ID NO: 228369 - DNA, 13 bp, Artificial Sequence
  Oligonucleotide for detection of SNP TSC0055692
ttttggaggagtt

SEQ ID NO: 228370 - DNA, 13 bp, Artificial Sequence
  Oligonucleotide for detection of SNP TSC0055692
aactcctccaaaa

SEQ ID NO: 228371 - DNA, 13 bp, Artificial Sequence
  Oligonucleotide for detection of SNP TSC0055694
ttttttaatagtg

SEQ ID NO: 228372 - DNA, 13 bp, Artificial Sequence
  Oligonucleotide for detection of SNP TSC0055694
cactattaaaaaa

SEQ ID NO: 228373 - DNA, 13 bp, Artificial Sequence
  Oligonucleotide for detection of SNP TSC0055694
ttttttgatagtg

SEQ ID NO: 228374 - DNA, 13 bp, Artificial Sequence
  Oligonucleotide for detection of SNP TSC0055694
cactatcaaaaaa

SEQ ID NO: 228375 - DNA, 13 bp, Artificial Sequence
  Oligonucleotide for detection of SNP TSC0055694
tttttcgatagtg

SEQ ID NO: 228376 - DNA, 13 bp, Artificial Sequence
  Oligonucleotide for detection of SNP TSC0055694
cactatcgaaaaa

SEQ ID NO: 228377 - DNA, 13 bp, Artificial Sequence
  Oligonucleotide for detection of SNP TSC0055694
tattgttgaaaag

SEQ ID NO: 228378 - DNA, 13 bp, Artificial Sequence
  Oligonucleotide for detection of SNP TSC0055694
cttttcaacaata

SEQ ID NO: 228379 - DNA, 13 bp, Artificial Sequence
  Oligonucleotide for detection of SNP TSC0055694
tattgtcgaaaag

SEQ ID NO: 228380 - DNA, 13 bp, Artificial Sequence
  Oligonucleotide for detection of SNP TSC0055694
cttttcgacaata

SEQ ID NO: 228381 - DNA, 13 bp, Artificial Sequence
  Oligonucleotide for detection of SNP TSC0055695
attgtagtatatt

SEQ ID NO: 228382 - DNA, 13 bp, Artificial Sequence
  Oligonucleotide for detection of SNP TSC0055695
aatatactacaat

SEQ ID NO: 228383 - DNA, 13 bp, Artificial Sequence
  Oligonucleotide for detection of SNP TSC0055695
attgtaatatatt

SEQ ID NO: 228384 - DNA, 13 bp, Artificial Sequence
  Oligonucleotide for detection of SNP TSC0055695
aatatattacaat

SEQ ID NO: 228385 - DNA, 13 bp, Artificial Sequence
  Oligonucleotide for detection of SNP TSC0055697
agttaatattata

SEQ ID NO: 228386 - DNA, 13 bp, Artificial Sequence
  Oligonucleotide for detection of SNP TSC0055697
tataatattaact

SEQ ID NO: 228387 - DNA, 13 bp, Artificial Sequence
  Oligonucleotide for detection of SNP TSC0055697
agttaagattata

SEQ ID NO: 228388 - DNA, 13 bp, Artificial Sequence
  Oligonucleotide for detection of SNP TSC0055697
tataatcttaact

SEQ ID NO: 228389 - DNA, 13 bp, Artificial Sequence
  Oligonucleotide for detection of SNP TSC0055697
tgtgatgttggtt

SEQ ID NO: 228390 - DNA, 13 bp, Artificial Sequence
  Oligonucleotide for detection of SNP TSC0055697
aaccaacatcaca

SEQ ID NO: 228391 - DNA, 13 bp, Artificial Sequence
  Oligonucleotide for detection of SNP TSC0055697
tgtgattttggtt

SEQ ID NO: 228392 - DNA, 13 bp, Artificial Sequence
  Oligonucleotide for detection of SNP TSC0055697
aaccaaaatcaca

SEQ ID NO: 228393 - DNA, 13 bp, Artificial Sequence
  Oligonucleotide for detection of SNP TSC0055698
tttaaatgtagaa

SEQ ID NO: 228394 - DNA, 13 bp, Artificial Sequence
  Oligonucleotide for detection of SNP TSC0055698
ttctacatttaaa

SEQ ID NO: 228395 - DNA, 13 bp, Artificial Sequence
  Oligonucleotide for detection of SNP TSC0055698
tttaaacgtagaa

SEQ ID NO: 228396 - DNA, 13 bp, Artificial Sequence
  Oligonucleotide for detection of SNP TSC0055698
ttctacgtttaaa

SEQ ID NO: 228397 - DNA, 13 bp, Artificial Sequence
  Oligonucleotide for detection of SNP TSC0055701
tattttataagtt

SEQ ID NO: 228398 - DNA, 13 bp, Artificial Sequence
  Oligonucleotide for detection of SNP TSC0055701
aacttataaaata

SEQ ID NO: 228399 - DNA, 13 bp, Artificial Sequence
  Oligonucleotide for detection of SNP TSC0055701
tattttgtaagtt

SEQ ID NO: 228400 - DNA, 13 bp, Artificial Sequence
  Oligonucleotide for detection of SNP TSC0055701
aacttacaaaata

SEQ ID NO: 228401 - DNA, 13 bp, Artificial Sequence
  Oligonucleotide for detection of SNP TSC0055701
tatttcgtaagtt

SEQ ID NO: 228402 - DNA, 13 bp, Artificial Sequence
  Oligonucleotide for detection of SNP TSC0055701
aacttacgaaata

SEQ ID NO: 228403 - DNA, 13 bp, Artificial Sequence
  Oligonucleotide for detection of SNP TSC0055701
aatttatgggata

SEQ ID NO: 228404 - DNA, 13 bp, Artificial Sequence
  Oligonucleotide for detection of SNP TSC0055701
tatcccataaatt

SEQ ID NO: 228405 - DNA, 13 bp, Artificial Sequence
  Oligonucleotide for detection of SNP TSC0055701
aatttacgggata

SEQ ID NO: 228406 - DNA, 13 bp, Artificial Sequence
  Oligonucleotide for detection of SNP TSC0055701
tatcccgtaaatt

SEQ ID NO: 228407 - DNA, 13 bp, Artificial Sequence
  Oligonucleotide for detection of SNP TSC0055702
ttgttaagtattt

SEQ ID NO: 228408 - DNA, 13 bp, Artificial Sequence
  Oligonucleotide for detection of SNP TSC0055702
aaatacttaacaa

SEQ ID NO: 228409 - DNA, 13 bp, Artificial Sequence
  Oligonucleotide for detection of SNP TSC0055702
ttgttaggtattt

SEQ ID NO: 228410 - DNA, 13 bp, Artificial Sequence
  Oligonucleotide for detection of SNP TSC0055702
aaatacctaacaa

SEQ ID NO: 228411 - DNA, 13 bp, Artificial Sequence
  Oligonucleotide for detection of SNP TSC0055704
ttaaggtgatgtt

SEQ ID NO: 228412 - DNA, 13 bp, Artificial Sequence
  Oligonucleotide for detection of SNP TSC0055704
aacatcaccttaa

SEQ ID NO: 228413 - DNA, 13 bp, Artificial Sequence
  Oligonucleotide for detection of SNP TSC0055704
ttaaggggatgtt

SEQ ID NO: 228414 - DNA, 13 bp, Artificial Sequence
  Oligonucleotide for detection of SNP TSC0055704
aacatccccttaa

SEQ ID NO: 228415 - DNA, 13 bp, Artificial Sequence
  Oligonucleotide for detection of SNP TSC0055704
ttaaggcgatgtt

SEQ ID NO: 228416 - DNA, 13 bp, Artificial Sequence
  Oligonucleotide for detection of SNP TSC0055704
aacatcgccttaa

SEQ ID NO: 228417 - DNA, 13 bp, Artificial Sequence
  Oligonucleotide for detection of SNP TSC0055704
agtattgttttga

SEQ ID NO: 228418 - DNA, 13 bp, Artificial Sequence
  Oligonucleotide for detection of SNP TSC0055704
tcaaaacaatact

SEQ ID NO: 228419 - DNA, 13 bp, Artificial Sequence
  Oligonucleotide for detection of SNP TSC0055704
agtatttttttga

SEQ ID NO: 228420 - DNA, 13 bp, Artificial Sequence
  Oligonucleotide for detection of SNP TSC0055704
tcaaaaaaatact

SEQ ID NO: 228421 - DNA, 13 bp, Artificial Sequence
  Oligonucleotide for detection of SNP TSC0055704
agtatcgttttga

SEQ ID NO: 228422 - DNA, 13 bp, Artificial Sequence
  Oligonucleotide for detection of SNP TSC0055704
tcaaaacgatact

SEQ ID NO: 228423 - DNA, 13 bp, Artificial Sequence
  Oligonucleotide for detection of SNP TSC0055705
tttgtatgtattt

SEQ ID NO: 228424 - DNA, 13 bp, Artificial Sequence
  Oligonucleotide for detection of SNP TSC0055705
aaatacatacaaa

SEQ ID NO: 228425 - DNA, 13 bp, Artificial Sequence
  Oligonucleotide for detection of SNP TSC0055705
tttgtaggtattt

SEQ ID NO: 228426 - DNA, 13 bp, Artificial Sequence
  Oligonucleotide for detection of SNP TSC0055705
aaatacctacaaa

SEQ ID NO: 228427 - DNA, 13 bp, Artificial Sequence
  Oligonucleotide for detection of SNP TSC0055705
tttgtacgtattt

SEQ ID NO: 228428 - DNA, 13 bp, Artificial Sequence
  Oligonucleotide for detection of SNP TSC0055705
aaatacgtacaaa

SEQ ID NO: 228429 - DNA, 13 bp, Artificial Sequence
  Oligonucleotide for detection of SNP TSC0055705
aagtatgtatagg

SEQ ID NO: 228430 - DNA, 13 bp, Artificial Sequence
  Oligonucleotide for detection of SNP TSC0055705
cctatacatactt

SEQ ID NO: 228431 - DNA, 13 bp, Artificial Sequence
  Oligonucleotide for detection of SNP TSC0055705
aagtatttatagg

SEQ ID NO: 228432 - DNA, 13 bp, Artificial Sequence
  Oligonucleotide for detection of SNP TSC0055705
cctataaatactt

SEQ ID NO: 228433 - DNA, 13 bp, Artificial Sequence
  Oligonucleotide for detection of SNP TSC0055705
aagtacgtatagg

SEQ ID NO: 228434 - DNA, 13 bp, Artificial Sequence
  Oligonucleotide for detection of SNP TSC0055705
cctatacgtactt

SEQ ID NO: 228435 - DNA, 13 bp, Artificial Sequence
  Oligonucleotide for detection of SNP TSC0055708
aagattatattta

SEQ ID NO: 228436 - DNA, 13 bp, Artificial Sequence
  Oligonucleotide for detection of SNP TSC0055708
taaatataatctt

SEQ ID NO: 228437 - DNA, 13 bp, Artificial Sequence
  Oligonucleotide for detection of SNP TSC0055708
aagattgtattta

SEQ ID NO: 228438 - DNA, 13 bp, Artificial Sequence
  Oligonucleotide for detection of SNP TSC0055708
taaatacaatctt

SEQ ID NO: 228439 - DNA, 13 bp, Artificial Sequence
  Oligonucleotide for detection of SNP TSC0055708
aagatcgtattta

SEQ ID NO: 228440 - DNA, 13 bp, Artificial Sequence
  Oligonucleotide for detection of SNP TSC0055708
taaatacgatctt

SEQ ID NO: 228441 - DNA, 13 bp, Artificial Sequence
  Oligonucleotide for detection of SNP TSC0055708
tgagtatggtttt

SEQ ID NO: 228442 - DNA, 13 bp, Artificial Sequence
  Oligonucleotide for detection of SNP TSC0055708
aaaaccatactca

SEQ ID NO: 228443 - DNA, 13 bp, Artificial Sequence
  Oligonucleotide for detection of SNP TSC0055708
tgagtacggtttt

SEQ ID NO: 228444 - DNA, 13 bp, Artificial Sequence
  Oligonucleotide for detection of SNP TSC0055708
aaaaccgtactca

SEQ ID NO: 228445 - DNA, 13 bp, Artificial Sequence
  Oligonucleotide for detection of SNP TSC0055709
tgggtttgtgatt

SEQ ID NO: 228446 - DNA, 13 bp, Artificial Sequence
  Oligonucleotide for detection of SNP TSC0055709
aatcacaaaccca

SEQ ID NO: 228447 - DNA, 13 bp, Artificial Sequence
  Oligonucleotide for detection of SNP TSC0055709
tgggttggtgatt

SEQ ID NO: 228448 - DNA, 13 bp, Artificial Sequence
  Oligonucleotide for detection of SNP TSC0055709
aatcaccaaccca

SEQ ID NO: 228449 - DNA, 13 bp, Artificial Sequence
  Oligonucleotide for detection of SNP TSC0055710
gttattagtattt

SEQ ID NO: 228450 - DNA, 13 bp, Artificial Sequence
  Oligonucleotide for detection of SNP TSC0055710
aaatactaataac

SEQ ID NO: 228451 - DNA, 13 bp, Artificial Sequence
  Oligonucleotide for detection of SNP TSC0055711
tatttattttgtt

SEQ ID NO: 228452 - DNA, 13 bp, Artificial Sequence
  Oligonucleotide for detection of SNP TSC0055711
aacaaaataaata

SEQ ID NO: 228453 - DNA, 13 bp, Artificial Sequence
  Oligonucleotide for detection of SNP TSC0055711
tatttagtttgtt

SEQ ID NO: 228454 - DNA, 13 bp, Artificial Sequence
  Oligonucleotide for detection of SNP TSC0055711
aacaaactaaata

SEQ ID NO: 228455 - DNA, 13 bp, Artificial Sequence
  Oligonucleotide for detection of SNP TSC0055711
aataaagtgggta

SEQ ID NO: 228456 - DNA, 13 bp, Artificial Sequence
  Oligonucleotide for detection of SNP TSC0055711
tacccactttatt

SEQ ID NO: 228457 - DNA, 13 bp, Artificial Sequence
  Oligonucleotide for detection of SNP TSC0055711
aataaaatgggta

SEQ ID NO: 228458 - DNA, 13 bp, Artificial Sequence
  Oligonucleotide for detection of SNP TSC0055711
tacccattttatt

SEQ ID NO: 228459 - DNA, 13 bp, Artificial Sequence
  Oligonucleotide for detection of SNP TSC0055711
aataaattgggta

SEQ ID NO: 228460 - DNA, 13 bp, Artificial Sequence
  Oligonucleotide for detection of SNP TSC0055711
tacccaatttatt

SEQ ID NO: 228461 - DNA, 13 bp, Artificial Sequence
  Oligonucleotide for detection of SNP TSC0009725
gattttttaaggg

SEQ ID NO: 228462 - DNA, 13 bp, Artificial Sequence
  Oligonucleotide for detection of SNP TSC0009725
cccttaaaaaatc

SEQ ID NO: 228463 - DNA, 13 bp, Artificial Sequence
  Oligonucleotide for detection of SNP TSC0009725
gattttgtaaggg

SEQ ID NO: 228464 - DNA, 13 bp, Artificial Sequence
  Oligonucleotide for detection of SNP TSC0009725
cccttacaaaatc

SEQ ID NO: 228465 - DNA, 13 bp, Artificial Sequence
  Oligonucleotide for detection of SNP TSC0009725
tttttagagagty

SEQ ID NO: 228466 - DNA, 13 bp, Artificial Sequence
  Oligonucleotide for detection of SNP TSC0009725
ractctctaaaaa

SEQ ID NO: 228467 - DNA, 13 bp, Artificial Sequence
  Oligonucleotide for detection of SNP TSC0009726
aaattaatttaga

SEQ ID NO: 228468 - DNA, 13 bp, Artificial Sequence
  Oligonucleotide for detection of SNP TSC0009726
tctaaattaattt

SEQ ID NO: 228469 - DNA, 13 bp, Artificial Sequence
  Oligonucleotide for detection of SNP TSC0009726
aaattagtttaga

SEQ ID NO: 228470 - DNA, 13 bp, Artificial Sequence
  Oligonucleotide for detection of SNP TSC0009726
tctaaactaattt

SEQ ID NO: 228471 - DNA, 13 bp, Artificial Sequence
  Oligonucleotide for detection of SNP TSC0055712
aagaattataaat

SEQ ID NO: 228472 - DNA, 13 bp, Artificial Sequence
  Oligonucleotide for detection of SNP TSC0055712
atttataattctt

SEQ ID NO: 228473 - DNA, 13 bp, Artificial Sequence
  Oligonucleotide for detection of SNP TSC0055712
aagaatgataaat

SEQ ID NO: 228474 - DNA, 13 bp, Artificial Sequence
  Oligonucleotide for detection of SNP TSC0055712
atttatcattctt

SEQ ID NO: 228475 - DNA, 13 bp, Artificial Sequence
  Oligonucleotide for detection of SNP TSC0055712
atttgttattttt

SEQ ID NO: 228476 - DNA, 13 bp, Artificial Sequence
  Oligonucleotide for detection of SNP TSC0055712
aaaaataacaaat

SEQ ID NO: 228477 - DNA, 13 bp, Artificial Sequence
  Oligonucleotide for detection of SNP TSC0055719
attttttgggggg

SEQ ID NO: 228478 - DNA, 13 bp, Artificial Sequence
  Oligonucleotide for detection of SNP TSC0055719
ccccccaaaaaat

SEQ ID NO: 228479 - DNA, 13 bp, Artificial Sequence
  Oligonucleotide for detection of SNP TSC0055719
atttttggggggg

SEQ ID NO: 228480 - DNA, 13 bp, Artificial Sequence
  Oligonucleotide for detection of SNP TSC0055719
cccccccaaaaat

SEQ ID NO: 228481 - DNA, 13 bp, Artificial Sequence
  Oligonucleotide for detection of SNP TSC0055720
ttgggaatatagg

SEQ ID NO: 228482 - DNA, 13 bp, Artificial Sequence
  Oligonucleotide for detection of SNP TSC0055720
cctatattcccaa

SEQ ID NO: 228483 - DNA, 13 bp, Artificial Sequence
  Oligonucleotide for detection of SNP TSC0055721
aggtattgataga

SEQ ID NO: 228484 - DNA, 13 bp, Artificial Sequence
  Oligonucleotide for detection of SNP TSC0055721
tctatcaatacct

SEQ ID NO: 228485 - DNA, 13 bp, Artificial Sequence
  Oligonucleotide for detection of SNP TSC0055721
aggtatcgataga

SEQ ID NO: 228486 - DNA, 13 bp, Artificial Sequence
  Oligonucleotide for detection of SNP TSC0055721
tctatcgatacct

SEQ ID NO: 228487 - DNA, 13 bp, Artificial Sequence
  Oligonucleotide for detection of SNP TSC0055721
tttgtcggtgttt

SEQ ID NO: 228488 - DNA, 13 bp, Artificial Sequence
  Oligonucleotide for detection of SNP TSC0055721
aaacaccgacaaa

SEQ ID NO: 228489 - DNA, 13 bp, Artificial Sequence
  Oligonucleotide for detection of SNP TSC0055722
taggagtaggtag

SEQ ID NO: 228490 - DNA, 13 bp, Artificial Sequence
  Oligonucleotide for detection of SNP TSC0055722
ctacctactccta

SEQ ID NO: 228491 - DNA, 13 bp, Artificial Sequence
  Oligonucleotide for detection of SNP TSC0055722
taggaggaggtag

SEQ ID NO: 228492 - DNA, 13 bp, Artificial Sequence
  Oligonucleotide for detection of SNP TSC0055722
ctacctcctccta

SEQ ID NO: 228493 - DNA, 13 bp, Artificial Sequence
  Oligonucleotide for detection of SNP TSC0055723
taattatgtggga

SEQ ID NO: 228494 - DNA, 13 bp, Artificial Sequence
  Oligonucleotide for detection of SNP TSC0055723
tcccacataatta

SEQ ID NO: 228495 - DNA, 13 bp, Artificial Sequence
  Oligonucleotide for detection of SNP TSC0055723
taattacgtggga

SEQ ID NO: 228496 - DNA, 13 bp, Artificial Sequence
  Oligonucleotide for detection of SNP TSC0055723
tcccacgtaatta

SEQ ID NO: 228497 - DNA, 13 bp, Artificial Sequence
  Oligonucleotide for detection of SNP TSC0055723
ttttatgtgatta

SEQ ID NO: 228498 - DNA, 13 bp, Artificial Sequence
  Oligonucleotide for detection of SNP TSC0055723
taatcacataaaa

SEQ ID NO: 228499 - DNA, 13 bp, Artificial Sequence
  Oligonucleotide for detection of SNP TSC0055723
ttttatatgatta

SEQ ID NO: 228500 - DNA, 13 bp, Artificial Sequence
  Oligonucleotide for detection of SNP TSC0055723
taatcatataaaa

SEQ ID NO: 228501 - DNA, 13 bp, Artificial Sequence
  Oligonucleotide for detection of SNP TSC0055723
ttttacgtgatta

SEQ ID NO: 228502 - DNA, 13 bp, Artificial Sequence
  Oligonucleotide for detection of SNP TSC0055723
taatcacgtaaaa

SEQ ID NO: 228503 - DNA, 13 bp, Artificial Sequence
  Oligonucleotide for detection of SNP TSC0055726
gaattatggaggy

SEQ ID NO: 228504 - DNA, 13 bp, Artificial Sequence
  Oligonucleotide for detection of SNP TSC0055726
rcctccataattc

SEQ ID NO: 228505 - DNA, 13 bp, Artificial Sequence
  Oligonucleotide for detection of SNP TSC0055726
gaattagggaggy

SEQ ID NO: 228506 - DNA, 13 bp, Artificial Sequence
  Oligonucleotide for detection of SNP TSC0055726
rcctccctaattc

SEQ ID NO: 228507 - DNA, 13 bp, Artificial Sequence
  Oligonucleotide for detection of SNP TSC0055726
gtttttttggtty

SEQ ID NO: 228508 - DNA, 13 bp, Artificial Sequence
  Oligonucleotide for detection of SNP TSC0055726
raaccaaaaaaac

SEQ ID NO: 228509 - DNA, 13 bp, Artificial Sequence
  Oligonucleotide for detection of SNP TSC0055730
tttgtttaggttg

SEQ ID NO: 228510 - DNA, 13 bp, Artificial Sequence
  Oligonucleotide for detection of SNP TSC0055730
caacctaaacaaa

SEQ ID NO: 228511 - DNA, 13 bp, Artificial Sequence
  Oligonucleotide for detection of SNP TSC0055730
tttgttgaggttg

SEQ ID NO: 228512 - DNA, 13 bp, Artificial Sequence
  Oligonucleotide for detection of SNP TSC0055730
caacctcaacaaa

SEQ ID NO: 228513 - DNA, 13 bp, Artificial Sequence
  Oligonucleotide for detection of SNP TSC0055730
tttgtcgaggttg

SEQ ID NO: 228514 - DNA, 13 bp, Artificial Sequence
  Oligonucleotide for detection of SNP TSC0055730
caacctcgacaaa

SEQ ID NO: 228515 - DNA, 13 bp, Artificial Sequence
  Oligonucleotide for detection of SNP TSC0055731
ggtttatgtgatt

SEQ ID NO: 228516 - DNA, 13 bp, Artificial Sequence
  Oligonucleotide for detection of SNP TSC0055731
aatcacataaacc

SEQ ID NO: 228517 - DNA, 13 bp, Artificial Sequence
  Oligonucleotide for detection of SNP TSC0055731
ggtttacgtgatt

SEQ ID NO: 228518 - DNA, 13 bp, Artificial Sequence
  Oligonucleotide for detection of SNP TSC0055731
aatcacgtaaacc

SEQ ID NO: 228519 - DNA, 13 bp, Artificial Sequence
  Oligonucleotide for detection of SNP TSC0055731
aattatgtgaaty

SEQ ID NO: 228520 - DNA, 13 bp, Artificial Sequence
  Oligonucleotide for detection of SNP TSC0055731
rattcacataatt

SEQ ID NO: 228521 - DNA, 13 bp, Artificial Sequence
  Oligonucleotide for detection of SNP TSC0055731
aattatatgaaty

SEQ ID NO: 228522 - DNA, 13 bp, Artificial Sequence
  Oligonucleotide for detection of SNP TSC0055731
rattcatataatt

SEQ ID NO: 228523 - DNA, 13 bp, Artificial Sequence
  Oligonucleotide for detection of SNP TSC0055731
aattacgtgaaty

SEQ ID NO: 228524 - DNA, 13 bp, Artificial Sequence
  Oligonucleotide for detection of SNP TSC0055731
rattcacgtaatt

SEQ ID NO: 228525 - DNA, 13 bp, Artificial Sequence
  Oligonucleotide for detection of SNP TSC0055737
ttagttatttagg

SEQ ID NO: 228526 - DNA, 13 bp, Artificial Sequence
  Oligonucleotide for detection of SNP TSC0055737
cctaaataactaa

SEQ ID NO: 228527 - DNA, 13 bp, Artificial Sequence
  Oligonucleotide for detection of SNP TSC0055737
ttagttgtttagg

SEQ ID NO: 228528 - DNA, 13 bp, Artificial Sequence
  Oligonucleotide for detection of SNP TSC0055737
cctaaacaactaa

SEQ ID NO: 228529 - DNA, 13 bp, Artificial Sequence
  Oligonucleotide for detection of SNP TSC0055739
ggttttagggtay

SEQ ID NO: 228530 - DNA, 13 bp, Artificial Sequence
  Oligonucleotide for detection of SNP TSC0055739
rtaccctaaaacc

SEQ ID NO: 228531 - DNA, 13 bp, Artificial Sequence
  Oligonucleotide for detection of SNP TSC0055739
ggttttggggtay

SEQ ID NO: 228532 - DNA, 13 bp, Artificial Sequence
  Oligonucleotide for detection of SNP TSC0055739
rtaccccaaaacc

SEQ ID NO: 228533 - DNA, 13 bp, Artificial Sequence
  Oligonucleotide for detection of SNP TSC0055739
ggtttcggggtay

SEQ ID NO: 228534 - DNA, 13 bp, Artificial Sequence
  Oligonucleotide for detection of SNP TSC0055739
rtaccccgaaacc

SEQ ID NO: 228535 - DNA, 13 bp, Artificial Sequence
  Oligonucleotide for detection of SNP TSC0055739
gtgttttggggty

SEQ ID NO: 228536 - DNA, 13 bp, Artificial Sequence
  Oligonucleotide for detection of SNP TSC0055739
raccccaaaacac

SEQ ID NO: 228537 - DNA, 13 bp, Artificial Sequence
  Oligonucleotide for detection of SNP TSC0055739
gtgtttcggggty

SEQ ID NO: 228538 - DNA, 13 bp, Artificial Sequence
  Oligonucleotide for detection of SNP TSC0055739
raccccgaaacac

SEQ ID NO: 228539 - DNA, 13 bp, Artificial Sequence
  Oligonucleotide for detection of SNP TSC0055740
ttagtatgaaaga

SEQ ID NO: 228540 - DNA, 13 bp, Artificial Sequence
  Oligonucleotide for detection of SNP TSC0055740
tctttcatactaa

SEQ ID NO: 228541 - DNA, 13 bp, Artificial Sequence
  Oligonucleotide for detection of SNP TSC0055740
ttagtaggaaaga

SEQ ID NO: 228542 - DNA, 13 bp, Artificial Sequence
  Oligonucleotide for detection of SNP TSC0055740
tctttcctactaa

SEQ ID NO: 228543 - DNA, 13 bp, Artificial Sequence
  Oligonucleotide for detection of SNP TSC0009540
agggttagagtty

SEQ ID NO: 228544 - DNA, 13 bp, Artificial Sequence
  Oligonucleotide for detection of SNP TSC0009540
raactctaaccct

SEQ ID NO: 228545 - DNA, 13 bp, Artificial Sequence
  Oligonucleotide for detection of SNP TSC0009540
agggttggagtty

SEQ ID NO: 228546 - DNA, 13 bp, Artificial Sequence
  Oligonucleotide for detection of SNP TSC0009540
raactccaaccct

SEQ ID NO: 228547 - DNA, 13 bp, Artificial Sequence
  Oligonucleotide for detection of SNP TSC0009541
ttatatatgttgt

SEQ ID NO: 228548 - DNA, 13 bp, Artificial Sequence
  Oligonucleotide for detection of SNP TSC0009541
acaacatatataa

SEQ ID NO: 228549 - DNA, 13 bp, Artificial Sequence
  Oligonucleotide for detection of SNP TSC0009541
ttatatgtgttgt

SEQ ID NO: 228550 - DNA, 13 bp, Artificial Sequence
  Oligonucleotide for detection of SNP TSC0009541
acaacacatataa

SEQ ID NO: 228551 - DNA, 13 bp, Artificial Sequence
  Oligonucleotide for detection of SNP TSC0009541
ttatacgtgttgt

SEQ ID NO: 228552 - DNA, 13 bp, Artificial Sequence
  Oligonucleotide for detection of SNP TSC0009541
acaacacgtataa

SEQ ID NO: 228553 - DNA, 13 bp, Artificial Sequence
  Oligonucleotide for detection of SNP TSC0009542
ttgggggaaaaag

SEQ ID NO: 228554 - DNA, 13 bp, Artificial Sequence
  Oligonucleotide for detection of SNP TSC0009542
ctttttcccccaa

SEQ ID NO: 228555 - DNA, 13 bp, Artificial Sequence
  Oligonucleotide for detection of SNP TSC0009542
ttggggaaaaaag

SEQ ID NO: 228556 - DNA, 13 bp, Artificial Sequence
  Oligonucleotide for detection of SNP TSC0009542
cttttttccccaa

SEQ ID NO: 228557 - DNA, 13 bp, Artificial Sequence
  Oligonucleotide for detection of SNP TSC0009481
tgggtttagtaaa

SEQ ID NO: 228558 - DNA, 13 bp, Artificial Sequence
  Oligonucleotide for detection of SNP TSC0009481
tttactaaaccca

SEQ ID NO: 228559 - DNA, 13 bp, Artificial Sequence
  Oligonucleotide for detection of SNP TSC0009481
tgggttgagtaaa

SEQ ID NO: 228560 - DNA, 13 bp, Artificial Sequence
  Oligonucleotide for detection of SNP TSC0009481
tttactcaaccca

SEQ ID NO: 228561 - DNA, 13 bp, Artificial Sequence
  Oligonucleotide for detection of SNP TSC0009481
tttgttgaattta

SEQ ID NO: 228562 - DNA, 13 bp, Artificial Sequence
  Oligonucleotide for detection of SNP TSC0009481
taaattcaacaaa

SEQ ID NO: 228563 - DNA, 13 bp, Artificial Sequence
  Oligonucleotide for detection of SNP TSC0009481
tttgtttaattta

SEQ ID NO: 228564 - DNA, 13 bp, Artificial Sequence
  Oligonucleotide for detection of SNP TSC0009481
taaattaaacaaa

SEQ ID NO: 228565 - DNA, 13 bp, Artificial Sequence
  Oligonucleotide for detection of SNP TSC0055748
tagtagataaaat

SEQ ID NO: 228566 - DNA, 13 bp, Artificial Sequence
  Oligonucleotide for detection of SNP TSC0055748
attttatctacta

SEQ ID NO: 228567 - DNA, 13 bp, Artificial Sequence
  Oligonucleotide for detection of SNP TSC0055748
tagtaggtaaaat

SEQ ID NO: 228568 - DNA, 13 bp, Artificial Sequence
  Oligonucleotide for detection of SNP TSC0055748
attttacctacta

SEQ ID NO: 228569 - DNA, 13 bp, Artificial Sequence
  Oligonucleotide for detection of SNP TSC0055749
tttgatagatttt

SEQ ID NO: 228570 - DNA, 13 bp, Artificial Sequence
  Oligonucleotide for detection of SNP TSC0055749
aaaatctatcaaa

SEQ ID NO: 228571 - DNA, 13 bp, Artificial Sequence
  Oligonucleotide for detection of SNP TSC0055749
tttgatggatttt

SEQ ID NO: 228572 - DNA, 13 bp, Artificial Sequence
  Oligonucleotide for detection of SNP TSC0055749
aaaatccatcaaa

SEQ ID NO: 228573 - DNA, 13 bp, Artificial Sequence
  Oligonucleotide for detection of SNP TSC0055749
tttgacggatttt

SEQ ID NO: 228574 - DNA, 13 bp, Artificial Sequence
  Oligonucleotide for detection of SNP TSC0055749
aaaatccgtcaaa

SEQ ID NO: 228575 - DNA, 13 bp, Artificial Sequence
  Oligonucleotide for detection of SNP TSC0055749
aaaatttgttaaa

SEQ ID NO: 228576 - DNA, 13 bp, Artificial Sequence
  Oligonucleotide for detection of SNP TSC0055749
tttaacaaatttt

SEQ ID NO: 228577 - DNA, 13 bp, Artificial Sequence
  Oligonucleotide for detection of SNP TSC0055749
aaaattcgttaaa

SEQ ID NO: 228578 - DNA, 13 bp, Artificial Sequence
  Oligonucleotide for detection of SNP TSC0055749
tttaacgaatttt

SEQ ID NO: 228579 - DNA, 13 bp, Artificial Sequence
  Oligonucleotide for detection of SNP TSC0055750
tggttagagaata

SEQ ID NO: 228580 - DNA, 13 bp, Artificial Sequence
  Oligonucleotide for detection of SNP TSC0055750
tattctctaacca

SEQ ID NO: 228581 - DNA, 13 bp, Artificial Sequence
  Oligonucleotide for detection of SNP TSC0055750
tggttaaagaata

SEQ ID NO: 228582 - DNA, 13 bp, Artificial Sequence
  Oligonucleotide for detection of SNP TSC0055750
tattctttaacca

SEQ ID NO: 228583 - DNA, 13 bp, Artificial Sequence
  Oligonucleotide for detection of SNP TSC0055751
aaatatatatttg

SEQ ID NO: 228584 - DNA, 13 bp, Artificial Sequence
  Oligonucleotide for detection of SNP TSC0055751
caaatatatattt

SEQ ID NO: 228585 - DNA, 13 bp, Artificial Sequence
  Oligonucleotide for detection of SNP TSC0055751
aaatatttatttg

SEQ ID NO: 228586 - DNA, 13 bp, Artificial Sequence
  Oligonucleotide for detection of SNP TSC0055751
caaataaatattt

SEQ ID NO: 228587 - DNA, 13 bp, Artificial Sequence
  Oligonucleotide for detection of SNP TSC0055751
taaatatgtgttt

SEQ ID NO: 228588 - DNA, 13 bp, Artificial Sequence
  Oligonucleotide for detection of SNP TSC0055751
aaacacatattta

SEQ ID NO: 228589 - DNA, 13 bp, Artificial Sequence
  Oligonucleotide for detection of SNP TSC0055751
taaataagtgttt

SEQ ID NO: 228590 - DNA, 13 bp, Artificial Sequence
  Oligonucleotide for detection of SNP TSC0055751
aaacacttattta

SEQ ID NO: 228591 - DNA, 13 bp, Artificial Sequence
  Oligonucleotide for detection of SNP TSC0055758
tgaggttgtgtta

SEQ ID NO: 228592 - DNA, 13 bp, Artificial Sequence
  Oligonucleotide for detection of SNP TSC0055758
taacacaacctca

SEQ ID NO: 228593 - DNA, 13 bp, Artificial Sequence
  Oligonucleotide for detection of SNP TSC0055758
cgaggttgtgtta

SEQ ID NO: 228594 - DNA, 13 bp, Artificial Sequence
  Oligonucleotide for detection of SNP TSC0055758
taacacaacctcg

SEQ ID NO: 228595 - DNA, 13 bp, Artificial Sequence
  Oligonucleotide for detection of SNP TSC0055758
tgaggtcgtgtta

SEQ ID NO: 228596 - DNA, 13 bp, Artificial Sequence
  Oligonucleotide for detection of SNP TSC0055758
taacacgacctca

SEQ ID NO: 228597 - DNA, 13 bp, Artificial Sequence
  Oligonucleotide for detection of SNP TSC0055758
cgaggtcgtgtta

SEQ ID NO: 228598 - DNA, 13 bp, Artificial Sequence
  Oligonucleotide for detection of SNP TSC0055758
taacacgacctcg

SEQ ID NO: 228599 - DNA, 13 bp, Artificial Sequence
  Oligonucleotide for detection of SNP TSC0055761
tgtaggaagtagg

SEQ ID NO: 228600 - DNA, 13 bp, Artificial Sequence
  Oligonucleotide for detection of SNP TSC0055761
cctacttcctaca

SEQ ID NO: 228601 - DNA, 13 bp, Artificial Sequence
  Oligonucleotide for detection of SNP TSC0055761
tgtagggagtagg

SEQ ID NO: 228602 - DNA, 13 bp, Artificial Sequence
  Oligonucleotide for detection of SNP TSC0055761
cctactccctaca

SEQ ID NO: 228603 - DNA, 13 bp, Artificial Sequence
  Oligonucleotide for detection of SNP TSC0055762
tttttataaatat

SEQ ID NO: 228604 - DNA, 13 bp, Artificial Sequence
  Oligonucleotide for detection of SNP TSC0055762
atatttataaaaa

SEQ ID NO: 228605 - DNA, 13 bp, Artificial Sequence
  Oligonucleotide for detection of SNP TSC0055762
tttttagaaatat

SEQ ID NO: 228606 - DNA, 13 bp, Artificial Sequence
  Oligonucleotide for detection of SNP TSC0055762
atatttctaaaaa

SEQ ID NO: 228607 - DNA, 13 bp, Artificial Sequence
  Oligonucleotide for detection of SNP TSC0055762
atgtttttgaagg

SEQ ID NO: 228608 - DNA, 13 bp, Artificial Sequence
  Oligonucleotide for detection of SNP TSC0055762
ccttcaaaaacat

SEQ ID NO: 228609 - DNA, 13 bp, Artificial Sequence
  Oligonucleotide for detection of SNP TSC0055763
agatatgagagta

SEQ ID NO: 228610 - DNA, 13 bp, Artificial Sequence
  Oligonucleotide for detection of SNP TSC0055763
tactctcatatct

SEQ ID NO: 228611 - DNA, 13 bp, Artificial Sequence
  Oligonucleotide for detection of SNP TSC0055763
agatataagagta

SEQ ID NO: 228612 - DNA, 13 bp, Artificial Sequence
  Oligonucleotide for detection of SNP TSC0055763
tactcttatatct

SEQ ID NO: 228613 - DNA, 13 bp, Artificial Sequence
  Oligonucleotide for detection of SNP TSC0055766
aagatggtaagtt

SEQ ID NO: 228614 - DNA, 13 bp, Artificial Sequence
  Oligonucleotide for detection of SNP TSC0055766
aacttaccatctt

SEQ ID NO: 228615 - DNA, 13 bp, Artificial Sequence
  Oligonucleotide for detection of SNP TSC0055766
aagatgataagtt

SEQ ID NO: 228616 - DNA, 13 bp, Artificial Sequence
  Oligonucleotide for detection of SNP TSC0055766
aacttatcatctt

SEQ ID NO: 228617 - DNA, 13 bp, Artificial Sequence
  Oligonucleotide for detection of SNP TSC0055767
taaaggtgatttt

SEQ ID NO: 228618 - DNA, 13 bp, Artificial Sequence
  Oligonucleotide for detection of SNP TSC0055767
aaaatcaccttta

SEQ ID NO: 228619 - DNA, 13 bp, Artificial Sequence
  Oligonucleotide for detection of SNP TSC0055767
aaaattatttttg

SEQ ID NO: 228620 - DNA, 13 bp, Artificial Sequence
  Oligonucleotide for detection of SNP TSC0055767
caaaaataatttt

SEQ ID NO: 228621 - DNA, 13 bp, Artificial Sequence
  Oligonucleotide for detection of SNP TSC0055767
aaaattttttttg

SEQ ID NO: 228622 - DNA, 13 bp, Artificial Sequence
  Oligonucleotide for detection of SNP TSC0055767
caaaaaaaatttt

SEQ ID NO: 228623 - DNA, 13 bp, Artificial Sequence
  Oligonucleotide for detection of SNP TSC0055768
attgatattggtg

SEQ ID NO: 228624 - DNA, 13 bp, Artificial Sequence
  Oligonucleotide for detection of SNP TSC0055768
caccaatatcaat

SEQ ID NO: 228625 - DNA, 13 bp, Artificial Sequence
  Oligonucleotide for detection of SNP TSC0055768
attgatgttggtg

SEQ ID NO: 228626 - DNA, 13 bp, Artificial Sequence
  Oligonucleotide for detection of SNP TSC0055768
caccaacatcaat

SEQ ID NO: 228627 - DNA, 13 bp, Artificial Sequence
  Oligonucleotide for detection of SNP TSC0055768
attgacgttggtg

SEQ ID NO: 228628 - DNA, 13 bp, Artificial Sequence
  Oligonucleotide for detection of SNP TSC0055768
caccaacgtcaat

SEQ ID NO: 228629 - DNA, 13 bp, Artificial Sequence
  Oligonucleotide for detection of SNP TSC0055768
tattaatgttagt

SEQ ID NO: 228630 - DNA, 13 bp, Artificial Sequence
  Oligonucleotide for detection of SNP TSC0055768
actaacattaata

SEQ ID NO: 228631 - DNA, 13 bp, Artificial Sequence
  Oligonucleotide for detection of SNP TSC0055768
tattaacgttagt

SEQ ID NO: 228632 - DNA, 13 bp, Artificial Sequence
  Oligonucleotide for detection of SNP TSC0055768
actaacgttaata

SEQ ID NO: 228633 - DNA, 13 bp, Artificial Sequence
  Oligonucleotide for detection of SNP TSC0009636
ataatatgaataa

SEQ ID NO: 228634 - DNA, 13 bp, Artificial Sequence
  Oligonucleotide for detection of SNP TSC0009636
ttattcatattat

SEQ ID NO: 228635 - DNA, 13 bp, Artificial Sequence
  Oligonucleotide for detection of SNP TSC0009636
ataataggaataa

SEQ ID NO: 228636 - DNA, 13 bp, Artificial Sequence
  Oligonucleotide for detection of SNP TSC0009636
ttattcctattat

SEQ ID NO: 228637 - DNA, 13 bp, Artificial Sequence
  Oligonucleotide for detection of SNP TSC0009636
ttgtttatattat

SEQ ID NO: 228638 - DNA, 13 bp, Artificial Sequence
  Oligonucleotide for detection of SNP TSC0009636
ataatataaacaa

SEQ ID NO: 228639 - DNA, 13 bp, Artificial Sequence
  Oligonucleotide for detection of SNP TSC0009636
ttgtttttattat

SEQ ID NO: 228640 - DNA, 13 bp, Artificial Sequence
  Oligonucleotide for detection of SNP TSC0009636
ataataaaaacaa

SEQ ID NO: 228641 - DNA, 13 bp, Artificial Sequence
  Oligonucleotide for detection of SNP TSC0055772
ttgttgtggttta

SEQ ID NO: 228642 - DNA, 13 bp, Artificial Sequence
  Oligonucleotide for detection of SNP TSC0055772
taaaccacaacaa

SEQ ID NO: 228643 - DNA, 13 bp, Artificial Sequence
  Oligonucleotide for detection of SNP TSC0055772
ttgttgcggttta

SEQ ID NO: 228644 - DNA, 13 bp, Artificial Sequence
  Oligonucleotide for detection of SNP TSC0055772
taaaccgcaacaa

SEQ ID NO: 228645 - DNA, 13 bp, Artificial Sequence
  Oligonucleotide for detection of SNP TSC0055772
tgaatcgtaataa

SEQ ID NO: 228646 - DNA, 13 bp, Artificial Sequence
  Oligonucleotide for detection of SNP TSC0055772
ttattacgattca

SEQ ID NO: 228647 - DNA, 13 bp, Artificial Sequence
  Oligonucleotide for detection of SNP TSC0055773
tggtttgattttt

SEQ ID NO: 228648 - DNA, 13 bp, Artificial Sequence
  Oligonucleotide for detection of SNP TSC0055773
aaaaatcaaacca

SEQ ID NO: 228649 - DNA, 13 bp, Artificial Sequence
  Oligonucleotide for detection of SNP TSC0055777
gaattaatatttt

SEQ ID NO: 228650 - DNA, 13 bp, Artificial Sequence
  Oligonucleotide for detection of SNP TSC0055777
aaaatattaattc

SEQ ID NO: 228651 - DNA, 13 bp, Artificial Sequence
  Oligonucleotide for detection of SNP TSC0055777
gaattagtatttt

SEQ ID NO: 228652 - DNA, 13 bp, Artificial Sequence
  Oligonucleotide for detection of SNP TSC0055777
aaaatactaattc

SEQ ID NO: 228653 - DNA, 13 bp, Artificial Sequence
  Oligonucleotide for detection of SNP TSC0055780
ggataaggggata

SEQ ID NO: 228654 - DNA, 13 bp, Artificial Sequence
  Oligonucleotide for detection of SNP TSC0055780
tatccccttatcc

SEQ ID NO: 228655 - DNA, 13 bp, Artificial Sequence
  Oligonucleotide for detection of SNP TSC0055780
ggataaagggata

SEQ ID NO: 228656 - DNA, 13 bp, Artificial Sequence
  Oligonucleotide for detection of SNP TSC0055780
tatccctttatcc

SEQ ID NO: 228657 - DNA, 13 bp, Artificial Sequence
  Oligonucleotide for detection of SNP TSC0055781
gattggatggtta

SEQ ID NO: 228658 - DNA, 13 bp, Artificial Sequence
  Oligonucleotide for detection of SNP TSC0055781
taaccatccaatc

SEQ ID NO: 228659 - DNA, 13 bp, Artificial Sequence
  Oligonucleotide for detection of SNP TSC0055781
gattgggtggtta

SEQ ID NO: 228660 - DNA, 13 bp, Artificial Sequence
  Oligonucleotide for detection of SNP TSC0055781
taaccacccaatc

SEQ ID NO: 228661 - DNA, 13 bp, Artificial Sequence
  Oligonucleotide for detection of SNP TSC0055783
aatagttgtaaat

SEQ ID NO: 228662 - DNA, 13 bp, Artificial Sequence
  Oligonucleotide for detection of SNP TSC0055783
atttacaactatt

SEQ ID NO: 228663 - DNA, 13 bp, Artificial Sequence
  Oligonucleotide for detection of SNP TSC0055783
aatagtcgtaaat

SEQ ID NO: 228664 - DNA, 13 bp, Artificial Sequence
  Oligonucleotide for detection of SNP TSC0055783
atttacgactatt

SEQ ID NO: 228665 - DNA, 13 bp, Artificial Sequence
  Oligonucleotide for detection of SNP TSC0055783
atttatggttatt

SEQ ID NO: 228666 - DNA, 13 bp, Artificial Sequence
  Oligonucleotide for detection of SNP TSC0055783
aataaccataaat

SEQ ID NO: 228667 - DNA, 13 bp, Artificial Sequence
  Oligonucleotide for detection of SNP TSC0055783
atttatagttatt

SEQ ID NO: 228668 - DNA, 13 bp, Artificial Sequence
  Oligonucleotide for detection of SNP TSC0055783
aataactataaat

SEQ ID NO: 228669 - DNA, 13 bp, Artificial Sequence
  Oligonucleotide for detection of SNP TSC0055783
atttacggttatt

SEQ ID NO: 228670 - DNA, 13 bp, Artificial Sequence
  Oligonucleotide for detection of SNP TSC0055783
aataaccgtaaat

SEQ ID NO: 228671 - DNA, 13 bp, Artificial Sequence
  Oligonucleotide for detection of SNP TSC0055784
atgagtgtttttg

SEQ ID NO: 228672 - DNA, 13 bp, Artificial Sequence
  Oligonucleotide for detection of SNP TSC0055784
caaaaacactcat

SEQ ID NO: 228673 - DNA, 13 bp, Artificial Sequence
  Oligonucleotide for detection of SNP TSC0055784
atgagtatttttg

SEQ ID NO: 228674 - DNA, 13 bp, Artificial Sequence
  Oligonucleotide for detection of SNP TSC0055784
caaaaatactcat

SEQ ID NO: 228675 - DNA, 13 bp, Artificial Sequence
  Oligonucleotide for detection of SNP TSC0055785
atataatttataa

SEQ ID NO: 228676 - DNA, 13 bp, Artificial Sequence
  Oligonucleotide for detection of SNP TSC0055785
ttataaattatat

SEQ ID NO: 228677 - DNA, 13 bp, Artificial Sequence
  Oligonucleotide for detection of SNP TSC0055785
ttatgagttgtat

SEQ ID NO: 228678 - DNA, 13 bp, Artificial Sequence
  Oligonucleotide for detection of SNP TSC0055785
atacaactcataa

SEQ ID NO: 228679 - DNA, 13 bp, Artificial Sequence
  Oligonucleotide for detection of SNP TSC0055785
ttatgatttgtat

SEQ ID NO: 228680 - DNA, 13 bp, Artificial Sequence
  Oligonucleotide for detection of SNP TSC0055785
atacaaatcataa

SEQ ID NO: 228681 - DNA, 13 bp, Artificial Sequence
  Oligonucleotide for detection of SNP TSC0055786
tttattgtgttgt

SEQ ID NO: 228682 - DNA, 13 bp, Artificial Sequence
  Oligonucleotide for detection of SNP TSC0055786
acaacacaataaa

SEQ ID NO: 228683 - DNA, 13 bp, Artificial Sequence
  Oligonucleotide for detection of SNP TSC0055786
tttattatgttgt

SEQ ID NO: 228684 - DNA, 13 bp, Artificial Sequence
  Oligonucleotide for detection of SNP TSC0055786
acaacataataaa

SEQ ID NO: 228685 - DNA, 13 bp, Artificial Sequence
  Oligonucleotide for detection of SNP TSC0055788
tgtatggttaaag

SEQ ID NO: 228686 - DNA, 13 bp, Artificial Sequence
  Oligonucleotide for detection of SNP TSC0055788
ctttaaccataca

SEQ ID NO: 228687 - DNA, 13 bp, Artificial Sequence
  Oligonucleotide for detection of SNP TSC0055788
tgtatgattaaag

SEQ ID NO: 228688 - DNA, 13 bp, Artificial Sequence
  Oligonucleotide for detection of SNP TSC0055788
ctttaatcataca

SEQ ID NO: 228689 - DNA, 13 bp, Artificial Sequence
  Oligonucleotide for detection of SNP TSC0055789
tttaagggagtgt

SEQ ID NO: 228690 - DNA, 13 bp, Artificial Sequence
  Oligonucleotide for detection of SNP TSC0055789
acactcccttaaa

SEQ ID NO: 228691 - DNA, 13 bp, Artificial Sequence
  Oligonucleotide for detection of SNP TSC0055789
tttaagagagtgt

SEQ ID NO: 228692 - DNA, 13 bp, Artificial Sequence
  Oligonucleotide for detection of SNP TSC0055789
acactctcttaaa

SEQ ID NO: 228693 - DNA, 13 bp, Artificial Sequence
  Oligonucleotide for detection of SNP TSC0055792
ttttatagattga

SEQ ID NO: 228694 - DNA, 13 bp, Artificial Sequence
  Oligonucleotide for detection of SNP TSC0055792
tcaatctataaaa

SEQ ID NO: 228695 - DNA, 13 bp, Artificial Sequence
  Oligonucleotide for detection of SNP TSC0055792
ttttatggattga

SEQ ID NO: 228696 - DNA, 13 bp, Artificial Sequence
  Oligonucleotide for detection of SNP TSC0055792
tcaatccataaaa

SEQ ID NO: 228697 - DNA, 13 bp, Artificial Sequence
  Oligonucleotide for detection of SNP TSC0055792
ttttacggattga

SEQ ID NO: 228698 - DNA, 13 bp, Artificial Sequence
  Oligonucleotide for detection of SNP TSC0055792
tcaatccgtaaaa

SEQ ID NO: 228699 - DNA, 13 bp, Artificial Sequence
  Oligonucleotide for detection of SNP TSC0055792
ttagtttgtagag

SEQ ID NO: 228700 - DNA, 13 bp, Artificial Sequence
  Oligonucleotide for detection of SNP TSC0055792
ctctacaaactaa

SEQ ID NO: 228701 - DNA, 13 bp, Artificial Sequence
  Oligonucleotide for detection of SNP TSC0055792
ttagttcgtagag

SEQ ID NO: 228702 - DNA, 13 bp, Artificial Sequence
  Oligonucleotide for detection of SNP TSC0055792
ctctacgaactaa

SEQ ID NO: 228703 - DNA, 13 bp, Artificial Sequence
  Oligonucleotide for detection of SNP TSC0055794
gaaaatgaggtta

SEQ ID NO: 228704 - DNA, 13 bp, Artificial Sequence
  Oligonucleotide for detection of SNP TSC0055794
taacctcattttc

SEQ ID NO: 228705 - DNA, 13 bp, Artificial Sequence
  Oligonucleotide for detection of SNP TSC0055794
gaaaataaggtta

SEQ ID NO: 228706 - DNA, 13 bp, Artificial Sequence
  Oligonucleotide for detection of SNP TSC0055794
taaccttattttc

SEQ ID NO: 228707 - DNA, 13 bp, Artificial Sequence
  Oligonucleotide for detection of SNP TSC0055795
ttgaatataatgt

SEQ ID NO: 228708 - DNA, 13 bp, Artificial Sequence
  Oligonucleotide for detection of SNP TSC0055795
acattatattcaa

SEQ ID NO: 228709 - DNA, 13 bp, Artificial Sequence
  Oligonucleotide for detection of SNP TSC0055795
ttgaatgtaatgt

SEQ ID NO: 228710 - DNA, 13 bp, Artificial Sequence
  Oligonucleotide for detection of SNP TSC0055795
acattacattcaa

SEQ ID NO: 228711 - DNA, 13 bp, Artificial Sequence
  Oligonucleotide for detection of SNP TSC0007966
agattatgttaaa

SEQ ID NO: 228712 - DNA, 13 bp, Artificial Sequence
  Oligonucleotide for detection of SNP TSC0007966
tttaacataatct

SEQ ID NO: 228713 - DNA, 13 bp, Artificial Sequence
  Oligonucleotide for detection of SNP TSC0007966
agattacgttaaa

SEQ ID NO: 228714 - DNA, 13 bp, Artificial Sequence
  Oligonucleotide for detection of SNP TSC0007966
tttaacgtaatct

SEQ ID NO: 228715 - DNA, 13 bp, Artificial Sequence
  Oligonucleotide for detection of SNP TSC0007966
tttgatgtggttt

SEQ ID NO: 228716 - DNA, 13 bp, Artificial Sequence
  Oligonucleotide for detection of SNP TSC0007966
aaaccacatcaaa

SEQ ID NO: 228717 - DNA, 13 bp, Artificial Sequence
  Oligonucleotide for detection of SNP TSC0007966
tttgatatggttt

SEQ ID NO: 228718 - DNA, 13 bp, Artificial Sequence
  Oligonucleotide for detection of SNP TSC0007966
aaaccatatcaaa

SEQ ID NO: 228719 - DNA, 13 bp, Artificial Sequence
  Oligonucleotide for detection of SNP TSC0007966
tttgacgtggttt

SEQ ID NO: 228720 - DNA, 13 bp, Artificial Sequence
  Oligonucleotide for detection of SNP TSC0007966
aaaccacgtcaaa

SEQ ID NO: 228721 - DNA, 13 bp, Artificial Sequence
  Oligonucleotide for detection of SNP TSC0055799
tggttgattttga

SEQ ID NO: 228722 - DNA, 13 bp, Artificial Sequence
  Oligonucleotide for detection of SNP TSC0055799
tcaaaatcaacca

SEQ ID NO: 228723 - DNA, 13 bp, Artificial Sequence
  Oligonucleotide for detection of SNP TSC0055799
tggttggttttga

SEQ ID NO: 228724 - DNA, 13 bp, Artificial Sequence
  Oligonucleotide for detection of SNP TSC0055799
tcaaaaccaacca

SEQ ID NO: 228725 - DNA, 13 bp, Artificial Sequence
  Oligonucleotide for detection of SNP TSC0055800
aagaagataagga

SEQ ID NO: 228726 - DNA, 13 bp, Artificial Sequence
  Oligonucleotide for detection of SNP TSC0055800
tccttatcttctt

SEQ ID NO: 228727 - DNA, 13 bp, Artificial Sequence
  Oligonucleotide for detection of SNP TSC0055800
aagaaggtaagga

SEQ ID NO: 228728 - DNA, 13 bp, Artificial Sequence
  Oligonucleotide for detection of SNP TSC0055800
tccttaccttctt

SEQ ID NO: 228729 - DNA, 13 bp, Artificial Sequence
  Oligonucleotide for detection of SNP TSC0006059
gttaatgtaaaty

SEQ ID NO: 228730 - DNA, 13 bp, Artificial Sequence
  Oligonucleotide for detection of SNP TSC0006059
ratttacattaac

SEQ ID NO: 228731 - DNA, 13 bp, Artificial Sequence
  Oligonucleotide for detection of SNP TSC0006059
gttaatataaaty

SEQ ID NO: 228732 - DNA, 13 bp, Artificial Sequence
  Oligonucleotide for detection of SNP TSC0006059
ratttatattaac

SEQ ID NO: 228733 - DNA, 13 bp, Artificial Sequence
  Oligonucleotide for detection of SNP TSC0009543
aggattgaggaaa

SEQ ID NO: 228734 - DNA, 13 bp, Artificial Sequence
  Oligonucleotide for detection of SNP TSC0009543
tttcctcaatcct

SEQ ID NO: 228735 - DNA, 13 bp, Artificial Sequence
  Oligonucleotide for detection of SNP TSC0009543
aggatttaggaaa

SEQ ID NO: 228736 - DNA, 13 bp, Artificial Sequence
  Oligonucleotide for detection of SNP TSC0009543
tttcctaaatcct

SEQ ID NO: 228737 - DNA, 13 bp, Artificial Sequence
  Oligonucleotide for detection of SNP TSC0055801
gtggataaatatg

SEQ ID NO: 228738 - DNA, 13 bp, Artificial Sequence
  Oligonucleotide for detection of SNP TSC0055801
catatttatccac

SEQ ID NO: 228739 - DNA, 13 bp, Artificial Sequence
  Oligonucleotide for detection of SNP TSC0055801
gtggattaatatg

SEQ ID NO: 228740 - DNA, 13 bp, Artificial Sequence
  Oligonucleotide for detection of SNP TSC0055801
catattaatccac

SEQ ID NO: 228741 - DNA, 13 bp, Artificial Sequence
  Oligonucleotide for detection of SNP TSC0055801
gtggataaatacg

SEQ ID NO: 228742 - DNA, 13 bp, Artificial Sequence
  Oligonucleotide for detection of SNP TSC0055801
cgtatttatccac

SEQ ID NO: 228743 - DNA, 13 bp, Artificial Sequence
  Oligonucleotide for detection of SNP TSC0055801
gtggattaatacg

SEQ ID NO: 228744 - DNA, 13 bp, Artificial Sequence
  Oligonucleotide for detection of SNP TSC0055801
cgtattaatccac

SEQ ID NO: 228745 - DNA, 13 bp, Artificial Sequence
  Oligonucleotide for detection of SNP TSC0055801
tgtatttgtttay

SEQ ID NO: 228746 - DNA, 13 bp, Artificial Sequence
  Oligonucleotide for detection of SNP TSC0055801
rtaaacaaataca

SEQ ID NO: 228747 - DNA, 13 bp, Artificial Sequence
  Oligonucleotide for detection of SNP TSC0055801
tgtattagtttay

SEQ ID NO: 228748 - DNA, 13 bp, Artificial Sequence
  Oligonucleotide for detection of SNP TSC0055801
rtaaactaataca

SEQ ID NO: 228749 - DNA, 13 bp, Artificial Sequence
  Oligonucleotide for detection of SNP TSC0055801
cgtatttgtttay

SEQ ID NO: 228750 - DNA, 13 bp, Artificial Sequence
  Oligonucleotide for detection of SNP TSC0055801
rtaaacaaatacg

SEQ ID NO: 228751 - DNA, 13 bp, Artificial Sequence
  Oligonucleotide for detection of SNP TSC0055801
cgtattagtttay

SEQ ID NO: 228752 - DNA, 13 bp, Artificial Sequence
  Oligonucleotide for detection of SNP TSC0055801
rtaaactaatacg

SEQ ID NO: 228753 - DNA, 13 bp, Artificial Sequence
  Oligonucleotide for detection of SNP TSC0008071
atttagtttttay

SEQ ID NO: 228754 - DNA, 13 bp, Artificial Sequence
  Oligonucleotide for detection of SNP TSC0008071
rtaaaaactaaat

SEQ ID NO: 228755 - DNA, 13 bp, Artificial Sequence
  Oligonucleotide for detection of SNP TSC0008071
atttaggttttay

SEQ ID NO: 228756 - DNA, 13 bp, Artificial Sequence
  Oligonucleotide for detection of SNP TSC0008071
rtaaaacctaaat

SEQ ID NO: 228757 - DNA, 13 bp, Artificial Sequence
  Oligonucleotide for detection of SNP TSC0008071
gtgaaaattgaat

SEQ ID NO: 228758 - DNA, 13 bp, Artificial Sequence
  Oligonucleotide for detection of SNP TSC0008071
attcaattttcac

SEQ ID NO: 228759 - DNA, 13 bp, Artificial Sequence
  Oligonucleotide for detection of SNP TSC0008071
gtgaaatttgaat

SEQ ID NO: 228760 - DNA, 13 bp, Artificial Sequence
  Oligonucleotide for detection of SNP TSC0008071
attcaaatttcac

SEQ ID NO: 228761 - DNA, 13 bp, Artificial Sequence
  Oligonucleotide for detection of SNP TSC0008072
gataagatagtgt

SEQ ID NO: 228762 - DNA, 13 bp, Artificial Sequence
  Oligonucleotide for detection of SNP TSC0008072
acactatcttatc

SEQ ID NO: 228763 - DNA, 13 bp, Artificial Sequence
  Oligonucleotide for detection of SNP TSC0008072
gataaggtagtgt

SEQ ID NO: 228764 - DNA, 13 bp, Artificial Sequence
  Oligonucleotide for detection of SNP TSC0008072
acactaccttatc

SEQ ID NO: 228765 - DNA, 13 bp, Artificial Sequence
  Oligonucleotide for detection of SNP TSC0055802
tagagagggggtt

SEQ ID NO: 228766 - DNA, 13 bp, Artificial Sequence
  Oligonucleotide for detection of SNP TSC0055802
aaccccctctcta

SEQ ID NO: 228767 - DNA, 13 bp, Artificial Sequence
  Oligonucleotide for detection of SNP TSC0055803
tttttgtttgttt

SEQ ID NO: 228768 - DNA, 13 bp, Artificial Sequence
  Oligonucleotide for detection of SNP TSC0055803
aaacaaacaaaaa

SEQ ID NO: 228769 - DNA, 13 bp, Artificial Sequence
  Oligonucleotide for detection of SNP TSC0055803
tttttggttgttt

SEQ ID NO: 228770 - DNA, 13 bp, Artificial Sequence
  Oligonucleotide for detection of SNP TSC0055803
aaacaaccaaaaa

SEQ ID NO: 228771 - DNA, 13 bp, Artificial Sequence
  Oligonucleotide for detection of SNP TSC0055803
aggtagataagga

SEQ ID NO: 228772 - DNA, 13 bp, Artificial Sequence
  Oligonucleotide for detection of SNP TSC0055803
tccttatctacct

SEQ ID NO: 228773 - DNA, 13 bp, Artificial Sequence
  Oligonucleotide for detection of SNP TSC0055803
aggtagttaagga

SEQ ID NO: 228774 - DNA, 13 bp, Artificial Sequence
  Oligonucleotide for detection of SNP TSC0055803
tccttaactacct

SEQ ID NO: 228775 - DNA, 13 bp, Artificial Sequence
  Oligonucleotide for detection of SNP TSC0055804
tgagttgtgagaa

SEQ ID NO: 228776 - DNA, 13 bp, Artificial Sequence
  Oligonucleotide for detection of SNP TSC0055804
ttctcacaactca

SEQ ID NO: 228777 - DNA, 13 bp, Artificial Sequence
  Oligonucleotide for detection of SNP TSC0055804
tgagttatgagaa

SEQ ID NO: 228778 - DNA, 13 bp, Artificial Sequence
  Oligonucleotide for detection of SNP TSC0055804
ttctcataactca

SEQ ID NO: 228779 - DNA, 13 bp, Artificial Sequence
  Oligonucleotide for detection of SNP TSC0055804
tgagtcgtgagaa

SEQ ID NO: 228780 - DNA, 13 bp, Artificial Sequence
  Oligonucleotide for detection of SNP TSC0055804
ttctcacgactca

SEQ ID NO: 228781 - DNA, 13 bp, Artificial Sequence
  Oligonucleotide for detection of SNP TSC0055805
aattttaggggga

SEQ ID NO: 228782 - DNA, 13 bp, Artificial Sequence
  Oligonucleotide for detection of SNP TSC0055805
tccccctaaaatt

SEQ ID NO: 228783 - DNA, 13 bp, Artificial Sequence
  Oligonucleotide for detection of SNP TSC0055805
aatttttggggga

SEQ ID NO: 228784 - DNA, 13 bp, Artificial Sequence
  Oligonucleotide for detection of SNP TSC0055805
tcccccaaaaatt

SEQ ID NO: 228785 - DNA, 13 bp, Artificial Sequence
  Oligonucleotide for detection of SNP TSC0055805
aattttgggggga

SEQ ID NO: 228786 - DNA, 13 bp, Artificial Sequence
  Oligonucleotide for detection of SNP TSC0055805
tccccccaaaatt

SEQ ID NO: 228787 - DNA, 13 bp, Artificial Sequence
  Oligonucleotide for detection of SNP TSC0055805
aattttcggggga

SEQ ID NO: 228788 - DNA, 13 bp, Artificial Sequence
  Oligonucleotide for detection of SNP TSC0055805
tcccccgaaaatt

SEQ ID NO: 228789 - DNA, 13 bp, Artificial Sequence
  Oligonucleotide for detection of SNP TSC0055805
ttttttgaaaatt

SEQ ID NO: 228790 - DNA, 13 bp, Artificial Sequence
  Oligonucleotide for detection of SNP TSC0055805
aattttcaaaaaa

SEQ ID NO: 228791 - DNA, 13 bp, Artificial Sequence
  Oligonucleotide for detection of SNP TSC0055805
tttttcgaaaatt

SEQ ID NO: 228792 - DNA, 13 bp, Artificial Sequence
  Oligonucleotide for detection of SNP TSC0055805
aattttcgaaaaa

SEQ ID NO: 228793 - DNA, 13 bp, Artificial Sequence
  Oligonucleotide for detection of SNP TSC0055812
gtttagttttttg

SEQ ID NO: 228794 - DNA, 13 bp, Artificial Sequence
  Oligonucleotide for detection of SNP TSC0055812
caaaaaactaaac

SEQ ID NO: 228795 - DNA, 13 bp, Artificial Sequence
  Oligonucleotide for detection of SNP TSC0055812
taggggtttggay

SEQ ID NO: 228796 - DNA, 13 bp, Artificial Sequence
  Oligonucleotide for detection of SNP TSC0055812
rtccaaaccccta

SEQ ID NO: 228797 - DNA, 13 bp, Artificial Sequence
  Oligonucleotide for detection of SNP TSC0055812
tagggggttggay

SEQ ID NO: 228798 - DNA, 13 bp, Artificial Sequence
  Oligonucleotide for detection of SNP TSC0055812
rtccaacccccta

SEQ ID NO: 228799 - DNA, 13 bp, Artificial Sequence
  Oligonucleotide for detection of SNP TSC0055814
ggtagtattttag

SEQ ID NO: 228800 - DNA, 13 bp, Artificial Sequence
  Oligonucleotide for detection of SNP TSC0055814
ctaaaatactacc

SEQ ID NO: 228801 - DNA, 13 bp, Artificial Sequence
  Oligonucleotide for detection of SNP TSC0055814
ggtagtgttttag

SEQ ID NO: 228802 - DNA, 13 bp, Artificial Sequence
  Oligonucleotide for detection of SNP TSC0055814
ctaaaacactacc

SEQ ID NO: 228803 - DNA, 13 bp, Artificial Sequence
  Oligonucleotide for detection of SNP TSC0055814
ggtagcgttttag

SEQ ID NO: 228804 - DNA, 13 bp, Artificial Sequence
  Oligonucleotide for detection of SNP TSC0055814
ctaaaacgctacc

SEQ ID NO: 228805 - DNA, 13 bp, Artificial Sequence
  Oligonucleotide for detection of SNP TSC0055814
ttagaatgttgty

SEQ ID NO: 228806 - DNA, 13 bp, Artificial Sequence
  Oligonucleotide for detection of SNP TSC0055814
racaacattctaa

SEQ ID NO: 228807 - DNA, 13 bp, Artificial Sequence
  Oligonucleotide for detection of SNP TSC0055814
ttagaacgttgty

SEQ ID NO: 228808 - DNA, 13 bp, Artificial Sequence
  Oligonucleotide for detection of SNP TSC0055814
racaacgttctaa

SEQ ID NO: 228809 - DNA, 13 bp, Artificial Sequence
  Oligonucleotide for detection of SNP TSC0055816
gatagaaagatag

SEQ ID NO: 228810 - DNA, 13 bp, Artificial Sequence
  Oligonucleotide for detection of SNP TSC0055816
ctatctttctatc

SEQ ID NO: 228811 - DNA, 13 bp, Artificial Sequence
  Oligonucleotide for detection of SNP TSC0055816
gatagatagatag

SEQ ID NO: 228812 - DNA, 13 bp, Artificial Sequence
  Oligonucleotide for detection of SNP TSC0055816
ctatctatctatc

SEQ ID NO: 228813 - DNA, 13 bp, Artificial Sequence
  Oligonucleotide for detection of SNP TSC0055820
tttatcgtgaata

SEQ ID NO: 228814 - DNA, 13 bp, Artificial Sequence
  Oligonucleotide for detection of SNP TSC0055820
tattcacgataaa

SEQ ID NO: 228815 - DNA, 13 bp, Artificial Sequence
  Oligonucleotide for detection of SNP TSC0055820
tgtttatggtggg

SEQ ID NO: 228816 - DNA, 13 bp, Artificial Sequence
  Oligonucleotide for detection of SNP TSC0055820
cccaccataaaca

SEQ ID NO: 228817 - DNA, 13 bp, Artificial Sequence
  Oligonucleotide for detection of SNP TSC0055820
tgtttacggtggg

SEQ ID NO: 228818 - DNA, 13 bp, Artificial Sequence
  Oligonucleotide for detection of SNP TSC0055820
cccaccgtaaaca

SEQ ID NO: 228819 - DNA, 13 bp, Artificial Sequence
  Oligonucleotide for detection of SNP TSC0055822
gatttattgttty

SEQ ID NO: 228820 - DNA, 13 bp, Artificial Sequence
  Oligonucleotide for detection of SNP TSC0055822
raaacaataaatc

SEQ ID NO: 228821 - DNA, 13 bp, Artificial Sequence
  Oligonucleotide for detection of SNP TSC0055822
gatttagtgttty

SEQ ID NO: 228822 - DNA, 13 bp, Artificial Sequence
  Oligonucleotide for detection of SNP TSC0055822
raaacactaaatc

SEQ ID NO: 228823 - DNA, 13 bp, Artificial Sequence
  Oligonucleotide for detection of SNP TSC0055822
gaggtagtgagty

SEQ ID NO: 228824 - DNA, 13 bp, Artificial Sequence
  Oligonucleotide for detection of SNP TSC0055822
ractcactacctc

SEQ ID NO: 228825 - DNA, 13 bp, Artificial Sequence
  Oligonucleotide for detection of SNP TSC0055822
gaggtattgagty

SEQ ID NO: 228826 - DNA, 13 bp, Artificial Sequence
  Oligonucleotide for detection of SNP TSC0055822
ractcaatacctc

SEQ ID NO: 228827 - DNA, 13 bp, Artificial Sequence
  Oligonucleotide for detection of SNP TSC0055828
ggaaaaggtatag

SEQ ID NO: 228828 - DNA, 13 bp, Artificial Sequence
  Oligonucleotide for detection of SNP TSC0055828
ctataccttttcc

SEQ ID NO: 228829 - DNA, 13 bp, Artificial Sequence
  Oligonucleotide for detection of SNP TSC0055828
ggaaaaagtatag

SEQ ID NO: 228830 - DNA, 13 bp, Artificial Sequence
  Oligonucleotide for detection of SNP TSC0055828
ctatactttttcc

SEQ ID NO: 228831 - DNA, 13 bp, Artificial Sequence
  Oligonucleotide for detection of SNP TSC0055829
ttatgaattaata

SEQ ID NO: 228832 - DNA, 13 bp, Artificial Sequence
  Oligonucleotide for detection of SNP TSC0055829
tattaattcataa

SEQ ID NO: 228833 - DNA, 13 bp, Artificial Sequence
  Oligonucleotide for detection of SNP TSC0055829
ttatgagttaata

SEQ ID NO: 228834 - DNA, 13 bp, Artificial Sequence
  Oligonucleotide for detection of SNP TSC0055829
tattaactcataa

SEQ ID NO: 228835 - DNA, 13 bp, Artificial Sequence
  Oligonucleotide for detection of SNP TSC0055830
tcgttatgtttgg

SEQ ID NO: 228836 - DNA, 13 bp, Artificial Sequence
  Oligonucleotide for detection of SNP TSC0055830
ccaaacataacga

SEQ ID NO: 228837 - DNA, 13 bp, Artificial Sequence
  Oligonucleotide for detection of SNP TSC0055830
tcgttacgtttgg

SEQ ID NO: 228838 - DNA, 13 bp, Artificial Sequence
  Oligonucleotide for detection of SNP TSC0055830
ccaaacgtaacga

SEQ ID NO: 228839 - DNA, 13 bp, Artificial Sequence
  Oligonucleotide for detection of SNP TSC0055830
ttaagtgtagtga

SEQ ID NO: 228840 - DNA, 13 bp, Artificial Sequence
  Oligonucleotide for detection of SNP TSC0055830
tcactacacttaa

SEQ ID NO: 228841 - DNA, 13 bp, Artificial Sequence
  Oligonucleotide for detection of SNP TSC0055830
ttaagtatagtga

SEQ ID NO: 228842 - DNA, 13 bp, Artificial Sequence
  Oligonucleotide for detection of SNP TSC0055830
tcactatacttaa

SEQ ID NO: 228843 - DNA, 13 bp, Artificial Sequence
  Oligonucleotide for detection of SNP TSC0055830
ttaagcgtagtga

SEQ ID NO: 228844 - DNA, 13 bp, Artificial Sequence
  Oligonucleotide for detection of SNP TSC0055830
tcactacgcttaa

SEQ ID NO: 228845 - DNA, 13 bp, Artificial Sequence
  Oligonucleotide for detection of SNP TSC0055830
ttaagtatagcga

SEQ ID NO: 228846 - DNA, 13 bp, Artificial Sequence
  Oligonucleotide for detection of SNP TSC0055830
tcgctatacttaa

SEQ ID NO: 228847 - DNA, 13 bp, Artificial Sequence
  Oligonucleotide for detection of SNP TSC0055830
ttaagtgtagcga

SEQ ID NO: 228848 - DNA, 13 bp, Artificial Sequence
  Oligonucleotide for detection of SNP TSC0055830
tcgctacacttaa

SEQ ID NO: 228849 - DNA, 13 bp, Artificial Sequence
  Oligonucleotide for detection of SNP TSC0055830
ttaagcgtagcga

SEQ ID NO: 228850 - DNA, 13 bp, Artificial Sequence
  Oligonucleotide for detection of SNP TSC0055830
tcgctacgcttaa

SEQ ID NO: 228851 - DNA, 13 bp, Artificial Sequence
  Oligonucleotide for detection of SNP TSC0055833
atattagttatta

SEQ ID NO: 228852 - DNA, 13 bp, Artificial Sequence
  Oligonucleotide for detection of SNP TSC0055833
taataactaatat

SEQ ID NO: 228853 - DNA, 13 bp, Artificial Sequence
  Oligonucleotide for detection of SNP TSC0055833
atattaattatta

SEQ ID NO: 228854 - DNA, 13 bp, Artificial Sequence
  Oligonucleotide for detection of SNP TSC0055833
taataattaatat

SEQ ID NO: 228855 - DNA, 13 bp, Artificial Sequence
  Oligonucleotide for detection of SNP TSC0055834
tttgattatgaat

SEQ ID NO: 228856 - DNA, 13 bp, Artificial Sequence
  Oligonucleotide for detection of SNP TSC0055834
attcataatcaaa

SEQ ID NO: 228857 - DNA, 13 bp, Artificial Sequence
  Oligonucleotide for detection of SNP TSC0055834
tttgatgatgaat

SEQ ID NO: 228858 - DNA, 13 bp, Artificial Sequence
  Oligonucleotide for detection of SNP TSC0055834
attcatcatcaaa

SEQ ID NO: 228859 - DNA, 13 bp, Artificial Sequence
  Oligonucleotide for detection of SNP TSC0055834
tttgacgatgaat

SEQ ID NO: 228860 - DNA, 13 bp, Artificial Sequence
  Oligonucleotide for detection of SNP TSC0055834
attcatcgtcaaa

SEQ ID NO: 228861 - DNA, 13 bp, Artificial Sequence
  Oligonucleotide for detection of SNP TSC0055834
atttatagttaag

SEQ ID NO: 228862 - DNA, 13 bp, Artificial Sequence
  Oligonucleotide for detection of SNP TSC0055834
cttaactataaat

SEQ ID NO: 228863 - DNA, 13 bp, Artificial Sequence
  Oligonucleotide for detection of SNP TSC0055834
atttattgttaag

SEQ ID NO: 228864 - DNA, 13 bp, Artificial Sequence
  Oligonucleotide for detection of SNP TSC0055834
cttaacaataaat

SEQ ID NO: 228865 - DNA, 13 bp, Artificial Sequence
  Oligonucleotide for detection of SNP TSC0055834
atttatcgttaag

SEQ ID NO: 228866 - DNA, 13 bp, Artificial Sequence
  Oligonucleotide for detection of SNP TSC0055834
cttaacgataaat

SEQ ID NO: 228867 - DNA, 13 bp, Artificial Sequence
  Oligonucleotide for detection of SNP TSC0055835
ataggtgaaatta

SEQ ID NO: 228868 - DNA, 13 bp, Artificial Sequence
  Oligonucleotide for detection of SNP TSC0055835
taatttcacctat

SEQ ID NO: 228869 - DNA, 13 bp, Artificial Sequence
  Oligonucleotide for detection of SNP TSC0055835
ataggtaaaatta

SEQ ID NO: 228870 - DNA, 13 bp, Artificial Sequence
  Oligonucleotide for detection of SNP TSC0055835
taattttacctat

SEQ ID NO: 228871 - DNA, 13 bp, Artificial Sequence
  Oligonucleotide for detection of SNP TSC0055836
ttatttttagtty

SEQ ID NO: 228872 - DNA, 13 bp, Artificial Sequence
  Oligonucleotide for detection of SNP TSC0055836
raactaaaaataa

SEQ ID NO: 228873 - DNA, 13 bp, Artificial Sequence
  Oligonucleotide for detection of SNP TSC0055836
gagttggaagtga

SEQ ID NO: 228874 - DNA, 13 bp, Artificial Sequence
  Oligonucleotide for detection of SNP TSC0055836
tcacttccaactc

SEQ ID NO: 228875 - DNA, 13 bp, Artificial Sequence
  Oligonucleotide for detection of SNP TSC0055836
gagttgtaagtga

SEQ ID NO: 228876 - DNA, 13 bp, Artificial Sequence
  Oligonucleotide for detection of SNP TSC0055836
tcacttacaactc

SEQ ID NO: 228877 - DNA, 13 bp, Artificial Sequence
  Oligonucleotide for detection of SNP TSC0055837
ggtataaagaaag

SEQ ID NO: 228878 - DNA, 13 bp, Artificial Sequence
  Oligonucleotide for detection of SNP TSC0055837
ctttctttatacc

SEQ ID NO: 228879 - DNA, 13 bp, Artificial Sequence
  Oligonucleotide for detection of SNP TSC0055837
ggtatatagaaag

SEQ ID NO: 228880 - DNA, 13 bp, Artificial Sequence
  Oligonucleotide for detection of SNP TSC0055837
ctttctatatacc

SEQ ID NO: 228881 - DNA, 13 bp, Artificial Sequence
  Oligonucleotide for detection of SNP TSC0055837
ggtatagagaaag

SEQ ID NO: 228882 - DNA, 13 bp, Artificial Sequence
  Oligonucleotide for detection of SNP TSC0055837
ctttctctatacc

SEQ ID NO: 228883 - DNA, 13 bp, Artificial Sequence
  Oligonucleotide for detection of SNP TSC0055838
tatggtagggtgt

SEQ ID NO: 228884 - DNA, 13 bp, Artificial Sequence
  Oligonucleotide for detection of SNP TSC0055838
acaccctaccata

SEQ ID NO: 228885 - DNA, 13 bp, Artificial Sequence
  Oligonucleotide for detection of SNP TSC0055838
tatggttgggtgt

SEQ ID NO: 228886 - DNA, 13 bp, Artificial Sequence
  Oligonucleotide for detection of SNP TSC0055838
acacccaaccata

SEQ ID NO: 228887 - DNA, 13 bp, Artificial Sequence
  Oligonucleotide for detection of SNP TSC0055838
tatggtggggtgt

SEQ ID NO: 228888 - DNA, 13 bp, Artificial Sequence
  Oligonucleotide for detection of SNP TSC0055838
acaccccaccata

SEQ ID NO: 228889 - DNA, 13 bp, Artificial Sequence
  Oligonucleotide for detection of SNP TSC0055838
tatggtagggcgt

SEQ ID NO: 228890 - DNA, 13 bp, Artificial Sequence
  Oligonucleotide for detection of SNP TSC0055838
acgccctaccata

SEQ ID NO: 228891 - DNA, 13 bp, Artificial Sequence
  Oligonucleotide for detection of SNP TSC0055838
tatggtcgggtgt

SEQ ID NO: 228892 - DNA, 13 bp, Artificial Sequence
  Oligonucleotide for detection of SNP TSC0055838
acacccgaccata

SEQ ID NO: 228893 - DNA, 13 bp, Artificial Sequence
  Oligonucleotide for detection of SNP TSC0055838
tatggcggggtgt

SEQ ID NO: 228894 - DNA, 13 bp, Artificial Sequence
  Oligonucleotide for detection of SNP TSC0055838
acaccccgccata

SEQ ID NO: 228895 - DNA, 13 bp, Artificial Sequence
  Oligonucleotide for detection of SNP TSC0055838
tatggttgggcgt

SEQ ID NO: 228896 - DNA, 13 bp, Artificial Sequence
  Oligonucleotide for detection of SNP TSC0055838
acgcccaaccata

SEQ ID NO: 228897 - DNA, 13 bp, Artificial Sequence
  Oligonucleotide for detection of SNP TSC0055838
tatggtggggcgt

SEQ ID NO: 228898 - DNA, 13 bp, Artificial Sequence
  Oligonucleotide for detection of SNP TSC0055838
acgccccaccata

SEQ ID NO: 228899 - DNA, 13 bp, Artificial Sequence
  Oligonucleotide for detection of SNP TSC0055838
tatggtcgggcgt

SEQ ID NO: 228900 - DNA, 13 bp, Artificial Sequence
  Oligonucleotide for detection of SNP TSC0055838
acgcccgaccata

SEQ ID NO: 228901 - DNA, 13 bp, Artificial Sequence
  Oligonucleotide for detection of SNP TSC0055838
tatggcggggcgt

SEQ ID NO: 228902 - DNA, 13 bp, Artificial Sequence
  Oligonucleotide for detection of SNP TSC0055838
acgccccgccata

SEQ ID NO: 228903 - DNA, 13 bp, Artificial Sequence
  Oligonucleotide for detection of SNP TSC0055838
atgttttgttatg

SEQ ID NO: 228904 - DNA, 13 bp, Artificial Sequence
  Oligonucleotide for detection of SNP TSC0055838
cataacaaaacat

SEQ ID NO: 228905 - DNA, 13 bp, Artificial Sequence
  Oligonucleotide for detection of SNP TSC0055838
atgtttggttatg

SEQ ID NO: 228906 - DNA, 13 bp, Artificial Sequence
  Oligonucleotide for detection of SNP TSC0055838
cataaccaaacat

SEQ ID NO: 228907 - DNA, 13 bp, Artificial Sequence
  Oligonucleotide for detection of SNP TSC0055838
acgttttgttatg

SEQ ID NO: 228908 - DNA, 13 bp, Artificial Sequence
  Oligonucleotide for detection of SNP TSC0055838
cataacaaaacgt

SEQ ID NO: 228909 - DNA, 13 bp, Artificial Sequence
  Oligonucleotide for detection of SNP TSC0055838
acgtttggttatg

SEQ ID NO: 228910 - DNA, 13 bp, Artificial Sequence
  Oligonucleotide for detection of SNP TSC0055838
cataaccaaacgt

SEQ ID NO: 228911 - DNA, 13 bp, Artificial Sequence
  Oligonucleotide for detection of SNP TSC0055838
atgttcggttatg

SEQ ID NO: 228912 - DNA, 13 bp, Artificial Sequence
  Oligonucleotide for detection of SNP TSC0055838
cataaccgaacat

SEQ ID NO: 228913 - DNA, 13 bp, Artificial Sequence
  Oligonucleotide for detection of SNP TSC0055838
atgtttcgttatg

SEQ ID NO: 228914 - DNA, 13 bp, Artificial Sequence
  Oligonucleotide for detection of SNP TSC0055838
cataacgaaacat

SEQ ID NO: 228915 - DNA, 13 bp, Artificial Sequence
  Oligonucleotide for detection of SNP TSC0055838
acgttcggttatg

SEQ ID NO: 228916 - DNA, 13 bp, Artificial Sequence
  Oligonucleotide for detection of SNP TSC0055838
cataaccgaacgt

SEQ ID NO: 228917 - DNA, 13 bp, Artificial Sequence
  Oligonucleotide for detection of SNP TSC0055838
acgtttcgttatg

SEQ ID NO: 228918 - DNA, 13 bp, Artificial Sequence
  Oligonucleotide for detection of SNP TSC0055838
cataacgaaacgt

SEQ ID NO: 228919 - DNA, 13 bp, Artificial Sequence
  Oligonucleotide for detection of SNP TSC0055840
atttgaatattty

SEQ ID NO: 228920 - DNA, 13 bp, Artificial Sequence
  Oligonucleotide for detection of SNP TSC0055840
raaatattcaaat

SEQ ID NO: 228921 - DNA, 13 bp, Artificial Sequence
  Oligonucleotide for detection of SNP TSC0055840
atttgagtattty

SEQ ID NO: 228922 - DNA, 13 bp, Artificial Sequence
  Oligonucleotide for detection of SNP TSC0055840
raaatactcaaat

SEQ ID NO: 228923 - DNA, 13 bp, Artificial Sequence
  Oligonucleotide for detection of SNP TSC0055841
aatttttatatgt

SEQ ID NO: 228924 - DNA, 13 bp, Artificial Sequence
  Oligonucleotide for detection of SNP TSC0055841
acatataaaaatt

SEQ ID NO: 228925 - DNA, 13 bp, Artificial Sequence
  Oligonucleotide for detection of SNP TSC0055841
aattttgatatgt

SEQ ID NO: 228926 - DNA, 13 bp, Artificial Sequence
  Oligonucleotide for detection of SNP TSC0055841
acatatcaaaatt

SEQ ID NO: 228927 - DNA, 13 bp, Artificial Sequence
  Oligonucleotide for detection of SNP TSC0055841
aatttttatacgt

SEQ ID NO: 228928 - DNA, 13 bp, Artificial Sequence
  Oligonucleotide for detection of SNP TSC0055841
acgtataaaaatt

SEQ ID NO: 228929 - DNA, 13 bp, Artificial Sequence
  Oligonucleotide for detection of SNP TSC0055841
aattttgatacgt

SEQ ID NO: 228930 - DNA, 13 bp, Artificial Sequence
  Oligonucleotide for detection of SNP TSC0055841
acgtatcaaaatt

SEQ ID NO: 228931 - DNA, 13 bp, Artificial Sequence
  Oligonucleotide for detection of SNP TSC0055841
atgtgtgaggatt

SEQ ID NO: 228932 - DNA, 13 bp, Artificial Sequence
  Oligonucleotide for detection of SNP TSC0055841
aatcctcacacat

SEQ ID NO: 228933 - DNA, 13 bp, Artificial Sequence
  Oligonucleotide for detection of SNP TSC0055841
atgtgttaggatt

SEQ ID NO: 228934 - DNA, 13 bp, Artificial Sequence
  Oligonucleotide for detection of SNP TSC0055841
aatcctaacacat

SEQ ID NO: 228935 - DNA, 13 bp, Artificial Sequence
  Oligonucleotide for detection of SNP TSC0055841
acgtgtgaggatt

SEQ ID NO: 228936 - DNA, 13 bp, Artificial Sequence
  Oligonucleotide for detection of SNP TSC0055841
aatcctcacacgt

SEQ ID NO: 228937 - DNA, 13 bp, Artificial Sequence
  Oligonucleotide for detection of SNP TSC0055841
acgtgttaggatt

SEQ ID NO: 228938 - DNA, 13 bp, Artificial Sequence
  Oligonucleotide for detection of SNP TSC0055841
aatcctaacacgt

SEQ ID NO: 228939 - DNA, 13 bp, Artificial Sequence
  Oligonucleotide for detection of SNP TSC0055842
ttttaggaaatgt

SEQ ID NO: 228940 - DNA, 13 bp, Artificial Sequence
  Oligonucleotide for detection of SNP TSC0055842
acatttcctaaaa

SEQ ID NO: 228941 - DNA, 13 bp, Artificial Sequence
  Oligonucleotide for detection of SNP TSC0055842
ttttagaaaatgt

SEQ ID NO: 228942 - DNA, 13 bp, Artificial Sequence
  Oligonucleotide for detection of SNP TSC0055842
acattttctaaaa

SEQ ID NO: 228943 - DNA, 13 bp, Artificial Sequence
  Oligonucleotide for detection of SNP TSC0055842
ttttaggaaacgt

SEQ ID NO: 228944 - DNA, 13 bp, Artificial Sequence
  Oligonucleotide for detection of SNP TSC0055842
acgtttcctaaaa

SEQ ID NO: 228945 - DNA, 13 bp, Artificial Sequence
  Oligonucleotide for detection of SNP TSC0055842
ttttagaaaacgt

SEQ ID NO: 228946 - DNA, 13 bp, Artificial Sequence
  Oligonucleotide for detection of SNP TSC0055842
acgttttctaaaa

SEQ ID NO: 228947 - DNA, 13 bp, Artificial Sequence
  Oligonucleotide for detection of SNP TSC0055843
tggggggatgaaa

SEQ ID NO: 228948 - DNA, 13 bp, Artificial Sequence
  Oligonucleotide for detection of SNP TSC0055843
tttcatcccccca

SEQ ID NO: 228949 - DNA, 13 bp, Artificial Sequence
  Oligonucleotide for detection of SNP TSC0055843
tgggggaatgaaa

SEQ ID NO: 228950 - DNA, 13 bp, Artificial Sequence
  Oligonucleotide for detection of SNP TSC0055843
tttcattccccca

SEQ ID NO: 228951 - DNA, 13 bp, Artificial Sequence
  Oligonucleotide for detection of SNP TSC0055845
taggggtggtttg

SEQ ID NO: 228952 - DNA, 13 bp, Artificial Sequence
  Oligonucleotide for detection of SNP TSC0055845
caaaccaccccta

SEQ ID NO: 228953 - DNA, 13 bp, Artificial Sequence
  Oligonucleotide for detection of SNP TSC0055845
taggggcggtttg

SEQ ID NO: 228954 - DNA, 13 bp, Artificial Sequence
  Oligonucleotide for detection of SNP TSC0055845
caaaccgccccta

SEQ ID NO: 228955 - DNA, 13 bp, Artificial Sequence
  Oligonucleotide for detection of SNP TSC0055845
taagtcgttttta

SEQ ID NO: 228956 - DNA, 13 bp, Artificial Sequence
  Oligonucleotide for detection of SNP TSC0055845
taaaaacgactta

SEQ ID NO: 228957 - DNA, 13 bp, Artificial Sequence
  Oligonucleotide for detection of SNP TSC0055846
ggggggaaaaaag

SEQ ID NO: 228958 - DNA, 13 bp, Artificial Sequence
  Oligonucleotide for detection of SNP TSC0055846
cttttttcccccc

SEQ ID NO: 228959 - DNA, 13 bp, Artificial Sequence
  Oligonucleotide for detection of SNP TSC0055846
gggggggaaaaag

SEQ ID NO: 228960 - DNA, 13 bp, Artificial Sequence
  Oligonucleotide for detection of SNP TSC0055846
ctttttccccccc

SEQ ID NO: 228961 - DNA, 13 bp, Artificial Sequence
  Oligonucleotide for detection of SNP TSC0055847
gaaaaaaaaaggt

SEQ ID NO: 228962 - DNA, 13 bp, Artificial Sequence
  Oligonucleotide for detection of SNP TSC0055847
acctttttttttc

SEQ ID NO: 228963 - DNA, 13 bp, Artificial Sequence
  Oligonucleotide for detection of SNP TSC0055847
gaaaaagaaaggt

SEQ ID NO: 228964 - DNA, 13 bp, Artificial Sequence
  Oligonucleotide for detection of SNP TSC0055847
acctttctttttc

SEQ ID NO: 228965 - DNA, 13 bp, Artificial Sequence
  Oligonucleotide for detection of SNP TSC0055848
attataaatttgg

SEQ ID NO: 228966 - DNA, 13 bp, Artificial Sequence
  Oligonucleotide for detection of SNP TSC0055848
ccaaatttataat

SEQ ID NO: 228967 - DNA, 13 bp, Artificial Sequence
  Oligonucleotide for detection of SNP TSC0055848
attatatatttgg

SEQ ID NO: 228968 - DNA, 13 bp, Artificial Sequence
  Oligonucleotide for detection of SNP TSC0055848
ccaaatatataat

SEQ ID NO: 228969 - DNA, 13 bp, Artificial Sequence
  Oligonucleotide for detection of SNP TSC0055848
ttaaatttatgat

SEQ ID NO: 228970 - DNA, 13 bp, Artificial Sequence
  Oligonucleotide for detection of SNP TSC0055848
atcataaatttaa

SEQ ID NO: 228971 - DNA, 13 bp, Artificial Sequence
  Oligonucleotide for detection of SNP TSC0055848
ttaaatgtatgat

SEQ ID NO: 228972 - DNA, 13 bp, Artificial Sequence
  Oligonucleotide for detection of SNP TSC0055848
atcatacatttaa

SEQ ID NO: 228973 - DNA, 13 bp, Artificial Sequence
  Oligonucleotide for detection of SNP TSC0005546
ttgtatattagga

SEQ ID NO: 228974 - DNA, 13 bp, Artificial Sequence
  Oligonucleotide for detection of SNP TSC0005546
tcctaatatacaa

SEQ ID NO: 228975 - DNA, 13 bp, Artificial Sequence
  Oligonucleotide for detection of SNP TSC0005546
ttgtatgttagga

SEQ ID NO: 228976 - DNA, 13 bp, Artificial Sequence
  Oligonucleotide for detection of SNP TSC0005546
tcctaacatacaa

SEQ ID NO: 228977 - DNA, 13 bp, Artificial Sequence
  Oligonucleotide for detection of SNP TSC0055854
gtgtattggagay

SEQ ID NO: 228978 - DNA, 13 bp, Artificial Sequence
  Oligonucleotide for detection of SNP TSC0055854
rtctccaatacac

SEQ ID NO: 228979 - DNA, 13 bp, Artificial Sequence
  Oligonucleotide for detection of SNP TSC0055854
gcgtattggagay

SEQ ID NO: 228980 - DNA, 13 bp, Artificial Sequence
  Oligonucleotide for detection of SNP TSC0055854
rtctccaatacgc

SEQ ID NO: 228981 - DNA, 13 bp, Artificial Sequence
  Oligonucleotide for detection of SNP TSC0055854
gtgtatcggagay

SEQ ID NO: 228982 - DNA, 13 bp, Artificial Sequence
  Oligonucleotide for detection of SNP TSC0055854
rtctccgatacac

SEQ ID NO: 228983 - DNA, 13 bp, Artificial Sequence
  Oligonucleotide for detection of SNP TSC0055854
gcgtatcggagay

SEQ ID NO: 228984 - DNA, 13 bp, Artificial Sequence
  Oligonucleotide for detection of SNP TSC0055854
rtctccgatacgc

SEQ ID NO: 228985 - DNA, 13 bp, Artificial Sequence
  Oligonucleotide for detection of SNP TSC0055854
gtttttgatatgy

SEQ ID NO: 228986 - DNA, 13 bp, Artificial Sequence
  Oligonucleotide for detection of SNP TSC0055854
rcatatcaaaaac

SEQ ID NO: 228987 - DNA, 13 bp, Artificial Sequence
  Oligonucleotide for detection of SNP TSC0055854
gtttttaatatgy

SEQ ID NO: 228988 - DNA, 13 bp, Artificial Sequence
  Oligonucleotide for detection of SNP TSC0055854
rcatattaaaaac

SEQ ID NO: 228989 - DNA, 13 bp, Artificial Sequence
  Oligonucleotide for detection of SNP TSC0055854
gttttcgatatgy

SEQ ID NO: 228990 - DNA, 13 bp, Artificial Sequence
  Oligonucleotide for detection of SNP TSC0055854
rcatatcgaaaac

SEQ ID NO: 228991 - DNA, 13 bp, Artificial Sequence
  Oligonucleotide for detection of SNP TSC0055854
gtttttaatacgy

SEQ ID NO: 228992 - DNA, 13 bp, Artificial Sequence
  Oligonucleotide for detection of SNP TSC0055854
rcgtattaaaaac

SEQ ID NO: 228993 - DNA, 13 bp, Artificial Sequence
  Oligonucleotide for detection of SNP TSC0055854
gtttttgatacgy

SEQ ID NO: 228994 - DNA, 13 bp, Artificial Sequence
  Oligonucleotide for detection of SNP TSC0055854
rcgtatcaaaaac

SEQ ID NO: 228995 - DNA, 13 bp, Artificial Sequence
  Oligonucleotide for detection of SNP TSC0055854
gttttcgatacgy

SEQ ID NO: 228996 - DNA, 13 bp, Artificial Sequence
  Oligonucleotide for detection of SNP TSC0055854
rcgtatcgaaaac

SEQ ID NO: 228997 - DNA, 13 bp, Artificial Sequence
  Oligonucleotide for detection of SNP TSC0055857
ggtttttatatgt

SEQ ID NO: 228998 - DNA, 13 bp, Artificial Sequence
  Oligonucleotide for detection of SNP TSC0055857
acatataaaaacc

SEQ ID NO: 228999 - DNA, 13 bp, Artificial Sequence
  Oligonucleotide for detection of SNP TSC0055857
ggttttgatatgt

SEQ ID NO: 229000 - DNA, 13 bp, Artificial Sequence
  Oligonucleotide for detection of SNP TSC0055857
acatatcaaaacc

SEQ ID NO: 229001 - DNA, 13 bp, Artificial Sequence
  Oligonucleotide for detection of SNP TSC0055857
ggtttcgatatgt

SEQ ID NO: 229002 - DNA, 13 bp, Artificial Sequence
  Oligonucleotide for detection of SNP TSC0055857
acatatcgaaacc

SEQ ID NO: 229003 - DNA, 13 bp, Artificial Sequence
  Oligonucleotide for detection of SNP TSC0055857
atatgtggaaaty

SEQ ID NO: 229004 - DNA, 13 bp, Artificial Sequence
  Oligonucleotide for detection of SNP TSC0055857
ratttccacatat

SEQ ID NO: 229005 - DNA, 13 bp, Artificial Sequence
  Oligonucleotide for detection of SNP TSC0055857
atatgttgaaaty

SEQ ID NO: 229006 - DNA, 13 bp, Artificial Sequence
  Oligonucleotide for detection of SNP TSC0055857
ratttcaacatat

SEQ ID NO: 229007 - DNA, 13 bp, Artificial Sequence
  Oligonucleotide for detection of SNP TSC0055857
atatgtcgaaaty

SEQ ID NO: 229008 - DNA, 13 bp, Artificial Sequence
  Oligonucleotide for detection of SNP TSC0055857
ratttcgacatat

SEQ ID NO: 229009 - DNA, 13 bp, Artificial Sequence
  Oligonucleotide for detection of SNP TSC0055858
tttatggtagtag

SEQ ID NO: 229010 - DNA, 13 bp, Artificial Sequence
  Oligonucleotide for detection of SNP TSC0055858
ctactaccataaa

SEQ ID NO: 229011 - DNA, 13 bp, Artificial Sequence
  Oligonucleotide for detection of SNP TSC0055858
tttatgatagtag

SEQ ID NO: 229012 - DNA, 13 bp, Artificial Sequence
  Oligonucleotide for detection of SNP TSC0055858
ctactatcataaa

SEQ ID NO: 229013 - DNA, 13 bp, Artificial Sequence
  Oligonucleotide for detection of SNP TSC0055858
tttacggtagtag

SEQ ID NO: 229014 - DNA, 13 bp, Artificial Sequence
  Oligonucleotide for detection of SNP TSC0055858
ctactaccgtaaa

SEQ ID NO: 229015 - DNA, 13 bp, Artificial Sequence
  Oligonucleotide for detection of SNP TSC0055858
tttacgatagtag

SEQ ID NO: 229016 - DNA, 13 bp, Artificial Sequence
  Oligonucleotide for detection of SNP TSC0055858
ctactatcgtaaa

SEQ ID NO: 229017 - DNA, 13 bp, Artificial Sequence
  Oligonucleotide for detection of SNP TSC0055860
aataaatttttty

SEQ ID NO: 229018 - DNA, 13 bp, Artificial Sequence
  Oligonucleotide for detection of SNP TSC0055860
raaaaaatttatt

SEQ ID NO: 229019 - DNA, 13 bp, Artificial Sequence
  Oligonucleotide for detection of SNP TSC0055860
ggaaaattttgtt

SEQ ID NO: 229020 - DNA, 13 bp, Artificial Sequence
  Oligonucleotide for detection of SNP TSC0055860
aacaaaattttcc

SEQ ID NO: 229021 - DNA, 13 bp, Artificial Sequence
  Oligonucleotide for detection of SNP TSC0055860
ggaaaagtttgtt

SEQ ID NO: 229022 - DNA, 13 bp, Artificial Sequence
  Oligonucleotide for detection of SNP TSC0055860
aacaaacttttcc

SEQ ID NO: 229023 - DNA, 13 bp, Artificial Sequence
  Oligonucleotide for detection of SNP TSC0055861
gtaagagagaggg

SEQ ID NO: 229024 - DNA, 13 bp, Artificial Sequence
  Oligonucleotide for detection of SNP TSC0055861
ccctctctcttac

SEQ ID NO: 229025 - DNA, 13 bp, Artificial Sequence
  Oligonucleotide for detection of SNP TSC0055861
gtaagaaagaggg

SEQ ID NO: 229026 - DNA, 13 bp, Artificial Sequence
  Oligonucleotide for detection of SNP TSC0055861
ccctctttcttac

SEQ ID NO: 229027 - DNA, 13 bp, Artificial Sequence
  Oligonucleotide for detection of SNP TSC0055863
ttgggtttattty

SEQ ID NO: 229028 - DNA, 13 bp, Artificial Sequence
  Oligonucleotide for detection of SNP TSC0055863
raaataaacccaa

SEQ ID NO: 229029 - DNA, 13 bp, Artificial Sequence
  Oligonucleotide for detection of SNP TSC0055863
ttgggtgtattty

SEQ ID NO: 229030 - DNA, 13 bp, Artificial Sequence
  Oligonucleotide for detection of SNP TSC0055863
raaatacacccaa

SEQ ID NO: 229031 - DNA, 13 bp, Artificial Sequence
  Oligonucleotide for detection of SNP TSC0055863
ttgggcgtattty

SEQ ID NO: 229032 - DNA, 13 bp, Artificial Sequence
  Oligonucleotide for detection of SNP TSC0055863
raaatacgcccaa

SEQ ID NO: 229033 - DNA, 13 bp, Artificial Sequence
  Oligonucleotide for detection of SNP TSC0055863
ggaatgagtttaa

SEQ ID NO: 229034 - DNA, 13 bp, Artificial Sequence
  Oligonucleotide for detection of SNP TSC0055863
ttaaactcattcc

SEQ ID NO: 229035 - DNA, 13 bp, Artificial Sequence
  Oligonucleotide for detection of SNP TSC0055863
ggaatgtgtttaa

SEQ ID NO: 229036 - DNA, 13 bp, Artificial Sequence
  Oligonucleotide for detection of SNP TSC0055863
ttaaacacattcc

SEQ ID NO: 229037 - DNA, 13 bp, Artificial Sequence
  Oligonucleotide for detection of SNP TSC0055863
ggaatgcgtttaa

SEQ ID NO: 229038 - DNA, 13 bp, Artificial Sequence
  Oligonucleotide for detection of SNP TSC0055863
ttaaacgcattcc

SEQ ID NO: 229039 - DNA, 13 bp, Artificial Sequence
  Oligonucleotide for detection of SNP TSC0055865
gtagtaattatgt

SEQ ID NO: 229040 - DNA, 13 bp, Artificial Sequence
  Oligonucleotide for detection of SNP TSC0055865
acataattactac

SEQ ID NO: 229041 - DNA, 13 bp, Artificial Sequence
  Oligonucleotide for detection of SNP TSC0055865
gtagtagttatgt

SEQ ID NO: 229042 - DNA, 13 bp, Artificial Sequence
  Oligonucleotide for detection of SNP TSC0055865
acataactactac

SEQ ID NO: 229043 - DNA, 13 bp, Artificial Sequence
  Oligonucleotide for detection of SNP TSC0055866
ggtagagggtgag

SEQ ID NO: 229044 - DNA, 13 bp, Artificial Sequence
  Oligonucleotide for detection of SNP TSC0055866
ctcaccctctacc

SEQ ID NO: 229045 - DNA, 13 bp, Artificial Sequence
  Oligonucleotide for detection of SNP TSC0055866
ggtagaaggtgag

SEQ ID NO: 229046 - DNA, 13 bp, Artificial Sequence
  Oligonucleotide for detection of SNP TSC0055866
ctcaccttctacc

SEQ ID NO: 229047 - DNA, 13 bp, Artificial Sequence
  Oligonucleotide for detection of SNP TSC0055867
agtttataagagg

SEQ ID NO: 229048 - DNA, 13 bp, Artificial Sequence
  Oligonucleotide for detection of SNP TSC0055867
cctcttataaact

SEQ ID NO: 229049 - DNA, 13 bp, Artificial Sequence
  Oligonucleotide for detection of SNP TSC0055867
agtttagaagagg

SEQ ID NO: 229050 - DNA, 13 bp, Artificial Sequence
  Oligonucleotide for detection of SNP TSC0055867
cctcttctaaact

SEQ ID NO: 229051 - DNA, 13 bp, Artificial Sequence
  Oligonucleotide for detection of SNP TSC0055867
ttttttttaggtt

SEQ ID NO: 229052 - DNA, 13 bp, Artificial Sequence
  Oligonucleotide for detection of SNP TSC0055867
aacctaaaaaaaa

SEQ ID NO: 229053 - DNA, 13 bp, Artificial Sequence
  Oligonucleotide for detection of SNP TSC0055868
atatggtggtgat

SEQ ID NO: 229054 - DNA, 13 bp, Artificial Sequence
  Oligonucleotide for detection of SNP TSC0055868
atcaccaccatat

SEQ ID NO: 229055 - DNA, 13 bp, Artificial Sequence
  Oligonucleotide for detection of SNP TSC0055868
atatggcggtgat

SEQ ID NO: 229056 - DNA, 13 bp, Artificial Sequence
  Oligonucleotide for detection of SNP TSC0055868
atcaccgccatat

SEQ ID NO: 229057 - DNA, 13 bp, Artificial Sequence
  Oligonucleotide for detection of SNP TSC0055868
attattgttatgt

SEQ ID NO: 229058 - DNA, 13 bp, Artificial Sequence
  Oligonucleotide for detection of SNP TSC0055868
acataacaataat

SEQ ID NO: 229059 - DNA, 13 bp, Artificial Sequence
  Oligonucleotide for detection of SNP TSC0055868
attattattatgt

SEQ ID NO: 229060 - DNA, 13 bp, Artificial Sequence
  Oligonucleotide for detection of SNP TSC0055868
acataataataat

SEQ ID NO: 229061 - DNA, 13 bp, Artificial Sequence
  Oligonucleotide for detection of SNP TSC0055868
attatcgttatgt

SEQ ID NO: 229062 - DNA, 13 bp, Artificial Sequence
  Oligonucleotide for detection of SNP TSC0055868
acataacgataat

SEQ ID NO: 229063 - DNA, 13 bp, Artificial Sequence
  Oligonucleotide for detection of SNP TSC0055874
tagtagattggtt

SEQ ID NO: 229064 - DNA, 13 bp, Artificial Sequence
  Oligonucleotide for detection of SNP TSC0055874
aaccaatctacta

SEQ ID NO: 229065 - DNA, 13 bp, Artificial Sequence
  Oligonucleotide for detection of SNP TSC0055874
tagtaggttggtt

SEQ ID NO: 229066 - DNA, 13 bp, Artificial Sequence
  Oligonucleotide for detection of SNP TSC0055874
aaccaacctacta

SEQ ID NO: 229067 - DNA, 13 bp, Artificial Sequence
  Oligonucleotide for detection of SNP TSC0055874
tagtagatcggtt

SEQ ID NO: 229068 - DNA, 13 bp, Artificial Sequence
  Oligonucleotide for detection of SNP TSC0055874
aaccgatctacta

SEQ ID NO: 229069 - DNA, 13 bp, Artificial Sequence
  Oligonucleotide for detection of SNP TSC0055874
tagtaggtcggtt

SEQ ID NO: 229070 - DNA, 13 bp, Artificial Sequence
  Oligonucleotide for detection of SNP TSC0055874
aaccgacctacta

SEQ ID NO: 229071 - DNA, 13 bp, Artificial Sequence
  Oligonucleotide for detection of SNP TSC0055875
aaagtaatttaty

SEQ ID NO: 229072 - DNA, 13 bp, Artificial Sequence
  Oligonucleotide for detection of SNP TSC0055875
rataaattacttt

SEQ ID NO: 229073 - DNA, 13 bp, Artificial Sequence
  Oligonucleotide for detection of SNP TSC0055875
aaagtagtttaty

SEQ ID NO: 229074 - DNA, 13 bp, Artificial Sequence
  Oligonucleotide for detection of SNP TSC0055875
rataaactacttt

SEQ ID NO: 229075 - DNA, 13 bp, Artificial Sequence
  Oligonucleotide for detection of SNP TSC0055877
tttattgtatgag

SEQ ID NO: 229076 - DNA, 13 bp, Artificial Sequence
  Oligonucleotide for detection of SNP TSC0055877
ctcatacaataaa

SEQ ID NO: 229077 - DNA, 13 bp, Artificial Sequence
  Oligonucleotide for detection of SNP TSC0055877
tttattatatgag

SEQ ID NO: 229078 - DNA, 13 bp, Artificial Sequence
  Oligonucleotide for detection of SNP TSC0055877
ctcatataataaa

SEQ ID NO: 229079 - DNA, 13 bp, Artificial Sequence
  Oligonucleotide for detection of SNP TSC0055882
ggttaaaaaatgt

SEQ ID NO: 229080 - DNA, 13 bp, Artificial Sequence
  Oligonucleotide for detection of SNP TSC0055882
acattttttaacc

SEQ ID NO: 229081 - DNA, 13 bp, Artificial Sequence
  Oligonucleotide for detection of SNP TSC0055882
ggttaagaaatgt

SEQ ID NO: 229082 - DNA, 13 bp, Artificial Sequence
  Oligonucleotide for detection of SNP TSC0055882
acatttcttaacc

SEQ ID NO: 229083 - DNA, 13 bp, Artificial Sequence
  Oligonucleotide for detection of SNP TSC0055882
ggttaaaaaacgt

SEQ ID NO: 229084 - DNA, 13 bp, Artificial Sequence
  Oligonucleotide for detection of SNP TSC0055882
acgttttttaacc

SEQ ID NO: 229085 - DNA, 13 bp, Artificial Sequence
  Oligonucleotide for detection of SNP TSC0055882
ggttaagaaacgt

SEQ ID NO: 229086 - DNA, 13 bp, Artificial Sequence
  Oligonucleotide for detection of SNP TSC0055882
acgtttcttaacc

SEQ ID NO: 229087 - DNA, 13 bp, Artificial Sequence
  Oligonucleotide for detection of SNP TSC0055885
ggtttttggaatt

SEQ ID NO: 229088 - DNA, 13 bp, Artificial Sequence
  Oligonucleotide for detection of SNP TSC0055885
aattccaaaaacc

SEQ ID NO: 229089 - DNA, 13 bp, Artificial Sequence
  Oligonucleotide for detection of SNP TSC0055885
ggttttcggaatt

SEQ ID NO: 229090 - DNA, 13 bp, Artificial Sequence
  Oligonucleotide for detection of SNP TSC0055885
aattccgaaaacc

SEQ ID NO: 229091 - DNA, 13 bp, Artificial Sequence
  Oligonucleotide for detection of SNP TSC0055885
agttttgaaggty

SEQ ID NO: 229092 - DNA, 13 bp, Artificial Sequence
  Oligonucleotide for detection of SNP TSC0055885
raccttcaaaact

SEQ ID NO: 229093 - DNA, 13 bp, Artificial Sequence
  Oligonucleotide for detection of SNP TSC0055885
agttttaaaggty

SEQ ID NO: 229094 - DNA, 13 bp, Artificial Sequence
  Oligonucleotide for detection of SNP TSC0055885
racctttaaaact

SEQ ID NO: 229095 - DNA, 13 bp, Artificial Sequence
  Oligonucleotide for detection of SNP TSC0055885
agtttcgaaggty

SEQ ID NO: 229096 - DNA, 13 bp, Artificial Sequence
  Oligonucleotide for detection of SNP TSC0055885
raccttcgaaact

SEQ ID NO: 229097 - DNA, 13 bp, Artificial Sequence
  Oligonucleotide for detection of SNP TSC0055886
gttgttgtgataa

SEQ ID NO: 229098 - DNA, 13 bp, Artificial Sequence
  Oligonucleotide for detection of SNP TSC0055886
ttatcacaacaac

SEQ ID NO: 229099 - DNA, 13 bp, Artificial Sequence
  Oligonucleotide for detection of SNP TSC0055886
gttgttatgataa

SEQ ID NO: 229100 - DNA, 13 bp, Artificial Sequence
  Oligonucleotide for detection of SNP TSC0055886
ttatcataacaac

SEQ ID NO: 229101 - DNA, 13 bp, Artificial Sequence
  Oligonucleotide for detection of SNP TSC0055889
ttatatgtaaaag

SEQ ID NO: 229102 - DNA, 13 bp, Artificial Sequence
  Oligonucleotide for detection of SNP TSC0055889
cttttacatataa

SEQ ID NO: 229103 - DNA, 13 bp, Artificial Sequence
  Oligonucleotide for detection of SNP TSC0055889
ttatatataaaag

SEQ ID NO: 229104 - DNA, 13 bp, Artificial Sequence
  Oligonucleotide for detection of SNP TSC0055889
cttttatatataa

SEQ ID NO: 229105 - DNA, 13 bp, Artificial Sequence
  Oligonucleotide for detection of SNP TSC0055891
ttattaagtatat

SEQ ID NO: 229106 - DNA, 13 bp, Artificial Sequence
  Oligonucleotide for detection of SNP TSC0055891
atatacttaataa

SEQ ID NO: 229107 - DNA, 13 bp, Artificial Sequence
  Oligonucleotide for detection of SNP TSC0055891
ttattaggtatat

SEQ ID NO: 229108 - DNA, 13 bp, Artificial Sequence
  Oligonucleotide for detection of SNP TSC0055891
atatacctaataa

SEQ ID NO: 229109 - DNA, 13 bp, Artificial Sequence
  Oligonucleotide for detection of SNP TSC0055895
ttttaatgtaatt

SEQ ID NO: 229110 - DNA, 13 bp, Artificial Sequence
  Oligonucleotide for detection of SNP TSC0055895
aattacattaaaa

SEQ ID NO: 229111 - DNA, 13 bp, Artificial Sequence
  Oligonucleotide for detection of SNP TSC0055895
ttttaaggtaatt

SEQ ID NO: 229112 - DNA, 13 bp, Artificial Sequence
  Oligonucleotide for detection of SNP TSC0055895
aattaccttaaaa

SEQ ID NO: 229113 - DNA, 13 bp, Artificial Sequence
  Oligonucleotide for detection of SNP TSC0055895
agttgtattgaag

SEQ ID NO: 229114 - DNA, 13 bp, Artificial Sequence
  Oligonucleotide for detection of SNP TSC0055895
cttcaatacaact

SEQ ID NO: 229115 - DNA, 13 bp, Artificial Sequence
  Oligonucleotide for detection of SNP TSC0055895
agttgttttgaag

SEQ ID NO: 229116 - DNA, 13 bp, Artificial Sequence
  Oligonucleotide for detection of SNP TSC0055895
cttcaaaacaact

SEQ ID NO: 229117 - DNA, 13 bp, Artificial Sequence
  Oligonucleotide for detection of SNP TSC0055896
attttgggttata

SEQ ID NO: 229118 - DNA, 13 bp, Artificial Sequence
  Oligonucleotide for detection of SNP TSC0055896
tataacccaaaat

SEQ ID NO: 229119 - DNA, 13 bp, Artificial Sequence
  Oligonucleotide for detection of SNP TSC0055896
attttgagttata

SEQ ID NO: 229120 - DNA, 13 bp, Artificial Sequence
  Oligonucleotide for detection of SNP TSC0055896
tataactcaaaat

SEQ ID NO: 229121 - DNA, 13 bp, Artificial Sequence
  Oligonucleotide for detection of SNP TSC0055896
atttcgggttata

SEQ ID NO: 229122 - DNA, 13 bp, Artificial Sequence
  Oligonucleotide for detection of SNP TSC0055896
tataacccgaaat

SEQ ID NO: 229123 - DNA, 13 bp, Artificial Sequence
  Oligonucleotide for detection of SNP TSC0055896
atttcgagttata

SEQ ID NO: 229124 - DNA, 13 bp, Artificial Sequence
  Oligonucleotide for detection of SNP TSC0055896
tataactcgaaat

SEQ ID NO: 229125 - DNA, 13 bp, Artificial Sequence
  Oligonucleotide for detection of SNP TSC0055897
aaaagaagaattg

SEQ ID NO: 229126 - DNA, 13 bp, Artificial Sequence
  Oligonucleotide for detection of SNP TSC0055897
caattcttctttt

SEQ ID NO: 229127 - DNA, 13 bp, Artificial Sequence
  Oligonucleotide for detection of SNP TSC0055897
aaaagatgaattg

SEQ ID NO: 229128 - DNA, 13 bp, Artificial Sequence
  Oligonucleotide for detection of SNP TSC0055897
caattcatctttt

SEQ ID NO: 229129 - DNA, 13 bp, Artificial Sequence
  Oligonucleotide for detection of SNP TSC0055897
aaaagacgaattg

SEQ ID NO: 229130 - DNA, 13 bp, Artificial Sequence
  Oligonucleotide for detection of SNP TSC0055897
caattcgtctttt

SEQ ID NO: 229131 - DNA, 13 bp, Artificial Sequence
  Oligonucleotide for detection of SNP TSC0055898
aaaagagttaatt

SEQ ID NO: 229132 - DNA, 13 bp, Artificial Sequence
  Oligonucleotide for detection of SNP TSC0055898
aattaactctttt

SEQ ID NO: 229133 - DNA, 13 bp, Artificial Sequence
  Oligonucleotide for detection of SNP TSC0055898
aaaagaattaatt

SEQ ID NO: 229134 - DNA, 13 bp, Artificial Sequence
  Oligonucleotide for detection of SNP TSC0055898
aattaattctttt

SEQ ID NO: 229135 - DNA, 13 bp, Artificial Sequence
  Oligonucleotide for detection of SNP TSC0055902
aattgtataagay

SEQ ID NO: 229136 - DNA, 13 bp, Artificial Sequence
  Oligonucleotide for detection of SNP TSC0055902
rtcttatacaatt

SEQ ID NO: 229137 - DNA, 13 bp, Artificial Sequence
  Oligonucleotide for detection of SNP TSC0055902
aattgtgtaagay

SEQ ID NO: 229138 - DNA, 13 bp, Artificial Sequence
  Oligonucleotide for detection of SNP TSC0055902
rtcttacacaatt

SEQ ID NO: 229139 - DNA, 13 bp, Artificial Sequence
  Oligonucleotide for detection of SNP TSC0055903
agtggtggagttt

SEQ ID NO: 229140 - DNA, 13 bp, Artificial Sequence
  Oligonucleotide for detection of SNP TSC0055903
aaactccaccact

SEQ ID NO: 229141 - DNA, 13 bp, Artificial Sequence
  Oligonucleotide for detection of SNP TSC0055903
agtggtagagttt

SEQ ID NO: 229142 - DNA, 13 bp, Artificial Sequence
  Oligonucleotide for detection of SNP TSC0055903
aaactctaccact

SEQ ID NO: 229143 - DNA, 13 bp, Artificial Sequence
  Oligonucleotide for detection of SNP TSC0055906
tttatagatgttt

SEQ ID NO: 229144 - DNA, 13 bp, Artificial Sequence
  Oligonucleotide for detection of SNP TSC0055906
aaacatctataaa

SEQ ID NO: 229145 - DNA, 13 bp, Artificial Sequence
  Oligonucleotide for detection of SNP TSC0055906
tttataaatgttt

SEQ ID NO: 229146 - DNA, 13 bp, Artificial Sequence
  Oligonucleotide for detection of SNP TSC0055906
aaacatttataaa

SEQ ID NO: 229147 - DNA, 13 bp, Artificial Sequence
  Oligonucleotide for detection of SNP TSC0055907
gtaagatagaatg

SEQ ID NO: 229148 - DNA, 13 bp, Artificial Sequence
  Oligonucleotide for detection of SNP TSC0055907
cattctatcttac

SEQ ID NO: 229149 - DNA, 13 bp, Artificial Sequence
  Oligonucleotide for detection of SNP TSC0055907
gtaagagagaatg

SEQ ID NO: 229150 - DNA, 13 bp, Artificial Sequence
  Oligonucleotide for detection of SNP TSC0055907
cattctctcttac

SEQ ID NO: 229151 - DNA, 13 bp, Artificial Sequence
  Oligonucleotide for detection of SNP TSC0055908
agtatatagggaa

SEQ ID NO: 229152 - DNA, 13 bp, Artificial Sequence
  Oligonucleotide for detection of SNP TSC0055908
ttccctatatact

SEQ ID NO: 229153 - DNA, 13 bp, Artificial Sequence
  Oligonucleotide for detection of SNP TSC0055908
agtataaagggaa

SEQ ID NO: 229154 - DNA, 13 bp, Artificial Sequence
  Oligonucleotide for detection of SNP TSC0055908
ttccctttatact

SEQ ID NO: 229155 - DNA, 13 bp, Artificial Sequence
  Oligonucleotide for detection of SNP TSC0055911
ttaatttagagag

SEQ ID NO: 229156 - DNA, 13 bp, Artificial Sequence
  Oligonucleotide for detection of SNP TSC0055911
ctctctaaattaa

SEQ ID NO: 229157 - DNA, 13 bp, Artificial Sequence
  Oligonucleotide for detection of SNP TSC0055911
ttaattgagagag

SEQ ID NO: 229158 - DNA, 13 bp, Artificial Sequence
  Oligonucleotide for detection of SNP TSC0055911
ctctctcaattaa

SEQ ID NO: 229159 - DNA, 13 bp, Artificial Sequence
  Oligonucleotide for detection of SNP TSC0055912
tttagtaagaatt

SEQ ID NO: 229160 - DNA, 13 bp, Artificial Sequence
  Oligonucleotide for detection of SNP TSC0055912
aattcttactaaa

SEQ ID NO: 229161 - DNA, 13 bp, Artificial Sequence
  Oligonucleotide for detection of SNP TSC0055912
tttagttagaatt

SEQ ID NO: 229162 - DNA, 13 bp, Artificial Sequence
  Oligonucleotide for detection of SNP TSC0055912
aattctaactaaa

SEQ ID NO: 229163 - DNA, 13 bp, Artificial Sequence
  Oligonucleotide for detection of SNP TSC0055912
aatttttattgga

SEQ ID NO: 229164 - DNA, 13 bp, Artificial Sequence
  Oligonucleotide for detection of SNP TSC0055912
tccaataaaaatt

SEQ ID NO: 229165 - DNA, 13 bp, Artificial Sequence
  Oligonucleotide for detection of SNP TSC0055912
aattttgattgga

SEQ ID NO: 229166 - DNA, 13 bp, Artificial Sequence
  Oligonucleotide for detection of SNP TSC0055912
tccaatcaaaatt

SEQ ID NO: 229167 - DNA, 13 bp, Artificial Sequence
  Oligonucleotide for detection of SNP TSC0008182
taagtttgtttat

SEQ ID NO: 229168 - DNA, 13 bp, Artificial Sequence
  Oligonucleotide for detection of SNP TSC0008182
ataaacaaactta

SEQ ID NO: 229169 - DNA, 13 bp, Artificial Sequence
  Oligonucleotide for detection of SNP TSC0008182
taagttggtttat

SEQ ID NO: 229170 - DNA, 13 bp, Artificial Sequence
  Oligonucleotide for detection of SNP TSC0008182
ataaaccaactta

SEQ ID NO: 229171 - DNA, 13 bp, Artificial Sequence
  Oligonucleotide for detection of SNP TSC0008182
ataaataaatttg

SEQ ID NO: 229172 - DNA, 13 bp, Artificial Sequence
  Oligonucleotide for detection of SNP TSC0008182
caaatttatttat

SEQ ID NO: 229173 - DNA, 13 bp, Artificial Sequence
  Oligonucleotide for detection of SNP TSC0008182
ataaattaatttg

SEQ ID NO: 229174 - DNA, 13 bp, Artificial Sequence
  Oligonucleotide for detection of SNP TSC0008182
caaattaatttat

SEQ ID NO: 229175 - DNA, 13 bp, Artificial Sequence
  Oligonucleotide for detection of SNP TSC0008183
gttattggtgatt

SEQ ID NO: 229176 - DNA, 13 bp, Artificial Sequence
  Oligonucleotide for detection of SNP TSC0008183
aatcaccaataac

SEQ ID NO: 229177 - DNA, 13 bp, Artificial Sequence
  Oligonucleotide for detection of SNP TSC0008183
gttattagtgatt

SEQ ID NO: 229178 - DNA, 13 bp, Artificial Sequence
  Oligonucleotide for detection of SNP TSC0008183
aatcactaataac

SEQ ID NO: 229179 - DNA, 13 bp, Artificial Sequence
  Oligonucleotide for detection of SNP TSC0008183
gttatcggtgatt

SEQ ID NO: 229180 - DNA, 13 bp, Artificial Sequence
  Oligonucleotide for detection of SNP TSC0008183
aatcaccgataac

SEQ ID NO: 229181 - DNA, 13 bp, Artificial Sequence
  Oligonucleotide for detection of SNP TSC0055914
ttattgttaaggt

SEQ ID NO: 229182 - DNA, 13 bp, Artificial Sequence
  Oligonucleotide for detection of SNP TSC0055914
accttaacaataa

SEQ ID NO: 229183 - DNA, 13 bp, Artificial Sequence
  Oligonucleotide for detection of SNP TSC0055914
ttattggtaaggt

SEQ ID NO: 229184 - DNA, 13 bp, Artificial Sequence
  Oligonucleotide for detection of SNP TSC0055914
accttaccaataa

SEQ ID NO: 229185 - DNA, 13 bp, Artificial Sequence
  Oligonucleotide for detection of SNP TSC0055915
aaagaggaagaga

SEQ ID NO: 229186 - DNA, 13 bp, Artificial Sequence
  Oligonucleotide for detection of SNP TSC0055915
tctcttcctcttt

SEQ ID NO: 229187 - DNA, 13 bp, Artificial Sequence
  Oligonucleotide for detection of SNP TSC0055915
aaagagtaagaga

SEQ ID NO: 229188 - DNA, 13 bp, Artificial Sequence
  Oligonucleotide for detection of SNP TSC0055915
tctcttactcttt

SEQ ID NO: 229189 - DNA, 13 bp, Artificial Sequence
  Oligonucleotide for detection of SNP TSC0055916
aggtaggtggttt

SEQ ID NO: 229190 - DNA, 13 bp, Artificial Sequence
  Oligonucleotide for detection of SNP TSC0055916
aaaccacctacct

SEQ ID NO: 229191 - DNA, 13 bp, Artificial Sequence
  Oligonucleotide for detection of SNP TSC0055916
aggtagatggttt

SEQ ID NO: 229192 - DNA, 13 bp, Artificial Sequence
  Oligonucleotide for detection of SNP TSC0055916
aaaccatctacct

SEQ ID NO: 229193 - DNA, 13 bp, Artificial Sequence
  Oligonucleotide for detection of SNP TSC0055917
ataaaagttttta

SEQ ID NO: 229194 - DNA, 13 bp, Artificial Sequence
  Oligonucleotide for detection of SNP TSC0055917
taaaaacttttat

SEQ ID NO: 229195 - DNA, 13 bp, Artificial Sequence
  Oligonucleotide for detection of SNP TSC0055918
taagtaaataaaa

SEQ ID NO: 229196 - DNA, 13 bp, Artificial Sequence
  Oligonucleotide for detection of SNP TSC0055918
ttttatttactta

SEQ ID NO: 229197 - DNA, 13 bp, Artificial Sequence
  Oligonucleotide for detection of SNP TSC0055918
taagtatataaaa

SEQ ID NO: 229198 - DNA, 13 bp, Artificial Sequence
  Oligonucleotide for detection of SNP TSC0055918
ttttatatactta

SEQ ID NO: 229199 - DNA, 13 bp, Artificial Sequence
  Oligonucleotide for detection of SNP TSC0055919
ggttttaaggtta

SEQ ID NO: 229200 - DNA, 13 bp, Artificial Sequence
  Oligonucleotide for detection of SNP TSC0055919
taaccttaaaacc

SEQ ID NO: 229201 - DNA, 13 bp, Artificial Sequence
  Oligonucleotide for detection of SNP TSC0055919
ggttttgaggtta

SEQ ID NO: 229202 - DNA, 13 bp, Artificial Sequence
  Oligonucleotide for detection of SNP TSC0055919
taacctcaaaacc

SEQ ID NO: 229203 - DNA, 13 bp, Artificial Sequence
  Oligonucleotide for detection of SNP TSC0055919
ggtttcgaggtta

SEQ ID NO: 229204 - DNA, 13 bp, Artificial Sequence
  Oligonucleotide for detection of SNP TSC0055919
taacctcgaaacc

SEQ ID NO: 229205 - DNA, 13 bp, Artificial Sequence
  Oligonucleotide for detection of SNP TSC0055919
tggttttggaaty

SEQ ID NO: 229206 - DNA, 13 bp, Artificial Sequence
  Oligonucleotide for detection of SNP TSC0055919
rattccaaaacca

SEQ ID NO: 229207 - DNA, 13 bp, Artificial Sequence
  Oligonucleotide for detection of SNP TSC0055919
tggtttcggaaty

SEQ ID NO: 229208 - DNA, 13 bp, Artificial Sequence
  Oligonucleotide for detection of SNP TSC0055919
rattccgaaacca

SEQ ID NO: 229209 - DNA, 13 bp, Artificial Sequence
  Oligonucleotide for detection of SNP TSC0055920
aattataagagag

SEQ ID NO: 229210 - DNA, 13 bp, Artificial Sequence
  Oligonucleotide for detection of SNP TSC0055920
ctctcttataatt

SEQ ID NO: 229211 - DNA, 13 bp, Artificial Sequence
  Oligonucleotide for detection of SNP TSC0055920
aattatgagagag

SEQ ID NO: 229212 - DNA, 13 bp, Artificial Sequence
  Oligonucleotide for detection of SNP TSC0055920
ctctctcataatt

SEQ ID NO: 229213 - DNA, 13 bp, Artificial Sequence
  Oligonucleotide for detection of SNP TSC0055924
tgttattgataaa

SEQ ID NO: 229214 - DNA, 13 bp, Artificial Sequence
  Oligonucleotide for detection of SNP TSC0055924
tttatcaataaca

SEQ ID NO: 229215 - DNA, 13 bp, Artificial Sequence
  Oligonucleotide for detection of SNP TSC0055924
tgttatcgataaa

SEQ ID NO: 229216 - DNA, 13 bp, Artificial Sequence
  Oligonucleotide for detection of SNP TSC0055924
tttatcgataaca

SEQ ID NO: 229217 - DNA, 13 bp, Artificial Sequence
  Oligonucleotide for detection of SNP TSC0055924
tttattggtgata

SEQ ID NO: 229218 - DNA, 13 bp, Artificial Sequence
  Oligonucleotide for detection of SNP TSC0055924
tatcaccaataaa

SEQ ID NO: 229219 - DNA, 13 bp, Artificial Sequence
  Oligonucleotide for detection of SNP TSC0055924
tttattagtgata

SEQ ID NO: 229220 - DNA, 13 bp, Artificial Sequence
  Oligonucleotide for detection of SNP TSC0055924
tatcactaataaa

SEQ ID NO: 229221 - DNA, 13 bp, Artificial Sequence
  Oligonucleotide for detection of SNP TSC0055924
tttatcggtgata

SEQ ID NO: 229222 - DNA, 13 bp, Artificial Sequence
  Oligonucleotide for detection of SNP TSC0055924
tatcaccgataaa

SEQ ID NO: 229223 - DNA, 13 bp, Artificial Sequence
  Oligonucleotide for detection of SNP TSC0055927
taaggttgtagtg

SEQ ID NO: 229224 - DNA, 13 bp, Artificial Sequence
  Oligonucleotide for detection of SNP TSC0055927
cactacaacctta

SEQ ID NO: 229225 - DNA, 13 bp, Artificial Sequence
  Oligonucleotide for detection of SNP TSC0055927
taaggtcgtagtg

SEQ ID NO: 229226 - DNA, 13 bp, Artificial Sequence
  Oligonucleotide for detection of SNP TSC0055927
cactacgacctta

SEQ ID NO: 229227 - DNA, 13 bp, Artificial Sequence
  Oligonucleotide for detection of SNP TSC0055928
aaaagataaaaaa

SEQ ID NO: 229228 - DNA, 13 bp, Artificial Sequence
  Oligonucleotide for detection of SNP TSC0055928
ttttttatctttt

SEQ ID NO: 229229 - DNA, 13 bp, Artificial Sequence
  Oligonucleotide for detection of SNP TSC0055928
aaaagaaaaaaaa

SEQ ID NO: 229230 - DNA, 13 bp, Artificial Sequence
  Oligonucleotide for detection of SNP TSC0055928
ttttttttctttt

SEQ ID NO: 229231 - DNA, 13 bp, Artificial Sequence
  Oligonucleotide for detection of SNP TSC0055930
aagttaagaaaay

SEQ ID NO: 229232 - DNA, 13 bp, Artificial Sequence
  Oligonucleotide for detection of SNP TSC0055930
rttttcttaactt

SEQ ID NO: 229233 - DNA, 13 bp, Artificial Sequence
  Oligonucleotide for detection of SNP TSC0055930
aagttaggaaaay

SEQ ID NO: 229234 - DNA, 13 bp, Artificial Sequence
  Oligonucleotide for detection of SNP TSC0055930
rttttcctaactt

SEQ ID NO: 229235 - DNA, 13 bp, Artificial Sequence
  Oligonucleotide for detection of SNP TSC0005243
gtaaaaatataty

SEQ ID NO: 229236 - DNA, 13 bp, Artificial Sequence
  Oligonucleotide for detection of SNP TSC0005243
ratatatttttac

SEQ ID NO: 229237 - DNA, 13 bp, Artificial Sequence
  Oligonucleotide for detection of SNP TSC0005243
gtaaaagtataty

SEQ ID NO: 229238 - DNA, 13 bp, Artificial Sequence
  Oligonucleotide for detection of SNP TSC0005243
ratatacttttac

SEQ ID NO: 229239 - DNA, 13 bp, Artificial Sequence
  Oligonucleotide for detection of SNP TSC0055931
gttattataagtg

SEQ ID NO: 229240 - DNA, 13 bp, Artificial Sequence
  Oligonucleotide for detection of SNP TSC0055931
cacttataataac

SEQ ID NO: 229241 - DNA, 13 bp, Artificial Sequence
  Oligonucleotide for detection of SNP TSC0055931
gttattttaagtg

SEQ ID NO: 229242 - DNA, 13 bp, Artificial Sequence
  Oligonucleotide for detection of SNP TSC0055931
cacttaaaataac

SEQ ID NO: 229243 - DNA, 13 bp, Artificial Sequence
  Oligonucleotide for detection of SNP TSC0055931
tatttatggtagy

SEQ ID NO: 229244 - DNA, 13 bp, Artificial Sequence
  Oligonucleotide for detection of SNP TSC0055931
rctaccataaata

SEQ ID NO: 229245 - DNA, 13 bp, Artificial Sequence
  Oligonucleotide for detection of SNP TSC0055931
tatttagggtagy

SEQ ID NO: 229246 - DNA, 13 bp, Artificial Sequence
  Oligonucleotide for detection of SNP TSC0055931
rctaccctaaata

SEQ ID NO: 229247 - DNA, 13 bp, Artificial Sequence
  Oligonucleotide for detection of SNP TSC0055934
agtagtgagaata

SEQ ID NO: 229248 - DNA, 13 bp, Artificial Sequence
  Oligonucleotide for detection of SNP TSC0055934
tattctcactact

SEQ ID NO: 229249 - DNA, 13 bp, Artificial Sequence
  Oligonucleotide for detection of SNP TSC0055934
agtagtaagaata

SEQ ID NO: 229250 - DNA, 13 bp, Artificial Sequence
  Oligonucleotide for detection of SNP TSC0055934
tattcttactact

SEQ ID NO: 229251 - DNA, 13 bp, Artificial Sequence
  Oligonucleotide for detection of SNP TSC0055935
ttaggtataatga

SEQ ID NO: 229252 - DNA, 13 bp, Artificial Sequence
  Oligonucleotide for detection of SNP TSC0055935
tcattatacctaa

SEQ ID NO: 229253 - DNA, 13 bp, Artificial Sequence
  Oligonucleotide for detection of SNP TSC0055935
ttaggtttaatga

SEQ ID NO: 229254 - DNA, 13 bp, Artificial Sequence
  Oligonucleotide for detection of SNP TSC0055935
tcattaaacctaa

SEQ ID NO: 229255 - DNA, 13 bp, Artificial Sequence
  Oligonucleotide for detection of SNP TSC0055935
ttaggtgtaatga

SEQ ID NO: 229256 - DNA, 13 bp, Artificial Sequence
  Oligonucleotide for detection of SNP TSC0055935
tcattacacctaa

SEQ ID NO: 229257 - DNA, 13 bp, Artificial Sequence
  Oligonucleotide for detection of SNP TSC0055935
ttaggcgtaatga

SEQ ID NO: 229258 - DNA, 13 bp, Artificial Sequence
  Oligonucleotide for detection of SNP TSC0055935
tcattacgcctaa

SEQ ID NO: 229259 - DNA, 13 bp, Artificial Sequence
  Oligonucleotide for detection of SNP TSC0055936
gttaggagtaatg

SEQ ID NO: 229260 - DNA, 13 bp, Artificial Sequence
  Oligonucleotide for detection of SNP TSC0055936
cattactcctaac

SEQ ID NO: 229261 - DNA, 13 bp, Artificial Sequence
  Oligonucleotide for detection of SNP TSC0055936
gttaggtgtaatg

SEQ ID NO: 229262 - DNA, 13 bp, Artificial Sequence
  Oligonucleotide for detection of SNP TSC0055936
cattacacctaac

SEQ ID NO: 229263 - DNA, 13 bp, Artificial Sequence
  Oligonucleotide for detection of SNP TSC0055936
gttaggcgtaatg

SEQ ID NO: 229264 - DNA, 13 bp, Artificial Sequence
  Oligonucleotide for detection of SNP TSC0055936
cattacgcctaac

SEQ ID NO: 229265 - DNA, 13 bp, Artificial Sequence
  Oligonucleotide for detection of SNP TSC0055936
tattgtttttggy

SEQ ID NO: 229266 - DNA, 13 bp, Artificial Sequence
  Oligonucleotide for detection of SNP TSC0055936
rccaaaaacaata

SEQ ID NO: 229267 - DNA, 13 bp, Artificial Sequence
  Oligonucleotide for detection of SNP TSC0055937
agaattttgggty

SEQ ID NO: 229268 - DNA, 13 bp, Artificial Sequence
  Oligonucleotide for detection of SNP TSC0055937
racccaaaattct

SEQ ID NO: 229269 - DNA, 13 bp, Artificial Sequence
  Oligonucleotide for detection of SNP TSC0055937
agaattgtgggty

SEQ ID NO: 229270 - DNA, 13 bp, Artificial Sequence
  Oligonucleotide for detection of SNP TSC0055937
racccacaattct

SEQ ID NO: 229271 - DNA, 13 bp, Artificial Sequence
  Oligonucleotide for detection of SNP TSC0055937
agaatcgtgggty

SEQ ID NO: 229272 - DNA, 13 bp, Artificial Sequence
  Oligonucleotide for detection of SNP TSC0055937
racccacgattct

SEQ ID NO: 229273 - DNA, 13 bp, Artificial Sequence
  Oligonucleotide for detection of SNP TSC0055937
ggtttagggtttt

SEQ ID NO: 229274 - DNA, 13 bp, Artificial Sequence
  Oligonucleotide for detection of SNP TSC0055937
aaaaccctaaacc

SEQ ID NO: 229275 - DNA, 13 bp, Artificial Sequence
  Oligonucleotide for detection of SNP TSC0055937
ggtttaaggtttt

SEQ ID NO: 229276 - DNA, 13 bp, Artificial Sequence
  Oligonucleotide for detection of SNP TSC0055937
aaaaccttaaacc

SEQ ID NO: 229277 - DNA, 13 bp, Artificial Sequence
  Oligonucleotide for detection of SNP TSC0055938
ggagttagaggta

SEQ ID NO: 229278 - DNA, 13 bp, Artificial Sequence
  Oligonucleotide for detection of SNP TSC0055938
tacctctaactcc

SEQ ID NO: 229279 - DNA, 13 bp, Artificial Sequence
  Oligonucleotide for detection of SNP TSC0055938
ggagtttgaggta

SEQ ID NO: 229280 - DNA, 13 bp, Artificial Sequence
  Oligonucleotide for detection of SNP TSC0055938
tacctcaaactcc

SEQ ID NO: 229281 - DNA, 13 bp, Artificial Sequence
  Oligonucleotide for detection of SNP TSC0055938
ggagttcgaggta

SEQ ID NO: 229282 - DNA, 13 bp, Artificial Sequence
  Oligonucleotide for detection of SNP TSC0055938
tacctcgaactcc

SEQ ID NO: 229283 - DNA, 13 bp, Artificial Sequence
  Oligonucleotide for detection of SNP TSC0055938
tgttttggattty

SEQ ID NO: 229284 - DNA, 13 bp, Artificial Sequence
  Oligonucleotide for detection of SNP TSC0055938
raaatccaaaaca

SEQ ID NO: 229285 - DNA, 13 bp, Artificial Sequence
  Oligonucleotide for detection of SNP TSC0055938
tgtttcggattty

SEQ ID NO: 229286 - DNA, 13 bp, Artificial Sequence
  Oligonucleotide for detection of SNP TSC0055938
raaatccgaaaca

SEQ ID NO: 229287 - DNA, 13 bp, Artificial Sequence
  Oligonucleotide for detection of SNP TSC0055940
gtttttaatttgt

SEQ ID NO: 229288 - DNA, 13 bp, Artificial Sequence
  Oligonucleotide for detection of SNP TSC0055940
acaaattaaaaac

SEQ ID NO: 229289 - DNA, 13 bp, Artificial Sequence
  Oligonucleotide for detection of SNP TSC0055940
gtttttgatttgt

SEQ ID NO: 229290 - DNA, 13 bp, Artificial Sequence
  Oligonucleotide for detection of SNP TSC0055940
acaaatcaaaaac

SEQ ID NO: 229291 - DNA, 13 bp, Artificial Sequence
  Oligonucleotide for detection of SNP TSC0055940
gttttcgatttgt

SEQ ID NO: 229292 - DNA, 13 bp, Artificial Sequence
  Oligonucleotide for detection of SNP TSC0055940
acaaatcgaaaac

SEQ ID NO: 229293 - DNA, 13 bp, Artificial Sequence
  Oligonucleotide for detection of SNP TSC0055940
ataggttgaaagy

SEQ ID NO: 229294 - DNA, 13 bp, Artificial Sequence
  Oligonucleotide for detection of SNP TSC0055940
rctttcaacctat

SEQ ID NO: 229295 - DNA, 13 bp, Artificial Sequence
  Oligonucleotide for detection of SNP TSC0055940
ataggtcgaaagy

SEQ ID NO: 229296 - DNA, 13 bp, Artificial Sequence
  Oligonucleotide for detection of SNP TSC0055940
rctttcgacctat

SEQ ID NO: 229297 - DNA, 13 bp, Artificial Sequence
  Oligonucleotide for detection of SNP TSC0055941
agtatatagattg

SEQ ID NO: 229298 - DNA, 13 bp, Artificial Sequence
  Oligonucleotide for detection of SNP TSC0055941
caatctatatact

SEQ ID NO: 229299 - DNA, 13 bp, Artificial Sequence
  Oligonucleotide for detection of SNP TSC0055941
agtatagagattg

SEQ ID NO: 229300 - DNA, 13 bp, Artificial Sequence
  Oligonucleotide for detection of SNP TSC0055941
caatctctatact

SEQ ID NO: 229301 - DNA, 13 bp, Artificial Sequence
  Oligonucleotide for detection of SNP TSC0055942
atagattgtaata

SEQ ID NO: 229302 - DNA, 13 bp, Artificial Sequence
  Oligonucleotide for detection of SNP TSC0055942
tattacaatctat

SEQ ID NO: 229303 - DNA, 13 bp, Artificial Sequence
  Oligonucleotide for detection of SNP TSC0055942
atagatggtaata

SEQ ID NO: 229304 - DNA, 13 bp, Artificial Sequence
  Oligonucleotide for detection of SNP TSC0055942
tattaccatctat

SEQ ID NO: 229305 - DNA, 13 bp, Artificial Sequence
  Oligonucleotide for detection of SNP TSC0055942
tattataatttat

SEQ ID NO: 229306 - DNA, 13 bp, Artificial Sequence
  Oligonucleotide for detection of SNP TSC0055942
ataaattataata

SEQ ID NO: 229307 - DNA, 13 bp, Artificial Sequence
  Oligonucleotide for detection of SNP TSC0055943
aattataatgaaa

SEQ ID NO: 229308 - DNA, 13 bp, Artificial Sequence
  Oligonucleotide for detection of SNP TSC0055943
tttcattataatt

SEQ ID NO: 229309 - DNA, 13 bp, Artificial Sequence
  Oligonucleotide for detection of SNP TSC0055943
aattatgatgaaa

SEQ ID NO: 229310 - DNA, 13 bp, Artificial Sequence
  Oligonucleotide for detection of SNP TSC0055943
tttcatcataatt

SEQ ID NO: 229311 - DNA, 13 bp, Artificial Sequence
  Oligonucleotide for detection of SNP TSC0055944
ggatttgagatag

SEQ ID NO: 229312 - DNA, 13 bp, Artificial Sequence
  Oligonucleotide for detection of SNP TSC0055944
ctatctcaaatcc

SEQ ID NO: 229313 - DNA, 13 bp, Artificial Sequence
  Oligonucleotide for detection of SNP TSC0055944
ggatttaagatag

SEQ ID NO: 229314 - DNA, 13 bp, Artificial Sequence
  Oligonucleotide for detection of SNP TSC0055944
ctatcttaaatcc

SEQ ID NO: 229315 - DNA, 13 bp, Artificial Sequence
  Oligonucleotide for detection of SNP TSC0055944
ggattcgagatag

SEQ ID NO: 229316 - DNA, 13 bp, Artificial Sequence
  Oligonucleotide for detection of SNP TSC0055944
ctatctcgaatcc

SEQ ID NO: 229317 - DNA, 13 bp, Artificial Sequence
  Oligonucleotide for detection of SNP TSC0055945
agtttaaatgtgy

SEQ ID NO: 229318 - DNA, 13 bp, Artificial Sequence
  Oligonucleotide for detection of SNP TSC0055945
rcacatttaaact

SEQ ID NO: 229319 - DNA, 13 bp, Artificial Sequence
  Oligonucleotide for detection of SNP TSC0055945
agtttagatgtgy

SEQ ID NO: 229320 - DNA, 13 bp, Artificial Sequence
  Oligonucleotide for detection of SNP TSC0055945
rcacatctaaact

SEQ ID NO: 229321 - DNA, 13 bp, Artificial Sequence
  Oligonucleotide for detection of SNP TSC0055946
taaatggggtatt

SEQ ID NO: 229322 - DNA, 13 bp, Artificial Sequence
  Oligonucleotide for detection of SNP TSC0055946
aataccccattta

SEQ ID NO: 229323 - DNA, 13 bp, Artificial Sequence
  Oligonucleotide for detection of SNP TSC0055946
taaatgaggtatt

SEQ ID NO: 229324 - DNA, 13 bp, Artificial Sequence
  Oligonucleotide for detection of SNP TSC0055946
aatacctcattta

SEQ ID NO: 229325 - DNA, 13 bp, Artificial Sequence
  Oligonucleotide for detection of SNP TSC0055950
aatagtaatatay

SEQ ID NO: 229326 - DNA, 13 bp, Artificial Sequence
  Oligonucleotide for detection of SNP TSC0055950
rtatattactatt

SEQ ID NO: 229327 - DNA, 13 bp, Artificial Sequence
  Oligonucleotide for detection of SNP TSC0055950
aatagtgatatay

SEQ ID NO: 229328 - DNA, 13 bp, Artificial Sequence
  Oligonucleotide for detection of SNP TSC0055950
rtatatcactatt

SEQ ID NO: 229329 - DNA, 13 bp, Artificial Sequence
  Oligonucleotide for detection of SNP TSC0055951
ttaagtatttttt

SEQ ID NO: 229330 - DNA, 13 bp, Artificial Sequence
  Oligonucleotide for detection of SNP TSC0055951
aaaaaatacttaa

SEQ ID NO: 229331 - DNA, 13 bp, Artificial Sequence
  Oligonucleotide for detection of SNP TSC0055951
ttaagtgtttttt

SEQ ID NO: 229332 - DNA, 13 bp, Artificial Sequence
  Oligonucleotide for detection of SNP TSC0055951
aaaaaacacttaa

SEQ ID NO: 229333 - DNA, 13 bp, Artificial Sequence
  Oligonucleotide for detection of SNP TSC0055951
ttaagcgtttttt

SEQ ID NO: 229334 - DNA, 13 bp, Artificial Sequence
  Oligonucleotide for detection of SNP TSC0055951
aaaaaacgcttaa

SEQ ID NO: 229335 - DNA, 13 bp, Artificial Sequence
  Oligonucleotide for detection of SNP TSC0055951
aaaggatgtttga

SEQ ID NO: 229336 - DNA, 13 bp, Artificial Sequence
  Oligonucleotide for detection of SNP TSC0055951
tcaaacatccttt

SEQ ID NO: 229337 - DNA, 13 bp, Artificial Sequence
  Oligonucleotide for detection of SNP TSC0055951
aaaggacgtttga

SEQ ID NO: 229338 - DNA, 13 bp, Artificial Sequence
  Oligonucleotide for detection of SNP TSC0055951
tcaaacgtccttt

SEQ ID NO: 229339 - DNA, 13 bp, Artificial Sequence
  Oligonucleotide for detection of SNP TSC0055952
tgatagtgttgta

SEQ ID NO: 229340 - DNA, 13 bp, Artificial Sequence
  Oligonucleotide for detection of SNP TSC0055952
tacaacactatca

SEQ ID NO: 229341 - DNA, 13 bp, Artificial Sequence
  Oligonucleotide for detection of SNP TSC0055952
tgatagcgttgta

SEQ ID NO: 229342 - DNA, 13 bp, Artificial Sequence
  Oligonucleotide for detection of SNP TSC0055952
tacaacgctatca

SEQ ID NO: 229343 - DNA, 13 bp, Artificial Sequence
  Oligonucleotide for detection of SNP TSC0055952
tatagcgttatta

SEQ ID NO: 229344 - DNA, 13 bp, Artificial Sequence
  Oligonucleotide for detection of SNP TSC0055952
taataacgctata

SEQ ID NO: 229345 - DNA, 13 bp, Artificial Sequence
  Oligonucleotide for detection of SNP TSC0055953
tttttgaatattt

SEQ ID NO: 229346 - DNA, 13 bp, Artificial Sequence
  Oligonucleotide for detection of SNP TSC0055953
aaatattcaaaaa

SEQ ID NO: 229347 - DNA, 13 bp, Artificial Sequence
  Oligonucleotide for detection of SNP TSC0055953
aggtatttaggga

SEQ ID NO: 229348 - DNA, 13 bp, Artificial Sequence
  Oligonucleotide for detection of SNP TSC0055953
tccctaaatacct

SEQ ID NO: 229349 - DNA, 13 bp, Artificial Sequence
  Oligonucleotide for detection of SNP TSC0055953
aggtatgtaggga

SEQ ID NO: 229350 - DNA, 13 bp, Artificial Sequence
  Oligonucleotide for detection of SNP TSC0055953
tccctacatacct

SEQ ID NO: 229351 - DNA, 13 bp, Artificial Sequence
  Oligonucleotide for detection of SNP TSC0055955
tttattatatgga

SEQ ID NO: 229352 - DNA, 13 bp, Artificial Sequence
  Oligonucleotide for detection of SNP TSC0055955
tccatataataaa

SEQ ID NO: 229353 - DNA, 13 bp, Artificial Sequence
  Oligonucleotide for detection of SNP TSC0055955
tttattgtatgga

SEQ ID NO: 229354 - DNA, 13 bp, Artificial Sequence
  Oligonucleotide for detection of SNP TSC0055955
tccatacaataaa

SEQ ID NO: 229355 - DNA, 13 bp, Artificial Sequence
  Oligonucleotide for detection of SNP TSC0055955
tttatcgtatgga

SEQ ID NO: 229356 - DNA, 13 bp, Artificial Sequence
  Oligonucleotide for detection of SNP TSC0055955
tccatacgataaa

SEQ ID NO: 229357 - DNA, 13 bp, Artificial Sequence
  Oligonucleotide for detection of SNP TSC0055955
tttatatgatgga

SEQ ID NO: 229358 - DNA, 13 bp, Artificial Sequence
  Oligonucleotide for detection of SNP TSC0055955
tccatcatataaa

SEQ ID NO: 229359 - DNA, 13 bp, Artificial Sequence
  Oligonucleotide for detection of SNP TSC0055955
tttatacgatgga

SEQ ID NO: 229360 - DNA, 13 bp, Artificial Sequence
  Oligonucleotide for detection of SNP TSC0055955
tccatcgtataaa

SEQ ID NO: 229361 - DNA, 13 bp, Artificial Sequence
  Oligonucleotide for detection of SNP TSC0055956
gtaatgatagaaa

SEQ ID NO: 229362 - DNA, 13 bp, Artificial Sequence
  Oligonucleotide for detection of SNP TSC0055956
tttctatcattac

SEQ ID NO: 229363 - DNA, 13 bp, Artificial Sequence
  Oligonucleotide for detection of SNP TSC0055956
gtaatggtagaaa

SEQ ID NO: 229364 - DNA, 13 bp, Artificial Sequence
  Oligonucleotide for detection of SNP TSC0055956
tttctaccattac

SEQ ID NO: 229365 - DNA, 13 bp, Artificial Sequence
  Oligonucleotide for detection of SNP TSC0055957
aaatgtttgggtg

SEQ ID NO: 229366 - DNA, 13 bp, Artificial Sequence
  Oligonucleotide for detection of SNP TSC0055957
cacccaaacattt

SEQ ID NO: 229367 - DNA, 13 bp, Artificial Sequence
  Oligonucleotide for detection of SNP TSC0055957
aaatgtgtgggtg

SEQ ID NO: 229368 - DNA, 13 bp, Artificial Sequence
  Oligonucleotide for detection of SNP TSC0055957
cacccacacattt

SEQ ID NO: 229369 - DNA, 13 bp, Artificial Sequence
  Oligonucleotide for detection of SNP TSC0055957
aaatgcgtgggtg

SEQ ID NO: 229370 - DNA, 13 bp, Artificial Sequence
  Oligonucleotide for detection of SNP TSC0055957
cacccacgcattt

SEQ ID NO: 229371 - DNA, 13 bp, Artificial Sequence
  Oligonucleotide for detection of SNP TSC0055957
tatttaggtattt

SEQ ID NO: 229372 - DNA, 13 bp, Artificial Sequence
  Oligonucleotide for detection of SNP TSC0055957
aaatacctaaata

SEQ ID NO: 229373 - DNA, 13 bp, Artificial Sequence
  Oligonucleotide for detection of SNP TSC0055957
tatttatgtattt

SEQ ID NO: 229374 - DNA, 13 bp, Artificial Sequence
  Oligonucleotide for detection of SNP TSC0055957
aaatacataaata

SEQ ID NO: 229375 - DNA, 13 bp, Artificial Sequence
  Oligonucleotide for detection of SNP TSC0055957
tatttacgtattt

SEQ ID NO: 229376 - DNA, 13 bp, Artificial Sequence
  Oligonucleotide for detection of SNP TSC0055957
aaatacgtaaata

SEQ ID NO: 229377 - DNA, 13 bp, Artificial Sequence
  Oligonucleotide for detection of SNP TSC0055959
taagtgaaaaaaa

SEQ ID NO: 229378 - DNA, 13 bp, Artificial Sequence
  Oligonucleotide for detection of SNP TSC0055959
tttttttcactta

SEQ ID NO: 229379 - DNA, 13 bp, Artificial Sequence
  Oligonucleotide for detection of SNP TSC0055959
taagtggaaaaaa

SEQ ID NO: 229380 - DNA, 13 bp, Artificial Sequence
  Oligonucleotide for detection of SNP TSC0055959
ttttttccactta

SEQ ID NO: 229381 - DNA, 13 bp, Artificial Sequence
  Oligonucleotide for detection of SNP TSC0055960
aatttattatatt

SEQ ID NO: 229382 - DNA, 13 bp, Artificial Sequence
  Oligonucleotide for detection of SNP TSC0055960
aatataataaatt

SEQ ID NO: 229383 - DNA, 13 bp, Artificial Sequence
  Oligonucleotide for detection of SNP TSC0055960
aatttagtatatt

SEQ ID NO: 229384 - DNA, 13 bp, Artificial Sequence
  Oligonucleotide for detection of SNP TSC0055960
aatatactaaatt

SEQ ID NO: 229385 - DNA, 13 bp, Artificial Sequence
  Oligonucleotide for detection of SNP TSC0055960
agtatggtaaatt

SEQ ID NO: 229386 - DNA, 13 bp, Artificial Sequence
  Oligonucleotide for detection of SNP TSC0055960
aatttaccatact

SEQ ID NO: 229387 - DNA, 13 bp, Artificial Sequence
  Oligonucleotide for detection of SNP TSC0055960
agtatgttaaatt

SEQ ID NO: 229388 - DNA, 13 bp, Artificial Sequence
  Oligonucleotide for detection of SNP TSC0055960
aatttaacatact

SEQ ID NO: 229389 - DNA, 13 bp, Artificial Sequence
  Oligonucleotide for detection of SNP TSC0055961
tttgtaatggata

SEQ ID NO: 229390 - DNA, 13 bp, Artificial Sequence
  Oligonucleotide for detection of SNP TSC0055961
tatccattacaaa

SEQ ID NO: 229391 - DNA, 13 bp, Artificial Sequence
  Oligonucleotide for detection of SNP TSC0055961
tttgtagtggata

SEQ ID NO: 229392 - DNA, 13 bp, Artificial Sequence
  Oligonucleotide for detection of SNP TSC0055961
tatccactacaaa

SEQ ID NO: 229393 - DNA, 13 bp, Artificial Sequence
  Oligonucleotide for detection of SNP TSC0055962
gtgtaggaggtty

SEQ ID NO: 229394 - DNA, 13 bp, Artificial Sequence
  Oligonucleotide for detection of SNP TSC0055962
raacctcctacac

SEQ ID NO: 229395 - DNA, 13 bp, Artificial Sequence
  Oligonucleotide for detection of SNP TSC0055962
gtgtagaaggtty

SEQ ID NO: 229396 - DNA, 13 bp, Artificial Sequence
  Oligonucleotide for detection of SNP TSC0055962
raaccttctacac

SEQ ID NO: 229397 - DNA, 13 bp, Artificial Sequence
  Oligonucleotide for detection of SNP TSC0055967
ataattggtagtg

SEQ ID NO: 229398 - DNA, 13 bp, Artificial Sequence
  Oligonucleotide for detection of SNP TSC0055967
cactaccaattat

SEQ ID NO: 229399 - DNA, 13 bp, Artificial Sequence
  Oligonucleotide for detection of SNP TSC0055967
ataattagtagtg

SEQ ID NO: 229400 - DNA, 13 bp, Artificial Sequence
  Oligonucleotide for detection of SNP TSC0055967
cactactaattat

SEQ ID NO: 229401 - DNA, 13 bp, Artificial Sequence
  Oligonucleotide for detection of SNP TSC0008916
aattaataaatga

SEQ ID NO: 229402 - DNA, 13 bp, Artificial Sequence
  Oligonucleotide for detection of SNP TSC0008916
tcatttattaatt

SEQ ID NO: 229403 - DNA, 13 bp, Artificial Sequence
  Oligonucleotide for detection of SNP TSC0008916
aattaagaaatga

SEQ ID NO: 229404 - DNA, 13 bp, Artificial Sequence
  Oligonucleotide for detection of SNP TSC0008916
tcatttcttaatt

SEQ ID NO: 229405 - DNA, 13 bp, Artificial Sequence
  Oligonucleotide for detection of SNP TSC0008916
ttatttattgatt

SEQ ID NO: 229406 - DNA, 13 bp, Artificial Sequence
  Oligonucleotide for detection of SNP TSC0008916
aatcaataaataa

SEQ ID NO: 229407 - DNA, 13 bp, Artificial Sequence
  Oligonucleotide for detection of SNP TSC0008916
ttattttttgatt

SEQ ID NO: 229408 - DNA, 13 bp, Artificial Sequence
  Oligonucleotide for detection of SNP TSC0008916
aatcaaaaaataa

SEQ ID NO: 229409 - DNA, 13 bp, Artificial Sequence
  Oligonucleotide for detection of SNP TSC0008917
tttatgatgattg

SEQ ID NO: 229410 - DNA, 13 bp, Artificial Sequence
  Oligonucleotide for detection of SNP TSC0008917
caatcatcataaa

SEQ ID NO: 229411 - DNA, 13 bp, Artificial Sequence
  Oligonucleotide for detection of SNP TSC0008917
tttatggtgattg

SEQ ID NO: 229412 - DNA, 13 bp, Artificial Sequence
  Oligonucleotide for detection of SNP TSC0008917
caatcaccataaa

SEQ ID NO: 229413 - DNA, 13 bp, Artificial Sequence
  Oligonucleotide for detection of SNP TSC0055971
aggagtaaaattt

SEQ ID NO: 229414 - DNA, 13 bp, Artificial Sequence
  Oligonucleotide for detection of SNP TSC0055971
aaattttactcct

SEQ ID NO: 229415 - DNA, 13 bp, Artificial Sequence
  Oligonucleotide for detection of SNP TSC0055971
aggagtgaaattt

SEQ ID NO: 229416 - DNA, 13 bp, Artificial Sequence
  Oligonucleotide for detection of SNP TSC0055971
aaatttcactcct

SEQ ID NO: 229417 - DNA, 13 bp, Artificial Sequence
  Oligonucleotide for detection of SNP TSC0055972
gtggagatgaaag

SEQ ID NO: 229418 - DNA, 13 bp, Artificial Sequence
  Oligonucleotide for detection of SNP TSC0055972
ctttcatctccac

SEQ ID NO: 229419 - DNA, 13 bp, Artificial Sequence
  Oligonucleotide for detection of SNP TSC0055972
gtggaggtgaaag

SEQ ID NO: 229420 - DNA, 13 bp, Artificial Sequence
  Oligonucleotide for detection of SNP TSC0055972
ctttcacctccac

SEQ ID NO: 229421 - DNA, 13 bp, Artificial Sequence
  Oligonucleotide for detection of SNP TSC0055973
tcgtggtgggtgg

SEQ ID NO: 229422 - DNA, 13 bp, Artificial Sequence
  Oligonucleotide for detection of SNP TSC0055973
ccacccaccacga

SEQ ID NO: 229423 - DNA, 13 bp, Artificial Sequence
  Oligonucleotide for detection of SNP TSC0055973
ttgcggtgggtgg

SEQ ID NO: 229424 - DNA, 13 bp, Artificial Sequence
  Oligonucleotide for detection of SNP TSC0055973
ccacccaccgcaa

SEQ ID NO: 229425 - DNA, 13 bp, Artificial Sequence
  Oligonucleotide for detection of SNP TSC0055973
ttgtggtgggcgg

SEQ ID NO: 229426 - DNA, 13 bp, Artificial Sequence
  Oligonucleotide for detection of SNP TSC0055973
ccgcccaccacaa

SEQ ID NO: 229427 - DNA, 13 bp, Artificial Sequence
  Oligonucleotide for detection of SNP TSC0055973
tcgcggtgggtgg

SEQ ID NO: 229428 - DNA, 13 bp, Artificial Sequence
  Oligonucleotide for detection of SNP TSC0055973
ccacccaccgcga

SEQ ID NO: 229429 - DNA, 13 bp, Artificial Sequence
  Oligonucleotide for detection of SNP TSC0055973
tcgtggtgggcgg

SEQ ID NO: 229430 - DNA, 13 bp, Artificial Sequence
  Oligonucleotide for detection of SNP TSC0055973
ccgcccaccacga

SEQ ID NO: 229431 - DNA, 13 bp, Artificial Sequence
  Oligonucleotide for detection of SNP TSC0055973
tcgtggcgggtgg

SEQ ID NO: 229432 - DNA, 13 bp, Artificial Sequence
  Oligonucleotide for detection of SNP TSC0055973
ccacccgccacga

SEQ ID NO: 229433 - DNA, 13 bp, Artificial Sequence
  Oligonucleotide for detection of SNP TSC0055973
ttgcggtgggcgg

SEQ ID NO: 229434 - DNA, 13 bp, Artificial Sequence
  Oligonucleotide for detection of SNP TSC0055973
ccgcccaccgcaa

SEQ ID NO: 229435 - DNA, 13 bp, Artificial Sequence
  Oligonucleotide for detection of SNP TSC0055973
tcgcggtgggcgg

SEQ ID NO: 229436 - DNA, 13 bp, Artificial Sequence
  Oligonucleotide for detection of SNP TSC0055973
ccgcccaccgcga

SEQ ID NO: 229437 - DNA, 13 bp, Artificial Sequence
  Oligonucleotide for detection of SNP TSC0055973
ttgcggcgggtgg

SEQ ID NO: 229438 - DNA, 13 bp, Artificial Sequence
  Oligonucleotide for detection of SNP TSC0055973
ccacccgccgcaa

SEQ ID NO: 229439 - DNA, 13 bp, Artificial Sequence
  Oligonucleotide for detection of SNP TSC0055973
ttgtggcgggcgg

SEQ ID NO: 229440 - DNA, 13 bp, Artificial Sequence
  Oligonucleotide for detection of SNP TSC0055973
ccgcccgccacaa

SEQ ID NO: 229441 - DNA, 13 bp, Artificial Sequence
  Oligonucleotide for detection of SNP TSC0055973
tcgcggcgggtgg

SEQ ID NO: 229442 - DNA, 13 bp, Artificial Sequence
  Oligonucleotide for detection of SNP TSC0055973
ccacccgccgcga

SEQ ID NO: 229443 - DNA, 13 bp, Artificial Sequence
  Oligonucleotide for detection of SNP TSC0055973
tcgtggcgggcgg

SEQ ID NO: 229444 - DNA, 13 bp, Artificial Sequence
  Oligonucleotide for detection of SNP TSC0055973
ccgcccgccacga

SEQ ID NO: 229445 - DNA, 13 bp, Artificial Sequence
  Oligonucleotide for detection of SNP TSC0055973
ttgcggcgggcgg

SEQ ID NO: 229446 - DNA, 13 bp, Artificial Sequence
  Oligonucleotide for detection of SNP TSC0055973
ccgcccgccgcaa

SEQ ID NO: 229447 - DNA, 13 bp, Artificial Sequence
  Oligonucleotide for detection of SNP TSC0055973
tcgcggcgggcgg

SEQ ID NO: 229448 - DNA, 13 bp, Artificial Sequence
  Oligonucleotide for detection of SNP TSC0055973
ccgcccgccgcga

SEQ ID NO: 229449 - DNA, 13 bp, Artificial Sequence
  Oligonucleotide for detection of SNP TSC0055973
ttgtttgttgtgg

SEQ ID NO: 229450 - DNA, 13 bp, Artificial Sequence
  Oligonucleotide for detection of SNP TSC0055973
ccacaacaaacaa

SEQ ID NO: 229451 - DNA, 13 bp, Artificial Sequence
  Oligonucleotide for detection of SNP TSC0055973
ttgtttattgtgg

SEQ ID NO: 229452 - DNA, 13 bp, Artificial Sequence
  Oligonucleotide for detection of SNP TSC0055973
ccacaataaacaa

SEQ ID NO: 229453 - DNA, 13 bp, Artificial Sequence
  Oligonucleotide for detection of SNP TSC0055973
tcgtttgttgtgg

SEQ ID NO: 229454 - DNA, 13 bp, Artificial Sequence
  Oligonucleotide for detection of SNP TSC0055973
ccacaacaaacga

SEQ ID NO: 229455 - DNA, 13 bp, Artificial Sequence
  Oligonucleotide for detection of SNP TSC0055973
tcgtttattgtgg

SEQ ID NO: 229456 - DNA, 13 bp, Artificial Sequence
  Oligonucleotide for detection of SNP TSC0055973
ccacaataaacga

SEQ ID NO: 229457 - DNA, 13 bp, Artificial Sequence
  Oligonucleotide for detection of SNP TSC0055973
ttgttcgttgtgg

SEQ ID NO: 229458 - DNA, 13 bp, Artificial Sequence
  Oligonucleotide for detection of SNP TSC0055973
ccacaacgaacaa

SEQ ID NO: 229459 - DNA, 13 bp, Artificial Sequence
  Oligonucleotide for detection of SNP TSC0055973
ttgtttatcgtgg

SEQ ID NO: 229460 - DNA, 13 bp, Artificial Sequence
  Oligonucleotide for detection of SNP TSC0055973
ccacgataaacaa

SEQ ID NO: 229461 - DNA, 13 bp, Artificial Sequence
  Oligonucleotide for detection of SNP TSC0055973
ttgtttgtcgtgg

SEQ ID NO: 229462 - DNA, 13 bp, Artificial Sequence
  Oligonucleotide for detection of SNP TSC0055973
ccacgacaaacaa

SEQ ID NO: 229463 - DNA, 13 bp, Artificial Sequence
  Oligonucleotide for detection of SNP TSC0055973
ttgtttattgcgg

SEQ ID NO: 229464 - DNA, 13 bp, Artificial Sequence
  Oligonucleotide for detection of SNP TSC0055973
ccgcaataaacaa

SEQ ID NO: 229465 - DNA, 13 bp, Artificial Sequence
  Oligonucleotide for detection of SNP TSC0055973
ttgtttgttgcgg

SEQ ID NO: 229466 - DNA, 13 bp, Artificial Sequence
  Oligonucleotide for detection of SNP TSC0055973
ccgcaacaaacaa

SEQ ID NO: 229467 - DNA, 13 bp, Artificial Sequence
  Oligonucleotide for detection of SNP TSC0055973
tcgtttatcgtgg

SEQ ID NO: 229468 - DNA, 13 bp, Artificial Sequence
  Oligonucleotide for detection of SNP TSC0055973
ccacgataaacga

SEQ ID NO: 229469 - DNA, 13 bp, Artificial Sequence
  Oligonucleotide for detection of SNP TSC0055973
tcgttcgttgtgg

SEQ ID NO: 229470 - DNA, 13 bp, Artificial Sequence
  Oligonucleotide for detection of SNP TSC0055973
ccacaacgaacga

SEQ ID NO: 229471 - DNA, 13 bp, Artificial Sequence
  Oligonucleotide for detection of SNP TSC0055973
tcgtttattgcgg

SEQ ID NO: 229472 - DNA, 13 bp, Artificial Sequence
  Oligonucleotide for detection of SNP TSC0055973
ccgcaataaacga

SEQ ID NO: 229473 - DNA, 13 bp, Artificial Sequence
  Oligonucleotide for detection of SNP TSC0055973
tcgtttgtcgtgg

SEQ ID NO: 229474 - DNA, 13 bp, Artificial Sequence
  Oligonucleotide for detection of SNP TSC0055973
ccacgacaaacga

SEQ ID NO: 229475 - DNA, 13 bp, Artificial Sequence
  Oligonucleotide for detection of SNP TSC0055973
ttgtttatcgcgg

SEQ ID NO: 229476 - DNA, 13 bp, Artificial Sequence
  Oligonucleotide for detection of SNP TSC0055973
ccgcgataaacaa

SEQ ID NO: 229477 - DNA, 13 bp, Artificial Sequence
  Oligonucleotide for detection of SNP TSC0055973
tcgtttgttgcgg

SEQ ID NO: 229478 - DNA, 13 bp, Artificial Sequence
  Oligonucleotide for detection of SNP TSC0055973
ccgcaacaaacga

SEQ ID NO: 229479 - DNA, 13 bp, Artificial Sequence
  Oligonucleotide for detection of SNP TSC0055973
tcgtttatcgcgg

SEQ ID NO: 229480 - DNA, 13 bp, Artificial Sequence
  Oligonucleotide for detection of SNP TSC0055973
ccgcgataaacga

SEQ ID NO: 229481 - DNA, 13 bp, Artificial Sequence
  Oligonucleotide for detection of SNP TSC0055973
ttgttcgtcgtgg

SEQ ID NO: 229482 - DNA, 13 bp, Artificial Sequence
  Oligonucleotide for detection of SNP TSC0055973
ccacgacgaacaa

SEQ ID NO: 229483 - DNA, 13 bp, Artificial Sequence
  Oligonucleotide for detection of SNP TSC0055973
ttgttcgttgcgg

SEQ ID NO: 229484 - DNA, 13 bp, Artificial Sequence
  Oligonucleotide for detection of SNP TSC0055973
ccgcaacgaacaa

SEQ ID NO: 229485 - DNA, 13 bp, Artificial Sequence
  Oligonucleotide for detection of SNP TSC0055973
ttgtttgtcgcgg

SEQ ID NO: 229486 - DNA, 13 bp, Artificial Sequence
  Oligonucleotide for detection of SNP TSC0055973
ccgcgacaaacaa

SEQ ID NO: 229487 - DNA, 13 bp, Artificial Sequence
  Oligonucleotide for detection of SNP TSC0055973
tcgttcgtcgtgg

SEQ ID NO: 229488 - DNA, 13 bp, Artificial Sequence
  Oligonucleotide for detection of SNP TSC0055973
ccacgacgaacga

SEQ ID NO: 229489 - DNA, 13 bp, Artificial Sequence
  Oligonucleotide for detection of SNP TSC0055973
tcgttcgttgcgg

SEQ ID NO: 229490 - DNA, 13 bp, Artificial Sequence
  Oligonucleotide for detection of SNP TSC0055973
ccgcaacgaacga

SEQ ID NO: 229491 - DNA, 13 bp, Artificial Sequence
  Oligonucleotide for detection of SNP TSC0055973
tcgtttgtcgcgg

SEQ ID NO: 229492 - DNA, 13 bp, Artificial Sequence
  Oligonucleotide for detection of SNP TSC0055973
ccgcgacaaacga

SEQ ID NO: 229493 - DNA, 13 bp, Artificial Sequence
  Oligonucleotide for detection of SNP TSC0055973
ttgttcgtcgcgg

SEQ ID NO: 229494 - DNA, 13 bp, Artificial Sequence
  Oligonucleotide for detection of SNP TSC0055973
ccgcgacgaacaa

SEQ ID NO: 229495 - DNA, 13 bp, Artificial Sequence
  Oligonucleotide for detection of SNP TSC0055973
tcgttcgtcgcgg

SEQ ID NO: 229496 - DNA, 13 bp, Artificial Sequence
  Oligonucleotide for detection of SNP TSC0055973
ccgcgacgaacga

SEQ ID NO: 229497 - DNA, 13 bp, Artificial Sequence
  Oligonucleotide for detection of SNP TSC0010567
taaattagtttty

SEQ ID NO: 229498 - DNA, 13 bp, Artificial Sequence
  Oligonucleotide for detection of SNP TSC0010567
raaaactaattta

SEQ ID NO: 229499 - DNA, 13 bp, Artificial Sequence
  Oligonucleotide for detection of SNP TSC0010567
taaatttgtttty

SEQ ID NO: 229500 - DNA, 13 bp, Artificial Sequence
  Oligonucleotide for detection of SNP TSC0010567
raaaacaaattta

SEQ ID NO: 229501 - DNA, 13 bp, Artificial Sequence
  Oligonucleotide for detection of SNP TSC0010567
gaaagttggtttg

SEQ ID NO: 229502 - DNA, 13 bp, Artificial Sequence
  Oligonucleotide for detection of SNP TSC0010567
caaaccaactttc

SEQ ID NO: 229503 - DNA, 13 bp, Artificial Sequence
  Oligonucleotide for detection of SNP TSC0010567
gaaagtaggtttg

SEQ ID NO: 229504 - DNA, 13 bp, Artificial Sequence
  Oligonucleotide for detection of SNP TSC0010567
caaacctactttc

SEQ ID NO: 229505 - DNA, 13 bp, Artificial Sequence
  Oligonucleotide for detection of SNP TSC0055975
aaggttatttaat

SEQ ID NO: 229506 - DNA, 13 bp, Artificial Sequence
  Oligonucleotide for detection of SNP TSC0055975
attaaataacctt

SEQ ID NO: 229507 - DNA, 13 bp, Artificial Sequence
  Oligonucleotide for detection of SNP TSC0055975
aaggttgtttaat

SEQ ID NO: 229508 - DNA, 13 bp, Artificial Sequence
  Oligonucleotide for detection of SNP TSC0055975
attaaacaacctt

SEQ ID NO: 229509 - DNA, 13 bp, Artificial Sequence
  Oligonucleotide for detection of SNP TSC0055975
aaggtcgtttaat

SEQ ID NO: 229510 - DNA, 13 bp, Artificial Sequence
  Oligonucleotide for detection of SNP TSC0055975
attaaacgacctt

SEQ ID NO: 229511 - DNA, 13 bp, Artificial Sequence
  Oligonucleotide for detection of SNP TSC0055975
attaaatggtttt

SEQ ID NO: 229512 - DNA, 13 bp, Artificial Sequence
  Oligonucleotide for detection of SNP TSC0055975
aaaaccatttaat

SEQ ID NO: 229513 - DNA, 13 bp, Artificial Sequence
  Oligonucleotide for detection of SNP TSC0055975
attaaacggtttt

SEQ ID NO: 229514 - DNA, 13 bp, Artificial Sequence
  Oligonucleotide for detection of SNP TSC0055975
aaaaccgtttaat

SEQ ID NO: 229515 - DNA, 13 bp, Artificial Sequence
  Oligonucleotide for detection of SNP TSC0055977
aatgtggaaaaag

SEQ ID NO: 229516 - DNA, 13 bp, Artificial Sequence
  Oligonucleotide for detection of SNP TSC0055977
ctttttccacatt

SEQ ID NO: 229517 - DNA, 13 bp, Artificial Sequence
  Oligonucleotide for detection of SNP TSC0055977
aatgtgaaaaaag

SEQ ID NO: 229518 - DNA, 13 bp, Artificial Sequence
  Oligonucleotide for detection of SNP TSC0055977
cttttttcacatt

SEQ ID NO: 229519 - DNA, 13 bp, Artificial Sequence
  Oligonucleotide for detection of SNP TSC0055978
tatattaagtaga

SEQ ID NO: 229520 - DNA, 13 bp, Artificial Sequence
  Oligonucleotide for detection of SNP TSC0055978
tctacttaatata

SEQ ID NO: 229521 - DNA, 13 bp, Artificial Sequence
  Oligonucleotide for detection of SNP TSC0055978
tatattgagtaga

SEQ ID NO: 229522 - DNA, 13 bp, Artificial Sequence
  Oligonucleotide for detection of SNP TSC0055978
tctactcaatata

SEQ ID NO: 229523 - DNA, 13 bp, Artificial Sequence
  Oligonucleotide for detection of SNP TSC0055978
tatatcgagtaga

SEQ ID NO: 229524 - DNA, 13 bp, Artificial Sequence
  Oligonucleotide for detection of SNP TSC0055978
tctactcgatata

SEQ ID NO: 229525 - DNA, 13 bp, Artificial Sequence
  Oligonucleotide for detection of SNP TSC0055978
tttgtttgatata

SEQ ID NO: 229526 - DNA, 13 bp, Artificial Sequence
  Oligonucleotide for detection of SNP TSC0055978
tatatcaaacaaa

SEQ ID NO: 229527 - DNA, 13 bp, Artificial Sequence
  Oligonucleotide for detection of SNP TSC0055978
tttgttcgatata

SEQ ID NO: 229528 - DNA, 13 bp, Artificial Sequence
  Oligonucleotide for detection of SNP TSC0055978
tatatcgaacaaa

SEQ ID NO: 229529 - DNA, 13 bp, Artificial Sequence
  Oligonucleotide for detection of SNP TSC0008225
taagtggtagggy

SEQ ID NO: 229530 - DNA, 13 bp, Artificial Sequence
  Oligonucleotide for detection of SNP TSC0008225
rccctaccactta

SEQ ID NO: 229531 - DNA, 13 bp, Artificial Sequence
  Oligonucleotide for detection of SNP TSC0008225
taagtgttagggy

SEQ ID NO: 229532 - DNA, 13 bp, Artificial Sequence
  Oligonucleotide for detection of SNP TSC0008225
rccctaacactta

SEQ ID NO: 229533 - DNA, 13 bp, Artificial Sequence
  Oligonucleotide for detection of SNP TSC0055979
aaaaatgttgtga

SEQ ID NO: 229534 - DNA, 13 bp, Artificial Sequence
  Oligonucleotide for detection of SNP TSC0055979
tcacaacattttt

SEQ ID NO: 229535 - DNA, 13 bp, Artificial Sequence
  Oligonucleotide for detection of SNP TSC0055979
aaaaatattgtga

SEQ ID NO: 229536 - DNA, 13 bp, Artificial Sequence
  Oligonucleotide for detection of SNP TSC0055979
tcacaatattttt

SEQ ID NO: 229537 - DNA, 13 bp, Artificial Sequence
  Oligonucleotide for detection of SNP TSC0055980
ggtggtttgaaat

SEQ ID NO: 229538 - DNA, 13 bp, Artificial Sequence
  Oligonucleotide for detection of SNP TSC0055980
atttcaaaccacc

SEQ ID NO: 229539 - DNA, 13 bp, Artificial Sequence
  Oligonucleotide for detection of SNP TSC0055980
ggtggtgtgaaat

SEQ ID NO: 229540 - DNA, 13 bp, Artificial Sequence
  Oligonucleotide for detection of SNP TSC0055980
atttcacaccacc

SEQ ID NO: 229541 - DNA, 13 bp, Artificial Sequence
  Oligonucleotide for detection of SNP TSC0055980
ggtggcgtgaaat

SEQ ID NO: 229542 - DNA, 13 bp, Artificial Sequence
  Oligonucleotide for detection of SNP TSC0055980
atttcacgccacc

SEQ ID NO: 229543 - DNA, 13 bp, Artificial Sequence
  Oligonucleotide for detection of SNP TSC0055980
attttaggttaty

SEQ ID NO: 229544 - DNA, 13 bp, Artificial Sequence
  Oligonucleotide for detection of SNP TSC0055980
rataacctaaaat

SEQ ID NO: 229545 - DNA, 13 bp, Artificial Sequence
  Oligonucleotide for detection of SNP TSC0055980
attttatgttaty

SEQ ID NO: 229546 - DNA, 13 bp, Artificial Sequence
  Oligonucleotide for detection of SNP TSC0055980
rataacataaaat

SEQ ID NO: 229547 - DNA, 13 bp, Artificial Sequence
  Oligonucleotide for detection of SNP TSC0055980
attttacgttaty

SEQ ID NO: 229548 - DNA, 13 bp, Artificial Sequence
  Oligonucleotide for detection of SNP TSC0055980
rataacgtaaaat

SEQ ID NO: 229549 - DNA, 13 bp, Artificial Sequence
  Oligonucleotide for detection of SNP TSC0055981
agagaaatggtgg

SEQ ID NO: 229550 - DNA, 13 bp, Artificial Sequence
  Oligonucleotide for detection of SNP TSC0055981
ccaccatttctct

SEQ ID NO: 229551 - DNA, 13 bp, Artificial Sequence
  Oligonucleotide for detection of SNP TSC0055981
agagaagtggtgg

SEQ ID NO: 229552 - DNA, 13 bp, Artificial Sequence
  Oligonucleotide for detection of SNP TSC0055981
ccaccacttctct

SEQ ID NO: 229553 - DNA, 13 bp, Artificial Sequence
  Oligonucleotide for detection of SNP TSC0055982
atttagagttttt

SEQ ID NO: 229554 - DNA, 13 bp, Artificial Sequence
  Oligonucleotide for detection of SNP TSC0055982
aaaaactctaaat

SEQ ID NO: 229555 - DNA, 13 bp, Artificial Sequence
  Oligonucleotide for detection of SNP TSC0055982
atttagggttttt

SEQ ID NO: 229556 - DNA, 13 bp, Artificial Sequence
  Oligonucleotide for detection of SNP TSC0055982
aaaaaccctaaat

SEQ ID NO: 229557 - DNA, 13 bp, Artificial Sequence
  Oligonucleotide for detection of SNP TSC0055983
atgatgattttat

SEQ ID NO: 229558 - DNA, 13 bp, Artificial Sequence
  Oligonucleotide for detection of SNP TSC0055983
ataaaatcatcat

SEQ ID NO: 229559 - DNA, 13 bp, Artificial Sequence
  Oligonucleotide for detection of SNP TSC0055983
atgatggttttat

SEQ ID NO: 229560 - DNA, 13 bp, Artificial Sequence
  Oligonucleotide for detection of SNP TSC0055983
ataaaaccatcat

SEQ ID NO: 229561 - DNA, 13 bp, Artificial Sequence
  Oligonucleotide for detection of SNP TSC0055984
ttttgatattaaa

SEQ ID NO: 229562 - DNA, 13 bp, Artificial Sequence
  Oligonucleotide for detection of SNP TSC0055984
tttaatatcaaaa

SEQ ID NO: 229563 - DNA, 13 bp, Artificial Sequence
  Oligonucleotide for detection of SNP TSC0055984
ttttgagattaaa

SEQ ID NO: 229564 - DNA, 13 bp, Artificial Sequence
  Oligonucleotide for detection of SNP TSC0055984
tttaatctcaaaa

SEQ ID NO: 229565 - DNA, 13 bp, Artificial Sequence
  Oligonucleotide for detection of SNP TSC0055984
tttggtattagga

SEQ ID NO: 229566 - DNA, 13 bp, Artificial Sequence
  Oligonucleotide for detection of SNP TSC0055984
tcctaataccaaa

SEQ ID NO: 229567 - DNA, 13 bp, Artificial Sequence
  Oligonucleotide for detection of SNP TSC0055984
tttggttttagga

SEQ ID NO: 229568 - DNA, 13 bp, Artificial Sequence
  Oligonucleotide for detection of SNP TSC0055984
tcctaaaaccaaa

SEQ ID NO: 229569 - DNA, 13 bp, Artificial Sequence
  Oligonucleotide for detection of SNP TSC0007574
ttttatgtttaga

SEQ ID NO: 229570 - DNA, 13 bp, Artificial Sequence
  Oligonucleotide for detection of SNP TSC0007574
tctaaacataaaa

SEQ ID NO: 229571 - DNA, 13 bp, Artificial Sequence
  Oligonucleotide for detection of SNP TSC0007574
ttttacgtttaga

SEQ ID NO: 229572 - DNA, 13 bp, Artificial Sequence
  Oligonucleotide for detection of SNP TSC0007574
tctaaacgtaaaa

SEQ ID NO: 229573 - DNA, 13 bp, Artificial Sequence
  Oligonucleotide for detection of SNP TSC0007574
tttaaatgtggga

SEQ ID NO: 229574 - DNA, 13 bp, Artificial Sequence
  Oligonucleotide for detection of SNP TSC0007574
tcccacatttaaa

SEQ ID NO: 229575 - DNA, 13 bp, Artificial Sequence
  Oligonucleotide for detection of SNP TSC0007574
tttaaacgtggga

SEQ ID NO: 229576 - DNA, 13 bp, Artificial Sequence
  Oligonucleotide for detection of SNP TSC0007574
tcccacgtttaaa

SEQ ID NO: 229577 - DNA, 13 bp, Artificial Sequence
  Oligonucleotide for detection of SNP TSC0010781
gaaataattttta

SEQ ID NO: 229578 - DNA, 13 bp, Artificial Sequence
  Oligonucleotide for detection of SNP TSC0010781
taaaaattatttc

SEQ ID NO: 229579 - DNA, 13 bp, Artificial Sequence
  Oligonucleotide for detection of SNP TSC0010781
tgaagaatgttty

SEQ ID NO: 229580 - DNA, 13 bp, Artificial Sequence
  Oligonucleotide for detection of SNP TSC0010781
raaacattcttca

SEQ ID NO: 229581 - DNA, 13 bp, Artificial Sequence
  Oligonucleotide for detection of SNP TSC0010312
tttataattgtag

SEQ ID NO: 229582 - DNA, 13 bp, Artificial Sequence
  Oligonucleotide for detection of SNP TSC0010312
ctacaattataaa

SEQ ID NO: 229583 - DNA, 13 bp, Artificial Sequence
  Oligonucleotide for detection of SNP TSC0010312
tttatagttgtag

SEQ ID NO: 229584 - DNA, 13 bp, Artificial Sequence
  Oligonucleotide for detection of SNP TSC0010312
ctacaactataaa

SEQ ID NO: 229585 - DNA, 13 bp, Artificial Sequence
  Oligonucleotide for detection of SNP TSC0055987
taattttgtttta

SEQ ID NO: 229586 - DNA, 13 bp, Artificial Sequence
  Oligonucleotide for detection of SNP TSC0055987
taaaacaaaatta

SEQ ID NO: 229587 - DNA, 13 bp, Artificial Sequence
  Oligonucleotide for detection of SNP TSC0055987
taatttcgtttta

SEQ ID NO: 229588 - DNA, 13 bp, Artificial Sequence
  Oligonucleotide for detection of SNP TSC0055987
taaaacgaaatta

SEQ ID NO: 229589 - DNA, 13 bp, Artificial Sequence
  Oligonucleotide for detection of SNP TSC0055987
tggaatgaagttg

SEQ ID NO: 229590 - DNA, 13 bp, Artificial Sequence
  Oligonucleotide for detection of SNP TSC0055987
caacttcattcca

SEQ ID NO: 229591 - DNA, 13 bp, Artificial Sequence
  Oligonucleotide for detection of SNP TSC0055987
tggaataaagttg

SEQ ID NO: 229592 - DNA, 13 bp, Artificial Sequence
  Oligonucleotide for detection of SNP TSC0055987
caactttattcca

SEQ ID NO: 229593 - DNA, 13 bp, Artificial Sequence
  Oligonucleotide for detection of SNP TSC0055987
tggaacgaagttg

SEQ ID NO: 229594 - DNA, 13 bp, Artificial Sequence
  Oligonucleotide for detection of SNP TSC0055987
caacttcgttcca

SEQ ID NO: 229595 - DNA, 13 bp, Artificial Sequence
  Oligonucleotide for detection of SNP TSC0055988
tttttgagtttgy

SEQ ID NO: 229596 - DNA, 13 bp, Artificial Sequence
  Oligonucleotide for detection of SNP TSC0055988
rcaaactcaaaaa

SEQ ID NO: 229597 - DNA, 13 bp, Artificial Sequence
  Oligonucleotide for detection of SNP TSC0055993
tatagggttgaag

SEQ ID NO: 229598 - DNA, 13 bp, Artificial Sequence
  Oligonucleotide for detection of SNP TSC0055993
cttcaaccctata

SEQ ID NO: 229599 - DNA, 13 bp, Artificial Sequence
  Oligonucleotide for detection of SNP TSC0055993
tataggattgaag

SEQ ID NO: 229600 - DNA, 13 bp, Artificial Sequence
  Oligonucleotide for detection of SNP TSC0055993
cttcaatcctata

SEQ ID NO: 229601 - DNA, 13 bp, Artificial Sequence
  Oligonucleotide for detection of SNP TSC0056000
attttatagatty

SEQ ID NO: 229602 - DNA, 13 bp, Artificial Sequence
  Oligonucleotide for detection of SNP TSC0056000
raatctataaaat

SEQ ID NO: 229603 - DNA, 13 bp, Artificial Sequence
  Oligonucleotide for detection of SNP TSC0056000
attttagagatty

SEQ ID NO: 229604 - DNA, 13 bp, Artificial Sequence
  Oligonucleotide for detection of SNP TSC0056000
raatctctaaaat

SEQ ID NO: 229605 - DNA, 13 bp, Artificial Sequence
  Oligonucleotide for detection of SNP TSC0056000
gggtttatggagt

SEQ ID NO: 229606 - DNA, 13 bp, Artificial Sequence
  Oligonucleotide for detection of SNP TSC0056000
actccataaaccc

SEQ ID NO: 229607 - DNA, 13 bp, Artificial Sequence
  Oligonucleotide for detection of SNP TSC0056000
gggtttttggagt

SEQ ID NO: 229608 - DNA, 13 bp, Artificial Sequence
  Oligonucleotide for detection of SNP TSC0056000
actccaaaaaccc

SEQ ID NO: 229609 - DNA, 13 bp, Artificial Sequence
  Oligonucleotide for detection of SNP TSC0056009
atgtgtgggaaga

SEQ ID NO: 229610 - DNA, 13 bp, Artificial Sequence
  Oligonucleotide for detection of SNP TSC0056009
tcttcccacacat

SEQ ID NO: 229611 - DNA, 13 bp, Artificial Sequence
  Oligonucleotide for detection of SNP TSC0056009
atgtgtaggaaga

SEQ ID NO: 229612 - DNA, 13 bp, Artificial Sequence
  Oligonucleotide for detection of SNP TSC0056009
tcttcctacacat

SEQ ID NO: 229613 - DNA, 13 bp, Artificial Sequence
  Oligonucleotide for detection of SNP TSC0056009
atgtgcgggaaga

SEQ ID NO: 229614 - DNA, 13 bp, Artificial Sequence
  Oligonucleotide for detection of SNP TSC0056009
tcttcccgcacat

SEQ ID NO: 229615 - DNA, 13 bp, Artificial Sequence
  Oligonucleotide for detection of SNP TSC0056010
atgttgtgtgaga

SEQ ID NO: 229616 - DNA, 13 bp, Artificial Sequence
  Oligonucleotide for detection of SNP TSC0056010
tctcacacaacat

SEQ ID NO: 229617 - DNA, 13 bp, Artificial Sequence
  Oligonucleotide for detection of SNP TSC0056010
atgttgcgtgaga

SEQ ID NO: 229618 - DNA, 13 bp, Artificial Sequence
  Oligonucleotide for detection of SNP TSC0056010
tctcacgcaacat

SEQ ID NO: 229619 - DNA, 13 bp, Artificial Sequence
  Oligonucleotide for detection of SNP TSC0056010
ttttatatagtat

SEQ ID NO: 229620 - DNA, 13 bp, Artificial Sequence
  Oligonucleotide for detection of SNP TSC0056010
atactatataaaa

SEQ ID NO: 229621 - DNA, 13 bp, Artificial Sequence
  Oligonucleotide for detection of SNP TSC0056010
ttttacgtagtat

SEQ ID NO: 229622 - DNA, 13 bp, Artificial Sequence
  Oligonucleotide for detection of SNP TSC0056010
atactacgtaaaa

SEQ ID NO: 229623 - DNA, 13 bp, Artificial Sequence
  Oligonucleotide for detection of SNP TSC0056011
tatatagaatttt

SEQ ID NO: 229624 - DNA, 13 bp, Artificial Sequence
  Oligonucleotide for detection of SNP TSC0056011
aaaattctatata

SEQ ID NO: 229625 - DNA, 13 bp, Artificial Sequence
  Oligonucleotide for detection of SNP TSC0056011
agggttgtatgta

SEQ ID NO: 229626 - DNA, 13 bp, Artificial Sequence
  Oligonucleotide for detection of SNP TSC0056011
tacatacaaccct

SEQ ID NO: 229627 - DNA, 13 bp, Artificial Sequence
  Oligonucleotide for detection of SNP TSC0056011
agggttttatgta

SEQ ID NO: 229628 - DNA, 13 bp, Artificial Sequence
  Oligonucleotide for detection of SNP TSC0056011
tacataaaaccct

SEQ ID NO: 229629 - DNA, 13 bp, Artificial Sequence
  Oligonucleotide for detection of SNP TSC0056012
ttataagttgatt

SEQ ID NO: 229630 - DNA, 13 bp, Artificial Sequence
  Oligonucleotide for detection of SNP TSC0056012
aatcaacttataa

SEQ ID NO: 229631 - DNA, 13 bp, Artificial Sequence
  Oligonucleotide for detection of SNP TSC0056012
ttataaattgatt

SEQ ID NO: 229632 - DNA, 13 bp, Artificial Sequence
  Oligonucleotide for detection of SNP TSC0056012
aatcaatttataa

SEQ ID NO: 229633 - DNA, 13 bp, Artificial Sequence
  Oligonucleotide for detection of SNP TSC0056013
agtagggttgggt

SEQ ID NO: 229634 - DNA, 13 bp, Artificial Sequence
  Oligonucleotide for detection of SNP TSC0056013
acccaaccctact

SEQ ID NO: 229635 - DNA, 13 bp, Artificial Sequence
  Oligonucleotide for detection of SNP TSC0056013
agtaggattgggt

SEQ ID NO: 229636 - DNA, 13 bp, Artificial Sequence
  Oligonucleotide for detection of SNP TSC0056013
acccaatcctact

SEQ ID NO: 229637 - DNA, 13 bp, Artificial Sequence
  Oligonucleotide for detection of SNP TSC0056014
tattttatttgat

SEQ ID NO: 229638 - DNA, 13 bp, Artificial Sequence
  Oligonucleotide for detection of SNP TSC0056014
atcaaataaaata

SEQ ID NO: 229639 - DNA, 13 bp, Artificial Sequence
  Oligonucleotide for detection of SNP TSC0056014
attagatgaagta

SEQ ID NO: 229640 - DNA, 13 bp, Artificial Sequence
  Oligonucleotide for detection of SNP TSC0056014
tacttcatctaat

SEQ ID NO: 229641 - DNA, 13 bp, Artificial Sequence
  Oligonucleotide for detection of SNP TSC0056014
attagacgaagta

SEQ ID NO: 229642 - DNA, 13 bp, Artificial Sequence
  Oligonucleotide for detection of SNP TSC0056014
tacttcgtctaat

SEQ ID NO: 229643 - DNA, 13 bp, Artificial Sequence
  Oligonucleotide for detection of SNP TSC0056015
tatttttaaaaty

SEQ ID NO: 229644 - DNA, 13 bp, Artificial Sequence
  Oligonucleotide for detection of SNP TSC0056015
rattttaaaaata

SEQ ID NO: 229645 - DNA, 13 bp, Artificial Sequence
  Oligonucleotide for detection of SNP TSC0056015
tattttgaaaaty

SEQ ID NO: 229646 - DNA, 13 bp, Artificial Sequence
  Oligonucleotide for detection of SNP TSC0056015
rattttcaaaata

SEQ ID NO: 229647 - DNA, 13 bp, Artificial Sequence
  Oligonucleotide for detection of SNP TSC0056015
gattttaagaatg

SEQ ID NO: 229648 - DNA, 13 bp, Artificial Sequence
  Oligonucleotide for detection of SNP TSC0056015
cattcttaaaatc

SEQ ID NO: 229649 - DNA, 13 bp, Artificial Sequence
  Oligonucleotide for detection of SNP TSC0056015
gatttttagaatg

SEQ ID NO: 229650 - DNA, 13 bp, Artificial Sequence
  Oligonucleotide for detection of SNP TSC0056015
cattctaaaaatc

SEQ ID NO: 229651 - DNA, 13 bp, Artificial Sequence
  Oligonucleotide for detection of SNP TSC0056017
ttgtttgtttggt

SEQ ID NO: 229652 - DNA, 13 bp, Artificial Sequence
  Oligonucleotide for detection of SNP TSC0056017
accaaacaaacaa

SEQ ID NO: 229653 - DNA, 13 bp, Artificial Sequence
  Oligonucleotide for detection of SNP TSC0056017
ttgttcgtttggt

SEQ ID NO: 229654 - DNA, 13 bp, Artificial Sequence
  Oligonucleotide for detection of SNP TSC0056017
accaaacgaacaa

SEQ ID NO: 229655 - DNA, 13 bp, Artificial Sequence
  Oligonucleotide for detection of SNP TSC0056017
attaaatgaataa

SEQ ID NO: 229656 - DNA, 13 bp, Artificial Sequence
  Oligonucleotide for detection of SNP TSC0056017
ttattcatttaat

SEQ ID NO: 229657 - DNA, 13 bp, Artificial Sequence
  Oligonucleotide for detection of SNP TSC0056019
agtaaagaaatag

SEQ ID NO: 229658 - DNA, 13 bp, Artificial Sequence
  Oligonucleotide for detection of SNP TSC0056019
ctatttctttact

SEQ ID NO: 229659 - DNA, 13 bp, Artificial Sequence
  Oligonucleotide for detection of SNP TSC0056019
agtaaaaaaatag

SEQ ID NO: 229660 - DNA, 13 bp, Artificial Sequence
  Oligonucleotide for detection of SNP TSC0056019
ctatttttttact

SEQ ID NO: 229661 - DNA, 13 bp, Artificial Sequence
  Oligonucleotide for detection of SNP TSC0056021
aaaatatttttga

SEQ ID NO: 229662 - DNA, 13 bp, Artificial Sequence
  Oligonucleotide for detection of SNP TSC0056021
tcaaaaatatttt

SEQ ID NO: 229663 - DNA, 13 bp, Artificial Sequence
  Oligonucleotide for detection of SNP TSC0056021
ttaagattgtttt

SEQ ID NO: 229664 - DNA, 13 bp, Artificial Sequence
  Oligonucleotide for detection of SNP TSC0056021
aaaacaatcttaa

SEQ ID NO: 229665 - DNA, 13 bp, Artificial Sequence
  Oligonucleotide for detection of SNP TSC0056021
ttaagagtgtttt

SEQ ID NO: 229666 - DNA, 13 bp, Artificial Sequence
  Oligonucleotide for detection of SNP TSC0056021
aaaacactcttaa

SEQ ID NO: 229667 - DNA, 13 bp, Artificial Sequence
  Oligonucleotide for detection of SNP TSC0056022
tagaataatatgt

SEQ ID NO: 229668 - DNA, 13 bp, Artificial Sequence
  Oligonucleotide for detection of SNP TSC0056022
acatattattcta

SEQ ID NO: 229669 - DNA, 13 bp, Artificial Sequence
  Oligonucleotide for detection of SNP TSC0056022
tagaatgatatgt

SEQ ID NO: 229670 - DNA, 13 bp, Artificial Sequence
  Oligonucleotide for detection of SNP TSC0056022
acatatcattcta

SEQ ID NO: 229671 - DNA, 13 bp, Artificial Sequence
  Oligonucleotide for detection of SNP TSC0056024
ttttagataaata

SEQ ID NO: 229672 - DNA, 13 bp, Artificial Sequence
  Oligonucleotide for detection of SNP TSC0056024
tatttatctaaaa

SEQ ID NO: 229673 - DNA, 13 bp, Artificial Sequence
  Oligonucleotide for detection of SNP TSC0056024
ttttaggtaaata

SEQ ID NO: 229674 - DNA, 13 bp, Artificial Sequence
  Oligonucleotide for detection of SNP TSC0056024
tatttacctaaaa

SEQ ID NO: 229675 - DNA, 13 bp, Artificial Sequence
  Oligonucleotide for detection of SNP TSC0056025
tatagaataatga

SEQ ID NO: 229676 - DNA, 13 bp, Artificial Sequence
  Oligonucleotide for detection of SNP TSC0056025
tcattattctata

SEQ ID NO: 229677 - DNA, 13 bp, Artificial Sequence
  Oligonucleotide for detection of SNP TSC0056025
tatagagtaatga

SEQ ID NO: 229678 - DNA, 13 bp, Artificial Sequence
  Oligonucleotide for detection of SNP TSC0056025
tcattactctata

SEQ ID NO: 229679 - DNA, 13 bp, Artificial Sequence
  Oligonucleotide for detection of SNP TSC0056026
tggtttagaaatt

SEQ ID NO: 229680 - DNA, 13 bp, Artificial Sequence
  Oligonucleotide for detection of SNP TSC0056026
aatttctaaacca

SEQ ID NO: 229681 - DNA, 13 bp, Artificial Sequence
  Oligonucleotide for detection of SNP TSC0056026
tggtttggaaatt

SEQ ID NO: 229682 - DNA, 13 bp, Artificial Sequence
  Oligonucleotide for detection of SNP TSC0056026
aatttccaaacca

SEQ ID NO: 229683 - DNA, 13 bp, Artificial Sequence
  Oligonucleotide for detection of SNP TSC0056027
ttgttaggttaat

SEQ ID NO: 229684 - DNA, 13 bp, Artificial Sequence
  Oligonucleotide for detection of SNP TSC0056027
attaacctaacaa

SEQ ID NO: 229685 - DNA, 13 bp, Artificial Sequence
  Oligonucleotide for detection of SNP TSC0056027
ttgttaagttaat

SEQ ID NO: 229686 - DNA, 13 bp, Artificial Sequence
  Oligonucleotide for detection of SNP TSC0056027
attaacttaacaa

SEQ ID NO: 229687 - DNA, 13 bp, Artificial Sequence
  Oligonucleotide for detection of SNP TSC0056031
aatatatgaaaay

SEQ ID NO: 229688 - DNA, 13 bp, Artificial Sequence
  Oligonucleotide for detection of SNP TSC0056031
rttttcatatatt

SEQ ID NO: 229689 - DNA, 13 bp, Artificial Sequence
  Oligonucleotide for detection of SNP TSC0056031
aatatacgaaaay

SEQ ID NO: 229690 - DNA, 13 bp, Artificial Sequence
  Oligonucleotide for detection of SNP TSC0056031
rttttcgtatatt

SEQ ID NO: 229691 - DNA, 13 bp, Artificial Sequence
  Oligonucleotide for detection of SNP TSC0056031
gtttttgtatgtt

SEQ ID NO: 229692 - DNA, 13 bp, Artificial Sequence
  Oligonucleotide for detection of SNP TSC0056031
aacatacaaaaac

SEQ ID NO: 229693 - DNA, 13 bp, Artificial Sequence
  Oligonucleotide for detection of SNP TSC0056031
gttttcgtatgtt

SEQ ID NO: 229694 - DNA, 13 bp, Artificial Sequence
  Oligonucleotide for detection of SNP TSC0056031
aacatacgaaaac

SEQ ID NO: 229695 - DNA, 13 bp, Artificial Sequence
  Oligonucleotide for detection of SNP TSC0056032
aggttttgtttta

SEQ ID NO: 229696 - DNA, 13 bp, Artificial Sequence
  Oligonucleotide for detection of SNP TSC0056032
taaaacaaaacct

SEQ ID NO: 229697 - DNA, 13 bp, Artificial Sequence
  Oligonucleotide for detection of SNP TSC0056032
aggtttggtttta

SEQ ID NO: 229698 - DNA, 13 bp, Artificial Sequence
  Oligonucleotide for detection of SNP TSC0056032
taaaaccaaacct

SEQ ID NO: 229699 - DNA, 13 bp, Artificial Sequence
  Oligonucleotide for detection of SNP TSC0056032
aggttcggtttta

SEQ ID NO: 229700 - DNA, 13 bp, Artificial Sequence
  Oligonucleotide for detection of SNP TSC0056032
taaaaccgaacct

SEQ ID NO: 229701 - DNA, 13 bp, Artificial Sequence
  Oligonucleotide for detection of SNP TSC0056032
taaggtagggttt

SEQ ID NO: 229702 - DNA, 13 bp, Artificial Sequence
  Oligonucleotide for detection of SNP TSC0056032
aaaccctacctta

SEQ ID NO: 229703 - DNA, 13 bp, Artificial Sequence
  Oligonucleotide for detection of SNP TSC0056032
taaggttgggttt

SEQ ID NO: 229704 - DNA, 13 bp, Artificial Sequence
  Oligonucleotide for detection of SNP TSC0056032
aaacccaacctta

SEQ ID NO: 229705 - DNA, 13 bp, Artificial Sequence
  Oligonucleotide for detection of SNP TSC0056032
taaggtcgggttt

SEQ ID NO: 229706 - DNA, 13 bp, Artificial Sequence
  Oligonucleotide for detection of SNP TSC0056032
aaacccgacctta

SEQ ID NO: 229707 - DNA, 13 bp, Artificial Sequence
  Oligonucleotide for detection of SNP TSC0056033
gtaggtattatag

SEQ ID NO: 229708 - DNA, 13 bp, Artificial Sequence
  Oligonucleotide for detection of SNP TSC0056033
ctataatacctac

SEQ ID NO: 229709 - DNA, 13 bp, Artificial Sequence
  Oligonucleotide for detection of SNP TSC0056033
gtaggtgttatag

SEQ ID NO: 229710 - DNA, 13 bp, Artificial Sequence
  Oligonucleotide for detection of SNP TSC0056033
ctataacacctac

SEQ ID NO: 229711 - DNA, 13 bp, Artificial Sequence
  Oligonucleotide for detection of SNP TSC0056033
gtaggcgttatag

SEQ ID NO: 229712 - DNA, 13 bp, Artificial Sequence
  Oligonucleotide for detection of SNP TSC0056033
ctataacgcctac

SEQ ID NO: 229713 - DNA, 13 bp, Artificial Sequence
  Oligonucleotide for detection of SNP TSC0056033
ttgtaatgtttay

SEQ ID NO: 229714 - DNA, 13 bp, Artificial Sequence
  Oligonucleotide for detection of SNP TSC0056033
rtaaacattacaa

SEQ ID NO: 229715 - DNA, 13 bp, Artificial Sequence
  Oligonucleotide for detection of SNP TSC0056033
ttgtaacgtttay

SEQ ID NO: 229716 - DNA, 13 bp, Artificial Sequence
  Oligonucleotide for detection of SNP TSC0056033
rtaaacgttacaa

SEQ ID NO: 229717 - DNA, 13 bp, Artificial Sequence
  Oligonucleotide for detection of SNP TSC0056035
atagaatgaatta

SEQ ID NO: 229718 - DNA, 13 bp, Artificial Sequence
  Oligonucleotide for detection of SNP TSC0056035
taattcattctat

SEQ ID NO: 229719 - DNA, 13 bp, Artificial Sequence
  Oligonucleotide for detection of SNP TSC0056035
atagaaggaatta

SEQ ID NO: 229720 - DNA, 13 bp, Artificial Sequence
  Oligonucleotide for detection of SNP TSC0056035
taattccttctat

SEQ ID NO: 229721 - DNA, 13 bp, Artificial Sequence
  Oligonucleotide for detection of SNP TSC0056036
tatgtatattcga

SEQ ID NO: 229722 - DNA, 13 bp, Artificial Sequence
  Oligonucleotide for detection of SNP TSC0056036
tcgaatatacata

SEQ ID NO: 229723 - DNA, 13 bp, Artificial Sequence
  Oligonucleotide for detection of SNP TSC0056036
tatgtagattcga

SEQ ID NO: 229724 - DNA, 13 bp, Artificial Sequence
  Oligonucleotide for detection of SNP TSC0056036
tcgaatctacata

SEQ ID NO: 229725 - DNA, 13 bp, Artificial Sequence
  Oligonucleotide for detection of SNP TSC0056036
ttgagtgtgtatg

SEQ ID NO: 229726 - DNA, 13 bp, Artificial Sequence
  Oligonucleotide for detection of SNP TSC0056036
catacacactcaa

SEQ ID NO: 229727 - DNA, 13 bp, Artificial Sequence
  Oligonucleotide for detection of SNP TSC0056036
ttgagtttgtatg

SEQ ID NO: 229728 - DNA, 13 bp, Artificial Sequence
  Oligonucleotide for detection of SNP TSC0056036
catacaaactcaa

SEQ ID NO: 229729 - DNA, 13 bp, Artificial Sequence
  Oligonucleotide for detection of SNP TSC0056036
tcgagtgtgtatg

SEQ ID NO: 229730 - DNA, 13 bp, Artificial Sequence
  Oligonucleotide for detection of SNP TSC0056036
catacacactcga

SEQ ID NO: 229731 - DNA, 13 bp, Artificial Sequence
  Oligonucleotide for detection of SNP TSC0056036
tcgagtttgtatg

SEQ ID NO: 229732 - DNA, 13 bp, Artificial Sequence
  Oligonucleotide for detection of SNP TSC0056036
catacaaactcga

SEQ ID NO: 229733 - DNA, 13 bp, Artificial Sequence
  Oligonucleotide for detection of SNP TSC0056037
atttataatatty

SEQ ID NO: 229734 - DNA, 13 bp, Artificial Sequence
  Oligonucleotide for detection of SNP TSC0056037
raatattataaat

SEQ ID NO: 229735 - DNA, 13 bp, Artificial Sequence
  Oligonucleotide for detection of SNP TSC0056037
atttatgatatty

SEQ ID NO: 229736 - DNA, 13 bp, Artificial Sequence
  Oligonucleotide for detection of SNP TSC0056037
raatatcataaat

SEQ ID NO: 229737 - DNA, 13 bp, Artificial Sequence
  Oligonucleotide for detection of SNP TSC0056037
atttacgatatty

SEQ ID NO: 229738 - DNA, 13 bp, Artificial Sequence
  Oligonucleotide for detection of SNP TSC0056037
raatatcgtaaat

SEQ ID NO: 229739 - DNA, 13 bp, Artificial Sequence
  Oligonucleotide for detection of SNP TSC0056037
gaatgttgtggat

SEQ ID NO: 229740 - DNA, 13 bp, Artificial Sequence
  Oligonucleotide for detection of SNP TSC0056037
atccacaacattc

SEQ ID NO: 229741 - DNA, 13 bp, Artificial Sequence
  Oligonucleotide for detection of SNP TSC0056037
gaatgtcgtggat

SEQ ID NO: 229742 - DNA, 13 bp, Artificial Sequence
  Oligonucleotide for detection of SNP TSC0056037
atccacgacattc

SEQ ID NO: 229743 - DNA, 13 bp, Artificial Sequence
  Oligonucleotide for detection of SNP TSC0056038
gtatagtgaagga

SEQ ID NO: 229744 - DNA, 13 bp, Artificial Sequence
  Oligonucleotide for detection of SNP TSC0056038
tccttcactatac

SEQ ID NO: 229745 - DNA, 13 bp, Artificial Sequence
  Oligonucleotide for detection of SNP TSC0056038
gtatagcgaagga

SEQ ID NO: 229746 - DNA, 13 bp, Artificial Sequence
  Oligonucleotide for detection of SNP TSC0056038
tccttcgctatac

SEQ ID NO: 229747 - DNA, 13 bp, Artificial Sequence
  Oligonucleotide for detection of SNP TSC0056040
gtgttattgttty

SEQ ID NO: 229748 - DNA, 13 bp, Artificial Sequence
  Oligonucleotide for detection of SNP TSC0056040
raaacaataacac

SEQ ID NO: 229749 - DNA, 13 bp, Artificial Sequence
  Oligonucleotide for detection of SNP TSC0056040
gtgttagtgttty

SEQ ID NO: 229750 - DNA, 13 bp, Artificial Sequence
  Oligonucleotide for detection of SNP TSC0056040
raaacactaacac

SEQ ID NO: 229751 - DNA, 13 bp, Artificial Sequence
  Oligonucleotide for detection of SNP TSC0056040
gaagtagtaatay

SEQ ID NO: 229752 - DNA, 13 bp, Artificial Sequence
  Oligonucleotide for detection of SNP TSC0056040
rtattactacttc

SEQ ID NO: 229753 - DNA, 13 bp, Artificial Sequence
  Oligonucleotide for detection of SNP TSC0056040
gaagtattaatay

SEQ ID NO: 229754 - DNA, 13 bp, Artificial Sequence
  Oligonucleotide for detection of SNP TSC0056040
rtattaatacttc

SEQ ID NO: 229755 - DNA, 13 bp, Artificial Sequence
  Oligonucleotide for detection of SNP TSC0056041
tggaggtgaagay

SEQ ID NO: 229756 - DNA, 13 bp, Artificial Sequence
  Oligonucleotide for detection of SNP TSC0056041
rtcttcacctcca

SEQ ID NO: 229757 - DNA, 13 bp, Artificial Sequence
  Oligonucleotide for detection of SNP TSC0056041
tggaggcgaagay

SEQ ID NO: 229758 - DNA, 13 bp, Artificial Sequence
  Oligonucleotide for detection of SNP TSC0056041
rtcttcgcctcca

SEQ ID NO: 229759 - DNA, 13 bp, Artificial Sequence
  Oligonucleotide for detection of SNP TSC0004704
gtatatggttttg

SEQ ID NO: 229760 - DNA, 13 bp, Artificial Sequence
  Oligonucleotide for detection of SNP TSC0004704
caaaaccatatac

SEQ ID NO: 229761 - DNA, 13 bp, Artificial Sequence
  Oligonucleotide for detection of SNP TSC0004704
gtatatagttttg

SEQ ID NO: 229762 - DNA, 13 bp, Artificial Sequence
  Oligonucleotide for detection of SNP TSC0004704
caaaactatatac

SEQ ID NO: 229763 - DNA, 13 bp, Artificial Sequence
  Oligonucleotide for detection of SNP TSC0004705
atgatgtggttay

SEQ ID NO: 229764 - DNA, 13 bp, Artificial Sequence
  Oligonucleotide for detection of SNP TSC0004705
rtaaccacatcat

SEQ ID NO: 229765 - DNA, 13 bp, Artificial Sequence
  Oligonucleotide for detection of SNP TSC0004705
atgatgcggttay

SEQ ID NO: 229766 - DNA, 13 bp, Artificial Sequence
  Oligonucleotide for detection of SNP TSC0004705
rtaaccgcatcat

SEQ ID NO: 229767 - DNA, 13 bp, Artificial Sequence
  Oligonucleotide for detection of SNP TSC0004705
gtaattgtattat

SEQ ID NO: 229768 - DNA, 13 bp, Artificial Sequence
  Oligonucleotide for detection of SNP TSC0004705
ataatacaattac

SEQ ID NO: 229769 - DNA, 13 bp, Artificial Sequence
  Oligonucleotide for detection of SNP TSC0004705
gtaattatattat

SEQ ID NO: 229770 - DNA, 13 bp, Artificial Sequence
  Oligonucleotide for detection of SNP TSC0004705
ataatataattac

SEQ ID NO: 229771 - DNA, 13 bp, Artificial Sequence
  Oligonucleotide for detection of SNP TSC0004705
gtaatcgtattat

SEQ ID NO: 229772 - DNA, 13 bp, Artificial Sequence
  Oligonucleotide for detection of SNP TSC0004705
ataatacgattac

SEQ ID NO: 229773 - DNA, 13 bp, Artificial Sequence
  Oligonucleotide for detection of SNP TSC0056045
atagatgtataaa

SEQ ID NO: 229774 - DNA, 13 bp, Artificial Sequence
  Oligonucleotide for detection of SNP TSC0056045
tttatacatctat

SEQ ID NO: 229775 - DNA, 13 bp, Artificial Sequence
  Oligonucleotide for detection of SNP TSC0056045
atagatatataaa

SEQ ID NO: 229776 - DNA, 13 bp, Artificial Sequence
  Oligonucleotide for detection of SNP TSC0056045
tttatatatctat

SEQ ID NO: 229777 - DNA, 13 bp, Artificial Sequence
  Oligonucleotide for detection of SNP TSC0056046
tttgatttaaaag

SEQ ID NO: 229778 - DNA, 13 bp, Artificial Sequence
  Oligonucleotide for detection of SNP TSC0056046
cttttaaatcaaa

SEQ ID NO: 229779 - DNA, 13 bp, Artificial Sequence
  Oligonucleotide for detection of SNP TSC0056046
tttgatgtaaaag

SEQ ID NO: 229780 - DNA, 13 bp, Artificial Sequence
  Oligonucleotide for detection of SNP TSC0056046
cttttacatcaaa

SEQ ID NO: 229781 - DNA, 13 bp, Artificial Sequence
  Oligonucleotide for detection of SNP TSC0056047
tgaaaaggaggaa

SEQ ID NO: 229782 - DNA, 13 bp, Artificial Sequence
  Oligonucleotide for detection of SNP TSC0056047
ttcctccttttca

SEQ ID NO: 229783 - DNA, 13 bp, Artificial Sequence
  Oligonucleotide for detection of SNP TSC0056047
tgaaaatgaggaa

SEQ ID NO: 229784 - DNA, 13 bp, Artificial Sequence
  Oligonucleotide for detection of SNP TSC0056047
ttcctcattttca

SEQ ID NO: 229785 - DNA, 13 bp, Artificial Sequence
  Oligonucleotide for detection of SNP TSC0056047
tgaaaacgaggaa

SEQ ID NO: 229786 - DNA, 13 bp, Artificial Sequence
  Oligonucleotide for detection of SNP TSC0056047
ttcctcgttttca

SEQ ID NO: 229787 - DNA, 13 bp, Artificial Sequence
  Oligonucleotide for detection of SNP TSC0056048
gtagagtggggaa

SEQ ID NO: 229788 - DNA, 13 bp, Artificial Sequence
  Oligonucleotide for detection of SNP TSC0056048
ttccccactctac

SEQ ID NO: 229789 - DNA, 13 bp, Artificial Sequence
  Oligonucleotide for detection of SNP TSC0056048
gtagaggggggaa

SEQ ID NO: 229790 - DNA, 13 bp, Artificial Sequence
  Oligonucleotide for detection of SNP TSC0056048
ttcccccctctac

SEQ ID NO: 229791 - DNA, 13 bp, Artificial Sequence
  Oligonucleotide for detection of SNP TSC0056050
tttaagattaaag

SEQ ID NO: 229792 - DNA, 13 bp, Artificial Sequence
  Oligonucleotide for detection of SNP TSC0056050
ctttaatcttaaa

SEQ ID NO: 229793 - DNA, 13 bp, Artificial Sequence
  Oligonucleotide for detection of SNP TSC0056050
tttaagtttaaag

SEQ ID NO: 229794 - DNA, 13 bp, Artificial Sequence
  Oligonucleotide for detection of SNP TSC0056050
ctttaaacttaaa

SEQ ID NO: 229795 - DNA, 13 bp, Artificial Sequence
  Oligonucleotide for detection of SNP TSC0056051
atttttatagaaa

SEQ ID NO: 229796 - DNA, 13 bp, Artificial Sequence
  Oligonucleotide for detection of SNP TSC0056051
tttctataaaaat

SEQ ID NO: 229797 - DNA, 13 bp, Artificial Sequence
  Oligonucleotide for detection of SNP TSC0056051
atttttgtagaaa

SEQ ID NO: 229798 - DNA, 13 bp, Artificial Sequence
  Oligonucleotide for detection of SNP TSC0056051
tttctacaaaaat

SEQ ID NO: 229799 - DNA, 13 bp, Artificial Sequence
  Oligonucleotide for detection of SNP TSC0056051
attttcgtagaaa

SEQ ID NO: 229800 - DNA, 13 bp, Artificial Sequence
  Oligonucleotide for detection of SNP TSC0056051
tttctacgaaaat

SEQ ID NO: 229801 - DNA, 13 bp, Artificial Sequence
  Oligonucleotide for detection of SNP TSC0056051
tttttgcgagggt

SEQ ID NO: 229802 - DNA, 13 bp, Artificial Sequence
  Oligonucleotide for detection of SNP TSC0056051
accctcgcaaaaa

SEQ ID NO: 229803 - DNA, 13 bp, Artificial Sequence
  Oligonucleotide for detection of SNP TSC0056057
atatatattgatt

SEQ ID NO: 229804 - DNA, 13 bp, Artificial Sequence
  Oligonucleotide for detection of SNP TSC0056057
aatcaatatatat

SEQ ID NO: 229805 - DNA, 13 bp, Artificial Sequence
  Oligonucleotide for detection of SNP TSC0056057
atatatgttgatt

SEQ ID NO: 229806 - DNA, 13 bp, Artificial Sequence
  Oligonucleotide for detection of SNP TSC0056057
aatcaacatatat

SEQ ID NO: 229807 - DNA, 13 bp, Artificial Sequence
  Oligonucleotide for detection of SNP TSC0056057
atatacgttgatt

SEQ ID NO: 229808 - DNA, 13 bp, Artificial Sequence
  Oligonucleotide for detection of SNP TSC0056057
aatcaacgtatat

SEQ ID NO: 229809 - DNA, 13 bp, Artificial Sequence
  Oligonucleotide for detection of SNP TSC0056057
agttagtgtatat

SEQ ID NO: 229810 - DNA, 13 bp, Artificial Sequence
  Oligonucleotide for detection of SNP TSC0056057
atatacactaact

SEQ ID NO: 229811 - DNA, 13 bp, Artificial Sequence
  Oligonucleotide for detection of SNP TSC0056057
agttagcgtatat

SEQ ID NO: 229812 - DNA, 13 bp, Artificial Sequence
  Oligonucleotide for detection of SNP TSC0056057
atatacgctaact

SEQ ID NO: 229813 - DNA, 13 bp, Artificial Sequence
  Oligonucleotide for detection of SNP TSC0056058
attttaagagtta

SEQ ID NO: 229814 - DNA, 13 bp, Artificial Sequence
  Oligonucleotide for detection of SNP TSC0056058
taactcttaaaat

SEQ ID NO: 229815 - DNA, 13 bp, Artificial Sequence
  Oligonucleotide for detection of SNP TSC0056058
attttaggagtta

SEQ ID NO: 229816 - DNA, 13 bp, Artificial Sequence
  Oligonucleotide for detection of SNP TSC0056058
taactcctaaaat

SEQ ID NO: 229817 - DNA, 13 bp, Artificial Sequence
  Oligonucleotide for detection of SNP TSC0056059
aaatgtgttttaa

SEQ ID NO: 229818 - DNA, 13 bp, Artificial Sequence
  Oligonucleotide for detection of SNP TSC0056059
ttaaaacacattt

SEQ ID NO: 229819 - DNA, 13 bp, Artificial Sequence
  Oligonucleotide for detection of SNP TSC0056062
tgtttaggttatg

SEQ ID NO: 229820 - DNA, 13 bp, Artificial Sequence
  Oligonucleotide for detection of SNP TSC0056062
cataacctaaaca

SEQ ID NO: 229821 - DNA, 13 bp, Artificial Sequence
  Oligonucleotide for detection of SNP TSC0056062
tatagtataagta

SEQ ID NO: 229822 - DNA, 13 bp, Artificial Sequence
  Oligonucleotide for detection of SNP TSC0056062
tacttatactata

SEQ ID NO: 229823 - DNA, 13 bp, Artificial Sequence
  Oligonucleotide for detection of SNP TSC0056062
tatagtttaagta

SEQ ID NO: 229824 - DNA, 13 bp, Artificial Sequence
  Oligonucleotide for detection of SNP TSC0056062
tacttaaactata

SEQ ID NO: 229825 - DNA, 13 bp, Artificial Sequence
  Oligonucleotide for detection of SNP TSC0056063
tttgagatattta

SEQ ID NO: 229826 - DNA, 13 bp, Artificial Sequence
  Oligonucleotide for detection of SNP TSC0056063
taaatatctcaaa

SEQ ID NO: 229827 - DNA, 13 bp, Artificial Sequence
  Oligonucleotide for detection of SNP TSC0056063
tttgaggtattta

SEQ ID NO: 229828 - DNA, 13 bp, Artificial Sequence
  Oligonucleotide for detection of SNP TSC0056063
taaatacctcaaa

SEQ ID NO: 229829 - DNA, 13 bp, Artificial Sequence
  Oligonucleotide for detection of SNP TSC0056064
ttttatgtaggty

SEQ ID NO: 229830 - DNA, 13 bp, Artificial Sequence
  Oligonucleotide for detection of SNP TSC0056064
racctacataaaa

SEQ ID NO: 229831 - DNA, 13 bp, Artificial Sequence
  Oligonucleotide for detection of SNP TSC0056064
ttttacgtaggty

SEQ ID NO: 229832 - DNA, 13 bp, Artificial Sequence
  Oligonucleotide for detection of SNP TSC0056064
racctacgtaaaa

SEQ ID NO: 229833 - DNA, 13 bp, Artificial Sequence
  Oligonucleotide for detection of SNP TSC0056064
ggtttatgtgaag

SEQ ID NO: 229834 - DNA, 13 bp, Artificial Sequence
  Oligonucleotide for detection of SNP TSC0056064
cttcacataaacc

SEQ ID NO: 229835 - DNA, 13 bp, Artificial Sequence
  Oligonucleotide for detection of SNP TSC0056064
ggtttacgtgaag

SEQ ID NO: 229836 - DNA, 13 bp, Artificial Sequence
  Oligonucleotide for detection of SNP TSC0056064
cttcacgtaaacc

SEQ ID NO: 229837 - DNA, 13 bp, Artificial Sequence
  Oligonucleotide for detection of SNP TSC0056066
atgttgggtttat

SEQ ID NO: 229838 - DNA, 13 bp, Artificial Sequence
  Oligonucleotide for detection of SNP TSC0056066
ataaacccaacat

SEQ ID NO: 229839 - DNA, 13 bp, Artificial Sequence
  Oligonucleotide for detection of SNP TSC0056066
atgttgagtttat

SEQ ID NO: 229840 - DNA, 13 bp, Artificial Sequence
  Oligonucleotide for detection of SNP TSC0056066
ataaactcaacat

SEQ ID NO: 229841 - DNA, 13 bp, Artificial Sequence
  Oligonucleotide for detection of SNP TSC0056069
gggttaatagggy

SEQ ID NO: 229842 - DNA, 13 bp, Artificial Sequence
  Oligonucleotide for detection of SNP TSC0056069
rccctattaaccc

SEQ ID NO: 229843 - DNA, 13 bp, Artificial Sequence
  Oligonucleotide for detection of SNP TSC0056069
gggttagtagggy

SEQ ID NO: 229844 - DNA, 13 bp, Artificial Sequence
  Oligonucleotide for detection of SNP TSC0056069
rccctactaaccc

SEQ ID NO: 229845 - DNA, 13 bp, Artificial Sequence
  Oligonucleotide for detection of SNP TSC0056070
tagaaggaaatay

SEQ ID NO: 229846 - DNA, 13 bp, Artificial Sequence
  Oligonucleotide for detection of SNP TSC0056070
rtatttccttcta

SEQ ID NO: 229847 - DNA, 13 bp, Artificial Sequence
  Oligonucleotide for detection of SNP TSC0056070
tagaagaaaatay

SEQ ID NO: 229848 - DNA, 13 bp, Artificial Sequence
  Oligonucleotide for detection of SNP TSC0056070
rtattttcttcta

SEQ ID NO: 229849 - DNA, 13 bp, Artificial Sequence
  Oligonucleotide for detection of SNP TSC0056071
ggtagaatttgtt

SEQ ID NO: 229850 - DNA, 13 bp, Artificial Sequence
  Oligonucleotide for detection of SNP TSC0056071
aacaaattctacc

SEQ ID NO: 229851 - DNA, 13 bp, Artificial Sequence
  Oligonucleotide for detection of SNP TSC0056071
ggtagagtttgtt

SEQ ID NO: 229852 - DNA, 13 bp, Artificial Sequence
  Oligonucleotide for detection of SNP TSC0056071
aacaaactctacc

SEQ ID NO: 229853 - DNA, 13 bp, Artificial Sequence
  Oligonucleotide for detection of SNP TSC0056072
tggtagagtgttt

SEQ ID NO: 229854 - DNA, 13 bp, Artificial Sequence
  Oligonucleotide for detection of SNP TSC0056072
aaacactctacca

SEQ ID NO: 229855 - DNA, 13 bp, Artificial Sequence
  Oligonucleotide for detection of SNP TSC0056072
tggtagggtgttt

SEQ ID NO: 229856 - DNA, 13 bp, Artificial Sequence
  Oligonucleotide for detection of SNP TSC0056072
aaacaccctacca

SEQ ID NO: 229857 - DNA, 13 bp, Artificial Sequence
  Oligonucleotide for detection of SNP TSC0006800
ggtaaaggggagy

SEQ ID NO: 229858 - DNA, 13 bp, Artificial Sequence
  Oligonucleotide for detection of SNP TSC0006800
rctcccctttacc

SEQ ID NO: 229859 - DNA, 13 bp, Artificial Sequence
  Oligonucleotide for detection of SNP TSC0006800
ggtaaatgggagy

SEQ ID NO: 229860 - DNA, 13 bp, Artificial Sequence
  Oligonucleotide for detection of SNP TSC0006800
rctcccatttacc

SEQ ID NO: 229861 - DNA, 13 bp, Artificial Sequence
  Oligonucleotide for detection of SNP TSC0006800
ggtaaacgggagy

SEQ ID NO: 229862 - DNA, 13 bp, Artificial Sequence
  Oligonucleotide for detection of SNP TSC0006800
rctcccgtttacc

SEQ ID NO: 229863 - DNA, 13 bp, Artificial Sequence
  Oligonucleotide for detection of SNP TSC0010737
tttgaagttttta

SEQ ID NO: 229864 - DNA, 13 bp, Artificial Sequence
  Oligonucleotide for detection of SNP TSC0010737
taaaaacttcaaa

SEQ ID NO: 229865 - DNA, 13 bp, Artificial Sequence
  Oligonucleotide for detection of SNP TSC0005304
gtttatatagtat

SEQ ID NO: 229866 - DNA, 13 bp, Artificial Sequence
  Oligonucleotide for detection of SNP TSC0005304
atactatataaac

SEQ ID NO: 229867 - DNA, 13 bp, Artificial Sequence
  Oligonucleotide for detection of SNP TSC0005304
gtttatttagtat

SEQ ID NO: 229868 - DNA, 13 bp, Artificial Sequence
  Oligonucleotide for detection of SNP TSC0005304
atactaaataaac

SEQ ID NO: 229869 - DNA, 13 bp, Artificial Sequence
  Oligonucleotide for detection of SNP TSC0005304
atattatatgagy

SEQ ID NO: 229870 - DNA, 13 bp, Artificial Sequence
  Oligonucleotide for detection of SNP TSC0005304
rctcatataatat

SEQ ID NO: 229871 - DNA, 13 bp, Artificial Sequence
  Oligonucleotide for detection of SNP TSC0005304
atattagatgagy

SEQ ID NO: 229872 - DNA, 13 bp, Artificial Sequence
  Oligonucleotide for detection of SNP TSC0005304
rctcatctaatat

SEQ ID NO: 229873 - DNA, 13 bp, Artificial Sequence
  Oligonucleotide for detection of SNP TSC0005305
ttttacgtttttg

SEQ ID NO: 229874 - DNA, 13 bp, Artificial Sequence
  Oligonucleotide for detection of SNP TSC0005305
caaaaacgtaaaa

SEQ ID NO: 229875 - DNA, 13 bp, Artificial Sequence
  Oligonucleotide for detection of SNP TSC0005305
taaaagtgtgaga

SEQ ID NO: 229876 - DNA, 13 bp, Artificial Sequence
  Oligonucleotide for detection of SNP TSC0005305
tctcacactttta

SEQ ID NO: 229877 - DNA, 13 bp, Artificial Sequence
  Oligonucleotide for detection of SNP TSC0005305
taaaagcgtgaga

SEQ ID NO: 229878 - DNA, 13 bp, Artificial Sequence
  Oligonucleotide for detection of SNP TSC0005305
tctcacgctttta

SEQ ID NO: 229879 - DNA, 13 bp, Artificial Sequence
  Oligonucleotide for detection of SNP TSC0005306
gtttttttgatgt

SEQ ID NO: 229880 - DNA, 13 bp, Artificial Sequence
  Oligonucleotide for detection of SNP TSC0005306
acatcaaaaaaac

SEQ ID NO: 229881 - DNA, 13 bp, Artificial Sequence
  Oligonucleotide for detection of SNP TSC0005306
gtttttgtgatgt

SEQ ID NO: 229882 - DNA, 13 bp, Artificial Sequence
  Oligonucleotide for detection of SNP TSC0005306
acatcacaaaaac

SEQ ID NO: 229883 - DNA, 13 bp, Artificial Sequence
  Oligonucleotide for detection of SNP TSC0005306
gttttttcgatgt

SEQ ID NO: 229884 - DNA, 13 bp, Artificial Sequence
  Oligonucleotide for detection of SNP TSC0005306
acatcgaaaaaac

SEQ ID NO: 229885 - DNA, 13 bp, Artificial Sequence
  Oligonucleotide for detection of SNP TSC0005306
gtttttgcgatgt

SEQ ID NO: 229886 - DNA, 13 bp, Artificial Sequence
  Oligonucleotide for detection of SNP TSC0005306
acatcgcaaaaac

SEQ ID NO: 229887 - DNA, 13 bp, Artificial Sequence
  Oligonucleotide for detection of SNP TSC0005306
atattgaaagggy

SEQ ID NO: 229888 - DNA, 13 bp, Artificial Sequence
  Oligonucleotide for detection of SNP TSC0005306
rccctttcaatat

SEQ ID NO: 229889 - DNA, 13 bp, Artificial Sequence
  Oligonucleotide for detection of SNP TSC0005306
atattgtaagggy

SEQ ID NO: 229890 - DNA, 13 bp, Artificial Sequence
  Oligonucleotide for detection of SNP TSC0005306
rcccttacaatat

SEQ ID NO: 229891 - DNA, 13 bp, Artificial Sequence
  Oligonucleotide for detection of SNP TSC0005306
atatcgaaagggy

SEQ ID NO: 229892 - DNA, 13 bp, Artificial Sequence
  Oligonucleotide for detection of SNP TSC0005306
rccctttcgatat

SEQ ID NO: 229893 - DNA, 13 bp, Artificial Sequence
  Oligonucleotide for detection of SNP TSC0005306
atatcgtaagggy

SEQ ID NO: 229894 - DNA, 13 bp, Artificial Sequence
  Oligonucleotide for detection of SNP TSC0005306
rcccttacgatat

SEQ ID NO: 229895 - DNA, 13 bp, Artificial Sequence
  Oligonucleotide for detection of SNP TSC0056073
tttagagaggttt

SEQ ID NO: 229896 - DNA, 13 bp, Artificial Sequence
  Oligonucleotide for detection of SNP TSC0056073
aaacctctctaaa

SEQ ID NO: 229897 - DNA, 13 bp, Artificial Sequence
  Oligonucleotide for detection of SNP TSC0056073
tttagaaaggttt

SEQ ID NO: 229898 - DNA, 13 bp, Artificial Sequence
  Oligonucleotide for detection of SNP TSC0056073
aaacctttctaaa

SEQ ID NO: 229899 - DNA, 13 bp, Artificial Sequence
  Oligonucleotide for detection of SNP TSC0056075
ttttgtttgttta

SEQ ID NO: 229900 - DNA, 13 bp, Artificial Sequence
  Oligonucleotide for detection of SNP TSC0056075
taaacaaacaaaa

SEQ ID NO: 229901 - DNA, 13 bp, Artificial Sequence
  Oligonucleotide for detection of SNP TSC0056076
agttaggtttttt

SEQ ID NO: 229902 - DNA, 13 bp, Artificial Sequence
  Oligonucleotide for detection of SNP TSC0056076
aaaaaacctaact

SEQ ID NO: 229903 - DNA, 13 bp, Artificial Sequence
  Oligonucleotide for detection of SNP TSC0056076
agggaagttaatt

SEQ ID NO: 229904 - DNA, 13 bp, Artificial Sequence
  Oligonucleotide for detection of SNP TSC0056076
aattaacttccct

SEQ ID NO: 229905 - DNA, 13 bp, Artificial Sequence
  Oligonucleotide for detection of SNP TSC0056076
agggaatttaatt

SEQ ID NO: 229906 - DNA, 13 bp, Artificial Sequence
  Oligonucleotide for detection of SNP TSC0056076
aattaaattccct

SEQ ID NO: 229907 - DNA, 13 bp, Artificial Sequence
  Oligonucleotide for detection of SNP TSC0056080
tatttaatgatgy

SEQ ID NO: 229908 - DNA, 13 bp, Artificial Sequence
  Oligonucleotide for detection of SNP TSC0056080
rcatcattaaata

SEQ ID NO: 229909 - DNA, 13 bp, Artificial Sequence
  Oligonucleotide for detection of SNP TSC0056080
tatttattgatgy

SEQ ID NO: 229910 - DNA, 13 bp, Artificial Sequence
  Oligonucleotide for detection of SNP TSC0056080
rcatcaataaata

SEQ ID NO: 229911 - DNA, 13 bp, Artificial Sequence
  Oligonucleotide for detection of SNP TSC0056080
tatttaacgatgy

SEQ ID NO: 229912 - DNA, 13 bp, Artificial Sequence
  Oligonucleotide for detection of SNP TSC0056080
rcatcgttaaata

SEQ ID NO: 229913 - DNA, 13 bp, Artificial Sequence
  Oligonucleotide for detection of SNP TSC0056080
tatttatcgatgy

SEQ ID NO: 229914 - DNA, 13 bp, Artificial Sequence
  Oligonucleotide for detection of SNP TSC0056080
rcatcgataaata

SEQ ID NO: 229915 - DNA, 13 bp, Artificial Sequence
  Oligonucleotide for detection of SNP TSC0056080
tatttaatgacgy

SEQ ID NO: 229916 - DNA, 13 bp, Artificial Sequence
  Oligonucleotide for detection of SNP TSC0056080
rcgtcattaaata

SEQ ID NO: 229917 - DNA, 13 bp, Artificial Sequence
  Oligonucleotide for detection of SNP TSC0056080
tatttattgacgy

SEQ ID NO: 229918 - DNA, 13 bp, Artificial Sequence
  Oligonucleotide for detection of SNP TSC0056080
rcgtcaataaata

SEQ ID NO: 229919 - DNA, 13 bp, Artificial Sequence
  Oligonucleotide for detection of SNP TSC0056080
tatttaacgacgy

SEQ ID NO: 229920 - DNA, 13 bp, Artificial Sequence
  Oligonucleotide for detection of SNP TSC0056080
rcgtcgttaaata

SEQ ID NO: 229921 - DNA, 13 bp, Artificial Sequence
  Oligonucleotide for detection of SNP TSC0056080
tatttatcgacgy

SEQ ID NO: 229922 - DNA, 13 bp, Artificial Sequence
  Oligonucleotide for detection of SNP TSC0056080
rcgtcgataaata

SEQ ID NO: 229923 - DNA, 13 bp, Artificial Sequence
  Oligonucleotide for detection of SNP TSC0056080
gtgttgttgaata

SEQ ID NO: 229924 - DNA, 13 bp, Artificial Sequence
  Oligonucleotide for detection of SNP TSC0056080
tattcaacaacac

SEQ ID NO: 229925 - DNA, 13 bp, Artificial Sequence
  Oligonucleotide for detection of SNP TSC0056080
gtgttgatgaata

SEQ ID NO: 229926 - DNA, 13 bp, Artificial Sequence
  Oligonucleotide for detection of SNP TSC0056080
tattcatcaacac

SEQ ID NO: 229927 - DNA, 13 bp, Artificial Sequence
  Oligonucleotide for detection of SNP TSC0056080
gcgttgttgaata

SEQ ID NO: 229928 - DNA, 13 bp, Artificial Sequence
  Oligonucleotide for detection of SNP TSC0056080
tattcaacaacgc

SEQ ID NO: 229929 - DNA, 13 bp, Artificial Sequence
  Oligonucleotide for detection of SNP TSC0056080
gcgttgatgaata

SEQ ID NO: 229930 - DNA, 13 bp, Artificial Sequence
  Oligonucleotide for detection of SNP TSC0056080
tattcatcaacgc

SEQ ID NO: 229931 - DNA, 13 bp, Artificial Sequence
  Oligonucleotide for detection of SNP TSC0056080
gtgtcgttgaata

SEQ ID NO: 229932 - DNA, 13 bp, Artificial Sequence
  Oligonucleotide for detection of SNP TSC0056080
tattcaacgacac

SEQ ID NO: 229933 - DNA, 13 bp, Artificial Sequence
  Oligonucleotide for detection of SNP TSC0056080
gtgtcgatgaata

SEQ ID NO: 229934 - DNA, 13 bp, Artificial Sequence
  Oligonucleotide for detection of SNP TSC0056080
tattcatcgacac

SEQ ID NO: 229935 - DNA, 13 bp, Artificial Sequence
  Oligonucleotide for detection of SNP TSC0056080
gcgtcgttgaata

SEQ ID NO: 229936 - DNA, 13 bp, Artificial Sequence
  Oligonucleotide for detection of SNP TSC0056080
tattcaacgacgc

SEQ ID NO: 229937 - DNA, 13 bp, Artificial Sequence
  Oligonucleotide for detection of SNP TSC0056080
gcgtcgatgaata

SEQ ID NO: 229938 - DNA, 13 bp, Artificial Sequence
  Oligonucleotide for detection of SNP TSC0056080
tattcatcgacgc

SEQ ID NO: 229939 - DNA, 13 bp, Artificial Sequence
  Oligonucleotide for detection of SNP TSC0005579
agatgttgttgtt

SEQ ID NO: 229940 - DNA, 13 bp, Artificial Sequence
  Oligonucleotide for detection of SNP TSC0005579
aacaacaacatct

SEQ ID NO: 229941 - DNA, 13 bp, Artificial Sequence
  Oligonucleotide for detection of SNP TSC0005579
agatgtcgttgtt

SEQ ID NO: 229942 - DNA, 13 bp, Artificial Sequence
  Oligonucleotide for detection of SNP TSC0005579
aacaacgacatct

SEQ ID NO: 229943 - DNA, 13 bp, Artificial Sequence
  Oligonucleotide for detection of SNP TSC0005579
aataatgatattt

SEQ ID NO: 229944 - DNA, 13 bp, Artificial Sequence
  Oligonucleotide for detection of SNP TSC0005579
aaatatcattatt

SEQ ID NO: 229945 - DNA, 13 bp, Artificial Sequence
  Oligonucleotide for detection of SNP TSC0005579
aataataatattt

SEQ ID NO: 229946 - DNA, 13 bp, Artificial Sequence
  Oligonucleotide for detection of SNP TSC0005579
aaatattattatt

SEQ ID NO: 229947 - DNA, 13 bp, Artificial Sequence
  Oligonucleotide for detection of SNP TSC0005579
aataacgatattt

SEQ ID NO: 229948 - DNA, 13 bp, Artificial Sequence
  Oligonucleotide for detection of SNP TSC0005579
aaatatcgttatt

SEQ ID NO: 229949 - DNA, 13 bp, Artificial Sequence
  Oligonucleotide for detection of SNP TSC0056081
aaagtaagatgtg

SEQ ID NO: 229950 - DNA, 13 bp, Artificial Sequence
  Oligonucleotide for detection of SNP TSC0056081
cacatcttacttt

SEQ ID NO: 229951 - DNA, 13 bp, Artificial Sequence
  Oligonucleotide for detection of SNP TSC0056081
aaagtaggatgtg

SEQ ID NO: 229952 - DNA, 13 bp, Artificial Sequence
  Oligonucleotide for detection of SNP TSC0056081
cacatcctacttt

SEQ ID NO: 229953 - DNA, 13 bp, Artificial Sequence
  Oligonucleotide for detection of SNP TSC0006330
aatgaattttagy

SEQ ID NO: 229954 - DNA, 13 bp, Artificial Sequence
  Oligonucleotide for detection of SNP TSC0006330
rctaaaattcatt

SEQ ID NO: 229955 - DNA, 13 bp, Artificial Sequence
  Oligonucleotide for detection of SNP TSC0006330
aatgaagtttagy

SEQ ID NO: 229956 - DNA, 13 bp, Artificial Sequence
  Oligonucleotide for detection of SNP TSC0006330
rctaaacttcatt

SEQ ID NO: 229957 - DNA, 13 bp, Artificial Sequence
  Oligonucleotide for detection of SNP TSC0006330
gttgaggtttatt

SEQ ID NO: 229958 - DNA, 13 bp, Artificial Sequence
  Oligonucleotide for detection of SNP TSC0006330
aataaacctcaac

SEQ ID NO: 229959 - DNA, 13 bp, Artificial Sequence
  Oligonucleotide for detection of SNP TSC0006330
gttgagatttatt

SEQ ID NO: 229960 - DNA, 13 bp, Artificial Sequence
  Oligonucleotide for detection of SNP TSC0006330
aataaatctcaac

SEQ ID NO: 229961 - DNA, 13 bp, Artificial Sequence
  Oligonucleotide for detection of SNP TSC0006330
gttgagttttatt

SEQ ID NO: 229962 - DNA, 13 bp, Artificial Sequence
  Oligonucleotide for detection of SNP TSC0006330
aataaaactcaac

SEQ ID NO: 229963 - DNA, 13 bp, Artificial Sequence
  Oligonucleotide for detection of SNP TSC0056086
aagttatgataaa

SEQ ID NO: 229964 - DNA, 13 bp, Artificial Sequence
  Oligonucleotide for detection of SNP TSC0056086
tttatcataactt

SEQ ID NO: 229965 - DNA, 13 bp, Artificial Sequence
  Oligonucleotide for detection of SNP TSC0056086
aagttacgataaa

SEQ ID NO: 229966 - DNA, 13 bp, Artificial Sequence
  Oligonucleotide for detection of SNP TSC0056086
tttatcgtaactt

SEQ ID NO: 229967 - DNA, 13 bp, Artificial Sequence
  Oligonucleotide for detection of SNP TSC0056086
tttgttgtaattt

SEQ ID NO: 229968 - DNA, 13 bp, Artificial Sequence
  Oligonucleotide for detection of SNP TSC0056086
aaattacaacaaa

SEQ ID NO: 229969 - DNA, 13 bp, Artificial Sequence
  Oligonucleotide for detection of SNP TSC0056086
tttgttataattt

SEQ ID NO: 229970 - DNA, 13 bp, Artificial Sequence
  Oligonucleotide for detection of SNP TSC0056086
aaattataacaaa

SEQ ID NO: 229971 - DNA, 13 bp, Artificial Sequence
  Oligonucleotide for detection of SNP TSC0056086
tttgtcgtaattt

SEQ ID NO: 229972 - DNA, 13 bp, Artificial Sequence
  Oligonucleotide for detection of SNP TSC0056086
aaattacgacaaa

SEQ ID NO: 229973 - DNA, 13 bp, Artificial Sequence
  Oligonucleotide for detection of SNP TSC0005227
ggttaggttggty

SEQ ID NO: 229974 - DNA, 13 bp, Artificial Sequence
  Oligonucleotide for detection of SNP TSC0005227
raccaacctaacc

SEQ ID NO: 229975 - DNA, 13 bp, Artificial Sequence
  Oligonucleotide for detection of SNP TSC0005227
ggttagattggty

SEQ ID NO: 229976 - DNA, 13 bp, Artificial Sequence
  Oligonucleotide for detection of SNP TSC0005227
raccaatctaacc

SEQ ID NO: 229977 - DNA, 13 bp, Artificial Sequence
  Oligonucleotide for detection of SNP TSC0005228
gtagtggtatgat

SEQ ID NO: 229978 - DNA, 13 bp, Artificial Sequence
  Oligonucleotide for detection of SNP TSC0005228
atcataccactac

SEQ ID NO: 229979 - DNA, 13 bp, Artificial Sequence
  Oligonucleotide for detection of SNP TSC0005228
gtagtgatatgat

SEQ ID NO: 229980 - DNA, 13 bp, Artificial Sequence
  Oligonucleotide for detection of SNP TSC0005228
atcatatcactac

SEQ ID NO: 229981 - DNA, 13 bp, Artificial Sequence
  Oligonucleotide for detection of SNP TSC0056089
gaagtatggattg

SEQ ID NO: 229982 - DNA, 13 bp, Artificial Sequence
  Oligonucleotide for detection of SNP TSC0056089
caatccatacttc

SEQ ID NO: 229983 - DNA, 13 bp, Artificial Sequence
  Oligonucleotide for detection of SNP TSC0056089
gaagtacggattg

SEQ ID NO: 229984 - DNA, 13 bp, Artificial Sequence
  Oligonucleotide for detection of SNP TSC0056089
caatccgtacttc

SEQ ID NO: 229985 - DNA, 13 bp, Artificial Sequence
  Oligonucleotide for detection of SNP TSC0056089
tagtttgtgttty

SEQ ID NO: 229986 - DNA, 13 bp, Artificial Sequence
  Oligonucleotide for detection of SNP TSC0056089
raaacacaaacta

SEQ ID NO: 229987 - DNA, 13 bp, Artificial Sequence
  Oligonucleotide for detection of SNP TSC0056089
tagtttatgttty

SEQ ID NO: 229988 - DNA, 13 bp, Artificial Sequence
  Oligonucleotide for detection of SNP TSC0056089
raaacataaacta

SEQ ID NO: 229989 - DNA, 13 bp, Artificial Sequence
  Oligonucleotide for detection of SNP TSC0056089
tagttcgtgttty

SEQ ID NO: 229990 - DNA, 13 bp, Artificial Sequence
  Oligonucleotide for detection of SNP TSC0056089
raaacacgaacta

SEQ ID NO: 229991 - DNA, 13 bp, Artificial Sequence
  Oligonucleotide for detection of SNP TSC0004569
gaggagatatttg

SEQ ID NO: 229992 - DNA, 13 bp, Artificial Sequence
  Oligonucleotide for detection of SNP TSC0004569
caaatatctcctc

SEQ ID NO: 229993 - DNA, 13 bp, Artificial Sequence
  Oligonucleotide for detection of SNP TSC0004569
gaggagttatttg

SEQ ID NO: 229994 - DNA, 13 bp, Artificial Sequence
  Oligonucleotide for detection of SNP TSC0004569
caaataactcctc

SEQ ID NO: 229995 - DNA, 13 bp, Artificial Sequence
  Oligonucleotide for detection of SNP TSC0004569
taggtatttttty

SEQ ID NO: 229996 - DNA, 13 bp, Artificial Sequence
  Oligonucleotide for detection of SNP TSC0004569
raaaaaataccta

SEQ ID NO: 229997 - DNA, 13 bp, Artificial Sequence
  Oligonucleotide for detection of SNP TSC0004569
taggtagttttty

SEQ ID NO: 229998 - DNA, 13 bp, Artificial Sequence
  Oligonucleotide for detection of SNP TSC0004569
raaaaactaccta

SEQ ID NO: 229999 - DNA, 13 bp, Artificial Sequence
  Oligonucleotide for detection of SNP TSC0005143
ataatagttatta

SEQ ID NO: 230000 - DNA, 13 bp, Artificial Sequence
  Oligonucleotide for detection of SNP TSC0005143
taataactattat

SEQ ID NO: 230001 - DNA, 13 bp, Artificial Sequence
  Oligonucleotide for detection of SNP TSC0005144
tgtttggttgttt

SEQ ID NO: 230002 - DNA, 13 bp, Artificial Sequence
  Oligonucleotide for detection of SNP TSC0005144
aaacaaccaaaca

SEQ ID NO: 230003 - DNA, 13 bp, Artificial Sequence
  Oligonucleotide for detection of SNP TSC0005144
tgtttgattgttt

SEQ ID NO: 230004 - DNA, 13 bp, Artificial Sequence
  Oligonucleotide for detection of SNP TSC0005144
aaacaatcaaaca

SEQ ID NO: 230005 - DNA, 13 bp, Artificial Sequence
  Oligonucleotide for detection of SNP TSC0005144
tgtttggtcgttt

SEQ ID NO: 230006 - DNA, 13 bp, Artificial Sequence
  Oligonucleotide for detection of SNP TSC0005144
aaacgaccaaaca

SEQ ID NO: 230007 - DNA, 13 bp, Artificial Sequence
  Oligonucleotide for detection of SNP TSC0005144
tgtttgatcgttt

SEQ ID NO: 230008 - DNA, 13 bp, Artificial Sequence
  Oligonucleotide for detection of SNP TSC0005144
aaacgatcaaaca

SEQ ID NO: 230009 - DNA, 13 bp, Artificial Sequence
  Oligonucleotide for detection of SNP TSC0005145
gttttaattaagg

SEQ ID NO: 230010 - DNA, 13 bp, Artificial Sequence
  Oligonucleotide for detection of SNP TSC0005145
ccttaattaaaac

SEQ ID NO: 230011 - DNA, 13 bp, Artificial Sequence
  Oligonucleotide for detection of SNP TSC0005145
gttttagttaagg

SEQ ID NO: 230012 - DNA, 13 bp, Artificial Sequence
  Oligonucleotide for detection of SNP TSC0005145
ccttaactaaaac

SEQ ID NO: 230013 - DNA, 13 bp, Artificial Sequence
  Oligonucleotide for detection of SNP TSC0056097
aaatgttgttagy

SEQ ID NO: 230014 - DNA, 13 bp, Artificial Sequence
  Oligonucleotide for detection of SNP TSC0056097
rctaacaacattt

SEQ ID NO: 230015 - DNA, 13 bp, Artificial Sequence
  Oligonucleotide for detection of SNP TSC0056097
aaatgtcgttagy

SEQ ID NO: 230016 - DNA, 13 bp, Artificial Sequence
  Oligonucleotide for detection of SNP TSC0056097
rctaacgacattt

SEQ ID NO: 230017 - DNA, 13 bp, Artificial Sequence
  Oligonucleotide for detection of SNP TSC0056097
gttagtggtattt

SEQ ID NO: 230018 - DNA, 13 bp, Artificial Sequence
  Oligonucleotide for detection of SNP TSC0056097
aaataccactaac

SEQ ID NO: 230019 - DNA, 13 bp, Artificial Sequence
  Oligonucleotide for detection of SNP TSC0056097
gttagtagtattt

SEQ ID NO: 230020 - DNA, 13 bp, Artificial Sequence
  Oligonucleotide for detection of SNP TSC0056097
aaatactactaac

SEQ ID NO: 230021 - DNA, 13 bp, Artificial Sequence
  Oligonucleotide for detection of SNP TSC0056097
gttagcggtattt

SEQ ID NO: 230022 - DNA, 13 bp, Artificial Sequence
  Oligonucleotide for detection of SNP TSC0056097
aaataccgctaac

SEQ ID NO: 230023 - DNA, 13 bp, Artificial Sequence
  Oligonucleotide for detection of SNP TSC0056098
aattttatataga

SEQ ID NO: 230024 - DNA, 13 bp, Artificial Sequence
  Oligonucleotide for detection of SNP TSC0056098
tctatataaaatt

SEQ ID NO: 230025 - DNA, 13 bp, Artificial Sequence
  Oligonucleotide for detection of SNP TSC0056098
aattttttataga

SEQ ID NO: 230026 - DNA, 13 bp, Artificial Sequence
  Oligonucleotide for detection of SNP TSC0056098
tctataaaaaatt

SEQ ID NO: 230027 - DNA, 13 bp, Artificial Sequence
  Oligonucleotide for detection of SNP TSC0056098
tttatgtagaatt

SEQ ID NO: 230028 - DNA, 13 bp, Artificial Sequence
  Oligonucleotide for detection of SNP TSC0056098
aattctacataaa

SEQ ID NO: 230029 - DNA, 13 bp, Artificial Sequence
  Oligonucleotide for detection of SNP TSC0056098
tttatggagaatt

SEQ ID NO: 230030 - DNA, 13 bp, Artificial Sequence
  Oligonucleotide for detection of SNP TSC0056098
aattctccataaa

SEQ ID NO: 230031 - DNA, 13 bp, Artificial Sequence
  Oligonucleotide for detection of SNP TSC0056099
agttatattaaaa

SEQ ID NO: 230032 - DNA, 13 bp, Artificial Sequence
  Oligonucleotide for detection of SNP TSC0056099
ttttaatataact

SEQ ID NO: 230033 - DNA, 13 bp, Artificial Sequence
  Oligonucleotide for detection of SNP TSC0056099
agttatgttaaaa

SEQ ID NO: 230034 - DNA, 13 bp, Artificial Sequence
  Oligonucleotide for detection of SNP TSC0056099
ttttaacataact

SEQ ID NO: 230035 - DNA, 13 bp, Artificial Sequence
  Oligonucleotide for detection of SNP TSC0056099
agttacgttaaaa

SEQ ID NO: 230036 - DNA, 13 bp, Artificial Sequence
  Oligonucleotide for detection of SNP TSC0056099
ttttaacgtaact

SEQ ID NO: 230037 - DNA, 13 bp, Artificial Sequence
  Oligonucleotide for detection of SNP TSC0056099
ttttagtgtgatt

SEQ ID NO: 230038 - DNA, 13 bp, Artificial Sequence
  Oligonucleotide for detection of SNP TSC0056099
aatcacactaaaa

SEQ ID NO: 230039 - DNA, 13 bp, Artificial Sequence
  Oligonucleotide for detection of SNP TSC0056099
ttttagcgtgatt

SEQ ID NO: 230040 - DNA, 13 bp, Artificial Sequence
  Oligonucleotide for detection of SNP TSC0056099
aatcacgctaaaa

SEQ ID NO: 230041 - DNA, 13 bp, Artificial Sequence
  Oligonucleotide for detection of SNP TSC0056100
tattaatagttat

SEQ ID NO: 230042 - DNA, 13 bp, Artificial Sequence
  Oligonucleotide for detection of SNP TSC0056100
ataactattaata

SEQ ID NO: 230043 - DNA, 13 bp, Artificial Sequence
  Oligonucleotide for detection of SNP TSC0056100
tattaagagttat

SEQ ID NO: 230044 - DNA, 13 bp, Artificial Sequence
  Oligonucleotide for detection of SNP TSC0056100
ataactcttaata

SEQ ID NO: 230045 - DNA, 13 bp, Artificial Sequence
  Oligonucleotide for detection of SNP TSC0056100
ataattgttgatg

SEQ ID NO: 230046 - DNA, 13 bp, Artificial Sequence
  Oligonucleotide for detection of SNP TSC0056100
catcaacaattat

SEQ ID NO: 230047 - DNA, 13 bp, Artificial Sequence
  Oligonucleotide for detection of SNP TSC0056100
ataatttttgatg

SEQ ID NO: 230048 - DNA, 13 bp, Artificial Sequence
  Oligonucleotide for detection of SNP TSC0056100
catcaaaaattat

SEQ ID NO: 230049 - DNA, 13 bp, Artificial Sequence
  Oligonucleotide for detection of SNP TSC0056102
attattaagagta

SEQ ID NO: 230050 - DNA, 13 bp, Artificial Sequence
  Oligonucleotide for detection of SNP TSC0056102
tactcttaataat

SEQ ID NO: 230051 - DNA, 13 bp, Artificial Sequence
  Oligonucleotide for detection of SNP TSC0056102
attattgagagta

SEQ ID NO: 230052 - DNA, 13 bp, Artificial Sequence
  Oligonucleotide for detection of SNP TSC0056102
tactctcaataat

SEQ ID NO: 230053 - DNA, 13 bp, Artificial Sequence
  Oligonucleotide for detection of SNP TSC0056102
attatcgagagta

SEQ ID NO: 230054 - DNA, 13 bp, Artificial Sequence
  Oligonucleotide for detection of SNP TSC0056102
tactctcgataat

SEQ ID NO: 230055 - DNA, 13 bp, Artificial Sequence
  Oligonucleotide for detection of SNP TSC0056102
tatttttgatgat

SEQ ID NO: 230056 - DNA, 13 bp, Artificial Sequence
  Oligonucleotide for detection of SNP TSC0056102
atcatcaaaaata

SEQ ID NO: 230057 - DNA, 13 bp, Artificial Sequence
  Oligonucleotide for detection of SNP TSC0056102
tattttcgatgat

SEQ ID NO: 230058 - DNA, 13 bp, Artificial Sequence
  Oligonucleotide for detection of SNP TSC0056102
atcatcgaaaata

SEQ ID NO: 230059 - DNA, 13 bp, Artificial Sequence
  Oligonucleotide for detection of SNP TSC0056104
tagattattttag

SEQ ID NO: 230060 - DNA, 13 bp, Artificial Sequence
  Oligonucleotide for detection of SNP TSC0056104
ctaaaataatcta

SEQ ID NO: 230061 - DNA, 13 bp, Artificial Sequence
  Oligonucleotide for detection of SNP TSC0056104
tagattgttttag

SEQ ID NO: 230062 - DNA, 13 bp, Artificial Sequence
  Oligonucleotide for detection of SNP TSC0056104
ctaaaacaatcta

SEQ ID NO: 230063 - DNA, 13 bp, Artificial Sequence
  Oligonucleotide for detection of SNP TSC0056108
gaggaagatagag

SEQ ID NO: 230064 - DNA, 13 bp, Artificial Sequence
  Oligonucleotide for detection of SNP TSC0056108
ctctatcttcctc

SEQ ID NO: 230065 - DNA, 13 bp, Artificial Sequence
  Oligonucleotide for detection of SNP TSC0056108
gaggaaaatagag

SEQ ID NO: 230066 - DNA, 13 bp, Artificial Sequence
  Oligonucleotide for detection of SNP TSC0056108
ctctattttcctc

SEQ ID NO: 230067 - DNA, 13 bp, Artificial Sequence
  Oligonucleotide for detection of SNP TSC0056109
ggttgaatattay

SEQ ID NO: 230068 - DNA, 13 bp, Artificial Sequence
  Oligonucleotide for detection of SNP TSC0056109
rtaatattcaacc

SEQ ID NO: 230069 - DNA, 13 bp, Artificial Sequence
  Oligonucleotide for detection of SNP TSC0056109
ggttgagtattay

SEQ ID NO: 230070 - DNA, 13 bp, Artificial Sequence
  Oligonucleotide for detection of SNP TSC0056109
rtaatactcaacc

SEQ ID NO: 230071 - DNA, 13 bp, Artificial Sequence
  Oligonucleotide for detection of SNP TSC0056110
ataaaggtgataa

SEQ ID NO: 230072 - DNA, 13 bp, Artificial Sequence
  Oligonucleotide for detection of SNP TSC0056110
ttatcacctttat

SEQ ID NO: 230073 - DNA, 13 bp, Artificial Sequence
  Oligonucleotide for detection of SNP TSC0056110
ataaagatgataa

SEQ ID NO: 230074 - DNA, 13 bp, Artificial Sequence
  Oligonucleotide for detection of SNP TSC0056110
ttatcatctttat

SEQ ID NO: 230075 - DNA, 13 bp, Artificial Sequence
  Oligonucleotide for detection of SNP TSC0056114
tgggggattttga

SEQ ID NO: 230076 - DNA, 13 bp, Artificial Sequence
  Oligonucleotide for detection of SNP TSC0056114
tcaaaatccccca

SEQ ID NO: 230077 - DNA, 13 bp, Artificial Sequence
  Oligonucleotide for detection of SNP TSC0056114
tgggggtttttga

SEQ ID NO: 230078 - DNA, 13 bp, Artificial Sequence
  Oligonucleotide for detection of SNP TSC0056114
tcaaaaaccccca

SEQ ID NO: 230079 - DNA, 13 bp, Artificial Sequence
  Oligonucleotide for detection of SNP TSC0056114
cgggggattttga

SEQ ID NO: 230080 - DNA, 13 bp, Artificial Sequence
  Oligonucleotide for detection of SNP TSC0056114
tcaaaatcccccg

SEQ ID NO: 230081 - DNA, 13 bp, Artificial Sequence
  Oligonucleotide for detection of SNP TSC0056114
cgggggtttttga

SEQ ID NO: 230082 - DNA, 13 bp, Artificial Sequence
  Oligonucleotide for detection of SNP TSC0056114
tcaaaaacccccg

SEQ ID NO: 230083 - DNA, 13 bp, Artificial Sequence
  Oligonucleotide for detection of SNP TSC0056114
ttaagattttttg

SEQ ID NO: 230084 - DNA, 13 bp, Artificial Sequence
  Oligonucleotide for detection of SNP TSC0056114
caaaaaatcttaa

SEQ ID NO: 230085 - DNA, 13 bp, Artificial Sequence
  Oligonucleotide for detection of SNP TSC0056114
ttaagatttttcg

SEQ ID NO: 230086 - DNA, 13 bp, Artificial Sequence
  Oligonucleotide for detection of SNP TSC0056114
cgaaaaatcttaa

SEQ ID NO: 230087 - DNA, 13 bp, Artificial Sequence
  Oligonucleotide for detection of SNP TSC0056114
ttaagaattttcg

SEQ ID NO: 230088 - DNA, 13 bp, Artificial Sequence
  Oligonucleotide for detection of SNP TSC0056114
cgaaaattcttaa

SEQ ID NO: 230089 - DNA, 13 bp, Artificial Sequence
  Oligonucleotide for detection of SNP TSC0056115
tataattttatay

SEQ ID NO: 230090 - DNA, 13 bp, Artificial Sequence
  Oligonucleotide for detection of SNP TSC0056115
rtataaaattata

SEQ ID NO: 230091 - DNA, 13 bp, Artificial Sequence
  Oligonucleotide for detection of SNP TSC0056115
gtataaagttgta

SEQ ID NO: 230092 - DNA, 13 bp, Artificial Sequence
  Oligonucleotide for detection of SNP TSC0056115
tacaactttatac

SEQ ID NO: 230093 - DNA, 13 bp, Artificial Sequence
  Oligonucleotide for detection of SNP TSC0056115
gtataatgttgta

SEQ ID NO: 230094 - DNA, 13 bp, Artificial Sequence
  Oligonucleotide for detection of SNP TSC0056115
tacaacattatac

SEQ ID NO: 230095 - DNA, 13 bp, Artificial Sequence
  Oligonucleotide for detection of SNP TSC0056115
gtataacgttgta

SEQ ID NO: 230096 - DNA, 13 bp, Artificial Sequence
  Oligonucleotide for detection of SNP TSC0056115
tacaacgttatac

SEQ ID NO: 230097 - DNA, 13 bp, Artificial Sequence
  Oligonucleotide for detection of SNP TSC0056116
atttatatttgta

SEQ ID NO: 230098 - DNA, 13 bp, Artificial Sequence
  Oligonucleotide for detection of SNP TSC0056116
tacaaatataaat

SEQ ID NO: 230099 - DNA, 13 bp, Artificial Sequence
  Oligonucleotide for detection of SNP TSC0056116
atttatttttgta

SEQ ID NO: 230100 - DNA, 13 bp, Artificial Sequence
  Oligonucleotide for detection of SNP TSC0056116
tacaaaaataaat

SEQ ID NO: 230101 - DNA, 13 bp, Artificial Sequence
  Oligonucleotide for detection of SNP TSC0056116
tataaatgtaagt

SEQ ID NO: 230102 - DNA, 13 bp, Artificial Sequence
  Oligonucleotide for detection of SNP TSC0056116
acttacatttata

SEQ ID NO: 230103 - DNA, 13 bp, Artificial Sequence
  Oligonucleotide for detection of SNP TSC0056116
tataaaagtaagt

SEQ ID NO: 230104 - DNA, 13 bp, Artificial Sequence
  Oligonucleotide for detection of SNP TSC0056116
acttacttttata

SEQ ID NO: 230105 - DNA, 13 bp, Artificial Sequence
  Oligonucleotide for detection of SNP TSC0056117
gggattgttaaag

SEQ ID NO: 230106 - DNA, 13 bp, Artificial Sequence
  Oligonucleotide for detection of SNP TSC0056117
ctttaacaatccc

SEQ ID NO: 230107 - DNA, 13 bp, Artificial Sequence
  Oligonucleotide for detection of SNP TSC0056117
gggattattaaag

SEQ ID NO: 230108 - DNA, 13 bp, Artificial Sequence
  Oligonucleotide for detection of SNP TSC0056117
ctttaataatccc

SEQ ID NO: 230109 - DNA, 13 bp, Artificial Sequence
  Oligonucleotide for detection of SNP TSC0056118
aaaatttgagaaa

SEQ ID NO: 230110 - DNA, 13 bp, Artificial Sequence
  Oligonucleotide for detection of SNP TSC0056118
tttctcaaatttt

SEQ ID NO: 230111 - DNA, 13 bp, Artificial Sequence
  Oligonucleotide for detection of SNP TSC0056118
aaaattggagaaa

SEQ ID NO: 230112 - DNA, 13 bp, Artificial Sequence
  Oligonucleotide for detection of SNP TSC0056118
tttctccaatttt

SEQ ID NO: 230113 - DNA, 13 bp, Artificial Sequence
  Oligonucleotide for detection of SNP TSC0056119
gtttgaggggtta

SEQ ID NO: 230114 - DNA, 13 bp, Artificial Sequence
  Oligonucleotide for detection of SNP TSC0056119
taacccctcaaac

SEQ ID NO: 230115 - DNA, 13 bp, Artificial Sequence
  Oligonucleotide for detection of SNP TSC0056119
gtttgaagggtta

SEQ ID NO: 230116 - DNA, 13 bp, Artificial Sequence
  Oligonucleotide for detection of SNP TSC0056119
taacccttcaaac

SEQ ID NO: 230117 - DNA, 13 bp, Artificial Sequence
  Oligonucleotide for detection of SNP TSC0056121
gggtaatgtttag

SEQ ID NO: 230118 - DNA, 13 bp, Artificial Sequence
  Oligonucleotide for detection of SNP TSC0056121
ctaaacattaccc

SEQ ID NO: 230119 - DNA, 13 bp, Artificial Sequence
  Oligonucleotide for detection of SNP TSC0056121
gggtaaggtttag

SEQ ID NO: 230120 - DNA, 13 bp, Artificial Sequence
  Oligonucleotide for detection of SNP TSC0056121
ctaaaccttaccc

SEQ ID NO: 230121 - DNA, 13 bp, Artificial Sequence
  Oligonucleotide for detection of SNP TSC0056121
ttagatattatty

SEQ ID NO: 230122 - DNA, 13 bp, Artificial Sequence
  Oligonucleotide for detection of SNP TSC0056121
raataatatctaa

SEQ ID NO: 230123 - DNA, 13 bp, Artificial Sequence
  Oligonucleotide for detection of SNP TSC0056121
ttagattttatty

SEQ ID NO: 230124 - DNA, 13 bp, Artificial Sequence
  Oligonucleotide for detection of SNP TSC0056121
raataaaatctaa

SEQ ID NO: 230125 - DNA, 13 bp, Artificial Sequence
  Oligonucleotide for detection of SNP TSC0056122
aaggtttagttat

SEQ ID NO: 230126 - DNA, 13 bp, Artificial Sequence
  Oligonucleotide for detection of SNP TSC0056122
ataactaaacctt

SEQ ID NO: 230127 - DNA, 13 bp, Artificial Sequence
  Oligonucleotide for detection of SNP TSC0056122
aaggttgagttat

SEQ ID NO: 230128 - DNA, 13 bp, Artificial Sequence
  Oligonucleotide for detection of SNP TSC0056122
ataactcaacctt

SEQ ID NO: 230129 - DNA, 13 bp, Artificial Sequence
  Oligonucleotide for detection of SNP TSC0056122
aaggtcgagttat

SEQ ID NO: 230130 - DNA, 13 bp, Artificial Sequence
  Oligonucleotide for detection of SNP TSC0056122
ataactcgacctt

SEQ ID NO: 230131 - DNA, 13 bp, Artificial Sequence
  Oligonucleotide for detection of SNP TSC0056122
atgattagatttt

SEQ ID NO: 230132 - DNA, 13 bp, Artificial Sequence
  Oligonucleotide for detection of SNP TSC0056122
aaaatctaatcat

SEQ ID NO: 230133 - DNA, 13 bp, Artificial Sequence
  Oligonucleotide for detection of SNP TSC0056122
atgatttgatttt

SEQ ID NO: 230134 - DNA, 13 bp, Artificial Sequence
  Oligonucleotide for detection of SNP TSC0056122
aaaatcaaatcat

SEQ ID NO: 230135 - DNA, 13 bp, Artificial Sequence
  Oligonucleotide for detection of SNP TSC0056122
atgattcgatttt

SEQ ID NO: 230136 - DNA, 13 bp, Artificial Sequence
  Oligonucleotide for detection of SNP TSC0056122
aaaatcgaatcat

SEQ ID NO: 230137 - DNA, 13 bp, Artificial Sequence
  Oligonucleotide for detection of SNP TSC0056123
gtgtttatttata

SEQ ID NO: 230138 - DNA, 13 bp, Artificial Sequence
  Oligonucleotide for detection of SNP TSC0056123
tataaataaacac

SEQ ID NO: 230139 - DNA, 13 bp, Artificial Sequence
  Oligonucleotide for detection of SNP TSC0056123
gtgtttgtttata

SEQ ID NO: 230140 - DNA, 13 bp, Artificial Sequence
  Oligonucleotide for detection of SNP TSC0056123
tataaacaaacac

SEQ ID NO: 230141 - DNA, 13 bp, Artificial Sequence
  Oligonucleotide for detection of SNP TSC0056123
gtgttcgtttata

SEQ ID NO: 230142 - DNA, 13 bp, Artificial Sequence
  Oligonucleotide for detection of SNP TSC0056123
tataaacgaacac

SEQ ID NO: 230143 - DNA, 13 bp, Artificial Sequence
  Oligonucleotide for detection of SNP TSC0056123
tataggtgagtay

SEQ ID NO: 230144 - DNA, 13 bp, Artificial Sequence
  Oligonucleotide for detection of SNP TSC0056123
rtactcacctata

SEQ ID NO: 230145 - DNA, 13 bp, Artificial Sequence
  Oligonucleotide for detection of SNP TSC0056123
tataggcgagtay

SEQ ID NO: 230146 - DNA, 13 bp, Artificial Sequence
  Oligonucleotide for detection of SNP TSC0056123
rtactcgcctata

SEQ ID NO: 230147 - DNA, 13 bp, Artificial Sequence
  Oligonucleotide for detection of SNP TSC0056124
attttattttgag

SEQ ID NO: 230148 - DNA, 13 bp, Artificial Sequence
  Oligonucleotide for detection of SNP TSC0056124
ctcaaaataaaat

SEQ ID NO: 230149 - DNA, 13 bp, Artificial Sequence
  Oligonucleotide for detection of SNP TSC0056124
attttagtttgag

SEQ ID NO: 230150 - DNA, 13 bp, Artificial Sequence
  Oligonucleotide for detection of SNP TSC0056124
ctcaaactaaaat

SEQ ID NO: 230151 - DNA, 13 bp, Artificial Sequence
  Oligonucleotide for detection of SNP TSC0008992
agaattgtaaata

SEQ ID NO: 230152 - DNA, 13 bp, Artificial Sequence
  Oligonucleotide for detection of SNP TSC0008992
tatttacaattct

SEQ ID NO: 230153 - DNA, 13 bp, Artificial Sequence
  Oligonucleotide for detection of SNP TSC0008992
agaattataaata

SEQ ID NO: 230154 - DNA, 13 bp, Artificial Sequence
  Oligonucleotide for detection of SNP TSC0008992
tatttataattct

SEQ ID NO: 230155 - DNA, 13 bp, Artificial Sequence
  Oligonucleotide for detection of SNP TSC0008215
atttaaataggag

SEQ ID NO: 230156 - DNA, 13 bp, Artificial Sequence
  Oligonucleotide for detection of SNP TSC0008215
ctcctatttaaat

SEQ ID NO: 230157 - DNA, 13 bp, Artificial Sequence
  Oligonucleotide for detection of SNP TSC0008215
atttaagtaggag

SEQ ID NO: 230158 - DNA, 13 bp, Artificial Sequence
  Oligonucleotide for detection of SNP TSC0008215
ctcctacttaaat

SEQ ID NO: 230159 - DNA, 13 bp, Artificial Sequence
  Oligonucleotide for detection of SNP TSC0005125
tatttggtggttt

SEQ ID NO: 230160 - DNA, 13 bp, Artificial Sequence
  Oligonucleotide for detection of SNP TSC0005125
aaaccaccaaata

SEQ ID NO: 230161 - DNA, 13 bp, Artificial Sequence
  Oligonucleotide for detection of SNP TSC0005125
tatttgatggttt

SEQ ID NO: 230162 - DNA, 13 bp, Artificial Sequence
  Oligonucleotide for detection of SNP TSC0005125
aaaccatcaaata

SEQ ID NO: 230163 - DNA, 13 bp, Artificial Sequence
  Oligonucleotide for detection of SNP TSC0005126
tttttagttaaga

SEQ ID NO: 230164 - DNA, 13 bp, Artificial Sequence
  Oligonucleotide for detection of SNP TSC0005126
tcttaactaaaaa

SEQ ID NO: 230165 - DNA, 13 bp, Artificial Sequence
  Oligonucleotide for detection of SNP TSC0005126
tttttaattaaga

SEQ ID NO: 230166 - DNA, 13 bp, Artificial Sequence
  Oligonucleotide for detection of SNP TSC0005126
tcttaattaaaaa

SEQ ID NO: 230167 - DNA, 13 bp, Artificial Sequence
  Oligonucleotide for detection of SNP TSC0056130
ttattaagtttag

SEQ ID NO: 230168 - DNA, 13 bp, Artificial Sequence
  Oligonucleotide for detection of SNP TSC0056130
ctaaacttaataa

SEQ ID NO: 230169 - DNA, 13 bp, Artificial Sequence
  Oligonucleotide for detection of SNP TSC0056135
aggtgggtaagat

SEQ ID NO: 230170 - DNA, 13 bp, Artificial Sequence
  Oligonucleotide for detection of SNP TSC0056135
atcttacccacct

SEQ ID NO: 230171 - DNA, 13 bp, Artificial Sequence
  Oligonucleotide for detection of SNP TSC0056135
aggtggataagat

SEQ ID NO: 230172 - DNA, 13 bp, Artificial Sequence
  Oligonucleotide for detection of SNP TSC0056135
atcttatccacct

SEQ ID NO: 230173 - DNA, 13 bp, Artificial Sequence
  Oligonucleotide for detection of SNP TSC0056136
tgtttaaggttty

SEQ ID NO: 230174 - DNA, 13 bp, Artificial Sequence
  Oligonucleotide for detection of SNP TSC0056136
raaaccttaaaca

SEQ ID NO: 230175 - DNA, 13 bp, Artificial Sequence
  Oligonucleotide for detection of SNP TSC0056136
tgtttagggttty

SEQ ID NO: 230176 - DNA, 13 bp, Artificial Sequence
  Oligonucleotide for detection of SNP TSC0056136
raaaccctaaaca

SEQ ID NO: 230177 - DNA, 13 bp, Artificial Sequence
  Oligonucleotide for detection of SNP TSC0056136
cgtttaaggttty

SEQ ID NO: 230178 - DNA, 13 bp, Artificial Sequence
  Oligonucleotide for detection of SNP TSC0056136
raaaccttaaacg

SEQ ID NO: 230179 - DNA, 13 bp, Artificial Sequence
  Oligonucleotide for detection of SNP TSC0056136
cgtttagggttty

SEQ ID NO: 230180 - DNA, 13 bp, Artificial Sequence
  Oligonucleotide for detection of SNP TSC0056136
raaaccctaaacg

SEQ ID NO: 230181 - DNA, 13 bp, Artificial Sequence
  Oligonucleotide for detection of SNP TSC0056137
gatttaataatag

SEQ ID NO: 230182 - DNA, 13 bp, Artificial Sequence
  Oligonucleotide for detection of SNP TSC0056137
ctattattaaatc

SEQ ID NO: 230183 - DNA, 13 bp, Artificial Sequence
  Oligonucleotide for detection of SNP TSC0056137
gatttagtaatag

SEQ ID NO: 230184 - DNA, 13 bp, Artificial Sequence
  Oligonucleotide for detection of SNP TSC0056137
ctattactaaatc

SEQ ID NO: 230185 - DNA, 13 bp, Artificial Sequence
  Oligonucleotide for detection of SNP TSC0056139
gttaagtaattag

SEQ ID NO: 230186 - DNA, 13 bp, Artificial Sequence
  Oligonucleotide for detection of SNP TSC0056139
ctaattacttaac

SEQ ID NO: 230187 - DNA, 13 bp, Artificial Sequence
  Oligonucleotide for detection of SNP TSC0056139
gttaaggaattag

SEQ ID NO: 230188 - DNA, 13 bp, Artificial Sequence
  Oligonucleotide for detection of SNP TSC0056139
ctaattccttaac

SEQ ID NO: 230189 - DNA, 13 bp, Artificial Sequence
  Oligonucleotide for detection of SNP TSC0056139
ttgattgtttggy

SEQ ID NO: 230190 - DNA, 13 bp, Artificial Sequence
  Oligonucleotide for detection of SNP TSC0056139
rccaaacaatcaa

SEQ ID NO: 230191 - DNA, 13 bp, Artificial Sequence
  Oligonucleotide for detection of SNP TSC0056139
ttgattttttggy

SEQ ID NO: 230192 - DNA, 13 bp, Artificial Sequence
  Oligonucleotide for detection of SNP TSC0056139
rccaaaaaatcaa

SEQ ID NO: 230193 - DNA, 13 bp, Artificial Sequence
  Oligonucleotide for detection of SNP TSC0056140
taaatgtgtggay

SEQ ID NO: 230194 - DNA, 13 bp, Artificial Sequence
  Oligonucleotide for detection of SNP TSC0056140
rtccacacattta

SEQ ID NO: 230195 - DNA, 13 bp, Artificial Sequence
  Oligonucleotide for detection of SNP TSC0056140
taaatgcgtggay

SEQ ID NO: 230196 - DNA, 13 bp, Artificial Sequence
  Oligonucleotide for detection of SNP TSC0056140
rtccacgcattta

SEQ ID NO: 230197 - DNA, 13 bp, Artificial Sequence
  Oligonucleotide for detection of SNP TSC0056140
gtttacgtatttg

SEQ ID NO: 230198 - DNA, 13 bp, Artificial Sequence
  Oligonucleotide for detection of SNP TSC0056140
caaatacgtaaac

SEQ ID NO: 230199 - DNA, 13 bp, Artificial Sequence
  Oligonucleotide for detection of SNP TSC0056141
gtttttaaggaag

SEQ ID NO: 230200 - DNA, 13 bp, Artificial Sequence
  Oligonucleotide for detection of SNP TSC0056141
cttccttaaaaac

SEQ ID NO: 230201 - DNA, 13 bp, Artificial Sequence
  Oligonucleotide for detection of SNP TSC0056141
gtttttgaggaag

SEQ ID NO: 230202 - DNA, 13 bp, Artificial Sequence
  Oligonucleotide for detection of SNP TSC0056141
cttcctcaaaaac

SEQ ID NO: 230203 - DNA, 13 bp, Artificial Sequence
  Oligonucleotide for detection of SNP TSC0006184
gtagaaatagtta

SEQ ID NO: 230204 - DNA, 13 bp, Artificial Sequence
  Oligonucleotide for detection of SNP TSC0006184
taactatttctac

SEQ ID NO: 230205 - DNA, 13 bp, Artificial Sequence
  Oligonucleotide for detection of SNP TSC0006184
gtagaagtagtta

SEQ ID NO: 230206 - DNA, 13 bp, Artificial Sequence
  Oligonucleotide for detection of SNP TSC0006184
taactacttctac

SEQ ID NO: 230207 - DNA, 13 bp, Artificial Sequence
  Oligonucleotide for detection of SNP TSC0006353
agaaataaaaata

SEQ ID NO: 230208 - DNA, 13 bp, Artificial Sequence
  Oligonucleotide for detection of SNP TSC0006353
tatttttatttct

SEQ ID NO: 230209 - DNA, 13 bp, Artificial Sequence
  Oligonucleotide for detection of SNP TSC0006353
agaaatgaaaata

SEQ ID NO: 230210 - DNA, 13 bp, Artificial Sequence
  Oligonucleotide for detection of SNP TSC0006353
tattttcatttct

SEQ ID NO: 230211 - DNA, 13 bp, Artificial Sequence
  Oligonucleotide for detection of SNP TSC0056143
agaggatgtttgg

SEQ ID NO: 230212 - DNA, 13 bp, Artificial Sequence
  Oligonucleotide for detection of SNP TSC0056143
ccaaacatcctct

SEQ ID NO: 230213 - DNA, 13 bp, Artificial Sequence
  Oligonucleotide for detection of SNP TSC0056143
agaggaggtttgg

SEQ ID NO: 230214 - DNA, 13 bp, Artificial Sequence
  Oligonucleotide for detection of SNP TSC0056143
ccaaacctcctct

SEQ ID NO: 230215 - DNA, 13 bp, Artificial Sequence
  Oligonucleotide for detection of SNP TSC0056143
agaggacgtttgg

SEQ ID NO: 230216 - DNA, 13 bp, Artificial Sequence
  Oligonucleotide for detection of SNP TSC0056143
ccaaacgtcctct

SEQ ID NO: 230217 - DNA, 13 bp, Artificial Sequence
  Oligonucleotide for detection of SNP TSC0056143
ttaaatttttttt

SEQ ID NO: 230218 - DNA, 13 bp, Artificial Sequence
  Oligonucleotide for detection of SNP TSC0056143
aaaaaaaatttaa

SEQ ID NO: 230219 - DNA, 13 bp, Artificial Sequence
  Oligonucleotide for detection of SNP TSC0008467
agttaaattatat

SEQ ID NO: 230220 - DNA, 13 bp, Artificial Sequence
  Oligonucleotide for detection of SNP TSC0008467
atataatttaact

SEQ ID NO: 230221 - DNA, 13 bp, Artificial Sequence
  Oligonucleotide for detection of SNP TSC0008467
agttaatttatat

SEQ ID NO: 230222 - DNA, 13 bp, Artificial Sequence
  Oligonucleotide for detection of SNP TSC0008467
atataaattaact

SEQ ID NO: 230223 - DNA, 13 bp, Artificial Sequence
  Oligonucleotide for detection of SNP TSC0008467
atatggtttggtt

SEQ ID NO: 230224 - DNA, 13 bp, Artificial Sequence
  Oligonucleotide for detection of SNP TSC0008467
aaccaaaccatat

SEQ ID NO: 230225 - DNA, 13 bp, Artificial Sequence
  Oligonucleotide for detection of SNP TSC0008467
atatgggttggtt

SEQ ID NO: 230226 - DNA, 13 bp, Artificial Sequence
  Oligonucleotide for detection of SNP TSC0008467
aaccaacccatat

SEQ ID NO: 230227 - DNA, 13 bp, Artificial Sequence
  Oligonucleotide for detection of SNP TSC0056150
tttttaaataaag

SEQ ID NO: 230228 - DNA, 13 bp, Artificial Sequence
  Oligonucleotide for detection of SNP TSC0056150
ctttatttaaaaa

SEQ ID NO: 230229 - DNA, 13 bp, Artificial Sequence
  Oligonucleotide for detection of SNP TSC0056150
tttttatataaag

SEQ ID NO: 230230 - DNA, 13 bp, Artificial Sequence
  Oligonucleotide for detection of SNP TSC0056150
ctttatataaaaa

SEQ ID NO: 230231 - DNA, 13 bp, Artificial Sequence
  Oligonucleotide for detection of SNP TSC0056150
ttttatttgaggg

SEQ ID NO: 230232 - DNA, 13 bp, Artificial Sequence
  Oligonucleotide for detection of SNP TSC0056150
ccctcaaataaaa

SEQ ID NO: 230233 - DNA, 13 bp, Artificial Sequence
  Oligonucleotide for detection of SNP TSC0056150
ttttatatgaggg

SEQ ID NO: 230234 - DNA, 13 bp, Artificial Sequence
  Oligonucleotide for detection of SNP TSC0056150
ccctcatataaaa

SEQ ID NO: 230235 - DNA, 13 bp, Artificial Sequence
  Oligonucleotide for detection of SNP TSC0056151
ttatatatgaata

SEQ ID NO: 230236 - DNA, 13 bp, Artificial Sequence
  Oligonucleotide for detection of SNP TSC0056151
tattcatatataa

SEQ ID NO: 230237 - DNA, 13 bp, Artificial Sequence
  Oligonucleotide for detection of SNP TSC0056151
ttatatgtgaata

SEQ ID NO: 230238 - DNA, 13 bp, Artificial Sequence
  Oligonucleotide for detection of SNP TSC0056151
tattcacatataa

SEQ ID NO: 230239 - DNA, 13 bp, Artificial Sequence
  Oligonucleotide for detection of SNP TSC0056151
ttatacgtgaata

SEQ ID NO: 230240 - DNA, 13 bp, Artificial Sequence
  Oligonucleotide for detection of SNP TSC0056151
tattcacgtataa

SEQ ID NO: 230241 - DNA, 13 bp, Artificial Sequence
  Oligonucleotide for detection of SNP TSC0056151
tatttatgtgtga

SEQ ID NO: 230242 - DNA, 13 bp, Artificial Sequence
  Oligonucleotide for detection of SNP TSC0056151
tcacacataaata

SEQ ID NO: 230243 - DNA, 13 bp, Artificial Sequence
  Oligonucleotide for detection of SNP TSC0056151
tatttacgtgtga

SEQ ID NO: 230244 - DNA, 13 bp, Artificial Sequence
  Oligonucleotide for detection of SNP TSC0056151
tcacacgtaaata

SEQ ID NO: 230245 - DNA, 13 bp, Artificial Sequence
  Oligonucleotide for detection of SNP TSC0056152
ttttagaatttta

SEQ ID NO: 230246 - DNA, 13 bp, Artificial Sequence
  Oligonucleotide for detection of SNP TSC0056152
taaaattctaaaa

SEQ ID NO: 230247 - DNA, 13 bp, Artificial Sequence
  Oligonucleotide for detection of SNP TSC0056153
agatattgggata

SEQ ID NO: 230248 - DNA, 13 bp, Artificial Sequence
  Oligonucleotide for detection of SNP TSC0056153
tatcccaatatct

SEQ ID NO: 230249 - DNA, 13 bp, Artificial Sequence
  Oligonucleotide for detection of SNP TSC0056153
agatatcgggata

SEQ ID NO: 230250 - DNA, 13 bp, Artificial Sequence
  Oligonucleotide for detection of SNP TSC0056153
tatcccgatatct

SEQ ID NO: 230251 - DNA, 13 bp, Artificial Sequence
  Oligonucleotide for detection of SNP TSC0056156
tttttggttatay

SEQ ID NO: 230252 - DNA, 13 bp, Artificial Sequence
  Oligonucleotide for detection of SNP TSC0056156
rtataaccaaaaa

SEQ ID NO: 230253 - DNA, 13 bp, Artificial Sequence
  Oligonucleotide for detection of SNP TSC0056156
tttttgattatay

SEQ ID NO: 230254 - DNA, 13 bp, Artificial Sequence
  Oligonucleotide for detection of SNP TSC0056156
rtataatcaaaaa

SEQ ID NO: 230255 - DNA, 13 bp, Artificial Sequence
  Oligonucleotide for detection of SNP TSC0056163
agggttatatgtt

SEQ ID NO: 230256 - DNA, 13 bp, Artificial Sequence
  Oligonucleotide for detection of SNP TSC0056163
aacatataaccct

SEQ ID NO: 230257 - DNA, 13 bp, Artificial Sequence
  Oligonucleotide for detection of SNP TSC0056163
agggttttatgtt

SEQ ID NO: 230258 - DNA, 13 bp, Artificial Sequence
  Oligonucleotide for detection of SNP TSC0056163
aacataaaaccct

SEQ ID NO: 230259 - DNA, 13 bp, Artificial Sequence
  Oligonucleotide for detection of SNP TSC0056163
aatatgtagtttt

SEQ ID NO: 230260 - DNA, 13 bp, Artificial Sequence
  Oligonucleotide for detection of SNP TSC0056163
aaaactacatatt

SEQ ID NO: 230261 - DNA, 13 bp, Artificial Sequence
  Oligonucleotide for detection of SNP TSC0056163
aatatggagtttt

SEQ ID NO: 230262 - DNA, 13 bp, Artificial Sequence
  Oligonucleotide for detection of SNP TSC0056163
aaaactccatatt

SEQ ID NO: 230263 - DNA, 13 bp, Artificial Sequence
  Oligonucleotide for detection of SNP TSC0056164
gatgaaagaagtt

SEQ ID NO: 230264 - DNA, 13 bp, Artificial Sequence
  Oligonucleotide for detection of SNP TSC0056164
aacttctttcatc

SEQ ID NO: 230265 - DNA, 13 bp, Artificial Sequence
  Oligonucleotide for detection of SNP TSC0056164
gatgaatgaagtt

SEQ ID NO: 230266 - DNA, 13 bp, Artificial Sequence
  Oligonucleotide for detection of SNP TSC0056164
aacttcattcatc

SEQ ID NO: 230267 - DNA, 13 bp, Artificial Sequence
  Oligonucleotide for detection of SNP TSC0056164
gacgaaagaagtt

SEQ ID NO: 230268 - DNA, 13 bp, Artificial Sequence
  Oligonucleotide for detection of SNP TSC0056164
aacttctttcgtc

SEQ ID NO: 230269 - DNA, 13 bp, Artificial Sequence
  Oligonucleotide for detection of SNP TSC0056164
gacgaatgaagtt

SEQ ID NO: 230270 - DNA, 13 bp, Artificial Sequence
  Oligonucleotide for detection of SNP TSC0056164
aacttcattcgtc

SEQ ID NO: 230271 - DNA, 13 bp, Artificial Sequence
  Oligonucleotide for detection of SNP TSC0056164
agttttttttgty

SEQ ID NO: 230272 - DNA, 13 bp, Artificial Sequence
  Oligonucleotide for detection of SNP TSC0056164
racaaaaaaaact

SEQ ID NO: 230273 - DNA, 13 bp, Artificial Sequence
  Oligonucleotide for detection of SNP TSC0056164
agtttttttcgty

SEQ ID NO: 230274 - DNA, 13 bp, Artificial Sequence
  Oligonucleotide for detection of SNP TSC0056164
racgaaaaaaact

SEQ ID NO: 230275 - DNA, 13 bp, Artificial Sequence
  Oligonucleotide for detection of SNP TSC0056167
tatgtatgaaata

SEQ ID NO: 230276 - DNA, 13 bp, Artificial Sequence
  Oligonucleotide for detection of SNP TSC0056167
tatttcatacata

SEQ ID NO: 230277 - DNA, 13 bp, Artificial Sequence
  Oligonucleotide for detection of SNP TSC0056167
tatgtacgaaata

SEQ ID NO: 230278 - DNA, 13 bp, Artificial Sequence
  Oligonucleotide for detection of SNP TSC0056167
tatttcgtacata

SEQ ID NO: 230279 - DNA, 13 bp, Artificial Sequence
  Oligonucleotide for detection of SNP TSC0056167
tattttgtgtata

SEQ ID NO: 230280 - DNA, 13 bp, Artificial Sequence
  Oligonucleotide for detection of SNP TSC0056167
tatacacaaaata

SEQ ID NO: 230281 - DNA, 13 bp, Artificial Sequence
  Oligonucleotide for detection of SNP TSC0056167
tattttatgtata

SEQ ID NO: 230282 - DNA, 13 bp, Artificial Sequence
  Oligonucleotide for detection of SNP TSC0056167
tatacataaaata

SEQ ID NO: 230283 - DNA, 13 bp, Artificial Sequence
  Oligonucleotide for detection of SNP TSC0056167
tatttcgtgtata

SEQ ID NO: 230284 - DNA, 13 bp, Artificial Sequence
  Oligonucleotide for detection of SNP TSC0056167
tatacacgaaata

SEQ ID NO: 230285 - DNA, 13 bp, Artificial Sequence
  Oligonucleotide for detection of SNP TSC0056170
atggttggggagg

SEQ ID NO: 230286 - DNA, 13 bp, Artificial Sequence
  Oligonucleotide for detection of SNP TSC0056170
cctccccaaccat

SEQ ID NO: 230287 - DNA, 13 bp, Artificial Sequence
  Oligonucleotide for detection of SNP TSC0056170
atggttagggagg

SEQ ID NO: 230288 - DNA, 13 bp, Artificial Sequence
  Oligonucleotide for detection of SNP TSC0056170
cctccctaaccat

SEQ ID NO: 230289 - DNA, 13 bp, Artificial Sequence
  Oligonucleotide for detection of SNP TSC0056171
tagattaatatay

SEQ ID NO: 230290 - DNA, 13 bp, Artificial Sequence
  Oligonucleotide for detection of SNP TSC0056171
rtatattaatcta

SEQ ID NO: 230291 - DNA, 13 bp, Artificial Sequence
  Oligonucleotide for detection of SNP TSC0056171
tagatttatatay

SEQ ID NO: 230292 - DNA, 13 bp, Artificial Sequence
  Oligonucleotide for detection of SNP TSC0056171
rtatataaatcta

SEQ ID NO: 230293 - DNA, 13 bp, Artificial Sequence
  Oligonucleotide for detection of SNP TSC0056171
gtgtattagtttg

SEQ ID NO: 230294 - DNA, 13 bp, Artificial Sequence
  Oligonucleotide for detection of SNP TSC0056171
caaactaatacac

SEQ ID NO: 230295 - DNA, 13 bp, Artificial Sequence
  Oligonucleotide for detection of SNP TSC0056172
ttagttatgtttt

SEQ ID NO: 230296 - DNA, 13 bp, Artificial Sequence
  Oligonucleotide for detection of SNP TSC0056172
aaaacataactaa

SEQ ID NO: 230297 - DNA, 13 bp, Artificial Sequence
  Oligonucleotide for detection of SNP TSC0056172
ttagttttgtttt

SEQ ID NO: 230298 - DNA, 13 bp, Artificial Sequence
  Oligonucleotide for detection of SNP TSC0056172
aaaacaaaactaa

SEQ ID NO: 230299 - DNA, 13 bp, Artificial Sequence
  Oligonucleotide for detection of SNP TSC0056172
aaagtataattga

SEQ ID NO: 230300 - DNA, 13 bp, Artificial Sequence
  Oligonucleotide for detection of SNP TSC0056172
tcaattatacttt

SEQ ID NO: 230301 - DNA, 13 bp, Artificial Sequence
  Oligonucleotide for detection of SNP TSC0056172
aaagtagaattga

SEQ ID NO: 230302 - DNA, 13 bp, Artificial Sequence
  Oligonucleotide for detection of SNP TSC0056172
tcaattctacttt

SEQ ID NO: 230303 - DNA, 13 bp, Artificial Sequence
  Oligonucleotide for detection of SNP TSC0056173
tgtatatgtattt

SEQ ID NO: 230304 - DNA, 13 bp, Artificial Sequence
  Oligonucleotide for detection of SNP TSC0056173
aaatacatataca

SEQ ID NO: 230305 - DNA, 13 bp, Artificial Sequence
  Oligonucleotide for detection of SNP TSC0056173
tgtatacgtattt

SEQ ID NO: 230306 - DNA, 13 bp, Artificial Sequence
  Oligonucleotide for detection of SNP TSC0056173
aaatacgtataca

SEQ ID NO: 230307 - DNA, 13 bp, Artificial Sequence
  Oligonucleotide for detection of SNP TSC0056173
aagtgtgtatata

SEQ ID NO: 230308 - DNA, 13 bp, Artificial Sequence
  Oligonucleotide for detection of SNP TSC0056173
tatatacacactt

SEQ ID NO: 230309 - DNA, 13 bp, Artificial Sequence
  Oligonucleotide for detection of SNP TSC0056173
aagtgtatatata

SEQ ID NO: 230310 - DNA, 13 bp, Artificial Sequence
  Oligonucleotide for detection of SNP TSC0056173
tatatatacactt

SEQ ID NO: 230311 - DNA, 13 bp, Artificial Sequence
  Oligonucleotide for detection of SNP TSC0056173
aagtgcgtatata

SEQ ID NO: 230312 - DNA, 13 bp, Artificial Sequence
  Oligonucleotide for detection of SNP TSC0056173
tatatacgcactt

SEQ ID NO: 230313 - DNA, 13 bp, Artificial Sequence
  Oligonucleotide for detection of SNP TSC0056174
aaaagtatatgat

SEQ ID NO: 230314 - DNA, 13 bp, Artificial Sequence
  Oligonucleotide for detection of SNP TSC0056174
atcatatactttt

SEQ ID NO: 230315 - DNA, 13 bp, Artificial Sequence
  Oligonucleotide for detection of SNP TSC0056174
aaaagtgtatgat

SEQ ID NO: 230316 - DNA, 13 bp, Artificial Sequence
  Oligonucleotide for detection of SNP TSC0056174
atcatacactttt

SEQ ID NO: 230317 - DNA, 13 bp, Artificial Sequence
  Oligonucleotide for detection of SNP TSC0056174
aaaagcgtatgat

SEQ ID NO: 230318 - DNA, 13 bp, Artificial Sequence
  Oligonucleotide for detection of SNP TSC0056174
atcatacgctttt

SEQ ID NO: 230319 - DNA, 13 bp, Artificial Sequence
  Oligonucleotide for detection of SNP TSC0056179
ttggttttgttag

SEQ ID NO: 230320 - DNA, 13 bp, Artificial Sequence
  Oligonucleotide for detection of SNP TSC0056179
ctaacaaaaccaa

SEQ ID NO: 230321 - DNA, 13 bp, Artificial Sequence
  Oligonucleotide for detection of SNP TSC0056179
ttggttgtgttag

SEQ ID NO: 230322 - DNA, 13 bp, Artificial Sequence
  Oligonucleotide for detection of SNP TSC0056179
ctaacacaaccaa

SEQ ID NO: 230323 - DNA, 13 bp, Artificial Sequence
  Oligonucleotide for detection of SNP TSC0056179
ttgatagagttag

SEQ ID NO: 230324 - DNA, 13 bp, Artificial Sequence
  Oligonucleotide for detection of SNP TSC0056179
ctaactctatcaa

SEQ ID NO: 230325 - DNA, 13 bp, Artificial Sequence
  Oligonucleotide for detection of SNP TSC0056179
ttgatatagttag

SEQ ID NO: 230326 - DNA, 13 bp, Artificial Sequence
  Oligonucleotide for detection of SNP TSC0056179
ctaactatatcaa

SEQ ID NO: 230327 - DNA, 13 bp, Artificial Sequence
  Oligonucleotide for detection of SNP TSC0008627
aaggagtgtttty

SEQ ID NO: 230328 - DNA, 13 bp, Artificial Sequence
  Oligonucleotide for detection of SNP TSC0008627
raaaacactcctt

SEQ ID NO: 230329 - DNA, 13 bp, Artificial Sequence
  Oligonucleotide for detection of SNP TSC0009298
attagtagaggty

SEQ ID NO: 230330 - DNA, 13 bp, Artificial Sequence
  Oligonucleotide for detection of SNP TSC0009298
racctctactaat

SEQ ID NO: 230331 - DNA, 13 bp, Artificial Sequence
  Oligonucleotide for detection of SNP TSC0009298
attagtggaggty

SEQ ID NO: 230332 - DNA, 13 bp, Artificial Sequence
  Oligonucleotide for detection of SNP TSC0009298
racctccactaat

SEQ ID NO: 230333 - DNA, 13 bp, Artificial Sequence
  Oligonucleotide for detection of SNP TSC0009298
attagcggaggty

SEQ ID NO: 230334 - DNA, 13 bp, Artificial Sequence
  Oligonucleotide for detection of SNP TSC0009298
racctccgctaat

SEQ ID NO: 230335 - DNA, 13 bp, Artificial Sequence
  Oligonucleotide for detection of SNP TSC0009298
gatttttgttgat

SEQ ID NO: 230336 - DNA, 13 bp, Artificial Sequence
  Oligonucleotide for detection of SNP TSC0009298
atcaacaaaaatc

SEQ ID NO: 230337 - DNA, 13 bp, Artificial Sequence
  Oligonucleotide for detection of SNP TSC0009298
gattttcgttgat

SEQ ID NO: 230338 - DNA, 13 bp, Artificial Sequence
  Oligonucleotide for detection of SNP TSC0009298
atcaacgaaaatc

SEQ ID NO: 230339 - DNA, 13 bp, Artificial Sequence
  Oligonucleotide for detection of SNP TSC0056183
aaataagtataaa

SEQ ID NO: 230340 - DNA, 13 bp, Artificial Sequence
  Oligonucleotide for detection of SNP TSC0056183
tttatacttattt

SEQ ID NO: 230341 - DNA, 13 bp, Artificial Sequence
  Oligonucleotide for detection of SNP TSC0056184
ttagatatgtgag

SEQ ID NO: 230342 - DNA, 13 bp, Artificial Sequence
  Oligonucleotide for detection of SNP TSC0056184
ctcacatatctaa

SEQ ID NO: 230343 - DNA, 13 bp, Artificial Sequence
  Oligonucleotide for detection of SNP TSC0056184
ttagatgtgtgag

SEQ ID NO: 230344 - DNA, 13 bp, Artificial Sequence
  Oligonucleotide for detection of SNP TSC0056184
ctcacacatctaa

SEQ ID NO: 230345 - DNA, 13 bp, Artificial Sequence
  Oligonucleotide for detection of SNP TSC0056184
ttagacgtgtgag

SEQ ID NO: 230346 - DNA, 13 bp, Artificial Sequence
  Oligonucleotide for detection of SNP TSC0056184
ctcacacgtctaa

SEQ ID NO: 230347 - DNA, 13 bp, Artificial Sequence
  Oligonucleotide for detection of SNP TSC0056186
aatttttttttag

SEQ ID NO: 230348 - DNA, 13 bp, Artificial Sequence
  Oligonucleotide for detection of SNP TSC0056186
ctaaaaaaaaatt

SEQ ID NO: 230349 - DNA, 13 bp, Artificial Sequence
  Oligonucleotide for detection of SNP TSC0056186
aattttgttttag

SEQ ID NO: 230350 - DNA, 13 bp, Artificial Sequence
  Oligonucleotide for detection of SNP TSC0056186
ctaaaacaaaatt

SEQ ID NO: 230351 - DNA, 13 bp, Artificial Sequence
  Oligonucleotide for detection of SNP TSC0056186
aatttcgttttag

SEQ ID NO: 230352 - DNA, 13 bp, Artificial Sequence
  Oligonucleotide for detection of SNP TSC0056186
ctaaaacgaaatt

SEQ ID NO: 230353 - DNA, 13 bp, Artificial Sequence
  Oligonucleotide for detection of SNP TSC0056186
ttgaaaagaagtt

SEQ ID NO: 230354 - DNA, 13 bp, Artificial Sequence
  Oligonucleotide for detection of SNP TSC0056186
aacttcttttcaa

SEQ ID NO: 230355 - DNA, 13 bp, Artificial Sequence
  Oligonucleotide for detection of SNP TSC0056186
ttgaaatgaagtt

SEQ ID NO: 230356 - DNA, 13 bp, Artificial Sequence
  Oligonucleotide for detection of SNP TSC0056186
aacttcatttcaa

SEQ ID NO: 230357 - DNA, 13 bp, Artificial Sequence
  Oligonucleotide for detection of SNP TSC0056186
ttgaaacgaagtt

SEQ ID NO: 230358 - DNA, 13 bp, Artificial Sequence
  Oligonucleotide for detection of SNP TSC0056186
aacttcgtttcaa

SEQ ID NO: 230359 - DNA, 13 bp, Artificial Sequence
  Oligonucleotide for detection of SNP TSC0056190
gcggttgtggtta

SEQ ID NO: 230360 - DNA, 13 bp, Artificial Sequence
  Oligonucleotide for detection of SNP TSC0056190
taaccacaaccgc

SEQ ID NO: 230361 - DNA, 13 bp, Artificial Sequence
  Oligonucleotide for detection of SNP TSC0056190
gcggttatggtta

SEQ ID NO: 230362 - DNA, 13 bp, Artificial Sequence
  Oligonucleotide for detection of SNP TSC0056190
taaccataaccgc

SEQ ID NO: 230363 - DNA, 13 bp, Artificial Sequence
  Oligonucleotide for detection of SNP TSC0056191
ttgttaagattay

SEQ ID NO: 230364 - DNA, 13 bp, Artificial Sequence
  Oligonucleotide for detection of SNP TSC0056191
rtaatcttaacaa

SEQ ID NO: 230365 - DNA, 13 bp, Artificial Sequence
  Oligonucleotide for detection of SNP TSC0056191
ttgttatgattay

SEQ ID NO: 230366 - DNA, 13 bp, Artificial Sequence
  Oligonucleotide for detection of SNP TSC0056191
rtaatcataacaa

SEQ ID NO: 230367 - DNA, 13 bp, Artificial Sequence
  Oligonucleotide for detection of SNP TSC0056191
tcgttaagattay

SEQ ID NO: 230368 - DNA, 13 bp, Artificial Sequence
  Oligonucleotide for detection of SNP TSC0056191
rtaatcttaacga

SEQ ID NO: 230369 - DNA, 13 bp, Artificial Sequence
  Oligonucleotide for detection of SNP TSC0056191
tcgttatgattay

SEQ ID NO: 230370 - DNA, 13 bp, Artificial Sequence
  Oligonucleotide for detection of SNP TSC0056191
rtaatcataacga

SEQ ID NO: 230371 - DNA, 13 bp, Artificial Sequence
  Oligonucleotide for detection of SNP TSC0056191
gtggttttagtgg

SEQ ID NO: 230372 - DNA, 13 bp, Artificial Sequence
  Oligonucleotide for detection of SNP TSC0056191
ccactaaaaccac

SEQ ID NO: 230373 - DNA, 13 bp, Artificial Sequence
  Oligonucleotide for detection of SNP TSC0056191
gtggttatagtgg

SEQ ID NO: 230374 - DNA, 13 bp, Artificial Sequence
  Oligonucleotide for detection of SNP TSC0056191
ccactataaccac

SEQ ID NO: 230375 - DNA, 13 bp, Artificial Sequence
  Oligonucleotide for detection of SNP TSC0056191
gtggttttagcgg

SEQ ID NO: 230376 - DNA, 13 bp, Artificial Sequence
  Oligonucleotide for detection of SNP TSC0056191
ccgctaaaaccac

SEQ ID NO: 230377 - DNA, 13 bp, Artificial Sequence
  Oligonucleotide for detection of SNP TSC0056191
gtggttatagcgg

SEQ ID NO: 230378 - DNA, 13 bp, Artificial Sequence
  Oligonucleotide for detection of SNP TSC0056191
ccgctataaccac

SEQ ID NO: 230379 - DNA, 13 bp, Artificial Sequence
  Oligonucleotide for detection of SNP TSC0056192
aatgtgagttaaa

SEQ ID NO: 230380 - DNA, 13 bp, Artificial Sequence
  Oligonucleotide for detection of SNP TSC0056192
tttaactcacatt

SEQ ID NO: 230381 - DNA, 13 bp, Artificial Sequence
  Oligonucleotide for detection of SNP TSC0056192
aatgtgggttaaa

SEQ ID NO: 230382 - DNA, 13 bp, Artificial Sequence
  Oligonucleotide for detection of SNP TSC0056192
tttaacccacatt

SEQ ID NO: 230383 - DNA, 13 bp, Artificial Sequence
  Oligonucleotide for detection of SNP TSC0056193
ggaaaaatttagt

SEQ ID NO: 230384 - DNA, 13 bp, Artificial Sequence
  Oligonucleotide for detection of SNP TSC0056193
actaaatttttcc

SEQ ID NO: 230385 - DNA, 13 bp, Artificial Sequence
  Oligonucleotide for detection of SNP TSC0056193
ggaaaattttagt

SEQ ID NO: 230386 - DNA, 13 bp, Artificial Sequence
  Oligonucleotide for detection of SNP TSC0056193
actaaaattttcc

SEQ ID NO: 230387 - DNA, 13 bp, Artificial Sequence
  Oligonucleotide for detection of SNP TSC0056193
attgggtttttty

SEQ ID NO: 230388 - DNA, 13 bp, Artificial Sequence
  Oligonucleotide for detection of SNP TSC0056193
raaaaaacccaat

SEQ ID NO: 230389 - DNA, 13 bp, Artificial Sequence
  Oligonucleotide for detection of SNP TSC0056196
ggatgtagtatga

SEQ ID NO: 230390 - DNA, 13 bp, Artificial Sequence
  Oligonucleotide for detection of SNP TSC0056196
tcatactacatcc

SEQ ID NO: 230391 - DNA, 13 bp, Artificial Sequence
  Oligonucleotide for detection of SNP TSC0056196
ggatgtggtatga

SEQ ID NO: 230392 - DNA, 13 bp, Artificial Sequence
  Oligonucleotide for detection of SNP TSC0056196
tcataccacatcc

SEQ ID NO: 230393 - DNA, 13 bp, Artificial Sequence
  Oligonucleotide for detection of SNP TSC0056196
ggacgtagtatga

SEQ ID NO: 230394 - DNA, 13 bp, Artificial Sequence
  Oligonucleotide for detection of SNP TSC0056196
tcatactacgtcc

SEQ ID NO: 230395 - DNA, 13 bp, Artificial Sequence
  Oligonucleotide for detection of SNP TSC0056196
ggacgtggtatga

SEQ ID NO: 230396 - DNA, 13 bp, Artificial Sequence
  Oligonucleotide for detection of SNP TSC0056196
tcataccacgtcc

SEQ ID NO: 230397 - DNA, 13 bp, Artificial Sequence
  Oligonucleotide for detection of SNP TSC0056196
ggatgcggtatga

SEQ ID NO: 230398 - DNA, 13 bp, Artificial Sequence
  Oligonucleotide for detection of SNP TSC0056196
tcataccgcatcc

SEQ ID NO: 230399 - DNA, 13 bp, Artificial Sequence
  Oligonucleotide for detection of SNP TSC0056196
ggacgcggtatga

SEQ ID NO: 230400 - DNA, 13 bp, Artificial Sequence
  Oligonucleotide for detection of SNP TSC0056196
tcataccgcgtcc

SEQ ID NO: 230401 - DNA, 13 bp, Artificial Sequence
  Oligonucleotide for detection of SNP TSC0056196
ttatattgtgtty

SEQ ID NO: 230402 - DNA, 13 bp, Artificial Sequence
  Oligonucleotide for detection of SNP TSC0056196
raacacaatataa

SEQ ID NO: 230403 - DNA, 13 bp, Artificial Sequence
  Oligonucleotide for detection of SNP TSC0056196
ttatattgcgtty

SEQ ID NO: 230404 - DNA, 13 bp, Artificial Sequence
  Oligonucleotide for detection of SNP TSC0056196
raacgcaatataa

SEQ ID NO: 230405 - DNA, 13 bp, Artificial Sequence
  Oligonucleotide for detection of SNP TSC0056196
ttatatcgtgtty

SEQ ID NO: 230406 - DNA, 13 bp, Artificial Sequence
  Oligonucleotide for detection of SNP TSC0056196
raacacgatataa

SEQ ID NO: 230407 - DNA, 13 bp, Artificial Sequence
  Oligonucleotide for detection of SNP TSC0056196
ttatatcgcgtty

SEQ ID NO: 230408 - DNA, 13 bp, Artificial Sequence
  Oligonucleotide for detection of SNP TSC0056196
raacgcgatataa

SEQ ID NO: 230409 - DNA, 13 bp, Artificial Sequence
  Oligonucleotide for detection of SNP TSC0056197
attattgatagty

SEQ ID NO: 230410 - DNA, 13 bp, Artificial Sequence
  Oligonucleotide for detection of SNP TSC0056197
ractatcaataat

SEQ ID NO: 230411 - DNA, 13 bp, Artificial Sequence
  Oligonucleotide for detection of SNP TSC0056197
attattaatagty

SEQ ID NO: 230412 - DNA, 13 bp, Artificial Sequence
  Oligonucleotide for detection of SNP TSC0056197
ractattaataat

SEQ ID NO: 230413 - DNA, 13 bp, Artificial Sequence
  Oligonucleotide for detection of SNP TSC0056203
gaatgtatgttat

SEQ ID NO: 230414 - DNA, 13 bp, Artificial Sequence
  Oligonucleotide for detection of SNP TSC0056203
ataacatacattc

SEQ ID NO: 230415 - DNA, 13 bp, Artificial Sequence
  Oligonucleotide for detection of SNP TSC0056203
gaatgtgtgttat

SEQ ID NO: 230416 - DNA, 13 bp, Artificial Sequence
  Oligonucleotide for detection of SNP TSC0056203
ataacacacattc

SEQ ID NO: 230417 - DNA, 13 bp, Artificial Sequence
  Oligonucleotide for detection of SNP TSC0056204
aaattataaaatg

SEQ ID NO: 230418 - DNA, 13 bp, Artificial Sequence
  Oligonucleotide for detection of SNP TSC0056204
cattttataattt

SEQ ID NO: 230419 - DNA, 13 bp, Artificial Sequence
  Oligonucleotide for detection of SNP TSC0056204
aaattagaaaatg

SEQ ID NO: 230420 - DNA, 13 bp, Artificial Sequence
  Oligonucleotide for detection of SNP TSC0056204
cattttctaattt

SEQ ID NO: 230421 - DNA, 13 bp, Artificial Sequence
  Oligonucleotide for detection of SNP TSC0056205
aagattttgttta

SEQ ID NO: 230422 - DNA, 13 bp, Artificial Sequence
  Oligonucleotide for detection of SNP TSC0056205
taaacaaaatctt

SEQ ID NO: 230423 - DNA, 13 bp, Artificial Sequence
  Oligonucleotide for detection of SNP TSC0056205
aagattgtgttta

SEQ ID NO: 230424 - DNA, 13 bp, Artificial Sequence
  Oligonucleotide for detection of SNP TSC0056205
taaacacaatctt

SEQ ID NO: 230425 - DNA, 13 bp, Artificial Sequence
  Oligonucleotide for detection of SNP TSC0056205
taaatagagtttt

SEQ ID NO: 230426 - DNA, 13 bp, Artificial Sequence
  Oligonucleotide for detection of SNP TSC0056205
aaaactctattta

SEQ ID NO: 230427 - DNA, 13 bp, Artificial Sequence
  Oligonucleotide for detection of SNP TSC0056205
taaatatagtttt

SEQ ID NO: 230428 - DNA, 13 bp, Artificial Sequence
  Oligonucleotide for detection of SNP TSC0056205
aaaactatattta

SEQ ID NO: 230429 - DNA, 13 bp, Artificial Sequence
  Oligonucleotide for detection of SNP TSC0056206
tttggtgttgagy

SEQ ID NO: 230430 - DNA, 13 bp, Artificial Sequence
  Oligonucleotide for detection of SNP TSC0056206
rctcaacaccaaa

SEQ ID NO: 230431 - DNA, 13 bp, Artificial Sequence
  Oligonucleotide for detection of SNP TSC0056206
tttggtattgagy

SEQ ID NO: 230432 - DNA, 13 bp, Artificial Sequence
  Oligonucleotide for detection of SNP TSC0056206
rctcaataccaaa

SEQ ID NO: 230433 - DNA, 13 bp, Artificial Sequence
  Oligonucleotide for detection of SNP TSC0056207
tataattattaat

SEQ ID NO: 230434 - DNA, 13 bp, Artificial Sequence
  Oligonucleotide for detection of SNP TSC0056207
attaataattata

SEQ ID NO: 230435 - DNA, 13 bp, Artificial Sequence
  Oligonucleotide for detection of SNP TSC0056207
tataatgattaat

SEQ ID NO: 230436 - DNA, 13 bp, Artificial Sequence
  Oligonucleotide for detection of SNP TSC0056207
attaatcattata

SEQ ID NO: 230437 - DNA, 13 bp, Artificial Sequence
  Oligonucleotide for detection of SNP TSC0056207
attggtgattgtg

SEQ ID NO: 230438 - DNA, 13 bp, Artificial Sequence
  Oligonucleotide for detection of SNP TSC0056207
cacaatcaccaat

SEQ ID NO: 230439 - DNA, 13 bp, Artificial Sequence
  Oligonucleotide for detection of SNP TSC0056207
attggttattgtg

SEQ ID NO: 230440 - DNA, 13 bp, Artificial Sequence
  Oligonucleotide for detection of SNP TSC0056207
cacaataaccaat

SEQ ID NO: 230441 - DNA, 13 bp, Artificial Sequence
  Oligonucleotide for detection of SNP TSC0056208
aaattagtgataa

SEQ ID NO: 230442 - DNA, 13 bp, Artificial Sequence
  Oligonucleotide for detection of SNP TSC0056208
ttatcactaattt

SEQ ID NO: 230443 - DNA, 13 bp, Artificial Sequence
  Oligonucleotide for detection of SNP TSC0056208
aaattaatgataa

SEQ ID NO: 230444 - DNA, 13 bp, Artificial Sequence
  Oligonucleotide for detection of SNP TSC0056208
ttatcattaattt

SEQ ID NO: 230445 - DNA, 13 bp, Artificial Sequence
  Oligonucleotide for detection of SNP TSC0056209
ggggagtgggagg

SEQ ID NO: 230446 - DNA, 13 bp, Artificial Sequence
  Oligonucleotide for detection of SNP TSC0056209
cctcccactcccc

SEQ ID NO: 230447 - DNA, 13 bp, Artificial Sequence
  Oligonucleotide for detection of SNP TSC0056209
ggggagcgggagg

SEQ ID NO: 230448 - DNA, 13 bp, Artificial Sequence
  Oligonucleotide for detection of SNP TSC0056209
cctcccgctcccc

SEQ ID NO: 230449 - DNA, 13 bp, Artificial Sequence
  Oligonucleotide for detection of SNP TSC0056210
aatgtataataat

SEQ ID NO: 230450 - DNA, 13 bp, Artificial Sequence
  Oligonucleotide for detection of SNP TSC0056210
attattatacatt

SEQ ID NO: 230451 - DNA, 13 bp, Artificial Sequence
  Oligonucleotide for detection of SNP TSC0056210
aatgtagaataat

SEQ ID NO: 230452 - DNA, 13 bp, Artificial Sequence
  Oligonucleotide for detection of SNP TSC0056210
attattctacatt

SEQ ID NO: 230453 - DNA, 13 bp, Artificial Sequence
  Oligonucleotide for detection of SNP TSC0056213
gtttggggttatt

SEQ ID NO: 230454 - DNA, 13 bp, Artificial Sequence
  Oligonucleotide for detection of SNP TSC0056213
aataaccccaaac

SEQ ID NO: 230455 - DNA, 13 bp, Artificial Sequence
  Oligonucleotide for detection of SNP TSC0056213
gtttggagttatt

SEQ ID NO: 230456 - DNA, 13 bp, Artificial Sequence
  Oligonucleotide for detection of SNP TSC0056213
aataactccaaac

SEQ ID NO: 230457 - DNA, 13 bp, Artificial Sequence
  Oligonucleotide for detection of SNP TSC0056215
agttttaagggtt

SEQ ID NO: 230458 - DNA, 13 bp, Artificial Sequence
  Oligonucleotide for detection of SNP TSC0056215
aacccttaaaact

SEQ ID NO: 230459 - DNA, 13 bp, Artificial Sequence
  Oligonucleotide for detection of SNP TSC0056215
agttttgagggtt

SEQ ID NO: 230460 - DNA, 13 bp, Artificial Sequence
  Oligonucleotide for detection of SNP TSC0056215
aaccctcaaaact

SEQ ID NO: 230461 - DNA, 13 bp, Artificial Sequence
  Oligonucleotide for detection of SNP TSC0056215
agtttcgagggtt

SEQ ID NO: 230462 - DNA, 13 bp, Artificial Sequence
  Oligonucleotide for detection of SNP TSC0056215
aaccctcgaaact

SEQ ID NO: 230463 - DNA, 13 bp, Artificial Sequence
  Oligonucleotide for detection of SNP TSC0056215
agtttttggggtt

SEQ ID NO: 230464 - DNA, 13 bp, Artificial Sequence
  Oligonucleotide for detection of SNP TSC0056215
aaccccaaaaact

SEQ ID NO: 230465 - DNA, 13 bp, Artificial Sequence
  Oligonucleotide for detection of SNP TSC0056215
agttttcggggtt

SEQ ID NO: 230466 - DNA, 13 bp, Artificial Sequence
  Oligonucleotide for detection of SNP TSC0056215
aaccccgaaaact

SEQ ID NO: 230467 - DNA, 13 bp, Artificial Sequence
  Oligonucleotide for detection of SNP TSC0056216
agggaggagagta

SEQ ID NO: 230468 - DNA, 13 bp, Artificial Sequence
  Oligonucleotide for detection of SNP TSC0056216
tactctcctccct

SEQ ID NO: 230469 - DNA, 13 bp, Artificial Sequence
  Oligonucleotide for detection of SNP TSC0056216
agggagtagagta

SEQ ID NO: 230470 - DNA, 13 bp, Artificial Sequence
  Oligonucleotide for detection of SNP TSC0056216
tactctactccct

SEQ ID NO: 230471 - DNA, 13 bp, Artificial Sequence
  Oligonucleotide for detection of SNP TSC0056217
taaataagaaaga

SEQ ID NO: 230472 - DNA, 13 bp, Artificial Sequence
  Oligonucleotide for detection of SNP TSC0056217
tctttcttattta

SEQ ID NO: 230473 - DNA, 13 bp, Artificial Sequence
  Oligonucleotide for detection of SNP TSC0056217
taaatatgaaaga

SEQ ID NO: 230474 - DNA, 13 bp, Artificial Sequence
  Oligonucleotide for detection of SNP TSC0056217
tctttcatattta

SEQ ID NO: 230475 - DNA, 13 bp, Artificial Sequence
  Oligonucleotide for detection of SNP TSC0056217
taaatacgaaaga

SEQ ID NO: 230476 - DNA, 13 bp, Artificial Sequence
  Oligonucleotide for detection of SNP TSC0056217
tctttcgtattta

SEQ ID NO: 230477 - DNA, 13 bp, Artificial Sequence
  Oligonucleotide for detection of SNP TSC0056218
gggttgattttaa

SEQ ID NO: 230478 - DNA, 13 bp, Artificial Sequence
  Oligonucleotide for detection of SNP TSC0056218
ttaaaatcaaccc

SEQ ID NO: 230479 - DNA, 13 bp, Artificial Sequence
  Oligonucleotide for detection of SNP TSC0056218
gggttggttttaa

SEQ ID NO: 230480 - DNA, 13 bp, Artificial Sequence
  Oligonucleotide for detection of SNP TSC0056218
ttaaaaccaaccc

SEQ ID NO: 230481 - DNA, 13 bp, Artificial Sequence
  Oligonucleotide for detection of SNP TSC0056219
tgtttgattattg

SEQ ID NO: 230482 - DNA, 13 bp, Artificial Sequence
  Oligonucleotide for detection of SNP TSC0056219
caataatcaaaca

SEQ ID NO: 230483 - DNA, 13 bp, Artificial Sequence
  Oligonucleotide for detection of SNP TSC0056219
tgtttgtttattg

SEQ ID NO: 230484 - DNA, 13 bp, Artificial Sequence
  Oligonucleotide for detection of SNP TSC0056219
caataaacaaaca

SEQ ID NO: 230485 - DNA, 13 bp, Artificial Sequence
  Oligonucleotide for detection of SNP TSC0056219
tagtagttaggta

SEQ ID NO: 230486 - DNA, 13 bp, Artificial Sequence
  Oligonucleotide for detection of SNP TSC0056219
tacctaactacta

SEQ ID NO: 230487 - DNA, 13 bp, Artificial Sequence
  Oligonucleotide for detection of SNP TSC0056219
tagtagataggta

SEQ ID NO: 230488 - DNA, 13 bp, Artificial Sequence
  Oligonucleotide for detection of SNP TSC0056219
tacctatctacta

SEQ ID NO: 230489 - DNA, 13 bp, Artificial Sequence
  Oligonucleotide for detection of SNP TSC0056221
ttttgtatgaata

SEQ ID NO: 230490 - DNA, 13 bp, Artificial Sequence
  Oligonucleotide for detection of SNP TSC0056221
tattcatacaaaa

SEQ ID NO: 230491 - DNA, 13 bp, Artificial Sequence
  Oligonucleotide for detection of SNP TSC0056221
ttttgtgtgaata

SEQ ID NO: 230492 - DNA, 13 bp, Artificial Sequence
  Oligonucleotide for detection of SNP TSC0056221
tattcacacaaaa

SEQ ID NO: 230493 - DNA, 13 bp, Artificial Sequence
  Oligonucleotide for detection of SNP TSC0056221
ttttgcgtgaata

SEQ ID NO: 230494 - DNA, 13 bp, Artificial Sequence
  Oligonucleotide for detection of SNP TSC0056221
tattcacgcaaaa

SEQ ID NO: 230495 - DNA, 13 bp, Artificial Sequence
  Oligonucleotide for detection of SNP TSC0056221
tatttatgtaagg

SEQ ID NO: 230496 - DNA, 13 bp, Artificial Sequence
  Oligonucleotide for detection of SNP TSC0056221
ccttacataaata

SEQ ID NO: 230497 - DNA, 13 bp, Artificial Sequence
  Oligonucleotide for detection of SNP TSC0056221
tatttacgtaagg

SEQ ID NO: 230498 - DNA, 13 bp, Artificial Sequence
  Oligonucleotide for detection of SNP TSC0056221
ccttacgtaaata

SEQ ID NO: 230499 - DNA, 13 bp, Artificial Sequence
  Oligonucleotide for detection of SNP TSC0056222
gttagaatttaty

SEQ ID NO: 230500 - DNA, 13 bp, Artificial Sequence
  Oligonucleotide for detection of SNP TSC0056222
rataaattctaac

SEQ ID NO: 230501 - DNA, 13 bp, Artificial Sequence
  Oligonucleotide for detection of SNP TSC0056222
gttagattttaty

SEQ ID NO: 230502 - DNA, 13 bp, Artificial Sequence
  Oligonucleotide for detection of SNP TSC0056222
rataaaatctaac

SEQ ID NO: 230503 - DNA, 13 bp, Artificial Sequence
  Oligonucleotide for detection of SNP TSC0056222
gatggattttggy

SEQ ID NO: 230504 - DNA, 13 bp, Artificial Sequence
  Oligonucleotide for detection of SNP TSC0056222
rccaaaatccatc

SEQ ID NO: 230505 - DNA, 13 bp, Artificial Sequence
  Oligonucleotide for detection of SNP TSC0056222
gatggagtttggy

SEQ ID NO: 230506 - DNA, 13 bp, Artificial Sequence
  Oligonucleotide for detection of SNP TSC0056222
rccaaactccatc

SEQ ID NO: 230507 - DNA, 13 bp, Artificial Sequence
  Oligonucleotide for detection of SNP TSC0056224
gaatttaagttgt

SEQ ID NO: 230508 - DNA, 13 bp, Artificial Sequence
  Oligonucleotide for detection of SNP TSC0056224
acaacttaaattc

SEQ ID NO: 230509 - DNA, 13 bp, Artificial Sequence
  Oligonucleotide for detection of SNP TSC0056224
gaatttgagttgt

SEQ ID NO: 230510 - DNA, 13 bp, Artificial Sequence
  Oligonucleotide for detection of SNP TSC0056224
acaactcaaattc

SEQ ID NO: 230511 - DNA, 13 bp, Artificial Sequence
  Oligonucleotide for detection of SNP TSC0056224
gaattcgagttgt

SEQ ID NO: 230512 - DNA, 13 bp, Artificial Sequence
  Oligonucleotide for detection of SNP TSC0056224
acaactcgaattc

SEQ ID NO: 230513 - DNA, 13 bp, Artificial Sequence
  Oligonucleotide for detection of SNP TSC0056224
atagtttgaatty

SEQ ID NO: 230514 - DNA, 13 bp, Artificial Sequence
  Oligonucleotide for detection of SNP TSC0056224
raattcaaactat

SEQ ID NO: 230515 - DNA, 13 bp, Artificial Sequence
  Oligonucleotide for detection of SNP TSC0056224
atagttcgaatty

SEQ ID NO: 230516 - DNA, 13 bp, Artificial Sequence
  Oligonucleotide for detection of SNP TSC0056224
raattcgaactat

SEQ ID NO: 230517 - DNA, 13 bp, Artificial Sequence
  Oligonucleotide for detection of SNP TSC0004767
ttaattaatttta

SEQ ID NO: 230518 - DNA, 13 bp, Artificial Sequence
  Oligonucleotide for detection of SNP TSC0004767
taaaattaattaa

SEQ ID NO: 230519 - DNA, 13 bp, Artificial Sequence
  Oligonucleotide for detection of SNP TSC0056226
aaaagtgaagtag

SEQ ID NO: 230520 - DNA, 13 bp, Artificial Sequence
  Oligonucleotide for detection of SNP TSC0056226
ctacttcactttt

SEQ ID NO: 230521 - DNA, 13 bp, Artificial Sequence
  Oligonucleotide for detection of SNP TSC0056226
aaaagtaaagtag

SEQ ID NO: 230522 - DNA, 13 bp, Artificial Sequence
  Oligonucleotide for detection of SNP TSC0056226
ctactttactttt

SEQ ID NO: 230523 - DNA, 13 bp, Artificial Sequence
  Oligonucleotide for detection of SNP TSC0056229
tgaaaggtataty

SEQ ID NO: 230524 - DNA, 13 bp, Artificial Sequence
  Oligonucleotide for detection of SNP TSC0056229
ratatacctttca

SEQ ID NO: 230525 - DNA, 13 bp, Artificial Sequence
  Oligonucleotide for detection of SNP TSC0056229
tgaaagatataty

SEQ ID NO: 230526 - DNA, 13 bp, Artificial Sequence
  Oligonucleotide for detection of SNP TSC0056229
ratatatctttca

SEQ ID NO: 230527 - DNA, 13 bp, Artificial Sequence
  Oligonucleotide for detection of SNP TSC0056232
tacgtatgtatay

SEQ ID NO: 230528 - DNA, 13 bp, Artificial Sequence
  Oligonucleotide for detection of SNP TSC0056232
rtatacatacgta

SEQ ID NO: 230529 - DNA, 13 bp, Artificial Sequence
  Oligonucleotide for detection of SNP TSC0056232
tacgtacgtatay

SEQ ID NO: 230530 - DNA, 13 bp, Artificial Sequence
  Oligonucleotide for detection of SNP TSC0056232
rtatacgtacgta

SEQ ID NO: 230531 - DNA, 13 bp, Artificial Sequence
  Oligonucleotide for detection of SNP TSC0056233
atatatatacgta

SEQ ID NO: 230532 - DNA, 13 bp, Artificial Sequence
  Oligonucleotide for detection of SNP TSC0056233
tacgtatatatat

SEQ ID NO: 230533 - DNA, 13 bp, Artificial Sequence
  Oligonucleotide for detection of SNP TSC0056233
atatatgtacgta

SEQ ID NO: 230534 - DNA, 13 bp, Artificial Sequence
  Oligonucleotide for detection of SNP TSC0056233
tacgtacatatat

SEQ ID NO: 230535 - DNA, 13 bp, Artificial Sequence
  Oligonucleotide for detection of SNP TSC0056233
atatacgtacgta

SEQ ID NO: 230536 - DNA, 13 bp, Artificial Sequence
  Oligonucleotide for detection of SNP TSC0056233
tacgtacgtatat

SEQ ID NO: 230537 - DNA, 13 bp, Artificial Sequence
  Oligonucleotide for detection of SNP TSC0056234
cgtgtgtgcgtgt

SEQ ID NO: 230538 - DNA, 13 bp, Artificial Sequence
  Oligonucleotide for detection of SNP TSC0056234
acacgcacacacg

SEQ ID NO: 230539 - DNA, 13 bp, Artificial Sequence
  Oligonucleotide for detection of SNP TSC0056234
cgtgtgcgcgtgt

SEQ ID NO: 230540 - DNA, 13 bp, Artificial Sequence
  Oligonucleotide for detection of SNP TSC0056234
acacgcgcacacg

SEQ ID NO: 230541 - DNA, 13 bp, Artificial Sequence
  Oligonucleotide for detection of SNP TSC0056234
atatgtgtatatg

SEQ ID NO: 230542 - DNA, 13 bp, Artificial Sequence
  Oligonucleotide for detection of SNP TSC0056234
catatacacatat

SEQ ID NO: 230543 - DNA, 13 bp, Artificial Sequence
  Oligonucleotide for detection of SNP TSC0056234
atatgtatatatg

SEQ ID NO: 230544 - DNA, 13 bp, Artificial Sequence
  Oligonucleotide for detection of SNP TSC0056234
catatatacatat

SEQ ID NO: 230545 - DNA, 13 bp, Artificial Sequence
  Oligonucleotide for detection of SNP TSC0056234
atacgtgtatatg

SEQ ID NO: 230546 - DNA, 13 bp, Artificial Sequence
  Oligonucleotide for detection of SNP TSC0056234
catatacacgtat

SEQ ID NO: 230547 - DNA, 13 bp, Artificial Sequence
  Oligonucleotide for detection of SNP TSC0056234
atacgtatatatg

SEQ ID NO: 230548 - DNA, 13 bp, Artificial Sequence
  Oligonucleotide for detection of SNP TSC0056234
catatatacgtat

SEQ ID NO: 230549 - DNA, 13 bp, Artificial Sequence
  Oligonucleotide for detection of SNP TSC0056234
atatgcgtatatg

SEQ ID NO: 230550 - DNA, 13 bp, Artificial Sequence
  Oligonucleotide for detection of SNP TSC0056234
catatacgcatat

SEQ ID NO: 230551 - DNA, 13 bp, Artificial Sequence
  Oligonucleotide for detection of SNP TSC0056234
atatgtatatacg

SEQ ID NO: 230552 - DNA, 13 bp, Artificial Sequence
  Oligonucleotide for detection of SNP TSC0056234
cgtatatacatat

SEQ ID NO: 230553 - DNA, 13 bp, Artificial Sequence
  Oligonucleotide for detection of SNP TSC0056234
atatgtgtatacg

SEQ ID NO: 230554 - DNA, 13 bp, Artificial Sequence
  Oligonucleotide for detection of SNP TSC0056234
cgtatacacatat

SEQ ID NO: 230555 - DNA, 13 bp, Artificial Sequence
  Oligonucleotide for detection of SNP TSC0056234
atacgtatatacg

SEQ ID NO: 230556 - DNA, 13 bp, Artificial Sequence
  Oligonucleotide for detection of SNP TSC0056234
cgtatatacgtat

SEQ ID NO: 230557 - DNA, 13 bp, Artificial Sequence
  Oligonucleotide for detection of SNP TSC0056234
atacgcgtatatg

SEQ ID NO: 230558 - DNA, 13 bp, Artificial Sequence
  Oligonucleotide for detection of SNP TSC0056234
catatacgcgtat

SEQ ID NO: 230559 - DNA, 13 bp, Artificial Sequence
  Oligonucleotide for detection of SNP TSC0056234
atacgtgtatacg

SEQ ID NO: 230560 - DNA, 13 bp, Artificial Sequence
  Oligonucleotide for detection of SNP TSC0056234
cgtatacacgtat

SEQ ID NO: 230561 - DNA, 13 bp, Artificial Sequence
  Oligonucleotide for detection of SNP TSC0056234
atatgcgtatacg

SEQ ID NO: 230562 - DNA, 13 bp, Artificial Sequence
  Oligonucleotide for detection of SNP TSC0056234
cgtatacgcatat

SEQ ID NO: 230563 - DNA, 13 bp, Artificial Sequence
  Oligonucleotide for detection of SNP TSC0056234
atacgcgtatacg

SEQ ID NO: 230564 - DNA, 13 bp, Artificial Sequence
  Oligonucleotide for detection of SNP TSC0056234
cgtatacgcgtat

SEQ ID NO: 230565 - DNA, 13 bp, Artificial Sequence
  Oligonucleotide for detection of SNP TSC0056235
tgtgtatgcgtgt

SEQ ID NO: 230566 - DNA, 13 bp, Artificial Sequence
  Oligonucleotide for detection of SNP TSC0056235
acacgcatacaca

SEQ ID NO: 230567 - DNA, 13 bp, Artificial Sequence
  Oligonucleotide for detection of SNP TSC0056235
tgtgtacgcgtgt

SEQ ID NO: 230568 - DNA, 13 bp, Artificial Sequence
  Oligonucleotide for detection of SNP TSC0056235
acacgcgtacaca

SEQ ID NO: 230569 - DNA, 13 bp, Artificial Sequence
  Oligonucleotide for detection of SNP TSC0056235
atatgtatgtata

SEQ ID NO: 230570 - DNA, 13 bp, Artificial Sequence
  Oligonucleotide for detection of SNP TSC0056235
tatacatacatat

SEQ ID NO: 230571 - DNA, 13 bp, Artificial Sequence
  Oligonucleotide for detection of SNP TSC0056235
atacgtatgtata

SEQ ID NO: 230572 - DNA, 13 bp, Artificial Sequence
  Oligonucleotide for detection of SNP TSC0056235
tatacatacgtat

SEQ ID NO: 230573 - DNA, 13 bp, Artificial Sequence
  Oligonucleotide for detection of SNP TSC0056236
atttgtaataaaa

SEQ ID NO: 230574 - DNA, 13 bp, Artificial Sequence
  Oligonucleotide for detection of SNP TSC0056236
ttttattacaaat

SEQ ID NO: 230575 - DNA, 13 bp, Artificial Sequence
  Oligonucleotide for detection of SNP TSC0056236
atttgtgataaaa

SEQ ID NO: 230576 - DNA, 13 bp, Artificial Sequence
  Oligonucleotide for detection of SNP TSC0056236
ttttatcacaaat

SEQ ID NO: 230577 - DNA, 13 bp, Artificial Sequence
  Oligonucleotide for detection of SNP TSC0056236
atttgcgataaaa

SEQ ID NO: 230578 - DNA, 13 bp, Artificial Sequence
  Oligonucleotide for detection of SNP TSC0056236
ttttatcgcaaat

SEQ ID NO: 230579 - DNA, 13 bp, Artificial Sequence
  Oligonucleotide for detection of SNP TSC0056236
ttttgttgtaagt

SEQ ID NO: 230580 - DNA, 13 bp, Artificial Sequence
  Oligonucleotide for detection of SNP TSC0056236
acttacaacaaaa

SEQ ID NO: 230581 - DNA, 13 bp, Artificial Sequence
  Oligonucleotide for detection of SNP TSC0056236
ttttgtcgtaagt

SEQ ID NO: 230582 - DNA, 13 bp, Artificial Sequence
  Oligonucleotide for detection of SNP TSC0056236
acttacgacaaaa

SEQ ID NO: 230583 - DNA, 13 bp, Artificial Sequence
  Oligonucleotide for detection of SNP TSC0056238
agtttaggtttta

SEQ ID NO: 230584 - DNA, 13 bp, Artificial Sequence
  Oligonucleotide for detection of SNP TSC0056238
taaaacctaaact

SEQ ID NO: 230585 - DNA, 13 bp, Artificial Sequence
  Oligonucleotide for detection of SNP TSC0056238
agtttaagtttta

SEQ ID NO: 230586 - DNA, 13 bp, Artificial Sequence
  Oligonucleotide for detection of SNP TSC0056238
taaaacttaaact

SEQ ID NO: 230587 - DNA, 13 bp, Artificial Sequence
  Oligonucleotide for detection of SNP TSC0056239
taataaaggtaty

SEQ ID NO: 230588 - DNA, 13 bp, Artificial Sequence
  Oligonucleotide for detection of SNP TSC0056239
ratacctttatta

SEQ ID NO: 230589 - DNA, 13 bp, Artificial Sequence
  Oligonucleotide for detection of SNP TSC0056239
taataatggtaty

SEQ ID NO: 230590 - DNA, 13 bp, Artificial Sequence
  Oligonucleotide for detection of SNP TSC0056239
rataccattatta

SEQ ID NO: 230591 - DNA, 13 bp, Artificial Sequence
  Oligonucleotide for detection of SNP TSC0056239
gatatttttatta

SEQ ID NO: 230592 - DNA, 13 bp, Artificial Sequence
  Oligonucleotide for detection of SNP TSC0056239
taataaaaatatc

SEQ ID NO: 230593 - DNA, 13 bp, Artificial Sequence
  Oligonucleotide for detection of SNP TSC0056239
gatattattatta

SEQ ID NO: 230594 - DNA, 13 bp, Artificial Sequence
  Oligonucleotide for detection of SNP TSC0056239
taataataatatc

SEQ ID NO: 230595 - DNA, 13 bp, Artificial Sequence
  Oligonucleotide for detection of SNP TSC0056240
attttagaatggt

SEQ ID NO: 230596 - DNA, 13 bp, Artificial Sequence
  Oligonucleotide for detection of SNP TSC0056240
accattctaaaat

SEQ ID NO: 230597 - DNA, 13 bp, Artificial Sequence
  Oligonucleotide for detection of SNP TSC0056240
attttaaaatggt

SEQ ID NO: 230598 - DNA, 13 bp, Artificial Sequence
  Oligonucleotide for detection of SNP TSC0056240
accattttaaaat

SEQ ID NO: 230599 - DNA, 13 bp, Artificial Sequence
  Oligonucleotide for detection of SNP TSC0007480
ttttagtgtaggt

SEQ ID NO: 230600 - DNA, 13 bp, Artificial Sequence
  Oligonucleotide for detection of SNP TSC0007480
acctacactaaaa

SEQ ID NO: 230601 - DNA, 13 bp, Artificial Sequence
  Oligonucleotide for detection of SNP TSC0007480
ttttagcgtaggt

SEQ ID NO: 230602 - DNA, 13 bp, Artificial Sequence
  Oligonucleotide for detection of SNP TSC0007480
acctacgctaaaa

SEQ ID NO: 230603 - DNA, 13 bp, Artificial Sequence
  Oligonucleotide for detection of SNP TSC0007480
atttatgttgaga

SEQ ID NO: 230604 - DNA, 13 bp, Artificial Sequence
  Oligonucleotide for detection of SNP TSC0007480
tctcaacataaat

SEQ ID NO: 230605 - DNA, 13 bp, Artificial Sequence
  Oligonucleotide for detection of SNP TSC0007480
atttatattgaga

SEQ ID NO: 230606 - DNA, 13 bp, Artificial Sequence
  Oligonucleotide for detection of SNP TSC0007480
tctcaatataaat

SEQ ID NO: 230607 - DNA, 13 bp, Artificial Sequence
  Oligonucleotide for detection of SNP TSC0007480
atttacgttgaga

SEQ ID NO: 230608 - DNA, 13 bp, Artificial Sequence
  Oligonucleotide for detection of SNP TSC0007480
tctcaacgtaaat

SEQ ID NO: 230609 - DNA, 13 bp, Artificial Sequence
  Oligonucleotide for detection of SNP TSC0056242
tagtgggagattt

SEQ ID NO: 230610 - DNA, 13 bp, Artificial Sequence
  Oligonucleotide for detection of SNP TSC0056242
aaatctcccacta

SEQ ID NO: 230611 - DNA, 13 bp, Artificial Sequence
  Oligonucleotide for detection of SNP TSC0056242
tagtggaagattt

SEQ ID NO: 230612 - DNA, 13 bp, Artificial Sequence
  Oligonucleotide for detection of SNP TSC0056242
aaatcttccacta

SEQ ID NO: 230613 - DNA, 13 bp, Artificial Sequence
  Oligonucleotide for detection of SNP TSC0056243
tttttattatggy

SEQ ID NO: 230614 - DNA, 13 bp, Artificial Sequence
  Oligonucleotide for detection of SNP TSC0056243
rccataataaaaa

SEQ ID NO: 230615 - DNA, 13 bp, Artificial Sequence
  Oligonucleotide for detection of SNP TSC0056243
gttatgttaaaag

SEQ ID NO: 230616 - DNA, 13 bp, Artificial Sequence
  Oligonucleotide for detection of SNP TSC0056243
cttttaacataac

SEQ ID NO: 230617 - DNA, 13 bp, Artificial Sequence
  Oligonucleotide for detection of SNP TSC0056243
gttatgataaaag

SEQ ID NO: 230618 - DNA, 13 bp, Artificial Sequence
  Oligonucleotide for detection of SNP TSC0056243
cttttatcataac

SEQ ID NO: 230619 - DNA, 13 bp, Artificial Sequence
  Oligonucleotide for detection of SNP TSC0005173
aataattgtgatt

SEQ ID NO: 230620 - DNA, 13 bp, Artificial Sequence
  Oligonucleotide for detection of SNP TSC0005173
aatcacaattatt

SEQ ID NO: 230621 - DNA, 13 bp, Artificial Sequence
  Oligonucleotide for detection of SNP TSC0005173
aataatcgtgatt

SEQ ID NO: 230622 - DNA, 13 bp, Artificial Sequence
  Oligonucleotide for detection of SNP TSC0005173
aatcacgattatt

SEQ ID NO: 230623 - DNA, 13 bp, Artificial Sequence
  Oligonucleotide for detection of SNP TSC0056244
atatttgtagaay

SEQ ID NO: 230624 - DNA, 13 bp, Artificial Sequence
  Oligonucleotide for detection of SNP TSC0056244
rttctacaaatat

SEQ ID NO: 230625 - DNA, 13 bp, Artificial Sequence
  Oligonucleotide for detection of SNP TSC0056244
atatttatagaay

SEQ ID NO: 230626 - DNA, 13 bp, Artificial Sequence
  Oligonucleotide for detection of SNP TSC0056244
rttctataaatat

SEQ ID NO: 230627 - DNA, 13 bp, Artificial Sequence
  Oligonucleotide for detection of SNP TSC0056247
tgatatattttgt

SEQ ID NO: 230628 - DNA, 13 bp, Artificial Sequence
  Oligonucleotide for detection of SNP TSC0056247
acaaaatatatca

SEQ ID NO: 230629 - DNA, 13 bp, Artificial Sequence
  Oligonucleotide for detection of SNP TSC0056247
tgatatgttttgt

SEQ ID NO: 230630 - DNA, 13 bp, Artificial Sequence
  Oligonucleotide for detection of SNP TSC0056247
acaaaacatatca

SEQ ID NO: 230631 - DNA, 13 bp, Artificial Sequence
  Oligonucleotide for detection of SNP TSC0056247
tgatacgttttgt

SEQ ID NO: 230632 - DNA, 13 bp, Artificial Sequence
  Oligonucleotide for detection of SNP TSC0056247
acaaaacgtatca

SEQ ID NO: 230633 - DNA, 13 bp, Artificial Sequence
  Oligonucleotide for detection of SNP TSC0056250
attgaaatatttt

SEQ ID NO: 230634 - DNA, 13 bp, Artificial Sequence
  Oligonucleotide for detection of SNP TSC0056250
aaaatatttcaat

SEQ ID NO: 230635 - DNA, 13 bp, Artificial Sequence
  Oligonucleotide for detection of SNP TSC0056250
attgaagtatttt

SEQ ID NO: 230636 - DNA, 13 bp, Artificial Sequence
  Oligonucleotide for detection of SNP TSC0056250
aaaatacttcaat

SEQ ID NO: 230637 - DNA, 13 bp, Artificial Sequence
  Oligonucleotide for detection of SNP TSC0056251
ttattgggtttta

SEQ ID NO: 230638 - DNA, 13 bp, Artificial Sequence
  Oligonucleotide for detection of SNP TSC0056251
taaaacccaataa

SEQ ID NO: 230639 - DNA, 13 bp, Artificial Sequence
  Oligonucleotide for detection of SNP TSC0056251
ttattgagtttta

SEQ ID NO: 230640 - DNA, 13 bp, Artificial Sequence
  Oligonucleotide for detection of SNP TSC0056251
taaaactcaataa

SEQ ID NO: 230641 - DNA, 13 bp, Artificial Sequence
  Oligonucleotide for detection of SNP TSC0056252
tttgagggttgat

SEQ ID NO: 230642 - DNA, 13 bp, Artificial Sequence
  Oligonucleotide for detection of SNP TSC0056252
atcaaccctcaaa

SEQ ID NO: 230643 - DNA, 13 bp, Artificial Sequence
  Oligonucleotide for detection of SNP TSC0056252
tttgagagttgat

SEQ ID NO: 230644 - DNA, 13 bp, Artificial Sequence
  Oligonucleotide for detection of SNP TSC0056252
atcaactctcaaa

SEQ ID NO: 230645 - DNA, 13 bp, Artificial Sequence
  Oligonucleotide for detection of SNP TSC0056253
tttatacggtaty

SEQ ID NO: 230646 - DNA, 13 bp, Artificial Sequence
  Oligonucleotide for detection of SNP TSC0056253
rataccgtataaa

SEQ ID NO: 230647 - DNA, 13 bp, Artificial Sequence
  Oligonucleotide for detection of SNP TSC0056253
ggtattgtgtagg

SEQ ID NO: 230648 - DNA, 13 bp, Artificial Sequence
  Oligonucleotide for detection of SNP TSC0056253
cctacacaatacc

SEQ ID NO: 230649 - DNA, 13 bp, Artificial Sequence
  Oligonucleotide for detection of SNP TSC0056253
ggtattatgtagg

SEQ ID NO: 230650 - DNA, 13 bp, Artificial Sequence
  Oligonucleotide for detection of SNP TSC0056253
cctacataatacc

SEQ ID NO: 230651 - DNA, 13 bp, Artificial Sequence
  Oligonucleotide for detection of SNP TSC0056253
ggtatcgtgtagg

SEQ ID NO: 230652 - DNA, 13 bp, Artificial Sequence
  Oligonucleotide for detection of SNP TSC0056253
cctacacgatacc

SEQ ID NO: 230653 - DNA, 13 bp, Artificial Sequence
  Oligonucleotide for detection of SNP TSC0056254
taagtttatggga

SEQ ID NO: 230654 - DNA, 13 bp, Artificial Sequence
  Oligonucleotide for detection of SNP TSC0056254
tcccataaactta

SEQ ID NO: 230655 - DNA, 13 bp, Artificial Sequence
  Oligonucleotide for detection of SNP TSC0056254
taagttgatggga

SEQ ID NO: 230656 - DNA, 13 bp, Artificial Sequence
  Oligonucleotide for detection of SNP TSC0056254
tcccatcaactta

SEQ ID NO: 230657 - DNA, 13 bp, Artificial Sequence
  Oligonucleotide for detection of SNP TSC0056254
ttttataaattta

SEQ ID NO: 230658 - DNA, 13 bp, Artificial Sequence
  Oligonucleotide for detection of SNP TSC0056254
taaatttataaaa

SEQ ID NO: 230659 - DNA, 13 bp, Artificial Sequence
  Oligonucleotide for detection of SNP TSC0056254
ttttattaattta

SEQ ID NO: 230660 - DNA, 13 bp, Artificial Sequence
  Oligonucleotide for detection of SNP TSC0056254
taaattaataaaa

SEQ ID NO: 230661 - DNA, 13 bp, Artificial Sequence
  Oligonucleotide for detection of SNP TSC0056255
gattgttggattg

SEQ ID NO: 230662 - DNA, 13 bp, Artificial Sequence
  Oligonucleotide for detection of SNP TSC0056255
caatccaacaatc

SEQ ID NO: 230663 - DNA, 13 bp, Artificial Sequence
  Oligonucleotide for detection of SNP TSC0056255
gattgtcggattg

SEQ ID NO: 230664 - DNA, 13 bp, Artificial Sequence
  Oligonucleotide for detection of SNP TSC0056255
caatccgacaatc

SEQ ID NO: 230665 - DNA, 13 bp, Artificial Sequence
  Oligonucleotide for detection of SNP TSC0056255
taatttggtaaty

SEQ ID NO: 230666 - DNA, 13 bp, Artificial Sequence
  Oligonucleotide for detection of SNP TSC0056255
rattaccaaatta

SEQ ID NO: 230667 - DNA, 13 bp, Artificial Sequence
  Oligonucleotide for detection of SNP TSC0056255
taatttagtaaty

SEQ ID NO: 230668 - DNA, 13 bp, Artificial Sequence
  Oligonucleotide for detection of SNP TSC0056255
rattactaaatta

SEQ ID NO: 230669 - DNA, 13 bp, Artificial Sequence
  Oligonucleotide for detection of SNP TSC0056255
taattcggtaaty

SEQ ID NO: 230670 - DNA, 13 bp, Artificial Sequence
  Oligonucleotide for detection of SNP TSC0056255
rattaccgaatta

SEQ ID NO: 230671 - DNA, 13 bp, Artificial Sequence
  Oligonucleotide for detection of SNP TSC0008140
gagttttgagagg

SEQ ID NO: 230672 - DNA, 13 bp, Artificial Sequence
  Oligonucleotide for detection of SNP TSC0008140
cctctcaaaactc

SEQ ID NO: 230673 - DNA, 13 bp, Artificial Sequence
  Oligonucleotide for detection of SNP TSC0008140
gagtttcgagagg

SEQ ID NO: 230674 - DNA, 13 bp, Artificial Sequence
  Oligonucleotide for detection of SNP TSC0008140
cctctcgaaactc

SEQ ID NO: 230675 - DNA, 13 bp, Artificial Sequence
  Oligonucleotide for detection of SNP TSC0056256
tatttatgggtta

SEQ ID NO: 230676 - DNA, 13 bp, Artificial Sequence
  Oligonucleotide for detection of SNP TSC0056256
taacccataaata

SEQ ID NO: 230677 - DNA, 13 bp, Artificial Sequence
  Oligonucleotide for detection of SNP TSC0056256
tatttacgggtta

SEQ ID NO: 230678 - DNA, 13 bp, Artificial Sequence
  Oligonucleotide for detection of SNP TSC0056256
taacccgtaaata

SEQ ID NO: 230679 - DNA, 13 bp, Artificial Sequence
  Oligonucleotide for detection of SNP TSC0056256
tggtttgtgggtg

SEQ ID NO: 230680 - DNA, 13 bp, Artificial Sequence
  Oligonucleotide for detection of SNP TSC0056256
cacccacaaacca

SEQ ID NO: 230681 - DNA, 13 bp, Artificial Sequence
  Oligonucleotide for detection of SNP TSC0056256
tggtttatgggtg

SEQ ID NO: 230682 - DNA, 13 bp, Artificial Sequence
  Oligonucleotide for detection of SNP TSC0056256
cacccataaacca

SEQ ID NO: 230683 - DNA, 13 bp, Artificial Sequence
  Oligonucleotide for detection of SNP TSC0056256
tggttcgtgggtg

SEQ ID NO: 230684 - DNA, 13 bp, Artificial Sequence
  Oligonucleotide for detection of SNP TSC0056256
cacccacgaacca

SEQ ID NO: 230685 - DNA, 13 bp, Artificial Sequence
  Oligonucleotide for detection of SNP TSC0009105
taggtagtagggg

SEQ ID NO: 230686 - DNA, 13 bp, Artificial Sequence
  Oligonucleotide for detection of SNP TSC0009105
cccctactaccta

SEQ ID NO: 230687 - DNA, 13 bp, Artificial Sequence
  Oligonucleotide for detection of SNP TSC0009105
taggtaatagggg

SEQ ID NO: 230688 - DNA, 13 bp, Artificial Sequence
  Oligonucleotide for detection of SNP TSC0009105
cccctattaccta

SEQ ID NO: 230689 - DNA, 13 bp, Artificial Sequence
  Oligonucleotide for detection of SNP TSC0056259
ttagatatgtttg

SEQ ID NO: 230690 - DNA, 13 bp, Artificial Sequence
  Oligonucleotide for detection of SNP TSC0056259
caaacatatctaa

SEQ ID NO: 230691 - DNA, 13 bp, Artificial Sequence
  Oligonucleotide for detection of SNP TSC0056259
ttagatgtgtttg

SEQ ID NO: 230692 - DNA, 13 bp, Artificial Sequence
  Oligonucleotide for detection of SNP TSC0056259
caaacacatctaa

SEQ ID NO: 230693 - DNA, 13 bp, Artificial Sequence
  Oligonucleotide for detection of SNP TSC0056260
agtttaagatgga

SEQ ID NO: 230694 - DNA, 13 bp, Artificial Sequence
  Oligonucleotide for detection of SNP TSC0056260
tccatcttaaact

SEQ ID NO: 230695 - DNA, 13 bp, Artificial Sequence
  Oligonucleotide for detection of SNP TSC0056260
agtttaggatgga

SEQ ID NO: 230696 - DNA, 13 bp, Artificial Sequence
  Oligonucleotide for detection of SNP TSC0056260
tccatcctaaact

SEQ ID NO: 230697 - DNA, 13 bp, Artificial Sequence
  Oligonucleotide for detection of SNP TSC0056261
gtttatagtaagg

SEQ ID NO: 230698 - DNA, 13 bp, Artificial Sequence
  Oligonucleotide for detection of SNP TSC0056261
ccttactataaac

SEQ ID NO: 230699 - DNA, 13 bp, Artificial Sequence
  Oligonucleotide for detection of SNP TSC0056262
gggtaggagggay

SEQ ID NO: 230700 - DNA, 13 bp, Artificial Sequence
  Oligonucleotide for detection of SNP TSC0056262
rtccctcctaccc

SEQ ID NO: 230701 - DNA, 13 bp, Artificial Sequence
  Oligonucleotide for detection of SNP TSC0056262
gggtagtagggay

SEQ ID NO: 230702 - DNA, 13 bp, Artificial Sequence
  Oligonucleotide for detection of SNP TSC0056262
rtccctactaccc

SEQ ID NO: 230703 - DNA, 13 bp, Artificial Sequence
  Oligonucleotide for detection of SNP TSC0056263
agggtgggggtag

SEQ ID NO: 230704 - DNA, 13 bp, Artificial Sequence
  Oligonucleotide for detection of SNP TSC0056263
ctacccccaccct

SEQ ID NO: 230705 - DNA, 13 bp, Artificial Sequence
  Oligonucleotide for detection of SNP TSC0056263
agggtgagggtag

SEQ ID NO: 230706 - DNA, 13 bp, Artificial Sequence
  Oligonucleotide for detection of SNP TSC0056263
ctaccctcaccct

SEQ ID NO: 230707 - DNA, 13 bp, Artificial Sequence
  Oligonucleotide for detection of SNP TSC0056264
ttattgtttaaag

SEQ ID NO: 230708 - DNA, 13 bp, Artificial Sequence
  Oligonucleotide for detection of SNP TSC0056264
ctttaaacaataa

SEQ ID NO: 230709 - DNA, 13 bp, Artificial Sequence
  Oligonucleotide for detection of SNP TSC0056264
ttttgattaatga

SEQ ID NO: 230710 - DNA, 13 bp, Artificial Sequence
  Oligonucleotide for detection of SNP TSC0056264
tcattaatcaaaa

SEQ ID NO: 230711 - DNA, 13 bp, Artificial Sequence
  Oligonucleotide for detection of SNP TSC0056265
tgataattggaaa

SEQ ID NO: 230712 - DNA, 13 bp, Artificial Sequence
  Oligonucleotide for detection of SNP TSC0056265
tttccaattatca

SEQ ID NO: 230713 - DNA, 13 bp, Artificial Sequence
  Oligonucleotide for detection of SNP TSC0056265
tgataagtggaaa

SEQ ID NO: 230714 - DNA, 13 bp, Artificial Sequence
  Oligonucleotide for detection of SNP TSC0056265
tttccacttatca

SEQ ID NO: 230715 - DNA, 13 bp, Artificial Sequence
  Oligonucleotide for detection of SNP TSC0056266
taaagtagtagta

SEQ ID NO: 230716 - DNA, 13 bp, Artificial Sequence
  Oligonucleotide for detection of SNP TSC0056266
tactactacttta

SEQ ID NO: 230717 - DNA, 13 bp, Artificial Sequence
  Oligonucleotide for detection of SNP TSC0056266
taaagtggtagta

SEQ ID NO: 230718 - DNA, 13 bp, Artificial Sequence
  Oligonucleotide for detection of SNP TSC0056266
tactaccacttta

SEQ ID NO: 230719 - DNA, 13 bp, Artificial Sequence
  Oligonucleotide for detection of SNP TSC0056266
taaagcggtagta

SEQ ID NO: 230720 - DNA, 13 bp, Artificial Sequence
  Oligonucleotide for detection of SNP TSC0056266
tactaccgcttta

SEQ ID NO: 230721 - DNA, 13 bp, Artificial Sequence
  Oligonucleotide for detection of SNP TSC0056267
gttttgtgtataa

SEQ ID NO: 230722 - DNA, 13 bp, Artificial Sequence
  Oligonucleotide for detection of SNP TSC0056267
ttatacacaaaac

SEQ ID NO: 230723 - DNA, 13 bp, Artificial Sequence
  Oligonucleotide for detection of SNP TSC0056267
gttttgcgtataa

SEQ ID NO: 230724 - DNA, 13 bp, Artificial Sequence
  Oligonucleotide for detection of SNP TSC0056267
ttatacgcaaaac

SEQ ID NO: 230725 - DNA, 13 bp, Artificial Sequence
  Oligonucleotide for detection of SNP TSC0056267
ttgtgtgtagggy

SEQ ID NO: 230726 - DNA, 13 bp, Artificial Sequence
  Oligonucleotide for detection of SNP TSC0056267
rccctacacacaa

SEQ ID NO: 230727 - DNA, 13 bp, Artificial Sequence
  Oligonucleotide for detection of SNP TSC0056267
ttgtgtatagggy

SEQ ID NO: 230728 - DNA, 13 bp, Artificial Sequence
  Oligonucleotide for detection of SNP TSC0056267
rccctatacacaa

SEQ ID NO: 230729 - DNA, 13 bp, Artificial Sequence
  Oligonucleotide for detection of SNP TSC0056267
ttgtgcgtagggy

SEQ ID NO: 230730 - DNA, 13 bp, Artificial Sequence
  Oligonucleotide for detection of SNP TSC0056267
rccctacgcacaa

SEQ ID NO: 230731 - DNA, 13 bp, Artificial Sequence
  Oligonucleotide for detection of SNP TSC0056272
ttttggtgtggty

SEQ ID NO: 230732 - DNA, 13 bp, Artificial Sequence
  Oligonucleotide for detection of SNP TSC0056272
raccacaccaaaa

SEQ ID NO: 230733 - DNA, 13 bp, Artificial Sequence
  Oligonucleotide for detection of SNP TSC0056272
ttttggggtggty

SEQ ID NO: 230734 - DNA, 13 bp, Artificial Sequence
  Oligonucleotide for detection of SNP TSC0056272
raccaccccaaaa

SEQ ID NO: 230735 - DNA, 13 bp, Artificial Sequence
  Oligonucleotide for detection of SNP TSC0056272
ttttggcgtggty

SEQ ID NO: 230736 - DNA, 13 bp, Artificial Sequence
  Oligonucleotide for detection of SNP TSC0056272
raccacgccaaaa

SEQ ID NO: 230737 - DNA, 13 bp, Artificial Sequence
  Oligonucleotide for detection of SNP TSC0056272
ttttggggcggty

SEQ ID NO: 230738 - DNA, 13 bp, Artificial Sequence
  Oligonucleotide for detection of SNP TSC0056272
raccgccccaaaa

SEQ ID NO: 230739 - DNA, 13 bp, Artificial Sequence
  Oligonucleotide for detection of SNP TSC0056272
ttttggtgcggty

SEQ ID NO: 230740 - DNA, 13 bp, Artificial Sequence
  Oligonucleotide for detection of SNP TSC0056272
raccgcaccaaaa

SEQ ID NO: 230741 - DNA, 13 bp, Artificial Sequence
  Oligonucleotide for detection of SNP TSC0056272
ttttggcgcggty

SEQ ID NO: 230742 - DNA, 13 bp, Artificial Sequence
  Oligonucleotide for detection of SNP TSC0056272
raccgcgccaaaa

SEQ ID NO: 230743 - DNA, 13 bp, Artificial Sequence
  Oligonucleotide for detection of SNP TSC0056272
gattgtgttagag

SEQ ID NO: 230744 - DNA, 13 bp, Artificial Sequence
  Oligonucleotide for detection of SNP TSC0056272
ctctaacacaatc

SEQ ID NO: 230745 - DNA, 13 bp, Artificial Sequence
  Oligonucleotide for detection of SNP TSC0056272
gattgttttagag

SEQ ID NO: 230746 - DNA, 13 bp, Artificial Sequence
  Oligonucleotide for detection of SNP TSC0056272
ctctaaaacaatc

SEQ ID NO: 230747 - DNA, 13 bp, Artificial Sequence
  Oligonucleotide for detection of SNP TSC0056272
gatcgtgttagag

SEQ ID NO: 230748 - DNA, 13 bp, Artificial Sequence
  Oligonucleotide for detection of SNP TSC0056272
ctctaacacgatc

SEQ ID NO: 230749 - DNA, 13 bp, Artificial Sequence
  Oligonucleotide for detection of SNP TSC0056272
gatcgttttagag

SEQ ID NO: 230750 - DNA, 13 bp, Artificial Sequence
  Oligonucleotide for detection of SNP TSC0056272
ctctaaaacgatc

SEQ ID NO: 230751 - DNA, 13 bp, Artificial Sequence
  Oligonucleotide for detection of SNP TSC0056272
gattgcgttagag

SEQ ID NO: 230752 - DNA, 13 bp, Artificial Sequence
  Oligonucleotide for detection of SNP TSC0056272
ctctaacgcaatc

SEQ ID NO: 230753 - DNA, 13 bp, Artificial Sequence
  Oligonucleotide for detection of SNP TSC0056272
gatcgcgttagag

SEQ ID NO: 230754 - DNA, 13 bp, Artificial Sequence
  Oligonucleotide for detection of SNP TSC0056272
ctctaacgcgatc

SEQ ID NO: 230755 - DNA, 13 bp, Artificial Sequence
  Oligonucleotide for detection of SNP TSC0056273
taaaaggattttt

SEQ ID NO: 230756 - DNA, 13 bp, Artificial Sequence
  Oligonucleotide for detection of SNP TSC0056273
aaaaatcctttta

SEQ ID NO: 230757 - DNA, 13 bp, Artificial Sequence
  Oligonucleotide for detection of SNP TSC0056273
taaaagaattttt

SEQ ID NO: 230758 - DNA, 13 bp, Artificial Sequence
  Oligonucleotide for detection of SNP TSC0056273
aaaaattctttta

SEQ ID NO: 230759 - DNA, 13 bp, Artificial Sequence
  Oligonucleotide for detection of SNP TSC0010397
gaaattagaatay

SEQ ID NO: 230760 - DNA, 13 bp, Artificial Sequence
  Oligonucleotide for detection of SNP TSC0010397
rtattctaatttc

SEQ ID NO: 230761 - DNA, 13 bp, Artificial Sequence
  Oligonucleotide for detection of SNP TSC0010397
gaaattggaatay

SEQ ID NO: 230762 - DNA, 13 bp, Artificial Sequence
  Oligonucleotide for detection of SNP TSC0010397
rtattccaatttc

SEQ ID NO: 230763 - DNA, 13 bp, Artificial Sequence
  Oligonucleotide for detection of SNP TSC0010397
gaaatcggaatay

SEQ ID NO: 230764 - DNA, 13 bp, Artificial Sequence
  Oligonucleotide for detection of SNP TSC0010397
rtattccgatttc

SEQ ID NO: 230765 - DNA, 13 bp, Artificial Sequence
  Oligonucleotide for detection of SNP TSC0010397
gtattttggttty

SEQ ID NO: 230766 - DNA, 13 bp, Artificial Sequence
  Oligonucleotide for detection of SNP TSC0010397
raaaccaaaatac

SEQ ID NO: 230767 - DNA, 13 bp, Artificial Sequence
  Oligonucleotide for detection of SNP TSC0010397
gtatttcggttty

SEQ ID NO: 230768 - DNA, 13 bp, Artificial Sequence
  Oligonucleotide for detection of SNP TSC0010397
raaaccgaaatac

SEQ ID NO: 230769 - DNA, 13 bp, Artificial Sequence
  Oligonucleotide for detection of SNP TSC0008837
aaaaaaattattg

SEQ ID NO: 230770 - DNA, 13 bp, Artificial Sequence
  Oligonucleotide for detection of SNP TSC0008837
caataattttttt

SEQ ID NO: 230771 - DNA, 13 bp, Artificial Sequence
  Oligonucleotide for detection of SNP TSC0008837
aaaaaatttattg

SEQ ID NO: 230772 - DNA, 13 bp, Artificial Sequence
  Oligonucleotide for detection of SNP TSC0008837
caataaatttttt

SEQ ID NO: 230773 - DNA, 13 bp, Artificial Sequence
  Oligonucleotide for detection of SNP TSC0008837
tagtaattttttt

SEQ ID NO: 230774 - DNA, 13 bp, Artificial Sequence
  Oligonucleotide for detection of SNP TSC0008837
aaaaaaattacta

SEQ ID NO: 230775 - DNA, 13 bp, Artificial Sequence
  Oligonucleotide for detection of SNP TSC0008837
tagtaaatttttt

SEQ ID NO: 230776 - DNA, 13 bp, Artificial Sequence
  Oligonucleotide for detection of SNP TSC0008837
aaaaaatttacta

SEQ ID NO: 230777 - DNA, 13 bp, Artificial Sequence
  Oligonucleotide for detection of SNP TSC0006849
gtgagggaagtta

SEQ ID NO: 230778 - DNA, 13 bp, Artificial Sequence
  Oligonucleotide for detection of SNP TSC0006849
taacttccctcac

SEQ ID NO: 230779 - DNA, 13 bp, Artificial Sequence
  Oligonucleotide for detection of SNP TSC0006849
gtgaggaaagtta

SEQ ID NO: 230780 - DNA, 13 bp, Artificial Sequence
  Oligonucleotide for detection of SNP TSC0006849
taactttcctcac

SEQ ID NO: 230781 - DNA, 13 bp, Artificial Sequence
  Oligonucleotide for detection of SNP TSC0006850
gagtaaatttttt

SEQ ID NO: 230782 - DNA, 13 bp, Artificial Sequence
  Oligonucleotide for detection of SNP TSC0006850
aaaaaatttactc

SEQ ID NO: 230783 - DNA, 13 bp, Artificial Sequence
  Oligonucleotide for detection of SNP TSC0006850
gagtaagtttttt

SEQ ID NO: 230784 - DNA, 13 bp, Artificial Sequence
  Oligonucleotide for detection of SNP TSC0006850
aaaaaacttactc

SEQ ID NO: 230785 - DNA, 13 bp, Artificial Sequence
  Oligonucleotide for detection of SNP TSC0006851
gagaacggattaa

SEQ ID NO: 230786 - DNA, 13 bp, Artificial Sequence
  Oligonucleotide for detection of SNP TSC0006851
ttaatccgttctc

SEQ ID NO: 230787 - DNA, 13 bp, Artificial Sequence
  Oligonucleotide for detection of SNP TSC0009154
ggttattgtattg

SEQ ID NO: 230788 - DNA, 13 bp, Artificial Sequence
  Oligonucleotide for detection of SNP TSC0009154
caatacaataacc

SEQ ID NO: 230789 - DNA, 13 bp, Artificial Sequence
  Oligonucleotide for detection of SNP TSC0009154
ggttatcgtattg

SEQ ID NO: 230790 - DNA, 13 bp, Artificial Sequence
  Oligonucleotide for detection of SNP TSC0009154
caatacgataacc

SEQ ID NO: 230791 - DNA, 13 bp, Artificial Sequence
  Oligonucleotide for detection of SNP TSC0009154
tagtatggtagty

SEQ ID NO: 230792 - DNA, 13 bp, Artificial Sequence
  Oligonucleotide for detection of SNP TSC0009154
ractaccatacta

SEQ ID NO: 230793 - DNA, 13 bp, Artificial Sequence
  Oligonucleotide for detection of SNP TSC0009154
tagtatagtagty

SEQ ID NO: 230794 - DNA, 13 bp, Artificial Sequence
  Oligonucleotide for detection of SNP TSC0009154
ractactatacta

SEQ ID NO: 230795 - DNA, 13 bp, Artificial Sequence
  Oligonucleotide for detection of SNP TSC0009154
tagtacggtagty

SEQ ID NO: 230796 - DNA, 13 bp, Artificial Sequence
  Oligonucleotide for detection of SNP TSC0009154
ractaccgtacta

SEQ ID NO: 230797 - DNA, 13 bp, Artificial Sequence
  Oligonucleotide for detection of SNP TSC0056279
aagattgaaattt

SEQ ID NO: 230798 - DNA, 13 bp, Artificial Sequence
  Oligonucleotide for detection of SNP TSC0056279
aaatttcaatctt

SEQ ID NO: 230799 - DNA, 13 bp, Artificial Sequence
  Oligonucleotide for detection of SNP TSC0056279
aagattaaaattt

SEQ ID NO: 230800 - DNA, 13 bp, Artificial Sequence
  Oligonucleotide for detection of SNP TSC0056279
aaattttaatctt

SEQ ID NO: 230801 - DNA, 13 bp, Artificial Sequence
  Oligonucleotide for detection of SNP TSC0056280
aaggtggggtttt

SEQ ID NO: 230802 - DNA, 13 bp, Artificial Sequence
  Oligonucleotide for detection of SNP TSC0056280
aaaaccccacctt

SEQ ID NO: 230803 - DNA, 13 bp, Artificial Sequence
  Oligonucleotide for detection of SNP TSC0056280
aaggtgaggtttt

SEQ ID NO: 230804 - DNA, 13 bp, Artificial Sequence
  Oligonucleotide for detection of SNP TSC0056280
aaaacctcacctt

SEQ ID NO: 230805 - DNA, 13 bp, Artificial Sequence
  Oligonucleotide for detection of SNP TSC0056281
taattatgtatay

SEQ ID NO: 230806 - DNA, 13 bp, Artificial Sequence
  Oligonucleotide for detection of SNP TSC0056281
rtatacataatta

SEQ ID NO: 230807 - DNA, 13 bp, Artificial Sequence
  Oligonucleotide for detection of SNP TSC0056281
taattacgtatay

SEQ ID NO: 230808 - DNA, 13 bp, Artificial Sequence
  Oligonucleotide for detection of SNP TSC0056281
rtatacgtaatta

SEQ ID NO: 230809 - DNA, 13 bp, Artificial Sequence
  Oligonucleotide for detection of SNP TSC0056281
gtatatgtgatta

SEQ ID NO: 230810 - DNA, 13 bp, Artificial Sequence
  Oligonucleotide for detection of SNP TSC0056281
taatcacatatac

SEQ ID NO: 230811 - DNA, 13 bp, Artificial Sequence
  Oligonucleotide for detection of SNP TSC0056281
gtatatatgatta

SEQ ID NO: 230812 - DNA, 13 bp, Artificial Sequence
  Oligonucleotide for detection of SNP TSC0056281
taatcatatatac

SEQ ID NO: 230813 - DNA, 13 bp, Artificial Sequence
  Oligonucleotide for detection of SNP TSC0056281
gtatacgtgatta

SEQ ID NO: 230814 - DNA, 13 bp, Artificial Sequence
  Oligonucleotide for detection of SNP TSC0056281
taatcacgtatac

SEQ ID NO: 230815 - DNA, 13 bp, Artificial Sequence
  Oligonucleotide for detection of SNP TSC0056282
ttttaatggatat

SEQ ID NO: 230816 - DNA, 13 bp, Artificial Sequence
  Oligonucleotide for detection of SNP TSC0056282
atatccattaaaa

SEQ ID NO: 230817 - DNA, 13 bp, Artificial Sequence
  Oligonucleotide for detection of SNP TSC0056282
ttttaacggatat

SEQ ID NO: 230818 - DNA, 13 bp, Artificial Sequence
  Oligonucleotide for detection of SNP TSC0056282
atatccgttaaaa

SEQ ID NO: 230819 - DNA, 13 bp, Artificial Sequence
  Oligonucleotide for detection of SNP TSC0056282
atgtttgttgaaa

SEQ ID NO: 230820 - DNA, 13 bp, Artificial Sequence
  Oligonucleotide for detection of SNP TSC0056282
tttcaacaaacat

SEQ ID NO: 230821 - DNA, 13 bp, Artificial Sequence
  Oligonucleotide for detection of SNP TSC0056282
atgtttattgaaa

SEQ ID NO: 230822 - DNA, 13 bp, Artificial Sequence
  Oligonucleotide for detection of SNP TSC0056282
tttcaataaacat

SEQ ID NO: 230823 - DNA, 13 bp, Artificial Sequence
  Oligonucleotide for detection of SNP TSC0056282
atgttcgttgaaa

SEQ ID NO: 230824 - DNA, 13 bp, Artificial Sequence
  Oligonucleotide for detection of SNP TSC0056282
tttcaacgaacat

SEQ ID NO: 230825 - DNA, 13 bp, Artificial Sequence
  Oligonucleotide for detection of SNP TSC0056283
taaataataaaat

SEQ ID NO: 230826 - DNA, 13 bp, Artificial Sequence
  Oligonucleotide for detection of SNP TSC0056283
attttattattta

SEQ ID NO: 230827 - DNA, 13 bp, Artificial Sequence
  Oligonucleotide for detection of SNP TSC0056283
taaatagtaaaat

SEQ ID NO: 230828 - DNA, 13 bp, Artificial Sequence
  Oligonucleotide for detection of SNP TSC0056283
attttactattta

SEQ ID NO: 230829 - DNA, 13 bp, Artificial Sequence
  Oligonucleotide for detection of SNP TSC0056284
aaagaggtttgag

SEQ ID NO: 230830 - DNA, 13 bp, Artificial Sequence
  Oligonucleotide for detection of SNP TSC0056284
ctcaaacctcttt

SEQ ID NO: 230831 - DNA, 13 bp, Artificial Sequence
  Oligonucleotide for detection of SNP TSC0056284
aaagagttttgag

SEQ ID NO: 230832 - DNA, 13 bp, Artificial Sequence
  Oligonucleotide for detection of SNP TSC0056284
ctcaaaactcttt

SEQ ID NO: 230833 - DNA, 13 bp, Artificial Sequence
  Oligonucleotide for detection of SNP TSC0056285
tgttatatttaat

SEQ ID NO: 230834 - DNA, 13 bp, Artificial Sequence
  Oligonucleotide for detection of SNP TSC0056285
attaaatataaca

SEQ ID NO: 230835 - DNA, 13 bp, Artificial Sequence
  Oligonucleotide for detection of SNP TSC0056285
tgttatttttaat

SEQ ID NO: 230836 - DNA, 13 bp, Artificial Sequence
  Oligonucleotide for detection of SNP TSC0056285
attaaaaataaca

SEQ ID NO: 230837 - DNA, 13 bp, Artificial Sequence
  Oligonucleotide for detection of SNP TSC0056285
attagatgtagta

SEQ ID NO: 230838 - DNA, 13 bp, Artificial Sequence
  Oligonucleotide for detection of SNP TSC0056285
tactacatctaat

SEQ ID NO: 230839 - DNA, 13 bp, Artificial Sequence
  Oligonucleotide for detection of SNP TSC0056285
attagaggtagta

SEQ ID NO: 230840 - DNA, 13 bp, Artificial Sequence
  Oligonucleotide for detection of SNP TSC0056285
tactacctctaat

SEQ ID NO: 230841 - DNA, 13 bp, Artificial Sequence
  Oligonucleotide for detection of SNP TSC0056288
attttttttaatt

SEQ ID NO: 230842 - DNA, 13 bp, Artificial Sequence
  Oligonucleotide for detection of SNP TSC0056288
aattaaaaaaaat

SEQ ID NO: 230843 - DNA, 13 bp, Artificial Sequence
  Oligonucleotide for detection of SNP TSC0056288
atttttgttaatt

SEQ ID NO: 230844 - DNA, 13 bp, Artificial Sequence
  Oligonucleotide for detection of SNP TSC0056288
aattaacaaaaat

SEQ ID NO: 230845 - DNA, 13 bp, Artificial Sequence
  Oligonucleotide for detection of SNP TSC0056288
aattaaaaaagat

SEQ ID NO: 230846 - DNA, 13 bp, Artificial Sequence
  Oligonucleotide for detection of SNP TSC0056288
atcttttttaatt

SEQ ID NO: 230847 - DNA, 13 bp, Artificial Sequence
  Oligonucleotide for detection of SNP TSC0056288
aattaataaagat

SEQ ID NO: 230848 - DNA, 13 bp, Artificial Sequence
  Oligonucleotide for detection of SNP TSC0056288
atctttattaatt

SEQ ID NO: 230849 - DNA, 13 bp, Artificial Sequence
  Oligonucleotide for detection of SNP TSC0056291
aaataggtattaa

SEQ ID NO: 230850 - DNA, 13 bp, Artificial Sequence
  Oligonucleotide for detection of SNP TSC0056291
ttaatacctattt

SEQ ID NO: 230851 - DNA, 13 bp, Artificial Sequence
  Oligonucleotide for detection of SNP TSC0056291
aaatagatattaa

SEQ ID NO: 230852 - DNA, 13 bp, Artificial Sequence
  Oligonucleotide for detection of SNP TSC0056291
ttaatatctattt

SEQ ID NO: 230853 - DNA, 13 bp, Artificial Sequence
  Oligonucleotide for detection of SNP TSC0056292
gtgttatgtgttt

SEQ ID NO: 230854 - DNA, 13 bp, Artificial Sequence
  Oligonucleotide for detection of SNP TSC0056292
aaacacataacac

SEQ ID NO: 230855 - DNA, 13 bp, Artificial Sequence
  Oligonucleotide for detection of SNP TSC0056292
gtgttacgtgttt

SEQ ID NO: 230856 - DNA, 13 bp, Artificial Sequence
  Oligonucleotide for detection of SNP TSC0056292
aaacacgtaacac

SEQ ID NO: 230857 - DNA, 13 bp, Artificial Sequence
  Oligonucleotide for detection of SNP TSC0056292
aaatatgtggtay

SEQ ID NO: 230858 - DNA, 13 bp, Artificial Sequence
  Oligonucleotide for detection of SNP TSC0056292
rtaccacatattt

SEQ ID NO: 230859 - DNA, 13 bp, Artificial Sequence
  Oligonucleotide for detection of SNP TSC0056292
aaatatatggtay

SEQ ID NO: 230860 - DNA, 13 bp, Artificial Sequence
  Oligonucleotide for detection of SNP TSC0056292
rtaccatatattt

SEQ ID NO: 230861 - DNA, 13 bp, Artificial Sequence
  Oligonucleotide for detection of SNP TSC0056292
aaatacgtggtay

SEQ ID NO: 230862 - DNA, 13 bp, Artificial Sequence
  Oligonucleotide for detection of SNP TSC0056292
rtaccacgtattt

SEQ ID NO: 230863 - DNA, 13 bp, Artificial Sequence
  Oligonucleotide for detection of SNP TSC0056293
attgtgatgaaty

SEQ ID NO: 230864 - DNA, 13 bp, Artificial Sequence
  Oligonucleotide for detection of SNP TSC0056293
rattcatcacaat

SEQ ID NO: 230865 - DNA, 13 bp, Artificial Sequence
  Oligonucleotide for detection of SNP TSC0056293
attgtgttgaaty

SEQ ID NO: 230866 - DNA, 13 bp, Artificial Sequence
  Oligonucleotide for detection of SNP TSC0056293
rattcaacacaat

SEQ ID NO: 230867 - DNA, 13 bp, Artificial Sequence
  Oligonucleotide for detection of SNP TSC0056293
gatttattataat

SEQ ID NO: 230868 - DNA, 13 bp, Artificial Sequence
  Oligonucleotide for detection of SNP TSC0056293
attataataaatc

SEQ ID NO: 230869 - DNA, 13 bp, Artificial Sequence
  Oligonucleotide for detection of SNP TSC0056293
gatttaatataat

SEQ ID NO: 230870 - DNA, 13 bp, Artificial Sequence
  Oligonucleotide for detection of SNP TSC0056293
attatattaaatc

SEQ ID NO: 230871 - DNA, 13 bp, Artificial Sequence
  Oligonucleotide for detection of SNP TSC0056294
gaggtatgggtty

SEQ ID NO: 230872 - DNA, 13 bp, Artificial Sequence
  Oligonucleotide for detection of SNP TSC0056294
raacccatacctc

SEQ ID NO: 230873 - DNA, 13 bp, Artificial Sequence
  Oligonucleotide for detection of SNP TSC0056294
gaggtacgggtty

SEQ ID NO: 230874 - DNA, 13 bp, Artificial Sequence
  Oligonucleotide for detection of SNP TSC0056294
raacccgtacctc

SEQ ID NO: 230875 - DNA, 13 bp, Artificial Sequence
  Oligonucleotide for detection of SNP TSC0056294
ggatttgtattty

SEQ ID NO: 230876 - DNA, 13 bp, Artificial Sequence
  Oligonucleotide for detection of SNP TSC0056294
raaatacaaatcc

SEQ ID NO: 230877 - DNA, 13 bp, Artificial Sequence
  Oligonucleotide for detection of SNP TSC0056294
ggatttatattty

SEQ ID NO: 230878 - DNA, 13 bp, Artificial Sequence
  Oligonucleotide for detection of SNP TSC0056294
raaatataaatcc

SEQ ID NO: 230879 - DNA, 13 bp, Artificial Sequence
  Oligonucleotide for detection of SNP TSC0056294
ggattcgtattty

SEQ ID NO: 230880 - DNA, 13 bp, Artificial Sequence
  Oligonucleotide for detection of SNP TSC0056294
raaatacgaatcc

SEQ ID NO: 230881 - DNA, 13 bp, Artificial Sequence
  Oligonucleotide for detection of SNP TSC0056295
ttagagttggtta

SEQ ID NO: 230882 - DNA, 13 bp, Artificial Sequence
  Oligonucleotide for detection of SNP TSC0056295
taaccaactctaa

SEQ ID NO: 230883 - DNA, 13 bp, Artificial Sequence
  Oligonucleotide for detection of SNP TSC0056295
ttagaggtggtta

SEQ ID NO: 230884 - DNA, 13 bp, Artificial Sequence
  Oligonucleotide for detection of SNP TSC0056295
taaccacctctaa

SEQ ID NO: 230885 - DNA, 13 bp, Artificial Sequence
  Oligonucleotide for detection of SNP TSC0056295
tggttagttttga

SEQ ID NO: 230886 - DNA, 13 bp, Artificial Sequence
  Oligonucleotide for detection of SNP TSC0056295
tcaaaactaacca

SEQ ID NO: 230887 - DNA, 13 bp, Artificial Sequence
  Oligonucleotide for detection of SNP TSC0056295
tggttatttttga

SEQ ID NO: 230888 - DNA, 13 bp, Artificial Sequence
  Oligonucleotide for detection of SNP TSC0056295
tcaaaaataacca

SEQ ID NO: 230889 - DNA, 13 bp, Artificial Sequence
  Oligonucleotide for detection of SNP TSC0056296
gaattaaggataa

SEQ ID NO: 230890 - DNA, 13 bp, Artificial Sequence
  Oligonucleotide for detection of SNP TSC0056296
ttatccttaattc

SEQ ID NO: 230891 - DNA, 13 bp, Artificial Sequence
  Oligonucleotide for detection of SNP TSC0056296
gaattagggataa

SEQ ID NO: 230892 - DNA, 13 bp, Artificial Sequence
  Oligonucleotide for detection of SNP TSC0056296
ttatccctaattc

SEQ ID NO: 230893 - DNA, 13 bp, Artificial Sequence
  Oligonucleotide for detection of SNP TSC0056298
ttagtaaaggttg

SEQ ID NO: 230894 - DNA, 13 bp, Artificial Sequence
  Oligonucleotide for detection of SNP TSC0056298
caacctttactaa

SEQ ID NO: 230895 - DNA, 13 bp, Artificial Sequence
  Oligonucleotide for detection of SNP TSC0056298
ttagtagaggttg

SEQ ID NO: 230896 - DNA, 13 bp, Artificial Sequence
  Oligonucleotide for detection of SNP TSC0056298
caacctctactaa

SEQ ID NO: 230897 - DNA, 13 bp, Artificial Sequence
  Oligonucleotide for detection of SNP TSC0056299
tttagagttttaa

SEQ ID NO: 230898 - DNA, 13 bp, Artificial Sequence
  Oligonucleotide for detection of SNP TSC0056299
ttaaaactctaaa

SEQ ID NO: 230899 - DNA, 13 bp, Artificial Sequence
  Oligonucleotide for detection of SNP TSC0056299
tttagaattttaa

SEQ ID NO: 230900 - DNA, 13 bp, Artificial Sequence
  Oligonucleotide for detection of SNP TSC0056299
ttaaaattctaaa

SEQ ID NO: 230901 - DNA, 13 bp, Artificial Sequence
  Oligonucleotide for detection of SNP TSC0056300
gagaatgtgtgtt

SEQ ID NO: 230902 - DNA, 13 bp, Artificial Sequence
  Oligonucleotide for detection of SNP TSC0056300
aacacacattctc

SEQ ID NO: 230903 - DNA, 13 bp, Artificial Sequence
  Oligonucleotide for detection of SNP TSC0056300
gagaatatgtgtt

SEQ ID NO: 230904 - DNA, 13 bp, Artificial Sequence
  Oligonucleotide for detection of SNP TSC0056300
aacacatattctc

SEQ ID NO: 230905 - DNA, 13 bp, Artificial Sequence
  Oligonucleotide for detection of SNP TSC0056302
agttaaagtttty

SEQ ID NO: 230906 - DNA, 13 bp, Artificial Sequence
  Oligonucleotide for detection of SNP TSC0056302
raaaactttaact

SEQ ID NO: 230907 - DNA, 13 bp, Artificial Sequence
  Oligonucleotide for detection of SNP TSC0056302
agttaaggtttty

SEQ ID NO: 230908 - DNA, 13 bp, Artificial Sequence
  Oligonucleotide for detection of SNP TSC0056302
raaaaccttaact

SEQ ID NO: 230909 - DNA, 13 bp, Artificial Sequence
  Oligonucleotide for detection of SNP TSC0056303
tatttgtgaatag

SEQ ID NO: 230910 - DNA, 13 bp, Artificial Sequence
  Oligonucleotide for detection of SNP TSC0056303
ctattcacaaata

SEQ ID NO: 230911 - DNA, 13 bp, Artificial Sequence
  Oligonucleotide for detection of SNP TSC0056303
tatttgggaatag

SEQ ID NO: 230912 - DNA, 13 bp, Artificial Sequence
  Oligonucleotide for detection of SNP TSC0056303
ctattcccaaata

SEQ ID NO: 230913 - DNA, 13 bp, Artificial Sequence
  Oligonucleotide for detection of SNP TSC0056303
ttgtttataagtg

SEQ ID NO: 230914 - DNA, 13 bp, Artificial Sequence
  Oligonucleotide for detection of SNP TSC0056303
cacttataaacaa

SEQ ID NO: 230915 - DNA, 13 bp, Artificial Sequence
  Oligonucleotide for detection of SNP TSC0056303
ttgtttttaagtg

SEQ ID NO: 230916 - DNA, 13 bp, Artificial Sequence
  Oligonucleotide for detection of SNP TSC0056303
cacttaaaaacaa

SEQ ID NO: 230917 - DNA, 13 bp, Artificial Sequence
  Oligonucleotide for detection of SNP TSC0007627
gtttgggttatgg

SEQ ID NO: 230918 - DNA, 13 bp, Artificial Sequence
  Oligonucleotide for detection of SNP TSC0007627
ccataacccaaac

SEQ ID NO: 230919 - DNA, 13 bp, Artificial Sequence
  Oligonucleotide for detection of SNP TSC0007627
gtttggattatgg

SEQ ID NO: 230920 - DNA, 13 bp, Artificial Sequence
  Oligonucleotide for detection of SNP TSC0007627
ccataatccaaac

SEQ ID NO: 230921 - DNA, 13 bp, Artificial Sequence
  Oligonucleotide for detection of SNP TSC0056304
ggggtagttttty

SEQ ID NO: 230922 - DNA, 13 bp, Artificial Sequence
  Oligonucleotide for detection of SNP TSC0056304
raaaaactacccc

SEQ ID NO: 230923 - DNA, 13 bp, Artificial Sequence
  Oligonucleotide for detection of SNP TSC0056304
ggggtaattttty

SEQ ID NO: 230924 - DNA, 13 bp, Artificial Sequence
  Oligonucleotide for detection of SNP TSC0056304
raaaaattacccc

SEQ ID NO: 230925 - DNA, 13 bp, Artificial Sequence
  Oligonucleotide for detection of SNP TSC0056305
ttgtatttattaa

SEQ ID NO: 230926 - DNA, 13 bp, Artificial Sequence
  Oligonucleotide for detection of SNP TSC0056305
ttaataaatacaa

SEQ ID NO: 230927 - DNA, 13 bp, Artificial Sequence
  Oligonucleotide for detection of SNP TSC0056305
ttgtatgtattaa

SEQ ID NO: 230928 - DNA, 13 bp, Artificial Sequence
  Oligonucleotide for detection of SNP TSC0056305
ttaatacatacaa

SEQ ID NO: 230929 - DNA, 13 bp, Artificial Sequence
  Oligonucleotide for detection of SNP TSC0056305
ttgtacgtattaa

SEQ ID NO: 230930 - DNA, 13 bp, Artificial Sequence
  Oligonucleotide for detection of SNP TSC0056305
ttaatacgtacaa

SEQ ID NO: 230931 - DNA, 13 bp, Artificial Sequence
  Oligonucleotide for detection of SNP TSC0056305
ttggtgggtgtag

SEQ ID NO: 230932 - DNA, 13 bp, Artificial Sequence
  Oligonucleotide for detection of SNP TSC0056305
ctacacccaccaa

SEQ ID NO: 230933 - DNA, 13 bp, Artificial Sequence
  Oligonucleotide for detection of SNP TSC0056305
ttggtgtgtgtag

SEQ ID NO: 230934 - DNA, 13 bp, Artificial Sequence
  Oligonucleotide for detection of SNP TSC0056305
ctacacacaccaa

SEQ ID NO: 230935 - DNA, 13 bp, Artificial Sequence
  Oligonucleotide for detection of SNP TSC0056305
ttggtgcgtgtag

SEQ ID NO: 230936 - DNA, 13 bp, Artificial Sequence
  Oligonucleotide for detection of SNP TSC0056305
ctacacgcaccaa

SEQ ID NO: 230937 - DNA, 13 bp, Artificial Sequence
  Oligonucleotide for detection of SNP TSC0008219
tgagataggtggt

SEQ ID NO: 230938 - DNA, 13 bp, Artificial Sequence
  Oligonucleotide for detection of SNP TSC0008219
accacctatctca

SEQ ID NO: 230939 - DNA, 13 bp, Artificial Sequence
  Oligonucleotide for detection of SNP TSC0008219
tgagatgggtggt

SEQ ID NO: 230940 - DNA, 13 bp, Artificial Sequence
  Oligonucleotide for detection of SNP TSC0008219
accacccatctca

SEQ ID NO: 230941 - DNA, 13 bp, Artificial Sequence
  Oligonucleotide for detection of SNP TSC0007039
gaataataaaggg

SEQ ID NO: 230942 - DNA, 13 bp, Artificial Sequence
  Oligonucleotide for detection of SNP TSC0007039
ccctttattattc

SEQ ID NO: 230943 - DNA, 13 bp, Artificial Sequence
  Oligonucleotide for detection of SNP TSC0007039
gaataagaaaggg

SEQ ID NO: 230944 - DNA, 13 bp, Artificial Sequence
  Oligonucleotide for detection of SNP TSC0007039
ccctttcttattc

SEQ ID NO: 230945 - DNA, 13 bp, Artificial Sequence
  Oligonucleotide for detection of SNP TSC0007040
tgttgtatttaaa

SEQ ID NO: 230946 - DNA, 13 bp, Artificial Sequence
  Oligonucleotide for detection of SNP TSC0007040
tttaaatacaaca

SEQ ID NO: 230947 - DNA, 13 bp, Artificial Sequence
  Oligonucleotide for detection of SNP TSC0007040
tgttgtgtttaaa

SEQ ID NO: 230948 - DNA, 13 bp, Artificial Sequence
  Oligonucleotide for detection of SNP TSC0007040
tttaaacacaaca

SEQ ID NO: 230949 - DNA, 13 bp, Artificial Sequence
  Oligonucleotide for detection of SNP TSC0056311
ttgttaggatgty

SEQ ID NO: 230950 - DNA, 13 bp, Artificial Sequence
  Oligonucleotide for detection of SNP TSC0056311
racatcctaacaa

SEQ ID NO: 230951 - DNA, 13 bp, Artificial Sequence
  Oligonucleotide for detection of SNP TSC0056311
ttgttaagatgty

SEQ ID NO: 230952 - DNA, 13 bp, Artificial Sequence
  Oligonucleotide for detection of SNP TSC0056311
racatcttaacaa

SEQ ID NO: 230953 - DNA, 13 bp, Artificial Sequence
  Oligonucleotide for detection of SNP TSC0056312
aaatagatttgag

SEQ ID NO: 230954 - DNA, 13 bp, Artificial Sequence
  Oligonucleotide for detection of SNP TSC0056312
ctcaaatctattt

SEQ ID NO: 230955 - DNA, 13 bp, Artificial Sequence
  Oligonucleotide for detection of SNP TSC0056312
aaataggtttgag

SEQ ID NO: 230956 - DNA, 13 bp, Artificial Sequence
  Oligonucleotide for detection of SNP TSC0056312
ctcaaacctattt

SEQ ID NO: 230957 - DNA, 13 bp, Artificial Sequence
  Oligonucleotide for detection of SNP TSC0056313
ttatatgtaatag

SEQ ID NO: 230958 - DNA, 13 bp, Artificial Sequence
  Oligonucleotide for detection of SNP TSC0056313
ctattacatataa

SEQ ID NO: 230959 - DNA, 13 bp, Artificial Sequence
  Oligonucleotide for detection of SNP TSC0056313
ttatatataatag

SEQ ID NO: 230960 - DNA, 13 bp, Artificial Sequence
  Oligonucleotide for detection of SNP TSC0056313
ctattatatataa

SEQ ID NO: 230961 - DNA, 13 bp, Artificial Sequence
  Oligonucleotide for detection of SNP TSC0005180
tttttgagtggtg

SEQ ID NO: 230962 - DNA, 13 bp, Artificial Sequence
  Oligonucleotide for detection of SNP TSC0005180
caccactcaaaaa

SEQ ID NO: 230963 - DNA, 13 bp, Artificial Sequence
  Oligonucleotide for detection of SNP TSC0005180
tttttgggtggtg

SEQ ID NO: 230964 - DNA, 13 bp, Artificial Sequence
  Oligonucleotide for detection of SNP TSC0005180
caccacccaaaaa

SEQ ID NO: 230965 - DNA, 13 bp, Artificial Sequence
  Oligonucleotide for detection of SNP TSC0056314
gtatggagagaag

SEQ ID NO: 230966 - DNA, 13 bp, Artificial Sequence
  Oligonucleotide for detection of SNP TSC0056314
cttctctccatac

SEQ ID NO: 230967 - DNA, 13 bp, Artificial Sequence
  Oligonucleotide for detection of SNP TSC0056314
gtatggtgagaag

SEQ ID NO: 230968 - DNA, 13 bp, Artificial Sequence
  Oligonucleotide for detection of SNP TSC0056314
cttctcaccatac

SEQ ID NO: 230969 - DNA, 13 bp, Artificial Sequence
  Oligonucleotide for detection of SNP TSC0056315
taaataagatgta

SEQ ID NO: 230970 - DNA, 13 bp, Artificial Sequence
  Oligonucleotide for detection of SNP TSC0056315
tacatcttattta

SEQ ID NO: 230971 - DNA, 13 bp, Artificial Sequence
  Oligonucleotide for detection of SNP TSC0056315
taaataggatgta

SEQ ID NO: 230972 - DNA, 13 bp, Artificial Sequence
  Oligonucleotide for detection of SNP TSC0056315
tacatcctattta

SEQ ID NO: 230973 - DNA, 13 bp, Artificial Sequence
  Oligonucleotide for detection of SNP TSC0056316
ataagatgtatga

SEQ ID NO: 230974 - DNA, 13 bp, Artificial Sequence
  Oligonucleotide for detection of SNP TSC0056316
tcatacatcttat

SEQ ID NO: 230975 - DNA, 13 bp, Artificial Sequence
  Oligonucleotide for detection of SNP TSC0056316
ataagacgtatga

SEQ ID NO: 230976 - DNA, 13 bp, Artificial Sequence
  Oligonucleotide for detection of SNP TSC0056316
tcatacgtcttat

SEQ ID NO: 230977 - DNA, 13 bp, Artificial Sequence
  Oligonucleotide for detection of SNP TSC0056317
aaaaattgaaata

SEQ ID NO: 230978 - DNA, 13 bp, Artificial Sequence
  Oligonucleotide for detection of SNP TSC0056317
tatttcaattttt

SEQ ID NO: 230979 - DNA, 13 bp, Artificial Sequence
  Oligonucleotide for detection of SNP TSC0056317
aaaaatggaaata

SEQ ID NO: 230980 - DNA, 13 bp, Artificial Sequence
  Oligonucleotide for detection of SNP TSC0056317
tatttccattttt

SEQ ID NO: 230981 - DNA, 13 bp, Artificial Sequence
  Oligonucleotide for detection of SNP TSC0056318
gaggtaggaagty

SEQ ID NO: 230982 - DNA, 13 bp, Artificial Sequence
  Oligonucleotide for detection of SNP TSC0056318
racttcctacctc

SEQ ID NO: 230983 - DNA, 13 bp, Artificial Sequence
  Oligonucleotide for detection of SNP TSC0056318
gaggtaagaagty

SEQ ID NO: 230984 - DNA, 13 bp, Artificial Sequence
  Oligonucleotide for detection of SNP TSC0056318
racttcttacctc

SEQ ID NO: 230985 - DNA, 13 bp, Artificial Sequence
  Oligonucleotide for detection of SNP TSC0009661
gaaagtgtttgta

SEQ ID NO: 230986 - DNA, 13 bp, Artificial Sequence
  Oligonucleotide for detection of SNP TSC0009661
tacaaacactttc

SEQ ID NO: 230987 - DNA, 13 bp, Artificial Sequence
  Oligonucleotide for detection of SNP TSC0009661
gaaagtatttgta

SEQ ID NO: 230988 - DNA, 13 bp, Artificial Sequence
  Oligonucleotide for detection of SNP TSC0009661
tacaaatactttc

SEQ ID NO: 230989 - DNA, 13 bp, Artificial Sequence
  Oligonucleotide for detection of SNP TSC0056319
tggttcgtatttg

SEQ ID NO: 230990 - DNA, 13 bp, Artificial Sequence
  Oligonucleotide for detection of SNP TSC0056319
caaatacgaacca

SEQ ID NO: 230991 - DNA, 13 bp, Artificial Sequence
  Oligonucleotide for detection of SNP TSC0005418
ttttaaggtttag

SEQ ID NO: 230992 - DNA, 13 bp, Artificial Sequence
  Oligonucleotide for detection of SNP TSC0005418
ctaaaccttaaaa

SEQ ID NO: 230993 - DNA, 13 bp, Artificial Sequence
  Oligonucleotide for detection of SNP TSC0005418
ttttaaagtttag

SEQ ID NO: 230994 - DNA, 13 bp, Artificial Sequence
  Oligonucleotide for detection of SNP TSC0005418
ctaaactttaaaa

SEQ ID NO: 230995 - DNA, 13 bp, Artificial Sequence
  Oligonucleotide for detection of SNP TSC0056321
agaaaaagggaag

SEQ ID NO: 230996 - DNA, 13 bp, Artificial Sequence
  Oligonucleotide for detection of SNP TSC0056321
cttccctttttct

SEQ ID NO: 230997 - DNA, 13 bp, Artificial Sequence
  Oligonucleotide for detection of SNP TSC0056321
agaaaaggggaag

SEQ ID NO: 230998 - DNA, 13 bp, Artificial Sequence
  Oligonucleotide for detection of SNP TSC0056321
cttccccttttct

SEQ ID NO: 230999 - DNA, 13 bp, Artificial Sequence
  Oligonucleotide for detection of SNP TSC0056323
tgtttaaatttty

SEQ ID NO: 231000 - DNA, 13 bp, Artificial Sequence
  Oligonucleotide for detection of SNP TSC0056323
raaaatttaaaca

SEQ ID NO: 231001 - DNA, 13 bp, Artificial Sequence
  Oligonucleotide for detection of SNP TSC0056323
gaaaatttgaata

SEQ ID NO: 231002 - DNA, 13 bp, Artificial Sequence
  Oligonucleotide for detection of SNP TSC0056323
tattcaaattttc

SEQ ID NO: 231003 - DNA, 13 bp, Artificial Sequence
  Oligonucleotide for detection of SNP TSC0056323
gaaaatgtgaata

SEQ ID NO: 231004 - DNA, 13 bp, Artificial Sequence
  Oligonucleotide for detection of SNP TSC0056323
tattcacattttc

SEQ ID NO: 231005 - DNA, 13 bp, Artificial Sequence
  Oligonucleotide for detection of SNP TSC0007714
gtgtatttaatty

SEQ ID NO: 231006 - DNA, 13 bp, Artificial Sequence
  Oligonucleotide for detection of SNP TSC0007714
raattaaatacac

SEQ ID NO: 231007 - DNA, 13 bp, Artificial Sequence
  Oligonucleotide for detection of SNP TSC0007714
gtgtatgtaatty

SEQ ID NO: 231008 - DNA, 13 bp, Artificial Sequence
  Oligonucleotide for detection of SNP TSC0007714
raattacatacac

SEQ ID NO: 231009 - DNA, 13 bp, Artificial Sequence
  Oligonucleotide for detection of SNP TSC0007714
gagttgaatgtay

SEQ ID NO: 231010 - DNA, 13 bp, Artificial Sequence
  Oligonucleotide for detection of SNP TSC0007714
rtacattcaactc

SEQ ID NO: 231011 - DNA, 13 bp, Artificial Sequence
  Oligonucleotide for detection of SNP TSC0007714
gagttgtatgtay

SEQ ID NO: 231012 - DNA, 13 bp, Artificial Sequence
  Oligonucleotide for detection of SNP TSC0007714
rtacatacaactc

SEQ ID NO: 231013 - DNA, 13 bp, Artificial Sequence
  Oligonucleotide for detection of SNP TSC0056324
atttttttgaggt

SEQ ID NO: 231014 - DNA, 13 bp, Artificial Sequence
  Oligonucleotide for detection of SNP TSC0056324
acctcaaaaaaat

SEQ ID NO: 231015 - DNA, 13 bp, Artificial Sequence
  Oligonucleotide for detection of SNP TSC0056324
atttttgtgaggt

SEQ ID NO: 231016 - DNA, 13 bp, Artificial Sequence
  Oligonucleotide for detection of SNP TSC0056324
acctcacaaaaat

SEQ ID NO: 231017 - DNA, 13 bp, Artificial Sequence
  Oligonucleotide for detection of SNP TSC0056324
attttaaaaagat

SEQ ID NO: 231018 - DNA, 13 bp, Artificial Sequence
  Oligonucleotide for detection of SNP TSC0056324
atctttttaaaat

SEQ ID NO: 231019 - DNA, 13 bp, Artificial Sequence
  Oligonucleotide for detection of SNP TSC0056324
attttataaagat

SEQ ID NO: 231020 - DNA, 13 bp, Artificial Sequence
  Oligonucleotide for detection of SNP TSC0056324
atctttataaaat

SEQ ID NO: 231021 - DNA, 13 bp, Artificial Sequence
  Oligonucleotide for detection of SNP TSC0056325
tttgtaaaatttg

SEQ ID NO: 231022 - DNA, 13 bp, Artificial Sequence
  Oligonucleotide for detection of SNP TSC0056325
caaattttacaaa

SEQ ID NO: 231023 - DNA, 13 bp, Artificial Sequence
  Oligonucleotide for detection of SNP TSC0056325
tttgtataatttg

SEQ ID NO: 231024 - DNA, 13 bp, Artificial Sequence
  Oligonucleotide for detection of SNP TSC0056325
caaattatacaaa

SEQ ID NO: 231025 - DNA, 13 bp, Artificial Sequence
  Oligonucleotide for detection of SNP TSC0056325
tagattttgtaaa

SEQ ID NO: 231026 - DNA, 13 bp, Artificial Sequence
  Oligonucleotide for detection of SNP TSC0056325
tttacaaaatcta

SEQ ID NO: 231027 - DNA, 13 bp, Artificial Sequence
  Oligonucleotide for detection of SNP TSC0056325
tagattgtgtaaa

SEQ ID NO: 231028 - DNA, 13 bp, Artificial Sequence
  Oligonucleotide for detection of SNP TSC0056325
tttacacaatcta

SEQ ID NO: 231029 - DNA, 13 bp, Artificial Sequence
  Oligonucleotide for detection of SNP TSC0004669
gtattttgaatta

SEQ ID NO: 231030 - DNA, 13 bp, Artificial Sequence
  Oligonucleotide for detection of SNP TSC0004669
taattcaaaatac

SEQ ID NO: 231031 - DNA, 13 bp, Artificial Sequence
  Oligonucleotide for detection of SNP TSC0004669
gtatttcgaatta

SEQ ID NO: 231032 - DNA, 13 bp, Artificial Sequence
  Oligonucleotide for detection of SNP TSC0004669
taattcgaaatac

SEQ ID NO: 231033 - DNA, 13 bp, Artificial Sequence
  Oligonucleotide for detection of SNP TSC0004669
tgatttggagtgy

SEQ ID NO: 231034 - DNA, 13 bp, Artificial Sequence
  Oligonucleotide for detection of SNP TSC0004669
rcactccaaatca

SEQ ID NO: 231035 - DNA, 13 bp, Artificial Sequence
  Oligonucleotide for detection of SNP TSC0004669
tgatttagagtgy

SEQ ID NO: 231036 - DNA, 13 bp, Artificial Sequence
  Oligonucleotide for detection of SNP TSC0004669
rcactctaaatca

SEQ ID NO: 231037 - DNA, 13 bp, Artificial Sequence
  Oligonucleotide for detection of SNP TSC0004669
tgattcggagtgy

SEQ ID NO: 231038 - DNA, 13 bp, Artificial Sequence
  Oligonucleotide for detection of SNP TSC0004669
rcactccgaatca

SEQ ID NO: 231039 - DNA, 13 bp, Artificial Sequence
  Oligonucleotide for detection of SNP TSC0056330
tagaagatttttt

SEQ ID NO: 231040 - DNA, 13 bp, Artificial Sequence
  Oligonucleotide for detection of SNP TSC0056330
aaaaaatcttcta

SEQ ID NO: 231041 - DNA, 13 bp, Artificial Sequence
  Oligonucleotide for detection of SNP TSC0056330
aaaaggtttttta

SEQ ID NO: 231042 - DNA, 13 bp, Artificial Sequence
  Oligonucleotide for detection of SNP TSC0056330
taaaaaacctttt

SEQ ID NO: 231043 - DNA, 13 bp, Artificial Sequence
  Oligonucleotide for detection of SNP TSC0056330
aaaagggttttta

SEQ ID NO: 231044 - DNA, 13 bp, Artificial Sequence
  Oligonucleotide for detection of SNP TSC0056330
taaaaaccctttt

SEQ ID NO: 231045 - DNA, 13 bp, Artificial Sequence
  Oligonucleotide for detection of SNP TSC0006664
gaaaaatagggta

SEQ ID NO: 231046 - DNA, 13 bp, Artificial Sequence
  Oligonucleotide for detection of SNP TSC0006664
taccctatttttc

SEQ ID NO: 231047 - DNA, 13 bp, Artificial Sequence
  Oligonucleotide for detection of SNP TSC0006664
gaaaaagagggta

SEQ ID NO: 231048 - DNA, 13 bp, Artificial Sequence
  Oligonucleotide for detection of SNP TSC0006664
taccctctttttc

SEQ ID NO: 231049 - DNA, 13 bp, Artificial Sequence
  Oligonucleotide for detection of SNP TSC0056333
tatttcgtttaat

SEQ ID NO: 231050 - DNA, 13 bp, Artificial Sequence
  Oligonucleotide for detection of SNP TSC0056333
attaaacgaaata

SEQ ID NO: 231051 - DNA, 13 bp, Artificial Sequence
  Oligonucleotide for detection of SNP TSC0056333
attaagtgaaata

SEQ ID NO: 231052 - DNA, 13 bp, Artificial Sequence
  Oligonucleotide for detection of SNP TSC0056333
tatttcacttaat

SEQ ID NO: 231053 - DNA, 13 bp, Artificial Sequence
  Oligonucleotide for detection of SNP TSC0056333
attaagcgaaata

SEQ ID NO: 231054 - DNA, 13 bp, Artificial Sequence
  Oligonucleotide for detection of SNP TSC0056333
tatttcgcttaat

SEQ ID NO: 231055 - DNA, 13 bp, Artificial Sequence
  Oligonucleotide for detection of SNP TSC0056334
atatttggtttat

SEQ ID NO: 231056 - DNA, 13 bp, Artificial Sequence
  Oligonucleotide for detection of SNP TSC0056334
ataaaccaaatat

SEQ ID NO: 231057 - DNA, 13 bp, Artificial Sequence
  Oligonucleotide for detection of SNP TSC0056334
ataaataaaatgt

SEQ ID NO: 231058 - DNA, 13 bp, Artificial Sequence
  Oligonucleotide for detection of SNP TSC0056334
acattttatttat

SEQ ID NO: 231059 - DNA, 13 bp, Artificial Sequence
  Oligonucleotide for detection of SNP TSC0056334
ataaattaaatgt

SEQ ID NO: 231060 - DNA, 13 bp, Artificial Sequence
  Oligonucleotide for detection of SNP TSC0056334
acatttaatttat

SEQ ID NO: 231061 - DNA, 13 bp, Artificial Sequence
  Oligonucleotide for detection of SNP TSC0007360
gtgaattggggga

SEQ ID NO: 231062 - DNA, 13 bp, Artificial Sequence
  Oligonucleotide for detection of SNP TSC0007360
tcccccaattcac

SEQ ID NO: 231063 - DNA, 13 bp, Artificial Sequence
  Oligonucleotide for detection of SNP TSC0007360
gtgaatgggggga

SEQ ID NO: 231064 - DNA, 13 bp, Artificial Sequence
  Oligonucleotide for detection of SNP TSC0007360
tccccccattcac

SEQ ID NO: 231065 - DNA, 13 bp, Artificial Sequence
  Oligonucleotide for detection of SNP TSC0056335
ataaaagaaaaaa

SEQ ID NO: 231066 - DNA, 13 bp, Artificial Sequence
  Oligonucleotide for detection of SNP TSC0056335
ttttttcttttat

SEQ ID NO: 231067 - DNA, 13 bp, Artificial Sequence
  Oligonucleotide for detection of SNP TSC0056343
atttaaaaaattt

SEQ ID NO: 231068 - DNA, 13 bp, Artificial Sequence
  Oligonucleotide for detection of SNP TSC0056343
aaattttttaaat

SEQ ID NO: 231069 - DNA, 13 bp, Artificial Sequence
  Oligonucleotide for detection of SNP TSC0056344
tagtttgggatta

SEQ ID NO: 231070 - DNA, 13 bp, Artificial Sequence
  Oligonucleotide for detection of SNP TSC0056344
taatcccaaacta

SEQ ID NO: 231071 - DNA, 13 bp, Artificial Sequence
  Oligonucleotide for detection of SNP TSC0056344
tagtttaggatta

SEQ ID NO: 231072 - DNA, 13 bp, Artificial Sequence
  Oligonucleotide for detection of SNP TSC0056344
taatcctaaacta

SEQ ID NO: 231073 - DNA, 13 bp, Artificial Sequence
  Oligonucleotide for detection of SNP TSC0056352
aagtttatgatta

SEQ ID NO: 231074 - DNA, 13 bp, Artificial Sequence
  Oligonucleotide for detection of SNP TSC0056352
taatcataaactt

SEQ ID NO: 231075 - DNA, 13 bp, Artificial Sequence
  Oligonucleotide for detection of SNP TSC0056352
aagtttgtgatta

SEQ ID NO: 231076 - DNA, 13 bp, Artificial Sequence
  Oligonucleotide for detection of SNP TSC0056352
taatcacaaactt

SEQ ID NO: 231077 - DNA, 13 bp, Artificial Sequence
  Oligonucleotide for detection of SNP TSC0056354
aaatatgaatatt

SEQ ID NO: 231078 - DNA, 13 bp, Artificial Sequence
  Oligonucleotide for detection of SNP TSC0056354
aatattcatattt

SEQ ID NO: 231079 - DNA, 13 bp, Artificial Sequence
  Oligonucleotide for detection of SNP TSC0056354
aaatataaatatt

SEQ ID NO: 231080 - DNA, 13 bp, Artificial Sequence
  Oligonucleotide for detection of SNP TSC0056354
aatatttatattt

SEQ ID NO: 231081 - DNA, 13 bp, Artificial Sequence
  Oligonucleotide for detection of SNP TSC0056354
aaatacgaatatt

SEQ ID NO: 231082 - DNA, 13 bp, Artificial Sequence
  Oligonucleotide for detection of SNP TSC0056354
aatattcgtattt

SEQ ID NO: 231083 - DNA, 13 bp, Artificial Sequence
  Oligonucleotide for detection of SNP TSC0056355
aaggttggaaatt

SEQ ID NO: 231084 - DNA, 13 bp, Artificial Sequence
  Oligonucleotide for detection of SNP TSC0056355
aatttccaacctt

SEQ ID NO: 231085 - DNA, 13 bp, Artificial Sequence
  Oligonucleotide for detection of SNP TSC0056355
aaggttagaaatt

SEQ ID NO: 231086 - DNA, 13 bp, Artificial Sequence
  Oligonucleotide for detection of SNP TSC0056355
aatttctaacctt

SEQ ID NO: 231087 - DNA, 13 bp, Artificial Sequence
  Oligonucleotide for detection of SNP TSC0056356
ttattttagtttt

SEQ ID NO: 231088 - DNA, 13 bp, Artificial Sequence
  Oligonucleotide for detection of SNP TSC0056356
aaaactaaaataa

SEQ ID NO: 231089 - DNA, 13 bp, Artificial Sequence
  Oligonucleotide for detection of SNP TSC0056356
ttattcgagtttt

SEQ ID NO: 231090 - DNA, 13 bp, Artificial Sequence
  Oligonucleotide for detection of SNP TSC0056356
aaaactcgaataa

SEQ ID NO: 231091 - DNA, 13 bp, Artificial Sequence
  Oligonucleotide for detection of SNP TSC0056356
aaggttggaatga

SEQ ID NO: 231092 - DNA, 13 bp, Artificial Sequence
  Oligonucleotide for detection of SNP TSC0056356
tcattccaacctt

SEQ ID NO: 231093 - DNA, 13 bp, Artificial Sequence
  Oligonucleotide for detection of SNP TSC0056356
aaggtttgaatga

SEQ ID NO: 231094 - DNA, 13 bp, Artificial Sequence
  Oligonucleotide for detection of SNP TSC0056356
tcattcaaacctt

SEQ ID NO: 231095 - DNA, 13 bp, Artificial Sequence
  Oligonucleotide for detection of SNP TSC0056356
aaggttcgaatga

SEQ ID NO: 231096 - DNA, 13 bp, Artificial Sequence
  Oligonucleotide for detection of SNP TSC0056356
tcattcgaacctt

SEQ ID NO: 231097 - DNA, 13 bp, Artificial Sequence
  Oligonucleotide for detection of SNP TSC0056358
ttgtgtgttataa

SEQ ID NO: 231098 - DNA, 13 bp, Artificial Sequence
  Oligonucleotide for detection of SNP TSC0056358
ttataacacacaa

SEQ ID NO: 231099 - DNA, 13 bp, Artificial Sequence
  Oligonucleotide for detection of SNP TSC0056358
ttgtgtattataa

SEQ ID NO: 231100 - DNA, 13 bp, Artificial Sequence
  Oligonucleotide for detection of SNP TSC0056358
ttataatacacaa

SEQ ID NO: 231101 - DNA, 13 bp, Artificial Sequence
  Oligonucleotide for detection of SNP TSC0056360
tatggaaggtaaa

SEQ ID NO: 231102 - DNA, 13 bp, Artificial Sequence
  Oligonucleotide for detection of SNP TSC0056360
tttaccttccata

SEQ ID NO: 231103 - DNA, 13 bp, Artificial Sequence
  Oligonucleotide for detection of SNP TSC0056360
tatggatggtaaa

SEQ ID NO: 231104 - DNA, 13 bp, Artificial Sequence
  Oligonucleotide for detection of SNP TSC0056360
tttaccatccata

SEQ ID NO: 231105 - DNA, 13 bp, Artificial Sequence
  Oligonucleotide for detection of SNP TSC0056360
tatggacggtaaa

SEQ ID NO: 231106 - DNA, 13 bp, Artificial Sequence
  Oligonucleotide for detection of SNP TSC0056360
tttaccgtccata

SEQ ID NO: 231107 - DNA, 13 bp, Artificial Sequence
  Oligonucleotide for detection of SNP TSC0056361
ttgtgtatatgtt

SEQ ID NO: 231108 - DNA, 13 bp, Artificial Sequence
  Oligonucleotide for detection of SNP TSC0056361
aacatatacacaa

SEQ ID NO: 231109 - DNA, 13 bp, Artificial Sequence
  Oligonucleotide for detection of SNP TSC0056361
ttgtgtttatgtt

SEQ ID NO: 231110 - DNA, 13 bp, Artificial Sequence
  Oligonucleotide for detection of SNP TSC0056361
aacataaacacaa

SEQ ID NO: 231111 - DNA, 13 bp, Artificial Sequence
  Oligonucleotide for detection of SNP TSC0056361
agtatatatataa

SEQ ID NO: 231112 - DNA, 13 bp, Artificial Sequence
  Oligonucleotide for detection of SNP TSC0056361
ttatatatatact

SEQ ID NO: 231113 - DNA, 13 bp, Artificial Sequence
  Oligonucleotide for detection of SNP TSC0056361
agtatagatataa

SEQ ID NO: 231114 - DNA, 13 bp, Artificial Sequence
  Oligonucleotide for detection of SNP TSC0056361
ttatatctatact

SEQ ID NO: 231115 - DNA, 13 bp, Artificial Sequence
  Oligonucleotide for detection of SNP TSC0056362
atatttgtagaaa

SEQ ID NO: 231116 - DNA, 13 bp, Artificial Sequence
  Oligonucleotide for detection of SNP TSC0056362
tttctacaaatat

SEQ ID NO: 231117 - DNA, 13 bp, Artificial Sequence
  Oligonucleotide for detection of SNP TSC0056362
atatttatagaaa

SEQ ID NO: 231118 - DNA, 13 bp, Artificial Sequence
  Oligonucleotide for detection of SNP TSC0056362
tttctataaatat

SEQ ID NO: 231119 - DNA, 13 bp, Artificial Sequence
  Oligonucleotide for detection of SNP TSC0056365
gtaattgtataat

SEQ ID NO: 231120 - DNA, 13 bp, Artificial Sequence
  Oligonucleotide for detection of SNP TSC0056365
attatacaattac

SEQ ID NO: 231121 - DNA, 13 bp, Artificial Sequence
  Oligonucleotide for detection of SNP TSC0056365
gtaattatataat

SEQ ID NO: 231122 - DNA, 13 bp, Artificial Sequence
  Oligonucleotide for detection of SNP TSC0056365
attatataattac

SEQ ID NO: 231123 - DNA, 13 bp, Artificial Sequence
  Oligonucleotide for detection of SNP TSC0056369
ttttatttgatga

SEQ ID NO: 231124 - DNA, 13 bp, Artificial Sequence
  Oligonucleotide for detection of SNP TSC0056369
tcatcaaataaaa

SEQ ID NO: 231125 - DNA, 13 bp, Artificial Sequence
  Oligonucleotide for detection of SNP TSC0056369
ttttatgtgatga

SEQ ID NO: 231126 - DNA, 13 bp, Artificial Sequence
  Oligonucleotide for detection of SNP TSC0056369
tcatcacataaaa

SEQ ID NO: 231127 - DNA, 13 bp, Artificial Sequence
  Oligonucleotide for detection of SNP TSC0056369
ttttattcgatga

SEQ ID NO: 231128 - DNA, 13 bp, Artificial Sequence
  Oligonucleotide for detection of SNP TSC0056369
tcatcgaataaaa

SEQ ID NO: 231129 - DNA, 13 bp, Artificial Sequence
  Oligonucleotide for detection of SNP TSC0056369
ttttacgtgatga

SEQ ID NO: 231130 - DNA, 13 bp, Artificial Sequence
  Oligonucleotide for detection of SNP TSC0056369
tcatcacgtaaaa

SEQ ID NO: 231131 - DNA, 13 bp, Artificial Sequence
  Oligonucleotide for detection of SNP TSC0056369
ttttatgcgatga

SEQ ID NO: 231132 - DNA, 13 bp, Artificial Sequence
  Oligonucleotide for detection of SNP TSC0056369
tcatcgcataaaa

SEQ ID NO: 231133 - DNA, 13 bp, Artificial Sequence
  Oligonucleotide for detection of SNP TSC0056369
ttttacgcgatga

SEQ ID NO: 231134 - DNA, 13 bp, Artificial Sequence
  Oligonucleotide for detection of SNP TSC0056369
tcatcgcgtaaaa

SEQ ID NO: 231135 - DNA, 13 bp, Artificial Sequence
  Oligonucleotide for detection of SNP TSC0056369
ttattgagtagag

SEQ ID NO: 231136 - DNA, 13 bp, Artificial Sequence
  Oligonucleotide for detection of SNP TSC0056369
ctctactcaataa

SEQ ID NO: 231137 - DNA, 13 bp, Artificial Sequence
  Oligonucleotide for detection of SNP TSC0056369
ttattgtgtagag

SEQ ID NO: 231138 - DNA, 13 bp, Artificial Sequence
  Oligonucleotide for detection of SNP TSC0056369
ctctacacaataa

SEQ ID NO: 231139 - DNA, 13 bp, Artificial Sequence
  Oligonucleotide for detection of SNP TSC0056369
ttatcgagtagag

SEQ ID NO: 231140 - DNA, 13 bp, Artificial Sequence
  Oligonucleotide for detection of SNP TSC0056369
ctctactcgataa

SEQ ID NO: 231141 - DNA, 13 bp, Artificial Sequence
  Oligonucleotide for detection of SNP TSC0056369
ttatcgtgtagag

SEQ ID NO: 231142 - DNA, 13 bp, Artificial Sequence
  Oligonucleotide for detection of SNP TSC0056369
ctctacacgataa

SEQ ID NO: 231143 - DNA, 13 bp, Artificial Sequence
  Oligonucleotide for detection of SNP TSC0056369
ttattgcgtagag

SEQ ID NO: 231144 - DNA, 13 bp, Artificial Sequence
  Oligonucleotide for detection of SNP TSC0056369
ctctacgcaataa

SEQ ID NO: 231145 - DNA, 13 bp, Artificial Sequence
  Oligonucleotide for detection of SNP TSC0056369
ttatcgcgtagag

SEQ ID NO: 231146 - DNA, 13 bp, Artificial Sequence
  Oligonucleotide for detection of SNP TSC0056369
ctctacgcgataa

SEQ ID NO: 231147 - DNA, 13 bp, Artificial Sequence
  Oligonucleotide for detection of SNP TSC0056370
atttttggttgtg

SEQ ID NO: 231148 - DNA, 13 bp, Artificial Sequence
  Oligonucleotide for detection of SNP TSC0056370
cacaaccaaaaat

SEQ ID NO: 231149 - DNA, 13 bp, Artificial Sequence
  Oligonucleotide for detection of SNP TSC0056370
tataatgaggagt

SEQ ID NO: 231150 - DNA, 13 bp, Artificial Sequence
  Oligonucleotide for detection of SNP TSC0056370
actcctcattata

SEQ ID NO: 231151 - DNA, 13 bp, Artificial Sequence
  Oligonucleotide for detection of SNP TSC0056370
tataattaggagt

SEQ ID NO: 231152 - DNA, 13 bp, Artificial Sequence
  Oligonucleotide for detection of SNP TSC0056370
actcctaattata

SEQ ID NO: 231153 - DNA, 13 bp, Artificial Sequence
  Oligonucleotide for detection of SNP TSC0056370
tataacgaggagt

SEQ ID NO: 231154 - DNA, 13 bp, Artificial Sequence
  Oligonucleotide for detection of SNP TSC0056370
actcctcgttata

SEQ ID NO: 231155 - DNA, 13 bp, Artificial Sequence
  Oligonucleotide for detection of SNP TSC0056372
tatgtaggttttt

SEQ ID NO: 231156 - DNA, 13 bp, Artificial Sequence
  Oligonucleotide for detection of SNP TSC0056372
aaaaacctacata

SEQ ID NO: 231157 - DNA, 13 bp, Artificial Sequence
  Oligonucleotide for detection of SNP TSC0056372
tatgtaagttttt

SEQ ID NO: 231158 - DNA, 13 bp, Artificial Sequence
  Oligonucleotide for detection of SNP TSC0056372
aaaaacttacata

SEQ ID NO: 231159 - DNA, 13 bp, Artificial Sequence
  Oligonucleotide for detection of SNP TSC0056373
taatgatgttttt

SEQ ID NO: 231160 - DNA, 13 bp, Artificial Sequence
  Oligonucleotide for detection of SNP TSC0056373
aaaaacatcatta

SEQ ID NO: 231161 - DNA, 13 bp, Artificial Sequence
  Oligonucleotide for detection of SNP TSC0056373
taatgacgttttt

SEQ ID NO: 231162 - DNA, 13 bp, Artificial Sequence
  Oligonucleotide for detection of SNP TSC0056373
aaaaacgtcatta

SEQ ID NO: 231163 - DNA, 13 bp, Artificial Sequence
  Oligonucleotide for detection of SNP TSC0056373
aagaatgttatta

SEQ ID NO: 231164 - DNA, 13 bp, Artificial Sequence
  Oligonucleotide for detection of SNP TSC0056373
taataacattctt

SEQ ID NO: 231165 - DNA, 13 bp, Artificial Sequence
  Oligonucleotide for detection of SNP TSC0056373
aagaatattatta

SEQ ID NO: 231166 - DNA, 13 bp, Artificial Sequence
  Oligonucleotide for detection of SNP TSC0056373
taataatattctt

SEQ ID NO: 231167 - DNA, 13 bp, Artificial Sequence
  Oligonucleotide for detection of SNP TSC0056373
aagaacgttatta

SEQ ID NO: 231168 - DNA, 13 bp, Artificial Sequence
  Oligonucleotide for detection of SNP TSC0056373
taataacgttctt

SEQ ID NO: 231169 - DNA, 13 bp, Artificial Sequence
  Oligonucleotide for detection of SNP TSC0056375
taattatgagagt

SEQ ID NO: 231170 - DNA, 13 bp, Artificial Sequence
  Oligonucleotide for detection of SNP TSC0056375
actctcataatta

SEQ ID NO: 231171 - DNA, 13 bp, Artificial Sequence
  Oligonucleotide for detection of SNP TSC0056375
taattacgagagt

SEQ ID NO: 231172 - DNA, 13 bp, Artificial Sequence
  Oligonucleotide for detection of SNP TSC0056375
actctcgtaatta

SEQ ID NO: 231173 - DNA, 13 bp, Artificial Sequence
  Oligonucleotide for detection of SNP TSC0056375
atttttgtgattg

SEQ ID NO: 231174 - DNA, 13 bp, Artificial Sequence
  Oligonucleotide for detection of SNP TSC0056375
caatcacaaaaat

SEQ ID NO: 231175 - DNA, 13 bp, Artificial Sequence
  Oligonucleotide for detection of SNP TSC0056375
atttttatgattg

SEQ ID NO: 231176 - DNA, 13 bp, Artificial Sequence
  Oligonucleotide for detection of SNP TSC0056375
caatcataaaaat

SEQ ID NO: 231177 - DNA, 13 bp, Artificial Sequence
  Oligonucleotide for detection of SNP TSC0056375
attttcgtgattg

SEQ ID NO: 231178 - DNA, 13 bp, Artificial Sequence
  Oligonucleotide for detection of SNP TSC0056375
caatcacgaaaat

SEQ ID NO: 231179 - DNA, 13 bp, Artificial Sequence
  Oligonucleotide for detection of SNP TSC0056377
tggttgatttttt

SEQ ID NO: 231180 - DNA, 13 bp, Artificial Sequence
  Oligonucleotide for detection of SNP TSC0056377
aaaaaatcaacca

SEQ ID NO: 231181 - DNA, 13 bp, Artificial Sequence
  Oligonucleotide for detection of SNP TSC0056377
cggttgatttttt

SEQ ID NO: 231182 - DNA, 13 bp, Artificial Sequence
  Oligonucleotide for detection of SNP TSC0056377
aaaaaatcaaccg

SEQ ID NO: 231183 - DNA, 13 bp, Artificial Sequence
  Oligonucleotide for detection of SNP TSC0056377
cggttgttttttt

SEQ ID NO: 231184 - DNA, 13 bp, Artificial Sequence
  Oligonucleotide for detection of SNP TSC0056377
aaaaaaacaaccg

SEQ ID NO: 231185 - DNA, 13 bp, Artificial Sequence
  Oligonucleotide for detection of SNP TSC0056377
agagagttaattg

SEQ ID NO: 231186 - DNA, 13 bp, Artificial Sequence
  Oligonucleotide for detection of SNP TSC0056377
caattaactctct

SEQ ID NO: 231187 - DNA, 13 bp, Artificial Sequence
  Oligonucleotide for detection of SNP TSC0056377
agagagataattg

SEQ ID NO: 231188 - DNA, 13 bp, Artificial Sequence
  Oligonucleotide for detection of SNP TSC0056377
caattatctctct

SEQ ID NO: 231189 - DNA, 13 bp, Artificial Sequence
  Oligonucleotide for detection of SNP TSC0056377
agagagttaatcg

SEQ ID NO: 231190 - DNA, 13 bp, Artificial Sequence
  Oligonucleotide for detection of SNP TSC0056377
cgattaactctct

SEQ ID NO: 231191 - DNA, 13 bp, Artificial Sequence
  Oligonucleotide for detection of SNP TSC0056377
agagagataatcg

SEQ ID NO: 231192 - DNA, 13 bp, Artificial Sequence
  Oligonucleotide for detection of SNP TSC0056377
cgattatctctct

SEQ ID NO: 231193 - DNA, 13 bp, Artificial Sequence
  Oligonucleotide for detection of SNP TSC0056378
gaataatgtatat

SEQ ID NO: 231194 - DNA, 13 bp, Artificial Sequence
  Oligonucleotide for detection of SNP TSC0056378
atatacattattc

SEQ ID NO: 231195 - DNA, 13 bp, Artificial Sequence
  Oligonucleotide for detection of SNP TSC0056378
gaataacgtatat

SEQ ID NO: 231196 - DNA, 13 bp, Artificial Sequence
  Oligonucleotide for detection of SNP TSC0056378
atatacgttattc

SEQ ID NO: 231197 - DNA, 13 bp, Artificial Sequence
  Oligonucleotide for detection of SNP TSC0056378
atatgtgttatty

SEQ ID NO: 231198 - DNA, 13 bp, Artificial Sequence
  Oligonucleotide for detection of SNP TSC0056378
raataacacatat

SEQ ID NO: 231199 - DNA, 13 bp, Artificial Sequence
  Oligonucleotide for detection of SNP TSC0056378
atatgtattatty

SEQ ID NO: 231200 - DNA, 13 bp, Artificial Sequence
  Oligonucleotide for detection of SNP TSC0056378
raataatacatat

SEQ ID NO: 231201 - DNA, 13 bp, Artificial Sequence
  Oligonucleotide for detection of SNP TSC0056378
atatgcgttatty

SEQ ID NO: 231202 - DNA, 13 bp, Artificial Sequence
  Oligonucleotide for detection of SNP TSC0056378
raataacgcatat

SEQ ID NO: 231203 - DNA, 13 bp, Artificial Sequence
  Oligonucleotide for detection of SNP TSC0056379
gttttgtttatta

SEQ ID NO: 231204 - DNA, 13 bp, Artificial Sequence
  Oligonucleotide for detection of SNP TSC0056379
taataaacaaaac

SEQ ID NO: 231205 - DNA, 13 bp, Artificial Sequence
  Oligonucleotide for detection of SNP TSC0056379
tggtaggtaaggy

SEQ ID NO: 231206 - DNA, 13 bp, Artificial Sequence
  Oligonucleotide for detection of SNP TSC0056379
rccttacctacca

SEQ ID NO: 231207 - DNA, 13 bp, Artificial Sequence
  Oligonucleotide for detection of SNP TSC0056379
tggtagttaaggy

SEQ ID NO: 231208 - DNA, 13 bp, Artificial Sequence
  Oligonucleotide for detection of SNP TSC0056379
rccttaactacca

SEQ ID NO: 231209 - DNA, 13 bp, Artificial Sequence
  Oligonucleotide for detection of SNP TSC0056380
ttatataaaagta

SEQ ID NO: 231210 - DNA, 13 bp, Artificial Sequence
  Oligonucleotide for detection of SNP TSC0056380
tacttttatataa

SEQ ID NO: 231211 - DNA, 13 bp, Artificial Sequence
  Oligonucleotide for detection of SNP TSC0056380
ttatatgaaagta

SEQ ID NO: 231212 - DNA, 13 bp, Artificial Sequence
  Oligonucleotide for detection of SNP TSC0056380
tactttcatataa

SEQ ID NO: 231213 - DNA, 13 bp, Artificial Sequence
  Oligonucleotide for detection of SNP TSC0056380
ttatacgaaagta

SEQ ID NO: 231214 - DNA, 13 bp, Artificial Sequence
  Oligonucleotide for detection of SNP TSC0056380
tactttcgtataa

SEQ ID NO: 231215 - DNA, 13 bp, Artificial Sequence
  Oligonucleotide for detection of SNP TSC0056380
tgtttttgtgtag

SEQ ID NO: 231216 - DNA, 13 bp, Artificial Sequence
  Oligonucleotide for detection of SNP TSC0056380
ctacacaaaaaca

SEQ ID NO: 231217 - DNA, 13 bp, Artificial Sequence
  Oligonucleotide for detection of SNP TSC0056380
tgttttcgtgtag

SEQ ID NO: 231218 - DNA, 13 bp, Artificial Sequence
  Oligonucleotide for detection of SNP TSC0056380
ctacacgaaaaca

SEQ ID NO: 231219 - DNA, 13 bp, Artificial Sequence
  Oligonucleotide for detection of SNP TSC0056381
aggtggggatgag

SEQ ID NO: 231220 - DNA, 13 bp, Artificial Sequence
  Oligonucleotide for detection of SNP TSC0056381
ctcatccccacct

SEQ ID NO: 231221 - DNA, 13 bp, Artificial Sequence
  Oligonucleotide for detection of SNP TSC0056381
aggtggagatgag

SEQ ID NO: 231222 - DNA, 13 bp, Artificial Sequence
  Oligonucleotide for detection of SNP TSC0056381
ctcatctccacct

SEQ ID NO: 231223 - DNA, 13 bp, Artificial Sequence
  Oligonucleotide for detection of SNP TSC0056382
gagtagtaggaga

SEQ ID NO: 231224 - DNA, 13 bp, Artificial Sequence
  Oligonucleotide for detection of SNP TSC0056382
tctcctactactc

SEQ ID NO: 231225 - DNA, 13 bp, Artificial Sequence
  Oligonucleotide for detection of SNP TSC0056382
gagtagaaggaga

SEQ ID NO: 231226 - DNA, 13 bp, Artificial Sequence
  Oligonucleotide for detection of SNP TSC0056382
tctccttctactc

SEQ ID NO: 231227 - DNA, 13 bp, Artificial Sequence
  Oligonucleotide for detection of SNP TSC0056383
ggtatttgtggga

SEQ ID NO: 231228 - DNA, 13 bp, Artificial Sequence
  Oligonucleotide for detection of SNP TSC0056383
tcccacaaatacc

SEQ ID NO: 231229 - DNA, 13 bp, Artificial Sequence
  Oligonucleotide for detection of SNP TSC0056383
ggtattcgtggga

SEQ ID NO: 231230 - DNA, 13 bp, Artificial Sequence
  Oligonucleotide for detection of SNP TSC0056383
tcccacgaatacc

SEQ ID NO: 231231 - DNA, 13 bp, Artificial Sequence
  Oligonucleotide for detection of SNP TSC0056383
ttttatggatgty

SEQ ID NO: 231232 - DNA, 13 bp, Artificial Sequence
  Oligonucleotide for detection of SNP TSC0056383
racatccataaaa

SEQ ID NO: 231233 - DNA, 13 bp, Artificial Sequence
  Oligonucleotide for detection of SNP TSC0056383
ttttatagatgty

SEQ ID NO: 231234 - DNA, 13 bp, Artificial Sequence
  Oligonucleotide for detection of SNP TSC0056383
racatctataaaa

SEQ ID NO: 231235 - DNA, 13 bp, Artificial Sequence
  Oligonucleotide for detection of SNP TSC0056383
ttttacggatgty

SEQ ID NO: 231236 - DNA, 13 bp, Artificial Sequence
  Oligonucleotide for detection of SNP TSC0056383
racatccgtaaaa

SEQ ID NO: 231237 - DNA, 13 bp, Artificial Sequence
  Oligonucleotide for detection of SNP TSC0056384
tgttgtaggaggy

SEQ ID NO: 231238 - DNA, 13 bp, Artificial Sequence
  Oligonucleotide for detection of SNP TSC0056384
rcctcctacaaca

SEQ ID NO: 231239 - DNA, 13 bp, Artificial Sequence
  Oligonucleotide for detection of SNP TSC0056384
tgttgtgggaggy

SEQ ID NO: 231240 - DNA, 13 bp, Artificial Sequence
  Oligonucleotide for detection of SNP TSC0056384
rcctcccacaaca

SEQ ID NO: 231241 - DNA, 13 bp, Artificial Sequence
  Oligonucleotide for detection of SNP TSC0056384
cgttgtaggaggy

SEQ ID NO: 231242 - DNA, 13 bp, Artificial Sequence
  Oligonucleotide for detection of SNP TSC0056384
rcctcctacaacg

SEQ ID NO: 231243 - DNA, 13 bp, Artificial Sequence
  Oligonucleotide for detection of SNP TSC0056384
cgttgtgggaggy

SEQ ID NO: 231244 - DNA, 13 bp, Artificial Sequence
  Oligonucleotide for detection of SNP TSC0056384
rcctcccacaacg

SEQ ID NO: 231245 - DNA, 13 bp, Artificial Sequence
  Oligonucleotide for detection of SNP TSC0056384
tgtcgtaggaggy

SEQ ID NO: 231246 - DNA, 13 bp, Artificial Sequence
  Oligonucleotide for detection of SNP TSC0056384
rcctcctacgaca

SEQ ID NO: 231247 - DNA, 13 bp, Artificial Sequence
  Oligonucleotide for detection of SNP TSC0056384
tgtcgtgggaggy

SEQ ID NO: 231248 - DNA, 13 bp, Artificial Sequence
  Oligonucleotide for detection of SNP TSC0056384
rcctcccacgaca

SEQ ID NO: 231249 - DNA, 13 bp, Artificial Sequence
  Oligonucleotide for detection of SNP TSC0056384
cgtcgtaggaggy

SEQ ID NO: 231250 - DNA, 13 bp, Artificial Sequence
  Oligonucleotide for detection of SNP TSC0056384
rcctcctacgacg

SEQ ID NO: 231251 - DNA, 13 bp, Artificial Sequence
  Oligonucleotide for detection of SNP TSC0056384
cgtcgtgggaggy

SEQ ID NO: 231252 - DNA, 13 bp, Artificial Sequence
  Oligonucleotide for detection of SNP TSC0056384
rcctcccacgacg

SEQ ID NO: 231253 - DNA, 13 bp, Artificial Sequence
  Oligonucleotide for detection of SNP TSC0056385
ggtgtgtgtttgt

SEQ ID NO: 231254 - DNA, 13 bp, Artificial Sequence
  Oligonucleotide for detection of SNP TSC0056385
acaaacacacacc

SEQ ID NO: 231255 - DNA, 13 bp, Artificial Sequence
  Oligonucleotide for detection of SNP TSC0056385
ggtgcgtgtttgt

SEQ ID NO: 231256 - DNA, 13 bp, Artificial Sequence
  Oligonucleotide for detection of SNP TSC0056385
acaaacacgcacc

SEQ ID NO: 231257 - DNA, 13 bp, Artificial Sequence
  Oligonucleotide for detection of SNP TSC0056385
ggtgtgcgtttgt

SEQ ID NO: 231258 - DNA, 13 bp, Artificial Sequence
  Oligonucleotide for detection of SNP TSC0056385
acaaacgcacacc

SEQ ID NO: 231259 - DNA, 13 bp, Artificial Sequence
  Oligonucleotide for detection of SNP TSC0056385
ggtgcgcgtttgt

SEQ ID NO: 231260 - DNA, 13 bp, Artificial Sequence
  Oligonucleotide for detection of SNP TSC0056385
acaaacgcgcacc

SEQ ID NO: 231261 - DNA, 13 bp, Artificial Sequence
  Oligonucleotide for detection of SNP TSC0056385
ataggtacgtaty

SEQ ID NO: 231262 - DNA, 13 bp, Artificial Sequence
  Oligonucleotide for detection of SNP TSC0056385
ratacgtacctat

SEQ ID NO: 231263 - DNA, 13 bp, Artificial Sequence
  Oligonucleotide for detection of SNP TSC0056385
ataggtgcgtaty

SEQ ID NO: 231264 - DNA, 13 bp, Artificial Sequence
  Oligonucleotide for detection of SNP TSC0056385
ratacgcacctat

SEQ ID NO: 231265 - DNA, 13 bp, Artificial Sequence
  Oligonucleotide for detection of SNP TSC0056385
ataggcgcgtaty

SEQ ID NO: 231266 - DNA, 13 bp, Artificial Sequence
  Oligonucleotide for detection of SNP TSC0056385
ratacgcgcctat

SEQ ID NO: 231267 - DNA, 13 bp, Artificial Sequence
  Oligonucleotide for detection of SNP TSC0056386
tagagaataaggy

SEQ ID NO: 231268 - DNA, 13 bp, Artificial Sequence
  Oligonucleotide for detection of SNP TSC0056386
rccttattctcta

SEQ ID NO: 231269 - DNA, 13 bp, Artificial Sequence
  Oligonucleotide for detection of SNP TSC0056386
tagagagtaaggy

SEQ ID NO: 231270 - DNA, 13 bp, Artificial Sequence
  Oligonucleotide for detection of SNP TSC0056386
rccttactctcta

SEQ ID NO: 231271 - DNA, 13 bp, Artificial Sequence
  Oligonucleotide for detection of SNP TSC0056390
tggtaggaagtga

SEQ ID NO: 231272 - DNA, 13 bp, Artificial Sequence
  Oligonucleotide for detection of SNP TSC0056390
tcacttcctacca

SEQ ID NO: 231273 - DNA, 13 bp, Artificial Sequence
  Oligonucleotide for detection of SNP TSC0056390
tggtagaaagtga

SEQ ID NO: 231274 - DNA, 13 bp, Artificial Sequence
  Oligonucleotide for detection of SNP TSC0056390
tcactttctacca

SEQ ID NO: 231275 - DNA, 13 bp, Artificial Sequence
  Oligonucleotide for detection of SNP TSC0056391
tagggagatggty

SEQ ID NO: 231276 - DNA, 13 bp, Artificial Sequence
  Oligonucleotide for detection of SNP TSC0056391
raccatctcccta

SEQ ID NO: 231277 - DNA, 13 bp, Artificial Sequence
  Oligonucleotide for detection of SNP TSC0056391
tagggaaatggty

SEQ ID NO: 231278 - DNA, 13 bp, Artificial Sequence
  Oligonucleotide for detection of SNP TSC0056391
raccatttcccta

SEQ ID NO: 231279 - DNA, 13 bp, Artificial Sequence
  Oligonucleotide for detection of SNP TSC0056393
gttgttataagaa

SEQ ID NO: 231280 - DNA, 13 bp, Artificial Sequence
  Oligonucleotide for detection of SNP TSC0056393
ttcttataacaac

SEQ ID NO: 231281 - DNA, 13 bp, Artificial Sequence
  Oligonucleotide for detection of SNP TSC0056393
gttgttgtaagaa

SEQ ID NO: 231282 - DNA, 13 bp, Artificial Sequence
  Oligonucleotide for detection of SNP TSC0056393
ttcttacaacaac

SEQ ID NO: 231283 - DNA, 13 bp, Artificial Sequence
  Oligonucleotide for detection of SNP TSC0056395
ggggaagtaaata

SEQ ID NO: 231284 - DNA, 13 bp, Artificial Sequence
  Oligonucleotide for detection of SNP TSC0056395
tatttacttcccc

SEQ ID NO: 231285 - DNA, 13 bp, Artificial Sequence
  Oligonucleotide for detection of SNP TSC0056395
ggggaaataaata

SEQ ID NO: 231286 - DNA, 13 bp, Artificial Sequence
  Oligonucleotide for detection of SNP TSC0056395
tatttatttcccc

SEQ ID NO: 231287 - DNA, 13 bp, Artificial Sequence
  Oligonucleotide for detection of SNP TSC0056396
atagaaaaaagag

SEQ ID NO: 231288 - DNA, 13 bp, Artificial Sequence
  Oligonucleotide for detection of SNP TSC0056396
ctcttttttctat

SEQ ID NO: 231289 - DNA, 13 bp, Artificial Sequence
  Oligonucleotide for detection of SNP TSC0056396
atagaataaagag

SEQ ID NO: 231290 - DNA, 13 bp, Artificial Sequence
  Oligonucleotide for detection of SNP TSC0056396
ctctttattctat

SEQ ID NO: 231291 - DNA, 13 bp, Artificial Sequence
  Oligonucleotide for detection of SNP TSC0056398
gttaggatagggy

SEQ ID NO: 231292 - DNA, 13 bp, Artificial Sequence
  Oligonucleotide for detection of SNP TSC0056398
rccctatcctaac

SEQ ID NO: 231293 - DNA, 13 bp, Artificial Sequence
  Oligonucleotide for detection of SNP TSC0056398
gttaggttagggy

SEQ ID NO: 231294 - DNA, 13 bp, Artificial Sequence
  Oligonucleotide for detection of SNP TSC0056398
rccctaacctaac

SEQ ID NO: 231295 - DNA, 13 bp, Artificial Sequence
  Oligonucleotide for detection of SNP TSC0056398
gttttattttagy

SEQ ID NO: 231296 - DNA, 13 bp, Artificial Sequence
  Oligonucleotide for detection of SNP TSC0056398
rctaaaataaaac

SEQ ID NO: 231297 - DNA, 13 bp, Artificial Sequence
  Oligonucleotide for detection of SNP TSC0056398
gttttagtttagy

SEQ ID NO: 231298 - DNA, 13 bp, Artificial Sequence
  Oligonucleotide for detection of SNP TSC0056398
rctaaactaaaac

SEQ ID NO: 231299 - DNA, 13 bp, Artificial Sequence
  Oligonucleotide for detection of SNP TSC0056402
ataatttttatga

SEQ ID NO: 231300 - DNA, 13 bp, Artificial Sequence
  Oligonucleotide for detection of SNP TSC0056402
tcataaaaattat

SEQ ID NO: 231301 - DNA, 13 bp, Artificial Sequence
  Oligonucleotide for detection of SNP TSC0056402
ataattgttatga

SEQ ID NO: 231302 - DNA, 13 bp, Artificial Sequence
  Oligonucleotide for detection of SNP TSC0056402
tcataacaattat

SEQ ID NO: 231303 - DNA, 13 bp, Artificial Sequence
  Oligonucleotide for detection of SNP TSC0056402
ataatcgttatga

SEQ ID NO: 231304 - DNA, 13 bp, Artificial Sequence
  Oligonucleotide for detection of SNP TSC0056402
tcataacgattat

SEQ ID NO: 231305 - DNA, 13 bp, Artificial Sequence
  Oligonucleotide for detection of SNP TSC0056402
ttatagtggttgt

SEQ ID NO: 231306 - DNA, 13 bp, Artificial Sequence
  Oligonucleotide for detection of SNP TSC0056402
acaaccactataa

SEQ ID NO: 231307 - DNA, 13 bp, Artificial Sequence
  Oligonucleotide for detection of SNP TSC0056402
ttatagcggttgt

SEQ ID NO: 231308 - DNA, 13 bp, Artificial Sequence
  Oligonucleotide for detection of SNP TSC0056402
acaaccgctataa

SEQ ID NO: 231309 - DNA, 13 bp, Artificial Sequence
  Oligonucleotide for detection of SNP TSC0056404
gggatttttgttt

SEQ ID NO: 231310 - DNA, 13 bp, Artificial Sequence
  Oligonucleotide for detection of SNP TSC0056404
aaacaaaaatccc

SEQ ID NO: 231311 - DNA, 13 bp, Artificial Sequence
  Oligonucleotide for detection of SNP TSC0056404
gggattgttgttt

SEQ ID NO: 231312 - DNA, 13 bp, Artificial Sequence
  Oligonucleotide for detection of SNP TSC0056404
aaacaacaatccc

SEQ ID NO: 231313 - DNA, 13 bp, Artificial Sequence
  Oligonucleotide for detection of SNP TSC0056404
aaatagaaattty

SEQ ID NO: 231314 - DNA, 13 bp, Artificial Sequence
  Oligonucleotide for detection of SNP TSC0056404
raaatttctattt

SEQ ID NO: 231315 - DNA, 13 bp, Artificial Sequence
  Oligonucleotide for detection of SNP TSC0056404
aaatagtaattty

SEQ ID NO: 231316 - DNA, 13 bp, Artificial Sequence
  Oligonucleotide for detection of SNP TSC0056404
raaattactattt

SEQ ID NO: 231317 - DNA, 13 bp, Artificial Sequence
  Oligonucleotide for detection of SNP TSC0056407
tttataggtgtga

SEQ ID NO: 231318 - DNA, 13 bp, Artificial Sequence
  Oligonucleotide for detection of SNP TSC0056407
tcacacctataaa

SEQ ID NO: 231319 - DNA, 13 bp, Artificial Sequence
  Oligonucleotide for detection of SNP TSC0056407
tttataagtgtga

SEQ ID NO: 231320 - DNA, 13 bp, Artificial Sequence
  Oligonucleotide for detection of SNP TSC0056407
tcacacttataaa

SEQ ID NO: 231321 - DNA, 13 bp, Artificial Sequence
  Oligonucleotide for detection of SNP TSC0056408
ttaggaatttgag

SEQ ID NO: 231322 - DNA, 13 bp, Artificial Sequence
  Oligonucleotide for detection of SNP TSC0056408
ctcaaattcctaa

SEQ ID NO: 231323 - DNA, 13 bp, Artificial Sequence
  Oligonucleotide for detection of SNP TSC0056409
tgtttgaaaagat

SEQ ID NO: 231324 - DNA, 13 bp, Artificial Sequence
  Oligonucleotide for detection of SNP TSC0056409
atcttttcaaaca

SEQ ID NO: 231325 - DNA, 13 bp, Artificial Sequence
  Oligonucleotide for detection of SNP TSC0056409
tgtttgtaaagat

SEQ ID NO: 231326 - DNA, 13 bp, Artificial Sequence
  Oligonucleotide for detection of SNP TSC0056409
atctttacaaaca

SEQ ID NO: 231327 - DNA, 13 bp, Artificial Sequence
  Oligonucleotide for detection of SNP TSC0056409
atttttttagata

SEQ ID NO: 231328 - DNA, 13 bp, Artificial Sequence
  Oligonucleotide for detection of SNP TSC0056409
tatctaaaaaaat

SEQ ID NO: 231329 - DNA, 13 bp, Artificial Sequence
  Oligonucleotide for detection of SNP TSC0056409
atttttgtagata

SEQ ID NO: 231330 - DNA, 13 bp, Artificial Sequence
  Oligonucleotide for detection of SNP TSC0056409
tatctacaaaaat

SEQ ID NO: 231331 - DNA, 13 bp, Artificial Sequence
  Oligonucleotide for detection of SNP TSC0056411
tttattaaaaatt

SEQ ID NO: 231332 - DNA, 13 bp, Artificial Sequence
  Oligonucleotide for detection of SNP TSC0056411
aatttttaataaa

SEQ ID NO: 231333 - DNA, 13 bp, Artificial Sequence
  Oligonucleotide for detection of SNP TSC0056411
tttattgaaaatt

SEQ ID NO: 231334 - DNA, 13 bp, Artificial Sequence
  Oligonucleotide for detection of SNP TSC0056411
aattttcaataaa

SEQ ID NO: 231335 - DNA, 13 bp, Artificial Sequence
  Oligonucleotide for detection of SNP TSC0056412
ttttttatgagty

SEQ ID NO: 231336 - DNA, 13 bp, Artificial Sequence
  Oligonucleotide for detection of SNP TSC0056412
ractcataaaaaa

SEQ ID NO: 231337 - DNA, 13 bp, Artificial Sequence
  Oligonucleotide for detection of SNP TSC0056413
aatattgttgaag

SEQ ID NO: 231338 - DNA, 13 bp, Artificial Sequence
  Oligonucleotide for detection of SNP TSC0056413
cttcaacaatatt

SEQ ID NO: 231339 - DNA, 13 bp, Artificial Sequence
  Oligonucleotide for detection of SNP TSC0056413
aatattattgaag

SEQ ID NO: 231340 - DNA, 13 bp, Artificial Sequence
  Oligonucleotide for detection of SNP TSC0056413
cttcaataatatt

SEQ ID NO: 231341 - DNA, 13 bp, Artificial Sequence
  Oligonucleotide for detection of SNP TSC0056413
aatatcgttgaag

SEQ ID NO: 231342 - DNA, 13 bp, Artificial Sequence
  Oligonucleotide for detection of SNP TSC0056413
cttcaacgatatt

SEQ ID NO: 231343 - DNA, 13 bp, Artificial Sequence
  Oligonucleotide for detection of SNP TSC0056414
aattttgtttgty

SEQ ID NO: 231344 - DNA, 13 bp, Artificial Sequence
  Oligonucleotide for detection of SNP TSC0056414
racaaacaaaatt

SEQ ID NO: 231345 - DNA, 13 bp, Artificial Sequence
  Oligonucleotide for detection of SNP TSC0056414
aattttatttgty

SEQ ID NO: 231346 - DNA, 13 bp, Artificial Sequence
  Oligonucleotide for detection of SNP TSC0056414
racaaataaaatt

SEQ ID NO: 231347 - DNA, 13 bp, Artificial Sequence
  Oligonucleotide for detection of SNP TSC0056416
ttttgattaatta

SEQ ID NO: 231348 - DNA, 13 bp, Artificial Sequence
  Oligonucleotide for detection of SNP TSC0056416
taattaatcaaaa

SEQ ID NO: 231349 - DNA, 13 bp, Artificial Sequence
  Oligonucleotide for detection of SNP TSC0056416
ttttgagtaatta

SEQ ID NO: 231350 - DNA, 13 bp, Artificial Sequence
  Oligonucleotide for detection of SNP TSC0056416
taattactcaaaa

SEQ ID NO: 231351 - DNA, 13 bp, Artificial Sequence
  Oligonucleotide for detection of SNP TSC0056416
tttcgattaatta

SEQ ID NO: 231352 - DNA, 13 bp, Artificial Sequence
  Oligonucleotide for detection of SNP TSC0056416
taattaatcgaaa

SEQ ID NO: 231353 - DNA, 13 bp, Artificial Sequence
  Oligonucleotide for detection of SNP TSC0056416
tttcgagtaatta

SEQ ID NO: 231354 - DNA, 13 bp, Artificial Sequence
  Oligonucleotide for detection of SNP TSC0056416
taattactcgaaa

SEQ ID NO: 231355 - DNA, 13 bp, Artificial Sequence
  Oligonucleotide for detection of SNP TSC0056416
tagttgattgaga

SEQ ID NO: 231356 - DNA, 13 bp, Artificial Sequence
  Oligonucleotide for detection of SNP TSC0056416
tctcaatcaacta

SEQ ID NO: 231357 - DNA, 13 bp, Artificial Sequence
  Oligonucleotide for detection of SNP TSC0056416
tagttgtttgaga

SEQ ID NO: 231358 - DNA, 13 bp, Artificial Sequence
  Oligonucleotide for detection of SNP TSC0056416
tctcaaacaacta

SEQ ID NO: 231359 - DNA, 13 bp, Artificial Sequence
  Oligonucleotide for detection of SNP TSC0056416
tagttgatcgaga

SEQ ID NO: 231360 - DNA, 13 bp, Artificial Sequence
  Oligonucleotide for detection of SNP TSC0056416
tctcgatcaacta

SEQ ID NO: 231361 - DNA, 13 bp, Artificial Sequence
  Oligonucleotide for detection of SNP TSC0056416
tagttgttcgaga

SEQ ID NO: 231362 - DNA, 13 bp, Artificial Sequence
  Oligonucleotide for detection of SNP TSC0056416
tctcgaacaacta

SEQ ID NO: 231363 - DNA, 13 bp, Artificial Sequence
  Oligonucleotide for detection of SNP TSC0056418
tattgaaaaatay

SEQ ID NO: 231364 - DNA, 13 bp, Artificial Sequence
  Oligonucleotide for detection of SNP TSC0056418
rtatttttcaata

SEQ ID NO: 231365 - DNA, 13 bp, Artificial Sequence
  Oligonucleotide for detection of SNP TSC0056418
tattgagaaatay

SEQ ID NO: 231366 - DNA, 13 bp, Artificial Sequence
  Oligonucleotide for detection of SNP TSC0056418
rtatttctcaata

SEQ ID NO: 231367 - DNA, 13 bp, Artificial Sequence
  Oligonucleotide for detection of SNP TSC0056419
tagttaggataag

SEQ ID NO: 231368 - DNA, 13 bp, Artificial Sequence
  Oligonucleotide for detection of SNP TSC0056419
cttatcctaacta

SEQ ID NO: 231369 - DNA, 13 bp, Artificial Sequence
  Oligonucleotide for detection of SNP TSC0056419
tagttaagataag

SEQ ID NO: 231370 - DNA, 13 bp, Artificial Sequence
  Oligonucleotide for detection of SNP TSC0056419
cttatcttaacta

SEQ ID NO: 231371 - DNA, 13 bp, Artificial Sequence
  Oligonucleotide for detection of SNP TSC0056420
taatgagtaatag

SEQ ID NO: 231372 - DNA, 13 bp, Artificial Sequence
  Oligonucleotide for detection of SNP TSC0056420
ctattactcatta

SEQ ID NO: 231373 - DNA, 13 bp, Artificial Sequence
  Oligonucleotide for detection of SNP TSC0056420
taatgaataatag

SEQ ID NO: 231374 - DNA, 13 bp, Artificial Sequence
  Oligonucleotide for detection of SNP TSC0056420
ctattattcatta

SEQ ID NO: 231375 - DNA, 13 bp, Artificial Sequence
  Oligonucleotide for detection of SNP TSC0056421
gatggtatttttg

SEQ ID NO: 231376 - DNA, 13 bp, Artificial Sequence
  Oligonucleotide for detection of SNP TSC0056421
caaaaataccatc

SEQ ID NO: 231377 - DNA, 13 bp, Artificial Sequence
  Oligonucleotide for detection of SNP TSC0056421
gatggtgtttttg

SEQ ID NO: 231378 - DNA, 13 bp, Artificial Sequence
  Oligonucleotide for detection of SNP TSC0056421
caaaaacaccatc

SEQ ID NO: 231379 - DNA, 13 bp, Artificial Sequence
  Oligonucleotide for detection of SNP TSC0056421
gatggcgtttttg

SEQ ID NO: 231380 - DNA, 13 bp, Artificial Sequence
  Oligonucleotide for detection of SNP TSC0056421
caaaaacgccatc

SEQ ID NO: 231381 - DNA, 13 bp, Artificial Sequence
  Oligonucleotide for detection of SNP TSC0056421
taggggtgttaty

SEQ ID NO: 231382 - DNA, 13 bp, Artificial Sequence
  Oligonucleotide for detection of SNP TSC0056421
rataacaccccta

SEQ ID NO: 231383 - DNA, 13 bp, Artificial Sequence
  Oligonucleotide for detection of SNP TSC0056421
taggggcgttaty

SEQ ID NO: 231384 - DNA, 13 bp, Artificial Sequence
  Oligonucleotide for detection of SNP TSC0056421
rataacgccccta

SEQ ID NO: 231385 - DNA, 13 bp, Artificial Sequence
  Oligonucleotide for detection of SNP TSC0056422
ttttattgatggy

SEQ ID NO: 231386 - DNA, 13 bp, Artificial Sequence
  Oligonucleotide for detection of SNP TSC0056422
rccatcaataaaa

SEQ ID NO: 231387 - DNA, 13 bp, Artificial Sequence
  Oligonucleotide for detection of SNP TSC0056422
ttttatggatggy

SEQ ID NO: 231388 - DNA, 13 bp, Artificial Sequence
  Oligonucleotide for detection of SNP TSC0056422
rccatccataaaa

SEQ ID NO: 231389 - DNA, 13 bp, Artificial Sequence
  Oligonucleotide for detection of SNP TSC0056422
ttttacggatggy

SEQ ID NO: 231390 - DNA, 13 bp, Artificial Sequence
  Oligonucleotide for detection of SNP TSC0056422
rccatccgtaaaa

SEQ ID NO: 231391 - DNA, 13 bp, Artificial Sequence
  Oligonucleotide for detection of SNP TSC0056422
gttattagtgaga

SEQ ID NO: 231392 - DNA, 13 bp, Artificial Sequence
  Oligonucleotide for detection of SNP TSC0056422
tctcactaataac

SEQ ID NO: 231393 - DNA, 13 bp, Artificial Sequence
  Oligonucleotide for detection of SNP TSC0056422
gttatttgtgaga

SEQ ID NO: 231394 - DNA, 13 bp, Artificial Sequence
  Oligonucleotide for detection of SNP TSC0056422
tctcacaaataac

SEQ ID NO: 231395 - DNA, 13 bp, Artificial Sequence
  Oligonucleotide for detection of SNP TSC0056422
gttattcgtgaga

SEQ ID NO: 231396 - DNA, 13 bp, Artificial Sequence
  Oligonucleotide for detection of SNP TSC0056422
tctcacgaataac

SEQ ID NO: 231397 - DNA, 13 bp, Artificial Sequence
  Oligonucleotide for detection of SNP TSC0056423
tgaattatttttg

SEQ ID NO: 231398 - DNA, 13 bp, Artificial Sequence
  Oligonucleotide for detection of SNP TSC0056423
caaaaataattca

SEQ ID NO: 231399 - DNA, 13 bp, Artificial Sequence
  Oligonucleotide for detection of SNP TSC0056423
tgaattttttttg

SEQ ID NO: 231400 - DNA, 13 bp, Artificial Sequence
  Oligonucleotide for detection of SNP TSC0056423
caaaaaaaattca

SEQ ID NO: 231401 - DNA, 13 bp, Artificial Sequence
  Oligonucleotide for detection of SNP TSC0056423
taagggtaattta

SEQ ID NO: 231402 - DNA, 13 bp, Artificial Sequence
  Oligonucleotide for detection of SNP TSC0056423
taaattaccctta

SEQ ID NO: 231403 - DNA, 13 bp, Artificial Sequence
  Oligonucleotide for detection of SNP TSC0056423
taagggaaattta

SEQ ID NO: 231404 - DNA, 13 bp, Artificial Sequence
  Oligonucleotide for detection of SNP TSC0056423
taaatttccctta

SEQ ID NO: 231405 - DNA, 13 bp, Artificial Sequence
  Oligonucleotide for detection of SNP TSC0056426
tgggttaaagatt

SEQ ID NO: 231406 - DNA, 13 bp, Artificial Sequence
  Oligonucleotide for detection of SNP TSC0056426
aatctttaaccca

SEQ ID NO: 231407 - DNA, 13 bp, Artificial Sequence
  Oligonucleotide for detection of SNP TSC0056426
tgggtttaagatt

SEQ ID NO: 231408 - DNA, 13 bp, Artificial Sequence
  Oligonucleotide for detection of SNP TSC0056426
aatcttaaaccca

SEQ ID NO: 231409 - DNA, 13 bp, Artificial Sequence
  Oligonucleotide for detection of SNP TSC0056429
ttaattatataag

SEQ ID NO: 231410 - DNA, 13 bp, Artificial Sequence
  Oligonucleotide for detection of SNP TSC0056429
cttatataattaa

SEQ ID NO: 231411 - DNA, 13 bp, Artificial Sequence
  Oligonucleotide for detection of SNP TSC0056429
ttaattttataag

SEQ ID NO: 231412 - DNA, 13 bp, Artificial Sequence
  Oligonucleotide for detection of SNP TSC0056429
cttataaaattaa

SEQ ID NO: 231413 - DNA, 13 bp, Artificial Sequence
  Oligonucleotide for detection of SNP TSC0056429
tttgtgtagttgg

SEQ ID NO: 231414 - DNA, 13 bp, Artificial Sequence
  Oligonucleotide for detection of SNP TSC0056429
ccaactacacaaa

SEQ ID NO: 231415 - DNA, 13 bp, Artificial Sequence
  Oligonucleotide for detection of SNP TSC0056429
tttgtggagttgg

SEQ ID NO: 231416 - DNA, 13 bp, Artificial Sequence
  Oligonucleotide for detection of SNP TSC0056429
ccaactccacaaa

SEQ ID NO: 231417 - DNA, 13 bp, Artificial Sequence
  Oligonucleotide for detection of SNP TSC0009653
tggatatgggttg

SEQ ID NO: 231418 - DNA, 13 bp, Artificial Sequence
  Oligonucleotide for detection of SNP TSC0009653
caacccatatcca

SEQ ID NO: 231419 - DNA, 13 bp, Artificial Sequence
  Oligonucleotide for detection of SNP TSC0009653
tggatacgggttg

SEQ ID NO: 231420 - DNA, 13 bp, Artificial Sequence
  Oligonucleotide for detection of SNP TSC0009653
caacccgtatcca

SEQ ID NO: 231421 - DNA, 13 bp, Artificial Sequence
  Oligonucleotide for detection of SNP TSC0009653
taattcgtgttta

SEQ ID NO: 231422 - DNA, 13 bp, Artificial Sequence
  Oligonucleotide for detection of SNP TSC0009653
taaacacgaatta

SEQ ID NO: 231423 - DNA, 13 bp, Artificial Sequence
  Oligonucleotide for detection of SNP TSC0056432
taaaaaatttatt

SEQ ID NO: 231424 - DNA, 13 bp, Artificial Sequence
  Oligonucleotide for detection of SNP TSC0056432
aataaatttttta

SEQ ID NO: 231425 - DNA, 13 bp, Artificial Sequence
  Oligonucleotide for detection of SNP TSC0056432
taaaaagtttatt

SEQ ID NO: 231426 - DNA, 13 bp, Artificial Sequence
  Oligonucleotide for detection of SNP TSC0056432
aataaacttttta

SEQ ID NO: 231427 - DNA, 13 bp, Artificial Sequence
  Oligonucleotide for detection of SNP TSC0056433
gtggagtgggtgy

SEQ ID NO: 231428 - DNA, 13 bp, Artificial Sequence
  Oligonucleotide for detection of SNP TSC0056433
rcacccactccac

SEQ ID NO: 231429 - DNA, 13 bp, Artificial Sequence
  Oligonucleotide for detection of SNP TSC0056433
gtggagggggtgy

SEQ ID NO: 231430 - DNA, 13 bp, Artificial Sequence
  Oligonucleotide for detection of SNP TSC0056433
rcaccccctccac

SEQ ID NO: 231431 - DNA, 13 bp, Artificial Sequence
  Oligonucleotide for detection of SNP TSC0056433
gtggagcgggtgy

SEQ ID NO: 231432 - DNA, 13 bp, Artificial Sequence
  Oligonucleotide for detection of SNP TSC0056433
rcacccgctccac

SEQ ID NO: 231433 - DNA, 13 bp, Artificial Sequence
  Oligonucleotide for detection of SNP TSC0056433
gtatttgttttay

SEQ ID NO: 231434 - DNA, 13 bp, Artificial Sequence
  Oligonucleotide for detection of SNP TSC0056433
rtaaaacaaatac

SEQ ID NO: 231435 - DNA, 13 bp, Artificial Sequence
  Oligonucleotide for detection of SNP TSC0056433
gtattttttttay

SEQ ID NO: 231436 - DNA, 13 bp, Artificial Sequence
  Oligonucleotide for detection of SNP TSC0056433
rtaaaaaaaatac

SEQ ID NO: 231437 - DNA, 13 bp, Artificial Sequence
  Oligonucleotide for detection of SNP TSC0056433
gtattcgttttay

SEQ ID NO: 231438 - DNA, 13 bp, Artificial Sequence
  Oligonucleotide for detection of SNP TSC0056433
rtaaaacgaatac

SEQ ID NO: 231439 - DNA, 13 bp, Artificial Sequence
  Oligonucleotide for detection of SNP TSC0056436
aaagtaatgtttt

SEQ ID NO: 231440 - DNA, 13 bp, Artificial Sequence
  Oligonucleotide for detection of SNP TSC0056436
aaaacattacttt

SEQ ID NO: 231441 - DNA, 13 bp, Artificial Sequence
  Oligonucleotide for detection of SNP TSC0056436
aaagtattgtttt

SEQ ID NO: 231442 - DNA, 13 bp, Artificial Sequence
  Oligonucleotide for detection of SNP TSC0056436
aaaacaatacttt

SEQ ID NO: 231443 - DNA, 13 bp, Artificial Sequence
  Oligonucleotide for detection of SNP TSC0056436
aaaatattatttt

SEQ ID NO: 231444 - DNA, 13 bp, Artificial Sequence
  Oligonucleotide for detection of SNP TSC0056436
aaaataatatttt

SEQ ID NO: 231445 - DNA, 13 bp, Artificial Sequence
  Oligonucleotide for detection of SNP TSC0008118
ttaattatattgg

SEQ ID NO: 231446 - DNA, 13 bp, Artificial Sequence
  Oligonucleotide for detection of SNP TSC0008118
ccaatataattaa

SEQ ID NO: 231447 - DNA, 13 bp, Artificial Sequence
  Oligonucleotide for detection of SNP TSC0008118
ttaattttattgg

SEQ ID NO: 231448 - DNA, 13 bp, Artificial Sequence
  Oligonucleotide for detection of SNP TSC0008118
ccaataaaattaa

SEQ ID NO: 231449 - DNA, 13 bp, Artificial Sequence
  Oligonucleotide for detection of SNP TSC0008118
ttaataggattgg

SEQ ID NO: 231450 - DNA, 13 bp, Artificial Sequence
  Oligonucleotide for detection of SNP TSC0008118
ccaatcctattaa

SEQ ID NO: 231451 - DNA, 13 bp, Artificial Sequence
  Oligonucleotide for detection of SNP TSC0056439
aagtagtttgtgg

SEQ ID NO: 231452 - DNA, 13 bp, Artificial Sequence
  Oligonucleotide for detection of SNP TSC0056439
ccacaaactactt

SEQ ID NO: 231453 - DNA, 13 bp, Artificial Sequence
  Oligonucleotide for detection of SNP TSC0056439
aagtaggttgtgg

SEQ ID NO: 231454 - DNA, 13 bp, Artificial Sequence
  Oligonucleotide for detection of SNP TSC0056439
ccacaacctactt

SEQ ID NO: 231455 - DNA, 13 bp, Artificial Sequence
  Oligonucleotide for detection of SNP TSC0056439
ttatagattgttt

SEQ ID NO: 231456 - DNA, 13 bp, Artificial Sequence
  Oligonucleotide for detection of SNP TSC0056439
aaacaatctataa

SEQ ID NO: 231457 - DNA, 13 bp, Artificial Sequence
  Oligonucleotide for detection of SNP TSC0056439
ttatagtttgttt

SEQ ID NO: 231458 - DNA, 13 bp, Artificial Sequence
  Oligonucleotide for detection of SNP TSC0056439
aaacaaactataa

SEQ ID NO: 231459 - DNA, 13 bp, Artificial Sequence
  Oligonucleotide for detection of SNP TSC0010020
taattgagagttt

SEQ ID NO: 231460 - DNA, 13 bp, Artificial Sequence
  Oligonucleotide for detection of SNP TSC0010020
aaactctcaatta

SEQ ID NO: 231461 - DNA, 13 bp, Artificial Sequence
  Oligonucleotide for detection of SNP TSC0010020
taattgggagttt

SEQ ID NO: 231462 - DNA, 13 bp, Artificial Sequence
  Oligonucleotide for detection of SNP TSC0010020
aaactcccaatta

SEQ ID NO: 231463 - DNA, 13 bp, Artificial Sequence
  Oligonucleotide for detection of SNP TSC0010021
gttttcgggtttt

SEQ ID NO: 231464 - DNA, 13 bp, Artificial Sequence
  Oligonucleotide for detection of SNP TSC0010021
aaaacccgaaaac

SEQ ID NO: 231465 - DNA, 13 bp, Artificial Sequence
  Oligonucleotide for detection of SNP TSC0010021
aaggtttgaaaay

SEQ ID NO: 231466 - DNA, 13 bp, Artificial Sequence
  Oligonucleotide for detection of SNP TSC0010021
rttttcaaacctt

SEQ ID NO: 231467 - DNA, 13 bp, Artificial Sequence
  Oligonucleotide for detection of SNP TSC0010021
aaggttcgaaaay

SEQ ID NO: 231468 - DNA, 13 bp, Artificial Sequence
  Oligonucleotide for detection of SNP TSC0010021
rttttcgaacctt

SEQ ID NO: 231469 - DNA, 13 bp, Artificial Sequence
  Oligonucleotide for detection of SNP TSC0056446
ttttatattgtay

SEQ ID NO: 231470 - DNA, 13 bp, Artificial Sequence
  Oligonucleotide for detection of SNP TSC0056446
rtacaatataaaa

SEQ ID NO: 231471 - DNA, 13 bp, Artificial Sequence
  Oligonucleotide for detection of SNP TSC0056448
attttaataagga

SEQ ID NO: 231472 - DNA, 13 bp, Artificial Sequence
  Oligonucleotide for detection of SNP TSC0056448
tccttattaaaat

SEQ ID NO: 231473 - DNA, 13 bp, Artificial Sequence
  Oligonucleotide for detection of SNP TSC0056448
attttagtaagga

SEQ ID NO: 231474 - DNA, 13 bp, Artificial Sequence
  Oligonucleotide for detection of SNP TSC0056448
tccttactaaaat

SEQ ID NO: 231475 - DNA, 13 bp, Artificial Sequence
  Oligonucleotide for detection of SNP TSC0056449
gaataaataaagg

SEQ ID NO: 231476 - DNA, 13 bp, Artificial Sequence
  Oligonucleotide for detection of SNP TSC0056449
cctttatttattc

SEQ ID NO: 231477 - DNA, 13 bp, Artificial Sequence
  Oligonucleotide for detection of SNP TSC0056449
gaataagtaaagg

SEQ ID NO: 231478 - DNA, 13 bp, Artificial Sequence
  Oligonucleotide for detection of SNP TSC0056449
cctttacttattc

SEQ ID NO: 231479 - DNA, 13 bp, Artificial Sequence
  Oligonucleotide for detection of SNP TSC0056450
gtggtattgagtt

SEQ ID NO: 231480 - DNA, 13 bp, Artificial Sequence
  Oligonucleotide for detection of SNP TSC0056450
aactcaataccac

SEQ ID NO: 231481 - DNA, 13 bp, Artificial Sequence
  Oligonucleotide for detection of SNP TSC0056450
aatttagtgttay

SEQ ID NO: 231482 - DNA, 13 bp, Artificial Sequence
  Oligonucleotide for detection of SNP TSC0056450
rtaacactaaatt

SEQ ID NO: 231483 - DNA, 13 bp, Artificial Sequence
  Oligonucleotide for detection of SNP TSC0056450
aatttattgttay

SEQ ID NO: 231484 - DNA, 13 bp, Artificial Sequence
  Oligonucleotide for detection of SNP TSC0056450
rtaacaataaatt

SEQ ID NO: 231485 - DNA, 13 bp, Artificial Sequence
  Oligonucleotide for detection of SNP TSC0056452
ataatataagttt

SEQ ID NO: 231486 - DNA, 13 bp, Artificial Sequence
  Oligonucleotide for detection of SNP TSC0056452
aaacttatattat

SEQ ID NO: 231487 - DNA, 13 bp, Artificial Sequence
  Oligonucleotide for detection of SNP TSC0056452
ataatagaagttt

SEQ ID NO: 231488 - DNA, 13 bp, Artificial Sequence
  Oligonucleotide for detection of SNP TSC0056452
aaacttctattat

SEQ ID NO: 231489 - DNA, 13 bp, Artificial Sequence
  Oligonucleotide for detection of SNP TSC0010291
tgtgtttaaaaat

SEQ ID NO: 231490 - DNA, 13 bp, Artificial Sequence
  Oligonucleotide for detection of SNP TSC0010291
atttttaaacaca

SEQ ID NO: 231491 - DNA, 13 bp, Artificial Sequence
  Oligonucleotide for detection of SNP TSC0010291
tgtgttgaaaaat

SEQ ID NO: 231492 - DNA, 13 bp, Artificial Sequence
  Oligonucleotide for detection of SNP TSC0010291
atttttcaacaca

SEQ ID NO: 231493 - DNA, 13 bp, Artificial Sequence
  Oligonucleotide for detection of SNP TSC0004985
gtattaatagtaa

SEQ ID NO: 231494 - DNA, 13 bp, Artificial Sequence
  Oligonucleotide for detection of SNP TSC0004985
ttactattaatac

SEQ ID NO: 231495 - DNA, 13 bp, Artificial Sequence
  Oligonucleotide for detection of SNP TSC0004985
gtattagtagtaa

SEQ ID NO: 231496 - DNA, 13 bp, Artificial Sequence
  Oligonucleotide for detection of SNP TSC0004985
ttactactaatac

SEQ ID NO: 231497 - DNA, 13 bp, Artificial Sequence
  Oligonucleotide for detection of SNP TSC0004986
gagaagagtatgg

SEQ ID NO: 231498 - DNA, 13 bp, Artificial Sequence
  Oligonucleotide for detection of SNP TSC0004986
ccatactcttctc

SEQ ID NO: 231499 - DNA, 13 bp, Artificial Sequence
  Oligonucleotide for detection of SNP TSC0004986
gagaagtgtatgg

SEQ ID NO: 231500 - DNA, 13 bp, Artificial Sequence
  Oligonucleotide for detection of SNP TSC0004986
ccatacacttctc

SEQ ID NO: 231501 - DNA, 13 bp, Artificial Sequence
  Oligonucleotide for detection of SNP TSC0004986
gagaagcgtatgg

SEQ ID NO: 231502 - DNA, 13 bp, Artificial Sequence
  Oligonucleotide for detection of SNP TSC0004986
ccatacgcttctc

SEQ ID NO: 231503 - DNA, 13 bp, Artificial Sequence
  Oligonucleotide for detection of SNP TSC0005643
aagagtgattggg

SEQ ID NO: 231504 - DNA, 13 bp, Artificial Sequence
  Oligonucleotide for detection of SNP TSC0005643
cccaatcactctt

SEQ ID NO: 231505 - DNA, 13 bp, Artificial Sequence
  Oligonucleotide for detection of SNP TSC0005643
aagagtaattggg

SEQ ID NO: 231506 - DNA, 13 bp, Artificial Sequence
  Oligonucleotide for detection of SNP TSC0005643
cccaattactctt

SEQ ID NO: 231507 - DNA, 13 bp, Artificial Sequence
  Oligonucleotide for detection of SNP TSC0005643
aagagcgattggg

SEQ ID NO: 231508 - DNA, 13 bp, Artificial Sequence
  Oligonucleotide for detection of SNP TSC0005643
cccaatcgctctt

SEQ ID NO: 231509 - DNA, 13 bp, Artificial Sequence
  Oligonucleotide for detection of SNP TSC0056459
tgaataatggtta

SEQ ID NO: 231510 - DNA, 13 bp, Artificial Sequence
  Oligonucleotide for detection of SNP TSC0056459
taaccattattca

SEQ ID NO: 231511 - DNA, 13 bp, Artificial Sequence
  Oligonucleotide for detection of SNP TSC0056459
tgaatagtggtta

SEQ ID NO: 231512 - DNA, 13 bp, Artificial Sequence
  Oligonucleotide for detection of SNP TSC0056459
taaccactattca

SEQ ID NO: 231513 - DNA, 13 bp, Artificial Sequence
  Oligonucleotide for detection of SNP TSC0056460
taaaatttattay

SEQ ID NO: 231514 - DNA, 13 bp, Artificial Sequence
  Oligonucleotide for detection of SNP TSC0056460
rtaataaatttta

SEQ ID NO: 231515 - DNA, 13 bp, Artificial Sequence
  Oligonucleotide for detection of SNP TSC0056460
taaaatgtattay

SEQ ID NO: 231516 - DNA, 13 bp, Artificial Sequence
  Oligonucleotide for detection of SNP TSC0056460
rtaatacatttta

SEQ ID NO: 231517 - DNA, 13 bp, Artificial Sequence
  Oligonucleotide for detection of SNP TSC0056460
gtagtgaatttta

SEQ ID NO: 231518 - DNA, 13 bp, Artificial Sequence
  Oligonucleotide for detection of SNP TSC0056460
taaaattcactac

SEQ ID NO: 231519 - DNA, 13 bp, Artificial Sequence
  Oligonucleotide for detection of SNP TSC0056460
gtagtgtatttta

SEQ ID NO: 231520 - DNA, 13 bp, Artificial Sequence
  Oligonucleotide for detection of SNP TSC0056460
taaaatacactac

SEQ ID NO: 231521 - DNA, 13 bp, Artificial Sequence
  Oligonucleotide for detection of SNP TSC0007541
ttatgcgagggta

SEQ ID NO: 231522 - DNA, 13 bp, Artificial Sequence
  Oligonucleotide for detection of SNP TSC0007541
taccctcgcataa

SEQ ID NO: 231523 - DNA, 13 bp, Artificial Sequence
  Oligonucleotide for detection of SNP TSC0007541
tgtttttgtatgg

SEQ ID NO: 231524 - DNA, 13 bp, Artificial Sequence
  Oligonucleotide for detection of SNP TSC0007541
ccatacaaaaaca

SEQ ID NO: 231525 - DNA, 13 bp, Artificial Sequence
  Oligonucleotide for detection of SNP TSC0007541
tgttttcgtatgg

SEQ ID NO: 231526 - DNA, 13 bp, Artificial Sequence
  Oligonucleotide for detection of SNP TSC0007541
ccatacgaaaaca

SEQ ID NO: 231527 - DNA, 13 bp, Artificial Sequence
  Oligonucleotide for detection of SNP TSC0007542
attgtaattaaaa

SEQ ID NO: 231528 - DNA, 13 bp, Artificial Sequence
  Oligonucleotide for detection of SNP TSC0007542
ttttaattacaat

SEQ ID NO: 231529 - DNA, 13 bp, Artificial Sequence
  Oligonucleotide for detection of SNP TSC0007542
attgtagttaaaa

SEQ ID NO: 231530 - DNA, 13 bp, Artificial Sequence
  Oligonucleotide for detection of SNP TSC0007542
ttttaactacaat

SEQ ID NO: 231531 - DNA, 13 bp, Artificial Sequence
  Oligonucleotide for detection of SNP TSC0004600
gtgtgtatttatg

SEQ ID NO: 231532 - DNA, 13 bp, Artificial Sequence
  Oligonucleotide for detection of SNP TSC0004600
cataaatacacac

SEQ ID NO: 231533 - DNA, 13 bp, Artificial Sequence
  Oligonucleotide for detection of SNP TSC0004600
gtgtgtttttatg

SEQ ID NO: 231534 - DNA, 13 bp, Artificial Sequence
  Oligonucleotide for detection of SNP TSC0004600
cataaaaacacac

SEQ ID NO: 231535 - DNA, 13 bp, Artificial Sequence
  Oligonucleotide for detection of SNP TSC0004600
tatgaatgtatay

SEQ ID NO: 231536 - DNA, 13 bp, Artificial Sequence
  Oligonucleotide for detection of SNP TSC0004600
rtatacattcata

SEQ ID NO: 231537 - DNA, 13 bp, Artificial Sequence
  Oligonucleotide for detection of SNP TSC0004600
tatgaaagtatay

SEQ ID NO: 231538 - DNA, 13 bp, Artificial Sequence
  Oligonucleotide for detection of SNP TSC0004600
rtatactttcata

SEQ ID NO: 231539 - DNA, 13 bp, Artificial Sequence
  Oligonucleotide for detection of SNP TSC0004601
atgtatgaaaaaa

SEQ ID NO: 231540 - DNA, 13 bp, Artificial Sequence
  Oligonucleotide for detection of SNP TSC0004601
ttttttcatacat

SEQ ID NO: 231541 - DNA, 13 bp, Artificial Sequence
  Oligonucleotide for detection of SNP TSC0004601
ttttttgatgtat

SEQ ID NO: 231542 - DNA, 13 bp, Artificial Sequence
  Oligonucleotide for detection of SNP TSC0004601
atacatcaaaaaa

SEQ ID NO: 231543 - DNA, 13 bp, Artificial Sequence
  Oligonucleotide for detection of SNP TSC0004601
tttttttatgtat

SEQ ID NO: 231544 - DNA, 13 bp, Artificial Sequence
  Oligonucleotide for detection of SNP TSC0004601
atacataaaaaaa

SEQ ID NO: 231545 - DNA, 13 bp, Artificial Sequence
  Oligonucleotide for detection of SNP TSC0056461
tgagtgtggatgt

SEQ ID NO: 231546 - DNA, 13 bp, Artificial Sequence
  Oligonucleotide for detection of SNP TSC0056461
acatccacactca

SEQ ID NO: 231547 - DNA, 13 bp, Artificial Sequence
  Oligonucleotide for detection of SNP TSC0056461
cgagtgtggatgt

SEQ ID NO: 231548 - DNA, 13 bp, Artificial Sequence
  Oligonucleotide for detection of SNP TSC0056461
acatccacactcg

SEQ ID NO: 231549 - DNA, 13 bp, Artificial Sequence
  Oligonucleotide for detection of SNP TSC0056461
tgagtgcggatgt

SEQ ID NO: 231550 - DNA, 13 bp, Artificial Sequence
  Oligonucleotide for detection of SNP TSC0056461
acatccgcactca

SEQ ID NO: 231551 - DNA, 13 bp, Artificial Sequence
  Oligonucleotide for detection of SNP TSC0056461
cgagtgcggatgt

SEQ ID NO: 231552 - DNA, 13 bp, Artificial Sequence
  Oligonucleotide for detection of SNP TSC0056461
acatccgcactcg

SEQ ID NO: 231553 - DNA, 13 bp, Artificial Sequence
  Oligonucleotide for detection of SNP TSC0056461
atatttatattcg

SEQ ID NO: 231554 - DNA, 13 bp, Artificial Sequence
  Oligonucleotide for detection of SNP TSC0056461
cgaatataaatat

SEQ ID NO: 231555 - DNA, 13 bp, Artificial Sequence
  Oligonucleotide for detection of SNP TSC0056461
atatttgtattcg

SEQ ID NO: 231556 - DNA, 13 bp, Artificial Sequence
  Oligonucleotide for detection of SNP TSC0056461
cgaatacaaatat

SEQ ID NO: 231557 - DNA, 13 bp, Artificial Sequence
  Oligonucleotide for detection of SNP TSC0056461
atattcgtattcg

SEQ ID NO: 231558 - DNA, 13 bp, Artificial Sequence
  Oligonucleotide for detection of SNP TSC0056461
cgaatacgaatat

SEQ ID NO: 231559 - DNA, 13 bp, Artificial Sequence
  Oligonucleotide for detection of SNP TSC0056462
aaaattgataatg

SEQ ID NO: 231560 - DNA, 13 bp, Artificial Sequence
  Oligonucleotide for detection of SNP TSC0056462
cattatcaatttt

SEQ ID NO: 231561 - DNA, 13 bp, Artificial Sequence
  Oligonucleotide for detection of SNP TSC0056462
aaaattaataatg

SEQ ID NO: 231562 - DNA, 13 bp, Artificial Sequence
  Oligonucleotide for detection of SNP TSC0056462
cattattaatttt

SEQ ID NO: 231563 - DNA, 13 bp, Artificial Sequence
  Oligonucleotide for detection of SNP TSC0056463
agaaaaattaatt

SEQ ID NO: 231564 - DNA, 13 bp, Artificial Sequence
  Oligonucleotide for detection of SNP TSC0056463
aattaatttttct

SEQ ID NO: 231565 - DNA, 13 bp, Artificial Sequence
  Oligonucleotide for detection of SNP TSC0056463
agaaaatttaatt

SEQ ID NO: 231566 - DNA, 13 bp, Artificial Sequence
  Oligonucleotide for detection of SNP TSC0056463
aattaaattttct

SEQ ID NO: 231567 - DNA, 13 bp, Artificial Sequence
  Oligonucleotide for detection of SNP TSC0056465
gatttagtttaat

SEQ ID NO: 231568 - DNA, 13 bp, Artificial Sequence
  Oligonucleotide for detection of SNP TSC0056465
attaaactaaatc

SEQ ID NO: 231569 - DNA, 13 bp, Artificial Sequence
  Oligonucleotide for detection of SNP TSC0056469
atgggataaaggt

SEQ ID NO: 231570 - DNA, 13 bp, Artificial Sequence
  Oligonucleotide for detection of SNP TSC0056469
acctttatcccat

SEQ ID NO: 231571 - DNA, 13 bp, Artificial Sequence
  Oligonucleotide for detection of SNP TSC0056469
atgggaaaaaggt

SEQ ID NO: 231572 - DNA, 13 bp, Artificial Sequence
  Oligonucleotide for detection of SNP TSC0056469
acctttttcccat

SEQ ID NO: 231573 - DNA, 13 bp, Artificial Sequence
  Oligonucleotide for detection of SNP TSC0056470
ttttagggggtag

SEQ ID NO: 231574 - DNA, 13 bp, Artificial Sequence
  Oligonucleotide for detection of SNP TSC0056470
ctaccccctaaaa

SEQ ID NO: 231575 - DNA, 13 bp, Artificial Sequence
  Oligonucleotide for detection of SNP TSC0056470
ttttagagggtag

SEQ ID NO: 231576 - DNA, 13 bp, Artificial Sequence
  Oligonucleotide for detection of SNP TSC0056470
ctaccctctaaaa

SEQ ID NO: 231577 - DNA, 13 bp, Artificial Sequence
  Oligonucleotide for detection of SNP TSC0056471
ggttttgggaaga

SEQ ID NO: 231578 - DNA, 13 bp, Artificial Sequence
  Oligonucleotide for detection of SNP TSC0056471
tcttcccaaaacc

SEQ ID NO: 231579 - DNA, 13 bp, Artificial Sequence
  Oligonucleotide for detection of SNP TSC0056471
ggttttaggaaga

SEQ ID NO: 231580 - DNA, 13 bp, Artificial Sequence
  Oligonucleotide for detection of SNP TSC0056471
tcttcctaaaacc

SEQ ID NO: 231581 - DNA, 13 bp, Artificial Sequence
  Oligonucleotide for detection of SNP TSC0056471
ggtttcgggaaga

SEQ ID NO: 231582 - DNA, 13 bp, Artificial Sequence
  Oligonucleotide for detection of SNP TSC0056471
tcttcccgaaacc

SEQ ID NO: 231583 - DNA, 13 bp, Artificial Sequence
  Oligonucleotide for detection of SNP TSC0056472
taggtagtgatta

SEQ ID NO: 231584 - DNA, 13 bp, Artificial Sequence
  Oligonucleotide for detection of SNP TSC0056472
taatcactaccta

SEQ ID NO: 231585 - DNA, 13 bp, Artificial Sequence
  Oligonucleotide for detection of SNP TSC0056472
taggtaatgatta

SEQ ID NO: 231586 - DNA, 13 bp, Artificial Sequence
  Oligonucleotide for detection of SNP TSC0056472
taatcattaccta

SEQ ID NO: 231587 - DNA, 13 bp, Artificial Sequence
  Oligonucleotide for detection of SNP TSC0056473
taattaagagata

SEQ ID NO: 231588 - DNA, 13 bp, Artificial Sequence
  Oligonucleotide for detection of SNP TSC0056473
tatctcttaatta

SEQ ID NO: 231589 - DNA, 13 bp, Artificial Sequence
  Oligonucleotide for detection of SNP TSC0056473
taattaggagata

SEQ ID NO: 231590 - DNA, 13 bp, Artificial Sequence
  Oligonucleotide for detection of SNP TSC0056473
tatctcctaatta

SEQ ID NO: 231591 - DNA, 13 bp, Artificial Sequence
  Oligonucleotide for detection of SNP TSC0056474
ataggtaaatgga

SEQ ID NO: 231592 - DNA, 13 bp, Artificial Sequence
  Oligonucleotide for detection of SNP TSC0056474
tccatttacctat

SEQ ID NO: 231593 - DNA, 13 bp, Artificial Sequence
  Oligonucleotide for detection of SNP TSC0056474
ataggtgaatgga

SEQ ID NO: 231594 - DNA, 13 bp, Artificial Sequence
  Oligonucleotide for detection of SNP TSC0056474
tccattcacctat

SEQ ID NO: 231595 - DNA, 13 bp, Artificial Sequence
  Oligonucleotide for detection of SNP TSC0056475
atagaggttaatt

SEQ ID NO: 231596 - DNA, 13 bp, Artificial Sequence
  Oligonucleotide for detection of SNP TSC0056475
aattaacctctat

SEQ ID NO: 231597 - DNA, 13 bp, Artificial Sequence
  Oligonucleotide for detection of SNP TSC0056475
atagagattaatt

SEQ ID NO: 231598 - DNA, 13 bp, Artificial Sequence
  Oligonucleotide for detection of SNP TSC0056475
aattaatctctat

SEQ ID NO: 231599 - DNA, 13 bp, Artificial Sequence
  Oligonucleotide for detection of SNP TSC0004864
agttatatgtata

SEQ ID NO: 231600 - DNA, 13 bp, Artificial Sequence
  Oligonucleotide for detection of SNP TSC0004864
tatacatataact

SEQ ID NO: 231601 - DNA, 13 bp, Artificial Sequence
  Oligonucleotide for detection of SNP TSC0004864
agttatgtgtata

SEQ ID NO: 231602 - DNA, 13 bp, Artificial Sequence
  Oligonucleotide for detection of SNP TSC0004864
tatacacataact

SEQ ID NO: 231603 - DNA, 13 bp, Artificial Sequence
  Oligonucleotide for detection of SNP TSC0004865
taatttaatataa

SEQ ID NO: 231604 - DNA, 13 bp, Artificial Sequence
  Oligonucleotide for detection of SNP TSC0004865
ttatattaaatta

SEQ ID NO: 231605 - DNA, 13 bp, Artificial Sequence
  Oligonucleotide for detection of SNP TSC0004865
taattttatataa

SEQ ID NO: 231606 - DNA, 13 bp, Artificial Sequence
  Oligonucleotide for detection of SNP TSC0004865
ttatataaaatta

SEQ ID NO: 231607 - DNA, 13 bp, Artificial Sequence
  Oligonucleotide for detection of SNP TSC0004865
ttatatgaaatta

SEQ ID NO: 231608 - DNA, 13 bp, Artificial Sequence
  Oligonucleotide for detection of SNP TSC0004865
taatttcatataa

SEQ ID NO: 231609 - DNA, 13 bp, Artificial Sequence
  Oligonucleotide for detection of SNP TSC0004884
gggagggaataaa

SEQ ID NO: 231610 - DNA, 13 bp, Artificial Sequence
  Oligonucleotide for detection of SNP TSC0004884
tttattccctccc

SEQ ID NO: 231611 - DNA, 13 bp, Artificial Sequence
  Oligonucleotide for detection of SNP TSC0004884
gggaggtaataaa

SEQ ID NO: 231612 - DNA, 13 bp, Artificial Sequence
  Oligonucleotide for detection of SNP TSC0004884
tttattacctccc

SEQ ID NO: 231613 - DNA, 13 bp, Artificial Sequence
  Oligonucleotide for detection of SNP TSC0056480
gattataggatgg

SEQ ID NO: 231614 - DNA, 13 bp, Artificial Sequence
  Oligonucleotide for detection of SNP TSC0056480
ccatcctataatc

SEQ ID NO: 231615 - DNA, 13 bp, Artificial Sequence
  Oligonucleotide for detection of SNP TSC0056480
gattatgggatgg

SEQ ID NO: 231616 - DNA, 13 bp, Artificial Sequence
  Oligonucleotide for detection of SNP TSC0056480
ccatcccataatc

SEQ ID NO: 231617 - DNA, 13 bp, Artificial Sequence
  Oligonucleotide for detection of SNP TSC0007621
ttgagatgtttay

SEQ ID NO: 231618 - DNA, 13 bp, Artificial Sequence
  Oligonucleotide for detection of SNP TSC0007621
rtaaacatctcaa

SEQ ID NO: 231619 - DNA, 13 bp, Artificial Sequence
  Oligonucleotide for detection of SNP TSC0007621
ttgagacgtttay

SEQ ID NO: 231620 - DNA, 13 bp, Artificial Sequence
  Oligonucleotide for detection of SNP TSC0007621
rtaaacgtctcaa

SEQ ID NO: 231621 - DNA, 13 bp, Artificial Sequence
  Oligonucleotide for detection of SNP TSC0007621
gtggatgttttaa

SEQ ID NO: 231622 - DNA, 13 bp, Artificial Sequence
  Oligonucleotide for detection of SNP TSC0007621
ttaaaacatccac

SEQ ID NO: 231623 - DNA, 13 bp, Artificial Sequence
  Oligonucleotide for detection of SNP TSC0007621
gtggatattttaa

SEQ ID NO: 231624 - DNA, 13 bp, Artificial Sequence
  Oligonucleotide for detection of SNP TSC0007621
ttaaaatatccac

SEQ ID NO: 231625 - DNA, 13 bp, Artificial Sequence
  Oligonucleotide for detection of SNP TSC0007621
gtggacgttttaa

SEQ ID NO: 231626 - DNA, 13 bp, Artificial Sequence
  Oligonucleotide for detection of SNP TSC0007621
ttaaaacgtccac

SEQ ID NO: 231627 - DNA, 13 bp, Artificial Sequence
  Oligonucleotide for detection of SNP TSC0056481
taatatatatttt

SEQ ID NO: 231628 - DNA, 13 bp, Artificial Sequence
  Oligonucleotide for detection of SNP TSC0056481
aaaatatatatta

SEQ ID NO: 231629 - DNA, 13 bp, Artificial Sequence
  Oligonucleotide for detection of SNP TSC0056481
taatatgtatttt

SEQ ID NO: 231630 - DNA, 13 bp, Artificial Sequence
  Oligonucleotide for detection of SNP TSC0056481
aaaatacatatta

SEQ ID NO: 231631 - DNA, 13 bp, Artificial Sequence
  Oligonucleotide for detection of SNP TSC0005488
tataattggtaay

SEQ ID NO: 231632 - DNA, 13 bp, Artificial Sequence
  Oligonucleotide for detection of SNP TSC0005488
rttaccaattata

SEQ ID NO: 231633 - DNA, 13 bp, Artificial Sequence
  Oligonucleotide for detection of SNP TSC0005488
tataatcggtaay

SEQ ID NO: 231634 - DNA, 13 bp, Artificial Sequence
  Oligonucleotide for detection of SNP TSC0005488
rttaccgattata

SEQ ID NO: 231635 - DNA, 13 bp, Artificial Sequence
  Oligonucleotide for detection of SNP TSC0005488
gttgttggttgta

SEQ ID NO: 231636 - DNA, 13 bp, Artificial Sequence
  Oligonucleotide for detection of SNP TSC0005488
tacaaccaacaac

SEQ ID NO: 231637 - DNA, 13 bp, Artificial Sequence
  Oligonucleotide for detection of SNP TSC0005488
gttgttagttgta

SEQ ID NO: 231638 - DNA, 13 bp, Artificial Sequence
  Oligonucleotide for detection of SNP TSC0005488
tacaactaacaac

SEQ ID NO: 231639 - DNA, 13 bp, Artificial Sequence
  Oligonucleotide for detection of SNP TSC0005488
gttgtcggttgta

SEQ ID NO: 231640 - DNA, 13 bp, Artificial Sequence
  Oligonucleotide for detection of SNP TSC0005488
tacaaccgacaac

SEQ ID NO: 231641 - DNA, 13 bp, Artificial Sequence
  Oligonucleotide for detection of SNP TSC0005585
gtatgtagatttg

SEQ ID NO: 231642 - DNA, 13 bp, Artificial Sequence
  Oligonucleotide for detection of SNP TSC0005585
caaatctacatac

SEQ ID NO: 231643 - DNA, 13 bp, Artificial Sequence
  Oligonucleotide for detection of SNP TSC0005585
gtatgtggatttg

SEQ ID NO: 231644 - DNA, 13 bp, Artificial Sequence
  Oligonucleotide for detection of SNP TSC0005585
caaatccacatac

SEQ ID NO: 231645 - DNA, 13 bp, Artificial Sequence
  Oligonucleotide for detection of SNP TSC0005585
gtatgtagattcg

SEQ ID NO: 231646 - DNA, 13 bp, Artificial Sequence
  Oligonucleotide for detection of SNP TSC0005585
cgaatctacatac

SEQ ID NO: 231647 - DNA, 13 bp, Artificial Sequence
  Oligonucleotide for detection of SNP TSC0005585
gtatgcggatttg

SEQ ID NO: 231648 - DNA, 13 bp, Artificial Sequence
  Oligonucleotide for detection of SNP TSC0005585
caaatccgcatac

SEQ ID NO: 231649 - DNA, 13 bp, Artificial Sequence
  Oligonucleotide for detection of SNP TSC0005585
gtatgtggattcg

SEQ ID NO: 231650 - DNA, 13 bp, Artificial Sequence
  Oligonucleotide for detection of SNP TSC0005585
cgaatccacatac

SEQ ID NO: 231651 - DNA, 13 bp, Artificial Sequence
  Oligonucleotide for detection of SNP TSC0005585
gtatgcggattcg

SEQ ID NO: 231652 - DNA, 13 bp, Artificial Sequence
  Oligonucleotide for detection of SNP TSC0005585
cgaatccgcatac

SEQ ID NO: 231653 - DNA, 13 bp, Artificial Sequence
  Oligonucleotide for detection of SNP TSC0005585
tgaatttgtatgy

SEQ ID NO: 231654 - DNA, 13 bp, Artificial Sequence
  Oligonucleotide for detection of SNP TSC0005585
rcatacaaattca

SEQ ID NO: 231655 - DNA, 13 bp, Artificial Sequence
  Oligonucleotide for detection of SNP TSC0005585
cgaatttgtatgy

SEQ ID NO: 231656 - DNA, 13 bp, Artificial Sequence
  Oligonucleotide for detection of SNP TSC0005585
rcatacaaattcg

SEQ ID NO: 231657 - DNA, 13 bp, Artificial Sequence
  Oligonucleotide for detection of SNP TSC0005585
tgaattcgtatgy

SEQ ID NO: 231658 - DNA, 13 bp, Artificial Sequence
  Oligonucleotide for detection of SNP TSC0005585
rcatacgaattca

SEQ ID NO: 231659 - DNA, 13 bp, Artificial Sequence
  Oligonucleotide for detection of SNP TSC0005585
cgaattcgtatgy

SEQ ID NO: 231660 - DNA, 13 bp, Artificial Sequence
  Oligonucleotide for detection of SNP TSC0005585
rcatacgaattcg

SEQ ID NO: 231661 - DNA, 13 bp, Artificial Sequence
  Oligonucleotide for detection of SNP TSC0056483
ttgataggatgtt

SEQ ID NO: 231662 - DNA, 13 bp, Artificial Sequence
  Oligonucleotide for detection of SNP TSC0056483
aacatcctatcaa

SEQ ID NO: 231663 - DNA, 13 bp, Artificial Sequence
  Oligonucleotide for detection of SNP TSC0056483
ttgataagatgtt

SEQ ID NO: 231664 - DNA, 13 bp, Artificial Sequence
  Oligonucleotide for detection of SNP TSC0056483
aacatcttatcaa

SEQ ID NO: 231665 - DNA, 13 bp, Artificial Sequence
  Oligonucleotide for detection of SNP TSC0056484
tgtgttggttata

SEQ ID NO: 231666 - DNA, 13 bp, Artificial Sequence
  Oligonucleotide for detection of SNP TSC0056484
tataaccaacaca

SEQ ID NO: 231667 - DNA, 13 bp, Artificial Sequence
  Oligonucleotide for detection of SNP TSC0056484
tgtgttagttata

SEQ ID NO: 231668 - DNA, 13 bp, Artificial Sequence
  Oligonucleotide for detection of SNP TSC0056484
tataactaacaca

SEQ ID NO: 231669 - DNA, 13 bp, Artificial Sequence
  Oligonucleotide for detection of SNP TSC0056485
tggttagaattta

SEQ ID NO: 231670 - DNA, 13 bp, Artificial Sequence
  Oligonucleotide for detection of SNP TSC0056485
taaattctaacca

SEQ ID NO: 231671 - DNA, 13 bp, Artificial Sequence
  Oligonucleotide for detection of SNP TSC0056485
tggttaaaattta

SEQ ID NO: 231672 - DNA, 13 bp, Artificial Sequence
  Oligonucleotide for detection of SNP TSC0056485
taaattttaacca

SEQ ID NO: 231673 - DNA, 13 bp, Artificial Sequence
  Oligonucleotide for detection of SNP TSC0056486
atatgaataatta

SEQ ID NO: 231674 - DNA, 13 bp, Artificial Sequence
  Oligonucleotide for detection of SNP TSC0056486
taattattcatat

SEQ ID NO: 231675 - DNA, 13 bp, Artificial Sequence
  Oligonucleotide for detection of SNP TSC0056486
atatgagtaatta

SEQ ID NO: 231676 - DNA, 13 bp, Artificial Sequence
  Oligonucleotide for detection of SNP TSC0056486
taattactcatat

SEQ ID NO: 231677 - DNA, 13 bp, Artificial Sequence
  Oligonucleotide for detection of SNP TSC0056487
tttggtaattgat

SEQ ID NO: 231678 - DNA, 13 bp, Artificial Sequence
  Oligonucleotide for detection of SNP TSC0056487
atcaattaccaaa

SEQ ID NO: 231679 - DNA, 13 bp, Artificial Sequence
  Oligonucleotide for detection of SNP TSC0056487
tttggtgattgat

SEQ ID NO: 231680 - DNA, 13 bp, Artificial Sequence
  Oligonucleotide for detection of SNP TSC0056487
atcaatcaccaaa

SEQ ID NO: 231681 - DNA, 13 bp, Artificial Sequence
  Oligonucleotide for detection of SNP TSC0056489
ttgtattaaaata

SEQ ID NO: 231682 - DNA, 13 bp, Artificial Sequence
  Oligonucleotide for detection of SNP TSC0056489
tattttaatacaa

SEQ ID NO: 231683 - DNA, 13 bp, Artificial Sequence
  Oligonucleotide for detection of SNP TSC0056489
ttgtatgaaaata

SEQ ID NO: 231684 - DNA, 13 bp, Artificial Sequence
  Oligonucleotide for detection of SNP TSC0056489
tattttcatacaa

SEQ ID NO: 231685 - DNA, 13 bp, Artificial Sequence
  Oligonucleotide for detection of SNP TSC0056489
ttgtacgaaaata

SEQ ID NO: 231686 - DNA, 13 bp, Artificial Sequence
  Oligonucleotide for detection of SNP TSC0056489
tattttcgtacaa

SEQ ID NO: 231687 - DNA, 13 bp, Artificial Sequence
  Oligonucleotide for detection of SNP TSC0056490
attgtaattttgt

SEQ ID NO: 231688 - DNA, 13 bp, Artificial Sequence
  Oligonucleotide for detection of SNP TSC0056490
acaaaattacaat

SEQ ID NO: 231689 - DNA, 13 bp, Artificial Sequence
  Oligonucleotide for detection of SNP TSC0056490
attgtatttttgt

SEQ ID NO: 231690 - DNA, 13 bp, Artificial Sequence
  Oligonucleotide for detection of SNP TSC0056490
acaaaaatacaat

SEQ ID NO: 231691 - DNA, 13 bp, Artificial Sequence
  Oligonucleotide for detection of SNP TSC0056490
ataaaattgtaat

SEQ ID NO: 231692 - DNA, 13 bp, Artificial Sequence
  Oligonucleotide for detection of SNP TSC0056490
attacaattttat

SEQ ID NO: 231693 - DNA, 13 bp, Artificial Sequence
  Oligonucleotide for detection of SNP TSC0056490
ataaaagtgtaat

SEQ ID NO: 231694 - DNA, 13 bp, Artificial Sequence
  Oligonucleotide for detection of SNP TSC0056490
attacacttttat

SEQ ID NO: 231695 - DNA, 13 bp, Artificial Sequence
  Oligonucleotide for detection of SNP TSC0056491
gaattttgttaaa

SEQ ID NO: 231696 - DNA, 13 bp, Artificial Sequence
  Oligonucleotide for detection of SNP TSC0056491
tttaacaaaattc

SEQ ID NO: 231697 - DNA, 13 bp, Artificial Sequence
  Oligonucleotide for detection of SNP TSC0056491
gaatttcgttaaa

SEQ ID NO: 231698 - DNA, 13 bp, Artificial Sequence
  Oligonucleotide for detection of SNP TSC0056491
tttaacgaaattc

SEQ ID NO: 231699 - DNA, 13 bp, Artificial Sequence
  Oligonucleotide for detection of SNP TSC0056491
tttggtggagtty

SEQ ID NO: 231700 - DNA, 13 bp, Artificial Sequence
  Oligonucleotide for detection of SNP TSC0056491
raactccaccaaa

SEQ ID NO: 231701 - DNA, 13 bp, Artificial Sequence
  Oligonucleotide for detection of SNP TSC0056491
tttggtagagtty

SEQ ID NO: 231702 - DNA, 13 bp, Artificial Sequence
  Oligonucleotide for detection of SNP TSC0056491
raactctaccaaa

SEQ ID NO: 231703 - DNA, 13 bp, Artificial Sequence
  Oligonucleotide for detection of SNP TSC0056491
tttggcggagtty

SEQ ID NO: 231704 - DNA, 13 bp, Artificial Sequence
  Oligonucleotide for detection of SNP TSC0056491
raactccgccaaa

SEQ ID NO: 231705 - DNA, 13 bp, Artificial Sequence
  Oligonucleotide for detection of SNP TSC0056492
tgttatagtgggt

SEQ ID NO: 231706 - DNA, 13 bp, Artificial Sequence
  Oligonucleotide for detection of SNP TSC0056492
acccactataaca

SEQ ID NO: 231707 - DNA, 13 bp, Artificial Sequence
  Oligonucleotide for detection of SNP TSC0056492
tgttattgtgggt

SEQ ID NO: 231708 - DNA, 13 bp, Artificial Sequence
  Oligonucleotide for detection of SNP TSC0056492
acccacaataaca

SEQ ID NO: 231709 - DNA, 13 bp, Artificial Sequence
  Oligonucleotide for detection of SNP TSC0056492
tgttatagcgggt

SEQ ID NO: 231710 - DNA, 13 bp, Artificial Sequence
  Oligonucleotide for detection of SNP TSC0056492
acccgctataaca

SEQ ID NO: 231711 - DNA, 13 bp, Artificial Sequence
  Oligonucleotide for detection of SNP TSC0056492
tgttattgcgggt

SEQ ID NO: 231712 - DNA, 13 bp, Artificial Sequence
  Oligonucleotide for detection of SNP TSC0056492
acccgcaataaca

SEQ ID NO: 231713 - DNA, 13 bp, Artificial Sequence
  Oligonucleotide for detection of SNP TSC0056492
atttgttgtaata

SEQ ID NO: 231714 - DNA, 13 bp, Artificial Sequence
  Oligonucleotide for detection of SNP TSC0056492
tattacaacaaat

SEQ ID NO: 231715 - DNA, 13 bp, Artificial Sequence
  Oligonucleotide for detection of SNP TSC0056492
atttgtagtaata

SEQ ID NO: 231716 - DNA, 13 bp, Artificial Sequence
  Oligonucleotide for detection of SNP TSC0056492
tattactacaaat

SEQ ID NO: 231717 - DNA, 13 bp, Artificial Sequence
  Oligonucleotide for detection of SNP TSC0056492
attcgttgtaata

SEQ ID NO: 231718 - DNA, 13 bp, Artificial Sequence
  Oligonucleotide for detection of SNP TSC0056492
tattacaacgaat

SEQ ID NO: 231719 - DNA, 13 bp, Artificial Sequence
  Oligonucleotide for detection of SNP TSC0056492
attcgtagtaata

SEQ ID NO: 231720 - DNA, 13 bp, Artificial Sequence
  Oligonucleotide for detection of SNP TSC0056492
tattactacgaat

SEQ ID NO: 231721 - DNA, 13 bp, Artificial Sequence
  Oligonucleotide for detection of SNP TSC0056493
aagataatgtttt

SEQ ID NO: 231722 - DNA, 13 bp, Artificial Sequence
  Oligonucleotide for detection of SNP TSC0056493
aaaacattatctt

SEQ ID NO: 231723 - DNA, 13 bp, Artificial Sequence
  Oligonucleotide for detection of SNP TSC0056493
aagatagtgtttt

SEQ ID NO: 231724 - DNA, 13 bp, Artificial Sequence
  Oligonucleotide for detection of SNP TSC0056493
aaaacactatctt

SEQ ID NO: 231725 - DNA, 13 bp, Artificial Sequence
  Oligonucleotide for detection of SNP TSC0056494
gagtaagtgttay

SEQ ID NO: 231726 - DNA, 13 bp, Artificial Sequence
  Oligonucleotide for detection of SNP TSC0056494
rtaacacttactc

SEQ ID NO: 231727 - DNA, 13 bp, Artificial Sequence
  Oligonucleotide for detection of SNP TSC0056494
gagtaaatgttay

SEQ ID NO: 231728 - DNA, 13 bp, Artificial Sequence
  Oligonucleotide for detection of SNP TSC0056494
rtaacatttactc

SEQ ID NO: 231729 - DNA, 13 bp, Artificial Sequence
  Oligonucleotide for detection of SNP TSC0056500
aagggaagattgt

SEQ ID NO: 231730 - DNA, 13 bp, Artificial Sequence
  Oligonucleotide for detection of SNP TSC0056500
acaatcttccctt

SEQ ID NO: 231731 - DNA, 13 bp, Artificial Sequence
  Oligonucleotide for detection of SNP TSC0056500
aagggatgattgt

SEQ ID NO: 231732 - DNA, 13 bp, Artificial Sequence
  Oligonucleotide for detection of SNP TSC0056500
acaatcatccctt

SEQ ID NO: 231733 - DNA, 13 bp, Artificial Sequence
  Oligonucleotide for detection of SNP TSC0056500
aagggacgattgt

SEQ ID NO: 231734 - DNA, 13 bp, Artificial Sequence
  Oligonucleotide for detection of SNP TSC0056500
acaatcgtccctt

SEQ ID NO: 231735 - DNA, 13 bp, Artificial Sequence
  Oligonucleotide for detection of SNP TSC0056500
atagttttttttt

SEQ ID NO: 231736 - DNA, 13 bp, Artificial Sequence
  Oligonucleotide for detection of SNP TSC0056500
aaaaaaaaactat

SEQ ID NO: 231737 - DNA, 13 bp, Artificial Sequence
  Oligonucleotide for detection of SNP TSC0056501
ggagataggagta

SEQ ID NO: 231738 - DNA, 13 bp, Artificial Sequence
  Oligonucleotide for detection of SNP TSC0056501
tactcctatctcc

SEQ ID NO: 231739 - DNA, 13 bp, Artificial Sequence
  Oligonucleotide for detection of SNP TSC0056501
ggagatgggagta

SEQ ID NO: 231740 - DNA, 13 bp, Artificial Sequence
  Oligonucleotide for detection of SNP TSC0056501
tactcccatctcc

SEQ ID NO: 231741 - DNA, 13 bp, Artificial Sequence
  Oligonucleotide for detection of SNP TSC0056501
ggagacgggagta

SEQ ID NO: 231742 - DNA, 13 bp, Artificial Sequence
  Oligonucleotide for detection of SNP TSC0056501
tactcccgtctcc

SEQ ID NO: 231743 - DNA, 13 bp, Artificial Sequence
  Oligonucleotide for detection of SNP TSC0056502
tatatagtgatay

SEQ ID NO: 231744 - DNA, 13 bp, Artificial Sequence
  Oligonucleotide for detection of SNP TSC0056502
rtatcactatata

SEQ ID NO: 231745 - DNA, 13 bp, Artificial Sequence
  Oligonucleotide for detection of SNP TSC0056502
tatataatgatay

SEQ ID NO: 231746 - DNA, 13 bp, Artificial Sequence
  Oligonucleotide for detection of SNP TSC0056502
rtatcattatata

SEQ ID NO: 231747 - DNA, 13 bp, Artificial Sequence
  Oligonucleotide for detection of SNP TSC0056506
gaaaattaaataa

SEQ ID NO: 231748 - DNA, 13 bp, Artificial Sequence
  Oligonucleotide for detection of SNP TSC0056506
ttatttaattttc

SEQ ID NO: 231749 - DNA, 13 bp, Artificial Sequence
  Oligonucleotide for detection of SNP TSC0056506
gaaaatgaaataa

SEQ ID NO: 231750 - DNA, 13 bp, Artificial Sequence
  Oligonucleotide for detection of SNP TSC0056506
ttatttcattttc

SEQ ID NO: 231751 - DNA, 13 bp, Artificial Sequence
  Oligonucleotide for detection of SNP TSC0056507
tagtaggagttat

SEQ ID NO: 231752 - DNA, 13 bp, Artificial Sequence
  Oligonucleotide for detection of SNP TSC0056507
ataactcctacta

SEQ ID NO: 231753 - DNA, 13 bp, Artificial Sequence
  Oligonucleotide for detection of SNP TSC0056507
tagtagaagttat

SEQ ID NO: 231754 - DNA, 13 bp, Artificial Sequence
  Oligonucleotide for detection of SNP TSC0056507
ataacttctacta

SEQ ID NO: 231755 - DNA, 13 bp, Artificial Sequence
  Oligonucleotide for detection of SNP TSC0056511
tatttataggtta

SEQ ID NO: 231756 - DNA, 13 bp, Artificial Sequence
  Oligonucleotide for detection of SNP TSC0056511
taacctataaata

SEQ ID NO: 231757 - DNA, 13 bp, Artificial Sequence
  Oligonucleotide for detection of SNP TSC0056511
tatttagaggtta

SEQ ID NO: 231758 - DNA, 13 bp, Artificial Sequence
  Oligonucleotide for detection of SNP TSC0056511
taacctctaaata

SEQ ID NO: 231759 - DNA, 13 bp, Artificial Sequence
  Oligonucleotide for detection of SNP TSC0056511
taatttatggatg

SEQ ID NO: 231760 - DNA, 13 bp, Artificial Sequence
  Oligonucleotide for detection of SNP TSC0056511
catccataaatta

SEQ ID NO: 231761 - DNA, 13 bp, Artificial Sequence
  Oligonucleotide for detection of SNP TSC0056511
taatttttggatg

SEQ ID NO: 231762 - DNA, 13 bp, Artificial Sequence
  Oligonucleotide for detection of SNP TSC0056511
catccaaaaatta

SEQ ID NO: 231763 - DNA, 13 bp, Artificial Sequence
  Oligonucleotide for detection of SNP TSC0056512
gagaaaattttat

SEQ ID NO: 231764 - DNA, 13 bp, Artificial Sequence
  Oligonucleotide for detection of SNP TSC0056512
ataaaattttctc

SEQ ID NO: 231765 - DNA, 13 bp, Artificial Sequence
  Oligonucleotide for detection of SNP TSC0056512
gagaaatttttat

SEQ ID NO: 231766 - DNA, 13 bp, Artificial Sequence
  Oligonucleotide for detection of SNP TSC0056512
ataaaaatttctc

SEQ ID NO: 231767 - DNA, 13 bp, Artificial Sequence
  Oligonucleotide for detection of SNP TSC0056513
aaaaaaaagtttg

SEQ ID NO: 231768 - DNA, 13 bp, Artificial Sequence
  Oligonucleotide for detection of SNP TSC0056513
caaactttttttt

SEQ ID NO: 231769 - DNA, 13 bp, Artificial Sequence
  Oligonucleotide for detection of SNP TSC0056513
aaaaaatagtttg

SEQ ID NO: 231770 - DNA, 13 bp, Artificial Sequence
  Oligonucleotide for detection of SNP TSC0056513
caaactatttttt

SEQ ID NO: 231771 - DNA, 13 bp, Artificial Sequence
  Oligonucleotide for detection of SNP TSC0056514
tagaggattttgy

SEQ ID NO: 231772 - DNA, 13 bp, Artificial Sequence
  Oligonucleotide for detection of SNP TSC0056514
rcaaaatcctcta

SEQ ID NO: 231773 - DNA, 13 bp, Artificial Sequence
  Oligonucleotide for detection of SNP TSC0056514
tagaggtttttgy

SEQ ID NO: 231774 - DNA, 13 bp, Artificial Sequence
  Oligonucleotide for detection of SNP TSC0056514
rcaaaaacctcta

SEQ ID NO: 231775 - DNA, 13 bp, Artificial Sequence
  Oligonucleotide for detection of SNP TSC0056514
gtagagttttttg

SEQ ID NO: 231776 - DNA, 13 bp, Artificial Sequence
  Oligonucleotide for detection of SNP TSC0056514
caaaaaactctac

SEQ ID NO: 231777 - DNA, 13 bp, Artificial Sequence
  Oligonucleotide for detection of SNP TSC0056514
gtagaggtttttg

SEQ ID NO: 231778 - DNA, 13 bp, Artificial Sequence
  Oligonucleotide for detection of SNP TSC0056514
caaaaacctctac

SEQ ID NO: 231779 - DNA, 13 bp, Artificial Sequence
  Oligonucleotide for detection of SNP TSC0056516
tatttgaataatt

SEQ ID NO: 231780 - DNA, 13 bp, Artificial Sequence
  Oligonucleotide for detection of SNP TSC0056516
aattattcaaata

SEQ ID NO: 231781 - DNA, 13 bp, Artificial Sequence
  Oligonucleotide for detection of SNP TSC0056516
tatttggataatt

SEQ ID NO: 231782 - DNA, 13 bp, Artificial Sequence
  Oligonucleotide for detection of SNP TSC0056516
aattatccaaata

SEQ ID NO: 231783 - DNA, 13 bp, Artificial Sequence
  Oligonucleotide for detection of SNP TSC0056519
ttgatgagaaaay

SEQ ID NO: 231784 - DNA, 13 bp, Artificial Sequence
  Oligonucleotide for detection of SNP TSC0056519
rttttctcatcaa

SEQ ID NO: 231785 - DNA, 13 bp, Artificial Sequence
  Oligonucleotide for detection of SNP TSC0056519
ttgatgggaaaay

SEQ ID NO: 231786 - DNA, 13 bp, Artificial Sequence
  Oligonucleotide for detection of SNP TSC0056519
rttttcccatcaa

SEQ ID NO: 231787 - DNA, 13 bp, Artificial Sequence
  Oligonucleotide for detection of SNP TSC0056520
gaattatggtgga

SEQ ID NO: 231788 - DNA, 13 bp, Artificial Sequence
  Oligonucleotide for detection of SNP TSC0056520
tccaccataattc

SEQ ID NO: 231789 - DNA, 13 bp, Artificial Sequence
  Oligonucleotide for detection of SNP TSC0056520
gaattacggtgga

SEQ ID NO: 231790 - DNA, 13 bp, Artificial Sequence
  Oligonucleotide for detection of SNP TSC0056520
tccaccgtaattc

SEQ ID NO: 231791 - DNA, 13 bp, Artificial Sequence
  Oligonucleotide for detection of SNP TSC0056521
agtatagggttty

SEQ ID NO: 231792 - DNA, 13 bp, Artificial Sequence
  Oligonucleotide for detection of SNP TSC0056521
raaaccctatact

SEQ ID NO: 231793 - DNA, 13 bp, Artificial Sequence
  Oligonucleotide for detection of SNP TSC0056521
agtataaggttty

SEQ ID NO: 231794 - DNA, 13 bp, Artificial Sequence
  Oligonucleotide for detection of SNP TSC0056521
raaaccttatact

SEQ ID NO: 231795 - DNA, 13 bp, Artificial Sequence
  Oligonucleotide for detection of SNP TSC0056523
aatatatatatgg

SEQ ID NO: 231796 - DNA, 13 bp, Artificial Sequence
  Oligonucleotide for detection of SNP TSC0056523
ccatatatatatt

SEQ ID NO: 231797 - DNA, 13 bp, Artificial Sequence
  Oligonucleotide for detection of SNP TSC0056523
aatatagatatgg

SEQ ID NO: 231798 - DNA, 13 bp, Artificial Sequence
  Oligonucleotide for detection of SNP TSC0056523
ccatatctatatt

SEQ ID NO: 231799 - DNA, 13 bp, Artificial Sequence
  Oligonucleotide for detection of SNP TSC0056523
ttatatgtatatt

SEQ ID NO: 231800 - DNA, 13 bp, Artificial Sequence
  Oligonucleotide for detection of SNP TSC0056523
aatatacatataa

SEQ ID NO: 231801 - DNA, 13 bp, Artificial Sequence
  Oligonucleotide for detection of SNP TSC0056523
ttatatttatatt

SEQ ID NO: 231802 - DNA, 13 bp, Artificial Sequence
  Oligonucleotide for detection of SNP TSC0056523
aatataaatataa

SEQ ID NO: 231803 - DNA, 13 bp, Artificial Sequence
  Oligonucleotide for detection of SNP TSC0056529
ttatttaagaggy

SEQ ID NO: 231804 - DNA, 13 bp, Artificial Sequence
  Oligonucleotide for detection of SNP TSC0056529
rcctcttaaataa

SEQ ID NO: 231805 - DNA, 13 bp, Artificial Sequence
  Oligonucleotide for detection of SNP TSC0056529
ttatttgagaggy

SEQ ID NO: 231806 - DNA, 13 bp, Artificial Sequence
  Oligonucleotide for detection of SNP TSC0056529
rcctctcaaataa

SEQ ID NO: 231807 - DNA, 13 bp, Artificial Sequence
  Oligonucleotide for detection of SNP TSC0056529
ttattcgagaggy

SEQ ID NO: 231808 - DNA, 13 bp, Artificial Sequence
  Oligonucleotide for detection of SNP TSC0056529
rcctctcgaataa

SEQ ID NO: 231809 - DNA, 13 bp, Artificial Sequence
  Oligonucleotide for detection of SNP TSC0056531
aagaattgggagt

SEQ ID NO: 231810 - DNA, 13 bp, Artificial Sequence
  Oligonucleotide for detection of SNP TSC0056531
actcccaattctt

SEQ ID NO: 231811 - DNA, 13 bp, Artificial Sequence
  Oligonucleotide for detection of SNP TSC0056531
aagaatcgggagt

SEQ ID NO: 231812 - DNA, 13 bp, Artificial Sequence
  Oligonucleotide for detection of SNP TSC0056531
actcccgattctt

SEQ ID NO: 231813 - DNA, 13 bp, Artificial Sequence
  Oligonucleotide for detection of SNP TSC0056532
tgatagaaattta

SEQ ID NO: 231814 - DNA, 13 bp, Artificial Sequence
  Oligonucleotide for detection of SNP TSC0056532
taaatttctatca

SEQ ID NO: 231815 - DNA, 13 bp, Artificial Sequence
  Oligonucleotide for detection of SNP TSC0056532
tgatagtaattta

SEQ ID NO: 231816 - DNA, 13 bp, Artificial Sequence
  Oligonucleotide for detection of SNP TSC0056532
taaattactatca

SEQ ID NO: 231817 - DNA, 13 bp, Artificial Sequence
  Oligonucleotide for detection of SNP TSC0056533
tataaaataattg

SEQ ID NO: 231818 - DNA, 13 bp, Artificial Sequence
  Oligonucleotide for detection of SNP TSC0056533
caattattttata

SEQ ID NO: 231819 - DNA, 13 bp, Artificial Sequence
  Oligonucleotide for detection of SNP TSC0056533
tataaagtaattg

SEQ ID NO: 231820 - DNA, 13 bp, Artificial Sequence
  Oligonucleotide for detection of SNP TSC0056533
caattactttata

SEQ ID NO: 231821 - DNA, 13 bp, Artificial Sequence
  Oligonucleotide for detection of SNP TSC0056534
tgtattcgtgtgt

SEQ ID NO: 231822 - DNA, 13 bp, Artificial Sequence
  Oligonucleotide for detection of SNP TSC0056534
acacacgaataca

SEQ ID NO: 231823 - DNA, 13 bp, Artificial Sequence
  Oligonucleotide for detection of SNP TSC0056535
attttaggttgty

SEQ ID NO: 231824 - DNA, 13 bp, Artificial Sequence
  Oligonucleotide for detection of SNP TSC0056535
racaacctaaaat

SEQ ID NO: 231825 - DNA, 13 bp, Artificial Sequence
  Oligonucleotide for detection of SNP TSC0056535
attttaagttgty

SEQ ID NO: 231826 - DNA, 13 bp, Artificial Sequence
  Oligonucleotide for detection of SNP TSC0056535
racaacttaaaat

SEQ ID NO: 231827 - DNA, 13 bp, Artificial Sequence
  Oligonucleotide for detection of SNP TSC0056536
ttaatgtgatttg

SEQ ID NO: 231828 - DNA, 13 bp, Artificial Sequence
  Oligonucleotide for detection of SNP TSC0056536
caaatcacattaa

SEQ ID NO: 231829 - DNA, 13 bp, Artificial Sequence
  Oligonucleotide for detection of SNP TSC0056536
ttaatgcgatttg

SEQ ID NO: 231830 - DNA, 13 bp, Artificial Sequence
  Oligonucleotide for detection of SNP TSC0056536
caaatcgcattaa

SEQ ID NO: 231831 - DNA, 13 bp, Artificial Sequence
  Oligonucleotide for detection of SNP TSC0056536
taagttgtattgg

SEQ ID NO: 231832 - DNA, 13 bp, Artificial Sequence
  Oligonucleotide for detection of SNP TSC0056536
ccaatacaactta

SEQ ID NO: 231833 - DNA, 13 bp, Artificial Sequence
  Oligonucleotide for detection of SNP TSC0056536
taagttatattgg

SEQ ID NO: 231834 - DNA, 13 bp, Artificial Sequence
  Oligonucleotide for detection of SNP TSC0056536
ccaatataactta

SEQ ID NO: 231835 - DNA, 13 bp, Artificial Sequence
  Oligonucleotide for detection of SNP TSC0056536
taagtcgtattgg

SEQ ID NO: 231836 - DNA, 13 bp, Artificial Sequence
  Oligonucleotide for detection of SNP TSC0056536
ccaatacgactta

SEQ ID NO: 231837 - DNA, 13 bp, Artificial Sequence
  Oligonucleotide for detection of SNP TSC0056537
ttttttagtgagt

SEQ ID NO: 231838 - DNA, 13 bp, Artificial Sequence
  Oligonucleotide for detection of SNP TSC0056537
actcactaaaaaa

SEQ ID NO: 231839 - DNA, 13 bp, Artificial Sequence
  Oligonucleotide for detection of SNP TSC0056537
tttttttgtgagt

SEQ ID NO: 231840 - DNA, 13 bp, Artificial Sequence
  Oligonucleotide for detection of SNP TSC0056537
actcacaaaaaaa

SEQ ID NO: 231841 - DNA, 13 bp, Artificial Sequence
  Oligonucleotide for detection of SNP TSC0056537
ttttttcgtgagt

SEQ ID NO: 231842 - DNA, 13 bp, Artificial Sequence
  Oligonucleotide for detection of SNP TSC0056537
actcacgaaaaaa

SEQ ID NO: 231843 - DNA, 13 bp, Artificial Sequence
  Oligonucleotide for detection of SNP TSC0056537
atttattgaagaa

SEQ ID NO: 231844 - DNA, 13 bp, Artificial Sequence
  Oligonucleotide for detection of SNP TSC0056537
ttcttcaataaat

SEQ ID NO: 231845 - DNA, 13 bp, Artificial Sequence
  Oligonucleotide for detection of SNP TSC0056537
atttatggaagaa

SEQ ID NO: 231846 - DNA, 13 bp, Artificial Sequence
  Oligonucleotide for detection of SNP TSC0056537
ttcttccataaat

SEQ ID NO: 231847 - DNA, 13 bp, Artificial Sequence
  Oligonucleotide for detection of SNP TSC0056537
atttacggaagaa

SEQ ID NO: 231848 - DNA, 13 bp, Artificial Sequence
  Oligonucleotide for detection of SNP TSC0056537
ttcttccgtaaat

SEQ ID NO: 231849 - DNA, 13 bp, Artificial Sequence
  Oligonucleotide for detection of SNP TSC0056539
gagttgtggattt

SEQ ID NO: 231850 - DNA, 13 bp, Artificial Sequence
  Oligonucleotide for detection of SNP TSC0056539
aaatccacaactc

SEQ ID NO: 231851 - DNA, 13 bp, Artificial Sequence
  Oligonucleotide for detection of SNP TSC0056539
gagttgcggattt

SEQ ID NO: 231852 - DNA, 13 bp, Artificial Sequence
  Oligonucleotide for detection of SNP TSC0056539
aaatccgcaactc

SEQ ID NO: 231853 - DNA, 13 bp, Artificial Sequence
  Oligonucleotide for detection of SNP TSC0056539
agatttgtagtty

SEQ ID NO: 231854 - DNA, 13 bp, Artificial Sequence
  Oligonucleotide for detection of SNP TSC0056539
raactacaaatct

SEQ ID NO: 231855 - DNA, 13 bp, Artificial Sequence
  Oligonucleotide for detection of SNP TSC0056539
agatttatagtty

SEQ ID NO: 231856 - DNA, 13 bp, Artificial Sequence
  Oligonucleotide for detection of SNP TSC0056539
raactataaatct

SEQ ID NO: 231857 - DNA, 13 bp, Artificial Sequence
  Oligonucleotide for detection of SNP TSC0056539
agattcgtagtty

SEQ ID NO: 231858 - DNA, 13 bp, Artificial Sequence
  Oligonucleotide for detection of SNP TSC0056539
raactacgaatct

SEQ ID NO: 231859 - DNA, 13 bp, Artificial Sequence
  Oligonucleotide for detection of SNP TSC0056543
gtagaagagtggg

SEQ ID NO: 231860 - DNA, 13 bp, Artificial Sequence
  Oligonucleotide for detection of SNP TSC0056543
cccactcttctac

SEQ ID NO: 231861 - DNA, 13 bp, Artificial Sequence
  Oligonucleotide for detection of SNP TSC0056543
gtagaaaagtggg

SEQ ID NO: 231862 - DNA, 13 bp, Artificial Sequence
  Oligonucleotide for detection of SNP TSC0056543
cccacttttctac

SEQ ID NO: 231863 - DNA, 13 bp, Artificial Sequence
  Oligonucleotide for detection of SNP TSC0056549
gtttttttaagty

SEQ ID NO: 231864 - DNA, 13 bp, Artificial Sequence
  Oligonucleotide for detection of SNP TSC0056549
racttaaaaaaac

SEQ ID NO: 231865 - DNA, 13 bp, Artificial Sequence
  Oligonucleotide for detection of SNP TSC0056549
ggtttataaaaay

SEQ ID NO: 231866 - DNA, 13 bp, Artificial Sequence
  Oligonucleotide for detection of SNP TSC0056549
rtttttataaacc

SEQ ID NO: 231867 - DNA, 13 bp, Artificial Sequence
  Oligonucleotide for detection of SNP TSC0056549
ggtttagaaaaay

SEQ ID NO: 231868 - DNA, 13 bp, Artificial Sequence
  Oligonucleotide for detection of SNP TSC0056549
rtttttctaaacc

SEQ ID NO: 231869 - DNA, 13 bp, Artificial Sequence
  Oligonucleotide for detection of SNP TSC0056550
tagattatgagaa

SEQ ID NO: 231870 - DNA, 13 bp, Artificial Sequence
  Oligonucleotide for detection of SNP TSC0056550
ttctcataatcta

SEQ ID NO: 231871 - DNA, 13 bp, Artificial Sequence
  Oligonucleotide for detection of SNP TSC0056550
tagattttgagaa

SEQ ID NO: 231872 - DNA, 13 bp, Artificial Sequence
  Oligonucleotide for detection of SNP TSC0056550
ttctcaaaatcta

SEQ ID NO: 231873 - DNA, 13 bp, Artificial Sequence
  Oligonucleotide for detection of SNP TSC0056551
ttgttttgtgttt

SEQ ID NO: 231874 - DNA, 13 bp, Artificial Sequence
  Oligonucleotide for detection of SNP TSC0056551
aaacacaaaacaa

SEQ ID NO: 231875 - DNA, 13 bp, Artificial Sequence
  Oligonucleotide for detection of SNP TSC0056551
ttgtttcgtgttt

SEQ ID NO: 231876 - DNA, 13 bp, Artificial Sequence
  Oligonucleotide for detection of SNP TSC0056551
aaacacgaaacaa

SEQ ID NO: 231877 - DNA, 13 bp, Artificial Sequence
  Oligonucleotide for detection of SNP TSC0056551
aggtatgagataa

SEQ ID NO: 231878 - DNA, 13 bp, Artificial Sequence
  Oligonucleotide for detection of SNP TSC0056551
ttatctcatacct

SEQ ID NO: 231879 - DNA, 13 bp, Artificial Sequence
  Oligonucleotide for detection of SNP TSC0056551
aggtataagataa

SEQ ID NO: 231880 - DNA, 13 bp, Artificial Sequence
  Oligonucleotide for detection of SNP TSC0056551
ttatcttatacct

SEQ ID NO: 231881 - DNA, 13 bp, Artificial Sequence
  Oligonucleotide for detection of SNP TSC0056551
aggtacgagataa

SEQ ID NO: 231882 - DNA, 13 bp, Artificial Sequence
  Oligonucleotide for detection of SNP TSC0056551
ttatctcgtacct

SEQ ID NO: 231883 - DNA, 13 bp, Artificial Sequence
  Oligonucleotide for detection of SNP TSC0056553
aatttaatagaga

SEQ ID NO: 231884 - DNA, 13 bp, Artificial Sequence
  Oligonucleotide for detection of SNP TSC0056553
tctctattaaatt

SEQ ID NO: 231885 - DNA, 13 bp, Artificial Sequence
  Oligonucleotide for detection of SNP TSC0056553
aatttattagaga

SEQ ID NO: 231886 - DNA, 13 bp, Artificial Sequence
  Oligonucleotide for detection of SNP TSC0056553
tctctaataaatt

SEQ ID NO: 231887 - DNA, 13 bp, Artificial Sequence
  Oligonucleotide for detection of SNP TSC0056553
tttttgttaaatt

SEQ ID NO: 231888 - DNA, 13 bp, Artificial Sequence
  Oligonucleotide for detection of SNP TSC0056553
aatttaacaaaaa

SEQ ID NO: 231889 - DNA, 13 bp, Artificial Sequence
  Oligonucleotide for detection of SNP TSC0056553
tttttggtaaatt

SEQ ID NO: 231890 - DNA, 13 bp, Artificial Sequence
  Oligonucleotide for detection of SNP TSC0056553
aatttaccaaaaa

SEQ ID NO: 231891 - DNA, 13 bp, Artificial Sequence
  Oligonucleotide for detection of SNP TSC0056554
tttgttaattaaa

SEQ ID NO: 231892 - DNA, 13 bp, Artificial Sequence
  Oligonucleotide for detection of SNP TSC0056554
tttaattaacaaa

SEQ ID NO: 231893 - DNA, 13 bp, Artificial Sequence
  Oligonucleotide for detection of SNP TSC0056554
tttgtttattaaa

SEQ ID NO: 231894 - DNA, 13 bp, Artificial Sequence
  Oligonucleotide for detection of SNP TSC0056554
tttaataaacaaa

SEQ ID NO: 231895 - DNA, 13 bp, Artificial Sequence
  Oligonucleotide for detection of SNP TSC0056554
tttggttagtaga

SEQ ID NO: 231896 - DNA, 13 bp, Artificial Sequence
  Oligonucleotide for detection of SNP TSC0056554
tctactaaccaaa

SEQ ID NO: 231897 - DNA, 13 bp, Artificial Sequence
  Oligonucleotide for detection of SNP TSC0056554
tttggtgagtaga

SEQ ID NO: 231898 - DNA, 13 bp, Artificial Sequence
  Oligonucleotide for detection of SNP TSC0056554
tctactcaccaaa

SEQ ID NO: 231899 - DNA, 13 bp, Artificial Sequence
  Oligonucleotide for detection of SNP TSC0056555
tgaaatatttaty

SEQ ID NO: 231900 - DNA, 13 bp, Artificial Sequence
  Oligonucleotide for detection of SNP TSC0056555
rataaatatttca

SEQ ID NO: 231901 - DNA, 13 bp, Artificial Sequence
  Oligonucleotide for detection of SNP TSC0056555
gataaatgtttta

SEQ ID NO: 231902 - DNA, 13 bp, Artificial Sequence
  Oligonucleotide for detection of SNP TSC0056555
taaaacatttatc

SEQ ID NO: 231903 - DNA, 13 bp, Artificial Sequence
  Oligonucleotide for detection of SNP TSC0056555
gataaaggtttta

SEQ ID NO: 231904 - DNA, 13 bp, Artificial Sequence
  Oligonucleotide for detection of SNP TSC0056555
taaaacctttatc

SEQ ID NO: 231905 - DNA, 13 bp, Artificial Sequence
  Oligonucleotide for detection of SNP TSC0056556
ttttaagagttta

SEQ ID NO: 231906 - DNA, 13 bp, Artificial Sequence
  Oligonucleotide for detection of SNP TSC0056556
taaactcttaaaa

SEQ ID NO: 231907 - DNA, 13 bp, Artificial Sequence
  Oligonucleotide for detection of SNP TSC0056556
ttttaaaagttta

SEQ ID NO: 231908 - DNA, 13 bp, Artificial Sequence
  Oligonucleotide for detection of SNP TSC0056556
taaacttttaaaa

SEQ ID NO: 231909 - DNA, 13 bp, Artificial Sequence
  Oligonucleotide for detection of SNP TSC0056557
gtattgtgttgtt

SEQ ID NO: 231910 - DNA, 13 bp, Artificial Sequence
  Oligonucleotide for detection of SNP TSC0056557
aacaacacaatac

SEQ ID NO: 231911 - DNA, 13 bp, Artificial Sequence
  Oligonucleotide for detection of SNP TSC0056557
gtatcgtgttgtt

SEQ ID NO: 231912 - DNA, 13 bp, Artificial Sequence
  Oligonucleotide for detection of SNP TSC0056557
aacaacacgatac

SEQ ID NO: 231913 - DNA, 13 bp, Artificial Sequence
  Oligonucleotide for detection of SNP TSC0056557
gtattgcgttgtt

SEQ ID NO: 231914 - DNA, 13 bp, Artificial Sequence
  Oligonucleotide for detection of SNP TSC0056557
aacaacgcaatac

SEQ ID NO: 231915 - DNA, 13 bp, Artificial Sequence
  Oligonucleotide for detection of SNP TSC0056557
gtatcgcgttgtt

SEQ ID NO: 231916 - DNA, 13 bp, Artificial Sequence
  Oligonucleotide for detection of SNP TSC0056557
aacaacgcgatac

SEQ ID NO: 231917 - DNA, 13 bp, Artificial Sequence
  Oligonucleotide for detection of SNP TSC0056557
aataacgtgatay

SEQ ID NO: 231918 - DNA, 13 bp, Artificial Sequence
  Oligonucleotide for detection of SNP TSC0056557
rtatcacgttatt

SEQ ID NO: 231919 - DNA, 13 bp, Artificial Sequence
  Oligonucleotide for detection of SNP TSC0056557
aataatacgatay

SEQ ID NO: 231920 - DNA, 13 bp, Artificial Sequence
  Oligonucleotide for detection of SNP TSC0056557
rtatcgtattatt

SEQ ID NO: 231921 - DNA, 13 bp, Artificial Sequence
  Oligonucleotide for detection of SNP TSC0056557
aataatgcgatay

SEQ ID NO: 231922 - DNA, 13 bp, Artificial Sequence
  Oligonucleotide for detection of SNP TSC0056557
rtatcgcattatt

SEQ ID NO: 231923 - DNA, 13 bp, Artificial Sequence
  Oligonucleotide for detection of SNP TSC0056557
aataacgcgatay

SEQ ID NO: 231924 - DNA, 13 bp, Artificial Sequence
  Oligonucleotide for detection of SNP TSC0056557
rtatcgcgttatt

SEQ ID NO: 231925 - DNA, 13 bp, Artificial Sequence
  Oligonucleotide for detection of SNP TSC0056562
tgaagtaaaagty

SEQ ID NO: 231926 - DNA, 13 bp, Artificial Sequence
  Oligonucleotide for detection of SNP TSC0056562
racttttacttca

SEQ ID NO: 231927 - DNA, 13 bp, Artificial Sequence
  Oligonucleotide for detection of SNP TSC0056562
tgaagtgaaagty

SEQ ID NO: 231928 - DNA, 13 bp, Artificial Sequence
  Oligonucleotide for detection of SNP TSC0056562
ractttcacttca

SEQ ID NO: 231929 - DNA, 13 bp, Artificial Sequence
  Oligonucleotide for detection of SNP TSC0056563
aagttatggtaat

SEQ ID NO: 231930 - DNA, 13 bp, Artificial Sequence
  Oligonucleotide for detection of SNP TSC0056563
attaccataactt

SEQ ID NO: 231931 - DNA, 13 bp, Artificial Sequence
  Oligonucleotide for detection of SNP TSC0056563
aagttacggtaat

SEQ ID NO: 231932 - DNA, 13 bp, Artificial Sequence
  Oligonucleotide for detection of SNP TSC0056563
attaccgtaactt

SEQ ID NO: 231933 - DNA, 13 bp, Artificial Sequence
  Oligonucleotide for detection of SNP TSC0056564
ttaaaagatatat

SEQ ID NO: 231934 - DNA, 13 bp, Artificial Sequence
  Oligonucleotide for detection of SNP TSC0056564
atatatcttttaa

SEQ ID NO: 231935 - DNA, 13 bp, Artificial Sequence
  Oligonucleotide for detection of SNP TSC0056565
tatgggaataata

SEQ ID NO: 231936 - DNA, 13 bp, Artificial Sequence
  Oligonucleotide for detection of SNP TSC0056565
tattattcccata

SEQ ID NO: 231937 - DNA, 13 bp, Artificial Sequence
  Oligonucleotide for detection of SNP TSC0056565
tatggggataata

SEQ ID NO: 231938 - DNA, 13 bp, Artificial Sequence
  Oligonucleotide for detection of SNP TSC0056565
tattatccccata

SEQ ID NO: 231939 - DNA, 13 bp, Artificial Sequence
  Oligonucleotide for detection of SNP TSC0056566
ataattaattaat

SEQ ID NO: 231940 - DNA, 13 bp, Artificial Sequence
  Oligonucleotide for detection of SNP TSC0056566
attaattaattat

SEQ ID NO: 231941 - DNA, 13 bp, Artificial Sequence
  Oligonucleotide for detection of SNP TSC0056566
ataatttattaat

SEQ ID NO: 231942 - DNA, 13 bp, Artificial Sequence
  Oligonucleotide for detection of SNP TSC0056566
attaataaattat

SEQ ID NO: 231943 - DNA, 13 bp, Artificial Sequence
  Oligonucleotide for detection of SNP TSC0056566
attaattagttat

SEQ ID NO: 231944 - DNA, 13 bp, Artificial Sequence
  Oligonucleotide for detection of SNP TSC0056566
ataactaattaat

SEQ ID NO: 231945 - DNA, 13 bp, Artificial Sequence
  Oligonucleotide for detection of SNP TSC0056566
attaatgagttat

SEQ ID NO: 231946 - DNA, 13 bp, Artificial Sequence
  Oligonucleotide for detection of SNP TSC0056566
ataactcattaat

SEQ ID NO: 231947 - DNA, 13 bp, Artificial Sequence
  Oligonucleotide for detection of SNP TSC0056571
ttagttaagtgga

SEQ ID NO: 231948 - DNA, 13 bp, Artificial Sequence
  Oligonucleotide for detection of SNP TSC0056571
tccacttaactaa

SEQ ID NO: 231949 - DNA, 13 bp, Artificial Sequence
  Oligonucleotide for detection of SNP TSC0056571
ttagtttagtgga

SEQ ID NO: 231950 - DNA, 13 bp, Artificial Sequence
  Oligonucleotide for detection of SNP TSC0056571
tccactaaactaa

SEQ ID NO: 231951 - DNA, 13 bp, Artificial Sequence
  Oligonucleotide for detection of SNP TSC0056571
tttatttagttga

SEQ ID NO: 231952 - DNA, 13 bp, Artificial Sequence
  Oligonucleotide for detection of SNP TSC0056571
tcaactaaataaa

SEQ ID NO: 231953 - DNA, 13 bp, Artificial Sequence
  Oligonucleotide for detection of SNP TSC0056571
tttattaagttga

SEQ ID NO: 231954 - DNA, 13 bp, Artificial Sequence
  Oligonucleotide for detection of SNP TSC0056571
tcaacttaataaa

SEQ ID NO: 231955 - DNA, 13 bp, Artificial Sequence
  Oligonucleotide for detection of SNP TSC0056572
attatagaaatgy

SEQ ID NO: 231956 - DNA, 13 bp, Artificial Sequence
  Oligonucleotide for detection of SNP TSC0056572
rcatttctataat

SEQ ID NO: 231957 - DNA, 13 bp, Artificial Sequence
  Oligonucleotide for detection of SNP TSC0056572
attataaaaatgy

SEQ ID NO: 231958 - DNA, 13 bp, Artificial Sequence
  Oligonucleotide for detection of SNP TSC0056572
rcatttttataat

SEQ ID NO: 231959 - DNA, 13 bp, Artificial Sequence
  Oligonucleotide for detection of SNP TSC0056572
attatagaaacgy

SEQ ID NO: 231960 - DNA, 13 bp, Artificial Sequence
  Oligonucleotide for detection of SNP TSC0056572
rcgtttctataat

SEQ ID NO: 231961 - DNA, 13 bp, Artificial Sequence
  Oligonucleotide for detection of SNP TSC0056572
attataaaaacgy

SEQ ID NO: 231962 - DNA, 13 bp, Artificial Sequence
  Oligonucleotide for detection of SNP TSC0056572
rcgtttttataat

SEQ ID NO: 231963 - DNA, 13 bp, Artificial Sequence
  Oligonucleotide for detection of SNP TSC0056573
atttatagtaggy

SEQ ID NO: 231964 - DNA, 13 bp, Artificial Sequence
  Oligonucleotide for detection of SNP TSC0056573
rcctactataaat

SEQ ID NO: 231965 - DNA, 13 bp, Artificial Sequence
  Oligonucleotide for detection of SNP TSC0056573
atttattgtaggy

SEQ ID NO: 231966 - DNA, 13 bp, Artificial Sequence
  Oligonucleotide for detection of SNP TSC0056573
rcctacaataaat

SEQ ID NO: 231967 - DNA, 13 bp, Artificial Sequence
  Oligonucleotide for detection of SNP TSC0056573
atttatcgtaggy

SEQ ID NO: 231968 - DNA, 13 bp, Artificial Sequence
  Oligonucleotide for detection of SNP TSC0056573
rcctacgataaat

SEQ ID NO: 231969 - DNA, 13 bp, Artificial Sequence
  Oligonucleotide for detection of SNP TSC0056573
gtttgttatggat

SEQ ID NO: 231970 - DNA, 13 bp, Artificial Sequence
  Oligonucleotide for detection of SNP TSC0056573
atccataacaaac

SEQ ID NO: 231971 - DNA, 13 bp, Artificial Sequence
  Oligonucleotide for detection of SNP TSC0056573
gtttgtgatggat

SEQ ID NO: 231972 - DNA, 13 bp, Artificial Sequence
  Oligonucleotide for detection of SNP TSC0056573
atccatcacaaac

SEQ ID NO: 231973 - DNA, 13 bp, Artificial Sequence
  Oligonucleotide for detection of SNP TSC0056573
gtttgcgatggat

SEQ ID NO: 231974 - DNA, 13 bp, Artificial Sequence
  Oligonucleotide for detection of SNP TSC0056573
atccatcgcaaac

SEQ ID NO: 231975 - DNA, 13 bp, Artificial Sequence
  Oligonucleotide for detection of SNP TSC0056577
aattttgtgattt

SEQ ID NO: 231976 - DNA, 13 bp, Artificial Sequence
  Oligonucleotide for detection of SNP TSC0056577
aaatcacaaaatt

SEQ ID NO: 231977 - DNA, 13 bp, Artificial Sequence
  Oligonucleotide for detection of SNP TSC0056577
aattttatgattt

SEQ ID NO: 231978 - DNA, 13 bp, Artificial Sequence
  Oligonucleotide for detection of SNP TSC0056577
aaatcataaaatt

SEQ ID NO: 231979 - DNA, 13 bp, Artificial Sequence
  Oligonucleotide for detection of SNP TSC0056578
gtaataaataaga

SEQ ID NO: 231980 - DNA, 13 bp, Artificial Sequence
  Oligonucleotide for detection of SNP TSC0056578
tcttatttattac

SEQ ID NO: 231981 - DNA, 13 bp, Artificial Sequence
  Oligonucleotide for detection of SNP TSC0056578
gtaatagataaga

SEQ ID NO: 231982 - DNA, 13 bp, Artificial Sequence
  Oligonucleotide for detection of SNP TSC0056578
tcttatctattac

SEQ ID NO: 231983 - DNA, 13 bp, Artificial Sequence
  Oligonucleotide for detection of SNP TSC0056579
tttttaaatgtag

SEQ ID NO: 231984 - DNA, 13 bp, Artificial Sequence
  Oligonucleotide for detection of SNP TSC0056579
ctacatttaaaaa

SEQ ID NO: 231985 - DNA, 13 bp, Artificial Sequence
  Oligonucleotide for detection of SNP TSC0056579
tttttagatgtag

SEQ ID NO: 231986 - DNA, 13 bp, Artificial Sequence
  Oligonucleotide for detection of SNP TSC0056579
ctacatctaaaaa

SEQ ID NO: 231987 - DNA, 13 bp, Artificial Sequence
  Oligonucleotide for detection of SNP TSC0056580
taggagtatgaay

SEQ ID NO: 231988 - DNA, 13 bp, Artificial Sequence
  Oligonucleotide for detection of SNP TSC0056580
rttcatactccta

SEQ ID NO: 231989 - DNA, 13 bp, Artificial Sequence
  Oligonucleotide for detection of SNP TSC0056580
taggaggatgaay

SEQ ID NO: 231990 - DNA, 13 bp, Artificial Sequence
  Oligonucleotide for detection of SNP TSC0056580
rttcatcctccta

SEQ ID NO: 231991 - DNA, 13 bp, Artificial Sequence
  Oligonucleotide for detection of SNP TSC0056580
gtttatatttttg

SEQ ID NO: 231992 - DNA, 13 bp, Artificial Sequence
  Oligonucleotide for detection of SNP TSC0056580
caaaaatataaac

SEQ ID NO: 231993 - DNA, 13 bp, Artificial Sequence
  Oligonucleotide for detection of SNP TSC0056580
gtttatttttttg

SEQ ID NO: 231994 - DNA, 13 bp, Artificial Sequence
  Oligonucleotide for detection of SNP TSC0056580
caaaaaaataaac

SEQ ID NO: 231995 - DNA, 13 bp, Artificial Sequence
  Oligonucleotide for detection of SNP TSC0056584
atgaaatgttaaa

SEQ ID NO: 231996 - DNA, 13 bp, Artificial Sequence
  Oligonucleotide for detection of SNP TSC0056584
tttaacatttcat

SEQ ID NO: 231997 - DNA, 13 bp, Artificial Sequence
  Oligonucleotide for detection of SNP TSC0056584
atgaaacgttaaa

SEQ ID NO: 231998 - DNA, 13 bp, Artificial Sequence
  Oligonucleotide for detection of SNP TSC0056584
tttaacgtttcat

SEQ ID NO: 231999 - DNA, 13 bp, Artificial Sequence
  Oligonucleotide for detection of SNP TSC0056585
agtaaggatggag

SEQ ID NO: 232000 - DNA, 13 bp, Artificial Sequence
  Oligonucleotide for detection of SNP TSC0056585
ctccatccttact

SEQ ID NO: 232001 - DNA, 13 bp, Artificial Sequence
  Oligonucleotide for detection of SNP TSC0056585
agtaagaatggag

SEQ ID NO: 232002 - DNA, 13 bp, Artificial Sequence
  Oligonucleotide for detection of SNP TSC0056585
ctccattcttact

SEQ ID NO: 232003 - DNA, 13 bp, Artificial Sequence
  Oligonucleotide for detection of SNP TSC0056586
gtgtagaggtgta

SEQ ID NO: 232004 - DNA, 13 bp, Artificial Sequence
  Oligonucleotide for detection of SNP TSC0056586
tacacctctacac

SEQ ID NO: 232005 - DNA, 13 bp, Artificial Sequence
  Oligonucleotide for detection of SNP TSC0056586
gtgtagaggcgta

SEQ ID NO: 232006 - DNA, 13 bp, Artificial Sequence
  Oligonucleotide for detection of SNP TSC0056586
tacgcctctacac

SEQ ID NO: 232007 - DNA, 13 bp, Artificial Sequence
  Oligonucleotide for detection of SNP TSC0056587
tgtttgaagttta

SEQ ID NO: 232008 - DNA, 13 bp, Artificial Sequence
  Oligonucleotide for detection of SNP TSC0056587
taaacttcaaaca

SEQ ID NO: 232009 - DNA, 13 bp, Artificial Sequence
  Oligonucleotide for detection of SNP TSC0056588
gttgtaatagtay

SEQ ID NO: 232010 - DNA, 13 bp, Artificial Sequence
  Oligonucleotide for detection of SNP TSC0056588
rtactattacaac

SEQ ID NO: 232011 - DNA, 13 bp, Artificial Sequence
  Oligonucleotide for detection of SNP TSC0056588
gttgtagtagtay

SEQ ID NO: 232012 - DNA, 13 bp, Artificial Sequence
  Oligonucleotide for detection of SNP TSC0056588
rtactactacaac

SEQ ID NO: 232013 - DNA, 13 bp, Artificial Sequence
  Oligonucleotide for detection of SNP TSC0056589
tattatagttgtg

SEQ ID NO: 232014 - DNA, 13 bp, Artificial Sequence
  Oligonucleotide for detection of SNP TSC0056589
cacaactataata

SEQ ID NO: 232015 - DNA, 13 bp, Artificial Sequence
  Oligonucleotide for detection of SNP TSC0056589
tattatggttgtg

SEQ ID NO: 232016 - DNA, 13 bp, Artificial Sequence
  Oligonucleotide for detection of SNP TSC0056589
cacaaccataata

SEQ ID NO: 232017 - DNA, 13 bp, Artificial Sequence
  Oligonucleotide for detection of SNP TSC0056589
tattacggttgtg

SEQ ID NO: 232018 - DNA, 13 bp, Artificial Sequence
  Oligonucleotide for detection of SNP TSC0056589
cacaaccgtaata

SEQ ID NO: 232019 - DNA, 13 bp, Artificial Sequence
  Oligonucleotide for detection of SNP TSC0056590
attatgattgtgg

SEQ ID NO: 232020 - DNA, 13 bp, Artificial Sequence
  Oligonucleotide for detection of SNP TSC0056590
ccacaatcataat

SEQ ID NO: 232021 - DNA, 13 bp, Artificial Sequence
  Oligonucleotide for detection of SNP TSC0056590
attatggttgtgg

SEQ ID NO: 232022 - DNA, 13 bp, Artificial Sequence
  Oligonucleotide for detection of SNP TSC0056590
ccacaaccataat

SEQ ID NO: 232023 - DNA, 13 bp, Artificial Sequence
  Oligonucleotide for detection of SNP TSC0056590
attacgattgtgg

SEQ ID NO: 232024 - DNA, 13 bp, Artificial Sequence
  Oligonucleotide for detection of SNP TSC0056590
ccacaatcgtaat

SEQ ID NO: 232025 - DNA, 13 bp, Artificial Sequence
  Oligonucleotide for detection of SNP TSC0056590
attacggttgtgg

SEQ ID NO: 232026 - DNA, 13 bp, Artificial Sequence
  Oligonucleotide for detection of SNP TSC0056590
ccacaaccgtaat

SEQ ID NO: 232027 - DNA, 13 bp, Artificial Sequence
  Oligonucleotide for detection of SNP TSC0000348
ttttatgtataaa

SEQ ID NO: 232028 - DNA, 13 bp, Artificial Sequence
  Oligonucleotide for detection of SNP TSC0000348
tttatacataaaa

SEQ ID NO: 232029 - DNA, 13 bp, Artificial Sequence
  Oligonucleotide for detection of SNP TSC0000348
ttttatatataaa

SEQ ID NO: 232030 - DNA, 13 bp, Artificial Sequence
  Oligonucleotide for detection of SNP TSC0000348
tttatatataaaa

SEQ ID NO: 232031 - DNA, 13 bp, Artificial Sequence
  Oligonucleotide for detection of SNP TSC0000349
agttaagtaatgt

SEQ ID NO: 232032 - DNA, 13 bp, Artificial Sequence
  Oligonucleotide for detection of SNP TSC0000349
acattacttaact

SEQ ID NO: 232033 - DNA, 13 bp, Artificial Sequence
  Oligonucleotide for detection of SNP TSC0000349
agttaaataatgt

SEQ ID NO: 232034 - DNA, 13 bp, Artificial Sequence
  Oligonucleotide for detection of SNP TSC0000349
acattatttaact

SEQ ID NO: 232035 - DNA, 13 bp, Artificial Sequence
  Oligonucleotide for detection of SNP TSC0056591
atgttattttgag

SEQ ID NO: 232036 - DNA, 13 bp, Artificial Sequence
  Oligonucleotide for detection of SNP TSC0056591
ctcaaaataacat

SEQ ID NO: 232037 - DNA, 13 bp, Artificial Sequence
  Oligonucleotide for detection of SNP TSC0056591
atgttagtttgag

SEQ ID NO: 232038 - DNA, 13 bp, Artificial Sequence
  Oligonucleotide for detection of SNP TSC0056591
ctcaaactaacat

SEQ ID NO: 232039 - DNA, 13 bp, Artificial Sequence
  Oligonucleotide for detection of SNP TSC0056591
tttaaattggtat

SEQ ID NO: 232040 - DNA, 13 bp, Artificial Sequence
  Oligonucleotide for detection of SNP TSC0056591
ataccaatttaaa

SEQ ID NO: 232041 - DNA, 13 bp, Artificial Sequence
  Oligonucleotide for detection of SNP TSC0056592
tgaatgagtttay

SEQ ID NO: 232042 - DNA, 13 bp, Artificial Sequence
  Oligonucleotide for detection of SNP TSC0056592
rtaaactcattca

SEQ ID NO: 232043 - DNA, 13 bp, Artificial Sequence
  Oligonucleotide for detection of SNP TSC0056592
tgaatgggtttay

SEQ ID NO: 232044 - DNA, 13 bp, Artificial Sequence
  Oligonucleotide for detection of SNP TSC0056592
rtaaacccattca

SEQ ID NO: 232045 - DNA, 13 bp, Artificial Sequence
  Oligonucleotide for detection of SNP TSC0056595
atatttagagtay

SEQ ID NO: 232046 - DNA, 13 bp, Artificial Sequence
  Oligonucleotide for detection of SNP TSC0056595
rtactctaaatat

SEQ ID NO: 232047 - DNA, 13 bp, Artificial Sequence
  Oligonucleotide for detection of SNP TSC0056595
atatttggagtay

SEQ ID NO: 232048 - DNA, 13 bp, Artificial Sequence
  Oligonucleotide for detection of SNP TSC0056595
rtactccaaatat

SEQ ID NO: 232049 - DNA, 13 bp, Artificial Sequence
  Oligonucleotide for detection of SNP TSC0056596
taatatgtataag

SEQ ID NO: 232050 - DNA, 13 bp, Artificial Sequence
  Oligonucleotide for detection of SNP TSC0056596
cttatacatatta

SEQ ID NO: 232051 - DNA, 13 bp, Artificial Sequence
  Oligonucleotide for detection of SNP TSC0056596
taatatatataag

SEQ ID NO: 232052 - DNA, 13 bp, Artificial Sequence
  Oligonucleotide for detection of SNP TSC0056596
cttatatatatta

SEQ ID NO: 232053 - DNA, 13 bp, Artificial Sequence
  Oligonucleotide for detection of SNP TSC0056597
ttttgtagtattt

SEQ ID NO: 232054 - DNA, 13 bp, Artificial Sequence
  Oligonucleotide for detection of SNP TSC0056597
aaatactacaaaa

SEQ ID NO: 232055 - DNA, 13 bp, Artificial Sequence
  Oligonucleotide for detection of SNP TSC0056597
ttttgtggtattt

SEQ ID NO: 232056 - DNA, 13 bp, Artificial Sequence
  Oligonucleotide for detection of SNP TSC0056597
aaataccacaaaa

SEQ ID NO: 232057 - DNA, 13 bp, Artificial Sequence
  Oligonucleotide for detection of SNP TSC0056597
ttttgcggtattt

SEQ ID NO: 232058 - DNA, 13 bp, Artificial Sequence
  Oligonucleotide for detection of SNP TSC0056597
aaataccgcaaaa

SEQ ID NO: 232059 - DNA, 13 bp, Artificial Sequence
  Oligonucleotide for detection of SNP TSC0056597
agatgttgtagag

SEQ ID NO: 232060 - DNA, 13 bp, Artificial Sequence
  Oligonucleotide for detection of SNP TSC0056597
ctctacaacatct

SEQ ID NO: 232061 - DNA, 13 bp, Artificial Sequence
  Oligonucleotide for detection of SNP TSC0056597
agatgtcgtagag

SEQ ID NO: 232062 - DNA, 13 bp, Artificial Sequence
  Oligonucleotide for detection of SNP TSC0056597
ctctacgacatct

SEQ ID NO: 232063 - DNA, 13 bp, Artificial Sequence
  Oligonucleotide for detection of SNP TSC0056598
ttatttggttggg

SEQ ID NO: 232064 - DNA, 13 bp, Artificial Sequence
  Oligonucleotide for detection of SNP TSC0056598
cccaaccaaataa

SEQ ID NO: 232065 - DNA, 13 bp, Artificial Sequence
  Oligonucleotide for detection of SNP TSC0056598
ttatttagttggg

SEQ ID NO: 232066 - DNA, 13 bp, Artificial Sequence
  Oligonucleotide for detection of SNP TSC0056598
cccaactaaataa

SEQ ID NO: 232067 - DNA, 13 bp, Artificial Sequence
  Oligonucleotide for detection of SNP TSC0008376
tatatgatatgta

SEQ ID NO: 232068 - DNA, 13 bp, Artificial Sequence
  Oligonucleotide for detection of SNP TSC0008376
tacatatcatata

SEQ ID NO: 232069 - DNA, 13 bp, Artificial Sequence
  Oligonucleotide for detection of SNP TSC0008376
tatatgttatgta

SEQ ID NO: 232070 - DNA, 13 bp, Artificial Sequence
  Oligonucleotide for detection of SNP TSC0008376
tacataacatata

SEQ ID NO: 232071 - DNA, 13 bp, Artificial Sequence
  Oligonucleotide for detection of SNP TSC0008376
tatatattatgtg

SEQ ID NO: 232072 - DNA, 13 bp, Artificial Sequence
  Oligonucleotide for detection of SNP TSC0008376
cacataatatata

SEQ ID NO: 232073 - DNA, 13 bp, Artificial Sequence
  Oligonucleotide for detection of SNP TSC0008376
tatataatatgtg

SEQ ID NO: 232074 - DNA, 13 bp, Artificial Sequence
  Oligonucleotide for detection of SNP TSC0008376
cacatattatata

SEQ ID NO: 232075 - DNA, 13 bp, Artificial Sequence
  Oligonucleotide for detection of SNP TSC0056599
tttagaagatata

SEQ ID NO: 232076 - DNA, 13 bp, Artificial Sequence
  Oligonucleotide for detection of SNP TSC0056599
tatatcttctaaa

SEQ ID NO: 232077 - DNA, 13 bp, Artificial Sequence
  Oligonucleotide for detection of SNP TSC0056599
tttagaggatata

SEQ ID NO: 232078 - DNA, 13 bp, Artificial Sequence
  Oligonucleotide for detection of SNP TSC0056599
tatatcctctaaa

SEQ ID NO: 232079 - DNA, 13 bp, Artificial Sequence
  Oligonucleotide for detection of SNP TSC0056600
tttatttgaaaat

SEQ ID NO: 232080 - DNA, 13 bp, Artificial Sequence
  Oligonucleotide for detection of SNP TSC0056600
attttcaaataaa

SEQ ID NO: 232081 - DNA, 13 bp, Artificial Sequence
  Oligonucleotide for detection of SNP TSC0056600
tttattcgaaaat

SEQ ID NO: 232082 - DNA, 13 bp, Artificial Sequence
  Oligonucleotide for detection of SNP TSC0056600
attttcgaataaa

SEQ ID NO: 232083 - DNA, 13 bp, Artificial Sequence
  Oligonucleotide for detection of SNP TSC0056600
atttttgagtgaa

SEQ ID NO: 232084 - DNA, 13 bp, Artificial Sequence
  Oligonucleotide for detection of SNP TSC0056600
ttcactcaaaaat

SEQ ID NO: 232085 - DNA, 13 bp, Artificial Sequence
  Oligonucleotide for detection of SNP TSC0056600
atttttaagtgaa

SEQ ID NO: 232086 - DNA, 13 bp, Artificial Sequence
  Oligonucleotide for detection of SNP TSC0056600
ttcacttaaaaat

SEQ ID NO: 232087 - DNA, 13 bp, Artificial Sequence
  Oligonucleotide for detection of SNP TSC0056600
attttcgagtgaa

SEQ ID NO: 232088 - DNA, 13 bp, Artificial Sequence
  Oligonucleotide for detection of SNP TSC0056600
ttcactcgaaaat

SEQ ID NO: 232089 - DNA, 13 bp, Artificial Sequence
  Oligonucleotide for detection of SNP TSC0056601
gttgttgtattaa

SEQ ID NO: 232090 - DNA, 13 bp, Artificial Sequence
  Oligonucleotide for detection of SNP TSC0056601
ttaatacaacaac

SEQ ID NO: 232091 - DNA, 13 bp, Artificial Sequence
  Oligonucleotide for detection of SNP TSC0056601
gttgttatattaa

SEQ ID NO: 232092 - DNA, 13 bp, Artificial Sequence
  Oligonucleotide for detection of SNP TSC0056601
ttaatataacaac

SEQ ID NO: 232093 - DNA, 13 bp, Artificial Sequence
  Oligonucleotide for detection of SNP TSC0056602
atttaatgtattt

SEQ ID NO: 232094 - DNA, 13 bp, Artificial Sequence
  Oligonucleotide for detection of SNP TSC0056602
aaatacattaaat

SEQ ID NO: 232095 - DNA, 13 bp, Artificial Sequence
  Oligonucleotide for detection of SNP TSC0056602
atttaacgtattt

SEQ ID NO: 232096 - DNA, 13 bp, Artificial Sequence
  Oligonucleotide for detection of SNP TSC0056602
aaatacgttaaat

SEQ ID NO: 232097 - DNA, 13 bp, Artificial Sequence
  Oligonucleotide for detection of SNP TSC0056602
aaatatgttggat

SEQ ID NO: 232098 - DNA, 13 bp, Artificial Sequence
  Oligonucleotide for detection of SNP TSC0056602
atccaacatattt

SEQ ID NO: 232099 - DNA, 13 bp, Artificial Sequence
  Oligonucleotide for detection of SNP TSC0056602
aaatatattggat

SEQ ID NO: 232100 - DNA, 13 bp, Artificial Sequence
  Oligonucleotide for detection of SNP TSC0056602
atccaatatattt

SEQ ID NO: 232101 - DNA, 13 bp, Artificial Sequence
  Oligonucleotide for detection of SNP TSC0056602
aaatacgttggat

SEQ ID NO: 232102 - DNA, 13 bp, Artificial Sequence
  Oligonucleotide for detection of SNP TSC0056602
atccaacgtattt

SEQ ID NO: 232103 - DNA, 13 bp, Artificial Sequence
  Oligonucleotide for detection of SNP TSC0056603
tgagaggtgtatt

SEQ ID NO: 232104 - DNA, 13 bp, Artificial Sequence
  Oligonucleotide for detection of SNP TSC0056603
aatacacctctca

SEQ ID NO: 232105 - DNA, 13 bp, Artificial Sequence
  Oligonucleotide for detection of SNP TSC0056603
tgagagatgtatt

SEQ ID NO: 232106 - DNA, 13 bp, Artificial Sequence
  Oligonucleotide for detection of SNP TSC0056603
aatacatctctca

SEQ ID NO: 232107 - DNA, 13 bp, Artificial Sequence
  Oligonucleotide for detection of SNP TSC0056603
cgagaggtgtatt

SEQ ID NO: 232108 - DNA, 13 bp, Artificial Sequence
  Oligonucleotide for detection of SNP TSC0056603
aatacacctctcg

SEQ ID NO: 232109 - DNA, 13 bp, Artificial Sequence
  Oligonucleotide for detection of SNP TSC0056603
cgagagatgtatt

SEQ ID NO: 232110 - DNA, 13 bp, Artificial Sequence
  Oligonucleotide for detection of SNP TSC0056603
aatacatctctcg

SEQ ID NO: 232111 - DNA, 13 bp, Artificial Sequence
  Oligonucleotide for detection of SNP TSC0056604
agataaaagtaat

SEQ ID NO: 232112 - DNA, 13 bp, Artificial Sequence
  Oligonucleotide for detection of SNP TSC0056604
attacttttatct

SEQ ID NO: 232113 - DNA, 13 bp, Artificial Sequence
  Oligonucleotide for detection of SNP TSC0056604
agataatagtaat

SEQ ID NO: 232114 - DNA, 13 bp, Artificial Sequence
  Oligonucleotide for detection of SNP TSC0056604
attactattatct

SEQ ID NO: 232115 - DNA, 13 bp, Artificial Sequence
  Oligonucleotide for detection of SNP TSC0056604
attatttttgttt

SEQ ID NO: 232116 - DNA, 13 bp, Artificial Sequence
  Oligonucleotide for detection of SNP TSC0056604
aaacaaaaataat

SEQ ID NO: 232117 - DNA, 13 bp, Artificial Sequence
  Oligonucleotide for detection of SNP TSC0000389
ataaaggtgttaa

SEQ ID NO: 232118 - DNA, 13 bp, Artificial Sequence
  Oligonucleotide for detection of SNP TSC0000389
ttaacacctttat

SEQ ID NO: 232119 - DNA, 13 bp, Artificial Sequence
  Oligonucleotide for detection of SNP TSC0000389
ataaagatgttaa

SEQ ID NO: 232120 - DNA, 13 bp, Artificial Sequence
  Oligonucleotide for detection of SNP TSC0000389
ttaacatctttat

SEQ ID NO: 232121 - DNA, 13 bp, Artificial Sequence
  Oligonucleotide for detection of SNP TSC0000389
ataaaggcgttaa

SEQ ID NO: 232122 - DNA, 13 bp, Artificial Sequence
  Oligonucleotide for detection of SNP TSC0000389
ttaacgcctttat

SEQ ID NO: 232123 - DNA, 13 bp, Artificial Sequence
  Oligonucleotide for detection of SNP TSC0000389
ataaagacgttaa

SEQ ID NO: 232124 - DNA, 13 bp, Artificial Sequence
  Oligonucleotide for detection of SNP TSC0000389
ttaacgtctttat

SEQ ID NO: 232125 - DNA, 13 bp, Artificial Sequence
  Oligonucleotide for detection of SNP TSC0056610
ataatagaattaa

SEQ ID NO: 232126 - DNA, 13 bp, Artificial Sequence
  Oligonucleotide for detection of SNP TSC0056610
ttaattctattat

SEQ ID NO: 232127 - DNA, 13 bp, Artificial Sequence
  Oligonucleotide for detection of SNP TSC0056612
ttattcgttagty

SEQ ID NO: 232128 - DNA, 13 bp, Artificial Sequence
  Oligonucleotide for detection of SNP TSC0056612
ractaacgaataa

SEQ ID NO: 232129 - DNA, 13 bp, Artificial Sequence
  Oligonucleotide for detection of SNP TSC0056612
ggttaatgaatag

SEQ ID NO: 232130 - DNA, 13 bp, Artificial Sequence
  Oligonucleotide for detection of SNP TSC0056612
ctattcattaacc

SEQ ID NO: 232131 - DNA, 13 bp, Artificial Sequence
  Oligonucleotide for detection of SNP TSC0056612
ggttaacgaatag

SEQ ID NO: 232132 - DNA, 13 bp, Artificial Sequence
  Oligonucleotide for detection of SNP TSC0056612
ctattcgttaacc

SEQ ID NO: 232133 - DNA, 13 bp, Artificial Sequence
  Oligonucleotide for detection of SNP TSC0056613
aatgggaatgtat

SEQ ID NO: 232134 - DNA, 13 bp, Artificial Sequence
  Oligonucleotide for detection of SNP TSC0056613
atacattcccatt

SEQ ID NO: 232135 - DNA, 13 bp, Artificial Sequence
  Oligonucleotide for detection of SNP TSC0056613
aatggggatgtat

SEQ ID NO: 232136 - DNA, 13 bp, Artificial Sequence
  Oligonucleotide for detection of SNP TSC0056613
atacatccccatt

SEQ ID NO: 232137 - DNA, 13 bp, Artificial Sequence
  Oligonucleotide for detection of SNP TSC0056617
gaaggagtttgat

SEQ ID NO: 232138 - DNA, 13 bp, Artificial Sequence
  Oligonucleotide for detection of SNP TSC0056617
atcaaactccttc

SEQ ID NO: 232139 - DNA, 13 bp, Artificial Sequence
  Oligonucleotide for detection of SNP TSC0056617
gaaggaatttgat

SEQ ID NO: 232140 - DNA, 13 bp, Artificial Sequence
  Oligonucleotide for detection of SNP TSC0056617
atcaaattccttc

SEQ ID NO: 232141 - DNA, 13 bp, Artificial Sequence
  Oligonucleotide for detection of SNP TSC0056620
tgttataatttta

SEQ ID NO: 232142 - DNA, 13 bp, Artificial Sequence
  Oligonucleotide for detection of SNP TSC0056620
taaaattataaca

SEQ ID NO: 232143 - DNA, 13 bp, Artificial Sequence
  Oligonucleotide for detection of SNP TSC0056620
tgttattatttta

SEQ ID NO: 232144 - DNA, 13 bp, Artificial Sequence
  Oligonucleotide for detection of SNP TSC0056620
taaaataataaca

SEQ ID NO: 232145 - DNA, 13 bp, Artificial Sequence
  Oligonucleotide for detection of SNP TSC0056620
tgagattataata

SEQ ID NO: 232146 - DNA, 13 bp, Artificial Sequence
  Oligonucleotide for detection of SNP TSC0056620
tattataatctca

SEQ ID NO: 232147 - DNA, 13 bp, Artificial Sequence
  Oligonucleotide for detection of SNP TSC0056620
tgagatgataata

SEQ ID NO: 232148 - DNA, 13 bp, Artificial Sequence
  Oligonucleotide for detection of SNP TSC0056620
tattatcatctca

SEQ ID NO: 232149 - DNA, 13 bp, Artificial Sequence
  Oligonucleotide for detection of SNP TSC0056623
ggaatatgtgaay

SEQ ID NO: 232150 - DNA, 13 bp, Artificial Sequence
  Oligonucleotide for detection of SNP TSC0056623
rttcacatattcc

SEQ ID NO: 232151 - DNA, 13 bp, Artificial Sequence
  Oligonucleotide for detection of SNP TSC0056623
ggaatacgtgaay

SEQ ID NO: 232152 - DNA, 13 bp, Artificial Sequence
  Oligonucleotide for detection of SNP TSC0056623
rttcacgtattcc

SEQ ID NO: 232153 - DNA, 13 bp, Artificial Sequence
  Oligonucleotide for detection of SNP TSC0056627
aaatagtgtaggy

SEQ ID NO: 232154 - DNA, 13 bp, Artificial Sequence
  Oligonucleotide for detection of SNP TSC0056627
rcctacactattt

SEQ ID NO: 232155 - DNA, 13 bp, Artificial Sequence
  Oligonucleotide for detection of SNP TSC0056627
aaatagcgtaggy

SEQ ID NO: 232156 - DNA, 13 bp, Artificial Sequence
  Oligonucleotide for detection of SNP TSC0056627
rcctacgctattt

SEQ ID NO: 232157 - DNA, 13 bp, Artificial Sequence
  Oligonucleotide for detection of SNP TSC0056627
gtttgtgttattt

SEQ ID NO: 232158 - DNA, 13 bp, Artificial Sequence
  Oligonucleotide for detection of SNP TSC0056627
aaataacacaaac

SEQ ID NO: 232159 - DNA, 13 bp, Artificial Sequence
  Oligonucleotide for detection of SNP TSC0056627
gtttgtattattt

SEQ ID NO: 232160 - DNA, 13 bp, Artificial Sequence
  Oligonucleotide for detection of SNP TSC0056627
aaataatacaaac

SEQ ID NO: 232161 - DNA, 13 bp, Artificial Sequence
  Oligonucleotide for detection of SNP TSC0056627
gtttgcgttattt

SEQ ID NO: 232162 - DNA, 13 bp, Artificial Sequence
  Oligonucleotide for detection of SNP TSC0056627
aaataacgcaaac

SEQ ID NO: 232163 - DNA, 13 bp, Artificial Sequence
  Oligonucleotide for detection of SNP TSC0056631
ggagatgagagta

SEQ ID NO: 232164 - DNA, 13 bp, Artificial Sequence
  Oligonucleotide for detection of SNP TSC0056631
tactctcatctcc

SEQ ID NO: 232165 - DNA, 13 bp, Artificial Sequence
  Oligonucleotide for detection of SNP TSC0056631
ggagataagagta

SEQ ID NO: 232166 - DNA, 13 bp, Artificial Sequence
  Oligonucleotide for detection of SNP TSC0056631
tactcttatctcc

SEQ ID NO: 232167 - DNA, 13 bp, Artificial Sequence
  Oligonucleotide for detection of SNP TSC0056633
gaagatgaaaagy

SEQ ID NO: 232168 - DNA, 13 bp, Artificial Sequence
  Oligonucleotide for detection of SNP TSC0056633
rcttttcatcttc

SEQ ID NO: 232169 - DNA, 13 bp, Artificial Sequence
  Oligonucleotide for detection of SNP TSC0056633
gaagataaaaagy

SEQ ID NO: 232170 - DNA, 13 bp, Artificial Sequence
  Oligonucleotide for detection of SNP TSC0056633
rctttttatcttc

SEQ ID NO: 232171 - DNA, 13 bp, Artificial Sequence
  Oligonucleotide for detection of SNP TSC0056634
agttggatatttg

SEQ ID NO: 232172 - DNA, 13 bp, Artificial Sequence
  Oligonucleotide for detection of SNP TSC0056634
caaatatccaact

SEQ ID NO: 232173 - DNA, 13 bp, Artificial Sequence
  Oligonucleotide for detection of SNP TSC0056634
agttgggtatttg

SEQ ID NO: 232174 - DNA, 13 bp, Artificial Sequence
  Oligonucleotide for detection of SNP TSC0056634
caaatacccaact

SEQ ID NO: 232175 - DNA, 13 bp, Artificial Sequence
  Oligonucleotide for detection of SNP TSC0056635
gaaaatatgatat

SEQ ID NO: 232176 - DNA, 13 bp, Artificial Sequence
  Oligonucleotide for detection of SNP TSC0056635
atatcatattttc

SEQ ID NO: 232177 - DNA, 13 bp, Artificial Sequence
  Oligonucleotide for detection of SNP TSC0056635
gaaaatgtgatat

SEQ ID NO: 232178 - DNA, 13 bp, Artificial Sequence
  Oligonucleotide for detection of SNP TSC0056635
atatcacattttc

SEQ ID NO: 232179 - DNA, 13 bp, Artificial Sequence
  Oligonucleotide for detection of SNP TSC0056636
tgatatatataaa

SEQ ID NO: 232180 - DNA, 13 bp, Artificial Sequence
  Oligonucleotide for detection of SNP TSC0056636
tttatatatatca

SEQ ID NO: 232181 - DNA, 13 bp, Artificial Sequence
  Oligonucleotide for detection of SNP TSC0056636
tgatatttataaa

SEQ ID NO: 232182 - DNA, 13 bp, Artificial Sequence
  Oligonucleotide for detection of SNP TSC0056636
tttataaatatca

SEQ ID NO: 232183 - DNA, 13 bp, Artificial Sequence
  Oligonucleotide for detection of SNP TSC0056636
tttatgtatatta

SEQ ID NO: 232184 - DNA, 13 bp, Artificial Sequence
  Oligonucleotide for detection of SNP TSC0056636
taatatacataaa

SEQ ID NO: 232185 - DNA, 13 bp, Artificial Sequence
  Oligonucleotide for detection of SNP TSC0056636
tttatgaatatta

SEQ ID NO: 232186 - DNA, 13 bp, Artificial Sequence
  Oligonucleotide for detection of SNP TSC0056636
taatattcataaa

SEQ ID NO: 232187 - DNA, 13 bp, Artificial Sequence
  Oligonucleotide for detection of SNP TSC0056637
aggaattgaatat

SEQ ID NO: 232188 - DNA, 13 bp, Artificial Sequence
  Oligonucleotide for detection of SNP TSC0056637
atattcaattcct

SEQ ID NO: 232189 - DNA, 13 bp, Artificial Sequence
  Oligonucleotide for detection of SNP TSC0056637
aggaatcgaatat

SEQ ID NO: 232190 - DNA, 13 bp, Artificial Sequence
  Oligonucleotide for detection of SNP TSC0056637
atattcgattcct

SEQ ID NO: 232191 - DNA, 13 bp, Artificial Sequence
  Oligonucleotide for detection of SNP TSC0056637
atatttggttttt

SEQ ID NO: 232192 - DNA, 13 bp, Artificial Sequence
  Oligonucleotide for detection of SNP TSC0056637
aaaaaccaaatat

SEQ ID NO: 232193 - DNA, 13 bp, Artificial Sequence
  Oligonucleotide for detection of SNP TSC0056637
atatttagttttt

SEQ ID NO: 232194 - DNA, 13 bp, Artificial Sequence
  Oligonucleotide for detection of SNP TSC0056637
aaaaactaaatat

SEQ ID NO: 232195 - DNA, 13 bp, Artificial Sequence
  Oligonucleotide for detection of SNP TSC0056637
atattcggttttt

SEQ ID NO: 232196 - DNA, 13 bp, Artificial Sequence
  Oligonucleotide for detection of SNP TSC0056637
aaaaaccgaatat

SEQ ID NO: 232197 - DNA, 13 bp, Artificial Sequence
  Oligonucleotide for detection of SNP TSC0056638
taaatttattatt

SEQ ID NO: 232198 - DNA, 13 bp, Artificial Sequence
  Oligonucleotide for detection of SNP TSC0056638
aataataaattta

SEQ ID NO: 232199 - DNA, 13 bp, Artificial Sequence
  Oligonucleotide for detection of SNP TSC0056638
taaattgattatt

SEQ ID NO: 232200 - DNA, 13 bp, Artificial Sequence
  Oligonucleotide for detection of SNP TSC0056638
aataatcaattta

SEQ ID NO: 232201 - DNA, 13 bp, Artificial Sequence
  Oligonucleotide for detection of SNP TSC0056638
aatagtaaatttg

SEQ ID NO: 232202 - DNA, 13 bp, Artificial Sequence
  Oligonucleotide for detection of SNP TSC0056638
caaatttactatt

SEQ ID NO: 232203 - DNA, 13 bp, Artificial Sequence
  Oligonucleotide for detection of SNP TSC0056638
aatagttaatttg

SEQ ID NO: 232204 - DNA, 13 bp, Artificial Sequence
  Oligonucleotide for detection of SNP TSC0056638
caaattaactatt

SEQ ID NO: 232205 - DNA, 13 bp, Artificial Sequence
  Oligonucleotide for detection of SNP TSC0056640
tgtatttttttay

SEQ ID NO: 232206 - DNA, 13 bp, Artificial Sequence
  Oligonucleotide for detection of SNP TSC0056640
rtaaaaaaataca

SEQ ID NO: 232207 - DNA, 13 bp, Artificial Sequence
  Oligonucleotide for detection of SNP TSC0056640
cgtatttttttay

SEQ ID NO: 232208 - DNA, 13 bp, Artificial Sequence
  Oligonucleotide for detection of SNP TSC0056640
rtaaaaaaatacg

SEQ ID NO: 232209 - DNA, 13 bp, Artificial Sequence
  Oligonucleotide for detection of SNP TSC0056640
cgtattgttttay

SEQ ID NO: 232210 - DNA, 13 bp, Artificial Sequence
  Oligonucleotide for detection of SNP TSC0056640
rtaaaacaatacg

SEQ ID NO: 232211 - DNA, 13 bp, Artificial Sequence
  Oligonucleotide for detection of SNP TSC0056640
gtaagaaagtatg

SEQ ID NO: 232212 - DNA, 13 bp, Artificial Sequence
  Oligonucleotide for detection of SNP TSC0056640
catactttcttac

SEQ ID NO: 232213 - DNA, 13 bp, Artificial Sequence
  Oligonucleotide for detection of SNP TSC0056640
gtaagatagtatg

SEQ ID NO: 232214 - DNA, 13 bp, Artificial Sequence
  Oligonucleotide for detection of SNP TSC0056640
catactatcttac

SEQ ID NO: 232215 - DNA, 13 bp, Artificial Sequence
  Oligonucleotide for detection of SNP TSC0056640
gtaagaaagtacg

SEQ ID NO: 232216 - DNA, 13 bp, Artificial Sequence
  Oligonucleotide for detection of SNP TSC0056640
cgtactttcttac

SEQ ID NO: 232217 - DNA, 13 bp, Artificial Sequence
  Oligonucleotide for detection of SNP TSC0056640
gtaagatagtacg

SEQ ID NO: 232218 - DNA, 13 bp, Artificial Sequence
  Oligonucleotide for detection of SNP TSC0056640
cgtactatcttac

SEQ ID NO: 232219 - DNA, 13 bp, Artificial Sequence
  Oligonucleotide for detection of SNP TSC0056641
aatgttattgaty

SEQ ID NO: 232220 - DNA, 13 bp, Artificial Sequence
  Oligonucleotide for detection of SNP TSC0056641
ratcaataacatt

SEQ ID NO: 232221 - DNA, 13 bp, Artificial Sequence
  Oligonucleotide for detection of SNP TSC0056641
aatgtttttgaty

SEQ ID NO: 232222 - DNA, 13 bp, Artificial Sequence
  Oligonucleotide for detection of SNP TSC0056641
ratcaaaaacatt

SEQ ID NO: 232223 - DNA, 13 bp, Artificial Sequence
  Oligonucleotide for detection of SNP TSC0056641
gattagtggtatt

SEQ ID NO: 232224 - DNA, 13 bp, Artificial Sequence
  Oligonucleotide for detection of SNP TSC0056641
aataccactaatc

SEQ ID NO: 232225 - DNA, 13 bp, Artificial Sequence
  Oligonucleotide for detection of SNP TSC0056641
gattaggggtatt

SEQ ID NO: 232226 - DNA, 13 bp, Artificial Sequence
  Oligonucleotide for detection of SNP TSC0056641
aatacccctaatc

SEQ ID NO: 232227 - DNA, 13 bp, Artificial Sequence
  Oligonucleotide for detection of SNP TSC0056642
ttgagatgtgggg

SEQ ID NO: 232228 - DNA, 13 bp, Artificial Sequence
  Oligonucleotide for detection of SNP TSC0056642
ccccacatctcaa

SEQ ID NO: 232229 - DNA, 13 bp, Artificial Sequence
  Oligonucleotide for detection of SNP TSC0056642
ttgagacgtgggg

SEQ ID NO: 232230 - DNA, 13 bp, Artificial Sequence
  Oligonucleotide for detection of SNP TSC0056642
ccccacgtctcaa

SEQ ID NO: 232231 - DNA, 13 bp, Artificial Sequence
  Oligonucleotide for detection of SNP TSC0056643
tgtttttatagay

SEQ ID NO: 232232 - DNA, 13 bp, Artificial Sequence
  Oligonucleotide for detection of SNP TSC0056643
rtctataaaaaca

SEQ ID NO: 232233 - DNA, 13 bp, Artificial Sequence
  Oligonucleotide for detection of SNP TSC0056643
tgttttgatagay

SEQ ID NO: 232234 - DNA, 13 bp, Artificial Sequence
  Oligonucleotide for detection of SNP TSC0056643
rtctatcaaaaca

SEQ ID NO: 232235 - DNA, 13 bp, Artificial Sequence
  Oligonucleotide for detection of SNP TSC0056643
tgtttcgatagay

SEQ ID NO: 232236 - DNA, 13 bp, Artificial Sequence
  Oligonucleotide for detection of SNP TSC0056643
rtctatcgaaaca

SEQ ID NO: 232237 - DNA, 13 bp, Artificial Sequence
  Oligonucleotide for detection of SNP TSC0056643
gtttataggagta

SEQ ID NO: 232238 - DNA, 13 bp, Artificial Sequence
  Oligonucleotide for detection of SNP TSC0056643
tactcctataaac

SEQ ID NO: 232239 - DNA, 13 bp, Artificial Sequence
  Oligonucleotide for detection of SNP TSC0056643
gtttattggagta

SEQ ID NO: 232240 - DNA, 13 bp, Artificial Sequence
  Oligonucleotide for detection of SNP TSC0056643
tactccaataaac

SEQ ID NO: 232241 - DNA, 13 bp, Artificial Sequence
  Oligonucleotide for detection of SNP TSC0056643
gtttatcggagta

SEQ ID NO: 232242 - DNA, 13 bp, Artificial Sequence
  Oligonucleotide for detection of SNP TSC0056643
tactccgataaac

SEQ ID NO: 232243 - DNA, 13 bp, Artificial Sequence
  Oligonucleotide for detection of SNP TSC0056644
ttttgtatatatt

SEQ ID NO: 232244 - DNA, 13 bp, Artificial Sequence
  Oligonucleotide for detection of SNP TSC0056644
aatatatacaaaa

SEQ ID NO: 232245 - DNA, 13 bp, Artificial Sequence
  Oligonucleotide for detection of SNP TSC0056644
ttttgtgtatatt

SEQ ID NO: 232246 - DNA, 13 bp, Artificial Sequence
  Oligonucleotide for detection of SNP TSC0056644
aatatacacaaaa

SEQ ID NO: 232247 - DNA, 13 bp, Artificial Sequence
  Oligonucleotide for detection of SNP TSC0056651
ttttgtatgtttt

SEQ ID NO: 232248 - DNA, 13 bp, Artificial Sequence
  Oligonucleotide for detection of SNP TSC0056651
aaaacatacaaaa

SEQ ID NO: 232249 - DNA, 13 bp, Artificial Sequence
  Oligonucleotide for detection of SNP TSC0056651
ttttgtttgtttt

SEQ ID NO: 232250 - DNA, 13 bp, Artificial Sequence
  Oligonucleotide for detection of SNP TSC0056651
aaaacaaacaaaa

SEQ ID NO: 232251 - DNA, 13 bp, Artificial Sequence
  Oligonucleotide for detection of SNP TSC0056651
aaggtatataagg

SEQ ID NO: 232252 - DNA, 13 bp, Artificial Sequence
  Oligonucleotide for detection of SNP TSC0056651
ccttatatacctt

SEQ ID NO: 232253 - DNA, 13 bp, Artificial Sequence
  Oligonucleotide for detection of SNP TSC0056651
aaggtagataagg

SEQ ID NO: 232254 - DNA, 13 bp, Artificial Sequence
  Oligonucleotide for detection of SNP TSC0056651
ccttatctacctt

SEQ ID NO: 232255 - DNA, 13 bp, Artificial Sequence
  Oligonucleotide for detection of SNP TSC0056652
ttgataatgatgt

SEQ ID NO: 232256 - DNA, 13 bp, Artificial Sequence
  Oligonucleotide for detection of SNP TSC0056652
acatcattatcaa

SEQ ID NO: 232257 - DNA, 13 bp, Artificial Sequence
  Oligonucleotide for detection of SNP TSC0056652
ttgatattgatgt

SEQ ID NO: 232258 - DNA, 13 bp, Artificial Sequence
  Oligonucleotide for detection of SNP TSC0056652
acatcaatatcaa

SEQ ID NO: 232259 - DNA, 13 bp, Artificial Sequence
  Oligonucleotide for detection of SNP TSC0056652
ttgataatgacgt

SEQ ID NO: 232260 - DNA, 13 bp, Artificial Sequence
  Oligonucleotide for detection of SNP TSC0056652
acgtcattatcaa

SEQ ID NO: 232261 - DNA, 13 bp, Artificial Sequence
  Oligonucleotide for detection of SNP TSC0056652
ttgatattgacgt

SEQ ID NO: 232262 - DNA, 13 bp, Artificial Sequence
  Oligonucleotide for detection of SNP TSC0056652
acgtcaatatcaa

SEQ ID NO: 232263 - DNA, 13 bp, Artificial Sequence
  Oligonucleotide for detection of SNP TSC0056652
atgttattgttaa

SEQ ID NO: 232264 - DNA, 13 bp, Artificial Sequence
  Oligonucleotide for detection of SNP TSC0056652
ttaacaataacat

SEQ ID NO: 232265 - DNA, 13 bp, Artificial Sequence
  Oligonucleotide for detection of SNP TSC0056652
atgttagtgttaa

SEQ ID NO: 232266 - DNA, 13 bp, Artificial Sequence
  Oligonucleotide for detection of SNP TSC0056652
ttaacactaacat

SEQ ID NO: 232267 - DNA, 13 bp, Artificial Sequence
  Oligonucleotide for detection of SNP TSC0056652
acgttattgttaa

SEQ ID NO: 232268 - DNA, 13 bp, Artificial Sequence
  Oligonucleotide for detection of SNP TSC0056652
ttaacaataacgt

SEQ ID NO: 232269 - DNA, 13 bp, Artificial Sequence
  Oligonucleotide for detection of SNP TSC0056652
acgttagtgttaa

SEQ ID NO: 232270 - DNA, 13 bp, Artificial Sequence
  Oligonucleotide for detection of SNP TSC0056652
ttaacactaacgt

SEQ ID NO: 232271 - DNA, 13 bp, Artificial Sequence
  Oligonucleotide for detection of SNP TSC0056653
ttgaaaggattga

SEQ ID NO: 232272 - DNA, 13 bp, Artificial Sequence
  Oligonucleotide for detection of SNP TSC0056653
tcaatcctttcaa

SEQ ID NO: 232273 - DNA, 13 bp, Artificial Sequence
  Oligonucleotide for detection of SNP TSC0056653
ttgaaaagattga

SEQ ID NO: 232274 - DNA, 13 bp, Artificial Sequence
  Oligonucleotide for detection of SNP TSC0056653
tcaatcttttcaa

SEQ ID NO: 232275 - DNA, 13 bp, Artificial Sequence
  Oligonucleotide for detection of SNP TSC0005515
atatttgttaaag

SEQ ID NO: 232276 - DNA, 13 bp, Artificial Sequence
  Oligonucleotide for detection of SNP TSC0005515
ctttaacaaatat

SEQ ID NO: 232277 - DNA, 13 bp, Artificial Sequence
  Oligonucleotide for detection of SNP TSC0005515
atatttattaaag

SEQ ID NO: 232278 - DNA, 13 bp, Artificial Sequence
  Oligonucleotide for detection of SNP TSC0005515
ctttaataaatat

SEQ ID NO: 232279 - DNA, 13 bp, Artificial Sequence
  Oligonucleotide for detection of SNP TSC0004540
taggatatatgtt

SEQ ID NO: 232280 - DNA, 13 bp, Artificial Sequence
  Oligonucleotide for detection of SNP TSC0004540
aacatatatccta

SEQ ID NO: 232281 - DNA, 13 bp, Artificial Sequence
  Oligonucleotide for detection of SNP TSC0004540
taggatgtatgtt

SEQ ID NO: 232282 - DNA, 13 bp, Artificial Sequence
  Oligonucleotide for detection of SNP TSC0004540
aacatacatccta

SEQ ID NO: 232283 - DNA, 13 bp, Artificial Sequence
  Oligonucleotide for detection of SNP TSC0004540
taggacgtatgtt

SEQ ID NO: 232284 - DNA, 13 bp, Artificial Sequence
  Oligonucleotide for detection of SNP TSC0004540
aacatacgtccta

SEQ ID NO: 232285 - DNA, 13 bp, Artificial Sequence
  Oligonucleotide for detection of SNP TSC0004540
aatatatgttttg

SEQ ID NO: 232286 - DNA, 13 bp, Artificial Sequence
  Oligonucleotide for detection of SNP TSC0004540
caaaacatatatt

SEQ ID NO: 232287 - DNA, 13 bp, Artificial Sequence
  Oligonucleotide for detection of SNP TSC0004540
aatatacgttttg

SEQ ID NO: 232288 - DNA, 13 bp, Artificial Sequence
  Oligonucleotide for detection of SNP TSC0004540
caaaacgtatatt

SEQ ID NO: 232289 - DNA, 13 bp, Artificial Sequence
  Oligonucleotide for detection of SNP TSC0004541
aagatgatattgg

SEQ ID NO: 232290 - DNA, 13 bp, Artificial Sequence
  Oligonucleotide for detection of SNP TSC0004541
ccaatatcatctt

SEQ ID NO: 232291 - DNA, 13 bp, Artificial Sequence
  Oligonucleotide for detection of SNP TSC0004541
aagatgttattgg

SEQ ID NO: 232292 - DNA, 13 bp, Artificial Sequence
  Oligonucleotide for detection of SNP TSC0004541
ccaataacatctt

SEQ ID NO: 232293 - DNA, 13 bp, Artificial Sequence
  Oligonucleotide for detection of SNP TSC0004542
tttgaggaggttg

SEQ ID NO: 232294 - DNA, 13 bp, Artificial Sequence
  Oligonucleotide for detection of SNP TSC0004542
caacctcctcaaa

SEQ ID NO: 232295 - DNA, 13 bp, Artificial Sequence
  Oligonucleotide for detection of SNP TSC0004542
tttgagaaggttg

SEQ ID NO: 232296 - DNA, 13 bp, Artificial Sequence
  Oligonucleotide for detection of SNP TSC0004542
caaccttctcaaa

SEQ ID NO: 232297 - DNA, 13 bp, Artificial Sequence
  Oligonucleotide for detection of SNP TSC0056654
taaaattttgata

SEQ ID NO: 232298 - DNA, 13 bp, Artificial Sequence
  Oligonucleotide for detection of SNP TSC0056654
tatcaaaatttta

SEQ ID NO: 232299 - DNA, 13 bp, Artificial Sequence
  Oligonucleotide for detection of SNP TSC0056654
taaaatgttgata

SEQ ID NO: 232300 - DNA, 13 bp, Artificial Sequence
  Oligonucleotide for detection of SNP TSC0056654
tatcaacatttta

SEQ ID NO: 232301 - DNA, 13 bp, Artificial Sequence
  Oligonucleotide for detection of SNP TSC0056654
taaaacgttgata

SEQ ID NO: 232302 - DNA, 13 bp, Artificial Sequence
  Oligonucleotide for detection of SNP TSC0056654
tatcaacgtttta

SEQ ID NO: 232303 - DNA, 13 bp, Artificial Sequence
  Oligonucleotide for detection of SNP TSC0056654
tgttaaagtttta

SEQ ID NO: 232304 - DNA, 13 bp, Artificial Sequence
  Oligonucleotide for detection of SNP TSC0056654
taaaactttaaca

SEQ ID NO: 232305 - DNA, 13 bp, Artificial Sequence
  Oligonucleotide for detection of SNP TSC0056654
tgttaacgtttta

SEQ ID NO: 232306 - DNA, 13 bp, Artificial Sequence
  Oligonucleotide for detection of SNP TSC0056654
taaaacgttaaca

SEQ ID NO: 232307 - DNA, 13 bp, Artificial Sequence
  Oligonucleotide for detection of SNP TSC0056655
ggtatgaataata

SEQ ID NO: 232308 - DNA, 13 bp, Artificial Sequence
  Oligonucleotide for detection of SNP TSC0056655
tattattcatacc

SEQ ID NO: 232309 - DNA, 13 bp, Artificial Sequence
  Oligonucleotide for detection of SNP TSC0056655
ggtatggataata

SEQ ID NO: 232310 - DNA, 13 bp, Artificial Sequence
  Oligonucleotide for detection of SNP TSC0056655
tattatccatacc

SEQ ID NO: 232311 - DNA, 13 bp, Artificial Sequence
  Oligonucleotide for detection of SNP TSC0056655
ggtacgaataata

SEQ ID NO: 232312 - DNA, 13 bp, Artificial Sequence
  Oligonucleotide for detection of SNP TSC0056655
tattattcgtacc

SEQ ID NO: 232313 - DNA, 13 bp, Artificial Sequence
  Oligonucleotide for detection of SNP TSC0056655
ggtacggataata

SEQ ID NO: 232314 - DNA, 13 bp, Artificial Sequence
  Oligonucleotide for detection of SNP TSC0056655
tattatccgtacc

SEQ ID NO: 232315 - DNA, 13 bp, Artificial Sequence
  Oligonucleotide for detection of SNP TSC0056659
tgttgagttgaty

SEQ ID NO: 232316 - DNA, 13 bp, Artificial Sequence
  Oligonucleotide for detection of SNP TSC0056659
ratcaactcaaca

SEQ ID NO: 232317 - DNA, 13 bp, Artificial Sequence
  Oligonucleotide for detection of SNP TSC0056659
tgttgaattgaty

SEQ ID NO: 232318 - DNA, 13 bp, Artificial Sequence
  Oligonucleotide for detection of SNP TSC0056659
ratcaattcaaca

SEQ ID NO: 232319 - DNA, 13 bp, Artificial Sequence
  Oligonucleotide for detection of SNP TSC0056659
tgtcgagttgaty

SEQ ID NO: 232320 - DNA, 13 bp, Artificial Sequence
  Oligonucleotide for detection of SNP TSC0056659
ratcaactcgaca

SEQ ID NO: 232321 - DNA, 13 bp, Artificial Sequence
  Oligonucleotide for detection of SNP TSC0056659
tgtcgaattgaty

SEQ ID NO: 232322 - DNA, 13 bp, Artificial Sequence
  Oligonucleotide for detection of SNP TSC0056659
ratcaattcgaca

SEQ ID NO: 232323 - DNA, 13 bp, Artificial Sequence
  Oligonucleotide for detection of SNP TSC0056660
aaattaatttaat

SEQ ID NO: 232324 - DNA, 13 bp, Artificial Sequence
  Oligonucleotide for detection of SNP TSC0056660
attaaattaattt

SEQ ID NO: 232325 - DNA, 13 bp, Artificial Sequence
  Oligonucleotide for detection of SNP TSC0056660
aaattagtttaat

SEQ ID NO: 232326 - DNA, 13 bp, Artificial Sequence
  Oligonucleotide for detection of SNP TSC0056660
attaaactaattt

SEQ ID NO: 232327 - DNA, 13 bp, Artificial Sequence
  Oligonucleotide for detection of SNP TSC0056661
aatttaatatttt

SEQ ID NO: 232328 - DNA, 13 bp, Artificial Sequence
  Oligonucleotide for detection of SNP TSC0056661
aaaatattaaatt

SEQ ID NO: 232329 - DNA, 13 bp, Artificial Sequence
  Oligonucleotide for detection of SNP TSC0056661
aatttattatttt

SEQ ID NO: 232330 - DNA, 13 bp, Artificial Sequence
  Oligonucleotide for detection of SNP TSC0056661
aaaataataaatt

SEQ ID NO: 232331 - DNA, 13 bp, Artificial Sequence
  Oligonucleotide for detection of SNP TSC0056661
aaagtattgagtt

SEQ ID NO: 232332 - DNA, 13 bp, Artificial Sequence
  Oligonucleotide for detection of SNP TSC0056661
aactcaatacttt

SEQ ID NO: 232333 - DNA, 13 bp, Artificial Sequence
  Oligonucleotide for detection of SNP TSC0056661
aaagtaatgagtt

SEQ ID NO: 232334 - DNA, 13 bp, Artificial Sequence
  Oligonucleotide for detection of SNP TSC0056661
aactcattacttt

SEQ ID NO: 232335 - DNA, 13 bp, Artificial Sequence
  Oligonucleotide for detection of SNP TSC0010114
ggagggaatgaat

SEQ ID NO: 232336 - DNA, 13 bp, Artificial Sequence
  Oligonucleotide for detection of SNP TSC0010114
attcattccctcc

SEQ ID NO: 232337 - DNA, 13 bp, Artificial Sequence
  Oligonucleotide for detection of SNP TSC0010114
ggagggtatgaat

SEQ ID NO: 232338 - DNA, 13 bp, Artificial Sequence
  Oligonucleotide for detection of SNP TSC0010114
attcataccctcc

SEQ ID NO: 232339 - DNA, 13 bp, Artificial Sequence
  Oligonucleotide for detection of SNP TSC0056663
gtgtgtttgtttg

SEQ ID NO: 232340 - DNA, 13 bp, Artificial Sequence
  Oligonucleotide for detection of SNP TSC0056663
caaacaaacacac

SEQ ID NO: 232341 - DNA, 13 bp, Artificial Sequence
  Oligonucleotide for detection of SNP TSC0056663
gtgtgtgtgtttg

SEQ ID NO: 232342 - DNA, 13 bp, Artificial Sequence
  Oligonucleotide for detection of SNP TSC0056663
caaacacacacac

SEQ ID NO: 232343 - DNA, 13 bp, Artificial Sequence
  Oligonucleotide for detection of SNP TSC0056663
tagatagatatay

SEQ ID NO: 232344 - DNA, 13 bp, Artificial Sequence
  Oligonucleotide for detection of SNP TSC0056663
rtatatctatcta

SEQ ID NO: 232345 - DNA, 13 bp, Artificial Sequence
  Oligonucleotide for detection of SNP TSC0056663
tagatatatatay

SEQ ID NO: 232346 - DNA, 13 bp, Artificial Sequence
  Oligonucleotide for detection of SNP TSC0056663
rtatatatatcta

SEQ ID NO: 232347 - DNA, 13 bp, Artificial Sequence
  Oligonucleotide for detection of SNP TSC0056664
ttaaagattagat

SEQ ID NO: 232348 - DNA, 13 bp, Artificial Sequence
  Oligonucleotide for detection of SNP TSC0056664
atctaatctttaa

SEQ ID NO: 232349 - DNA, 13 bp, Artificial Sequence
  Oligonucleotide for detection of SNP TSC0056665
gttattatgaatt

SEQ ID NO: 232350 - DNA, 13 bp, Artificial Sequence
  Oligonucleotide for detection of SNP TSC0056665
aattcataataac

SEQ ID NO: 232351 - DNA, 13 bp, Artificial Sequence
  Oligonucleotide for detection of SNP TSC0056665
gttattgtgaatt

SEQ ID NO: 232352 - DNA, 13 bp, Artificial Sequence
  Oligonucleotide for detection of SNP TSC0056665
aattcacaataac

SEQ ID NO: 232353 - DNA, 13 bp, Artificial Sequence
  Oligonucleotide for detection of SNP TSC0056665
gttatcgtgaatt

SEQ ID NO: 232354 - DNA, 13 bp, Artificial Sequence
  Oligonucleotide for detection of SNP TSC0056665
aattcacgataac

SEQ ID NO: 232355 - DNA, 13 bp, Artificial Sequence
  Oligonucleotide for detection of SNP TSC0056665
aatttatggtagy

SEQ ID NO: 232356 - DNA, 13 bp, Artificial Sequence
  Oligonucleotide for detection of SNP TSC0056665
rctaccataaatt

SEQ ID NO: 232357 - DNA, 13 bp, Artificial Sequence
  Oligonucleotide for detection of SNP TSC0056665
aatttacggtagy

SEQ ID NO: 232358 - DNA, 13 bp, Artificial Sequence
  Oligonucleotide for detection of SNP TSC0056665
rctaccgtaaatt

SEQ ID NO: 232359 - DNA, 13 bp, Artificial Sequence
  Oligonucleotide for detection of SNP TSC0056666
gtgataaattttt

SEQ ID NO: 232360 - DNA, 13 bp, Artificial Sequence
  Oligonucleotide for detection of SNP TSC0056666
aaaaatttatcac

SEQ ID NO: 232361 - DNA, 13 bp, Artificial Sequence
  Oligonucleotide for detection of SNP TSC0056666
gtgatagattttt

SEQ ID NO: 232362 - DNA, 13 bp, Artificial Sequence
  Oligonucleotide for detection of SNP TSC0056666
aaaaatctatcac

SEQ ID NO: 232363 - DNA, 13 bp, Artificial Sequence
  Oligonucleotide for detection of SNP TSC0056671
atttagggtggag

SEQ ID NO: 232364 - DNA, 13 bp, Artificial Sequence
  Oligonucleotide for detection of SNP TSC0056671
ctccaccctaaat

SEQ ID NO: 232365 - DNA, 13 bp, Artificial Sequence
  Oligonucleotide for detection of SNP TSC0056671
atttagagtggag

SEQ ID NO: 232366 - DNA, 13 bp, Artificial Sequence
  Oligonucleotide for detection of SNP TSC0056671
ctccactctaaat

SEQ ID NO: 232367 - DNA, 13 bp, Artificial Sequence
  Oligonucleotide for detection of SNP TSC0056672
gttgttataaata

SEQ ID NO: 232368 - DNA, 13 bp, Artificial Sequence
  Oligonucleotide for detection of SNP TSC0056672
tatttataacaac

SEQ ID NO: 232369 - DNA, 13 bp, Artificial Sequence
  Oligonucleotide for detection of SNP TSC0056672
gttgttgtaaata

SEQ ID NO: 232370 - DNA, 13 bp, Artificial Sequence
  Oligonucleotide for detection of SNP TSC0056672
tatttacaacaac

SEQ ID NO: 232371 - DNA, 13 bp, Artificial Sequence
  Oligonucleotide for detection of SNP TSC0009109
tgttttaagttta

SEQ ID NO: 232372 - DNA, 13 bp, Artificial Sequence
  Oligonucleotide for detection of SNP TSC0009109
taaacttaaaaca

SEQ ID NO: 232373 - DNA, 13 bp, Artificial Sequence
  Oligonucleotide for detection of SNP TSC0009109
tagatttaagata

SEQ ID NO: 232374 - DNA, 13 bp, Artificial Sequence
  Oligonucleotide for detection of SNP TSC0009109
tatcttaaatcta

SEQ ID NO: 232375 - DNA, 13 bp, Artificial Sequence
  Oligonucleotide for detection of SNP TSC0009109
tagattaaagata

SEQ ID NO: 232376 - DNA, 13 bp, Artificial Sequence
  Oligonucleotide for detection of SNP TSC0009109
tatctttaatcta

SEQ ID NO: 232377 - DNA, 13 bp, Artificial Sequence
  Oligonucleotide for detection of SNP TSC0056673
attgtaatttttt

SEQ ID NO: 232378 - DNA, 13 bp, Artificial Sequence
  Oligonucleotide for detection of SNP TSC0056673
aaaaaattacaat

SEQ ID NO: 232379 - DNA, 13 bp, Artificial Sequence
  Oligonucleotide for detection of SNP TSC0056673
attgtagtttttt

SEQ ID NO: 232380 - DNA, 13 bp, Artificial Sequence
  Oligonucleotide for detection of SNP TSC0056673
aaaaaactacaat

SEQ ID NO: 232381 - DNA, 13 bp, Artificial Sequence
  Oligonucleotide for detection of SNP TSC0056676
aagtttatgagga

SEQ ID NO: 232382 - DNA, 13 bp, Artificial Sequence
  Oligonucleotide for detection of SNP TSC0056676
tcctcataaactt

SEQ ID NO: 232383 - DNA, 13 bp, Artificial Sequence
  Oligonucleotide for detection of SNP TSC0056676
aagtttgtgagga

SEQ ID NO: 232384 - DNA, 13 bp, Artificial Sequence
  Oligonucleotide for detection of SNP TSC0056676
tcctcacaaactt

SEQ ID NO: 232385 - DNA, 13 bp, Artificial Sequence
  Oligonucleotide for detection of SNP TSC0056677
aatagataggtat

SEQ ID NO: 232386 - DNA, 13 bp, Artificial Sequence
  Oligonucleotide for detection of SNP TSC0056677
atacctatctatt

SEQ ID NO: 232387 - DNA, 13 bp, Artificial Sequence
  Oligonucleotide for detection of SNP TSC0056677
aatagagaggtat

SEQ ID NO: 232388 - DNA, 13 bp, Artificial Sequence
  Oligonucleotide for detection of SNP TSC0056677
atacctctctatt

SEQ ID NO: 232389 - DNA, 13 bp, Artificial Sequence
  Oligonucleotide for detection of SNP TSC0056677
atatttttttatt

SEQ ID NO: 232390 - DNA, 13 bp, Artificial Sequence
  Oligonucleotide for detection of SNP TSC0056677
aataaaaaaatat

SEQ ID NO: 232391 - DNA, 13 bp, Artificial Sequence
  Oligonucleotide for detection of SNP TSC0056679
agagaatgttgtt

SEQ ID NO: 232392 - DNA, 13 bp, Artificial Sequence
  Oligonucleotide for detection of SNP TSC0056679
aacaacattctct

SEQ ID NO: 232393 - DNA, 13 bp, Artificial Sequence
  Oligonucleotide for detection of SNP TSC0056679
agagaacgttgtt

SEQ ID NO: 232394 - DNA, 13 bp, Artificial Sequence
  Oligonucleotide for detection of SNP TSC0056679
aacaacgttctct

SEQ ID NO: 232395 - DNA, 13 bp, Artificial Sequence
  Oligonucleotide for detection of SNP TSC0056679
agtagtgtttttt

SEQ ID NO: 232396 - DNA, 13 bp, Artificial Sequence
  Oligonucleotide for detection of SNP TSC0056679
aaaaaacactact

SEQ ID NO: 232397 - DNA, 13 bp, Artificial Sequence
  Oligonucleotide for detection of SNP TSC0056679
agtagtatttttt

SEQ ID NO: 232398 - DNA, 13 bp, Artificial Sequence
  Oligonucleotide for detection of SNP TSC0056679
aaaaaatactact

SEQ ID NO: 232399 - DNA, 13 bp, Artificial Sequence
  Oligonucleotide for detection of SNP TSC0056679
agtagcgtttttt

SEQ ID NO: 232400 - DNA, 13 bp, Artificial Sequence
  Oligonucleotide for detection of SNP TSC0056679
aaaaaacgctact

SEQ ID NO: 232401 - DNA, 13 bp, Artificial Sequence
  Oligonucleotide for detection of SNP TSC0056680
ttatagttgtttg

SEQ ID NO: 232402 - DNA, 13 bp, Artificial Sequence
  Oligonucleotide for detection of SNP TSC0056680
caaacaactataa

SEQ ID NO: 232403 - DNA, 13 bp, Artificial Sequence
  Oligonucleotide for detection of SNP TSC0056680
taggtagttgtag

SEQ ID NO: 232404 - DNA, 13 bp, Artificial Sequence
  Oligonucleotide for detection of SNP TSC0056680
ctacaactaccta

SEQ ID NO: 232405 - DNA, 13 bp, Artificial Sequence
  Oligonucleotide for detection of SNP TSC0056680
taggtatttgtag

SEQ ID NO: 232406 - DNA, 13 bp, Artificial Sequence
  Oligonucleotide for detection of SNP TSC0056680
ctacaaataccta

SEQ ID NO: 232407 - DNA, 13 bp, Artificial Sequence
  Oligonucleotide for detection of SNP TSC0056682
ttaaaatgaaggg

SEQ ID NO: 232408 - DNA, 13 bp, Artificial Sequence
  Oligonucleotide for detection of SNP TSC0056682
cccttcattttaa

SEQ ID NO: 232409 - DNA, 13 bp, Artificial Sequence
  Oligonucleotide for detection of SNP TSC0056682
ttaaaacgaaggg

SEQ ID NO: 232410 - DNA, 13 bp, Artificial Sequence
  Oligonucleotide for detection of SNP TSC0056682
cccttcgttttaa

SEQ ID NO: 232411 - DNA, 13 bp, Artificial Sequence
  Oligonucleotide for detection of SNP TSC0056683
ttttattatgata

SEQ ID NO: 232412 - DNA, 13 bp, Artificial Sequence
  Oligonucleotide for detection of SNP TSC0056683
tatcataataaaa

SEQ ID NO: 232413 - DNA, 13 bp, Artificial Sequence
  Oligonucleotide for detection of SNP TSC0056683
ttttatgatgata

SEQ ID NO: 232414 - DNA, 13 bp, Artificial Sequence
  Oligonucleotide for detection of SNP TSC0056683
tatcatcataaaa

SEQ ID NO: 232415 - DNA, 13 bp, Artificial Sequence
  Oligonucleotide for detection of SNP TSC0056683
ttttacgatgata

SEQ ID NO: 232416 - DNA, 13 bp, Artificial Sequence
  Oligonucleotide for detection of SNP TSC0056683
tatcatcgtaaaa

SEQ ID NO: 232417 - DNA, 13 bp, Artificial Sequence
  Oligonucleotide for detection of SNP TSC0056683
tgttatggtagaa

SEQ ID NO: 232418 - DNA, 13 bp, Artificial Sequence
  Oligonucleotide for detection of SNP TSC0056683
ttctaccataaca

SEQ ID NO: 232419 - DNA, 13 bp, Artificial Sequence
  Oligonucleotide for detection of SNP TSC0056683
tgttattgtagaa

SEQ ID NO: 232420 - DNA, 13 bp, Artificial Sequence
  Oligonucleotide for detection of SNP TSC0056683
ttctacaataaca

SEQ ID NO: 232421 - DNA, 13 bp, Artificial Sequence
  Oligonucleotide for detection of SNP TSC0056683
tgttatcgtagaa

SEQ ID NO: 232422 - DNA, 13 bp, Artificial Sequence
  Oligonucleotide for detection of SNP TSC0056683
ttctacgataaca

SEQ ID NO: 232423 - DNA, 13 bp, Artificial Sequence
  Oligonucleotide for detection of SNP TSC0056684
ttagttattagtg

SEQ ID NO: 232424 - DNA, 13 bp, Artificial Sequence
  Oligonucleotide for detection of SNP TSC0056684
cactaataactaa

SEQ ID NO: 232425 - DNA, 13 bp, Artificial Sequence
  Oligonucleotide for detection of SNP TSC0056684
ttagttgttagtg

SEQ ID NO: 232426 - DNA, 13 bp, Artificial Sequence
  Oligonucleotide for detection of SNP TSC0056684
cactaacaactaa

SEQ ID NO: 232427 - DNA, 13 bp, Artificial Sequence
  Oligonucleotide for detection of SNP TSC0056685
tgggtatattatt

SEQ ID NO: 232428 - DNA, 13 bp, Artificial Sequence
  Oligonucleotide for detection of SNP TSC0056685
aataatataccca

SEQ ID NO: 232429 - DNA, 13 bp, Artificial Sequence
  Oligonucleotide for detection of SNP TSC0056685
tgggtagattatt

SEQ ID NO: 232430 - DNA, 13 bp, Artificial Sequence
  Oligonucleotide for detection of SNP TSC0056685
aataatctaccca

SEQ ID NO: 232431 - DNA, 13 bp, Artificial Sequence
  Oligonucleotide for detection of SNP TSC0056685
agtgatgtgttta

SEQ ID NO: 232432 - DNA, 13 bp, Artificial Sequence
  Oligonucleotide for detection of SNP TSC0056685
taaacacatcact

SEQ ID NO: 232433 - DNA, 13 bp, Artificial Sequence
  Oligonucleotide for detection of SNP TSC0056685
agtgatttgttta

SEQ ID NO: 232434 - DNA, 13 bp, Artificial Sequence
  Oligonucleotide for detection of SNP TSC0056685
taaacaaatcact

SEQ ID NO: 232435 - DNA, 13 bp, Artificial Sequence
  Oligonucleotide for detection of SNP TSC0056687
gtagttttggtat

SEQ ID NO: 232436 - DNA, 13 bp, Artificial Sequence
  Oligonucleotide for detection of SNP TSC0056687
ataccaaaactac

SEQ ID NO: 232437 - DNA, 13 bp, Artificial Sequence
  Oligonucleotide for detection of SNP TSC0056687
gtagttgtggtat

SEQ ID NO: 232438 - DNA, 13 bp, Artificial Sequence
  Oligonucleotide for detection of SNP TSC0056687
ataccacaactac

SEQ ID NO: 232439 - DNA, 13 bp, Artificial Sequence
  Oligonucleotide for detection of SNP TSC0056687
gtagtttcggtat

SEQ ID NO: 232440 - DNA, 13 bp, Artificial Sequence
  Oligonucleotide for detection of SNP TSC0056687
ataccgaaactac

SEQ ID NO: 232441 - DNA, 13 bp, Artificial Sequence
  Oligonucleotide for detection of SNP TSC0056687
gtagtcgtggtat

SEQ ID NO: 232442 - DNA, 13 bp, Artificial Sequence
  Oligonucleotide for detection of SNP TSC0056687
ataccacgactac

SEQ ID NO: 232443 - DNA, 13 bp, Artificial Sequence
  Oligonucleotide for detection of SNP TSC0056687
gtagttgcggtat

SEQ ID NO: 232444 - DNA, 13 bp, Artificial Sequence
  Oligonucleotide for detection of SNP TSC0056687
ataccgcaactac

SEQ ID NO: 232445 - DNA, 13 bp, Artificial Sequence
  Oligonucleotide for detection of SNP TSC0056687
gtagtcgcggtat

SEQ ID NO: 232446 - DNA, 13 bp, Artificial Sequence
  Oligonucleotide for detection of SNP TSC0056687
ataccgcgactac

SEQ ID NO: 232447 - DNA, 13 bp, Artificial Sequence
  Oligonucleotide for detection of SNP TSC0056687
atgttgggattgy

SEQ ID NO: 232448 - DNA, 13 bp, Artificial Sequence
  Oligonucleotide for detection of SNP TSC0056687
rcaatcccaacat

SEQ ID NO: 232449 - DNA, 13 bp, Artificial Sequence
  Oligonucleotide for detection of SNP TSC0056687
atgttgtgattgy

SEQ ID NO: 232450 - DNA, 13 bp, Artificial Sequence
  Oligonucleotide for detection of SNP TSC0056687
rcaatcacaacat

SEQ ID NO: 232451 - DNA, 13 bp, Artificial Sequence
  Oligonucleotide for detection of SNP TSC0056687
atgtcgggattgy

SEQ ID NO: 232452 - DNA, 13 bp, Artificial Sequence
  Oligonucleotide for detection of SNP TSC0056687
rcaatcccgacat

SEQ ID NO: 232453 - DNA, 13 bp, Artificial Sequence
  Oligonucleotide for detection of SNP TSC0056687
atgtcgtgattgy

SEQ ID NO: 232454 - DNA, 13 bp, Artificial Sequence
  Oligonucleotide for detection of SNP TSC0056687
rcaatcacgacat

SEQ ID NO: 232455 - DNA, 13 bp, Artificial Sequence
  Oligonucleotide for detection of SNP TSC0056687
atgttgcgattgy

SEQ ID NO: 232456 - DNA, 13 bp, Artificial Sequence
  Oligonucleotide for detection of SNP TSC0056687
rcaatcgcaacat

SEQ ID NO: 232457 - DNA, 13 bp, Artificial Sequence
  Oligonucleotide for detection of SNP TSC0056687
atgtcgcgattgy

SEQ ID NO: 232458 - DNA, 13 bp, Artificial Sequence
  Oligonucleotide for detection of SNP TSC0056687
rcaatcgcgacat

SEQ ID NO: 232459 - DNA, 13 bp, Artificial Sequence
  Oligonucleotide for detection of SNP TSC0056688
tttgggattaagg

SEQ ID NO: 232460 - DNA, 13 bp, Artificial Sequence
  Oligonucleotide for detection of SNP TSC0056688
ccttaatcccaaa

SEQ ID NO: 232461 - DNA, 13 bp, Artificial Sequence
  Oligonucleotide for detection of SNP TSC0056688
tttgggtttaagg

SEQ ID NO: 232462 - DNA, 13 bp, Artificial Sequence
  Oligonucleotide for detection of SNP TSC0056688
ccttaaacccaaa

SEQ ID NO: 232463 - DNA, 13 bp, Artificial Sequence
  Oligonucleotide for detection of SNP TSC0056689
aaggggatgtgtt

SEQ ID NO: 232464 - DNA, 13 bp, Artificial Sequence
  Oligonucleotide for detection of SNP TSC0056689
aacacatcccctt

SEQ ID NO: 232465 - DNA, 13 bp, Artificial Sequence
  Oligonucleotide for detection of SNP TSC0056689
aagggggtgtgtt

SEQ ID NO: 232466 - DNA, 13 bp, Artificial Sequence
  Oligonucleotide for detection of SNP TSC0056689
aacacaccccctt

SEQ ID NO: 232467 - DNA, 13 bp, Artificial Sequence
  Oligonucleotide for detection of SNP TSC0056690
attgagatgtaty

SEQ ID NO: 232468 - DNA, 13 bp, Artificial Sequence
  Oligonucleotide for detection of SNP TSC0056690
ratacatctcaat

SEQ ID NO: 232469 - DNA, 13 bp, Artificial Sequence
  Oligonucleotide for detection of SNP TSC0056690
attgagttgtaty

SEQ ID NO: 232470 - DNA, 13 bp, Artificial Sequence
  Oligonucleotide for detection of SNP TSC0056690
ratacaactcaat

SEQ ID NO: 232471 - DNA, 13 bp, Artificial Sequence
  Oligonucleotide for detection of SNP TSC0056690
ggtatattttaat

SEQ ID NO: 232472 - DNA, 13 bp, Artificial Sequence
  Oligonucleotide for detection of SNP TSC0056690
attaaaatatacc

SEQ ID NO: 232473 - DNA, 13 bp, Artificial Sequence
  Oligonucleotide for detection of SNP TSC0056690
ggtatagtttaat

SEQ ID NO: 232474 - DNA, 13 bp, Artificial Sequence
  Oligonucleotide for detection of SNP TSC0056690
attaaactatacc

SEQ ID NO: 232475 - DNA, 13 bp, Artificial Sequence
  Oligonucleotide for detection of SNP TSC0056691
attattggaataa

SEQ ID NO: 232476 - DNA, 13 bp, Artificial Sequence
  Oligonucleotide for detection of SNP TSC0056691
ttattccaataat

SEQ ID NO: 232477 - DNA, 13 bp, Artificial Sequence
  Oligonucleotide for detection of SNP TSC0056691
attattagaataa

SEQ ID NO: 232478 - DNA, 13 bp, Artificial Sequence
  Oligonucleotide for detection of SNP TSC0056691
ttattctaataat

SEQ ID NO: 232479 - DNA, 13 bp, Artificial Sequence
  Oligonucleotide for detection of SNP TSC0056692
taaatgttttatg

SEQ ID NO: 232480 - DNA, 13 bp, Artificial Sequence
  Oligonucleotide for detection of SNP TSC0056692
cataaaacattta

SEQ ID NO: 232481 - DNA, 13 bp, Artificial Sequence
  Oligonucleotide for detection of SNP TSC0056692
taaatgatttatg

SEQ ID NO: 232482 - DNA, 13 bp, Artificial Sequence
  Oligonucleotide for detection of SNP TSC0056692
cataaatcattta

SEQ ID NO: 232483 - DNA, 13 bp, Artificial Sequence
  Oligonucleotide for detection of SNP TSC0056693
ttaatagagaaaa

SEQ ID NO: 232484 - DNA, 13 bp, Artificial Sequence
  Oligonucleotide for detection of SNP TSC0056693
ttttctctattaa

SEQ ID NO: 232485 - DNA, 13 bp, Artificial Sequence
  Oligonucleotide for detection of SNP TSC0056693
ttaatatagaaaa

SEQ ID NO: 232486 - DNA, 13 bp, Artificial Sequence
  Oligonucleotide for detection of SNP TSC0056693
ttttctatattaa

SEQ ID NO: 232487 - DNA, 13 bp, Artificial Sequence
  Oligonucleotide for detection of SNP TSC0056694
aggtaaattattt

SEQ ID NO: 232488 - DNA, 13 bp, Artificial Sequence
  Oligonucleotide for detection of SNP TSC0056694
aaataatttacct

SEQ ID NO: 232489 - DNA, 13 bp, Artificial Sequence
  Oligonucleotide for detection of SNP TSC0056694
aggtaagttattt

SEQ ID NO: 232490 - DNA, 13 bp, Artificial Sequence
  Oligonucleotide for detection of SNP TSC0056694
aaataacttacct

SEQ ID NO: 232491 - DNA, 13 bp, Artificial Sequence
  Oligonucleotide for detection of SNP TSC0056695
gatttatgtttgt

SEQ ID NO: 232492 - DNA, 13 bp, Artificial Sequence
  Oligonucleotide for detection of SNP TSC0056695
acaaacataaatc

SEQ ID NO: 232493 - DNA, 13 bp, Artificial Sequence
  Oligonucleotide for detection of SNP TSC0056695
gatttacgtttgt

SEQ ID NO: 232494 - DNA, 13 bp, Artificial Sequence
  Oligonucleotide for detection of SNP TSC0056695
acaaacgtaaatc

SEQ ID NO: 232495 - DNA, 13 bp, Artificial Sequence
  Oligonucleotide for detection of SNP TSC0056696
gattgtaaaggtg

SEQ ID NO: 232496 - DNA, 13 bp, Artificial Sequence
  Oligonucleotide for detection of SNP TSC0056696
cacctttacaatc

SEQ ID NO: 232497 - DNA, 13 bp, Artificial Sequence
  Oligonucleotide for detection of SNP TSC0056696
gattgttaaggtg

SEQ ID NO: 232498 - DNA, 13 bp, Artificial Sequence
  Oligonucleotide for detection of SNP TSC0056696
caccttaacaatc

SEQ ID NO: 232499 - DNA, 13 bp, Artificial Sequence
  Oligonucleotide for detection of SNP TSC0056696
tatttttataaty

SEQ ID NO: 232500 - DNA, 13 bp, Artificial Sequence
  Oligonucleotide for detection of SNP TSC0056696
rattataaaaata

SEQ ID NO: 232501 - DNA, 13 bp, Artificial Sequence
  Oligonucleotide for detection of SNP TSC0056696
tattttgataaty

SEQ ID NO: 232502 - DNA, 13 bp, Artificial Sequence
  Oligonucleotide for detection of SNP TSC0056696
rattatcaaaata

SEQ ID NO: 232503 - DNA, 13 bp, Artificial Sequence
  Oligonucleotide for detection of SNP TSC0056697
aagggaggtttaa

SEQ ID NO: 232504 - DNA, 13 bp, Artificial Sequence
  Oligonucleotide for detection of SNP TSC0056697
ttaaacctccctt

SEQ ID NO: 232505 - DNA, 13 bp, Artificial Sequence
  Oligonucleotide for detection of SNP TSC0056697
aagggaagtttaa

SEQ ID NO: 232506 - DNA, 13 bp, Artificial Sequence
  Oligonucleotide for detection of SNP TSC0056697
ttaaacttccctt

SEQ ID NO: 232507 - DNA, 13 bp, Artificial Sequence
  Oligonucleotide for detection of SNP TSC0056698
tttagagtattga

SEQ ID NO: 232508 - DNA, 13 bp, Artificial Sequence
  Oligonucleotide for detection of SNP TSC0056698
tcaatactctaaa

SEQ ID NO: 232509 - DNA, 13 bp, Artificial Sequence
  Oligonucleotide for detection of SNP TSC0056701
ttagttatatata

SEQ ID NO: 232510 - DNA, 13 bp, Artificial Sequence
  Oligonucleotide for detection of SNP TSC0056701
tatatataactaa

SEQ ID NO: 232511 - DNA, 13 bp, Artificial Sequence
  Oligonucleotide for detection of SNP TSC0056701
ttagttgtatata

SEQ ID NO: 232512 - DNA, 13 bp, Artificial Sequence
  Oligonucleotide for detection of SNP TSC0056701
tatatacaactaa

SEQ ID NO: 232513 - DNA, 13 bp, Artificial Sequence
  Oligonucleotide for detection of SNP TSC0056701
ttagtcgtatata

SEQ ID NO: 232514 - DNA, 13 bp, Artificial Sequence
  Oligonucleotide for detection of SNP TSC0056701
tatatacgactaa

SEQ ID NO: 232515 - DNA, 13 bp, Artificial Sequence
  Oligonucleotide for detection of SNP TSC0056701
tatgtatgattag

SEQ ID NO: 232516 - DNA, 13 bp, Artificial Sequence
  Oligonucleotide for detection of SNP TSC0056701
ctaatcatacata

SEQ ID NO: 232517 - DNA, 13 bp, Artificial Sequence
  Oligonucleotide for detection of SNP TSC0056701
tatgtacgattag

SEQ ID NO: 232518 - DNA, 13 bp, Artificial Sequence
  Oligonucleotide for detection of SNP TSC0056701
ctaatcgtacata

SEQ ID NO: 232519 - DNA, 13 bp, Artificial Sequence
  Oligonucleotide for detection of SNP TSC0006157
gagaagggtttty

SEQ ID NO: 232520 - DNA, 13 bp, Artificial Sequence
  Oligonucleotide for detection of SNP TSC0006157
raaaacccttctc

SEQ ID NO: 232521 - DNA, 13 bp, Artificial Sequence
  Oligonucleotide for detection of SNP TSC0006157
gagaagagtttty

SEQ ID NO: 232522 - DNA, 13 bp, Artificial Sequence
  Oligonucleotide for detection of SNP TSC0006157
raaaactcttctc

SEQ ID NO: 232523 - DNA, 13 bp, Artificial Sequence
  Oligonucleotide for detection of SNP TSC0056703
gtaataaatagaa

SEQ ID NO: 232524 - DNA, 13 bp, Artificial Sequence
  Oligonucleotide for detection of SNP TSC0056703
ttctatttattac

SEQ ID NO: 232525 - DNA, 13 bp, Artificial Sequence
  Oligonucleotide for detection of SNP TSC0056703
gtaatatatagaa

SEQ ID NO: 232526 - DNA, 13 bp, Artificial Sequence
  Oligonucleotide for detection of SNP TSC0056703
ttctatatattac

SEQ ID NO: 232527 - DNA, 13 bp, Artificial Sequence
  Oligonucleotide for detection of SNP TSC0056707
tttttttttgggg

SEQ ID NO: 232528 - DNA, 13 bp, Artificial Sequence
  Oligonucleotide for detection of SNP TSC0056707
ccccaaaaaaaaa

SEQ ID NO: 232529 - DNA, 13 bp, Artificial Sequence
  Oligonucleotide for detection of SNP TSC0056707
ttttaataggaaa

SEQ ID NO: 232530 - DNA, 13 bp, Artificial Sequence
  Oligonucleotide for detection of SNP TSC0056707
tttcctattaaaa

SEQ ID NO: 232531 - DNA, 13 bp, Artificial Sequence
  Oligonucleotide for detection of SNP TSC0056707
ttttaaaaggaaa

SEQ ID NO: 232532 - DNA, 13 bp, Artificial Sequence
  Oligonucleotide for detection of SNP TSC0056707
tttccttttaaaa

SEQ ID NO: 232533 - DNA, 13 bp, Artificial Sequence
  Oligonucleotide for detection of SNP TSC0056708
tttgagaatgtgt

SEQ ID NO: 232534 - DNA, 13 bp, Artificial Sequence
  Oligonucleotide for detection of SNP TSC0056708
acacattctcaaa

SEQ ID NO: 232535 - DNA, 13 bp, Artificial Sequence
  Oligonucleotide for detection of SNP TSC0056708
tttgagtatgtgt

SEQ ID NO: 232536 - DNA, 13 bp, Artificial Sequence
  Oligonucleotide for detection of SNP TSC0056708
acacatactcaaa

SEQ ID NO: 232537 - DNA, 13 bp, Artificial Sequence
  Oligonucleotide for detection of SNP TSC0056708
atatatttttagg

SEQ ID NO: 232538 - DNA, 13 bp, Artificial Sequence
  Oligonucleotide for detection of SNP TSC0056708
cctaaaaatatat

SEQ ID NO: 232539 - DNA, 13 bp, Artificial Sequence
  Oligonucleotide for detection of SNP TSC0056708
atatatatttagg

SEQ ID NO: 232540 - DNA, 13 bp, Artificial Sequence
  Oligonucleotide for detection of SNP TSC0056708
cctaaatatatat

SEQ ID NO: 232541 - DNA, 13 bp, Artificial Sequence
  Oligonucleotide for detection of SNP TSC0056709
tagaaagtttgaa

SEQ ID NO: 232542 - DNA, 13 bp, Artificial Sequence
  Oligonucleotide for detection of SNP TSC0056709
ttcaaactttcta

SEQ ID NO: 232543 - DNA, 13 bp, Artificial Sequence
  Oligonucleotide for detection of SNP TSC0056709
tagaaaatttgaa

SEQ ID NO: 232544 - DNA, 13 bp, Artificial Sequence
  Oligonucleotide for detection of SNP TSC0056709
ttcaaattttcta

SEQ ID NO: 232545 - DNA, 13 bp, Artificial Sequence
  Oligonucleotide for detection of SNP TSC0056710
aaagtaaaaggta

SEQ ID NO: 232546 - DNA, 13 bp, Artificial Sequence
  Oligonucleotide for detection of SNP TSC0056710
taccttttacttt

SEQ ID NO: 232547 - DNA, 13 bp, Artificial Sequence
  Oligonucleotide for detection of SNP TSC0056710
aaagtagaaggta

SEQ ID NO: 232548 - DNA, 13 bp, Artificial Sequence
  Oligonucleotide for detection of SNP TSC0056710
taccttctacttt

SEQ ID NO: 232549 - DNA, 13 bp, Artificial Sequence
  Oligonucleotide for detection of SNP TSC0056712
taaaaagataaaa

SEQ ID NO: 232550 - DNA, 13 bp, Artificial Sequence
  Oligonucleotide for detection of SNP TSC0056712
ttttatcttttta

SEQ ID NO: 232551 - DNA, 13 bp, Artificial Sequence
  Oligonucleotide for detection of SNP TSC0056713
gagggagaaatgg

SEQ ID NO: 232552 - DNA, 13 bp, Artificial Sequence
  Oligonucleotide for detection of SNP TSC0056713
ccatttctccctc

SEQ ID NO: 232553 - DNA, 13 bp, Artificial Sequence
  Oligonucleotide for detection of SNP TSC0056713
gagggaaaaatgg

SEQ ID NO: 232554 - DNA, 13 bp, Artificial Sequence
  Oligonucleotide for detection of SNP TSC0056713
ccatttttccctc

SEQ ID NO: 232555 - DNA, 13 bp, Artificial Sequence
  Oligonucleotide for detection of SNP TSC0056714
aaggagggtatag

SEQ ID NO: 232556 - DNA, 13 bp, Artificial Sequence
  Oligonucleotide for detection of SNP TSC0056714
ctataccctcctt

SEQ ID NO: 232557 - DNA, 13 bp, Artificial Sequence
  Oligonucleotide for detection of SNP TSC0056714
aaggagagtatag

SEQ ID NO: 232558 - DNA, 13 bp, Artificial Sequence
  Oligonucleotide for detection of SNP TSC0056714
ctatactctcctt

SEQ ID NO: 232559 - DNA, 13 bp, Artificial Sequence
  Oligonucleotide for detection of SNP TSC0005236
gaattgttattta

SEQ ID NO: 232560 - DNA, 13 bp, Artificial Sequence
  Oligonucleotide for detection of SNP TSC0005236
taaataacaattc

SEQ ID NO: 232561 - DNA, 13 bp, Artificial Sequence
  Oligonucleotide for detection of SNP TSC0005236
gaattggtattta

SEQ ID NO: 232562 - DNA, 13 bp, Artificial Sequence
  Oligonucleotide for detection of SNP TSC0005236
taaataccaattc

SEQ ID NO: 232563 - DNA, 13 bp, Artificial Sequence
  Oligonucleotide for detection of SNP TSC0005236
taaatagtagtty

SEQ ID NO: 232564 - DNA, 13 bp, Artificial Sequence
  Oligonucleotide for detection of SNP TSC0005236
raactactattta

SEQ ID NO: 232565 - DNA, 13 bp, Artificial Sequence
  Oligonucleotide for detection of SNP TSC0005236
taaatattagtty

SEQ ID NO: 232566 - DNA, 13 bp, Artificial Sequence
  Oligonucleotide for detection of SNP TSC0005236
raactaatattta

SEQ ID NO: 232567 - DNA, 13 bp, Artificial Sequence
  Oligonucleotide for detection of SNP TSC0005240
atgttgaaaatgy

SEQ ID NO: 232568 - DNA, 13 bp, Artificial Sequence
  Oligonucleotide for detection of SNP TSC0005240
rcattttcaacat

SEQ ID NO: 232569 - DNA, 13 bp, Artificial Sequence
  Oligonucleotide for detection of SNP TSC0005240
atgttgtaaatgy

SEQ ID NO: 232570 - DNA, 13 bp, Artificial Sequence
  Oligonucleotide for detection of SNP TSC0005240
rcatttacaacat

SEQ ID NO: 232571 - DNA, 13 bp, Artificial Sequence
  Oligonucleotide for detection of SNP TSC0005240
gtatttttagtat

SEQ ID NO: 232572 - DNA, 13 bp, Artificial Sequence
  Oligonucleotide for detection of SNP TSC0005240
atactaaaaatac

SEQ ID NO: 232573 - DNA, 13 bp, Artificial Sequence
  Oligonucleotide for detection of SNP TSC0005240
gtatttgtagtat

SEQ ID NO: 232574 - DNA, 13 bp, Artificial Sequence
  Oligonucleotide for detection of SNP TSC0005240
atactacaaatac

SEQ ID NO: 232575 - DNA, 13 bp, Artificial Sequence
  Oligonucleotide for detection of SNP TSC0056715
aatagtaaaaagy

SEQ ID NO: 232576 - DNA, 13 bp, Artificial Sequence
  Oligonucleotide for detection of SNP TSC0056715
rctttttactatt

SEQ ID NO: 232577 - DNA, 13 bp, Artificial Sequence
  Oligonucleotide for detection of SNP TSC0056715
aatagtgaaaagy

SEQ ID NO: 232578 - DNA, 13 bp, Artificial Sequence
  Oligonucleotide for detection of SNP TSC0056715
rcttttcactatt

SEQ ID NO: 232579 - DNA, 13 bp, Artificial Sequence
  Oligonucleotide for detection of SNP TSC0056715
aatagcgaaaagy

SEQ ID NO: 232580 - DNA, 13 bp, Artificial Sequence
  Oligonucleotide for detection of SNP TSC0056715
rcttttcgctatt

SEQ ID NO: 232581 - DNA, 13 bp, Artificial Sequence
  Oligonucleotide for detection of SNP TSC0056715
gttttttgttgtt

SEQ ID NO: 232582 - DNA, 13 bp, Artificial Sequence
  Oligonucleotide for detection of SNP TSC0056715
aacaacaaaaaac

SEQ ID NO: 232583 - DNA, 13 bp, Artificial Sequence
  Oligonucleotide for detection of SNP TSC0056715
gtttttcgttgtt

SEQ ID NO: 232584 - DNA, 13 bp, Artificial Sequence
  Oligonucleotide for detection of SNP TSC0056715
aacaacgaaaaac

SEQ ID NO: 232585 - DNA, 13 bp, Artificial Sequence
  Oligonucleotide for detection of SNP TSC0056717
aaagatgggaata

SEQ ID NO: 232586 - DNA, 13 bp, Artificial Sequence
  Oligonucleotide for detection of SNP TSC0056717
tattcccatcttt

SEQ ID NO: 232587 - DNA, 13 bp, Artificial Sequence
  Oligonucleotide for detection of SNP TSC0056717
aaagataggaata

SEQ ID NO: 232588 - DNA, 13 bp, Artificial Sequence
  Oligonucleotide for detection of SNP TSC0056717
tattcctatcttt

SEQ ID NO: 232589 - DNA, 13 bp, Artificial Sequence
  Oligonucleotide for detection of SNP TSC0056717
aaagacgggaata

SEQ ID NO: 232590 - DNA, 13 bp, Artificial Sequence
  Oligonucleotide for detection of SNP TSC0056717
tattcccgtcttt

SEQ ID NO: 232591 - DNA, 13 bp, Artificial Sequence
  Oligonucleotide for detection of SNP TSC0004525
agaatatgtagta

SEQ ID NO: 232592 - DNA, 13 bp, Artificial Sequence
  Oligonucleotide for detection of SNP TSC0004525
tactacatattct

SEQ ID NO: 232593 - DNA, 13 bp, Artificial Sequence
  Oligonucleotide for detection of SNP TSC0004525
agaatacgtagta

SEQ ID NO: 232594 - DNA, 13 bp, Artificial Sequence
  Oligonucleotide for detection of SNP TSC0004525
tactacgtattct

SEQ ID NO: 232595 - DNA, 13 bp, Artificial Sequence
  Oligonucleotide for detection of SNP TSC0056719
ttaatagtatgta

SEQ ID NO: 232596 - DNA, 13 bp, Artificial Sequence
  Oligonucleotide for detection of SNP TSC0056719
tacatactattaa

SEQ ID NO: 232597 - DNA, 13 bp, Artificial Sequence
  Oligonucleotide for detection of SNP TSC0056719
ttaataatatgta

SEQ ID NO: 232598 - DNA, 13 bp, Artificial Sequence
  Oligonucleotide for detection of SNP TSC0056719
tacatattattaa

SEQ ID NO: 232599 - DNA, 13 bp, Artificial Sequence
  Oligonucleotide for detection of SNP TSC0056720
agttaatggaata

SEQ ID NO: 232600 - DNA, 13 bp, Artificial Sequence
  Oligonucleotide for detection of SNP TSC0056720
tattccattaact

SEQ ID NO: 232601 - DNA, 13 bp, Artificial Sequence
  Oligonucleotide for detection of SNP TSC0056720
agttaacggaata

SEQ ID NO: 232602 - DNA, 13 bp, Artificial Sequence
  Oligonucleotide for detection of SNP TSC0056720
tattccgttaact

SEQ ID NO: 232603 - DNA, 13 bp, Artificial Sequence
  Oligonucleotide for detection of SNP TSC0056721
gttttagaaataa

SEQ ID NO: 232604 - DNA, 13 bp, Artificial Sequence
  Oligonucleotide for detection of SNP TSC0056721
ttatttctaaaac

SEQ ID NO: 232605 - DNA, 13 bp, Artificial Sequence
  Oligonucleotide for detection of SNP TSC0056721
gttttaaaaataa

SEQ ID NO: 232606 - DNA, 13 bp, Artificial Sequence
  Oligonucleotide for detection of SNP TSC0056721
ttatttttaaaac

SEQ ID NO: 232607 - DNA, 13 bp, Artificial Sequence
  Oligonucleotide for detection of SNP TSC0056722
gatatatgggttg

SEQ ID NO: 232608 - DNA, 13 bp, Artificial Sequence
  Oligonucleotide for detection of SNP TSC0056722
caacccatatatc

SEQ ID NO: 232609 - DNA, 13 bp, Artificial Sequence
  Oligonucleotide for detection of SNP TSC0056722
gatataggggttg

SEQ ID NO: 232610 - DNA, 13 bp, Artificial Sequence
  Oligonucleotide for detection of SNP TSC0056722
caacccctatatc

SEQ ID NO: 232611 - DNA, 13 bp, Artificial Sequence
  Oligonucleotide for detection of SNP TSC0056722
taatttatgtgty

SEQ ID NO: 232612 - DNA, 13 bp, Artificial Sequence
  Oligonucleotide for detection of SNP TSC0056722
racacataaatta

SEQ ID NO: 232613 - DNA, 13 bp, Artificial Sequence
  Oligonucleotide for detection of SNP TSC0056722
taatttttgtgty

SEQ ID NO: 232614 - DNA, 13 bp, Artificial Sequence
  Oligonucleotide for detection of SNP TSC0056722
racacaaaaatta

SEQ ID NO: 232615 - DNA, 13 bp, Artificial Sequence
  Oligonucleotide for detection of SNP TSC0056723
tatataataatty

SEQ ID NO: 232616 - DNA, 13 bp, Artificial Sequence
  Oligonucleotide for detection of SNP TSC0056723
raattattatata

SEQ ID NO: 232617 - DNA, 13 bp, Artificial Sequence
  Oligonucleotide for detection of SNP TSC0056723
tatatattaatty

SEQ ID NO: 232618 - DNA, 13 bp, Artificial Sequence
  Oligonucleotide for detection of SNP TSC0056723
raattaatatata

SEQ ID NO: 232619 - DNA, 13 bp, Artificial Sequence
  Oligonucleotide for detection of SNP TSC0056723
gaattattatgta

SEQ ID NO: 232620 - DNA, 13 bp, Artificial Sequence
  Oligonucleotide for detection of SNP TSC0056723
tacataataattc

SEQ ID NO: 232621 - DNA, 13 bp, Artificial Sequence
  Oligonucleotide for detection of SNP TSC0056723
gaattaatatgta

SEQ ID NO: 232622 - DNA, 13 bp, Artificial Sequence
  Oligonucleotide for detection of SNP TSC0056723
tacatattaattc

SEQ ID NO: 232623 - DNA, 13 bp, Artificial Sequence
  Oligonucleotide for detection of SNP TSC0056724
aatgatggtgaaa

SEQ ID NO: 232624 - DNA, 13 bp, Artificial Sequence
  Oligonucleotide for detection of SNP TSC0056724
tttcaccatcatt

SEQ ID NO: 232625 - DNA, 13 bp, Artificial Sequence
  Oligonucleotide for detection of SNP TSC0056724
aatgattgtgaaa

SEQ ID NO: 232626 - DNA, 13 bp, Artificial Sequence
  Oligonucleotide for detection of SNP TSC0056724
tttcacaatcatt

SEQ ID NO: 232627 - DNA, 13 bp, Artificial Sequence
  Oligonucleotide for detection of SNP TSC0056724
aatgacggtgaaa

SEQ ID NO: 232628 - DNA, 13 bp, Artificial Sequence
  Oligonucleotide for detection of SNP TSC0056724
tttcaccgtcatt

SEQ ID NO: 232629 - DNA, 13 bp, Artificial Sequence
  Oligonucleotide for detection of SNP TSC0056724
aatgatcgtgaaa

SEQ ID NO: 232630 - DNA, 13 bp, Artificial Sequence
  Oligonucleotide for detection of SNP TSC0056724
tttcacgatcatt

SEQ ID NO: 232631 - DNA, 13 bp, Artificial Sequence
  Oligonucleotide for detection of SNP TSC0056725
gaagatgtaagtg

SEQ ID NO: 232632 - DNA, 13 bp, Artificial Sequence
  Oligonucleotide for detection of SNP TSC0056725
cacttacatcttc

SEQ ID NO: 232633 - DNA, 13 bp, Artificial Sequence
  Oligonucleotide for detection of SNP TSC0056725
gaagatataagtg

SEQ ID NO: 232634 - DNA, 13 bp, Artificial Sequence
  Oligonucleotide for detection of SNP TSC0056725
cacttatatcttc

SEQ ID NO: 232635 - DNA, 13 bp, Artificial Sequence
  Oligonucleotide for detection of SNP TSC0056725
gaagacgtaagtg

SEQ ID NO: 232636 - DNA, 13 bp, Artificial Sequence
  Oligonucleotide for detection of SNP TSC0056725
cacttacgtcttc

SEQ ID NO: 232637 - DNA, 13 bp, Artificial Sequence
  Oligonucleotide for detection of SNP TSC0056726
ttttagtggtaga

SEQ ID NO: 232638 - DNA, 13 bp, Artificial Sequence
  Oligonucleotide for detection of SNP TSC0056726
tctaccactaaaa

SEQ ID NO: 232639 - DNA, 13 bp, Artificial Sequence
  Oligonucleotide for detection of SNP TSC0056726
ttttagcggtaga

SEQ ID NO: 232640 - DNA, 13 bp, Artificial Sequence
  Oligonucleotide for detection of SNP TSC0056726
tctaccgctaaaa

SEQ ID NO: 232641 - DNA, 13 bp, Artificial Sequence
  Oligonucleotide for detection of SNP TSC0056726
tttgttgttggag

SEQ ID NO: 232642 - DNA, 13 bp, Artificial Sequence
  Oligonucleotide for detection of SNP TSC0056726
ctccaacaacaaa

SEQ ID NO: 232643 - DNA, 13 bp, Artificial Sequence
  Oligonucleotide for detection of SNP TSC0056726
tttgttattggag

SEQ ID NO: 232644 - DNA, 13 bp, Artificial Sequence
  Oligonucleotide for detection of SNP TSC0056726
ctccaataacaaa

SEQ ID NO: 232645 - DNA, 13 bp, Artificial Sequence
  Oligonucleotide for detection of SNP TSC0056726
tttgtcgttggag

SEQ ID NO: 232646 - DNA, 13 bp, Artificial Sequence
  Oligonucleotide for detection of SNP TSC0056726
ctccaacgacaaa

SEQ ID NO: 232647 - DNA, 13 bp, Artificial Sequence
  Oligonucleotide for detection of SNP TSC0056727
atttagggttatt

SEQ ID NO: 232648 - DNA, 13 bp, Artificial Sequence
  Oligonucleotide for detection of SNP TSC0056727
aataaccctaaat

SEQ ID NO: 232649 - DNA, 13 bp, Artificial Sequence
  Oligonucleotide for detection of SNP TSC0056732
aggtaaaatattt

SEQ ID NO: 232650 - DNA, 13 bp, Artificial Sequence
  Oligonucleotide for detection of SNP TSC0056732
aaatattttacct

SEQ ID NO: 232651 - DNA, 13 bp, Artificial Sequence
  Oligonucleotide for detection of SNP TSC0056732
aggtaatatattt

SEQ ID NO: 232652 - DNA, 13 bp, Artificial Sequence
  Oligonucleotide for detection of SNP TSC0056732
aaatatattacct

SEQ ID NO: 232653 - DNA, 13 bp, Artificial Sequence
  Oligonucleotide for detection of SNP TSC0056732
aggtattttattt

SEQ ID NO: 232654 - DNA, 13 bp, Artificial Sequence
  Oligonucleotide for detection of SNP TSC0056732
aaataaaatacct

SEQ ID NO: 232655 - DNA, 13 bp, Artificial Sequence
  Oligonucleotide for detection of SNP TSC0056732
aggtatattattt

SEQ ID NO: 232656 - DNA, 13 bp, Artificial Sequence
  Oligonucleotide for detection of SNP TSC0056732
aaataatatacct

SEQ ID NO: 232657 - DNA, 13 bp, Artificial Sequence
  Oligonucleotide for detection of SNP TSC0056733
ggttgtaagagty

SEQ ID NO: 232658 - DNA, 13 bp, Artificial Sequence
  Oligonucleotide for detection of SNP TSC0056733
ractcttacaacc

SEQ ID NO: 232659 - DNA, 13 bp, Artificial Sequence
  Oligonucleotide for detection of SNP TSC0056733
ggttgtgagagty

SEQ ID NO: 232660 - DNA, 13 bp, Artificial Sequence
  Oligonucleotide for detection of SNP TSC0056733
ractctcacaacc

SEQ ID NO: 232661 - DNA, 13 bp, Artificial Sequence
  Oligonucleotide for detection of SNP TSC0056734
gtggggtgaagga

SEQ ID NO: 232662 - DNA, 13 bp, Artificial Sequence
  Oligonucleotide for detection of SNP TSC0056734
tccttcaccccac

SEQ ID NO: 232663 - DNA, 13 bp, Artificial Sequence
  Oligonucleotide for detection of SNP TSC0056734
gtggggcgaagga

SEQ ID NO: 232664 - DNA, 13 bp, Artificial Sequence
  Oligonucleotide for detection of SNP TSC0056734
tccttcgccccac

SEQ ID NO: 232665 - DNA, 13 bp, Artificial Sequence
  Oligonucleotide for detection of SNP TSC0056735
tgggattggttta

SEQ ID NO: 232666 - DNA, 13 bp, Artificial Sequence
  Oligonucleotide for detection of SNP TSC0056735
taaaccaatccca

SEQ ID NO: 232667 - DNA, 13 bp, Artificial Sequence
  Oligonucleotide for detection of SNP TSC0056735
tgggatcggttta

SEQ ID NO: 232668 - DNA, 13 bp, Artificial Sequence
  Oligonucleotide for detection of SNP TSC0056735
taaaccgatccca

SEQ ID NO: 232669 - DNA, 13 bp, Artificial Sequence
  Oligonucleotide for detection of SNP TSC0056735
taaatcggtttta

SEQ ID NO: 232670 - DNA, 13 bp, Artificial Sequence
  Oligonucleotide for detection of SNP TSC0056735
taaaaccgattta

SEQ ID NO: 232671 - DNA, 13 bp, Artificial Sequence
  Oligonucleotide for detection of SNP TSC0056740
attaatattataa

SEQ ID NO: 232672 - DNA, 13 bp, Artificial Sequence
  Oligonucleotide for detection of SNP TSC0056740
ttataatattaat

SEQ ID NO: 232673 - DNA, 13 bp, Artificial Sequence
  Oligonucleotide for detection of SNP TSC0056740
attaatgttataa

SEQ ID NO: 232674 - DNA, 13 bp, Artificial Sequence
  Oligonucleotide for detection of SNP TSC0056740
ttataacattaat

SEQ ID NO: 232675 - DNA, 13 bp, Artificial Sequence
  Oligonucleotide for detection of SNP TSC0056741
aaagaatgtgaag

SEQ ID NO: 232676 - DNA, 13 bp, Artificial Sequence
  Oligonucleotide for detection of SNP TSC0056741
cttcacattcttt

SEQ ID NO: 232677 - DNA, 13 bp, Artificial Sequence
  Oligonucleotide for detection of SNP TSC0056741
aaagaacgtgaag

SEQ ID NO: 232678 - DNA, 13 bp, Artificial Sequence
  Oligonucleotide for detection of SNP TSC0056741
cttcacgttcttt

SEQ ID NO: 232679 - DNA, 13 bp, Artificial Sequence
  Oligonucleotide for detection of SNP TSC0056747
taagaatgaatgg

SEQ ID NO: 232680 - DNA, 13 bp, Artificial Sequence
  Oligonucleotide for detection of SNP TSC0056747
ccattcattctta

SEQ ID NO: 232681 - DNA, 13 bp, Artificial Sequence
  Oligonucleotide for detection of SNP TSC0056747
taagaacgaatgg

SEQ ID NO: 232682 - DNA, 13 bp, Artificial Sequence
  Oligonucleotide for detection of SNP TSC0056747
ccattcgttctta

SEQ ID NO: 232683 - DNA, 13 bp, Artificial Sequence
  Oligonucleotide for detection of SNP TSC0056749
tattaatgatggg

SEQ ID NO: 232684 - DNA, 13 bp, Artificial Sequence
  Oligonucleotide for detection of SNP TSC0056749
cccatcattaata

SEQ ID NO: 232685 - DNA, 13 bp, Artificial Sequence
  Oligonucleotide for detection of SNP TSC0056749
tattaacgatggg

SEQ ID NO: 232686 - DNA, 13 bp, Artificial Sequence
  Oligonucleotide for detection of SNP TSC0056749
cccatcgttaata

SEQ ID NO: 232687 - DNA, 13 bp, Artificial Sequence
  Oligonucleotide for detection of SNP TSC0056751
ttgttgggtgata

SEQ ID NO: 232688 - DNA, 13 bp, Artificial Sequence
  Oligonucleotide for detection of SNP TSC0056751
tatcacccaacaa

SEQ ID NO: 232689 - DNA, 13 bp, Artificial Sequence
  Oligonucleotide for detection of SNP TSC0056751
ttgttgagtgata

SEQ ID NO: 232690 - DNA, 13 bp, Artificial Sequence
  Oligonucleotide for detection of SNP TSC0056751
tatcactcaacaa

SEQ ID NO: 232691 - DNA, 13 bp, Artificial Sequence
  Oligonucleotide for detection of SNP TSC0056751
ttgtcgggtgata

SEQ ID NO: 232692 - DNA, 13 bp, Artificial Sequence
  Oligonucleotide for detection of SNP TSC0056751
tatcacccgacaa

SEQ ID NO: 232693 - DNA, 13 bp, Artificial Sequence
  Oligonucleotide for detection of SNP TSC0056751
ttgtcgagtgata

SEQ ID NO: 232694 - DNA, 13 bp, Artificial Sequence
  Oligonucleotide for detection of SNP TSC0056751
tatcactcgacaa

SEQ ID NO: 232695 - DNA, 13 bp, Artificial Sequence
  Oligonucleotide for detection of SNP TSC0056758
taatatatgttag

SEQ ID NO: 232696 - DNA, 13 bp, Artificial Sequence
  Oligonucleotide for detection of SNP TSC0056758
ctaacatatatta

SEQ ID NO: 232697 - DNA, 13 bp, Artificial Sequence
  Oligonucleotide for detection of SNP TSC0056758
taatatgtgttag

SEQ ID NO: 232698 - DNA, 13 bp, Artificial Sequence
  Oligonucleotide for detection of SNP TSC0056758
ctaacacatatta

SEQ ID NO: 232699 - DNA, 13 bp, Artificial Sequence
  Oligonucleotide for detection of SNP TSC0056758
taatacgtgttag

SEQ ID NO: 232700 - DNA, 13 bp, Artificial Sequence
  Oligonucleotide for detection of SNP TSC0056758
ctaacacgtatta

SEQ ID NO: 232701 - DNA, 13 bp, Artificial Sequence
  Oligonucleotide for detection of SNP TSC0056760
gataaaaaaataa

SEQ ID NO: 232702 - DNA, 13 bp, Artificial Sequence
  Oligonucleotide for detection of SNP TSC0056760
ttatttttttatc

SEQ ID NO: 232703 - DNA, 13 bp, Artificial Sequence
  Oligonucleotide for detection of SNP TSC0056760
gataaataaataa

SEQ ID NO: 232704 - DNA, 13 bp, Artificial Sequence
  Oligonucleotide for detection of SNP TSC0056760
ttatttatttatc

SEQ ID NO: 232705 - DNA, 13 bp, Artificial Sequence
  Oligonucleotide for detection of SNP TSC0056769
aaattatagttgt

SEQ ID NO: 232706 - DNA, 13 bp, Artificial Sequence
  Oligonucleotide for detection of SNP TSC0056769
acaactataattt

SEQ ID NO: 232707 - DNA, 13 bp, Artificial Sequence
  Oligonucleotide for detection of SNP TSC0056769
aaattagagttgt

SEQ ID NO: 232708 - DNA, 13 bp, Artificial Sequence
  Oligonucleotide for detection of SNP TSC0056769
acaactctaattt

SEQ ID NO: 232709 - DNA, 13 bp, Artificial Sequence
  Oligonucleotide for detection of SNP TSC0056769
ataattataattt

SEQ ID NO: 232710 - DNA, 13 bp, Artificial Sequence
  Oligonucleotide for detection of SNP TSC0056769
aaattataattat

SEQ ID NO: 232711 - DNA, 13 bp, Artificial Sequence
  Oligonucleotide for detection of SNP TSC0056769
ataattttaattt

SEQ ID NO: 232712 - DNA, 13 bp, Artificial Sequence
  Oligonucleotide for detection of SNP TSC0056769
aaattaaaattat

SEQ ID NO: 232713 - DNA, 13 bp, Artificial Sequence
  Oligonucleotide for detection of SNP TSC0056770
tgtatttaaaaag

SEQ ID NO: 232714 - DNA, 13 bp, Artificial Sequence
  Oligonucleotide for detection of SNP TSC0056770
ctttttaaataca

SEQ ID NO: 232715 - DNA, 13 bp, Artificial Sequence
  Oligonucleotide for detection of SNP TSC0056770
tgtattaaaaaag

SEQ ID NO: 232716 - DNA, 13 bp, Artificial Sequence
  Oligonucleotide for detection of SNP TSC0056770
cttttttaataca

SEQ ID NO: 232717 - DNA, 13 bp, Artificial Sequence
  Oligonucleotide for detection of SNP TSC0056771
aaaggtagtatga

SEQ ID NO: 232718 - DNA, 13 bp, Artificial Sequence
  Oligonucleotide for detection of SNP TSC0056771
tcatactaccttt

SEQ ID NO: 232719 - DNA, 13 bp, Artificial Sequence
  Oligonucleotide for detection of SNP TSC0056771
aaaggtggtatga

SEQ ID NO: 232720 - DNA, 13 bp, Artificial Sequence
  Oligonucleotide for detection of SNP TSC0056771
tcataccaccttt

SEQ ID NO: 232721 - DNA, 13 bp, Artificial Sequence
  Oligonucleotide for detection of SNP TSC0056772
atggtatgtggta

SEQ ID NO: 232722 - DNA, 13 bp, Artificial Sequence
  Oligonucleotide for detection of SNP TSC0056772
taccacataccat

SEQ ID NO: 232723 - DNA, 13 bp, Artificial Sequence
  Oligonucleotide for detection of SNP TSC0056772
atggtacgtggta

SEQ ID NO: 232724 - DNA, 13 bp, Artificial Sequence
  Oligonucleotide for detection of SNP TSC0056772
taccacgtaccat

SEQ ID NO: 232725 - DNA, 13 bp, Artificial Sequence
  Oligonucleotide for detection of SNP TSC0056773
tttataatttaag

SEQ ID NO: 232726 - DNA, 13 bp, Artificial Sequence
  Oligonucleotide for detection of SNP TSC0056773
cttaaattataaa

SEQ ID NO: 232727 - DNA, 13 bp, Artificial Sequence
  Oligonucleotide for detection of SNP TSC0056773
tttatagtttaag

SEQ ID NO: 232728 - DNA, 13 bp, Artificial Sequence
  Oligonucleotide for detection of SNP TSC0056773
cttaaactataaa

SEQ ID NO: 232729 - DNA, 13 bp, Artificial Sequence
  Oligonucleotide for detection of SNP TSC0009564
gagttaattaaay

SEQ ID NO: 232730 - DNA, 13 bp, Artificial Sequence
  Oligonucleotide for detection of SNP TSC0009564
rtttaattaactc

SEQ ID NO: 232731 - DNA, 13 bp, Artificial Sequence
  Oligonucleotide for detection of SNP TSC0009564
gagttagttaaay

SEQ ID NO: 232732 - DNA, 13 bp, Artificial Sequence
  Oligonucleotide for detection of SNP TSC0009564
rtttaactaactc

SEQ ID NO: 232733 - DNA, 13 bp, Artificial Sequence
  Oligonucleotide for detection of SNP TSC0009565
gaggaaatttatt

SEQ ID NO: 232734 - DNA, 13 bp, Artificial Sequence
  Oligonucleotide for detection of SNP TSC0009565
aataaatttcctc

SEQ ID NO: 232735 - DNA, 13 bp, Artificial Sequence
  Oligonucleotide for detection of SNP TSC0009565
gaggaattttatt

SEQ ID NO: 232736 - DNA, 13 bp, Artificial Sequence
  Oligonucleotide for detection of SNP TSC0009565
aataaaattcctc

SEQ ID NO: 232737 - DNA, 13 bp, Artificial Sequence
  Oligonucleotide for detection of SNP TSC0056776
agatttattttta

SEQ ID NO: 232738 - DNA, 13 bp, Artificial Sequence
  Oligonucleotide for detection of SNP TSC0056776
taaaaataaatct

SEQ ID NO: 232739 - DNA, 13 bp, Artificial Sequence
  Oligonucleotide for detection of SNP TSC0056776
agattcgttttta

SEQ ID NO: 232740 - DNA, 13 bp, Artificial Sequence
  Oligonucleotide for detection of SNP TSC0056776
taaaaacgaatct

SEQ ID NO: 232741 - DNA, 13 bp, Artificial Sequence
  Oligonucleotide for detection of SNP TSC0056776
tgaaaatgaattt

SEQ ID NO: 232742 - DNA, 13 bp, Artificial Sequence
  Oligonucleotide for detection of SNP TSC0056776
aaattcattttca

SEQ ID NO: 232743 - DNA, 13 bp, Artificial Sequence
  Oligonucleotide for detection of SNP TSC0056776
tgaaaacgaattt

SEQ ID NO: 232744 - DNA, 13 bp, Artificial Sequence
  Oligonucleotide for detection of SNP TSC0056776
aaattcgttttca

SEQ ID NO: 232745 - DNA, 13 bp, Artificial Sequence
  Oligonucleotide for detection of SNP TSC0056777
ttaaatgtttttg

SEQ ID NO: 232746 - DNA, 13 bp, Artificial Sequence
  Oligonucleotide for detection of SNP TSC0056777
caaaaacatttaa

SEQ ID NO: 232747 - DNA, 13 bp, Artificial Sequence
  Oligonucleotide for detection of SNP TSC0056777
ttaaatatttttg

SEQ ID NO: 232748 - DNA, 13 bp, Artificial Sequence
  Oligonucleotide for detection of SNP TSC0056777
caaaaatatttaa

SEQ ID NO: 232749 - DNA, 13 bp, Artificial Sequence
  Oligonucleotide for detection of SNP TSC0056777
ttaaatgttttcg

SEQ ID NO: 232750 - DNA, 13 bp, Artificial Sequence
  Oligonucleotide for detection of SNP TSC0056777
cgaaaacatttaa

SEQ ID NO: 232751 - DNA, 13 bp, Artificial Sequence
  Oligonucleotide for detection of SNP TSC0056777
ttaaatattttcg

SEQ ID NO: 232752 - DNA, 13 bp, Artificial Sequence
  Oligonucleotide for detection of SNP TSC0056777
cgaaaatatttaa

SEQ ID NO: 232753 - DNA, 13 bp, Artificial Sequence
  Oligonucleotide for detection of SNP TSC0056778
aatttagggagag

SEQ ID NO: 232754 - DNA, 13 bp, Artificial Sequence
  Oligonucleotide for detection of SNP TSC0056778
ctctccctaaatt

SEQ ID NO: 232755 - DNA, 13 bp, Artificial Sequence
  Oligonucleotide for detection of SNP TSC0056778
aatttaaggagag

SEQ ID NO: 232756 - DNA, 13 bp, Artificial Sequence
  Oligonucleotide for detection of SNP TSC0056778
ctctccttaaatt

SEQ ID NO: 232757 - DNA, 13 bp, Artificial Sequence
  Oligonucleotide for detection of SNP TSC0056779
agtaaagtttttt

SEQ ID NO: 232758 - DNA, 13 bp, Artificial Sequence
  Oligonucleotide for detection of SNP TSC0056779
aaaaaactttact

SEQ ID NO: 232759 - DNA, 13 bp, Artificial Sequence
  Oligonucleotide for detection of SNP TSC0056780
tagatttgtttty

SEQ ID NO: 232760 - DNA, 13 bp, Artificial Sequence
  Oligonucleotide for detection of SNP TSC0056780
raaaacaaatcta

SEQ ID NO: 232761 - DNA, 13 bp, Artificial Sequence
  Oligonucleotide for detection of SNP TSC0056780
tagattcgtttty

SEQ ID NO: 232762 - DNA, 13 bp, Artificial Sequence
  Oligonucleotide for detection of SNP TSC0056780
raaaacgaatcta

SEQ ID NO: 232763 - DNA, 13 bp, Artificial Sequence
  Oligonucleotide for detection of SNP TSC0056780
gaagatggattta

SEQ ID NO: 232764 - DNA, 13 bp, Artificial Sequence
  Oligonucleotide for detection of SNP TSC0056780
taaatccatcttc

SEQ ID NO: 232765 - DNA, 13 bp, Artificial Sequence
  Oligonucleotide for detection of SNP TSC0056780
gaagatagattta

SEQ ID NO: 232766 - DNA, 13 bp, Artificial Sequence
  Oligonucleotide for detection of SNP TSC0056780
taaatctatcttc

SEQ ID NO: 232767 - DNA, 13 bp, Artificial Sequence
  Oligonucleotide for detection of SNP TSC0056780
gaagacggattta

SEQ ID NO: 232768 - DNA, 13 bp, Artificial Sequence
  Oligonucleotide for detection of SNP TSC0056780
taaatccgtcttc

SEQ ID NO: 232769 - DNA, 13 bp, Artificial Sequence
  Oligonucleotide for detection of SNP TSC0056781
ttgttaaaaaaaa

SEQ ID NO: 232770 - DNA, 13 bp, Artificial Sequence
  Oligonucleotide for detection of SNP TSC0056781
ttttttttaacaa

SEQ ID NO: 232771 - DNA, 13 bp, Artificial Sequence
  Oligonucleotide for detection of SNP TSC0056781
ttgttagaaaaaa

SEQ ID NO: 232772 - DNA, 13 bp, Artificial Sequence
  Oligonucleotide for detection of SNP TSC0056781
ttttttctaacaa

SEQ ID NO: 232773 - DNA, 13 bp, Artificial Sequence
  Oligonucleotide for detection of SNP TSC0056782
gaagaatgatatt

SEQ ID NO: 232774 - DNA, 13 bp, Artificial Sequence
  Oligonucleotide for detection of SNP TSC0056782
aatatcattcttc

SEQ ID NO: 232775 - DNA, 13 bp, Artificial Sequence
  Oligonucleotide for detection of SNP TSC0056782
gaagaacgatatt

SEQ ID NO: 232776 - DNA, 13 bp, Artificial Sequence
  Oligonucleotide for detection of SNP TSC0056782
aatatcgttcttc

SEQ ID NO: 232777 - DNA, 13 bp, Artificial Sequence
  Oligonucleotide for detection of SNP TSC0056789
gtatatttttttt

SEQ ID NO: 232778 - DNA, 13 bp, Artificial Sequence
  Oligonucleotide for detection of SNP TSC0056789
aaaaaaaatatac

SEQ ID NO: 232779 - DNA, 13 bp, Artificial Sequence
  Oligonucleotide for detection of SNP TSC0056789
aaaaaatgtgtay

SEQ ID NO: 232780 - DNA, 13 bp, Artificial Sequence
  Oligonucleotide for detection of SNP TSC0056789
rtacacatttttt

SEQ ID NO: 232781 - DNA, 13 bp, Artificial Sequence
  Oligonucleotide for detection of SNP TSC0056789
aaaaaaagtgtay

SEQ ID NO: 232782 - DNA, 13 bp, Artificial Sequence
  Oligonucleotide for detection of SNP TSC0056789
rtacacttttttt

SEQ ID NO: 232783 - DNA, 13 bp, Artificial Sequence
  Oligonucleotide for detection of SNP TSC0056790
tgggattataggt

SEQ ID NO: 232784 - DNA, 13 bp, Artificial Sequence
  Oligonucleotide for detection of SNP TSC0056790
acctataatccca

SEQ ID NO: 232785 - DNA, 13 bp, Artificial Sequence
  Oligonucleotide for detection of SNP TSC0056790
tgggataataggt

SEQ ID NO: 232786 - DNA, 13 bp, Artificial Sequence
  Oligonucleotide for detection of SNP TSC0056790
acctattatccca

SEQ ID NO: 232787 - DNA, 13 bp, Artificial Sequence
  Oligonucleotide for detection of SNP TSC0056793
aatttaggaagag

SEQ ID NO: 232788 - DNA, 13 bp, Artificial Sequence
  Oligonucleotide for detection of SNP TSC0056793
ctcttcctaaatt

SEQ ID NO: 232789 - DNA, 13 bp, Artificial Sequence
  Oligonucleotide for detection of SNP TSC0056793
aatttaagaagag

SEQ ID NO: 232790 - DNA, 13 bp, Artificial Sequence
  Oligonucleotide for detection of SNP TSC0056793
ctcttcttaaatt

SEQ ID NO: 232791 - DNA, 13 bp, Artificial Sequence
  Oligonucleotide for detection of SNP TSC0056794
taggttataatty

SEQ ID NO: 232792 - DNA, 13 bp, Artificial Sequence
  Oligonucleotide for detection of SNP TSC0056794
raattataaccta

SEQ ID NO: 232793 - DNA, 13 bp, Artificial Sequence
  Oligonucleotide for detection of SNP TSC0056794
taggttgtaatty

SEQ ID NO: 232794 - DNA, 13 bp, Artificial Sequence
  Oligonucleotide for detection of SNP TSC0056794
raattacaaccta

SEQ ID NO: 232795 - DNA, 13 bp, Artificial Sequence
  Oligonucleotide for detection of SNP TSC0056794
taggtcgtaatty

SEQ ID NO: 232796 - DNA, 13 bp, Artificial Sequence
  Oligonucleotide for detection of SNP TSC0056794
raattacgaccta

SEQ ID NO: 232797 - DNA, 13 bp, Artificial Sequence
  Oligonucleotide for detection of SNP TSC0056794
gagttgtgatttg

SEQ ID NO: 232798 - DNA, 13 bp, Artificial Sequence
  Oligonucleotide for detection of SNP TSC0056794
caaatcacaactc

SEQ ID NO: 232799 - DNA, 13 bp, Artificial Sequence
  Oligonucleotide for detection of SNP TSC0056794
gagttgcgatttg

SEQ ID NO: 232800 - DNA, 13 bp, Artificial Sequence
  Oligonucleotide for detection of SNP TSC0056794
caaatcgcaactc

SEQ ID NO: 232801 - DNA, 13 bp, Artificial Sequence
  Oligonucleotide for detection of SNP TSC0056795
ttttaaggaatga

SEQ ID NO: 232802 - DNA, 13 bp, Artificial Sequence
  Oligonucleotide for detection of SNP TSC0056795
tcattccttaaaa

SEQ ID NO: 232803 - DNA, 13 bp, Artificial Sequence
  Oligonucleotide for detection of SNP TSC0056795
ttttaaagaatga

SEQ ID NO: 232804 - DNA, 13 bp, Artificial Sequence
  Oligonucleotide for detection of SNP TSC0056795
tcattctttaaaa

SEQ ID NO: 232805 - DNA, 13 bp, Artificial Sequence
  Oligonucleotide for detection of SNP TSC0056796
tatggaaattaaa

SEQ ID NO: 232806 - DNA, 13 bp, Artificial Sequence
  Oligonucleotide for detection of SNP TSC0056796
tttaatttccata

SEQ ID NO: 232807 - DNA, 13 bp, Artificial Sequence
  Oligonucleotide for detection of SNP TSC0056796
tatggagattaaa

SEQ ID NO: 232808 - DNA, 13 bp, Artificial Sequence
  Oligonucleotide for detection of SNP TSC0056796
tttaatctccata

SEQ ID NO: 232809 - DNA, 13 bp, Artificial Sequence
  Oligonucleotide for detection of SNP TSC0056797
ttgttttgtaata

SEQ ID NO: 232810 - DNA, 13 bp, Artificial Sequence
  Oligonucleotide for detection of SNP TSC0056797
tattacaaaacaa

SEQ ID NO: 232811 - DNA, 13 bp, Artificial Sequence
  Oligonucleotide for detection of SNP TSC0056797
ttgtttcgtaata

SEQ ID NO: 232812 - DNA, 13 bp, Artificial Sequence
  Oligonucleotide for detection of SNP TSC0056797
tattacgaaacaa

SEQ ID NO: 232813 - DNA, 13 bp, Artificial Sequence
  Oligonucleotide for detection of SNP TSC0056797
tattgtgaggtag

SEQ ID NO: 232814 - DNA, 13 bp, Artificial Sequence
  Oligonucleotide for detection of SNP TSC0056797
ctacctcacaata

SEQ ID NO: 232815 - DNA, 13 bp, Artificial Sequence
  Oligonucleotide for detection of SNP TSC0056797
tattgtaaggtag

SEQ ID NO: 232816 - DNA, 13 bp, Artificial Sequence
  Oligonucleotide for detection of SNP TSC0056797
ctaccttacaata

SEQ ID NO: 232817 - DNA, 13 bp, Artificial Sequence
  Oligonucleotide for detection of SNP TSC0056797
tattgcgaggtag

SEQ ID NO: 232818 - DNA, 13 bp, Artificial Sequence
  Oligonucleotide for detection of SNP TSC0056797
ctacctcgcaata

SEQ ID NO: 232819 - DNA, 13 bp, Artificial Sequence
  Oligonucleotide for detection of SNP TSC0056798
tatttgtggaatg

SEQ ID NO: 232820 - DNA, 13 bp, Artificial Sequence
  Oligonucleotide for detection of SNP TSC0056798
cattccacaaata

SEQ ID NO: 232821 - DNA, 13 bp, Artificial Sequence
  Oligonucleotide for detection of SNP TSC0056798
tatttggggaatg

SEQ ID NO: 232822 - DNA, 13 bp, Artificial Sequence
  Oligonucleotide for detection of SNP TSC0056798
cattccccaaata

SEQ ID NO: 232823 - DNA, 13 bp, Artificial Sequence
  Oligonucleotide for detection of SNP TSC0056799
ttatgtatgtgtt

SEQ ID NO: 232824 - DNA, 13 bp, Artificial Sequence
  Oligonucleotide for detection of SNP TSC0056799
aacacatacataa

SEQ ID NO: 232825 - DNA, 13 bp, Artificial Sequence
  Oligonucleotide for detection of SNP TSC0056799
ttatgtgtgtgtt

SEQ ID NO: 232826 - DNA, 13 bp, Artificial Sequence
  Oligonucleotide for detection of SNP TSC0056799
aacacacacataa

SEQ ID NO: 232827 - DNA, 13 bp, Artificial Sequence
  Oligonucleotide for detection of SNP TSC0056799
ttatgcgtgtgtt

SEQ ID NO: 232828 - DNA, 13 bp, Artificial Sequence
  Oligonucleotide for detection of SNP TSC0056799
aacacacgcataa

SEQ ID NO: 232829 - DNA, 13 bp, Artificial Sequence
  Oligonucleotide for detection of SNP TSC0056799
agtatatgtatag

SEQ ID NO: 232830 - DNA, 13 bp, Artificial Sequence
  Oligonucleotide for detection of SNP TSC0056799
ctatacatatact

SEQ ID NO: 232831 - DNA, 13 bp, Artificial Sequence
  Oligonucleotide for detection of SNP TSC0056799
agtatacgtatag

SEQ ID NO: 232832 - DNA, 13 bp, Artificial Sequence
  Oligonucleotide for detection of SNP TSC0056799
ctatacgtatact

SEQ ID NO: 232833 - DNA, 13 bp, Artificial Sequence
  Oligonucleotide for detection of SNP TSC0056800
ataataatgtaaa

SEQ ID NO: 232834 - DNA, 13 bp, Artificial Sequence
  Oligonucleotide for detection of SNP TSC0056800
tttacattattat

SEQ ID NO: 232835 - DNA, 13 bp, Artificial Sequence
  Oligonucleotide for detection of SNP TSC0056800
ataatagtgtaaa

SEQ ID NO: 232836 - DNA, 13 bp, Artificial Sequence
  Oligonucleotide for detection of SNP TSC0056800
tttacactattat

SEQ ID NO: 232837 - DNA, 13 bp, Artificial Sequence
  Oligonucleotide for detection of SNP TSC0056804
gtttattttttgt

SEQ ID NO: 232838 - DNA, 13 bp, Artificial Sequence
  Oligonucleotide for detection of SNP TSC0056804
acaaaaaataaac

SEQ ID NO: 232839 - DNA, 13 bp, Artificial Sequence
  Oligonucleotide for detection of SNP TSC0056804
ataaggtatgagy

SEQ ID NO: 232840 - DNA, 13 bp, Artificial Sequence
  Oligonucleotide for detection of SNP TSC0056804
rctcataccttat

SEQ ID NO: 232841 - DNA, 13 bp, Artificial Sequence
  Oligonucleotide for detection of SNP TSC0056804
ataaggaatgagy

SEQ ID NO: 232842 - DNA, 13 bp, Artificial Sequence
  Oligonucleotide for detection of SNP TSC0056804
rctcattccttat

SEQ ID NO: 232843 - DNA, 13 bp, Artificial Sequence
  Oligonucleotide for detection of SNP TSC0056806
tagtttatttgty

SEQ ID NO: 232844 - DNA, 13 bp, Artificial Sequence
  Oligonucleotide for detection of SNP TSC0056806
racaaataaacta

SEQ ID NO: 232845 - DNA, 13 bp, Artificial Sequence
  Oligonucleotide for detection of SNP TSC0056806
tagttcgtttgty

SEQ ID NO: 232846 - DNA, 13 bp, Artificial Sequence
  Oligonucleotide for detection of SNP TSC0056806
racaaacgaacta

SEQ ID NO: 232847 - DNA, 13 bp, Artificial Sequence
  Oligonucleotide for detection of SNP TSC0056806
ggtaggtggattg

SEQ ID NO: 232848 - DNA, 13 bp, Artificial Sequence
  Oligonucleotide for detection of SNP TSC0056806
caatccacctacc

SEQ ID NO: 232849 - DNA, 13 bp, Artificial Sequence
  Oligonucleotide for detection of SNP TSC0056806
ggtaggcggattg

SEQ ID NO: 232850 - DNA, 13 bp, Artificial Sequence
  Oligonucleotide for detection of SNP TSC0056806
caatccgcctacc

SEQ ID NO: 232851 - DNA, 13 bp, Artificial Sequence
  Oligonucleotide for detection of SNP TSC0056807
taggtgcgtgtta

SEQ ID NO: 232852 - DNA, 13 bp, Artificial Sequence
  Oligonucleotide for detection of SNP TSC0056807
taacacgcaccta

SEQ ID NO: 232853 - DNA, 13 bp, Artificial Sequence
  Oligonucleotide for detection of SNP TSC0056807
taggtgtgcgtta

SEQ ID NO: 232854 - DNA, 13 bp, Artificial Sequence
  Oligonucleotide for detection of SNP TSC0056807
taacgcacaccta

SEQ ID NO: 232855 - DNA, 13 bp, Artificial Sequence
  Oligonucleotide for detection of SNP TSC0056807
taggtgcgcgtta

SEQ ID NO: 232856 - DNA, 13 bp, Artificial Sequence
  Oligonucleotide for detection of SNP TSC0056807
taacgcgcaccta

SEQ ID NO: 232857 - DNA, 13 bp, Artificial Sequence
  Oligonucleotide for detection of SNP TSC0056807
tggtgtatatttg

SEQ ID NO: 232858 - DNA, 13 bp, Artificial Sequence
  Oligonucleotide for detection of SNP TSC0056807
caaatatacacca

SEQ ID NO: 232859 - DNA, 13 bp, Artificial Sequence
  Oligonucleotide for detection of SNP TSC0056807
tggcgtatatttg

SEQ ID NO: 232860 - DNA, 13 bp, Artificial Sequence
  Oligonucleotide for detection of SNP TSC0056807
caaatatacgcca

SEQ ID NO: 232861 - DNA, 13 bp, Artificial Sequence
  Oligonucleotide for detection of SNP TSC0056809
cggtttgttttta

SEQ ID NO: 232862 - DNA, 13 bp, Artificial Sequence
  Oligonucleotide for detection of SNP TSC0056809
taaaaacaaaccg

SEQ ID NO: 232863 - DNA, 13 bp, Artificial Sequence
  Oligonucleotide for detection of SNP TSC0056809
cggtttattttta

SEQ ID NO: 232864 - DNA, 13 bp, Artificial Sequence
  Oligonucleotide for detection of SNP TSC0056809
taaaaataaaccg

SEQ ID NO: 232865 - DNA, 13 bp, Artificial Sequence
  Oligonucleotide for detection of SNP TSC0056810
ttaaatattaaag

SEQ ID NO: 232866 - DNA, 13 bp, Artificial Sequence
  Oligonucleotide for detection of SNP TSC0056810
ctttaatatttaa

SEQ ID NO: 232867 - DNA, 13 bp, Artificial Sequence
  Oligonucleotide for detection of SNP TSC0056810
ttaaattttaaag

SEQ ID NO: 232868 - DNA, 13 bp, Artificial Sequence
  Oligonucleotide for detection of SNP TSC0056810
ctttaaaatttaa

SEQ ID NO: 232869 - DNA, 13 bp, Artificial Sequence
  Oligonucleotide for detection of SNP TSC0009580
ttttgggaattag

SEQ ID NO: 232870 - DNA, 13 bp, Artificial Sequence
  Oligonucleotide for detection of SNP TSC0009580
ctaattcccaaaa

SEQ ID NO: 232871 - DNA, 13 bp, Artificial Sequence
  Oligonucleotide for detection of SNP TSC0009580
ttttggaaattag

SEQ ID NO: 232872 - DNA, 13 bp, Artificial Sequence
  Oligonucleotide for detection of SNP TSC0009580
ctaatttccaaaa

SEQ ID NO: 232873 - DNA, 13 bp, Artificial Sequence
  Oligonucleotide for detection of SNP TSC0056812
aaagaatgtagag

SEQ ID NO: 232874 - DNA, 13 bp, Artificial Sequence
  Oligonucleotide for detection of SNP TSC0056812
ctctacattcttt

SEQ ID NO: 232875 - DNA, 13 bp, Artificial Sequence
  Oligonucleotide for detection of SNP TSC0056812
aaagaacgtagag

SEQ ID NO: 232876 - DNA, 13 bp, Artificial Sequence
  Oligonucleotide for detection of SNP TSC0056812
ctctacgttcttt

SEQ ID NO: 232877 - DNA, 13 bp, Artificial Sequence
  Oligonucleotide for detection of SNP TSC0056815
aggagaataagaa

SEQ ID NO: 232878 - DNA, 13 bp, Artificial Sequence
  Oligonucleotide for detection of SNP TSC0056815
ttcttattctcct

SEQ ID NO: 232879 - DNA, 13 bp, Artificial Sequence
  Oligonucleotide for detection of SNP TSC0056815
aggagagtaagaa

SEQ ID NO: 232880 - DNA, 13 bp, Artificial Sequence
  Oligonucleotide for detection of SNP TSC0056815
ttcttactctcct

SEQ ID NO: 232881 - DNA, 13 bp, Artificial Sequence
  Oligonucleotide for detection of SNP TSC0056816
aaaaaaaaatgaa

SEQ ID NO: 232882 - DNA, 13 bp, Artificial Sequence
  Oligonucleotide for detection of SNP TSC0056816
ttcattttttttt

SEQ ID NO: 232883 - DNA, 13 bp, Artificial Sequence
  Oligonucleotide for detection of SNP TSC0056816
aaaaaataatgaa

SEQ ID NO: 232884 - DNA, 13 bp, Artificial Sequence
  Oligonucleotide for detection of SNP TSC0056816
ttcattatttttt

SEQ ID NO: 232885 - DNA, 13 bp, Artificial Sequence
  Oligonucleotide for detection of SNP TSC0056817
tatataaattggy

SEQ ID NO: 232886 - DNA, 13 bp, Artificial Sequence
  Oligonucleotide for detection of SNP TSC0056817
rccaatttatata

SEQ ID NO: 232887 - DNA, 13 bp, Artificial Sequence
  Oligonucleotide for detection of SNP TSC0056817
tatatatattggy

SEQ ID NO: 232888 - DNA, 13 bp, Artificial Sequence
  Oligonucleotide for detection of SNP TSC0056817
rccaatatatata

SEQ ID NO: 232889 - DNA, 13 bp, Artificial Sequence
  Oligonucleotide for detection of SNP TSC0056817
gttaatttgtgtg

SEQ ID NO: 232890 - DNA, 13 bp, Artificial Sequence
  Oligonucleotide for detection of SNP TSC0056817
cacacaaattaac

SEQ ID NO: 232891 - DNA, 13 bp, Artificial Sequence
  Oligonucleotide for detection of SNP TSC0056817
gttaatgtgtgtg

SEQ ID NO: 232892 - DNA, 13 bp, Artificial Sequence
  Oligonucleotide for detection of SNP TSC0056817
cacacacattaac

SEQ ID NO: 232893 - DNA, 13 bp, Artificial Sequence
  Oligonucleotide for detection of SNP TSC0056819
ggatgtgtagaay

SEQ ID NO: 232894 - DNA, 13 bp, Artificial Sequence
  Oligonucleotide for detection of SNP TSC0056819
rttctacacatcc

SEQ ID NO: 232895 - DNA, 13 bp, Artificial Sequence
  Oligonucleotide for detection of SNP TSC0056819
ggatgtatagaay

SEQ ID NO: 232896 - DNA, 13 bp, Artificial Sequence
  Oligonucleotide for detection of SNP TSC0056819
rttctatacatcc

SEQ ID NO: 232897 - DNA, 13 bp, Artificial Sequence
  Oligonucleotide for detection of SNP TSC0056819
ggatgcgtagaay

SEQ ID NO: 232898 - DNA, 13 bp, Artificial Sequence
  Oligonucleotide for detection of SNP TSC0056819
rttctacgcatcc

SEQ ID NO: 232899 - DNA, 13 bp, Artificial Sequence
  Oligonucleotide for detection of SNP TSC0056821
agtttgagtgata

SEQ ID NO: 232900 - DNA, 13 bp, Artificial Sequence
  Oligonucleotide for detection of SNP TSC0056821
tatcactcaaact

SEQ ID NO: 232901 - DNA, 13 bp, Artificial Sequence
  Oligonucleotide for detection of SNP TSC0056821
agttcgagtgata

SEQ ID NO: 232902 - DNA, 13 bp, Artificial Sequence
  Oligonucleotide for detection of SNP TSC0056821
tatcactcgaact

SEQ ID NO: 232903 - DNA, 13 bp, Artificial Sequence
  Oligonucleotide for detection of SNP TSC0056821
agttcgggtgata

SEQ ID NO: 232904 - DNA, 13 bp, Artificial Sequence
  Oligonucleotide for detection of SNP TSC0056821
tatcacccgaact

SEQ ID NO: 232905 - DNA, 13 bp, Artificial Sequence
  Oligonucleotide for detection of SNP TSC0056822
gggtattagttga

SEQ ID NO: 232906 - DNA, 13 bp, Artificial Sequence
  Oligonucleotide for detection of SNP TSC0056822
tcaactaataccc

SEQ ID NO: 232907 - DNA, 13 bp, Artificial Sequence
  Oligonucleotide for detection of SNP TSC0056822
gggtatgagttga

SEQ ID NO: 232908 - DNA, 13 bp, Artificial Sequence
  Oligonucleotide for detection of SNP TSC0056822
tcaactcataccc

SEQ ID NO: 232909 - DNA, 13 bp, Artificial Sequence
  Oligonucleotide for detection of SNP TSC0056822
ttaattaatgtty

SEQ ID NO: 232910 - DNA, 13 bp, Artificial Sequence
  Oligonucleotide for detection of SNP TSC0056822
raacattaattaa

SEQ ID NO: 232911 - DNA, 13 bp, Artificial Sequence
  Oligonucleotide for detection of SNP TSC0056822
ttaatttatgtty

SEQ ID NO: 232912 - DNA, 13 bp, Artificial Sequence
  Oligonucleotide for detection of SNP TSC0056822
raacataaattaa

SEQ ID NO: 232913 - DNA, 13 bp, Artificial Sequence
  Oligonucleotide for detection of SNP TSC0056824
ttttaatgtgggy

SEQ ID NO: 232914 - DNA, 13 bp, Artificial Sequence
  Oligonucleotide for detection of SNP TSC0056824
rcccacattaaaa

SEQ ID NO: 232915 - DNA, 13 bp, Artificial Sequence
  Oligonucleotide for detection of SNP TSC0056824
ttttaacgtgggy

SEQ ID NO: 232916 - DNA, 13 bp, Artificial Sequence
  Oligonucleotide for detection of SNP TSC0056824
rcccacgttaaaa

SEQ ID NO: 232917 - DNA, 13 bp, Artificial Sequence
  Oligonucleotide for detection of SNP TSC0056824
gtttatgttaagg

SEQ ID NO: 232918 - DNA, 13 bp, Artificial Sequence
  Oligonucleotide for detection of SNP TSC0056824
ccttaacataaac

SEQ ID NO: 232919 - DNA, 13 bp, Artificial Sequence
  Oligonucleotide for detection of SNP TSC0056824
gtttatattaagg

SEQ ID NO: 232920 - DNA, 13 bp, Artificial Sequence
  Oligonucleotide for detection of SNP TSC0056824
ccttaatataaac

SEQ ID NO: 232921 - DNA, 13 bp, Artificial Sequence
  Oligonucleotide for detection of SNP TSC0056824
gtttacgttaagg

SEQ ID NO: 232922 - DNA, 13 bp, Artificial Sequence
  Oligonucleotide for detection of SNP TSC0056824
ccttaacgtaaac

SEQ ID NO: 232923 - DNA, 13 bp, Artificial Sequence
  Oligonucleotide for detection of SNP TSC0007514
aattttattttay

SEQ ID NO: 232924 - DNA, 13 bp, Artificial Sequence
  Oligonucleotide for detection of SNP TSC0007514
rtaaaataaaatt

SEQ ID NO: 232925 - DNA, 13 bp, Artificial Sequence
  Oligonucleotide for detection of SNP TSC0007514
aattttgttttay

SEQ ID NO: 232926 - DNA, 13 bp, Artificial Sequence
  Oligonucleotide for detection of SNP TSC0007514
rtaaaacaaaatt

SEQ ID NO: 232927 - DNA, 13 bp, Artificial Sequence
  Oligonucleotide for detection of SNP TSC0056837
gaatttatatagt

SEQ ID NO: 232928 - DNA, 13 bp, Artificial Sequence
  Oligonucleotide for detection of SNP TSC0056837
actatataaattc

SEQ ID NO: 232929 - DNA, 13 bp, Artificial Sequence
  Oligonucleotide for detection of SNP TSC0056837
gaatttgtatagt

SEQ ID NO: 232930 - DNA, 13 bp, Artificial Sequence
  Oligonucleotide for detection of SNP TSC0056837
actatacaaattc

SEQ ID NO: 232931 - DNA, 13 bp, Artificial Sequence
  Oligonucleotide for detection of SNP TSC0056838
tatttatggggta

SEQ ID NO: 232932 - DNA, 13 bp, Artificial Sequence
  Oligonucleotide for detection of SNP TSC0056838
taccccataaata

SEQ ID NO: 232933 - DNA, 13 bp, Artificial Sequence
  Oligonucleotide for detection of SNP TSC0056838
tatttacggggta

SEQ ID NO: 232934 - DNA, 13 bp, Artificial Sequence
  Oligonucleotide for detection of SNP TSC0056838
taccccgtaaata

SEQ ID NO: 232935 - DNA, 13 bp, Artificial Sequence
  Oligonucleotide for detection of SNP TSC0056838
tattttataagta

SEQ ID NO: 232936 - DNA, 13 bp, Artificial Sequence
  Oligonucleotide for detection of SNP TSC0056838
tacttataaaata

SEQ ID NO: 232937 - DNA, 13 bp, Artificial Sequence
  Oligonucleotide for detection of SNP TSC0056839
gaattatggtgat

SEQ ID NO: 232938 - DNA, 13 bp, Artificial Sequence
  Oligonucleotide for detection of SNP TSC0056839
atcaccataattc

SEQ ID NO: 232939 - DNA, 13 bp, Artificial Sequence
  Oligonucleotide for detection of SNP TSC0056839
gaattagggtgat

SEQ ID NO: 232940 - DNA, 13 bp, Artificial Sequence
  Oligonucleotide for detection of SNP TSC0056839
atcaccctaattc

SEQ ID NO: 232941 - DNA, 13 bp, Artificial Sequence
  Oligonucleotide for detection of SNP TSC0056839
gaattacggtgat

SEQ ID NO: 232942 - DNA, 13 bp, Artificial Sequence
  Oligonucleotide for detection of SNP TSC0056839
atcaccgtaattc

SEQ ID NO: 232943 - DNA, 13 bp, Artificial Sequence
  Oligonucleotide for detection of SNP TSC0000686
tagtaatggatta

SEQ ID NO: 232944 - DNA, 13 bp, Artificial Sequence
  Oligonucleotide for detection of SNP TSC0000686
taatccattacta

SEQ ID NO: 232945 - DNA, 13 bp, Artificial Sequence
  Oligonucleotide for detection of SNP TSC0000686
tagtaacggatta

SEQ ID NO: 232946 - DNA, 13 bp, Artificial Sequence
  Oligonucleotide for detection of SNP TSC0000686
taatccgttacta

SEQ ID NO: 232947 - DNA, 13 bp, Artificial Sequence
  Oligonucleotide for detection of SNP TSC0056840
ggttgatgttttt

SEQ ID NO: 232948 - DNA, 13 bp, Artificial Sequence
  Oligonucleotide for detection of SNP TSC0056840
aaaaacatcaacc

SEQ ID NO: 232949 - DNA, 13 bp, Artificial Sequence
  Oligonucleotide for detection of SNP TSC0056840
ggtcgatgttttt

SEQ ID NO: 232950 - DNA, 13 bp, Artificial Sequence
  Oligonucleotide for detection of SNP TSC0056840
aaaaacatcgacc

SEQ ID NO: 232951 - DNA, 13 bp, Artificial Sequence
  Oligonucleotide for detection of SNP TSC0056840
ggttgacgttttt

SEQ ID NO: 232952 - DNA, 13 bp, Artificial Sequence
  Oligonucleotide for detection of SNP TSC0056840
aaaaacgtcaacc

SEQ ID NO: 232953 - DNA, 13 bp, Artificial Sequence
  Oligonucleotide for detection of SNP TSC0056840
ggtcgacgttttt

SEQ ID NO: 232954 - DNA, 13 bp, Artificial Sequence
  Oligonucleotide for detection of SNP TSC0056840
aaaaacgtcgacc

SEQ ID NO: 232955 - DNA, 13 bp, Artificial Sequence
  Oligonucleotide for detection of SNP TSC0056840
agaaatgttggty

SEQ ID NO: 232956 - DNA, 13 bp, Artificial Sequence
  Oligonucleotide for detection of SNP TSC0056840
raccaacatttct

SEQ ID NO: 232957 - DNA, 13 bp, Artificial Sequence
  Oligonucleotide for detection of SNP TSC0056840
agaaatattggty

SEQ ID NO: 232958 - DNA, 13 bp, Artificial Sequence
  Oligonucleotide for detection of SNP TSC0056840
raccaatatttct

SEQ ID NO: 232959 - DNA, 13 bp, Artificial Sequence
  Oligonucleotide for detection of SNP TSC0056840
agaaacgttggty

SEQ ID NO: 232960 - DNA, 13 bp, Artificial Sequence
  Oligonucleotide for detection of SNP TSC0056840
raccaacgtttct

SEQ ID NO: 232961 - DNA, 13 bp, Artificial Sequence
  Oligonucleotide for detection of SNP TSC0056840
agaaatatcggty

SEQ ID NO: 232962 - DNA, 13 bp, Artificial Sequence
  Oligonucleotide for detection of SNP TSC0056840
raccgatatttct

SEQ ID NO: 232963 - DNA, 13 bp, Artificial Sequence
  Oligonucleotide for detection of SNP TSC0056840
agaaatgtcggty

SEQ ID NO: 232964 - DNA, 13 bp, Artificial Sequence
  Oligonucleotide for detection of SNP TSC0056840
raccgacatttct

SEQ ID NO: 232965 - DNA, 13 bp, Artificial Sequence
  Oligonucleotide for detection of SNP TSC0056840
agaaacgtcggty

SEQ ID NO: 232966 - DNA, 13 bp, Artificial Sequence
  Oligonucleotide for detection of SNP TSC0056840
raccgacgtttct

SEQ ID NO: 232967 - DNA, 13 bp, Artificial Sequence
  Oligonucleotide for detection of SNP TSC0056841
tatagtgtagttt

SEQ ID NO: 232968 - DNA, 13 bp, Artificial Sequence
  Oligonucleotide for detection of SNP TSC0056841
aaactacactata

SEQ ID NO: 232969 - DNA, 13 bp, Artificial Sequence
  Oligonucleotide for detection of SNP TSC0056841
tatagtatagttt

SEQ ID NO: 232970 - DNA, 13 bp, Artificial Sequence
  Oligonucleotide for detection of SNP TSC0056841
aaactatactata

SEQ ID NO: 232971 - DNA, 13 bp, Artificial Sequence
  Oligonucleotide for detection of SNP TSC0056842
aaggtaagttatt

SEQ ID NO: 232972 - DNA, 13 bp, Artificial Sequence
  Oligonucleotide for detection of SNP TSC0056842
aataacttacctt

SEQ ID NO: 232973 - DNA, 13 bp, Artificial Sequence
  Oligonucleotide for detection of SNP TSC0056842
aaggtaggttatt

SEQ ID NO: 232974 - DNA, 13 bp, Artificial Sequence
  Oligonucleotide for detection of SNP TSC0056842
aataacctacctt

SEQ ID NO: 232975 - DNA, 13 bp, Artificial Sequence
  Oligonucleotide for detection of SNP TSC0056843
agtttgtttttgt

SEQ ID NO: 232976 - DNA, 13 bp, Artificial Sequence
  Oligonucleotide for detection of SNP TSC0056843
acaaaaacaaact

SEQ ID NO: 232977 - DNA, 13 bp, Artificial Sequence
  Oligonucleotide for detection of SNP TSC0056843
agtttggttttgt

SEQ ID NO: 232978 - DNA, 13 bp, Artificial Sequence
  Oligonucleotide for detection of SNP TSC0056843
acaaaaccaaact

SEQ ID NO: 232979 - DNA, 13 bp, Artificial Sequence
  Oligonucleotide for detection of SNP TSC0056843
atagagatagatt

SEQ ID NO: 232980 - DNA, 13 bp, Artificial Sequence
  Oligonucleotide for detection of SNP TSC0056843
aatctatctctat

SEQ ID NO: 232981 - DNA, 13 bp, Artificial Sequence
  Oligonucleotide for detection of SNP TSC0056843
atagagttagatt

SEQ ID NO: 232982 - DNA, 13 bp, Artificial Sequence
  Oligonucleotide for detection of SNP TSC0056843
aatctaactctat

SEQ ID NO: 232983 - DNA, 13 bp, Artificial Sequence
  Oligonucleotide for detection of SNP TSC0056852
atagataagtgty

SEQ ID NO: 232984 - DNA, 13 bp, Artificial Sequence
  Oligonucleotide for detection of SNP TSC0056852
racacttatctat

SEQ ID NO: 232985 - DNA, 13 bp, Artificial Sequence
  Oligonucleotide for detection of SNP TSC0056852
atagatgagtgty

SEQ ID NO: 232986 - DNA, 13 bp, Artificial Sequence
  Oligonucleotide for detection of SNP TSC0056852
racactcatctat

SEQ ID NO: 232987 - DNA, 13 bp, Artificial Sequence
  Oligonucleotide for detection of SNP TSC0056852
atagataagcgty

SEQ ID NO: 232988 - DNA, 13 bp, Artificial Sequence
  Oligonucleotide for detection of SNP TSC0056852
racgcttatctat

SEQ ID NO: 232989 - DNA, 13 bp, Artificial Sequence
  Oligonucleotide for detection of SNP TSC0056852
atagacgagtgty

SEQ ID NO: 232990 - DNA, 13 bp, Artificial Sequence
  Oligonucleotide for detection of SNP TSC0056852
racactcgtctat

SEQ ID NO: 232991 - DNA, 13 bp, Artificial Sequence
  Oligonucleotide for detection of SNP TSC0056852
atagatgagcgty

SEQ ID NO: 232992 - DNA, 13 bp, Artificial Sequence
  Oligonucleotide for detection of SNP TSC0056852
racgctcatctat

SEQ ID NO: 232993 - DNA, 13 bp, Artificial Sequence
  Oligonucleotide for detection of SNP TSC0056852
atagacgagcgty

SEQ ID NO: 232994 - DNA, 13 bp, Artificial Sequence
  Oligonucleotide for detection of SNP TSC0056852
racgctcgtctat

SEQ ID NO: 232995 - DNA, 13 bp, Artificial Sequence
  Oligonucleotide for detection of SNP TSC0056852
ggtgtttgtttgt

SEQ ID NO: 232996 - DNA, 13 bp, Artificial Sequence
  Oligonucleotide for detection of SNP TSC0056852
acaaacaaacacc

SEQ ID NO: 232997 - DNA, 13 bp, Artificial Sequence
  Oligonucleotide for detection of SNP TSC0056852
ggcgtttgtttgt

SEQ ID NO: 232998 - DNA, 13 bp, Artificial Sequence
  Oligonucleotide for detection of SNP TSC0056852
acaaacaaacgcc

SEQ ID NO: 232999 - DNA, 13 bp, Artificial Sequence
  Oligonucleotide for detection of SNP TSC0056852
ggtgttcgtttgt

SEQ ID NO: 233000 - DNA, 13 bp, Artificial Sequence
  Oligonucleotide for detection of SNP TSC0056852
acaaacgaacacc

SEQ ID NO: 233001 - DNA, 13 bp, Artificial Sequence
  Oligonucleotide for detection of SNP TSC0056852
ggcgttcgtttgt

SEQ ID NO: 233002 - DNA, 13 bp, Artificial Sequence
  Oligonucleotide for detection of SNP TSC0056852
acaaacgaacgcc

SEQ ID NO: 233003 - DNA, 13 bp, Artificial Sequence
  Oligonucleotide for detection of SNP TSC0056853
gttggggttagag

SEQ ID NO: 233004 - DNA, 13 bp, Artificial Sequence
  Oligonucleotide for detection of SNP TSC0056853
ctctaaccccaac

SEQ ID NO: 233005 - DNA, 13 bp, Artificial Sequence
  Oligonucleotide for detection of SNP TSC0056853
gttgggattagag

SEQ ID NO: 233006 - DNA, 13 bp, Artificial Sequence
  Oligonucleotide for detection of SNP TSC0056853
ctctaatcccaac

SEQ ID NO: 233007 - DNA, 13 bp, Artificial Sequence
  Oligonucleotide for detection of SNP TSC0056858
tttttttataaag

SEQ ID NO: 233008 - DNA, 13 bp, Artificial Sequence
  Oligonucleotide for detection of SNP TSC0056858
ctttataaaaaaa

SEQ ID NO: 233009 - DNA, 13 bp, Artificial Sequence
  Oligonucleotide for detection of SNP TSC0056858
ttttgtgagggag

SEQ ID NO: 233010 - DNA, 13 bp, Artificial Sequence
  Oligonucleotide for detection of SNP TSC0056858
ctccctcacaaaa

SEQ ID NO: 233011 - DNA, 13 bp, Artificial Sequence
  Oligonucleotide for detection of SNP TSC0056858
ttttgttagggag

SEQ ID NO: 233012 - DNA, 13 bp, Artificial Sequence
  Oligonucleotide for detection of SNP TSC0056858
ctccctaacaaaa

SEQ ID NO: 233013 - DNA, 13 bp, Artificial Sequence
  Oligonucleotide for detection of SNP TSC0007229
taggttaggaaay

SEQ ID NO: 233014 - DNA, 13 bp, Artificial Sequence
  Oligonucleotide for detection of SNP TSC0007229
rtttcctaaccta

SEQ ID NO: 233015 - DNA, 13 bp, Artificial Sequence
  Oligonucleotide for detection of SNP TSC0007229
taggttgggaaay

SEQ ID NO: 233016 - DNA, 13 bp, Artificial Sequence
  Oligonucleotide for detection of SNP TSC0007229
rtttcccaaccta

SEQ ID NO: 233017 - DNA, 13 bp, Artificial Sequence
  Oligonucleotide for detection of SNP TSC0007229
taggtcgggaaay

SEQ ID NO: 233018 - DNA, 13 bp, Artificial Sequence
  Oligonucleotide for detection of SNP TSC0007229
rtttcccgaccta

SEQ ID NO: 233019 - DNA, 13 bp, Artificial Sequence
  Oligonucleotide for detection of SNP TSC0007229
gttttttgatttg

SEQ ID NO: 233020 - DNA, 13 bp, Artificial Sequence
  Oligonucleotide for detection of SNP TSC0007229
caaatcaaaaaac

SEQ ID NO: 233021 - DNA, 13 bp, Artificial Sequence
  Oligonucleotide for detection of SNP TSC0007229
gtttttcgatttg

SEQ ID NO: 233022 - DNA, 13 bp, Artificial Sequence
  Oligonucleotide for detection of SNP TSC0007229
caaatcgaaaaac

SEQ ID NO: 233023 - DNA, 13 bp, Artificial Sequence
  Oligonucleotide for detection of SNP TSC0056861
tttttaagaattt

SEQ ID NO: 233024 - DNA, 13 bp, Artificial Sequence
  Oligonucleotide for detection of SNP TSC0056861
aaattcttaaaaa

SEQ ID NO: 233025 - DNA, 13 bp, Artificial Sequence
  Oligonucleotide for detection of SNP TSC0056861
tttttaggaattt

SEQ ID NO: 233026 - DNA, 13 bp, Artificial Sequence
  Oligonucleotide for detection of SNP TSC0056861
aaattcctaaaaa

SEQ ID NO: 233027 - DNA, 13 bp, Artificial Sequence
  Oligonucleotide for detection of SNP TSC0056863
taaaaataagttt

SEQ ID NO: 233028 - DNA, 13 bp, Artificial Sequence
  Oligonucleotide for detection of SNP TSC0056863
aaacttattttta

SEQ ID NO: 233029 - DNA, 13 bp, Artificial Sequence
  Oligonucleotide for detection of SNP TSC0056864
gattaagaagaag

SEQ ID NO: 233030 - DNA, 13 bp, Artificial Sequence
  Oligonucleotide for detection of SNP TSC0056864
cttcttcttaatc

SEQ ID NO: 233031 - DNA, 13 bp, Artificial Sequence
  Oligonucleotide for detection of SNP TSC0056864
gattaaaaagaag

SEQ ID NO: 233032 - DNA, 13 bp, Artificial Sequence
  Oligonucleotide for detection of SNP TSC0056864
cttctttttaatc

SEQ ID NO: 233033 - DNA, 13 bp, Artificial Sequence
  Oligonucleotide for detection of SNP TSC0056865
tatttaaaatttg

SEQ ID NO: 233034 - DNA, 13 bp, Artificial Sequence
  Oligonucleotide for detection of SNP TSC0056865
caaattttaaata

SEQ ID NO: 233035 - DNA, 13 bp, Artificial Sequence
  Oligonucleotide for detection of SNP TSC0056865
tatttagaatttg

SEQ ID NO: 233036 - DNA, 13 bp, Artificial Sequence
  Oligonucleotide for detection of SNP TSC0056865
caaattctaaata

SEQ ID NO: 233037 - DNA, 13 bp, Artificial Sequence
  Oligonucleotide for detection of SNP TSC0056866
atgaagttatgaa

SEQ ID NO: 233038 - DNA, 13 bp, Artificial Sequence
  Oligonucleotide for detection of SNP TSC0056866
ttcataacttcat

SEQ ID NO: 233039 - DNA, 13 bp, Artificial Sequence
  Oligonucleotide for detection of SNP TSC0056866
atgaaggtatgaa

SEQ ID NO: 233040 - DNA, 13 bp, Artificial Sequence
  Oligonucleotide for detection of SNP TSC0056866
ttcataccttcat

SEQ ID NO: 233041 - DNA, 13 bp, Artificial Sequence
  Oligonucleotide for detection of SNP TSC0056866
tttatgattttat

SEQ ID NO: 233042 - DNA, 13 bp, Artificial Sequence
  Oligonucleotide for detection of SNP TSC0056866
ataaaatcataaa

SEQ ID NO: 233043 - DNA, 13 bp, Artificial Sequence
  Oligonucleotide for detection of SNP TSC0056867
ttaataaaaagty

SEQ ID NO: 233044 - DNA, 13 bp, Artificial Sequence
  Oligonucleotide for detection of SNP TSC0056867
ractttttattaa

SEQ ID NO: 233045 - DNA, 13 bp, Artificial Sequence
  Oligonucleotide for detection of SNP TSC0056867
ttaatagaaagty

SEQ ID NO: 233046 - DNA, 13 bp, Artificial Sequence
  Oligonucleotide for detection of SNP TSC0056867
ractttctattaa

SEQ ID NO: 233047 - DNA, 13 bp, Artificial Sequence
  Oligonucleotide for detection of SNP TSC0056868
aagtttaaaatgg

SEQ ID NO: 233048 - DNA, 13 bp, Artificial Sequence
  Oligonucleotide for detection of SNP TSC0056868
ccattttaaactt

SEQ ID NO: 233049 - DNA, 13 bp, Artificial Sequence
  Oligonucleotide for detection of SNP TSC0056868
aagtttgaaatgg

SEQ ID NO: 233050 - DNA, 13 bp, Artificial Sequence
  Oligonucleotide for detection of SNP TSC0056868
ccatttcaaactt

SEQ ID NO: 233051 - DNA, 13 bp, Artificial Sequence
  Oligonucleotide for detection of SNP TSC0056868
aagttcgaaatgg

SEQ ID NO: 233052 - DNA, 13 bp, Artificial Sequence
  Oligonucleotide for detection of SNP TSC0056868
ccatttcgaactt

SEQ ID NO: 233053 - DNA, 13 bp, Artificial Sequence
  Oligonucleotide for detection of SNP TSC0056869
ttttagtgataag

SEQ ID NO: 233054 - DNA, 13 bp, Artificial Sequence
  Oligonucleotide for detection of SNP TSC0056869
cttatcactaaaa

SEQ ID NO: 233055 - DNA, 13 bp, Artificial Sequence
  Oligonucleotide for detection of SNP TSC0056869
ttttagcgataag

SEQ ID NO: 233056 - DNA, 13 bp, Artificial Sequence
  Oligonucleotide for detection of SNP TSC0056869
cttatcgctaaaa

SEQ ID NO: 233057 - DNA, 13 bp, Artificial Sequence
  Oligonucleotide for detection of SNP TSC0056869
tttgttgttgagg

SEQ ID NO: 233058 - DNA, 13 bp, Artificial Sequence
  Oligonucleotide for detection of SNP TSC0056869
cctcaacaacaaa

SEQ ID NO: 233059 - DNA, 13 bp, Artificial Sequence
  Oligonucleotide for detection of SNP TSC0056869
tttgttattgagg

SEQ ID NO: 233060 - DNA, 13 bp, Artificial Sequence
  Oligonucleotide for detection of SNP TSC0056869
cctcaataacaaa

SEQ ID NO: 233061 - DNA, 13 bp, Artificial Sequence
  Oligonucleotide for detection of SNP TSC0056869
tttgtcgttgagg

SEQ ID NO: 233062 - DNA, 13 bp, Artificial Sequence
  Oligonucleotide for detection of SNP TSC0056869
cctcaacgacaaa

SEQ ID NO: 233063 - DNA, 13 bp, Artificial Sequence
  Oligonucleotide for detection of SNP TSC0056874
gataatgttttta

SEQ ID NO: 233064 - DNA, 13 bp, Artificial Sequence
  Oligonucleotide for detection of SNP TSC0056874
taaaaacattatc

SEQ ID NO: 233065 - DNA, 13 bp, Artificial Sequence
  Oligonucleotide for detection of SNP TSC0056874
gataatattttta

SEQ ID NO: 233066 - DNA, 13 bp, Artificial Sequence
  Oligonucleotide for detection of SNP TSC0056874
taaaaatattatc

SEQ ID NO: 233067 - DNA, 13 bp, Artificial Sequence
  Oligonucleotide for detection of SNP TSC0056875
gtataaagtaaat

SEQ ID NO: 233068 - DNA, 13 bp, Artificial Sequence
  Oligonucleotide for detection of SNP TSC0056875
atttactttatac

SEQ ID NO: 233069 - DNA, 13 bp, Artificial Sequence
  Oligonucleotide for detection of SNP TSC0056875
gtataaggtaaat

SEQ ID NO: 233070 - DNA, 13 bp, Artificial Sequence
  Oligonucleotide for detection of SNP TSC0056875
atttaccttatac

SEQ ID NO: 233071 - DNA, 13 bp, Artificial Sequence
  Oligonucleotide for detection of SNP TSC0056876
ttgagggtatttt

SEQ ID NO: 233072 - DNA, 13 bp, Artificial Sequence
  Oligonucleotide for detection of SNP TSC0056876
aaaataccctcaa

SEQ ID NO: 233073 - DNA, 13 bp, Artificial Sequence
  Oligonucleotide for detection of SNP TSC0056876
ttgaggatatttt

SEQ ID NO: 233074 - DNA, 13 bp, Artificial Sequence
  Oligonucleotide for detection of SNP TSC0056876
aaaatatcctcaa

SEQ ID NO: 233075 - DNA, 13 bp, Artificial Sequence
  Oligonucleotide for detection of SNP TSC0056877
ttaaaagtattaa

SEQ ID NO: 233076 - DNA, 13 bp, Artificial Sequence
  Oligonucleotide for detection of SNP TSC0056877
ttaatacttttaa

SEQ ID NO: 233077 - DNA, 13 bp, Artificial Sequence
  Oligonucleotide for detection of SNP TSC0056878
ttaagatgttatg

SEQ ID NO: 233078 - DNA, 13 bp, Artificial Sequence
  Oligonucleotide for detection of SNP TSC0056878
cataacatcttaa

SEQ ID NO: 233079 - DNA, 13 bp, Artificial Sequence
  Oligonucleotide for detection of SNP TSC0056878
ttaagacgttatg

SEQ ID NO: 233080 - DNA, 13 bp, Artificial Sequence
  Oligonucleotide for detection of SNP TSC0056878
cataacgtcttaa

SEQ ID NO: 233081 - DNA, 13 bp, Artificial Sequence
  Oligonucleotide for detection of SNP TSC0056878
tatgatgttttgg

SEQ ID NO: 233082 - DNA, 13 bp, Artificial Sequence
  Oligonucleotide for detection of SNP TSC0056878
ccaaaacatcata

SEQ ID NO: 233083 - DNA, 13 bp, Artificial Sequence
  Oligonucleotide for detection of SNP TSC0056878
tatgatattttgg

SEQ ID NO: 233084 - DNA, 13 bp, Artificial Sequence
  Oligonucleotide for detection of SNP TSC0056878
ccaaaatatcata

SEQ ID NO: 233085 - DNA, 13 bp, Artificial Sequence
  Oligonucleotide for detection of SNP TSC0056878
tatgacgttttgg

SEQ ID NO: 233086 - DNA, 13 bp, Artificial Sequence
  Oligonucleotide for detection of SNP TSC0056878
ccaaaacgtcata

SEQ ID NO: 233087 - DNA, 13 bp, Artificial Sequence
  Oligonucleotide for detection of SNP TSC0000942
tttttgagtttga

SEQ ID NO: 233088 - DNA, 13 bp, Artificial Sequence
  Oligonucleotide for detection of SNP TSC0000942
tcaaactcaaaaa

SEQ ID NO: 233089 - DNA, 13 bp, Artificial Sequence
  Oligonucleotide for detection of SNP TSC0000942
tttttgggtttga

SEQ ID NO: 233090 - DNA, 13 bp, Artificial Sequence
  Oligonucleotide for detection of SNP TSC0000942
tcaaacccaaaaa

SEQ ID NO: 233091 - DNA, 13 bp, Artificial Sequence
  Oligonucleotide for detection of SNP TSC0000942
tttttgagttcga

SEQ ID NO: 233092 - DNA, 13 bp, Artificial Sequence
  Oligonucleotide for detection of SNP TSC0000942
tcgaactcaaaaa

SEQ ID NO: 233093 - DNA, 13 bp, Artificial Sequence
  Oligonucleotide for detection of SNP TSC0000942
tttttgggttcga

SEQ ID NO: 233094 - DNA, 13 bp, Artificial Sequence
  Oligonucleotide for detection of SNP TSC0000942
tcgaacccaaaaa

SEQ ID NO: 233095 - DNA, 13 bp, Artificial Sequence
  Oligonucleotide for detection of SNP TSC0056879
ttaagtgtaggtt

SEQ ID NO: 233096 - DNA, 13 bp, Artificial Sequence
  Oligonucleotide for detection of SNP TSC0056879
aacctacacttaa

SEQ ID NO: 233097 - DNA, 13 bp, Artificial Sequence
  Oligonucleotide for detection of SNP TSC0056879
ttaagtataggtt

SEQ ID NO: 233098 - DNA, 13 bp, Artificial Sequence
  Oligonucleotide for detection of SNP TSC0056879
aacctatacttaa

SEQ ID NO: 233099 - DNA, 13 bp, Artificial Sequence
  Oligonucleotide for detection of SNP TSC0056879
ttaagcgtaggtt

SEQ ID NO: 233100 - DNA, 13 bp, Artificial Sequence
  Oligonucleotide for detection of SNP TSC0056879
aacctacgcttaa

SEQ ID NO: 233101 - DNA, 13 bp, Artificial Sequence
  Oligonucleotide for detection of SNP TSC0056880
gtatttatatggt

SEQ ID NO: 233102 - DNA, 13 bp, Artificial Sequence
  Oligonucleotide for detection of SNP TSC0056880
accatataaatac

SEQ ID NO: 233103 - DNA, 13 bp, Artificial Sequence
  Oligonucleotide for detection of SNP TSC0056880
gtatttttatggt

SEQ ID NO: 233104 - DNA, 13 bp, Artificial Sequence
  Oligonucleotide for detection of SNP TSC0056880
accataaaaatac

SEQ ID NO: 233105 - DNA, 13 bp, Artificial Sequence
  Oligonucleotide for detection of SNP TSC0056880
gtatttatacggt

SEQ ID NO: 233106 - DNA, 13 bp, Artificial Sequence
  Oligonucleotide for detection of SNP TSC0056880
accgtataaatac

SEQ ID NO: 233107 - DNA, 13 bp, Artificial Sequence
  Oligonucleotide for detection of SNP TSC0056880
gtatttttacggt

SEQ ID NO: 233108 - DNA, 13 bp, Artificial Sequence
  Oligonucleotide for detection of SNP TSC0056880
accgtaaaaatac

SEQ ID NO: 233109 - DNA, 13 bp, Artificial Sequence
  Oligonucleotide for detection of SNP TSC0056880
attgtataagtay

SEQ ID NO: 233110 - DNA, 13 bp, Artificial Sequence
  Oligonucleotide for detection of SNP TSC0056880
rtacttatacaat

SEQ ID NO: 233111 - DNA, 13 bp, Artificial Sequence
  Oligonucleotide for detection of SNP TSC0056880
attgtagaagtay

SEQ ID NO: 233112 - DNA, 13 bp, Artificial Sequence
  Oligonucleotide for detection of SNP TSC0056880
rtacttctacaat

SEQ ID NO: 233113 - DNA, 13 bp, Artificial Sequence
  Oligonucleotide for detection of SNP TSC0056880
atcgtataagtay

SEQ ID NO: 233114 - DNA, 13 bp, Artificial Sequence
  Oligonucleotide for detection of SNP TSC0056880
rtacttatacgat

SEQ ID NO: 233115 - DNA, 13 bp, Artificial Sequence
  Oligonucleotide for detection of SNP TSC0056880
atcgtagaagtay

SEQ ID NO: 233116 - DNA, 13 bp, Artificial Sequence
  Oligonucleotide for detection of SNP TSC0056880
rtacttctacgat

SEQ ID NO: 233117 - DNA, 13 bp, Artificial Sequence
  Oligonucleotide for detection of SNP TSC0000563
tagaagagttggg

SEQ ID NO: 233118 - DNA, 13 bp, Artificial Sequence
  Oligonucleotide for detection of SNP TSC0000563
cccaactcttcta

SEQ ID NO: 233119 - DNA, 13 bp, Artificial Sequence
  Oligonucleotide for detection of SNP TSC0000563
tagaagtgttggg

SEQ ID NO: 233120 - DNA, 13 bp, Artificial Sequence
  Oligonucleotide for detection of SNP TSC0000563
cccaacacttcta

SEQ ID NO: 233121 - DNA, 13 bp, Artificial Sequence
  Oligonucleotide for detection of SNP TSC0000563
tagaagcgttggg

SEQ ID NO: 233122 - DNA, 13 bp, Artificial Sequence
  Oligonucleotide for detection of SNP TSC0000563
cccaacgcttcta

SEQ ID NO: 233123 - DNA, 13 bp, Artificial Sequence
  Oligonucleotide for detection of SNP TSC0056884
tttaggataggta

SEQ ID NO: 233124 - DNA, 13 bp, Artificial Sequence
  Oligonucleotide for detection of SNP TSC0056884
tacctatcctaaa

SEQ ID NO: 233125 - DNA, 13 bp, Artificial Sequence
  Oligonucleotide for detection of SNP TSC0056884
tttaggttaggta

SEQ ID NO: 233126 - DNA, 13 bp, Artificial Sequence
  Oligonucleotide for detection of SNP TSC0056884
tacctaacctaaa

SEQ ID NO: 233127 - DNA, 13 bp, Artificial Sequence
  Oligonucleotide for detection of SNP TSC0056884
tttagggtaggta

SEQ ID NO: 233128 - DNA, 13 bp, Artificial Sequence
  Oligonucleotide for detection of SNP TSC0056884
tacctaccctaaa

SEQ ID NO: 233129 - DNA, 13 bp, Artificial Sequence
  Oligonucleotide for detection of SNP TSC0056884
tgtttgttttggg

SEQ ID NO: 233130 - DNA, 13 bp, Artificial Sequence
  Oligonucleotide for detection of SNP TSC0056884
cccaaaacaaaca

SEQ ID NO: 233131 - DNA, 13 bp, Artificial Sequence
  Oligonucleotide for detection of SNP TSC0056884
tgtttggtttggg

SEQ ID NO: 233132 - DNA, 13 bp, Artificial Sequence
  Oligonucleotide for detection of SNP TSC0056884
cccaaaccaaaca

SEQ ID NO: 233133 - DNA, 13 bp, Artificial Sequence
  Oligonucleotide for detection of SNP TSC0056884
tgtttgatttggg

SEQ ID NO: 233134 - DNA, 13 bp, Artificial Sequence
  Oligonucleotide for detection of SNP TSC0056884
cccaaatcaaaca

SEQ ID NO: 233135 - DNA, 13 bp, Artificial Sequence
  Oligonucleotide for detection of SNP TSC0056885
ggagtgtgatgga

SEQ ID NO: 233136 - DNA, 13 bp, Artificial Sequence
  Oligonucleotide for detection of SNP TSC0056885
tccatcacactcc

SEQ ID NO: 233137 - DNA, 13 bp, Artificial Sequence
  Oligonucleotide for detection of SNP TSC0056885
ggagtgggatgga

SEQ ID NO: 233138 - DNA, 13 bp, Artificial Sequence
  Oligonucleotide for detection of SNP TSC0056885
tccatcccactcc

SEQ ID NO: 233139 - DNA, 13 bp, Artificial Sequence
  Oligonucleotide for detection of SNP TSC0056886
gaatttggaggat

SEQ ID NO: 233140 - DNA, 13 bp, Artificial Sequence
  Oligonucleotide for detection of SNP TSC0056886
atcctccaaattc

SEQ ID NO: 233141 - DNA, 13 bp, Artificial Sequence
  Oligonucleotide for detection of SNP TSC0056886
gaatttagaggat

SEQ ID NO: 233142 - DNA, 13 bp, Artificial Sequence
  Oligonucleotide for detection of SNP TSC0056886
atcctctaaattc

SEQ ID NO: 233143 - DNA, 13 bp, Artificial Sequence
  Oligonucleotide for detection of SNP TSC0056888
gttgagataaagg

SEQ ID NO: 233144 - DNA, 13 bp, Artificial Sequence
  Oligonucleotide for detection of SNP TSC0056888
cctttatctcaac

SEQ ID NO: 233145 - DNA, 13 bp, Artificial Sequence
  Oligonucleotide for detection of SNP TSC0056888
gttgagttaaagg

SEQ ID NO: 233146 - DNA, 13 bp, Artificial Sequence
  Oligonucleotide for detection of SNP TSC0056888
cctttaactcaac

SEQ ID NO: 233147 - DNA, 13 bp, Artificial Sequence
  Oligonucleotide for detection of SNP TSC0006995
gtttaagtgttty

SEQ ID NO: 233148 - DNA, 13 bp, Artificial Sequence
  Oligonucleotide for detection of SNP TSC0006995
raaacacttaaac

SEQ ID NO: 233149 - DNA, 13 bp, Artificial Sequence
  Oligonucleotide for detection of SNP TSC0006995
gtttaaatgttty

SEQ ID NO: 233150 - DNA, 13 bp, Artificial Sequence
  Oligonucleotide for detection of SNP TSC0006995
raaacatttaaac

SEQ ID NO: 233151 - DNA, 13 bp, Artificial Sequence
  Oligonucleotide for detection of SNP TSC0056889
aatttgataaata

SEQ ID NO: 233152 - DNA, 13 bp, Artificial Sequence
  Oligonucleotide for detection of SNP TSC0056889
tatttatcaaatt

SEQ ID NO: 233153 - DNA, 13 bp, Artificial Sequence
  Oligonucleotide for detection of SNP TSC0056889
aatttgttaaata

SEQ ID NO: 233154 - DNA, 13 bp, Artificial Sequence
  Oligonucleotide for detection of SNP TSC0056889
tatttaacaaatt

SEQ ID NO: 233155 - DNA, 13 bp, Artificial Sequence
  Oligonucleotide for detection of SNP TSC0056889
tgtttattaagtt

SEQ ID NO: 233156 - DNA, 13 bp, Artificial Sequence
  Oligonucleotide for detection of SNP TSC0056889
aacttaataaaca

SEQ ID NO: 233157 - DNA, 13 bp, Artificial Sequence
  Oligonucleotide for detection of SNP TSC0056889
tgtttaataagtt

SEQ ID NO: 233158 - DNA, 13 bp, Artificial Sequence
  Oligonucleotide for detection of SNP TSC0056889
aacttattaaaca

SEQ ID NO: 233159 - DNA, 13 bp, Artificial Sequence
  Oligonucleotide for detection of SNP TSC0056890
aaatattgttata

SEQ ID NO: 233160 - DNA, 13 bp, Artificial Sequence
  Oligonucleotide for detection of SNP TSC0056890
tataacaatattt

SEQ ID NO: 233161 - DNA, 13 bp, Artificial Sequence
  Oligonucleotide for detection of SNP TSC0056890
aaatatcgttata

SEQ ID NO: 233162 - DNA, 13 bp, Artificial Sequence
  Oligonucleotide for detection of SNP TSC0056890
tataacgatattt

SEQ ID NO: 233163 - DNA, 13 bp, Artificial Sequence
  Oligonucleotide for detection of SNP TSC0056890
tatagtgatgttt

SEQ ID NO: 233164 - DNA, 13 bp, Artificial Sequence
  Oligonucleotide for detection of SNP TSC0056890
aaacatcactata

SEQ ID NO: 233165 - DNA, 13 bp, Artificial Sequence
  Oligonucleotide for detection of SNP TSC0056890
tatagtaatgttt

SEQ ID NO: 233166 - DNA, 13 bp, Artificial Sequence
  Oligonucleotide for detection of SNP TSC0056890
aaacattactata

SEQ ID NO: 233167 - DNA, 13 bp, Artificial Sequence
  Oligonucleotide for detection of SNP TSC0056890
tatagcgatgttt

SEQ ID NO: 233168 - DNA, 13 bp, Artificial Sequence
  Oligonucleotide for detection of SNP TSC0056890
aaacatcgctata

SEQ ID NO: 233169 - DNA, 13 bp, Artificial Sequence
  Oligonucleotide for detection of SNP TSC0056892
tagaagagttatg

SEQ ID NO: 233170 - DNA, 13 bp, Artificial Sequence
  Oligonucleotide for detection of SNP TSC0056892
cataactcttcta

SEQ ID NO: 233171 - DNA, 13 bp, Artificial Sequence
  Oligonucleotide for detection of SNP TSC0056892
tagaagggttatg

SEQ ID NO: 233172 - DNA, 13 bp, Artificial Sequence
  Oligonucleotide for detection of SNP TSC0056892
cataacccttcta

SEQ ID NO: 233173 - DNA, 13 bp, Artificial Sequence
  Oligonucleotide for detection of SNP TSC0009575
attttggtatgat

SEQ ID NO: 233174 - DNA, 13 bp, Artificial Sequence
  Oligonucleotide for detection of SNP TSC0009575
atcataccaaaat

SEQ ID NO: 233175 - DNA, 13 bp, Artificial Sequence
  Oligonucleotide for detection of SNP TSC0004556
agatatattggga

SEQ ID NO: 233176 - DNA, 13 bp, Artificial Sequence
  Oligonucleotide for detection of SNP TSC0004556
tcccaatatatct

SEQ ID NO: 233177 - DNA, 13 bp, Artificial Sequence
  Oligonucleotide for detection of SNP TSC0004556
agatattttggga

SEQ ID NO: 233178 - DNA, 13 bp, Artificial Sequence
  Oligonucleotide for detection of SNP TSC0004556
tcccaaaatatct

SEQ ID NO: 233179 - DNA, 13 bp, Artificial Sequence
  Oligonucleotide for detection of SNP TSC0004556
ttttaggatgttt

SEQ ID NO: 233180 - DNA, 13 bp, Artificial Sequence
  Oligonucleotide for detection of SNP TSC0004556
aaacatcctaaaa

SEQ ID NO: 233181 - DNA, 13 bp, Artificial Sequence
  Oligonucleotide for detection of SNP TSC0056895
aaggtatgttatt

SEQ ID NO: 233182 - DNA, 13 bp, Artificial Sequence
  Oligonucleotide for detection of SNP TSC0056895
aataacatacctt

SEQ ID NO: 233183 - DNA, 13 bp, Artificial Sequence
  Oligonucleotide for detection of SNP TSC0056895
aaggtacgttatt

SEQ ID NO: 233184 - DNA, 13 bp, Artificial Sequence
  Oligonucleotide for detection of SNP TSC0056895
aataacgtacctt

SEQ ID NO: 233185 - DNA, 13 bp, Artificial Sequence
  Oligonucleotide for detection of SNP TSC0056895
aatagtttatttt

SEQ ID NO: 233186 - DNA, 13 bp, Artificial Sequence
  Oligonucleotide for detection of SNP TSC0056895
aaaataaactatt

SEQ ID NO: 233187 - DNA, 13 bp, Artificial Sequence
  Oligonucleotide for detection of SNP TSC0056895
aatagtgtatttt

SEQ ID NO: 233188 - DNA, 13 bp, Artificial Sequence
  Oligonucleotide for detection of SNP TSC0056895
aaaatacactatt

SEQ ID NO: 233189 - DNA, 13 bp, Artificial Sequence
  Oligonucleotide for detection of SNP TSC0056895
aatagtatatttt

SEQ ID NO: 233190 - DNA, 13 bp, Artificial Sequence
  Oligonucleotide for detection of SNP TSC0056895
aaaatatactatt

SEQ ID NO: 233191 - DNA, 13 bp, Artificial Sequence
  Oligonucleotide for detection of SNP TSC0056895
aatagcgtatttt

SEQ ID NO: 233192 - DNA, 13 bp, Artificial Sequence
  Oligonucleotide for detection of SNP TSC0056895
aaaatacgctatt

SEQ ID NO: 233193 - DNA, 13 bp, Artificial Sequence
  Oligonucleotide for detection of SNP TSC0056896
ttttataaaaagy

SEQ ID NO: 233194 - DNA, 13 bp, Artificial Sequence
  Oligonucleotide for detection of SNP TSC0056896
rctttttataaaa

SEQ ID NO: 233195 - DNA, 13 bp, Artificial Sequence
  Oligonucleotide for detection of SNP TSC0056896
ttttattaaaagy

SEQ ID NO: 233196 - DNA, 13 bp, Artificial Sequence
  Oligonucleotide for detection of SNP TSC0056896
rcttttaataaaa

SEQ ID NO: 233197 - DNA, 13 bp, Artificial Sequence
  Oligonucleotide for detection of SNP TSC0056896
ttttatgaaaagy

SEQ ID NO: 233198 - DNA, 13 bp, Artificial Sequence
  Oligonucleotide for detection of SNP TSC0056896
rcttttcataaaa

SEQ ID NO: 233199 - DNA, 13 bp, Artificial Sequence
  Oligonucleotide for detection of SNP TSC0056896
gttttttatagga

SEQ ID NO: 233200 - DNA, 13 bp, Artificial Sequence
  Oligonucleotide for detection of SNP TSC0056896
tcctataaaaaac

SEQ ID NO: 233201 - DNA, 13 bp, Artificial Sequence
  Oligonucleotide for detection of SNP TSC0056896
gtttttgatagga

SEQ ID NO: 233202 - DNA, 13 bp, Artificial Sequence
  Oligonucleotide for detection of SNP TSC0056896
tcctatcaaaaac

SEQ ID NO: 233203 - DNA, 13 bp, Artificial Sequence
  Oligonucleotide for detection of SNP TSC0005703
gttatgatttttt

SEQ ID NO: 233204 - DNA, 13 bp, Artificial Sequence
  Oligonucleotide for detection of SNP TSC0005703
aaaaaatcataac

SEQ ID NO: 233205 - DNA, 13 bp, Artificial Sequence
  Oligonucleotide for detection of SNP TSC0005703
gttatggtttttt

SEQ ID NO: 233206 - DNA, 13 bp, Artificial Sequence
  Oligonucleotide for detection of SNP TSC0005703
aaaaaaccataac

SEQ ID NO: 233207 - DNA, 13 bp, Artificial Sequence
  Oligonucleotide for detection of SNP TSC0005703
gttacgatttttt

SEQ ID NO: 233208 - DNA, 13 bp, Artificial Sequence
  Oligonucleotide for detection of SNP TSC0005703
aaaaaatcgtaac

SEQ ID NO: 233209 - DNA, 13 bp, Artificial Sequence
  Oligonucleotide for detection of SNP TSC0005703
gttacggtttttt

SEQ ID NO: 233210 - DNA, 13 bp, Artificial Sequence
  Oligonucleotide for detection of SNP TSC0005703
aaaaaaccgtaac

SEQ ID NO: 233211 - DNA, 13 bp, Artificial Sequence
  Oligonucleotide for detection of SNP TSC0056897
taggtttggggag

SEQ ID NO: 233212 - DNA, 13 bp, Artificial Sequence
  Oligonucleotide for detection of SNP TSC0056897
ctccccaaaccta

SEQ ID NO: 233213 - DNA, 13 bp, Artificial Sequence
  Oligonucleotide for detection of SNP TSC0056897
taggttgggggag

SEQ ID NO: 233214 - DNA, 13 bp, Artificial Sequence
  Oligonucleotide for detection of SNP TSC0056897
ctcccccaaccta

SEQ ID NO: 233215 - DNA, 13 bp, Artificial Sequence
  Oligonucleotide for detection of SNP TSC0056897
taggttcggggag

SEQ ID NO: 233216 - DNA, 13 bp, Artificial Sequence
  Oligonucleotide for detection of SNP TSC0056897
ctccccgaaccta

SEQ ID NO: 233217 - DNA, 13 bp, Artificial Sequence
  Oligonucleotide for detection of SNP TSC0056897
taggtcgggggag

SEQ ID NO: 233218 - DNA, 13 bp, Artificial Sequence
  Oligonucleotide for detection of SNP TSC0056897
ctcccccgaccta

SEQ ID NO: 233219 - DNA, 13 bp, Artificial Sequence
  Oligonucleotide for detection of SNP TSC0056898
ttgtatatttgty

SEQ ID NO: 233220 - DNA, 13 bp, Artificial Sequence
  Oligonucleotide for detection of SNP TSC0056898
racaaatatacaa

SEQ ID NO: 233221 - DNA, 13 bp, Artificial Sequence
  Oligonucleotide for detection of SNP TSC0056898
ttgtatttttgty

SEQ ID NO: 233222 - DNA, 13 bp, Artificial Sequence
  Oligonucleotide for detection of SNP TSC0056898
racaaaaatacaa

SEQ ID NO: 233223 - DNA, 13 bp, Artificial Sequence
  Oligonucleotide for detection of SNP TSC0056898
ggtaggtgtgtag

SEQ ID NO: 233224 - DNA, 13 bp, Artificial Sequence
  Oligonucleotide for detection of SNP TSC0056898
ctacacacctacc

SEQ ID NO: 233225 - DNA, 13 bp, Artificial Sequence
  Oligonucleotide for detection of SNP TSC0056898
ggtaggagtgtag

SEQ ID NO: 233226 - DNA, 13 bp, Artificial Sequence
  Oligonucleotide for detection of SNP TSC0056898
ctacactcctacc

SEQ ID NO: 233227 - DNA, 13 bp, Artificial Sequence
  Oligonucleotide for detection of SNP TSC0056899
tattataattgtg

SEQ ID NO: 233228 - DNA, 13 bp, Artificial Sequence
  Oligonucleotide for detection of SNP TSC0056899
cacaattataata

SEQ ID NO: 233229 - DNA, 13 bp, Artificial Sequence
  Oligonucleotide for detection of SNP TSC0056899
tattatgattgtg

SEQ ID NO: 233230 - DNA, 13 bp, Artificial Sequence
  Oligonucleotide for detection of SNP TSC0056899
cacaatcataata

SEQ ID NO: 233231 - DNA, 13 bp, Artificial Sequence
  Oligonucleotide for detection of SNP TSC0056899
tattacgattgtg

SEQ ID NO: 233232 - DNA, 13 bp, Artificial Sequence
  Oligonucleotide for detection of SNP TSC0056899
cacaatcgtaata

SEQ ID NO: 233233 - DNA, 13 bp, Artificial Sequence
  Oligonucleotide for detection of SNP TSC0056899
tataattgtggtg

SEQ ID NO: 233234 - DNA, 13 bp, Artificial Sequence
  Oligonucleotide for detection of SNP TSC0056899
caccacaattata

SEQ ID NO: 233235 - DNA, 13 bp, Artificial Sequence
  Oligonucleotide for detection of SNP TSC0056899
tataatcgtggtg

SEQ ID NO: 233236 - DNA, 13 bp, Artificial Sequence
  Oligonucleotide for detection of SNP TSC0056899
caccacgattata

SEQ ID NO: 233237 - DNA, 13 bp, Artificial Sequence
  Oligonucleotide for detection of SNP TSC0009946
ttttggaattttg

SEQ ID NO: 233238 - DNA, 13 bp, Artificial Sequence
  Oligonucleotide for detection of SNP TSC0009946
caaaattccaaaa

SEQ ID NO: 233239 - DNA, 13 bp, Artificial Sequence
  Oligonucleotide for detection of SNP TSC0009946
ttttgggattttg

SEQ ID NO: 233240 - DNA, 13 bp, Artificial Sequence
  Oligonucleotide for detection of SNP TSC0009946
caaaatcccaaaa

SEQ ID NO: 233241 - DNA, 13 bp, Artificial Sequence
  Oligonucleotide for detection of SNP TSC0056901
atattaaaattaa

SEQ ID NO: 233242 - DNA, 13 bp, Artificial Sequence
  Oligonucleotide for detection of SNP TSC0056901
ttaattttaatat

SEQ ID NO: 233243 - DNA, 13 bp, Artificial Sequence
  Oligonucleotide for detection of SNP TSC0056901
atattataattaa

SEQ ID NO: 233244 - DNA, 13 bp, Artificial Sequence
  Oligonucleotide for detection of SNP TSC0056901
ttaattataatat

SEQ ID NO: 233245 - DNA, 13 bp, Artificial Sequence
  Oligonucleotide for detection of SNP TSC0056901
ttaattgtgatat

SEQ ID NO: 233246 - DNA, 13 bp, Artificial Sequence
  Oligonucleotide for detection of SNP TSC0056901
atatcacaattaa

SEQ ID NO: 233247 - DNA, 13 bp, Artificial Sequence
  Oligonucleotide for detection of SNP TSC0056903
ttttatataagag

SEQ ID NO: 233248 - DNA, 13 bp, Artificial Sequence
  Oligonucleotide for detection of SNP TSC0056903
ctcttatataaaa

SEQ ID NO: 233249 - DNA, 13 bp, Artificial Sequence
  Oligonucleotide for detection of SNP TSC0056903
ttttatgtaagag

SEQ ID NO: 233250 - DNA, 13 bp, Artificial Sequence
  Oligonucleotide for detection of SNP TSC0056903
ctcttacataaaa

SEQ ID NO: 233251 - DNA, 13 bp, Artificial Sequence
  Oligonucleotide for detection of SNP TSC0056904
tagtataaggtta

SEQ ID NO: 233252 - DNA, 13 bp, Artificial Sequence
  Oligonucleotide for detection of SNP TSC0056904
taaccttatacta

SEQ ID NO: 233253 - DNA, 13 bp, Artificial Sequence
  Oligonucleotide for detection of SNP TSC0056904
tagtatgaggtta

SEQ ID NO: 233254 - DNA, 13 bp, Artificial Sequence
  Oligonucleotide for detection of SNP TSC0056904
taacctcatacta

SEQ ID NO: 233255 - DNA, 13 bp, Artificial Sequence
  Oligonucleotide for detection of SNP TSC0005433
tgggatgtagaty

SEQ ID NO: 233256 - DNA, 13 bp, Artificial Sequence
  Oligonucleotide for detection of SNP TSC0005433
ratctacatccca

SEQ ID NO: 233257 - DNA, 13 bp, Artificial Sequence
  Oligonucleotide for detection of SNP TSC0005433
tgggatatagaty

SEQ ID NO: 233258 - DNA, 13 bp, Artificial Sequence
  Oligonucleotide for detection of SNP TSC0005433
ratctatatccca

SEQ ID NO: 233259 - DNA, 13 bp, Artificial Sequence
  Oligonucleotide for detection of SNP TSC0056905
tattgtagtttat

SEQ ID NO: 233260 - DNA, 13 bp, Artificial Sequence
  Oligonucleotide for detection of SNP TSC0056905
ataaactacaata

SEQ ID NO: 233261 - DNA, 13 bp, Artificial Sequence
  Oligonucleotide for detection of SNP TSC0056905
tattgtggtttat

SEQ ID NO: 233262 - DNA, 13 bp, Artificial Sequence
  Oligonucleotide for detection of SNP TSC0056905
ataaaccacaata

SEQ ID NO: 233263 - DNA, 13 bp, Artificial Sequence
  Oligonucleotide for detection of SNP TSC0007451
agatagatttggt

SEQ ID NO: 233264 - DNA, 13 bp, Artificial Sequence
  Oligonucleotide for detection of SNP TSC0007451
accaaatctatct

SEQ ID NO: 233265 - DNA, 13 bp, Artificial Sequence
  Oligonucleotide for detection of SNP TSC0007451
agataggtttggt

SEQ ID NO: 233266 - DNA, 13 bp, Artificial Sequence
  Oligonucleotide for detection of SNP TSC0007451
accaaacctatct

SEQ ID NO: 233267 - DNA, 13 bp, Artificial Sequence
  Oligonucleotide for detection of SNP TSC0007452
ttaaatgtgaaag

SEQ ID NO: 233268 - DNA, 13 bp, Artificial Sequence
  Oligonucleotide for detection of SNP TSC0007452
ctttcacatttaa

SEQ ID NO: 233269 - DNA, 13 bp, Artificial Sequence
  Oligonucleotide for detection of SNP TSC0007452
ttaaatatgaaag

SEQ ID NO: 233270 - DNA, 13 bp, Artificial Sequence
  Oligonucleotide for detection of SNP TSC0007452
ctttcatatttaa

SEQ ID NO: 233271 - DNA, 13 bp, Artificial Sequence
  Oligonucleotide for detection of SNP TSC0056909
ggtattaatgtta

SEQ ID NO: 233272 - DNA, 13 bp, Artificial Sequence
  Oligonucleotide for detection of SNP TSC0056909
taacattaatacc

SEQ ID NO: 233273 - DNA, 13 bp, Artificial Sequence
  Oligonucleotide for detection of SNP TSC0056909
ggtattgatgtta

SEQ ID NO: 233274 - DNA, 13 bp, Artificial Sequence
  Oligonucleotide for detection of SNP TSC0056909
taacatcaatacc

SEQ ID NO: 233275 - DNA, 13 bp, Artificial Sequence
  Oligonucleotide for detection of SNP TSC0056909
ggtatcgatgtta

SEQ ID NO: 233276 - DNA, 13 bp, Artificial Sequence
  Oligonucleotide for detection of SNP TSC0056909
taacatcgatacc

SEQ ID NO: 233277 - DNA, 13 bp, Artificial Sequence
  Oligonucleotide for detection of SNP TSC0007943
ttttggtgaggtt

SEQ ID NO: 233278 - DNA, 13 bp, Artificial Sequence
  Oligonucleotide for detection of SNP TSC0007943
aacctcaccaaaa

SEQ ID NO: 233279 - DNA, 13 bp, Artificial Sequence
  Oligonucleotide for detection of SNP TSC0007943
ttttggcgaggtt

SEQ ID NO: 233280 - DNA, 13 bp, Artificial Sequence
  Oligonucleotide for detection of SNP TSC0007943
aacctcgccaaaa

SEQ ID NO: 233281 - DNA, 13 bp, Artificial Sequence
  Oligonucleotide for detection of SNP TSC0007943
agttttgttaggg

SEQ ID NO: 233282 - DNA, 13 bp, Artificial Sequence
  Oligonucleotide for detection of SNP TSC0007943
ccctaacaaaact

SEQ ID NO: 233283 - DNA, 13 bp, Artificial Sequence
  Oligonucleotide for detection of SNP TSC0007943
agttttattaggg

SEQ ID NO: 233284 - DNA, 13 bp, Artificial Sequence
  Oligonucleotide for detection of SNP TSC0007943
ccctaataaaact

SEQ ID NO: 233285 - DNA, 13 bp, Artificial Sequence
  Oligonucleotide for detection of SNP TSC0007943
agtttcgttaggg

SEQ ID NO: 233286 - DNA, 13 bp, Artificial Sequence
  Oligonucleotide for detection of SNP TSC0007943
ccctaacgaaact

SEQ ID NO: 233287 - DNA, 13 bp, Artificial Sequence
  Oligonucleotide for detection of SNP TSC0007944
ttttaaaatagtt

SEQ ID NO: 233288 - DNA, 13 bp, Artificial Sequence
  Oligonucleotide for detection of SNP TSC0007944
aactattttaaaa

SEQ ID NO: 233289 - DNA, 13 bp, Artificial Sequence
  Oligonucleotide for detection of SNP TSC0007944
ttttaagatagtt

SEQ ID NO: 233290 - DNA, 13 bp, Artificial Sequence
  Oligonucleotide for detection of SNP TSC0007944
aactatcttaaaa

SEQ ID NO: 233291 - DNA, 13 bp, Artificial Sequence
  Oligonucleotide for detection of SNP TSC0006073
gggatgaagttaa

SEQ ID NO: 233292 - DNA, 13 bp, Artificial Sequence
  Oligonucleotide for detection of SNP TSC0006073
ttaacttcatccc

SEQ ID NO: 233293 - DNA, 13 bp, Artificial Sequence
  Oligonucleotide for detection of SNP TSC0006073
gggatgtagttaa

SEQ ID NO: 233294 - DNA, 13 bp, Artificial Sequence
  Oligonucleotide for detection of SNP TSC0006073
ttaactacatccc

SEQ ID NO: 233295 - DNA, 13 bp, Artificial Sequence
  Oligonucleotide for detection of SNP TSC0056910
agtaagtgtaaaa

SEQ ID NO: 233296 - DNA, 13 bp, Artificial Sequence
  Oligonucleotide for detection of SNP TSC0056910
ttttacacttact

SEQ ID NO: 233297 - DNA, 13 bp, Artificial Sequence
  Oligonucleotide for detection of SNP TSC0056910
agtaagggtaaaa

SEQ ID NO: 233298 - DNA, 13 bp, Artificial Sequence
  Oligonucleotide for detection of SNP TSC0056910
ttttacccttact

SEQ ID NO: 233299 - DNA, 13 bp, Artificial Sequence
  Oligonucleotide for detection of SNP TSC0056911
gaaaaggtataty

SEQ ID NO: 233300 - DNA, 13 bp, Artificial Sequence
  Oligonucleotide for detection of SNP TSC0056911
ratataccttttc

SEQ ID NO: 233301 - DNA, 13 bp, Artificial Sequence
  Oligonucleotide for detection of SNP TSC0056911
gaaaagatataty

SEQ ID NO: 233302 - DNA, 13 bp, Artificial Sequence
  Oligonucleotide for detection of SNP TSC0056911
ratatatcttttc

SEQ ID NO: 233303 - DNA, 13 bp, Artificial Sequence
  Oligonucleotide for detection of SNP TSC0056912
aatagaattatta

SEQ ID NO: 233304 - DNA, 13 bp, Artificial Sequence
  Oligonucleotide for detection of SNP TSC0056912
taataattctatt

SEQ ID NO: 233305 - DNA, 13 bp, Artificial Sequence
  Oligonucleotide for detection of SNP TSC0056912
aatagagttatta

SEQ ID NO: 233306 - DNA, 13 bp, Artificial Sequence
  Oligonucleotide for detection of SNP TSC0056912
taataactctatt

SEQ ID NO: 233307 - DNA, 13 bp, Artificial Sequence
  Oligonucleotide for detection of SNP TSC0056913
gtttattgtttag

SEQ ID NO: 233308 - DNA, 13 bp, Artificial Sequence
  Oligonucleotide for detection of SNP TSC0056913
ctaaacaataaac

SEQ ID NO: 233309 - DNA, 13 bp, Artificial Sequence
  Oligonucleotide for detection of SNP TSC0056913
gtttatggtttag

SEQ ID NO: 233310 - DNA, 13 bp, Artificial Sequence
  Oligonucleotide for detection of SNP TSC0056913
ctaaaccataaac

SEQ ID NO: 233311 - DNA, 13 bp, Artificial Sequence
  Oligonucleotide for detection of SNP TSC0056913
ttaagtaataaay

SEQ ID NO: 233312 - DNA, 13 bp, Artificial Sequence
  Oligonucleotide for detection of SNP TSC0056913
rtttattacttaa

SEQ ID NO: 233313 - DNA, 13 bp, Artificial Sequence
  Oligonucleotide for detection of SNP TSC0056913
ttaagttataaay

SEQ ID NO: 233314 - DNA, 13 bp, Artificial Sequence
  Oligonucleotide for detection of SNP TSC0056913
rtttataacttaa

SEQ ID NO: 233315 - DNA, 13 bp, Artificial Sequence
  Oligonucleotide for detection of SNP TSC0056914
taaatagagataa

SEQ ID NO: 233316 - DNA, 13 bp, Artificial Sequence
  Oligonucleotide for detection of SNP TSC0056914
ttatctctattta

SEQ ID NO: 233317 - DNA, 13 bp, Artificial Sequence
  Oligonucleotide for detection of SNP TSC0056914
taaataaagataa

SEQ ID NO: 233318 - DNA, 13 bp, Artificial Sequence
  Oligonucleotide for detection of SNP TSC0056914
ttatctttattta

SEQ ID NO: 233319 - DNA, 13 bp, Artificial Sequence
  Oligonucleotide for detection of SNP TSC0056919
aatatatgtaatt

SEQ ID NO: 233320 - DNA, 13 bp, Artificial Sequence
  Oligonucleotide for detection of SNP TSC0056919
aattacatatatt

SEQ ID NO: 233321 - DNA, 13 bp, Artificial Sequence
  Oligonucleotide for detection of SNP TSC0056919
aatatacgtaatt

SEQ ID NO: 233322 - DNA, 13 bp, Artificial Sequence
  Oligonucleotide for detection of SNP TSC0056919
aattacgtatatt

SEQ ID NO: 233323 - DNA, 13 bp, Artificial Sequence
  Oligonucleotide for detection of SNP TSC0056919
agttgtgtgtatt

SEQ ID NO: 233324 - DNA, 13 bp, Artificial Sequence
  Oligonucleotide for detection of SNP TSC0056919
aatacacacaact

SEQ ID NO: 233325 - DNA, 13 bp, Artificial Sequence
  Oligonucleotide for detection of SNP TSC0056919
agttgtatgtatt

SEQ ID NO: 233326 - DNA, 13 bp, Artificial Sequence
  Oligonucleotide for detection of SNP TSC0056919
aatacatacaact

SEQ ID NO: 233327 - DNA, 13 bp, Artificial Sequence
  Oligonucleotide for detection of SNP TSC0056919
agttgcgtgtatt

SEQ ID NO: 233328 - DNA, 13 bp, Artificial Sequence
  Oligonucleotide for detection of SNP TSC0056919
aatacacgcaact

SEQ ID NO: 233329 - DNA, 13 bp, Artificial Sequence
  Oligonucleotide for detection of SNP TSC0006338
taagatgaaggaa

SEQ ID NO: 233330 - DNA, 13 bp, Artificial Sequence
  Oligonucleotide for detection of SNP TSC0006338
ttccttcatctta

SEQ ID NO: 233331 - DNA, 13 bp, Artificial Sequence
  Oligonucleotide for detection of SNP TSC0006338
taagataaaggaa

SEQ ID NO: 233332 - DNA, 13 bp, Artificial Sequence
  Oligonucleotide for detection of SNP TSC0006338
ttcctttatctta

SEQ ID NO: 233333 - DNA, 13 bp, Artificial Sequence
  Oligonucleotide for detection of SNP TSC0006338
taagacgaaggaa

SEQ ID NO: 233334 - DNA, 13 bp, Artificial Sequence
  Oligonucleotide for detection of SNP TSC0006338
ttccttcgtctta

SEQ ID NO: 233335 - DNA, 13 bp, Artificial Sequence
  Oligonucleotide for detection of SNP TSC0056921
gagagatgaagtg

SEQ ID NO: 233336 - DNA, 13 bp, Artificial Sequence
  Oligonucleotide for detection of SNP TSC0056921
cacttcatctctc

SEQ ID NO: 233337 - DNA, 13 bp, Artificial Sequence
  Oligonucleotide for detection of SNP TSC0056921
gagagaggaagtg

SEQ ID NO: 233338 - DNA, 13 bp, Artificial Sequence
  Oligonucleotide for detection of SNP TSC0056921
cacttcctctctc

SEQ ID NO: 233339 - DNA, 13 bp, Artificial Sequence
  Oligonucleotide for detection of SNP TSC0056922
ttatttattgttt

SEQ ID NO: 233340 - DNA, 13 bp, Artificial Sequence
  Oligonucleotide for detection of SNP TSC0056922
aaacaataaataa

SEQ ID NO: 233341 - DNA, 13 bp, Artificial Sequence
  Oligonucleotide for detection of SNP TSC0056922
ttatttgtcgttt

SEQ ID NO: 233342 - DNA, 13 bp, Artificial Sequence
  Oligonucleotide for detection of SNP TSC0056922
aaacgacaaataa

SEQ ID NO: 233343 - DNA, 13 bp, Artificial Sequence
  Oligonucleotide for detection of SNP TSC0056922
ttatttatcgttt

SEQ ID NO: 233344 - DNA, 13 bp, Artificial Sequence
  Oligonucleotide for detection of SNP TSC0056922
aaacgataaataa

SEQ ID NO: 233345 - DNA, 13 bp, Artificial Sequence
  Oligonucleotide for detection of SNP TSC0056924
ttaagatgtaatt

SEQ ID NO: 233346 - DNA, 13 bp, Artificial Sequence
  Oligonucleotide for detection of SNP TSC0056924
aattacatcttaa

SEQ ID NO: 233347 - DNA, 13 bp, Artificial Sequence
  Oligonucleotide for detection of SNP TSC0056924
ttaagacgtaatt

SEQ ID NO: 233348 - DNA, 13 bp, Artificial Sequence
  Oligonucleotide for detection of SNP TSC0056924
aattacgtcttaa

SEQ ID NO: 233349 - DNA, 13 bp, Artificial Sequence
  Oligonucleotide for detection of SNP TSC0056924
agttgtgttttga

SEQ ID NO: 233350 - DNA, 13 bp, Artificial Sequence
  Oligonucleotide for detection of SNP TSC0056924
tcaaaacacaact

SEQ ID NO: 233351 - DNA, 13 bp, Artificial Sequence
  Oligonucleotide for detection of SNP TSC0056924
agttgtattttga

SEQ ID NO: 233352 - DNA, 13 bp, Artificial Sequence
  Oligonucleotide for detection of SNP TSC0056924
tcaaaatacaact

SEQ ID NO: 233353 - DNA, 13 bp, Artificial Sequence
  Oligonucleotide for detection of SNP TSC0056924
agttgcgttttga

SEQ ID NO: 233354 - DNA, 13 bp, Artificial Sequence
  Oligonucleotide for detection of SNP TSC0056924
tcaaaacgcaact

SEQ ID NO: 233355 - DNA, 13 bp, Artificial Sequence
  Oligonucleotide for detection of SNP TSC0056928
tatttagtagatg

SEQ ID NO: 233356 - DNA, 13 bp, Artificial Sequence
  Oligonucleotide for detection of SNP TSC0056928
catctactaaata

SEQ ID NO: 233357 - DNA, 13 bp, Artificial Sequence
  Oligonucleotide for detection of SNP TSC0056928
tatttaatagatg

SEQ ID NO: 233358 - DNA, 13 bp, Artificial Sequence
  Oligonucleotide for detection of SNP TSC0056928
catctattaaata

SEQ ID NO: 233359 - DNA, 13 bp, Artificial Sequence
  Oligonucleotide for detection of SNP TSC0056930
gatggaatttttt

SEQ ID NO: 233360 - DNA, 13 bp, Artificial Sequence
  Oligonucleotide for detection of SNP TSC0056930
aaaaaattccatc

SEQ ID NO: 233361 - DNA, 13 bp, Artificial Sequence
  Oligonucleotide for detection of SNP TSC0056930
gatggattttttt

SEQ ID NO: 233362 - DNA, 13 bp, Artificial Sequence
  Oligonucleotide for detection of SNP TSC0056930
aaaaaaatccatc

SEQ ID NO: 233363 - DNA, 13 bp, Artificial Sequence
  Oligonucleotide for detection of SNP TSC0056931
gtttggtgggagg

SEQ ID NO: 233364 - DNA, 13 bp, Artificial Sequence
  Oligonucleotide for detection of SNP TSC0056931
cctcccaccaaac

SEQ ID NO: 233365 - DNA, 13 bp, Artificial Sequence
  Oligonucleotide for detection of SNP TSC0056931
gtttggcgggagg

SEQ ID NO: 233366 - DNA, 13 bp, Artificial Sequence
  Oligonucleotide for detection of SNP TSC0056931
cctcccgccaaac

SEQ ID NO: 233367 - DNA, 13 bp, Artificial Sequence
  Oligonucleotide for detection of SNP TSC0056935
tagaatattaagy

SEQ ID NO: 233368 - DNA, 13 bp, Artificial Sequence
  Oligonucleotide for detection of SNP TSC0056935
rcttaatattcta

SEQ ID NO: 233369 - DNA, 13 bp, Artificial Sequence
  Oligonucleotide for detection of SNP TSC0056935
tagaattttaagy

SEQ ID NO: 233370 - DNA, 13 bp, Artificial Sequence
  Oligonucleotide for detection of SNP TSC0056935
rcttaaaattcta

SEQ ID NO: 233371 - DNA, 13 bp, Artificial Sequence
  Oligonucleotide for detection of SNP TSC0056935
gtttggtgtttta

SEQ ID NO: 233372 - DNA, 13 bp, Artificial Sequence
  Oligonucleotide for detection of SNP TSC0056935
taaaacaccaaac

SEQ ID NO: 233373 - DNA, 13 bp, Artificial Sequence
  Oligonucleotide for detection of SNP TSC0056935
gtttggggtttta

SEQ ID NO: 233374 - DNA, 13 bp, Artificial Sequence
  Oligonucleotide for detection of SNP TSC0056935
taaaaccccaaac

SEQ ID NO: 233375 - DNA, 13 bp, Artificial Sequence
  Oligonucleotide for detection of SNP TSC0056936
ttgttggttttgt

SEQ ID NO: 233376 - DNA, 13 bp, Artificial Sequence
  Oligonucleotide for detection of SNP TSC0056936
acaaaaccaacaa

SEQ ID NO: 233377 - DNA, 13 bp, Artificial Sequence
  Oligonucleotide for detection of SNP TSC0056936
ttgttgtttttgt

SEQ ID NO: 233378 - DNA, 13 bp, Artificial Sequence
  Oligonucleotide for detection of SNP TSC0056936
acaaaaacaacaa

SEQ ID NO: 233379 - DNA, 13 bp, Artificial Sequence
  Oligonucleotide for detection of SNP TSC0056937
gatattgaaaaaa

SEQ ID NO: 233380 - DNA, 13 bp, Artificial Sequence
  Oligonucleotide for detection of SNP TSC0056937
ttttttcaatatc

SEQ ID NO: 233381 - DNA, 13 bp, Artificial Sequence
  Oligonucleotide for detection of SNP TSC0056937
gatattaaaaaaa

SEQ ID NO: 233382 - DNA, 13 bp, Artificial Sequence
  Oligonucleotide for detection of SNP TSC0056937
tttttttaatatc

SEQ ID NO: 233383 - DNA, 13 bp, Artificial Sequence
  Oligonucleotide for detection of SNP TSC0056940
atattgagaatty

SEQ ID NO: 233384 - DNA, 13 bp, Artificial Sequence
  Oligonucleotide for detection of SNP TSC0056940
raattctcaatat

SEQ ID NO: 233385 - DNA, 13 bp, Artificial Sequence
  Oligonucleotide for detection of SNP TSC0056940
atattgggaatty

SEQ ID NO: 233386 - DNA, 13 bp, Artificial Sequence
  Oligonucleotide for detection of SNP TSC0056940
raattcccaatat

SEQ ID NO: 233387 - DNA, 13 bp, Artificial Sequence
  Oligonucleotide for detection of SNP TSC0056942
aaaggtatttaaa

SEQ ID NO: 233388 - DNA, 13 bp, Artificial Sequence
  Oligonucleotide for detection of SNP TSC0056942
tttaaataccttt

SEQ ID NO: 233389 - DNA, 13 bp, Artificial Sequence
  Oligonucleotide for detection of SNP TSC0056942
aaaggtgtttaaa

SEQ ID NO: 233390 - DNA, 13 bp, Artificial Sequence
  Oligonucleotide for detection of SNP TSC0056942
tttaaacaccttt

SEQ ID NO: 233391 - DNA, 13 bp, Artificial Sequence
  Oligonucleotide for detection of SNP TSC0056943
tatgttatagggg

SEQ ID NO: 233392 - DNA, 13 bp, Artificial Sequence
  Oligonucleotide for detection of SNP TSC0056943
cccctataacata

SEQ ID NO: 233393 - DNA, 13 bp, Artificial Sequence
  Oligonucleotide for detection of SNP TSC0056943
tatgttgtagggg

SEQ ID NO: 233394 - DNA, 13 bp, Artificial Sequence
  Oligonucleotide for detection of SNP TSC0056943
cccctacaacata

SEQ ID NO: 233395 - DNA, 13 bp, Artificial Sequence
  Oligonucleotide for detection of SNP TSC0056943
tatgtcgtagggg

SEQ ID NO: 233396 - DNA, 13 bp, Artificial Sequence
  Oligonucleotide for detection of SNP TSC0056943
cccctacgacata

SEQ ID NO: 233397 - DNA, 13 bp, Artificial Sequence
  Oligonucleotide for detection of SNP TSC0056943
tttttatggtatg

SEQ ID NO: 233398 - DNA, 13 bp, Artificial Sequence
  Oligonucleotide for detection of SNP TSC0056943
cataccataaaaa

SEQ ID NO: 233399 - DNA, 13 bp, Artificial Sequence
  Oligonucleotide for detection of SNP TSC0056943
tttttacggtatg

SEQ ID NO: 233400 - DNA, 13 bp, Artificial Sequence
  Oligonucleotide for detection of SNP TSC0056943
cataccgtaaaaa

SEQ ID NO: 233401 - DNA, 13 bp, Artificial Sequence
  Oligonucleotide for detection of SNP TSC0056944
atgaataaggaag

SEQ ID NO: 233402 - DNA, 13 bp, Artificial Sequence
  Oligonucleotide for detection of SNP TSC0056944
cttccttattcat

SEQ ID NO: 233403 - DNA, 13 bp, Artificial Sequence
  Oligonucleotide for detection of SNP TSC0056944
atgaattaggaag

SEQ ID NO: 233404 - DNA, 13 bp, Artificial Sequence
  Oligonucleotide for detection of SNP TSC0056944
cttcctaattcat

SEQ ID NO: 233405 - DNA, 13 bp, Artificial Sequence
  Oligonucleotide for detection of SNP TSC0056951
ttatgaatttgga

SEQ ID NO: 233406 - DNA, 13 bp, Artificial Sequence
  Oligonucleotide for detection of SNP TSC0056951
tccaaattcataa

SEQ ID NO: 233407 - DNA, 13 bp, Artificial Sequence
  Oligonucleotide for detection of SNP TSC0056951
ttatgagtttgga

SEQ ID NO: 233408 - DNA, 13 bp, Artificial Sequence
  Oligonucleotide for detection of SNP TSC0056951
tccaaactcataa

SEQ ID NO: 233409 - DNA, 13 bp, Artificial Sequence
  Oligonucleotide for detection of SNP TSC0056952
atttttattgata

SEQ ID NO: 233410 - DNA, 13 bp, Artificial Sequence
  Oligonucleotide for detection of SNP TSC0056952
tatcaataaaaat

SEQ ID NO: 233411 - DNA, 13 bp, Artificial Sequence
  Oligonucleotide for detection of SNP TSC0056952
atttttgttgata

SEQ ID NO: 233412 - DNA, 13 bp, Artificial Sequence
  Oligonucleotide for detection of SNP TSC0056952
tatcaacaaaaat

SEQ ID NO: 233413 - DNA, 13 bp, Artificial Sequence
  Oligonucleotide for detection of SNP TSC0056954
ggaggggtagtay

SEQ ID NO: 233414 - DNA, 13 bp, Artificial Sequence
  Oligonucleotide for detection of SNP TSC0056954
rtactacccctcc

SEQ ID NO: 233415 - DNA, 13 bp, Artificial Sequence
  Oligonucleotide for detection of SNP TSC0056954
ggagggatagtay

SEQ ID NO: 233416 - DNA, 13 bp, Artificial Sequence
  Oligonucleotide for detection of SNP TSC0056954
rtactatccctcc

SEQ ID NO: 233417 - DNA, 13 bp, Artificial Sequence
  Oligonucleotide for detection of SNP TSC0056955
gttttattgtgat

SEQ ID NO: 233418 - DNA, 13 bp, Artificial Sequence
  Oligonucleotide for detection of SNP TSC0056955
atcacaataaaac

SEQ ID NO: 233419 - DNA, 13 bp, Artificial Sequence
  Oligonucleotide for detection of SNP TSC0056955
gttttagtgtgat

SEQ ID NO: 233420 - DNA, 13 bp, Artificial Sequence
  Oligonucleotide for detection of SNP TSC0056955
atcacactaaaac

SEQ ID NO: 233421 - DNA, 13 bp, Artificial Sequence
  Oligonucleotide for detection of SNP TSC0056955
attatagtgagay

SEQ ID NO: 233422 - DNA, 13 bp, Artificial Sequence
  Oligonucleotide for detection of SNP TSC0056955
rtctcactataat

SEQ ID NO: 233423 - DNA, 13 bp, Artificial Sequence
  Oligonucleotide for detection of SNP TSC0056955
attatattgagay

SEQ ID NO: 233424 - DNA, 13 bp, Artificial Sequence
  Oligonucleotide for detection of SNP TSC0056955
rtctcaatataat

SEQ ID NO: 233425 - DNA, 13 bp, Artificial Sequence
  Oligonucleotide for detection of SNP TSC0056965
ttttagagagagg

SEQ ID NO: 233426 - DNA, 13 bp, Artificial Sequence
  Oligonucleotide for detection of SNP TSC0056965
cctctctctaaaa

SEQ ID NO: 233427 - DNA, 13 bp, Artificial Sequence
  Oligonucleotide for detection of SNP TSC0056965
ttttagggagagg

SEQ ID NO: 233428 - DNA, 13 bp, Artificial Sequence
  Oligonucleotide for detection of SNP TSC0056965
cctctccctaaaa

SEQ ID NO: 233429 - DNA, 13 bp, Artificial Sequence
  Oligonucleotide for detection of SNP TSC0056966
gtggttaggtgtg

SEQ ID NO: 233430 - DNA, 13 bp, Artificial Sequence
  Oligonucleotide for detection of SNP TSC0056966
cacacctaaccac

SEQ ID NO: 233431 - DNA, 13 bp, Artificial Sequence
  Oligonucleotide for detection of SNP TSC0056966
gtggttgggtgtg

SEQ ID NO: 233432 - DNA, 13 bp, Artificial Sequence
  Oligonucleotide for detection of SNP TSC0056966
cacacccaaccac

SEQ ID NO: 233433 - DNA, 13 bp, Artificial Sequence
  Oligonucleotide for detection of SNP TSC0056966
gtggttaggcgtg

SEQ ID NO: 233434 - DNA, 13 bp, Artificial Sequence
  Oligonucleotide for detection of SNP TSC0056966
cacgcctaaccac

SEQ ID NO: 233435 - DNA, 13 bp, Artificial Sequence
  Oligonucleotide for detection of SNP TSC0056966
gtggtcgggtgtg

SEQ ID NO: 233436 - DNA, 13 bp, Artificial Sequence
  Oligonucleotide for detection of SNP TSC0056966
cacacccgaccac

SEQ ID NO: 233437 - DNA, 13 bp, Artificial Sequence
  Oligonucleotide for detection of SNP TSC0056966
gtggttaggtgcg

SEQ ID NO: 233438 - DNA, 13 bp, Artificial Sequence
  Oligonucleotide for detection of SNP TSC0056966
cgcacctaaccac

SEQ ID NO: 233439 - DNA, 13 bp, Artificial Sequence
  Oligonucleotide for detection of SNP TSC0056966
gtggttgggcgtg

SEQ ID NO: 233440 - DNA, 13 bp, Artificial Sequence
  Oligonucleotide for detection of SNP TSC0056966
cacgcccaaccac

SEQ ID NO: 233441 - DNA, 13 bp, Artificial Sequence
  Oligonucleotide for detection of SNP TSC0056966
gtggttaggcgcg

SEQ ID NO: 233442 - DNA, 13 bp, Artificial Sequence
  Oligonucleotide for detection of SNP TSC0056966
cgcgcctaaccac

SEQ ID NO: 233443 - DNA, 13 bp, Artificial Sequence
  Oligonucleotide for detection of SNP TSC0056966
gtggttgggtgcg

SEQ ID NO: 233444 - DNA, 13 bp, Artificial Sequence
  Oligonucleotide for detection of SNP TSC0056966
cgcacccaaccac

SEQ ID NO: 233445 - DNA, 13 bp, Artificial Sequence
  Oligonucleotide for detection of SNP TSC0056966
gtggtcgggcgtg

SEQ ID NO: 233446 - DNA, 13 bp, Artificial Sequence
  Oligonucleotide for detection of SNP TSC0056966
cacgcccgaccac

SEQ ID NO: 233447 - DNA, 13 bp, Artificial Sequence
  Oligonucleotide for detection of SNP TSC0056966
gtggtcgggtgcg

SEQ ID NO: 233448 - DNA, 13 bp, Artificial Sequence
  Oligonucleotide for detection of SNP TSC0056966
cgcacccgaccac

SEQ ID NO: 233449 - DNA, 13 bp, Artificial Sequence
  Oligonucleotide for detection of SNP TSC0056966
gtggttgggcgcg

SEQ ID NO: 233450 - DNA, 13 bp, Artificial Sequence
  Oligonucleotide for detection of SNP TSC0056966
cgcgcccaaccac

SEQ ID NO: 233451 - DNA, 13 bp, Artificial Sequence
  Oligonucleotide for detection of SNP TSC0056966
gtggtcgggcgcg

SEQ ID NO: 233452 - DNA, 13 bp, Artificial Sequence
  Oligonucleotide for detection of SNP TSC0056966
cgcgcccgaccac

SEQ ID NO: 233453 - DNA, 13 bp, Artificial Sequence
  Oligonucleotide for detection of SNP TSC0056966
tgtgtttggttay

SEQ ID NO: 233454 - DNA, 13 bp, Artificial Sequence
  Oligonucleotide for detection of SNP TSC0056966
rtaaccaaacaca

SEQ ID NO: 233455 - DNA, 13 bp, Artificial Sequence
  Oligonucleotide for detection of SNP TSC0056966
cgtgtttggttay

SEQ ID NO: 233456 - DNA, 13 bp, Artificial Sequence
  Oligonucleotide for detection of SNP TSC0056966
rtaaccaaacacg

SEQ ID NO: 233457 - DNA, 13 bp, Artificial Sequence
  Oligonucleotide for detection of SNP TSC0056966
tgcgtttggttay

SEQ ID NO: 233458 - DNA, 13 bp, Artificial Sequence
  Oligonucleotide for detection of SNP TSC0056966
rtaaccaaacgca

SEQ ID NO: 233459 - DNA, 13 bp, Artificial Sequence
  Oligonucleotide for detection of SNP TSC0056966
cgcgtttggttay

SEQ ID NO: 233460 - DNA, 13 bp, Artificial Sequence
  Oligonucleotide for detection of SNP TSC0056966
rtaaccaaacgcg

SEQ ID NO: 233461 - DNA, 13 bp, Artificial Sequence
  Oligonucleotide for detection of SNP TSC0056966
tgtgttcggttay

SEQ ID NO: 233462 - DNA, 13 bp, Artificial Sequence
  Oligonucleotide for detection of SNP TSC0056966
rtaaccgaacaca

SEQ ID NO: 233463 - DNA, 13 bp, Artificial Sequence
  Oligonucleotide for detection of SNP TSC0056966
cgtgttcggttay

SEQ ID NO: 233464 - DNA, 13 bp, Artificial Sequence
  Oligonucleotide for detection of SNP TSC0056966
rtaaccgaacacg

SEQ ID NO: 233465 - DNA, 13 bp, Artificial Sequence
  Oligonucleotide for detection of SNP TSC0056966
tgcgttcggttay

SEQ ID NO: 233466 - DNA, 13 bp, Artificial Sequence
  Oligonucleotide for detection of SNP TSC0056966
rtaaccgaacgca

SEQ ID NO: 233467 - DNA, 13 bp, Artificial Sequence
  Oligonucleotide for detection of SNP TSC0056966
cgcgttcggttay

SEQ ID NO: 233468 - DNA, 13 bp, Artificial Sequence
  Oligonucleotide for detection of SNP TSC0056966
rtaaccgaacgcg

SEQ ID NO: 233469 - DNA, 13 bp, Artificial Sequence
  Oligonucleotide for detection of SNP TSC0056968
gttagagaaggag

SEQ ID NO: 233470 - DNA, 13 bp, Artificial Sequence
  Oligonucleotide for detection of SNP TSC0056968
ctccttctctaac

SEQ ID NO: 233471 - DNA, 13 bp, Artificial Sequence
  Oligonucleotide for detection of SNP TSC0056968
gttagaaaaggag

SEQ ID NO: 233472 - DNA, 13 bp, Artificial Sequence
  Oligonucleotide for detection of SNP TSC0056968
ctccttttctaac

SEQ ID NO: 233473 - DNA, 13 bp, Artificial Sequence
  Oligonucleotide for detection of SNP TSC0004768
gttttttggggag

SEQ ID NO: 233474 - DNA, 13 bp, Artificial Sequence
  Oligonucleotide for detection of SNP TSC0004768
ctccccaaaaaac

SEQ ID NO: 233475 - DNA, 13 bp, Artificial Sequence
  Oligonucleotide for detection of SNP TSC0004768
gtttttcggggag

SEQ ID NO: 233476 - DNA, 13 bp, Artificial Sequence
  Oligonucleotide for detection of SNP TSC0004768
ctccccgaaaaac

SEQ ID NO: 233477 - DNA, 13 bp, Artificial Sequence
  Oligonucleotide for detection of SNP TSC0056983
atgtgtgatttty

SEQ ID NO: 233478 - DNA, 13 bp, Artificial Sequence
  Oligonucleotide for detection of SNP TSC0056983
raaaatcacacat

SEQ ID NO: 233479 - DNA, 13 bp, Artificial Sequence
  Oligonucleotide for detection of SNP TSC0056983
atgtgtaatttty

SEQ ID NO: 233480 - DNA, 13 bp, Artificial Sequence
  Oligonucleotide for detection of SNP TSC0056983
raaaattacacat

SEQ ID NO: 233481 - DNA, 13 bp, Artificial Sequence
  Oligonucleotide for detection of SNP TSC0056984
tatagaatttgaa

SEQ ID NO: 233482 - DNA, 13 bp, Artificial Sequence
  Oligonucleotide for detection of SNP TSC0056984
ttcaaattctata

SEQ ID NO: 233483 - DNA, 13 bp, Artificial Sequence
  Oligonucleotide for detection of SNP TSC0056984
tatagagtttgaa

SEQ ID NO: 233484 - DNA, 13 bp, Artificial Sequence
  Oligonucleotide for detection of SNP TSC0056984
ttcaaactctata

SEQ ID NO: 233485 - DNA, 13 bp, Artificial Sequence
  Oligonucleotide for detection of SNP TSC0056985
gtgtatatattta

SEQ ID NO: 233486 - DNA, 13 bp, Artificial Sequence
  Oligonucleotide for detection of SNP TSC0056985
taaatatatacac

SEQ ID NO: 233487 - DNA, 13 bp, Artificial Sequence
  Oligonucleotide for detection of SNP TSC0056985
gtgtatttattta

SEQ ID NO: 233488 - DNA, 13 bp, Artificial Sequence
  Oligonucleotide for detection of SNP TSC0056985
taaataaatacac

SEQ ID NO: 233489 - DNA, 13 bp, Artificial Sequence
  Oligonucleotide for detection of SNP TSC0056985
gcgtatatattta

SEQ ID NO: 233490 - DNA, 13 bp, Artificial Sequence
  Oligonucleotide for detection of SNP TSC0056985
taaatatatacgc

SEQ ID NO: 233491 - DNA, 13 bp, Artificial Sequence
  Oligonucleotide for detection of SNP TSC0056985
gcgtatttattta

SEQ ID NO: 233492 - DNA, 13 bp, Artificial Sequence
  Oligonucleotide for detection of SNP TSC0056985
taaataaatacgc

SEQ ID NO: 233493 - DNA, 13 bp, Artificial Sequence
  Oligonucleotide for detection of SNP TSC0056985
tgggtatgtgtgy

SEQ ID NO: 233494 - DNA, 13 bp, Artificial Sequence
  Oligonucleotide for detection of SNP TSC0056985
rcacacataccca

SEQ ID NO: 233495 - DNA, 13 bp, Artificial Sequence
  Oligonucleotide for detection of SNP TSC0056985
tgggtaggtgtgy

SEQ ID NO: 233496 - DNA, 13 bp, Artificial Sequence
  Oligonucleotide for detection of SNP TSC0056985
rcacacctaccca

SEQ ID NO: 233497 - DNA, 13 bp, Artificial Sequence
  Oligonucleotide for detection of SNP TSC0056985
tgggtatgtgcgy

SEQ ID NO: 233498 - DNA, 13 bp, Artificial Sequence
  Oligonucleotide for detection of SNP TSC0056985
rcgcacataccca

SEQ ID NO: 233499 - DNA, 13 bp, Artificial Sequence
  Oligonucleotide for detection of SNP TSC0056985
tgggtaggtgcgy

SEQ ID NO: 233500 - DNA, 13 bp, Artificial Sequence
  Oligonucleotide for detection of SNP TSC0056985
rcgcacctaccca

SEQ ID NO: 233501 - DNA, 13 bp, Artificial Sequence
  Oligonucleotide for detection of SNP TSC0056986
tgattaatgatay

SEQ ID NO: 233502 - DNA, 13 bp, Artificial Sequence
  Oligonucleotide for detection of SNP TSC0056986
rtatcattaatca

SEQ ID NO: 233503 - DNA, 13 bp, Artificial Sequence
  Oligonucleotide for detection of SNP TSC0056986
tgattagtgatay

SEQ ID NO: 233504 - DNA, 13 bp, Artificial Sequence
  Oligonucleotide for detection of SNP TSC0056986
rtatcactaatca

SEQ ID NO: 233505 - DNA, 13 bp, Artificial Sequence
  Oligonucleotide for detection of SNP TSC0056987
gttgtattaatgt

SEQ ID NO: 233506 - DNA, 13 bp, Artificial Sequence
  Oligonucleotide for detection of SNP TSC0056987
acattaatacaac

SEQ ID NO: 233507 - DNA, 13 bp, Artificial Sequence
  Oligonucleotide for detection of SNP TSC0056987
gttgtaataatgt

SEQ ID NO: 233508 - DNA, 13 bp, Artificial Sequence
  Oligonucleotide for detection of SNP TSC0056987
acattattacaac

SEQ ID NO: 233509 - DNA, 13 bp, Artificial Sequence
  Oligonucleotide for detection of SNP TSC0056994
agaataataggay

SEQ ID NO: 233510 - DNA, 13 bp, Artificial Sequence
  Oligonucleotide for detection of SNP TSC0056994
rtcctattattct

SEQ ID NO: 233511 - DNA, 13 bp, Artificial Sequence
  Oligonucleotide for detection of SNP TSC0056994
agaatattaggay

SEQ ID NO: 233512 - DNA, 13 bp, Artificial Sequence
  Oligonucleotide for detection of SNP TSC0056994
rtcctaatattct

SEQ ID NO: 233513 - DNA, 13 bp, Artificial Sequence
  Oligonucleotide for detection of SNP TSC0056994
gttttattatttt

SEQ ID NO: 233514 - DNA, 13 bp, Artificial Sequence
  Oligonucleotide for detection of SNP TSC0056994
aaaataataaaac

SEQ ID NO: 233515 - DNA, 13 bp, Artificial Sequence
  Oligonucleotide for detection of SNP TSC0010037
atttttaattata

SEQ ID NO: 233516 - DNA, 13 bp, Artificial Sequence
  Oligonucleotide for detection of SNP TSC0010037
tataattaaaaat

SEQ ID NO: 233517 - DNA, 13 bp, Artificial Sequence
  Oligonucleotide for detection of SNP TSC0010037
attttttattata

SEQ ID NO: 233518 - DNA, 13 bp, Artificial Sequence
  Oligonucleotide for detection of SNP TSC0010037
tataataaaaaat

SEQ ID NO: 233519 - DNA, 13 bp, Artificial Sequence
  Oligonucleotide for detection of SNP TSC0010037
tgtaattggaaat

SEQ ID NO: 233520 - DNA, 13 bp, Artificial Sequence
  Oligonucleotide for detection of SNP TSC0010037
atttccaattaca

SEQ ID NO: 233521 - DNA, 13 bp, Artificial Sequence
  Oligonucleotide for detection of SNP TSC0010037
tgtaataggaaat

SEQ ID NO: 233522 - DNA, 13 bp, Artificial Sequence
  Oligonucleotide for detection of SNP TSC0010037
atttcctattaca

SEQ ID NO: 233523 - DNA, 13 bp, Artificial Sequence
  Oligonucleotide for detection of SNP TSC0010038
gaaagttgagtty

SEQ ID NO: 233524 - DNA, 13 bp, Artificial Sequence
  Oligonucleotide for detection of SNP TSC0010038
raactcaactttc

SEQ ID NO: 233525 - DNA, 13 bp, Artificial Sequence
  Oligonucleotide for detection of SNP TSC0010038
gaaagtcgagtty

SEQ ID NO: 233526 - DNA, 13 bp, Artificial Sequence
  Oligonucleotide for detection of SNP TSC0010038
raactcgactttc

SEQ ID NO: 233527 - DNA, 13 bp, Artificial Sequence
  Oligonucleotide for detection of SNP TSC0056998
tttgatgtatatt

SEQ ID NO: 233528 - DNA, 13 bp, Artificial Sequence
  Oligonucleotide for detection of SNP TSC0056998
aatatacatcaaa

SEQ ID NO: 233529 - DNA, 13 bp, Artificial Sequence
  Oligonucleotide for detection of SNP TSC0056998
tttgatatatatt

SEQ ID NO: 233530 - DNA, 13 bp, Artificial Sequence
  Oligonucleotide for detection of SNP TSC0056998
aatatatatcaaa

SEQ ID NO: 233531 - DNA, 13 bp, Artificial Sequence
  Oligonucleotide for detection of SNP TSC0004792
taaataattttag

SEQ ID NO: 233532 - DNA, 13 bp, Artificial Sequence
  Oligonucleotide for detection of SNP TSC0004792
ctaaaattattta

SEQ ID NO: 233533 - DNA, 13 bp, Artificial Sequence
  Oligonucleotide for detection of SNP TSC0004792
taaatatttttag

SEQ ID NO: 233534 - DNA, 13 bp, Artificial Sequence
  Oligonucleotide for detection of SNP TSC0004792
ctaaaaatattta

SEQ ID NO: 233535 - DNA, 13 bp, Artificial Sequence
  Oligonucleotide for detection of SNP TSC0004792
ttggaattatttg

SEQ ID NO: 233536 - DNA, 13 bp, Artificial Sequence
  Oligonucleotide for detection of SNP TSC0004792
caaataattccaa

SEQ ID NO: 233537 - DNA, 13 bp, Artificial Sequence
  Oligonucleotide for detection of SNP TSC0004792
ttggaagtatttg

SEQ ID NO: 233538 - DNA, 13 bp, Artificial Sequence
  Oligonucleotide for detection of SNP TSC0004792
caaatacttccaa

SEQ ID NO: 233539 - DNA, 13 bp, Artificial Sequence
  Oligonucleotide for detection of SNP TSC0004793
agttttgtaagty

SEQ ID NO: 233540 - DNA, 13 bp, Artificial Sequence
  Oligonucleotide for detection of SNP TSC0004793
racttacaaaact

SEQ ID NO: 233541 - DNA, 13 bp, Artificial Sequence
  Oligonucleotide for detection of SNP TSC0004793
agttttataagty

SEQ ID NO: 233542 - DNA, 13 bp, Artificial Sequence
  Oligonucleotide for detection of SNP TSC0004793
racttataaaact

SEQ ID NO: 233543 - DNA, 13 bp, Artificial Sequence
  Oligonucleotide for detection of SNP TSC0056999
taatttattgtag

SEQ ID NO: 233544 - DNA, 13 bp, Artificial Sequence
  Oligonucleotide for detection of SNP TSC0056999
ctacaataaatta

SEQ ID NO: 233545 - DNA, 13 bp, Artificial Sequence
  Oligonucleotide for detection of SNP TSC0056999
taatttgttgtag

SEQ ID NO: 233546 - DNA, 13 bp, Artificial Sequence
  Oligonucleotide for detection of SNP TSC0056999
ctacaacaaatta

SEQ ID NO: 233547 - DNA, 13 bp, Artificial Sequence
  Oligonucleotide for detection of SNP TSC0004833
gtttttattagay

SEQ ID NO: 233548 - DNA, 13 bp, Artificial Sequence
  Oligonucleotide for detection of SNP TSC0004833
rtctaataaaaac

SEQ ID NO: 233549 - DNA, 13 bp, Artificial Sequence
  Oligonucleotide for detection of SNP TSC0057007
gaagggttattgt

SEQ ID NO: 233550 - DNA, 13 bp, Artificial Sequence
  Oligonucleotide for detection of SNP TSC0057007
acaataacccttc

SEQ ID NO: 233551 - DNA, 13 bp, Artificial Sequence
  Oligonucleotide for detection of SNP TSC0057007
gaaggggtattgt

SEQ ID NO: 233552 - DNA, 13 bp, Artificial Sequence
  Oligonucleotide for detection of SNP TSC0057007
acaataccccttc

SEQ ID NO: 233553 - DNA, 13 bp, Artificial Sequence
  Oligonucleotide for detection of SNP TSC0057007
atagtaattttty

SEQ ID NO: 233554 - DNA, 13 bp, Artificial Sequence
  Oligonucleotide for detection of SNP TSC0057007
raaaaattactat

SEQ ID NO: 233555 - DNA, 13 bp, Artificial Sequence
  Oligonucleotide for detection of SNP TSC0057007
atagtatttttty

SEQ ID NO: 233556 - DNA, 13 bp, Artificial Sequence
  Oligonucleotide for detection of SNP TSC0057007
raaaaaatactat

SEQ ID NO: 233557 - DNA, 13 bp, Artificial Sequence
  Oligonucleotide for detection of SNP TSC0057010
tgagggtgtttty

SEQ ID NO: 233558 - DNA, 13 bp, Artificial Sequence
  Oligonucleotide for detection of SNP TSC0057010
raaaacaccctca

SEQ ID NO: 233559 - DNA, 13 bp, Artificial Sequence
  Oligonucleotide for detection of SNP TSC0057010
tgagggcgtttty

SEQ ID NO: 233560 - DNA, 13 bp, Artificial Sequence
  Oligonucleotide for detection of SNP TSC0057010
raaaacgccctca

SEQ ID NO: 233561 - DNA, 13 bp, Artificial Sequence
  Oligonucleotide for detection of SNP TSC0057012
tataaatgaagaa

SEQ ID NO: 233562 - DNA, 13 bp, Artificial Sequence
  Oligonucleotide for detection of SNP TSC0057012
ttcttcatttata

SEQ ID NO: 233563 - DNA, 13 bp, Artificial Sequence
  Oligonucleotide for detection of SNP TSC0057012
tataaacgaagaa

SEQ ID NO: 233564 - DNA, 13 bp, Artificial Sequence
  Oligonucleotide for detection of SNP TSC0057012
ttcttcgtttata

SEQ ID NO: 233565 - DNA, 13 bp, Artificial Sequence
  Oligonucleotide for detection of SNP TSC0057013
gggttttaaaata

SEQ ID NO: 233566 - DNA, 13 bp, Artificial Sequence
  Oligonucleotide for detection of SNP TSC0057013
tattttaaaaccc

SEQ ID NO: 233567 - DNA, 13 bp, Artificial Sequence
  Oligonucleotide for detection of SNP TSC0057013
gggtttgaaaata

SEQ ID NO: 233568 - DNA, 13 bp, Artificial Sequence
  Oligonucleotide for detection of SNP TSC0057013
tattttcaaaccc

SEQ ID NO: 233569 - DNA, 13 bp, Artificial Sequence
  Oligonucleotide for detection of SNP TSC0057013
tattttgagatty

SEQ ID NO: 233570 - DNA, 13 bp, Artificial Sequence
  Oligonucleotide for detection of SNP TSC0057013
raatctcaaaata

SEQ ID NO: 233571 - DNA, 13 bp, Artificial Sequence
  Oligonucleotide for detection of SNP TSC0057013
tatttttagatty

SEQ ID NO: 233572 - DNA, 13 bp, Artificial Sequence
  Oligonucleotide for detection of SNP TSC0057013
raatctaaaaata

SEQ ID NO: 233573 - DNA, 13 bp, Artificial Sequence
  Oligonucleotide for detection of SNP TSC0057014
tgtttaagttgta

SEQ ID NO: 233574 - DNA, 13 bp, Artificial Sequence
  Oligonucleotide for detection of SNP TSC0057014
tacaacttaaaca

SEQ ID NO: 233575 - DNA, 13 bp, Artificial Sequence
  Oligonucleotide for detection of SNP TSC0057014
tgtttaggttgta

SEQ ID NO: 233576 - DNA, 13 bp, Artificial Sequence
  Oligonucleotide for detection of SNP TSC0057014
tacaacctaaaca

SEQ ID NO: 233577 - DNA, 13 bp, Artificial Sequence
  Oligonucleotide for detection of SNP TSC0057015
gaaattgaggtgg

SEQ ID NO: 233578 - DNA, 13 bp, Artificial Sequence
  Oligonucleotide for detection of SNP TSC0057015
ccacctcaatttc

SEQ ID NO: 233579 - DNA, 13 bp, Artificial Sequence
  Oligonucleotide for detection of SNP TSC0057015
gaaattaaggtgg

SEQ ID NO: 233580 - DNA, 13 bp, Artificial Sequence
  Oligonucleotide for detection of SNP TSC0057015
ccaccttaatttc

SEQ ID NO: 233581 - DNA, 13 bp, Artificial Sequence
  Oligonucleotide for detection of SNP TSC0057015
gaaatcgaggtgg

SEQ ID NO: 233582 - DNA, 13 bp, Artificial Sequence
  Oligonucleotide for detection of SNP TSC0057015
ccacctcgatttc

SEQ ID NO: 233583 - DNA, 13 bp, Artificial Sequence
  Oligonucleotide for detection of SNP TSC0057016
tgttggtattatt

SEQ ID NO: 233584 - DNA, 13 bp, Artificial Sequence
  Oligonucleotide for detection of SNP TSC0057016
aataataccaaca

SEQ ID NO: 233585 - DNA, 13 bp, Artificial Sequence
  Oligonucleotide for detection of SNP TSC0057016
tgttgggattatt

SEQ ID NO: 233586 - DNA, 13 bp, Artificial Sequence
  Oligonucleotide for detection of SNP TSC0057016
aataatcccaaca

SEQ ID NO: 233587 - DNA, 13 bp, Artificial Sequence
  Oligonucleotide for detection of SNP TSC0057016
aataatattaata

SEQ ID NO: 233588 - DNA, 13 bp, Artificial Sequence
  Oligonucleotide for detection of SNP TSC0057016
tattaatattatt

SEQ ID NO: 233589 - DNA, 13 bp, Artificial Sequence
  Oligonucleotide for detection of SNP TSC0057016
aataattttaata

SEQ ID NO: 233590 - DNA, 13 bp, Artificial Sequence
  Oligonucleotide for detection of SNP TSC0057016
tattaaaattatt

SEQ ID NO: 233591 - DNA, 13 bp, Artificial Sequence
  Oligonucleotide for detection of SNP TSC0057017
agtattatggaag

SEQ ID NO: 233592 - DNA, 13 bp, Artificial Sequence
  Oligonucleotide for detection of SNP TSC0057017
cttccataatact

SEQ ID NO: 233593 - DNA, 13 bp, Artificial Sequence
  Oligonucleotide for detection of SNP TSC0057017
agtattgtggaag

SEQ ID NO: 233594 - DNA, 13 bp, Artificial Sequence
  Oligonucleotide for detection of SNP TSC0057017
cttccacaatact

SEQ ID NO: 233595 - DNA, 13 bp, Artificial Sequence
  Oligonucleotide for detection of SNP TSC0057017
agtattacggaag

SEQ ID NO: 233596 - DNA, 13 bp, Artificial Sequence
  Oligonucleotide for detection of SNP TSC0057017
cttccgtaatact

SEQ ID NO: 233597 - DNA, 13 bp, Artificial Sequence
  Oligonucleotide for detection of SNP TSC0057017
agtatcgtggaag

SEQ ID NO: 233598 - DNA, 13 bp, Artificial Sequence
  Oligonucleotide for detection of SNP TSC0057017
cttccacgatact

SEQ ID NO: 233599 - DNA, 13 bp, Artificial Sequence
  Oligonucleotide for detection of SNP TSC0057017
agtattgcggaag

SEQ ID NO: 233600 - DNA, 13 bp, Artificial Sequence
  Oligonucleotide for detection of SNP TSC0057017
cttccgcaatact

SEQ ID NO: 233601 - DNA, 13 bp, Artificial Sequence
  Oligonucleotide for detection of SNP TSC0057017
agtatcgcggaag

SEQ ID NO: 233602 - DNA, 13 bp, Artificial Sequence
  Oligonucleotide for detection of SNP TSC0057017
cttccgcgatact

SEQ ID NO: 233603 - DNA, 13 bp, Artificial Sequence
  Oligonucleotide for detection of SNP TSC0057017
ttttcgtgatatt

SEQ ID NO: 233604 - DNA, 13 bp, Artificial Sequence
  Oligonucleotide for detection of SNP TSC0057017
aatatcacgaaaa

SEQ ID NO: 233605 - DNA, 13 bp, Artificial Sequence
  Oligonucleotide for detection of SNP TSC0057017
tttttgcgatatt

SEQ ID NO: 233606 - DNA, 13 bp, Artificial Sequence
  Oligonucleotide for detection of SNP TSC0057017
aatatcgcaaaaa

SEQ ID NO: 233607 - DNA, 13 bp, Artificial Sequence
  Oligonucleotide for detection of SNP TSC0057017
ttttcgcgatatt

SEQ ID NO: 233608 - DNA, 13 bp, Artificial Sequence
  Oligonucleotide for detection of SNP TSC0057017
aatatcgcgaaaa

SEQ ID NO: 233609 - DNA, 13 bp, Artificial Sequence
  Oligonucleotide for detection of SNP TSC0057018
gaaattatatttt

SEQ ID NO: 233610 - DNA, 13 bp, Artificial Sequence
  Oligonucleotide for detection of SNP TSC0057018
aaaatataatttc

SEQ ID NO: 233611 - DNA, 13 bp, Artificial Sequence
  Oligonucleotide for detection of SNP TSC0057018
aaaatatgattty

SEQ ID NO: 233612 - DNA, 13 bp, Artificial Sequence
  Oligonucleotide for detection of SNP TSC0057018
raaatcatatttt

SEQ ID NO: 233613 - DNA, 13 bp, Artificial Sequence
  Oligonucleotide for detection of SNP TSC0057018
aaaataagattty

SEQ ID NO: 233614 - DNA, 13 bp, Artificial Sequence
  Oligonucleotide for detection of SNP TSC0057018
raaatcttatttt

SEQ ID NO: 233615 - DNA, 13 bp, Artificial Sequence
  Oligonucleotide for detection of SNP TSC0057027
tgtgttagttagg

SEQ ID NO: 233616 - DNA, 13 bp, Artificial Sequence
  Oligonucleotide for detection of SNP TSC0057027
cctaactaacaca

SEQ ID NO: 233617 - DNA, 13 bp, Artificial Sequence
  Oligonucleotide for detection of SNP TSC0057027
tgtgtttgttagg

SEQ ID NO: 233618 - DNA, 13 bp, Artificial Sequence
  Oligonucleotide for detection of SNP TSC0057027
cctaacaaacaca

SEQ ID NO: 233619 - DNA, 13 bp, Artificial Sequence
  Oligonucleotide for detection of SNP TSC0057027
cgtgttagttagg

SEQ ID NO: 233620 - DNA, 13 bp, Artificial Sequence
  Oligonucleotide for detection of SNP TSC0057027
cctaactaacacg

SEQ ID NO: 233621 - DNA, 13 bp, Artificial Sequence
  Oligonucleotide for detection of SNP TSC0057027
cgtgtttgttagg

SEQ ID NO: 233622 - DNA, 13 bp, Artificial Sequence
  Oligonucleotide for detection of SNP TSC0057027
cctaacaaacacg

SEQ ID NO: 233623 - DNA, 13 bp, Artificial Sequence
  Oligonucleotide for detection of SNP TSC0057027
tgtgttcgttagg

SEQ ID NO: 233624 - DNA, 13 bp, Artificial Sequence
  Oligonucleotide for detection of SNP TSC0057027
cctaacgaacaca

SEQ ID NO: 233625 - DNA, 13 bp, Artificial Sequence
  Oligonucleotide for detection of SNP TSC0057027
cgtgttcgttagg

SEQ ID NO: 233626 - DNA, 13 bp, Artificial Sequence
  Oligonucleotide for detection of SNP TSC0057027
cctaacgaacacg

SEQ ID NO: 233627 - DNA, 13 bp, Artificial Sequence
  Oligonucleotide for detection of SNP TSC0057027
tttgattagtatg

SEQ ID NO: 233628 - DNA, 13 bp, Artificial Sequence
  Oligonucleotide for detection of SNP TSC0057027
catactaatcaaa

SEQ ID NO: 233629 - DNA, 13 bp, Artificial Sequence
  Oligonucleotide for detection of SNP TSC0057027
tttgatgagtatg

SEQ ID NO: 233630 - DNA, 13 bp, Artificial Sequence
  Oligonucleotide for detection of SNP TSC0057027
catactcatcaaa

SEQ ID NO: 233631 - DNA, 13 bp, Artificial Sequence
  Oligonucleotide for detection of SNP TSC0057027
tttgattagtacg

SEQ ID NO: 233632 - DNA, 13 bp, Artificial Sequence
  Oligonucleotide for detection of SNP TSC0057027
cgtactaatcaaa

SEQ ID NO: 233633 - DNA, 13 bp, Artificial Sequence
  Oligonucleotide for detection of SNP TSC0057027
tttgacgagtatg

SEQ ID NO: 233634 - DNA, 13 bp, Artificial Sequence
  Oligonucleotide for detection of SNP TSC0057027
catactcgtcaaa

SEQ ID NO: 233635 - DNA, 13 bp, Artificial Sequence
  Oligonucleotide for detection of SNP TSC0057027
tttgatgagtacg

SEQ ID NO: 233636 - DNA, 13 bp, Artificial Sequence
  Oligonucleotide for detection of SNP TSC0057027
cgtactcatcaaa

SEQ ID NO: 233637 - DNA, 13 bp, Artificial Sequence
  Oligonucleotide for detection of SNP TSC0057027
tttgacgagtacg

SEQ ID NO: 233638 - DNA, 13 bp, Artificial Sequence
  Oligonucleotide for detection of SNP TSC0057027
cgtactcgtcaaa

SEQ ID NO: 233639 - DNA, 13 bp, Artificial Sequence
  Oligonucleotide for detection of SNP TSC0057028
aaggagggatttg

SEQ ID NO: 233640 - DNA, 13 bp, Artificial Sequence
  Oligonucleotide for detection of SNP TSC0057028
caaatccctcctt

SEQ ID NO: 233641 - DNA, 13 bp, Artificial Sequence
  Oligonucleotide for detection of SNP TSC0057028
aaggagagatttg

SEQ ID NO: 233642 - DNA, 13 bp, Artificial Sequence
  Oligonucleotide for detection of SNP TSC0057028
caaatctctcctt

SEQ ID NO: 233643 - DNA, 13 bp, Artificial Sequence
  Oligonucleotide for detection of SNP TSC0057028
aaggagggattcg

SEQ ID NO: 233644 - DNA, 13 bp, Artificial Sequence
  Oligonucleotide for detection of SNP TSC0057028
cgaatccctcctt

SEQ ID NO: 233645 - DNA, 13 bp, Artificial Sequence
  Oligonucleotide for detection of SNP TSC0057028
aaggagagattcg

SEQ ID NO: 233646 - DNA, 13 bp, Artificial Sequence
  Oligonucleotide for detection of SNP TSC0057028
cgaatctctcctt

SEQ ID NO: 233647 - DNA, 13 bp, Artificial Sequence
  Oligonucleotide for detection of SNP TSC0057029
gagttttgaggaa

SEQ ID NO: 233648 - DNA, 13 bp, Artificial Sequence
  Oligonucleotide for detection of SNP TSC0057029
ttcctcaaaactc

SEQ ID NO: 233649 - DNA, 13 bp, Artificial Sequence
  Oligonucleotide for detection of SNP TSC0057029
gagtttcgaggaa

SEQ ID NO: 233650 - DNA, 13 bp, Artificial Sequence
  Oligonucleotide for detection of SNP TSC0057029
ttcctcgaaactc

SEQ ID NO: 233651 - DNA, 13 bp, Artificial Sequence
  Oligonucleotide for detection of SNP TSC0057030
tgaaatttgaaag

SEQ ID NO: 233652 - DNA, 13 bp, Artificial Sequence
  Oligonucleotide for detection of SNP TSC0057030
ctttcaaatttca

SEQ ID NO: 233653 - DNA, 13 bp, Artificial Sequence
  Oligonucleotide for detection of SNP TSC0057030
tgaaatgtgaaag

SEQ ID NO: 233654 - DNA, 13 bp, Artificial Sequence
  Oligonucleotide for detection of SNP TSC0057030
ctttcacatttca

SEQ ID NO: 233655 - DNA, 13 bp, Artificial Sequence
  Oligonucleotide for detection of SNP TSC0057031
tagtgtagtaagy

SEQ ID NO: 233656 - DNA, 13 bp, Artificial Sequence
  Oligonucleotide for detection of SNP TSC0057031
rcttactacacta

SEQ ID NO: 233657 - DNA, 13 bp, Artificial Sequence
  Oligonucleotide for detection of SNP TSC0057031
tagtgtggtaagy

SEQ ID NO: 233658 - DNA, 13 bp, Artificial Sequence
  Oligonucleotide for detection of SNP TSC0057031
rcttaccacacta

SEQ ID NO: 233659 - DNA, 13 bp, Artificial Sequence
  Oligonucleotide for detection of SNP TSC0057032
atattatggttga

SEQ ID NO: 233660 - DNA, 13 bp, Artificial Sequence
  Oligonucleotide for detection of SNP TSC0057032
tcaaccataatat

SEQ ID NO: 233661 - DNA, 13 bp, Artificial Sequence
  Oligonucleotide for detection of SNP TSC0057032
atattagggttga

SEQ ID NO: 233662 - DNA, 13 bp, Artificial Sequence
  Oligonucleotide for detection of SNP TSC0057032
tcaaccctaatat

SEQ ID NO: 233663 - DNA, 13 bp, Artificial Sequence
  Oligonucleotide for detection of SNP TSC0057032
atattatggtcga

SEQ ID NO: 233664 - DNA, 13 bp, Artificial Sequence
  Oligonucleotide for detection of SNP TSC0057032
tcgaccataatat

SEQ ID NO: 233665 - DNA, 13 bp, Artificial Sequence
  Oligonucleotide for detection of SNP TSC0057032
atattagggtcga

SEQ ID NO: 233666 - DNA, 13 bp, Artificial Sequence
  Oligonucleotide for detection of SNP TSC0057032
tcgaccctaatat

SEQ ID NO: 233667 - DNA, 13 bp, Artificial Sequence
  Oligonucleotide for detection of SNP TSC0057032
ttggttataatat

SEQ ID NO: 233668 - DNA, 13 bp, Artificial Sequence
  Oligonucleotide for detection of SNP TSC0057032
atattataaccaa

SEQ ID NO: 233669 - DNA, 13 bp, Artificial Sequence
  Oligonucleotide for detection of SNP TSC0057032
ttggttttaatat

SEQ ID NO: 233670 - DNA, 13 bp, Artificial Sequence
  Oligonucleotide for detection of SNP TSC0057032
atattaaaaccaa

SEQ ID NO: 233671 - DNA, 13 bp, Artificial Sequence
  Oligonucleotide for detection of SNP TSC0057032
tcggttataatat

SEQ ID NO: 233672 - DNA, 13 bp, Artificial Sequence
  Oligonucleotide for detection of SNP TSC0057032
atattataaccga

SEQ ID NO: 233673 - DNA, 13 bp, Artificial Sequence
  Oligonucleotide for detection of SNP TSC0057032
tcggttttaatat

SEQ ID NO: 233674 - DNA, 13 bp, Artificial Sequence
  Oligonucleotide for detection of SNP TSC0057032
atattaaaaccga

SEQ ID NO: 233675 - DNA, 13 bp, Artificial Sequence
  Oligonucleotide for detection of SNP TSC0057035
agtttagtaatat

SEQ ID NO: 233676 - DNA, 13 bp, Artificial Sequence
  Oligonucleotide for detection of SNP TSC0057035
atattactaaact

SEQ ID NO: 233677 - DNA, 13 bp, Artificial Sequence
  Oligonucleotide for detection of SNP TSC0057035
agtttaataatat

SEQ ID NO: 233678 - DNA, 13 bp, Artificial Sequence
  Oligonucleotide for detection of SNP TSC0057035
atattattaaact

SEQ ID NO: 233679 - DNA, 13 bp, Artificial Sequence
  Oligonucleotide for detection of SNP TSC0057041
ttatttaaattty

SEQ ID NO: 233680 - DNA, 13 bp, Artificial Sequence
  Oligonucleotide for detection of SNP TSC0057041
raaatttaaataa

SEQ ID NO: 233681 - DNA, 13 bp, Artificial Sequence
  Oligonucleotide for detection of SNP TSC0057041
ttattttaattty

SEQ ID NO: 233682 - DNA, 13 bp, Artificial Sequence
  Oligonucleotide for detection of SNP TSC0057041
raaattaaaataa

SEQ ID NO: 233683 - DNA, 13 bp, Artificial Sequence
  Oligonucleotide for detection of SNP TSC0057041
gagatttgggtgg

SEQ ID NO: 233684 - DNA, 13 bp, Artificial Sequence
  Oligonucleotide for detection of SNP TSC0057041
ccacccaaatctc

SEQ ID NO: 233685 - DNA, 13 bp, Artificial Sequence
  Oligonucleotide for detection of SNP TSC0057041
gagattggggtgg

SEQ ID NO: 233686 - DNA, 13 bp, Artificial Sequence
  Oligonucleotide for detection of SNP TSC0057041
ccaccccaatctc

SEQ ID NO: 233687 - DNA, 13 bp, Artificial Sequence
  Oligonucleotide for detection of SNP TSC0057042
cgttgttgttaat

SEQ ID NO: 233688 - DNA, 13 bp, Artificial Sequence
  Oligonucleotide for detection of SNP TSC0057042
attaacaacaacg

SEQ ID NO: 233689 - DNA, 13 bp, Artificial Sequence
  Oligonucleotide for detection of SNP TSC0057042
tgttgtcgttaat

SEQ ID NO: 233690 - DNA, 13 bp, Artificial Sequence
  Oligonucleotide for detection of SNP TSC0057042
attaacgacaaca

SEQ ID NO: 233691 - DNA, 13 bp, Artificial Sequence
  Oligonucleotide for detection of SNP TSC0057042
cgttgtcgttaat

SEQ ID NO: 233692 - DNA, 13 bp, Artificial Sequence
  Oligonucleotide for detection of SNP TSC0057042
attaacgacaacg

SEQ ID NO: 233693 - DNA, 13 bp, Artificial Sequence
  Oligonucleotide for detection of SNP TSC0057042
attaatggtagtg

SEQ ID NO: 233694 - DNA, 13 bp, Artificial Sequence
  Oligonucleotide for detection of SNP TSC0057042
cactaccattaat

SEQ ID NO: 233695 - DNA, 13 bp, Artificial Sequence
  Oligonucleotide for detection of SNP TSC0057042
attaatagtagtg

SEQ ID NO: 233696 - DNA, 13 bp, Artificial Sequence
  Oligonucleotide for detection of SNP TSC0057042
cactactattaat

SEQ ID NO: 233697 - DNA, 13 bp, Artificial Sequence
  Oligonucleotide for detection of SNP TSC0057042
attaacggtagtg

SEQ ID NO: 233698 - DNA, 13 bp, Artificial Sequence
  Oligonucleotide for detection of SNP TSC0057042
cactaccgttaat

SEQ ID NO: 233699 - DNA, 13 bp, Artificial Sequence
  Oligonucleotide for detection of SNP TSC0057042
attaatagtagcg

SEQ ID NO: 233700 - DNA, 13 bp, Artificial Sequence
  Oligonucleotide for detection of SNP TSC0057042
cgctactattaat

SEQ ID NO: 233701 - DNA, 13 bp, Artificial Sequence
  Oligonucleotide for detection of SNP TSC0057042
attaatggtagcg

SEQ ID NO: 233702 - DNA, 13 bp, Artificial Sequence
  Oligonucleotide for detection of SNP TSC0057042
cgctaccattaat

SEQ ID NO: 233703 - DNA, 13 bp, Artificial Sequence
  Oligonucleotide for detection of SNP TSC0057042
attaacggtagcg

SEQ ID NO: 233704 - DNA, 13 bp, Artificial Sequence
  Oligonucleotide for detection of SNP TSC0057042
cgctaccgttaat

SEQ ID NO: 233705 - DNA, 13 bp, Artificial Sequence
  Oligonucleotide for detection of SNP TSC0057043
gagatattattat

SEQ ID NO: 233706 - DNA, 13 bp, Artificial Sequence
  Oligonucleotide for detection of SNP TSC0057043
ataataatatctc

SEQ ID NO: 233707 - DNA, 13 bp, Artificial Sequence
  Oligonucleotide for detection of SNP TSC0057043
gagatagtattat

SEQ ID NO: 233708 - DNA, 13 bp, Artificial Sequence
  Oligonucleotide for detection of SNP TSC0057043
ataatactatctc

SEQ ID NO: 233709 - DNA, 13 bp, Artificial Sequence
  Oligonucleotide for detection of SNP TSC0057043
atgatggtgttty

SEQ ID NO: 233710 - DNA, 13 bp, Artificial Sequence
  Oligonucleotide for detection of SNP TSC0057043
raaacaccatcat

SEQ ID NO: 233711 - DNA, 13 bp, Artificial Sequence
  Oligonucleotide for detection of SNP TSC0057043
atgatgttgttty

SEQ ID NO: 233712 - DNA, 13 bp, Artificial Sequence
  Oligonucleotide for detection of SNP TSC0057043
raaacaacatcat

SEQ ID NO: 233713 - DNA, 13 bp, Artificial Sequence
  Oligonucleotide for detection of SNP TSC0057044
aggttggggtagg

SEQ ID NO: 233714 - DNA, 13 bp, Artificial Sequence
  Oligonucleotide for detection of SNP TSC0057044
cctaccccaacct

SEQ ID NO: 233715 - DNA, 13 bp, Artificial Sequence
  Oligonucleotide for detection of SNP TSC0057044
aggtcgaggtagg

SEQ ID NO: 233716 - DNA, 13 bp, Artificial Sequence
  Oligonucleotide for detection of SNP TSC0057044
cctacctcgacct

SEQ ID NO: 233717 - DNA, 13 bp, Artificial Sequence
  Oligonucleotide for detection of SNP TSC0057044
aggtcggggtagg

SEQ ID NO: 233718 - DNA, 13 bp, Artificial Sequence
  Oligonucleotide for detection of SNP TSC0057044
cctaccccgacct

SEQ ID NO: 233719 - DNA, 13 bp, Artificial Sequence
  Oligonucleotide for detection of SNP TSC0057046
tttgatatattag

SEQ ID NO: 233720 - DNA, 13 bp, Artificial Sequence
  Oligonucleotide for detection of SNP TSC0057046
ctaatatatcaaa

SEQ ID NO: 233721 - DNA, 13 bp, Artificial Sequence
  Oligonucleotide for detection of SNP TSC0057046
tttgatgtattag

SEQ ID NO: 233722 - DNA, 13 bp, Artificial Sequence
  Oligonucleotide for detection of SNP TSC0057046
ctaatacatcaaa

SEQ ID NO: 233723 - DNA, 13 bp, Artificial Sequence
  Oligonucleotide for detection of SNP TSC0057047
tttgagatattgt

SEQ ID NO: 233724 - DNA, 13 bp, Artificial Sequence
  Oligonucleotide for detection of SNP TSC0057047
acaatatctcaaa

SEQ ID NO: 233725 - DNA, 13 bp, Artificial Sequence
  Oligonucleotide for detection of SNP TSC0057047
tttgaggtattgt

SEQ ID NO: 233726 - DNA, 13 bp, Artificial Sequence
  Oligonucleotide for detection of SNP TSC0057047
acaatacctcaaa

SEQ ID NO: 233727 - DNA, 13 bp, Artificial Sequence
  Oligonucleotide for detection of SNP TSC0010523
ataaatgtttgtg

SEQ ID NO: 233728 - DNA, 13 bp, Artificial Sequence
  Oligonucleotide for detection of SNP TSC0010523
cacaaacatttat

SEQ ID NO: 233729 - DNA, 13 bp, Artificial Sequence
  Oligonucleotide for detection of SNP TSC0010523
ataaatatttgtg

SEQ ID NO: 233730 - DNA, 13 bp, Artificial Sequence
  Oligonucleotide for detection of SNP TSC0010523
cacaaatatttat

SEQ ID NO: 233731 - DNA, 13 bp, Artificial Sequence
  Oligonucleotide for detection of SNP TSC0010525
tgttaaggtataa

SEQ ID NO: 233732 - DNA, 13 bp, Artificial Sequence
  Oligonucleotide for detection of SNP TSC0010525
ttataccttaaca

SEQ ID NO: 233733 - DNA, 13 bp, Artificial Sequence
  Oligonucleotide for detection of SNP TSC0010525
tgttaaagtataa

SEQ ID NO: 233734 - DNA, 13 bp, Artificial Sequence
  Oligonucleotide for detection of SNP TSC0010525
ttatactttaaca

SEQ ID NO: 233735 - DNA, 13 bp, Artificial Sequence
  Oligonucleotide for detection of SNP TSC0057048
tgtagtatgggga

SEQ ID NO: 233736 - DNA, 13 bp, Artificial Sequence
  Oligonucleotide for detection of SNP TSC0057048
tccccatactaca

SEQ ID NO: 233737 - DNA, 13 bp, Artificial Sequence
  Oligonucleotide for detection of SNP TSC0057048
tgtagtgtgggga

SEQ ID NO: 233738 - DNA, 13 bp, Artificial Sequence
  Oligonucleotide for detection of SNP TSC0057048
tccccacactaca

SEQ ID NO: 233739 - DNA, 13 bp, Artificial Sequence
  Oligonucleotide for detection of SNP TSC0057048
tgtagcgtgggga

SEQ ID NO: 233740 - DNA, 13 bp, Artificial Sequence
  Oligonucleotide for detection of SNP TSC0057048
tccccacgctaca

SEQ ID NO: 233741 - DNA, 13 bp, Artificial Sequence
  Oligonucleotide for detection of SNP TSC0057049
gagtataaggtta

SEQ ID NO: 233742 - DNA, 13 bp, Artificial Sequence
  Oligonucleotide for detection of SNP TSC0057049
taaccttatactc

SEQ ID NO: 233743 - DNA, 13 bp, Artificial Sequence
  Oligonucleotide for detection of SNP TSC0057049
gagtatgaggtta

SEQ ID NO: 233744 - DNA, 13 bp, Artificial Sequence
  Oligonucleotide for detection of SNP TSC0057049
taacctcatactc

SEQ ID NO: 233745 - DNA, 13 bp, Artificial Sequence
  Oligonucleotide for detection of SNP TSC0057050
aggggttgagaty

SEQ ID NO: 233746 - DNA, 13 bp, Artificial Sequence
  Oligonucleotide for detection of SNP TSC0057050
ratctcaacccct

SEQ ID NO: 233747 - DNA, 13 bp, Artificial Sequence
  Oligonucleotide for detection of SNP TSC0057050
aggggtcgagaty

SEQ ID NO: 233748 - DNA, 13 bp, Artificial Sequence
  Oligonucleotide for detection of SNP TSC0057050
ratctcgacccct

SEQ ID NO: 233749 - DNA, 13 bp, Artificial Sequence
  Oligonucleotide for detection of SNP TSC0057050
gattttgattttt

SEQ ID NO: 233750 - DNA, 13 bp, Artificial Sequence
  Oligonucleotide for detection of SNP TSC0057050
aaaaatcaaaatc

SEQ ID NO: 233751 - DNA, 13 bp, Artificial Sequence
  Oligonucleotide for detection of SNP TSC0057050
gattttaattttt

SEQ ID NO: 233752 - DNA, 13 bp, Artificial Sequence
  Oligonucleotide for detection of SNP TSC0057050
aaaaattaaaatc

SEQ ID NO: 233753 - DNA, 13 bp, Artificial Sequence
  Oligonucleotide for detection of SNP TSC0057050
gatttcgattttt

SEQ ID NO: 233754 - DNA, 13 bp, Artificial Sequence
  Oligonucleotide for detection of SNP TSC0057050
aaaaatcgaaatc

SEQ ID NO: 233755 - DNA, 13 bp, Artificial Sequence
  Oligonucleotide for detection of SNP TSC0057051
gatttaaaagaaa

SEQ ID NO: 233756 - DNA, 13 bp, Artificial Sequence
  Oligonucleotide for detection of SNP TSC0057051
tttcttttaaatc

SEQ ID NO: 233757 - DNA, 13 bp, Artificial Sequence
  Oligonucleotide for detection of SNP TSC0057051
gatttagaagaaa

SEQ ID NO: 233758 - DNA, 13 bp, Artificial Sequence
  Oligonucleotide for detection of SNP TSC0057051
tttcttctaaatc

SEQ ID NO: 233759 - DNA, 13 bp, Artificial Sequence
  Oligonucleotide for detection of SNP TSC0057052
ttaaaaaggttgg

SEQ ID NO: 233760 - DNA, 13 bp, Artificial Sequence
  Oligonucleotide for detection of SNP TSC0057052
ccaacctttttaa

SEQ ID NO: 233761 - DNA, 13 bp, Artificial Sequence
  Oligonucleotide for detection of SNP TSC0057052
ttaaaagggttgg

SEQ ID NO: 233762 - DNA, 13 bp, Artificial Sequence
  Oligonucleotide for detection of SNP TSC0057052
ccaacccttttaa

SEQ ID NO: 233763 - DNA, 13 bp, Artificial Sequence
  Oligonucleotide for detection of SNP TSC0057055
tagaaaaggaaga

SEQ ID NO: 233764 - DNA, 13 bp, Artificial Sequence
  Oligonucleotide for detection of SNP TSC0057055
tcttccttttcta

SEQ ID NO: 233765 - DNA, 13 bp, Artificial Sequence
  Oligonucleotide for detection of SNP TSC0057055
tagaaatggaaga

SEQ ID NO: 233766 - DNA, 13 bp, Artificial Sequence
  Oligonucleotide for detection of SNP TSC0057055
tcttccatttcta

SEQ ID NO: 233767 - DNA, 13 bp, Artificial Sequence
  Oligonucleotide for detection of SNP TSC0057055
tagaaacggaaga

SEQ ID NO: 233768 - DNA, 13 bp, Artificial Sequence
  Oligonucleotide for detection of SNP TSC0057055
tcttccgtttcta

SEQ ID NO: 233769 - DNA, 13 bp, Artificial Sequence
  Oligonucleotide for detection of SNP TSC0057056
agtatttgatgty

SEQ ID NO: 233770 - DNA, 13 bp, Artificial Sequence
  Oligonucleotide for detection of SNP TSC0057056
racatcaaatact

SEQ ID NO: 233771 - DNA, 13 bp, Artificial Sequence
  Oligonucleotide for detection of SNP TSC0057056
agtattggatgty

SEQ ID NO: 233772 - DNA, 13 bp, Artificial Sequence
  Oligonucleotide for detection of SNP TSC0057056
racatccaatact

SEQ ID NO: 233773 - DNA, 13 bp, Artificial Sequence
  Oligonucleotide for detection of SNP TSC0057056
agtattcgatgty

SEQ ID NO: 233774 - DNA, 13 bp, Artificial Sequence
  Oligonucleotide for detection of SNP TSC0057056
racatcgaatact

SEQ ID NO: 233775 - DNA, 13 bp, Artificial Sequence
  Oligonucleotide for detection of SNP TSC0057056
agtatcggatgty

SEQ ID NO: 233776 - DNA, 13 bp, Artificial Sequence
  Oligonucleotide for detection of SNP TSC0057056
racatccgatact

SEQ ID NO: 233777 - DNA, 13 bp, Artificial Sequence
  Oligonucleotide for detection of SNP TSC0057056
ggtattgggtatt

SEQ ID NO: 233778 - DNA, 13 bp, Artificial Sequence
  Oligonucleotide for detection of SNP TSC0057056
aatacccaatacc

SEQ ID NO: 233779 - DNA, 13 bp, Artificial Sequence
  Oligonucleotide for detection of SNP TSC0057056
ggtatttggtatt

SEQ ID NO: 233780 - DNA, 13 bp, Artificial Sequence
  Oligonucleotide for detection of SNP TSC0057056
aataccaaatacc

SEQ ID NO: 233781 - DNA, 13 bp, Artificial Sequence
  Oligonucleotide for detection of SNP TSC0057056
ggtatcgggtatt

SEQ ID NO: 233782 - DNA, 13 bp, Artificial Sequence
  Oligonucleotide for detection of SNP TSC0057056
aatacccgatacc

SEQ ID NO: 233783 - DNA, 13 bp, Artificial Sequence
  Oligonucleotide for detection of SNP TSC0057056
ggtattcggtatt

SEQ ID NO: 233784 - DNA, 13 bp, Artificial Sequence
  Oligonucleotide for detection of SNP TSC0057056
aataccgaatacc

SEQ ID NO: 233785 - DNA, 13 bp, Artificial Sequence
  Oligonucleotide for detection of SNP TSC0057058
atagataggtaay

SEQ ID NO: 233786 - DNA, 13 bp, Artificial Sequence
  Oligonucleotide for detection of SNP TSC0057058
rttacctatctat

SEQ ID NO: 233787 - DNA, 13 bp, Artificial Sequence
  Oligonucleotide for detection of SNP TSC0057058
atagatgggtaay

SEQ ID NO: 233788 - DNA, 13 bp, Artificial Sequence
  Oligonucleotide for detection of SNP TSC0057058
rttacccatctat

SEQ ID NO: 233789 - DNA, 13 bp, Artificial Sequence
  Oligonucleotide for detection of SNP TSC0057059
ataagatggttty

SEQ ID NO: 233790 - DNA, 13 bp, Artificial Sequence
  Oligonucleotide for detection of SNP TSC0057059
raaaccatcttat

SEQ ID NO: 233791 - DNA, 13 bp, Artificial Sequence
  Oligonucleotide for detection of SNP TSC0057059
ataagacggttty

SEQ ID NO: 233792 - DNA, 13 bp, Artificial Sequence
  Oligonucleotide for detection of SNP TSC0057059
raaaccgtcttat

SEQ ID NO: 233793 - DNA, 13 bp, Artificial Sequence
  Oligonucleotide for detection of SNP TSC0057060
tattttgtattgt

SEQ ID NO: 233794 - DNA, 13 bp, Artificial Sequence
  Oligonucleotide for detection of SNP TSC0057060
acaatacaaaata

SEQ ID NO: 233795 - DNA, 13 bp, Artificial Sequence
  Oligonucleotide for detection of SNP TSC0057060
tattttatatcgt

SEQ ID NO: 233796 - DNA, 13 bp, Artificial Sequence
  Oligonucleotide for detection of SNP TSC0057060
acgatataaaata

SEQ ID NO: 233797 - DNA, 13 bp, Artificial Sequence
  Oligonucleotide for detection of SNP TSC0057060
tatttcgtattgt

SEQ ID NO: 233798 - DNA, 13 bp, Artificial Sequence
  Oligonucleotide for detection of SNP TSC0057060
acaatacgaaata

SEQ ID NO: 233799 - DNA, 13 bp, Artificial Sequence
  Oligonucleotide for detection of SNP TSC0057060
tattttgtatcgt

SEQ ID NO: 233800 - DNA, 13 bp, Artificial Sequence
  Oligonucleotide for detection of SNP TSC0057060
acgatacaaaata

SEQ ID NO: 233801 - DNA, 13 bp, Artificial Sequence
  Oligonucleotide for detection of SNP TSC0057060
tatttcgtatcgt

SEQ ID NO: 233802 - DNA, 13 bp, Artificial Sequence
  Oligonucleotide for detection of SNP TSC0057060
acgatacgaaata

SEQ ID NO: 233803 - DNA, 13 bp, Artificial Sequence
  Oligonucleotide for detection of SNP TSC0057060
atgatgtgaggtg

SEQ ID NO: 233804 - DNA, 13 bp, Artificial Sequence
  Oligonucleotide for detection of SNP TSC0057060
cacctcacatcat

SEQ ID NO: 233805 - DNA, 13 bp, Artificial Sequence
  Oligonucleotide for detection of SNP TSC0057060
acgatgtgaggtg

SEQ ID NO: 233806 - DNA, 13 bp, Artificial Sequence
  Oligonucleotide for detection of SNP TSC0057060
cacctcacatcgt

SEQ ID NO: 233807 - DNA, 13 bp, Artificial Sequence
  Oligonucleotide for detection of SNP TSC0057060
atgatgcgaggtg

SEQ ID NO: 233808 - DNA, 13 bp, Artificial Sequence
  Oligonucleotide for detection of SNP TSC0057060
cacctcgcatcat

SEQ ID NO: 233809 - DNA, 13 bp, Artificial Sequence
  Oligonucleotide for detection of SNP TSC0057060
acgatgcgaggtg

SEQ ID NO: 233810 - DNA, 13 bp, Artificial Sequence
  Oligonucleotide for detection of SNP TSC0057060
cacctcgcatcgt

SEQ ID NO: 233811 - DNA, 13 bp, Artificial Sequence
  Oligonucleotide for detection of SNP TSC0057062
tataaaagtttty

SEQ ID NO: 233812 - DNA, 13 bp, Artificial Sequence
  Oligonucleotide for detection of SNP TSC0057062
raaaacttttata

SEQ ID NO: 233813 - DNA, 13 bp, Artificial Sequence
  Oligonucleotide for detection of SNP TSC0057062
tataaatgtttty

SEQ ID NO: 233814 - DNA, 13 bp, Artificial Sequence
  Oligonucleotide for detection of SNP TSC0057062
raaaacatttata

SEQ ID NO: 233815 - DNA, 13 bp, Artificial Sequence
  Oligonucleotide for detection of SNP TSC0057062
tataaacgtttty

SEQ ID NO: 233816 - DNA, 13 bp, Artificial Sequence
  Oligonucleotide for detection of SNP TSC0057062
raaaacgtttata

SEQ ID NO: 233817 - DNA, 13 bp, Artificial Sequence
  Oligonucleotide for detection of SNP TSC0057062
gaggatttttata

SEQ ID NO: 233818 - DNA, 13 bp, Artificial Sequence
  Oligonucleotide for detection of SNP TSC0057062
tataaaaatcctc

SEQ ID NO: 233819 - DNA, 13 bp, Artificial Sequence
  Oligonucleotide for detection of SNP TSC0057062
gaggatgtttata

SEQ ID NO: 233820 - DNA, 13 bp, Artificial Sequence
  Oligonucleotide for detection of SNP TSC0057062
tataaacatcctc

SEQ ID NO: 233821 - DNA, 13 bp, Artificial Sequence
  Oligonucleotide for detection of SNP TSC0057062
gaggacgtttata

SEQ ID NO: 233822 - DNA, 13 bp, Artificial Sequence
  Oligonucleotide for detection of SNP TSC0057062
tataaacgtcctc

SEQ ID NO: 233823 - DNA, 13 bp, Artificial Sequence
  Oligonucleotide for detection of SNP TSC0057063
tttaaaataaatg

SEQ ID NO: 233824 - DNA, 13 bp, Artificial Sequence
  Oligonucleotide for detection of SNP TSC0057063
catttattttaaa

SEQ ID NO: 233825 - DNA, 13 bp, Artificial Sequence
  Oligonucleotide for detection of SNP TSC0057063
tttaaagtaaatg

SEQ ID NO: 233826 - DNA, 13 bp, Artificial Sequence
  Oligonucleotide for detection of SNP TSC0057063
catttactttaaa

SEQ ID NO: 233827 - DNA, 13 bp, Artificial Sequence
  Oligonucleotide for detection of SNP TSC0057065
aaaatatgtgata

SEQ ID NO: 233828 - DNA, 13 bp, Artificial Sequence
  Oligonucleotide for detection of SNP TSC0057065
tatcacatatttt

SEQ ID NO: 233829 - DNA, 13 bp, Artificial Sequence
  Oligonucleotide for detection of SNP TSC0057065
aaaatacgtgata

SEQ ID NO: 233830 - DNA, 13 bp, Artificial Sequence
  Oligonucleotide for detection of SNP TSC0057065
tatcacgtatttt

SEQ ID NO: 233831 - DNA, 13 bp, Artificial Sequence
  Oligonucleotide for detection of SNP TSC0057068
tgttggtgttgaa

SEQ ID NO: 233832 - DNA, 13 bp, Artificial Sequence
  Oligonucleotide for detection of SNP TSC0057068
ttcaacaccaaca

SEQ ID NO: 233833 - DNA, 13 bp, Artificial Sequence
  Oligonucleotide for detection of SNP TSC0057068
tgttggcgttgaa

SEQ ID NO: 233834 - DNA, 13 bp, Artificial Sequence
  Oligonucleotide for detection of SNP TSC0057068
ttcaacgccaaca

SEQ ID NO: 233835 - DNA, 13 bp, Artificial Sequence
  Oligonucleotide for detection of SNP TSC0057068
tttagtgttaata

SEQ ID NO: 233836 - DNA, 13 bp, Artificial Sequence
  Oligonucleotide for detection of SNP TSC0057068
tattaacactaaa

SEQ ID NO: 233837 - DNA, 13 bp, Artificial Sequence
  Oligonucleotide for detection of SNP TSC0057068
tttagtattaata

SEQ ID NO: 233838 - DNA, 13 bp, Artificial Sequence
  Oligonucleotide for detection of SNP TSC0057068
tattaatactaaa

SEQ ID NO: 233839 - DNA, 13 bp, Artificial Sequence
  Oligonucleotide for detection of SNP TSC0057068
tttagcgttaata

SEQ ID NO: 233840 - DNA, 13 bp, Artificial Sequence
  Oligonucleotide for detection of SNP TSC0057068
tattaacgctaaa

SEQ ID NO: 233841 - DNA, 13 bp, Artificial Sequence
  Oligonucleotide for detection of SNP TSC0057069
tatataaaagagy

SEQ ID NO: 233842 - DNA, 13 bp, Artificial Sequence
  Oligonucleotide for detection of SNP TSC0057069
rctcttttatata

SEQ ID NO: 233843 - DNA, 13 bp, Artificial Sequence
  Oligonucleotide for detection of SNP TSC0057069
tatatataagagy

SEQ ID NO: 233844 - DNA, 13 bp, Artificial Sequence
  Oligonucleotide for detection of SNP TSC0057069
rctcttatatata

SEQ ID NO: 233845 - DNA, 13 bp, Artificial Sequence
  Oligonucleotide for detection of SNP TSC0057069
gtttttttatgta

SEQ ID NO: 233846 - DNA, 13 bp, Artificial Sequence
  Oligonucleotide for detection of SNP TSC0057069
tacataaaaaaac

SEQ ID NO: 233847 - DNA, 13 bp, Artificial Sequence
  Oligonucleotide for detection of SNP TSC0057069
gtttttatatgta

SEQ ID NO: 233848 - DNA, 13 bp, Artificial Sequence
  Oligonucleotide for detection of SNP TSC0057069
tacatataaaaac

SEQ ID NO: 233849 - DNA, 13 bp, Artificial Sequence
  Oligonucleotide for detection of SNP TSC0057070
gaaatatatatga

SEQ ID NO: 233850 - DNA, 13 bp, Artificial Sequence
  Oligonucleotide for detection of SNP TSC0057070
tcatatatatttc

SEQ ID NO: 233851 - DNA, 13 bp, Artificial Sequence
  Oligonucleotide for detection of SNP TSC0057070
gaaatagatatga

SEQ ID NO: 233852 - DNA, 13 bp, Artificial Sequence
  Oligonucleotide for detection of SNP TSC0057070
tcatatctatttc

SEQ ID NO: 233853 - DNA, 13 bp, Artificial Sequence
  Oligonucleotide for detection of SNP TSC0057070
gaaatatatacga

SEQ ID NO: 233854 - DNA, 13 bp, Artificial Sequence
  Oligonucleotide for detection of SNP TSC0057070
tcgtatatatttc

SEQ ID NO: 233855 - DNA, 13 bp, Artificial Sequence
  Oligonucleotide for detection of SNP TSC0057070
gaaatagatacga

SEQ ID NO: 233856 - DNA, 13 bp, Artificial Sequence
  Oligonucleotide for detection of SNP TSC0057070
tcgtatctatttc

SEQ ID NO: 233857 - DNA, 13 bp, Artificial Sequence
  Oligonucleotide for detection of SNP TSC0057070
ttgtatatgttty

SEQ ID NO: 233858 - DNA, 13 bp, Artificial Sequence
  Oligonucleotide for detection of SNP TSC0057070
raaacatatacaa

SEQ ID NO: 233859 - DNA, 13 bp, Artificial Sequence
  Oligonucleotide for detection of SNP TSC0057070
ttgtatttgttty

SEQ ID NO: 233860 - DNA, 13 bp, Artificial Sequence
  Oligonucleotide for detection of SNP TSC0057070
raaacaaatacaa

SEQ ID NO: 233861 - DNA, 13 bp, Artificial Sequence
  Oligonucleotide for detection of SNP TSC0057070
tcgtatatgttty

SEQ ID NO: 233862 - DNA, 13 bp, Artificial Sequence
  Oligonucleotide for detection of SNP TSC0057070
raaacatatacga

SEQ ID NO: 233863 - DNA, 13 bp, Artificial Sequence
  Oligonucleotide for detection of SNP TSC0057070
tcgtatttgttty

SEQ ID NO: 233864 - DNA, 13 bp, Artificial Sequence
  Oligonucleotide for detection of SNP TSC0057070
raaacaaatacga

SEQ ID NO: 233865 - DNA, 13 bp, Artificial Sequence
  Oligonucleotide for detection of SNP TSC0057073
gagggtttaggtt

SEQ ID NO: 233866 - DNA, 13 bp, Artificial Sequence
  Oligonucleotide for detection of SNP TSC0057073
aacctaaaccctc

SEQ ID NO: 233867 - DNA, 13 bp, Artificial Sequence
  Oligonucleotide for detection of SNP TSC0057073
gagggtgtaggtt

SEQ ID NO: 233868 - DNA, 13 bp, Artificial Sequence
  Oligonucleotide for detection of SNP TSC0057073
aacctacaccctc

SEQ ID NO: 233869 - DNA, 13 bp, Artificial Sequence
  Oligonucleotide for detection of SNP TSC0057073
agtttgaatttty

SEQ ID NO: 233870 - DNA, 13 bp, Artificial Sequence
  Oligonucleotide for detection of SNP TSC0057073
raaaattcaaact

SEQ ID NO: 233871 - DNA, 13 bp, Artificial Sequence
  Oligonucleotide for detection of SNP TSC0057073
agtttgtatttty

SEQ ID NO: 233872 - DNA, 13 bp, Artificial Sequence
  Oligonucleotide for detection of SNP TSC0057073
raaaatacaaact

SEQ ID NO: 233873 - DNA, 13 bp, Artificial Sequence
  Oligonucleotide for detection of SNP TSC0057074
agaatgatataag

SEQ ID NO: 233874 - DNA, 13 bp, Artificial Sequence
  Oligonucleotide for detection of SNP TSC0057074
cttatatcattct

SEQ ID NO: 233875 - DNA, 13 bp, Artificial Sequence
  Oligonucleotide for detection of SNP TSC0057074
agaatgttataag

SEQ ID NO: 233876 - DNA, 13 bp, Artificial Sequence
  Oligonucleotide for detection of SNP TSC0057074
cttataacattct

SEQ ID NO: 233877 - DNA, 13 bp, Artificial Sequence
  Oligonucleotide for detection of SNP TSC0057075
agtgagtggttgt

SEQ ID NO: 233878 - DNA, 13 bp, Artificial Sequence
  Oligonucleotide for detection of SNP TSC0057075
acaaccactcact

SEQ ID NO: 233879 - DNA, 13 bp, Artificial Sequence
  Oligonucleotide for detection of SNP TSC0057075
agtgaggggttgt

SEQ ID NO: 233880 - DNA, 13 bp, Artificial Sequence
  Oligonucleotide for detection of SNP TSC0057075
acaacccctcact

SEQ ID NO: 233881 - DNA, 13 bp, Artificial Sequence
  Oligonucleotide for detection of SNP TSC0057075
agtgagcggttgt

SEQ ID NO: 233882 - DNA, 13 bp, Artificial Sequence
  Oligonucleotide for detection of SNP TSC0057075
acaaccgctcact

SEQ ID NO: 233883 - DNA, 13 bp, Artificial Sequence
  Oligonucleotide for detection of SNP TSC0057075
ataattgtttatt

SEQ ID NO: 233884 - DNA, 13 bp, Artificial Sequence
  Oligonucleotide for detection of SNP TSC0057075
aataaacaattat

SEQ ID NO: 233885 - DNA, 13 bp, Artificial Sequence
  Oligonucleotide for detection of SNP TSC0057075
ataattttttatt

SEQ ID NO: 233886 - DNA, 13 bp, Artificial Sequence
  Oligonucleotide for detection of SNP TSC0057075
aataaaaaattat

SEQ ID NO: 233887 - DNA, 13 bp, Artificial Sequence
  Oligonucleotide for detection of SNP TSC0057075
ataatcgtttatt

SEQ ID NO: 233888 - DNA, 13 bp, Artificial Sequence
  Oligonucleotide for detection of SNP TSC0057075
aataaacgattat

SEQ ID NO: 233889 - DNA, 13 bp, Artificial Sequence
  Oligonucleotide for detection of SNP TSC0057080
ggtaatattttga

SEQ ID NO: 233890 - DNA, 13 bp, Artificial Sequence
  Oligonucleotide for detection of SNP TSC0057080
tcaaaatattacc

SEQ ID NO: 233891 - DNA, 13 bp, Artificial Sequence
  Oligonucleotide for detection of SNP TSC0057080
ggtaattttttga

SEQ ID NO: 233892 - DNA, 13 bp, Artificial Sequence
  Oligonucleotide for detection of SNP TSC0057080
tcaaaaaattacc

SEQ ID NO: 233893 - DNA, 13 bp, Artificial Sequence
  Oligonucleotide for detection of SNP TSC0057080
ttaaagtgttaty

SEQ ID NO: 233894 - DNA, 13 bp, Artificial Sequence
  Oligonucleotide for detection of SNP TSC0057080
rataacactttaa

SEQ ID NO: 233895 - DNA, 13 bp, Artificial Sequence
  Oligonucleotide for detection of SNP TSC0057080
ttaaagggttaty

SEQ ID NO: 233896 - DNA, 13 bp, Artificial Sequence
  Oligonucleotide for detection of SNP TSC0057080
rataaccctttaa

SEQ ID NO: 233897 - DNA, 13 bp, Artificial Sequence
  Oligonucleotide for detection of SNP TSC0000157
tatgggtgtttay

SEQ ID NO: 233898 - DNA, 13 bp, Artificial Sequence
  Oligonucleotide for detection of SNP TSC0000157
rtaaacacccata

SEQ ID NO: 233899 - DNA, 13 bp, Artificial Sequence
  Oligonucleotide for detection of SNP TSC0000157
tatgggcgtttay

SEQ ID NO: 233900 - DNA, 13 bp, Artificial Sequence
  Oligonucleotide for detection of SNP TSC0000157
rtaaacgcccata

SEQ ID NO: 233901 - DNA, 13 bp, Artificial Sequence
  Oligonucleotide for detection of SNP TSC0000157
gtgggtgtttatg

SEQ ID NO: 233902 - DNA, 13 bp, Artificial Sequence
  Oligonucleotide for detection of SNP TSC0000157
cataaacacccac

SEQ ID NO: 233903 - DNA, 13 bp, Artificial Sequence
  Oligonucleotide for detection of SNP TSC0000157
gtgggtatttatg

SEQ ID NO: 233904 - DNA, 13 bp, Artificial Sequence
  Oligonucleotide for detection of SNP TSC0000157
cataaatacccac

SEQ ID NO: 233905 - DNA, 13 bp, Artificial Sequence
  Oligonucleotide for detection of SNP TSC0000157
gtgggcgtttatg

SEQ ID NO: 233906 - DNA, 13 bp, Artificial Sequence
  Oligonucleotide for detection of SNP TSC0000157
cataaacgcccac

SEQ ID NO: 233907 - DNA, 13 bp, Artificial Sequence
  Oligonucleotide for detection of SNP TSC0057082
tatattattgtta

SEQ ID NO: 233908 - DNA, 13 bp, Artificial Sequence
  Oligonucleotide for detection of SNP TSC0057082
taacaataatata

SEQ ID NO: 233909 - DNA, 13 bp, Artificial Sequence
  Oligonucleotide for detection of SNP TSC0057086
aatgatatagagy

SEQ ID NO: 233910 - DNA, 13 bp, Artificial Sequence
  Oligonucleotide for detection of SNP TSC0057086
rctctatatcatt

SEQ ID NO: 233911 - DNA, 13 bp, Artificial Sequence
  Oligonucleotide for detection of SNP TSC0057086
aatgatgtagagy

SEQ ID NO: 233912 - DNA, 13 bp, Artificial Sequence
  Oligonucleotide for detection of SNP TSC0057086
rctctacatcatt

SEQ ID NO: 233913 - DNA, 13 bp, Artificial Sequence
  Oligonucleotide for detection of SNP TSC0057087
aaggatttgaaga

SEQ ID NO: 233914 - DNA, 13 bp, Artificial Sequence
  Oligonucleotide for detection of SNP TSC0057087
tcttcaaatcctt

SEQ ID NO: 233915 - DNA, 13 bp, Artificial Sequence
  Oligonucleotide for detection of SNP TSC0057087
aaggatgtgaaga

SEQ ID NO: 233916 - DNA, 13 bp, Artificial Sequence
  Oligonucleotide for detection of SNP TSC0057087
tcttcacatcctt

SEQ ID NO: 233917 - DNA, 13 bp, Artificial Sequence
  Oligonucleotide for detection of SNP TSC0057087
aaggacgtgaaga

SEQ ID NO: 233918 - DNA, 13 bp, Artificial Sequence
  Oligonucleotide for detection of SNP TSC0057087
tcttcacgtcctt

SEQ ID NO: 233919 - DNA, 13 bp, Artificial Sequence
  Oligonucleotide for detection of SNP TSC0057088
ttttgtgaagtag

SEQ ID NO: 233920 - DNA, 13 bp, Artificial Sequence
  Oligonucleotide for detection of SNP TSC0057088
ctacttcacaaaa

SEQ ID NO: 233921 - DNA, 13 bp, Artificial Sequence
  Oligonucleotide for detection of SNP TSC0057088
ttttgtaaagtag

SEQ ID NO: 233922 - DNA, 13 bp, Artificial Sequence
  Oligonucleotide for detection of SNP TSC0057088
ctactttacaaaa

SEQ ID NO: 233923 - DNA, 13 bp, Artificial Sequence
  Oligonucleotide for detection of SNP TSC0057088
tttcgtgaagtag

SEQ ID NO: 233924 - DNA, 13 bp, Artificial Sequence
  Oligonucleotide for detection of SNP TSC0057088
ctacttcacgaaa

SEQ ID NO: 233925 - DNA, 13 bp, Artificial Sequence
  Oligonucleotide for detection of SNP TSC0057088
tttcgtaaagtag

SEQ ID NO: 233926 - DNA, 13 bp, Artificial Sequence
  Oligonucleotide for detection of SNP TSC0057088
ctactttacgaaa

SEQ ID NO: 233927 - DNA, 13 bp, Artificial Sequence
  Oligonucleotide for detection of SNP TSC0057089
aaatataaaggay

SEQ ID NO: 233928 - DNA, 13 bp, Artificial Sequence
  Oligonucleotide for detection of SNP TSC0057089
rtcctttatattt

SEQ ID NO: 233929 - DNA, 13 bp, Artificial Sequence
  Oligonucleotide for detection of SNP TSC0057089
aaatattaaggay

SEQ ID NO: 233930 - DNA, 13 bp, Artificial Sequence
  Oligonucleotide for detection of SNP TSC0057089
rtccttaatattt

SEQ ID NO: 233931 - DNA, 13 bp, Artificial Sequence
  Oligonucleotide for detection of SNP TSC0057089
gttttttgtattt

SEQ ID NO: 233932 - DNA, 13 bp, Artificial Sequence
  Oligonucleotide for detection of SNP TSC0057089
aaatacaaaaaac

SEQ ID NO: 233933 - DNA, 13 bp, Artificial Sequence
  Oligonucleotide for detection of SNP TSC0057089
gtttttagtattt

SEQ ID NO: 233934 - DNA, 13 bp, Artificial Sequence
  Oligonucleotide for detection of SNP TSC0057089
aaatactaaaaac

SEQ ID NO: 233935 - DNA, 13 bp, Artificial Sequence
  Oligonucleotide for detection of SNP TSC0010025
aaatagaaaatag

SEQ ID NO: 233936 - DNA, 13 bp, Artificial Sequence
  Oligonucleotide for detection of SNP TSC0010025
ctattttctattt

SEQ ID NO: 233937 - DNA, 13 bp, Artificial Sequence
  Oligonucleotide for detection of SNP TSC0010025
aaataggaaatag

SEQ ID NO: 233938 - DNA, 13 bp, Artificial Sequence
  Oligonucleotide for detection of SNP TSC0010025
ctatttcctattt

SEQ ID NO: 233939 - DNA, 13 bp, Artificial Sequence
  Oligonucleotide for detection of SNP TSC0010026
aagtatggattta

SEQ ID NO: 233940 - DNA, 13 bp, Artificial Sequence
  Oligonucleotide for detection of SNP TSC0010026
taaatccatactt

SEQ ID NO: 233941 - DNA, 13 bp, Artificial Sequence
  Oligonucleotide for detection of SNP TSC0010026
aagtatagattta

SEQ ID NO: 233942 - DNA, 13 bp, Artificial Sequence
  Oligonucleotide for detection of SNP TSC0010026
taaatctatactt

SEQ ID NO: 233943 - DNA, 13 bp, Artificial Sequence
  Oligonucleotide for detection of SNP TSC0009520
gtggtaattaggt

SEQ ID NO: 233944 - DNA, 13 bp, Artificial Sequence
  Oligonucleotide for detection of SNP TSC0009520
acctaattaccac

SEQ ID NO: 233945 - DNA, 13 bp, Artificial Sequence
  Oligonucleotide for detection of SNP TSC0009520
gtggtagttaggt

SEQ ID NO: 233946 - DNA, 13 bp, Artificial Sequence
  Oligonucleotide for detection of SNP TSC0009520
acctaactaccac

SEQ ID NO: 233947 - DNA, 13 bp, Artificial Sequence
  Oligonucleotide for detection of SNP TSC0009521
ttatttgttaagy

SEQ ID NO: 233948 - DNA, 13 bp, Artificial Sequence
  Oligonucleotide for detection of SNP TSC0009521
rcttaacaaataa

SEQ ID NO: 233949 - DNA, 13 bp, Artificial Sequence
  Oligonucleotide for detection of SNP TSC0009521
ttatttattaagy

SEQ ID NO: 233950 - DNA, 13 bp, Artificial Sequence
  Oligonucleotide for detection of SNP TSC0009521
rcttaataaataa

SEQ ID NO: 233951 - DNA, 13 bp, Artificial Sequence
  Oligonucleotide for detection of SNP TSC0057094
tagataatgatga

SEQ ID NO: 233952 - DNA, 13 bp, Artificial Sequence
  Oligonucleotide for detection of SNP TSC0057094
tcatcattatcta

SEQ ID NO: 233953 - DNA, 13 bp, Artificial Sequence
  Oligonucleotide for detection of SNP TSC0057094
tagatagtgatga

SEQ ID NO: 233954 - DNA, 13 bp, Artificial Sequence
  Oligonucleotide for detection of SNP TSC0057094
tcatcactatcta

SEQ ID NO: 233955 - DNA, 13 bp, Artificial Sequence
  Oligonucleotide for detection of SNP TSC0057096
tataaaagaaagy

SEQ ID NO: 233956 - DNA, 13 bp, Artificial Sequence
  Oligonucleotide for detection of SNP TSC0057096
rctttcttttata

SEQ ID NO: 233957 - DNA, 13 bp, Artificial Sequence
  Oligonucleotide for detection of SNP TSC0057096
tataaaggaaagy

SEQ ID NO: 233958 - DNA, 13 bp, Artificial Sequence
  Oligonucleotide for detection of SNP TSC0057096
rctttcctttata

SEQ ID NO: 233959 - DNA, 13 bp, Artificial Sequence
  Oligonucleotide for detection of SNP TSC0057097
atagtagatgaty

SEQ ID NO: 233960 - DNA, 13 bp, Artificial Sequence
  Oligonucleotide for detection of SNP TSC0057097
ratcatctactat

SEQ ID NO: 233961 - DNA, 13 bp, Artificial Sequence
  Oligonucleotide for detection of SNP TSC0057097
atagtaaatgaty

SEQ ID NO: 233962 - DNA, 13 bp, Artificial Sequence
  Oligonucleotide for detection of SNP TSC0057097
ratcatttactat

SEQ ID NO: 233963 - DNA, 13 bp, Artificial Sequence
  Oligonucleotide for detection of SNP TSC0057097
atagtagacgaty

SEQ ID NO: 233964 - DNA, 13 bp, Artificial Sequence
  Oligonucleotide for detection of SNP TSC0057097
ratcgtctactat

SEQ ID NO: 233965 - DNA, 13 bp, Artificial Sequence
  Oligonucleotide for detection of SNP TSC0057097
atagtaaacgaty

SEQ ID NO: 233966 - DNA, 13 bp, Artificial Sequence
  Oligonucleotide for detection of SNP TSC0057097
ratcgtttactat

SEQ ID NO: 233967 - DNA, 13 bp, Artificial Sequence
  Oligonucleotide for detection of SNP TSC0057099
ttgtagtgtaaat

SEQ ID NO: 233968 - DNA, 13 bp, Artificial Sequence
  Oligonucleotide for detection of SNP TSC0057099
atttacactacaa

SEQ ID NO: 233969 - DNA, 13 bp, Artificial Sequence
  Oligonucleotide for detection of SNP TSC0057099
ttgtagcgtaaat

SEQ ID NO: 233970 - DNA, 13 bp, Artificial Sequence
  Oligonucleotide for detection of SNP TSC0057099
atttacgctacaa

SEQ ID NO: 233971 - DNA, 13 bp, Artificial Sequence
  Oligonucleotide for detection of SNP TSC0057099
atttgtgttataa

SEQ ID NO: 233972 - DNA, 13 bp, Artificial Sequence
  Oligonucleotide for detection of SNP TSC0057099
ttataacacaaat

SEQ ID NO: 233973 - DNA, 13 bp, Artificial Sequence
  Oligonucleotide for detection of SNP TSC0057099
atttgtattataa

SEQ ID NO: 233974 - DNA, 13 bp, Artificial Sequence
  Oligonucleotide for detection of SNP TSC0057099
ttataatacaaat

SEQ ID NO: 233975 - DNA, 13 bp, Artificial Sequence
  Oligonucleotide for detection of SNP TSC0057099
atttgcgttataa

SEQ ID NO: 233976 - DNA, 13 bp, Artificial Sequence
  Oligonucleotide for detection of SNP TSC0057099
ttataacgcaaat

SEQ ID NO: 233977 - DNA, 13 bp, Artificial Sequence
  Oligonucleotide for detection of SNP TSC0057100
aatatgatataaa

SEQ ID NO: 233978 - DNA, 13 bp, Artificial Sequence
  Oligonucleotide for detection of SNP TSC0057100
tttatatcatatt

SEQ ID NO: 233979 - DNA, 13 bp, Artificial Sequence
  Oligonucleotide for detection of SNP TSC0057100
aatatggtataaa

SEQ ID NO: 233980 - DNA, 13 bp, Artificial Sequence
  Oligonucleotide for detection of SNP TSC0057100
tttataccatatt

SEQ ID NO: 233981 - DNA, 13 bp, Artificial Sequence
  Oligonucleotide for detection of SNP TSC0057101
attattaattgag

SEQ ID NO: 233982 - DNA, 13 bp, Artificial Sequence
  Oligonucleotide for detection of SNP TSC0057101
ctcaattaataat

SEQ ID NO: 233983 - DNA, 13 bp, Artificial Sequence
  Oligonucleotide for detection of SNP TSC0057101
attattgattgag

SEQ ID NO: 233984 - DNA, 13 bp, Artificial Sequence
  Oligonucleotide for detection of SNP TSC0057101
ctcaatcaataat

SEQ ID NO: 233985 - DNA, 13 bp, Artificial Sequence
  Oligonucleotide for detection of SNP TSC0057101
attatcgattgag

SEQ ID NO: 233986 - DNA, 13 bp, Artificial Sequence
  Oligonucleotide for detection of SNP TSC0057101
ctcaatcgataat

SEQ ID NO: 233987 - DNA, 13 bp, Artificial Sequence
  Oligonucleotide for detection of SNP TSC0057101
tttaattgatggt

SEQ ID NO: 233988 - DNA, 13 bp, Artificial Sequence
  Oligonucleotide for detection of SNP TSC0057101
accatcaattaaa

SEQ ID NO: 233989 - DNA, 13 bp, Artificial Sequence
  Oligonucleotide for detection of SNP TSC0057101
tttaatcgatggt

SEQ ID NO: 233990 - DNA, 13 bp, Artificial Sequence
  Oligonucleotide for detection of SNP TSC0057101
accatcgattaaa

SEQ ID NO: 233991 - DNA, 13 bp, Artificial Sequence
  Oligonucleotide for detection of SNP TSC0057102
gaatttaagaggt

SEQ ID NO: 233992 - DNA, 13 bp, Artificial Sequence
  Oligonucleotide for detection of SNP TSC0057102
acctcttaaattc

SEQ ID NO: 233993 - DNA, 13 bp, Artificial Sequence
  Oligonucleotide for detection of SNP TSC0057102
gaatttgagaggt

SEQ ID NO: 233994 - DNA, 13 bp, Artificial Sequence
  Oligonucleotide for detection of SNP TSC0057102
acctctcaaattc

SEQ ID NO: 233995 - DNA, 13 bp, Artificial Sequence
  Oligonucleotide for detection of SNP TSC0057102
gaattcgagaggt

SEQ ID NO: 233996 - DNA, 13 bp, Artificial Sequence
  Oligonucleotide for detection of SNP TSC0057102
acctctcgaattc

SEQ ID NO: 233997 - DNA, 13 bp, Artificial Sequence
  Oligonucleotide for detection of SNP TSC0057103
atatgaattatat

SEQ ID NO: 233998 - DNA, 13 bp, Artificial Sequence
  Oligonucleotide for detection of SNP TSC0057103
atataattcatat

SEQ ID NO: 233999 - DNA, 13 bp, Artificial Sequence
  Oligonucleotide for detection of SNP TSC0057103
atatgatttatat

SEQ ID NO: 234000 - DNA, 13 bp, Artificial Sequence
  Oligonucleotide for detection of SNP TSC0057103
atataaatcatat

SEQ ID NO: 234001 - DNA, 13 bp, Artificial Sequence
  Oligonucleotide for detection of SNP TSC0057103
atatgatttatgt

SEQ ID NO: 234002 - DNA, 13 bp, Artificial Sequence
  Oligonucleotide for detection of SNP TSC0057103
acataaatcatat

SEQ ID NO: 234003 - DNA, 13 bp, Artificial Sequence
  Oligonucleotide for detection of SNP TSC0057103
atatgagttatgt

SEQ ID NO: 234004 - DNA, 13 bp, Artificial Sequence
  Oligonucleotide for detection of SNP TSC0057103
acataactcatat

SEQ ID NO: 234005 - DNA, 13 bp, Artificial Sequence
  Oligonucleotide for detection of SNP TSC0057106
ttggtgaagttay

SEQ ID NO: 234006 - DNA, 13 bp, Artificial Sequence
  Oligonucleotide for detection of SNP TSC0057106
rtaacttcaccaa

SEQ ID NO: 234007 - DNA, 13 bp, Artificial Sequence
  Oligonucleotide for detection of SNP TSC0057106
ttggtggagttay

SEQ ID NO: 234008 - DNA, 13 bp, Artificial Sequence
  Oligonucleotide for detection of SNP TSC0057106
rtaactccaccaa

SEQ ID NO: 234009 - DNA, 13 bp, Artificial Sequence
  Oligonucleotide for detection of SNP TSC0057109
agaaatgagaaaa

SEQ ID NO: 234010 - DNA, 13 bp, Artificial Sequence
  Oligonucleotide for detection of SNP TSC0057109
ttttctcatttct

SEQ ID NO: 234011 - DNA, 13 bp, Artificial Sequence
  Oligonucleotide for detection of SNP TSC0057109
agaaataagaaaa

SEQ ID NO: 234012 - DNA, 13 bp, Artificial Sequence
  Oligonucleotide for detection of SNP TSC0057109
ttttcttatttct

SEQ ID NO: 234013 - DNA, 13 bp, Artificial Sequence
  Oligonucleotide for detection of SNP TSC0057109
agaaacgagaaaa

SEQ ID NO: 234014 - DNA, 13 bp, Artificial Sequence
  Oligonucleotide for detection of SNP TSC0057109
ttttctcgtttct

SEQ ID NO: 234015 - DNA, 13 bp, Artificial Sequence
  Oligonucleotide for detection of SNP TSC0057110
tatgtataaatta

SEQ ID NO: 234016 - DNA, 13 bp, Artificial Sequence
  Oligonucleotide for detection of SNP TSC0057110
taatttatacata

SEQ ID NO: 234017 - DNA, 13 bp, Artificial Sequence
  Oligonucleotide for detection of SNP TSC0057110
tatgtagaaatta

SEQ ID NO: 234018 - DNA, 13 bp, Artificial Sequence
  Oligonucleotide for detection of SNP TSC0057110
taatttctacata

SEQ ID NO: 234019 - DNA, 13 bp, Artificial Sequence
  Oligonucleotide for detection of SNP TSC0057110
tgatttgtgtata

SEQ ID NO: 234020 - DNA, 13 bp, Artificial Sequence
  Oligonucleotide for detection of SNP TSC0057110
tatacacaaatca

SEQ ID NO: 234021 - DNA, 13 bp, Artificial Sequence
  Oligonucleotide for detection of SNP TSC0057110
tgatttttgtata

SEQ ID NO: 234022 - DNA, 13 bp, Artificial Sequence
  Oligonucleotide for detection of SNP TSC0057110
tatacaaaaatca

SEQ ID NO: 234023 - DNA, 13 bp, Artificial Sequence
  Oligonucleotide for detection of SNP TSC0057113
gattaaaaagtay

SEQ ID NO: 234024 - DNA, 13 bp, Artificial Sequence
  Oligonucleotide for detection of SNP TSC0057113
rtactttttaatc

SEQ ID NO: 234025 - DNA, 13 bp, Artificial Sequence
  Oligonucleotide for detection of SNP TSC0057113
gattaataagtay

SEQ ID NO: 234026 - DNA, 13 bp, Artificial Sequence
  Oligonucleotide for detection of SNP TSC0057113
rtacttattaatc

SEQ ID NO: 234027 - DNA, 13 bp, Artificial Sequence
  Oligonucleotide for detection of SNP TSC0057113
gtgttttttaaty

SEQ ID NO: 234028 - DNA, 13 bp, Artificial Sequence
  Oligonucleotide for detection of SNP TSC0057113
rattaaaaaacac

SEQ ID NO: 234029 - DNA, 13 bp, Artificial Sequence
  Oligonucleotide for detection of SNP TSC0057113
gtgtttgttaaty

SEQ ID NO: 234030 - DNA, 13 bp, Artificial Sequence
  Oligonucleotide for detection of SNP TSC0057113
rattaacaaacac

SEQ ID NO: 234031 - DNA, 13 bp, Artificial Sequence
  Oligonucleotide for detection of SNP TSC0057114
atattagtattty

SEQ ID NO: 234032 - DNA, 13 bp, Artificial Sequence
  Oligonucleotide for detection of SNP TSC0057114
raaatactaatat

SEQ ID NO: 234033 - DNA, 13 bp, Artificial Sequence
  Oligonucleotide for detection of SNP TSC0057114
atattaatattty

SEQ ID NO: 234034 - DNA, 13 bp, Artificial Sequence
  Oligonucleotide for detection of SNP TSC0057114
raaatattaatat

SEQ ID NO: 234035 - DNA, 13 bp, Artificial Sequence
  Oligonucleotide for detection of SNP TSC0057115
aaatatgtaggaa

SEQ ID NO: 234036 - DNA, 13 bp, Artificial Sequence
  Oligonucleotide for detection of SNP TSC0057115
ttcctacatattt

SEQ ID NO: 234037 - DNA, 13 bp, Artificial Sequence
  Oligonucleotide for detection of SNP TSC0057115
aaatacgtaggaa

SEQ ID NO: 234038 - DNA, 13 bp, Artificial Sequence
  Oligonucleotide for detection of SNP TSC0057115
ttcctacgtattt

SEQ ID NO: 234039 - DNA, 13 bp, Artificial Sequence
  Oligonucleotide for detection of SNP TSC0057116
tttgtattattty

SEQ ID NO: 234040 - DNA, 13 bp, Artificial Sequence
  Oligonucleotide for detection of SNP TSC0057116
raaataatacaaa

SEQ ID NO: 234041 - DNA, 13 bp, Artificial Sequence
  Oligonucleotide for detection of SNP TSC0057116
tttgtagtattty

SEQ ID NO: 234042 - DNA, 13 bp, Artificial Sequence
  Oligonucleotide for detection of SNP TSC0057116
raaatactacaaa

SEQ ID NO: 234043 - DNA, 13 bp, Artificial Sequence
  Oligonucleotide for detection of SNP TSC0057116
gagatagtgtaga

SEQ ID NO: 234044 - DNA, 13 bp, Artificial Sequence
  Oligonucleotide for detection of SNP TSC0057116
tctacactatctc

SEQ ID NO: 234045 - DNA, 13 bp, Artificial Sequence
  Oligonucleotide for detection of SNP TSC0057116
gagatattgtaga

SEQ ID NO: 234046 - DNA, 13 bp, Artificial Sequence
  Oligonucleotide for detection of SNP TSC0057116
tctacaatatctc

SEQ ID NO: 234047 - DNA, 13 bp, Artificial Sequence
  Oligonucleotide for detection of SNP TSC0057117
tatatgtgtaatt

SEQ ID NO: 234048 - DNA, 13 bp, Artificial Sequence
  Oligonucleotide for detection of SNP TSC0057117
aattacacatata

SEQ ID NO: 234049 - DNA, 13 bp, Artificial Sequence
  Oligonucleotide for detection of SNP TSC0057117
tatatgcgtaatt

SEQ ID NO: 234050 - DNA, 13 bp, Artificial Sequence
  Oligonucleotide for detection of SNP TSC0057117
aattacgcatata

SEQ ID NO: 234051 - DNA, 13 bp, Artificial Sequence
  Oligonucleotide for detection of SNP TSC0057117
aattatgtatgta

SEQ ID NO: 234052 - DNA, 13 bp, Artificial Sequence
  Oligonucleotide for detection of SNP TSC0057117
tacatacataatt

SEQ ID NO: 234053 - DNA, 13 bp, Artificial Sequence
  Oligonucleotide for detection of SNP TSC0057117
aattatatatgta

SEQ ID NO: 234054 - DNA, 13 bp, Artificial Sequence
  Oligonucleotide for detection of SNP TSC0057117
tacatatataatt

SEQ ID NO: 234055 - DNA, 13 bp, Artificial Sequence
  Oligonucleotide for detection of SNP TSC0057117
aattacgtatgta

SEQ ID NO: 234056 - DNA, 13 bp, Artificial Sequence
  Oligonucleotide for detection of SNP TSC0057117
tacatacgtaatt

SEQ ID NO: 234057 - DNA, 13 bp, Artificial Sequence
  Oligonucleotide for detection of SNP TSC0057118
tataatgggggtt

SEQ ID NO: 234058 - DNA, 13 bp, Artificial Sequence
  Oligonucleotide for detection of SNP TSC0057118
aacccccattata

SEQ ID NO: 234059 - DNA, 13 bp, Artificial Sequence
  Oligonucleotide for detection of SNP TSC0057118
tataataggggtt

SEQ ID NO: 234060 - DNA, 13 bp, Artificial Sequence
  Oligonucleotide for detection of SNP TSC0057118
aacccctattata

SEQ ID NO: 234061 - DNA, 13 bp, Artificial Sequence
  Oligonucleotide for detection of SNP TSC0057118
tataacgggggtt

SEQ ID NO: 234062 - DNA, 13 bp, Artificial Sequence
  Oligonucleotide for detection of SNP TSC0057118
aacccccgttata

SEQ ID NO: 234063 - DNA, 13 bp, Artificial Sequence
  Oligonucleotide for detection of SNP TSC0057119
tgtgtttgtgggt

SEQ ID NO: 234064 - DNA, 13 bp, Artificial Sequence
  Oligonucleotide for detection of SNP TSC0057119
acccacaaacaca

SEQ ID NO: 234065 - DNA, 13 bp, Artificial Sequence
  Oligonucleotide for detection of SNP TSC0057119
tgtgttggtgggt

SEQ ID NO: 234066 - DNA, 13 bp, Artificial Sequence
  Oligonucleotide for detection of SNP TSC0057119
acccaccaacaca

SEQ ID NO: 234067 - DNA, 13 bp, Artificial Sequence
  Oligonucleotide for detection of SNP TSC0057119
tgtgtcggtgggt

SEQ ID NO: 234068 - DNA, 13 bp, Artificial Sequence
  Oligonucleotide for detection of SNP TSC0057119
acccaccgacaca

SEQ ID NO: 234069 - DNA, 13 bp, Artificial Sequence
  Oligonucleotide for detection of SNP TSC0057119
atttattgatata

SEQ ID NO: 234070 - DNA, 13 bp, Artificial Sequence
  Oligonucleotide for detection of SNP TSC0057119
tatatcaataaat

SEQ ID NO: 234071 - DNA, 13 bp, Artificial Sequence
  Oligonucleotide for detection of SNP TSC0057119
atttatcgatata

SEQ ID NO: 234072 - DNA, 13 bp, Artificial Sequence
  Oligonucleotide for detection of SNP TSC0057119
tatatcgataaat

SEQ ID NO: 234073 - DNA, 13 bp, Artificial Sequence
  Oligonucleotide for detection of SNP TSC0057120
gttgaggggagag

SEQ ID NO: 234074 - DNA, 13 bp, Artificial Sequence
  Oligonucleotide for detection of SNP TSC0057120
ctctcccctcaac

SEQ ID NO: 234075 - DNA, 13 bp, Artificial Sequence
  Oligonucleotide for detection of SNP TSC0057120
gttgagtggagag

SEQ ID NO: 234076 - DNA, 13 bp, Artificial Sequence
  Oligonucleotide for detection of SNP TSC0057120
ctctccactcaac

SEQ ID NO: 234077 - DNA, 13 bp, Artificial Sequence
  Oligonucleotide for detection of SNP TSC0057120
gttgagcggagag

SEQ ID NO: 234078 - DNA, 13 bp, Artificial Sequence
  Oligonucleotide for detection of SNP TSC0057120
ctctccgctcaac

SEQ ID NO: 234079 - DNA, 13 bp, Artificial Sequence
  Oligonucleotide for detection of SNP TSC0057125
gagggtataaaag

SEQ ID NO: 234080 - DNA, 13 bp, Artificial Sequence
  Oligonucleotide for detection of SNP TSC0057125
cttttataccctc

SEQ ID NO: 234081 - DNA, 13 bp, Artificial Sequence
  Oligonucleotide for detection of SNP TSC0057125
gagggtttaaaag

SEQ ID NO: 234082 - DNA, 13 bp, Artificial Sequence
  Oligonucleotide for detection of SNP TSC0057125
cttttaaaccctc

SEQ ID NO: 234083 - DNA, 13 bp, Artificial Sequence
  Oligonucleotide for detection of SNP TSC0057126
ttttattgataga

SEQ ID NO: 234084 - DNA, 13 bp, Artificial Sequence
  Oligonucleotide for detection of SNP TSC0057126
tctatcaataaaa

SEQ ID NO: 234085 - DNA, 13 bp, Artificial Sequence
  Oligonucleotide for detection of SNP TSC0057126
ttttatggataga

SEQ ID NO: 234086 - DNA, 13 bp, Artificial Sequence
  Oligonucleotide for detection of SNP TSC0057126
tctatccataaaa

SEQ ID NO: 234087 - DNA, 13 bp, Artificial Sequence
  Oligonucleotide for detection of SNP TSC0057126
tttgttaatgaaa

SEQ ID NO: 234088 - DNA, 13 bp, Artificial Sequence
  Oligonucleotide for detection of SNP TSC0057126
tttcattaacaaa

SEQ ID NO: 234089 - DNA, 13 bp, Artificial Sequence
  Oligonucleotide for detection of SNP TSC0057126
tttgtttatgaaa

SEQ ID NO: 234090 - DNA, 13 bp, Artificial Sequence
  Oligonucleotide for detection of SNP TSC0057126
tttcataaacaaa

SEQ ID NO: 234091 - DNA, 13 bp, Artificial Sequence
  Oligonucleotide for detection of SNP TSC0057127
aggtgtaaatgta

SEQ ID NO: 234092 - DNA, 13 bp, Artificial Sequence
  Oligonucleotide for detection of SNP TSC0057127
tacatttacacct

SEQ ID NO: 234093 - DNA, 13 bp, Artificial Sequence
  Oligonucleotide for detection of SNP TSC0057127
aggtgtgaatgta

SEQ ID NO: 234094 - DNA, 13 bp, Artificial Sequence
  Oligonucleotide for detection of SNP TSC0057127
tacattcacacct

SEQ ID NO: 234095 - DNA, 13 bp, Artificial Sequence
  Oligonucleotide for detection of SNP TSC0057127
aggtgcgaatgta

SEQ ID NO: 234096 - DNA, 13 bp, Artificial Sequence
  Oligonucleotide for detection of SNP TSC0057127
tacattcgcacct

SEQ ID NO: 234097 - DNA, 13 bp, Artificial Sequence
  Oligonucleotide for detection of SNP TSC0057128
aagattaattaag

SEQ ID NO: 234098 - DNA, 13 bp, Artificial Sequence
  Oligonucleotide for detection of SNP TSC0057128
cttaattaatctt

SEQ ID NO: 234099 - DNA, 13 bp, Artificial Sequence
  Oligonucleotide for detection of SNP TSC0057128
aagattgattaag

SEQ ID NO: 234100 - DNA, 13 bp, Artificial Sequence
  Oligonucleotide for detection of SNP TSC0057128
cttaatcaatctt

SEQ ID NO: 234101 - DNA, 13 bp, Artificial Sequence
  Oligonucleotide for detection of SNP TSC0057128
aagatcgattaag

SEQ ID NO: 234102 - DNA, 13 bp, Artificial Sequence
  Oligonucleotide for detection of SNP TSC0057128
cttaatcgatctt

SEQ ID NO: 234103 - DNA, 13 bp, Artificial Sequence
  Oligonucleotide for detection of SNP TSC0057128
tttgattgatttt

SEQ ID NO: 234104 - DNA, 13 bp, Artificial Sequence
  Oligonucleotide for detection of SNP TSC0057128
aaaatcaatcaaa

SEQ ID NO: 234105 - DNA, 13 bp, Artificial Sequence
  Oligonucleotide for detection of SNP TSC0057128
tttgatcgatttt

SEQ ID NO: 234106 - DNA, 13 bp, Artificial Sequence
  Oligonucleotide for detection of SNP TSC0057128
aaaatcgatcaaa

SEQ ID NO: 234107 - DNA, 13 bp, Artificial Sequence
  Oligonucleotide for detection of SNP TSC0057131
tttgtgaataatg

SEQ ID NO: 234108 - DNA, 13 bp, Artificial Sequence
  Oligonucleotide for detection of SNP TSC0057131
cattattcacaaa

SEQ ID NO: 234109 - DNA, 13 bp, Artificial Sequence
  Oligonucleotide for detection of SNP TSC0057131
tttgtgtataatg

SEQ ID NO: 234110 - DNA, 13 bp, Artificial Sequence
  Oligonucleotide for detection of SNP TSC0057131
cattatacacaaa

SEQ ID NO: 234111 - DNA, 13 bp, Artificial Sequence
  Oligonucleotide for detection of SNP TSC0057131
ttcgtgaataatg

SEQ ID NO: 234112 - DNA, 13 bp, Artificial Sequence
  Oligonucleotide for detection of SNP TSC0057131
cattattcacgaa

SEQ ID NO: 234113 - DNA, 13 bp, Artificial Sequence
  Oligonucleotide for detection of SNP TSC0057131
ttcgtgtataatg

SEQ ID NO: 234114 - DNA, 13 bp, Artificial Sequence
  Oligonucleotide for detection of SNP TSC0057131
cattatacacgaa

SEQ ID NO: 234115 - DNA, 13 bp, Artificial Sequence
  Oligonucleotide for detection of SNP TSC0057131
tattgtttatgaa

SEQ ID NO: 234116 - DNA, 13 bp, Artificial Sequence
  Oligonucleotide for detection of SNP TSC0057131
ttcataaacaata

SEQ ID NO: 234117 - DNA, 13 bp, Artificial Sequence
  Oligonucleotide for detection of SNP TSC0057131
tattgtgtatgaa

SEQ ID NO: 234118 - DNA, 13 bp, Artificial Sequence
  Oligonucleotide for detection of SNP TSC0057131
ttcatacacaata

SEQ ID NO: 234119 - DNA, 13 bp, Artificial Sequence
  Oligonucleotide for detection of SNP TSC0057131
tattgtttacgaa

SEQ ID NO: 234120 - DNA, 13 bp, Artificial Sequence
  Oligonucleotide for detection of SNP TSC0057131
ttcgtaaacaata

SEQ ID NO: 234121 - DNA, 13 bp, Artificial Sequence
  Oligonucleotide for detection of SNP TSC0057131
tattgtgtacgaa

SEQ ID NO: 234122 - DNA, 13 bp, Artificial Sequence
  Oligonucleotide for detection of SNP TSC0057131
ttcgtacacaata

SEQ ID NO: 234123 - DNA, 13 bp, Artificial Sequence
  Oligonucleotide for detection of SNP TSC0057132
atagttgtgttag

SEQ ID NO: 234124 - DNA, 13 bp, Artificial Sequence
  Oligonucleotide for detection of SNP TSC0057132
ctaacacaactat

SEQ ID NO: 234125 - DNA, 13 bp, Artificial Sequence
  Oligonucleotide for detection of SNP TSC0057132
atagttatgttag

SEQ ID NO: 234126 - DNA, 13 bp, Artificial Sequence
  Oligonucleotide for detection of SNP TSC0057132
ctaacataactat

SEQ ID NO: 234127 - DNA, 13 bp, Artificial Sequence
  Oligonucleotide for detection of SNP TSC0057133
gaaatatgtgtty

SEQ ID NO: 234128 - DNA, 13 bp, Artificial Sequence
  Oligonucleotide for detection of SNP TSC0057133
raacacatatttc

SEQ ID NO: 234129 - DNA, 13 bp, Artificial Sequence
  Oligonucleotide for detection of SNP TSC0057133
gaaatacgtgtty

SEQ ID NO: 234130 - DNA, 13 bp, Artificial Sequence
  Oligonucleotide for detection of SNP TSC0057133
raacacgtatttc

SEQ ID NO: 234131 - DNA, 13 bp, Artificial Sequence
  Oligonucleotide for detection of SNP TSC0057133
gggtatgtgttty

SEQ ID NO: 234132 - DNA, 13 bp, Artificial Sequence
  Oligonucleotide for detection of SNP TSC0057133
raaacacataccc

SEQ ID NO: 234133 - DNA, 13 bp, Artificial Sequence
  Oligonucleotide for detection of SNP TSC0057133
gggtatatgttty

SEQ ID NO: 234134 - DNA, 13 bp, Artificial Sequence
  Oligonucleotide for detection of SNP TSC0057133
raaacatataccc

SEQ ID NO: 234135 - DNA, 13 bp, Artificial Sequence
  Oligonucleotide for detection of SNP TSC0057133
gggtacgtgttty

SEQ ID NO: 234136 - DNA, 13 bp, Artificial Sequence
  Oligonucleotide for detection of SNP TSC0057133
raaacacgtaccc

SEQ ID NO: 234137 - DNA, 13 bp, Artificial Sequence
  Oligonucleotide for detection of SNP TSC0057134
aatatgtgtatag

SEQ ID NO: 234138 - DNA, 13 bp, Artificial Sequence
  Oligonucleotide for detection of SNP TSC0057134
ctatacacatatt

SEQ ID NO: 234139 - DNA, 13 bp, Artificial Sequence
  Oligonucleotide for detection of SNP TSC0057134
aatatgcgtatag

SEQ ID NO: 234140 - DNA, 13 bp, Artificial Sequence
  Oligonucleotide for detection of SNP TSC0057134
ctatacgcatatt

SEQ ID NO: 234141 - DNA, 13 bp, Artificial Sequence
  Oligonucleotide for detection of SNP TSC0057134
ttgtgtgtatgtt

SEQ ID NO: 234142 - DNA, 13 bp, Artificial Sequence
  Oligonucleotide for detection of SNP TSC0057134
aacatacacacaa

SEQ ID NO: 234143 - DNA, 13 bp, Artificial Sequence
  Oligonucleotide for detection of SNP TSC0057134
ttgtgcgtatgtt

SEQ ID NO: 234144 - DNA, 13 bp, Artificial Sequence
  Oligonucleotide for detection of SNP TSC0057134
aacatacgcacaa

SEQ ID NO: 234145 - DNA, 13 bp, Artificial Sequence
  Oligonucleotide for detection of SNP TSC0057135
taagttagttttt

SEQ ID NO: 234146 - DNA, 13 bp, Artificial Sequence
  Oligonucleotide for detection of SNP TSC0057135
aaaaactaactta

SEQ ID NO: 234147 - DNA, 13 bp, Artificial Sequence
  Oligonucleotide for detection of SNP TSC0057135
taagtttgttttt

SEQ ID NO: 234148 - DNA, 13 bp, Artificial Sequence
  Oligonucleotide for detection of SNP TSC0057135
aaaaacaaactta

SEQ ID NO: 234149 - DNA, 13 bp, Artificial Sequence
  Oligonucleotide for detection of SNP TSC0057135
agggattgattta

SEQ ID NO: 234150 - DNA, 13 bp, Artificial Sequence
  Oligonucleotide for detection of SNP TSC0057135
taaatcaatccct

SEQ ID NO: 234151 - DNA, 13 bp, Artificial Sequence
  Oligonucleotide for detection of SNP TSC0057135
agggatagattta

SEQ ID NO: 234152 - DNA, 13 bp, Artificial Sequence
  Oligonucleotide for detection of SNP TSC0057135
taaatctatccct

SEQ ID NO: 234153 - DNA, 13 bp, Artificial Sequence
  Oligonucleotide for detection of SNP TSC0057139
atttatttaatta

SEQ ID NO: 234154 - DNA, 13 bp, Artificial Sequence
  Oligonucleotide for detection of SNP TSC0057139
taattaaataaat

SEQ ID NO: 234155 - DNA, 13 bp, Artificial Sequence
  Oligonucleotide for detection of SNP TSC0057139
tgattaaatgagt

SEQ ID NO: 234156 - DNA, 13 bp, Artificial Sequence
  Oligonucleotide for detection of SNP TSC0057139
actcatttaatca

SEQ ID NO: 234157 - DNA, 13 bp, Artificial Sequence
  Oligonucleotide for detection of SNP TSC0057139
tgattatatgagt

SEQ ID NO: 234158 - DNA, 13 bp, Artificial Sequence
  Oligonucleotide for detection of SNP TSC0057139
actcatataatca

SEQ ID NO: 234159 - DNA, 13 bp, Artificial Sequence
  Oligonucleotide for detection of SNP TSC0005010
tgtgtgagattty

SEQ ID NO: 234160 - DNA, 13 bp, Artificial Sequence
  Oligonucleotide for detection of SNP TSC0005010
raaatctcacaca

SEQ ID NO: 234161 - DNA, 13 bp, Artificial Sequence
  Oligonucleotide for detection of SNP TSC0005010
tgtgtgtgattty

SEQ ID NO: 234162 - DNA, 13 bp, Artificial Sequence
  Oligonucleotide for detection of SNP TSC0005010
raaatcacacaca

SEQ ID NO: 234163 - DNA, 13 bp, Artificial Sequence
  Oligonucleotide for detection of SNP TSC0005010
gagattttatata

SEQ ID NO: 234164 - DNA, 13 bp, Artificial Sequence
  Oligonucleotide for detection of SNP TSC0005010
tatataaaatctc

SEQ ID NO: 234165 - DNA, 13 bp, Artificial Sequence
  Oligonucleotide for detection of SNP TSC0005010
gagattatatata

SEQ ID NO: 234166 - DNA, 13 bp, Artificial Sequence
  Oligonucleotide for detection of SNP TSC0005010
tatatataatctc

SEQ ID NO: 234167 - DNA, 13 bp, Artificial Sequence
  Oligonucleotide for detection of SNP TSC0057141
tgtttgtttttaa

SEQ ID NO: 234168 - DNA, 13 bp, Artificial Sequence
  Oligonucleotide for detection of SNP TSC0057141
ttaaaaacaaaca

SEQ ID NO: 234169 - DNA, 13 bp, Artificial Sequence
  Oligonucleotide for detection of SNP TSC0057141
tgtttggttttaa

SEQ ID NO: 234170 - DNA, 13 bp, Artificial Sequence
  Oligonucleotide for detection of SNP TSC0057141
ttaaaaccaaaca

SEQ ID NO: 234171 - DNA, 13 bp, Artificial Sequence
  Oligonucleotide for detection of SNP TSC0057141
ttaaaggtagata

SEQ ID NO: 234172 - DNA, 13 bp, Artificial Sequence
  Oligonucleotide for detection of SNP TSC0057141
tatctacctttaa

SEQ ID NO: 234173 - DNA, 13 bp, Artificial Sequence
  Oligonucleotide for detection of SNP TSC0057141
ttaaagttagata

SEQ ID NO: 234174 - DNA, 13 bp, Artificial Sequence
  Oligonucleotide for detection of SNP TSC0057141
tatctaactttaa

SEQ ID NO: 234175 - DNA, 13 bp, Artificial Sequence
  Oligonucleotide for detection of SNP TSC0057142
aggaagatttttt

SEQ ID NO: 234176 - DNA, 13 bp, Artificial Sequence
  Oligonucleotide for detection of SNP TSC0057142
aaaaaatcttcct

SEQ ID NO: 234177 - DNA, 13 bp, Artificial Sequence
  Oligonucleotide for detection of SNP TSC0057142
aggaagttttttt

SEQ ID NO: 234178 - DNA, 13 bp, Artificial Sequence
  Oligonucleotide for detection of SNP TSC0057142
aaaaaaacttcct

SEQ ID NO: 234179 - DNA, 13 bp, Artificial Sequence
  Oligonucleotide for detection of SNP TSC0057143
tttaagtttatat

SEQ ID NO: 234180 - DNA, 13 bp, Artificial Sequence
  Oligonucleotide for detection of SNP TSC0057143
atataaacttaaa

SEQ ID NO: 234181 - DNA, 13 bp, Artificial Sequence
  Oligonucleotide for detection of SNP TSC0057143
tttaaggttatat

SEQ ID NO: 234182 - DNA, 13 bp, Artificial Sequence
  Oligonucleotide for detection of SNP TSC0057143
atataaccttaaa

SEQ ID NO: 234183 - DNA, 13 bp, Artificial Sequence
  Oligonucleotide for detection of SNP TSC0057143
atataggtttgag

SEQ ID NO: 234184 - DNA, 13 bp, Artificial Sequence
  Oligonucleotide for detection of SNP TSC0057143
ctcaaacctatat

SEQ ID NO: 234185 - DNA, 13 bp, Artificial Sequence
  Oligonucleotide for detection of SNP TSC0057143
atatagttttgag

SEQ ID NO: 234186 - DNA, 13 bp, Artificial Sequence
  Oligonucleotide for detection of SNP TSC0057143
ctcaaaactatat

SEQ ID NO: 234187 - DNA, 13 bp, Artificial Sequence
  Oligonucleotide for detection of SNP TSC0057145
tgagtttgtttgt

SEQ ID NO: 234188 - DNA, 13 bp, Artificial Sequence
  Oligonucleotide for detection of SNP TSC0057145
acaaacaaactca

SEQ ID NO: 234189 - DNA, 13 bp, Artificial Sequence
  Oligonucleotide for detection of SNP TSC0057145
tgagttggtttgt

SEQ ID NO: 234190 - DNA, 13 bp, Artificial Sequence
  Oligonucleotide for detection of SNP TSC0057145
acaaaccaactca

SEQ ID NO: 234191 - DNA, 13 bp, Artificial Sequence
  Oligonucleotide for detection of SNP TSC0057145
cgagtttgtttgt

SEQ ID NO: 234192 - DNA, 13 bp, Artificial Sequence
  Oligonucleotide for detection of SNP TSC0057145
acaaacaaactcg

SEQ ID NO: 234193 - DNA, 13 bp, Artificial Sequence
  Oligonucleotide for detection of SNP TSC0057145
cgagttggtttgt

SEQ ID NO: 234194 - DNA, 13 bp, Artificial Sequence
  Oligonucleotide for detection of SNP TSC0057145
acaaaccaactcg

SEQ ID NO: 234195 - DNA, 13 bp, Artificial Sequence
  Oligonucleotide for detection of SNP TSC0057145
ataggtaagtttg

SEQ ID NO: 234196 - DNA, 13 bp, Artificial Sequence
  Oligonucleotide for detection of SNP TSC0057145
caaacttacctat

SEQ ID NO: 234197 - DNA, 13 bp, Artificial Sequence
  Oligonucleotide for detection of SNP TSC0057145
ataggttagtttg

SEQ ID NO: 234198 - DNA, 13 bp, Artificial Sequence
  Oligonucleotide for detection of SNP TSC0057145
caaactaacctat

SEQ ID NO: 234199 - DNA, 13 bp, Artificial Sequence
  Oligonucleotide for detection of SNP TSC0057145
ataggtaagttcg

SEQ ID NO: 234200 - DNA, 13 bp, Artificial Sequence
  Oligonucleotide for detection of SNP TSC0057145
cgaacttacctat

SEQ ID NO: 234201 - DNA, 13 bp, Artificial Sequence
  Oligonucleotide for detection of SNP TSC0057145
ataggttagttcg

SEQ ID NO: 234202 - DNA, 13 bp, Artificial Sequence
  Oligonucleotide for detection of SNP TSC0057145
cgaactaacctat

SEQ ID NO: 234203 - DNA, 13 bp, Artificial Sequence
  Oligonucleotide for detection of SNP TSC0057148
atagtggtaatag

SEQ ID NO: 234204 - DNA, 13 bp, Artificial Sequence
  Oligonucleotide for detection of SNP TSC0057148
ctattaccactat

SEQ ID NO: 234205 - DNA, 13 bp, Artificial Sequence
  Oligonucleotide for detection of SNP TSC0057148
atagtgataatag

SEQ ID NO: 234206 - DNA, 13 bp, Artificial Sequence
  Oligonucleotide for detection of SNP TSC0057148
ctattatcactat

SEQ ID NO: 234207 - DNA, 13 bp, Artificial Sequence
  Oligonucleotide for detection of SNP TSC0057149
atatggaatgtaa

SEQ ID NO: 234208 - DNA, 13 bp, Artificial Sequence
  Oligonucleotide for detection of SNP TSC0057149
ttacattccatat

SEQ ID NO: 234209 - DNA, 13 bp, Artificial Sequence
  Oligonucleotide for detection of SNP TSC0057149
atatggtatgtaa

SEQ ID NO: 234210 - DNA, 13 bp, Artificial Sequence
  Oligonucleotide for detection of SNP TSC0057149
ttacataccatat

SEQ ID NO: 234211 - DNA, 13 bp, Artificial Sequence
  Oligonucleotide for detection of SNP TSC0057150
tatagtaatgtty

SEQ ID NO: 234212 - DNA, 13 bp, Artificial Sequence
  Oligonucleotide for detection of SNP TSC0057150
raacattactata

SEQ ID NO: 234213 - DNA, 13 bp, Artificial Sequence
  Oligonucleotide for detection of SNP TSC0057150
tatagtgatgtty

SEQ ID NO: 234214 - DNA, 13 bp, Artificial Sequence
  Oligonucleotide for detection of SNP TSC0057150
raacatcactata

SEQ ID NO: 234215 - DNA, 13 bp, Artificial Sequence
  Oligonucleotide for detection of SNP TSC0057150
tatagtaacgtty

SEQ ID NO: 234216 - DNA, 13 bp, Artificial Sequence
  Oligonucleotide for detection of SNP TSC0057150
raacgttactata

SEQ ID NO: 234217 - DNA, 13 bp, Artificial Sequence
  Oligonucleotide for detection of SNP TSC0057150
tatagtgacgtty

SEQ ID NO: 234218 - DNA, 13 bp, Artificial Sequence
  Oligonucleotide for detection of SNP TSC0057150
raacgtcactata

SEQ ID NO: 234219 - DNA, 13 bp, Artificial Sequence
  Oligonucleotide for detection of SNP TSC0057154
tggttaaagttag

SEQ ID NO: 234220 - DNA, 13 bp, Artificial Sequence
  Oligonucleotide for detection of SNP TSC0057154
ctaactttaacca

SEQ ID NO: 234221 - DNA, 13 bp, Artificial Sequence
  Oligonucleotide for detection of SNP TSC0057154
tggttagagttag

SEQ ID NO: 234222 - DNA, 13 bp, Artificial Sequence
  Oligonucleotide for detection of SNP TSC0057154
ctaactctaacca

SEQ ID NO: 234223 - DNA, 13 bp, Artificial Sequence
  Oligonucleotide for detection of SNP TSC0000173
aatagggagttat

SEQ ID NO: 234224 - DNA, 13 bp, Artificial Sequence
  Oligonucleotide for detection of SNP TSC0000173
ataactccctatt

SEQ ID NO: 234225 - DNA, 13 bp, Artificial Sequence
  Oligonucleotide for detection of SNP TSC0000173
aataggaagttat

SEQ ID NO: 234226 - DNA, 13 bp, Artificial Sequence
  Oligonucleotide for detection of SNP TSC0000173
ataacttcctatt

SEQ ID NO: 234227 - DNA, 13 bp, Artificial Sequence
  Oligonucleotide for detection of SNP TSC0000174
gaaataaggaatt

SEQ ID NO: 234228 - DNA, 13 bp, Artificial Sequence
  Oligonucleotide for detection of SNP TSC0000174
aattccttatttc

SEQ ID NO: 234229 - DNA, 13 bp, Artificial Sequence
  Oligonucleotide for detection of SNP TSC0000174
gaaatagggaatt

SEQ ID NO: 234230 - DNA, 13 bp, Artificial Sequence
  Oligonucleotide for detection of SNP TSC0000174
aattccctatttc

SEQ ID NO: 234231 - DNA, 13 bp, Artificial Sequence
  Oligonucleotide for detection of SNP TSC0057155
gaataaagttatg

SEQ ID NO: 234232 - DNA, 13 bp, Artificial Sequence
  Oligonucleotide for detection of SNP TSC0057155
cataactttattc

SEQ ID NO: 234233 - DNA, 13 bp, Artificial Sequence
  Oligonucleotide for detection of SNP TSC0057155
gaataaggttatg

SEQ ID NO: 234234 - DNA, 13 bp, Artificial Sequence
  Oligonucleotide for detection of SNP TSC0057155
cataaccttattc

SEQ ID NO: 234235 - DNA, 13 bp, Artificial Sequence
  Oligonucleotide for detection of SNP TSC0057155
gaataaagttacg

SEQ ID NO: 234236 - DNA, 13 bp, Artificial Sequence
  Oligonucleotide for detection of SNP TSC0057155
cgtaactttattc

SEQ ID NO: 234237 - DNA, 13 bp, Artificial Sequence
  Oligonucleotide for detection of SNP TSC0057155
gaataaggttacg

SEQ ID NO: 234238 - DNA, 13 bp, Artificial Sequence
  Oligonucleotide for detection of SNP TSC0057155
cgtaaccttattc

SEQ ID NO: 234239 - DNA, 13 bp, Artificial Sequence
  Oligonucleotide for detection of SNP TSC0057156
tatttaggaaaat

SEQ ID NO: 234240 - DNA, 13 bp, Artificial Sequence
  Oligonucleotide for detection of SNP TSC0057156
attttcctaaata

SEQ ID NO: 234241 - DNA, 13 bp, Artificial Sequence
  Oligonucleotide for detection of SNP TSC0057156
atttttgtaagtg

SEQ ID NO: 234242 - DNA, 13 bp, Artificial Sequence
  Oligonucleotide for detection of SNP TSC0057156
cacttacaaaaat

SEQ ID NO: 234243 - DNA, 13 bp, Artificial Sequence
  Oligonucleotide for detection of SNP TSC0057156
atttttttaagtg

SEQ ID NO: 234244 - DNA, 13 bp, Artificial Sequence
  Oligonucleotide for detection of SNP TSC0057156
cacttaaaaaaat

SEQ ID NO: 234245 - DNA, 13 bp, Artificial Sequence
  Oligonucleotide for detection of SNP TSC0057156
attttcgtaagtg

SEQ ID NO: 234246 - DNA, 13 bp, Artificial Sequence
  Oligonucleotide for detection of SNP TSC0057156
cacttacgaaaat

SEQ ID NO: 234247 - DNA, 13 bp, Artificial Sequence
  Oligonucleotide for detection of SNP TSC0057163
atttttagaggag

SEQ ID NO: 234248 - DNA, 13 bp, Artificial Sequence
  Oligonucleotide for detection of SNP TSC0057163
ctcctctaaaaat

SEQ ID NO: 234249 - DNA, 13 bp, Artificial Sequence
  Oligonucleotide for detection of SNP TSC0057163
atttttggaggag

SEQ ID NO: 234250 - DNA, 13 bp, Artificial Sequence
  Oligonucleotide for detection of SNP TSC0057163
ctcctccaaaaat

SEQ ID NO: 234251 - DNA, 13 bp, Artificial Sequence
  Oligonucleotide for detection of SNP TSC0057163
attttcggaggag

SEQ ID NO: 234252 - DNA, 13 bp, Artificial Sequence
  Oligonucleotide for detection of SNP TSC0057163
ctcctccgaaaat

SEQ ID NO: 234253 - DNA, 13 bp, Artificial Sequence
  Oligonucleotide for detection of SNP TSC0057164
gaggttaggggtt

SEQ ID NO: 234254 - DNA, 13 bp, Artificial Sequence
  Oligonucleotide for detection of SNP TSC0057164
aacccctaacctc

SEQ ID NO: 234255 - DNA, 13 bp, Artificial Sequence
  Oligonucleotide for detection of SNP TSC0057164
gaggttgggggtt

SEQ ID NO: 234256 - DNA, 13 bp, Artificial Sequence
  Oligonucleotide for detection of SNP TSC0057164
aacccccaacctc

SEQ ID NO: 234257 - DNA, 13 bp, Artificial Sequence
  Oligonucleotide for detection of SNP TSC0057165
gttattttatttt

SEQ ID NO: 234258 - DNA, 13 bp, Artificial Sequence
  Oligonucleotide for detection of SNP TSC0057165
aaaataaaataac

SEQ ID NO: 234259 - DNA, 13 bp, Artificial Sequence
  Oligonucleotide for detection of SNP TSC0057165
agggtaaaatagy

SEQ ID NO: 234260 - DNA, 13 bp, Artificial Sequence
  Oligonucleotide for detection of SNP TSC0057165
rctattttaccct

SEQ ID NO: 234261 - DNA, 13 bp, Artificial Sequence
  Oligonucleotide for detection of SNP TSC0057165
agggtataatagy

SEQ ID NO: 234262 - DNA, 13 bp, Artificial Sequence
  Oligonucleotide for detection of SNP TSC0057165
rctattataccct

SEQ ID NO: 234263 - DNA, 13 bp, Artificial Sequence
  Oligonucleotide for detection of SNP TSC0004687
gtaggaagtaaaa

SEQ ID NO: 234264 - DNA, 13 bp, Artificial Sequence
  Oligonucleotide for detection of SNP TSC0004687
ttttacttcctac

SEQ ID NO: 234265 - DNA, 13 bp, Artificial Sequence
  Oligonucleotide for detection of SNP TSC0004687
gtaggaggtaaaa

SEQ ID NO: 234266 - DNA, 13 bp, Artificial Sequence
  Oligonucleotide for detection of SNP TSC0004687
ttttacctcctac

SEQ ID NO: 234267 - DNA, 13 bp, Artificial Sequence
  Oligonucleotide for detection of SNP TSC0057170
gatgtataggtta

SEQ ID NO: 234268 - DNA, 13 bp, Artificial Sequence
  Oligonucleotide for detection of SNP TSC0057170
taacctatacatc

SEQ ID NO: 234269 - DNA, 13 bp, Artificial Sequence
  Oligonucleotide for detection of SNP TSC0057170
gatgtagaggtta

SEQ ID NO: 234270 - DNA, 13 bp, Artificial Sequence
  Oligonucleotide for detection of SNP TSC0057170
taacctctacatc

SEQ ID NO: 234271 - DNA, 13 bp, Artificial Sequence
  Oligonucleotide for detection of SNP TSC0057170
tagtttgtgtaty

SEQ ID NO: 234272 - DNA, 13 bp, Artificial Sequence
  Oligonucleotide for detection of SNP TSC0057170
ratacacaaacta

SEQ ID NO: 234273 - DNA, 13 bp, Artificial Sequence
  Oligonucleotide for detection of SNP TSC0057170
tagtttttgtaty

SEQ ID NO: 234274 - DNA, 13 bp, Artificial Sequence
  Oligonucleotide for detection of SNP TSC0057170
ratacaaaaacta

SEQ ID NO: 234275 - DNA, 13 bp, Artificial Sequence
  Oligonucleotide for detection of SNP TSC0057172
atgttgttttagy

SEQ ID NO: 234276 - DNA, 13 bp, Artificial Sequence
  Oligonucleotide for detection of SNP TSC0057172
rctaaaacaacat

SEQ ID NO: 234277 - DNA, 13 bp, Artificial Sequence
  Oligonucleotide for detection of SNP TSC0057172
atgttgatttagy

SEQ ID NO: 234278 - DNA, 13 bp, Artificial Sequence
  Oligonucleotide for detection of SNP TSC0057172
rctaaatcaacat

SEQ ID NO: 234279 - DNA, 13 bp, Artificial Sequence
  Oligonucleotide for detection of SNP TSC0057173
taataatattgtt

SEQ ID NO: 234280 - DNA, 13 bp, Artificial Sequence
  Oligonucleotide for detection of SNP TSC0057173
aacaatattatta

SEQ ID NO: 234281 - DNA, 13 bp, Artificial Sequence
  Oligonucleotide for detection of SNP TSC0057173
taataagattgtt

SEQ ID NO: 234282 - DNA, 13 bp, Artificial Sequence
  Oligonucleotide for detection of SNP TSC0057173
aacaatcttatta

SEQ ID NO: 234283 - DNA, 13 bp, Artificial Sequence
  Oligonucleotide for detection of SNP TSC0057173
aataatattatta

SEQ ID NO: 234284 - DNA, 13 bp, Artificial Sequence
  Oligonucleotide for detection of SNP TSC0057173
taataatattatt

SEQ ID NO: 234285 - DNA, 13 bp, Artificial Sequence
  Oligonucleotide for detection of SNP TSC0057173
aataattttatta

SEQ ID NO: 234286 - DNA, 13 bp, Artificial Sequence
  Oligonucleotide for detection of SNP TSC0057173
taataaaattatt

SEQ ID NO: 234287 - DNA, 13 bp, Artificial Sequence
  Oligonucleotide for detection of SNP TSC0057176
tgattggtggaga

SEQ ID NO: 234288 - DNA, 13 bp, Artificial Sequence
  Oligonucleotide for detection of SNP TSC0057176
tctccaccaatca

SEQ ID NO: 234289 - DNA, 13 bp, Artificial Sequence
  Oligonucleotide for detection of SNP TSC0057176
tgattgatggaga

SEQ ID NO: 234290 - DNA, 13 bp, Artificial Sequence
  Oligonucleotide for detection of SNP TSC0057176
tctccatcaatca

SEQ ID NO: 234291 - DNA, 13 bp, Artificial Sequence
  Oligonucleotide for detection of SNP TSC0057177
ttgtttaaagtta

SEQ ID NO: 234292 - DNA, 13 bp, Artificial Sequence
  Oligonucleotide for detection of SNP TSC0057177
taactttaaacaa

SEQ ID NO: 234293 - DNA, 13 bp, Artificial Sequence
  Oligonucleotide for detection of SNP TSC0057177
ttgttttaagtta

SEQ ID NO: 234294 - DNA, 13 bp, Artificial Sequence
  Oligonucleotide for detection of SNP TSC0057177
taacttaaaacaa

SEQ ID NO: 234295 - DNA, 13 bp, Artificial Sequence
  Oligonucleotide for detection of SNP TSC0057177
taatttggagtaa

SEQ ID NO: 234296 - DNA, 13 bp, Artificial Sequence
  Oligonucleotide for detection of SNP TSC0057177
ttactccaaatta

SEQ ID NO: 234297 - DNA, 13 bp, Artificial Sequence
  Oligonucleotide for detection of SNP TSC0057178
ttgatagttgttt

SEQ ID NO: 234298 - DNA, 13 bp, Artificial Sequence
  Oligonucleotide for detection of SNP TSC0057178
aaacaactatcaa

SEQ ID NO: 234299 - DNA, 13 bp, Artificial Sequence
  Oligonucleotide for detection of SNP TSC0057178
ttgataattgttt

SEQ ID NO: 234300 - DNA, 13 bp, Artificial Sequence
  Oligonucleotide for detection of SNP TSC0057178
aaacaattatcaa

SEQ ID NO: 234301 - DNA, 13 bp, Artificial Sequence
  Oligonucleotide for detection of SNP TSC0057183
ttatggattttag

SEQ ID NO: 234302 - DNA, 13 bp, Artificial Sequence
  Oligonucleotide for detection of SNP TSC0057183
ctaaaatccataa

SEQ ID NO: 234303 - DNA, 13 bp, Artificial Sequence
  Oligonucleotide for detection of SNP TSC0057183
ttatgggttttag

SEQ ID NO: 234304 - DNA, 13 bp, Artificial Sequence
  Oligonucleotide for detection of SNP TSC0057183
ctaaaacccataa

SEQ ID NO: 234305 - DNA, 13 bp, Artificial Sequence
  Oligonucleotide for detection of SNP TSC0057183
ttacggattttag

SEQ ID NO: 234306 - DNA, 13 bp, Artificial Sequence
  Oligonucleotide for detection of SNP TSC0057183
ctaaaatccgtaa

SEQ ID NO: 234307 - DNA, 13 bp, Artificial Sequence
  Oligonucleotide for detection of SNP TSC0057183
ttacgggttttag

SEQ ID NO: 234308 - DNA, 13 bp, Artificial Sequence
  Oligonucleotide for detection of SNP TSC0057183
ctaaaacccgtaa

SEQ ID NO: 234309 - DNA, 13 bp, Artificial Sequence
  Oligonucleotide for detection of SNP TSC0057184
tggtgataggtta

SEQ ID NO: 234310 - DNA, 13 bp, Artificial Sequence
  Oligonucleotide for detection of SNP TSC0057184
taacctatcacca

SEQ ID NO: 234311 - DNA, 13 bp, Artificial Sequence
  Oligonucleotide for detection of SNP TSC0057184
tggtgagaggtta

SEQ ID NO: 234312 - DNA, 13 bp, Artificial Sequence
  Oligonucleotide for detection of SNP TSC0057184
taacctctcacca

SEQ ID NO: 234313 - DNA, 13 bp, Artificial Sequence
  Oligonucleotide for detection of SNP TSC0057186
tgtgtaattatta

SEQ ID NO: 234314 - DNA, 13 bp, Artificial Sequence
  Oligonucleotide for detection of SNP TSC0057186
taataattacaca

SEQ ID NO: 234315 - DNA, 13 bp, Artificial Sequence
  Oligonucleotide for detection of SNP TSC0057186
tgtgtagttatta

SEQ ID NO: 234316 - DNA, 13 bp, Artificial Sequence
  Oligonucleotide for detection of SNP TSC0057186
taataactacaca

SEQ ID NO: 234317 - DNA, 13 bp, Artificial Sequence
  Oligonucleotide for detection of SNP TSC0057187
atgtagaaatttt

SEQ ID NO: 234318 - DNA, 13 bp, Artificial Sequence
  Oligonucleotide for detection of SNP TSC0057187
aaaatttctacat

SEQ ID NO: 234319 - DNA, 13 bp, Artificial Sequence
  Oligonucleotide for detection of SNP TSC0057187
atgtagtaatttt

SEQ ID NO: 234320 - DNA, 13 bp, Artificial Sequence
  Oligonucleotide for detection of SNP TSC0057187
aaaattactacat

SEQ ID NO: 234321 - DNA, 13 bp, Artificial Sequence
  Oligonucleotide for detection of SNP TSC0057187
atgtaggaatttt

SEQ ID NO: 234322 - DNA, 13 bp, Artificial Sequence
  Oligonucleotide for detection of SNP TSC0057187
aaaattcctacat

SEQ ID NO: 234323 - DNA, 13 bp, Artificial Sequence
  Oligonucleotide for detection of SNP TSC0057187
aaggtttttgtat

SEQ ID NO: 234324 - DNA, 13 bp, Artificial Sequence
  Oligonucleotide for detection of SNP TSC0057187
atacaaaaacctt

SEQ ID NO: 234325 - DNA, 13 bp, Artificial Sequence
  Oligonucleotide for detection of SNP TSC0057187
aaggttgttgtat

SEQ ID NO: 234326 - DNA, 13 bp, Artificial Sequence
  Oligonucleotide for detection of SNP TSC0057187
atacaacaacctt

SEQ ID NO: 234327 - DNA, 13 bp, Artificial Sequence
  Oligonucleotide for detection of SNP TSC0057187
aaggttattgtat

SEQ ID NO: 234328 - DNA, 13 bp, Artificial Sequence
  Oligonucleotide for detection of SNP TSC0057187
atacaataacctt

SEQ ID NO: 234329 - DNA, 13 bp, Artificial Sequence
  Oligonucleotide for detection of SNP TSC0057188
atgtttattatta

SEQ ID NO: 234330 - DNA, 13 bp, Artificial Sequence
  Oligonucleotide for detection of SNP TSC0057188
taataataaacat

SEQ ID NO: 234331 - DNA, 13 bp, Artificial Sequence
  Oligonucleotide for detection of SNP TSC0057188
atgttttttatta

SEQ ID NO: 234332 - DNA, 13 bp, Artificial Sequence
  Oligonucleotide for detection of SNP TSC0057188
taataaaaaacat

SEQ ID NO: 234333 - DNA, 13 bp, Artificial Sequence
  Oligonucleotide for detection of SNP TSC0057188
taataataaatat

SEQ ID NO: 234334 - DNA, 13 bp, Artificial Sequence
  Oligonucleotide for detection of SNP TSC0057188
atatttattatta

SEQ ID NO: 234335 - DNA, 13 bp, Artificial Sequence
  Oligonucleotide for detection of SNP TSC0057188
taataaaaaatat

SEQ ID NO: 234336 - DNA, 13 bp, Artificial Sequence
  Oligonucleotide for detection of SNP TSC0057188
atattttttatta

SEQ ID NO: 234337 - DNA, 13 bp, Artificial Sequence
  Oligonucleotide for detection of SNP TSC0057189
aaatgaattgtgg

SEQ ID NO: 234338 - DNA, 13 bp, Artificial Sequence
  Oligonucleotide for detection of SNP TSC0057189
ccacaattcattt

SEQ ID NO: 234339 - DNA, 13 bp, Artificial Sequence
  Oligonucleotide for detection of SNP TSC0057189
aaatgagttgtgg

SEQ ID NO: 234340 - DNA, 13 bp, Artificial Sequence
  Oligonucleotide for detection of SNP TSC0057189
ccacaactcattt

SEQ ID NO: 234341 - DNA, 13 bp, Artificial Sequence
  Oligonucleotide for detection of SNP TSC0057190
tatgtatatatat

SEQ ID NO: 234342 - DNA, 13 bp, Artificial Sequence
  Oligonucleotide for detection of SNP TSC0057190
atatatatacata

SEQ ID NO: 234343 - DNA, 13 bp, Artificial Sequence
  Oligonucleotide for detection of SNP TSC0057190
tatgtaaatatat

SEQ ID NO: 234344 - DNA, 13 bp, Artificial Sequence
  Oligonucleotide for detection of SNP TSC0057190
atatatttacata

SEQ ID NO: 234345 - DNA, 13 bp, Artificial Sequence
  Oligonucleotide for detection of SNP TSC0057191
taaaagatgttgy

SEQ ID NO: 234346 - DNA, 13 bp, Artificial Sequence
  Oligonucleotide for detection of SNP TSC0057191
rcaacatctttta

SEQ ID NO: 234347 - DNA, 13 bp, Artificial Sequence
  Oligonucleotide for detection of SNP TSC0057191
taaaagttgttgy

SEQ ID NO: 234348 - DNA, 13 bp, Artificial Sequence
  Oligonucleotide for detection of SNP TSC0057191
rcaacaactttta

SEQ ID NO: 234349 - DNA, 13 bp, Artificial Sequence
  Oligonucleotide for detection of SNP TSC0057191
gtagtattttttg

SEQ ID NO: 234350 - DNA, 13 bp, Artificial Sequence
  Oligonucleotide for detection of SNP TSC0057191
caaaaaatactac

SEQ ID NO: 234351 - DNA, 13 bp, Artificial Sequence
  Oligonucleotide for detection of SNP TSC0057191
gtagtaatttttg

SEQ ID NO: 234352 - DNA, 13 bp, Artificial Sequence
  Oligonucleotide for detection of SNP TSC0057191
caaaaattactac

SEQ ID NO: 234353 - DNA, 13 bp, Artificial Sequence
  Oligonucleotide for detection of SNP TSC0057196
atgaaggtttttg

SEQ ID NO: 234354 - DNA, 13 bp, Artificial Sequence
  Oligonucleotide for detection of SNP TSC0057196
caaaaaccttcat

SEQ ID NO: 234355 - DNA, 13 bp, Artificial Sequence
  Oligonucleotide for detection of SNP TSC0057196
atgaagatttttg

SEQ ID NO: 234356 - DNA, 13 bp, Artificial Sequence
  Oligonucleotide for detection of SNP TSC0057196
caaaaatcttcat

SEQ ID NO: 234357 - DNA, 13 bp, Artificial Sequence
  Oligonucleotide for detection of SNP TSC0057197
tattgggggatga

SEQ ID NO: 234358 - DNA, 13 bp, Artificial Sequence
  Oligonucleotide for detection of SNP TSC0057197
tcatcccccaata

SEQ ID NO: 234359 - DNA, 13 bp, Artificial Sequence
  Oligonucleotide for detection of SNP TSC0057197
tattggaggatga

SEQ ID NO: 234360 - DNA, 13 bp, Artificial Sequence
  Oligonucleotide for detection of SNP TSC0057197
tcatcctccaata

SEQ ID NO: 234361 - DNA, 13 bp, Artificial Sequence
  Oligonucleotide for detection of SNP TSC0057198
taagatatagtaa

SEQ ID NO: 234362 - DNA, 13 bp, Artificial Sequence
  Oligonucleotide for detection of SNP TSC0057198
ttactatatctta

SEQ ID NO: 234363 - DNA, 13 bp, Artificial Sequence
  Oligonucleotide for detection of SNP TSC0057198
taagatttagtaa

SEQ ID NO: 234364 - DNA, 13 bp, Artificial Sequence
  Oligonucleotide for detection of SNP TSC0057198
ttactaaatctta

SEQ ID NO: 234365 - DNA, 13 bp, Artificial Sequence
  Oligonucleotide for detection of SNP TSC0057198
ttgttgagttttg

SEQ ID NO: 234366 - DNA, 13 bp, Artificial Sequence
  Oligonucleotide for detection of SNP TSC0057198
caaaactcaacaa

SEQ ID NO: 234367 - DNA, 13 bp, Artificial Sequence
  Oligonucleotide for detection of SNP TSC0057199
aataaaggttttt

SEQ ID NO: 234368 - DNA, 13 bp, Artificial Sequence
  Oligonucleotide for detection of SNP TSC0057199
aaaaacctttatt

SEQ ID NO: 234369 - DNA, 13 bp, Artificial Sequence
  Oligonucleotide for detection of SNP TSC0057199
aataaaagttttt

SEQ ID NO: 234370 - DNA, 13 bp, Artificial Sequence
  Oligonucleotide for detection of SNP TSC0057199
aaaaacttttatt

SEQ ID NO: 234371 - DNA, 13 bp, Artificial Sequence
  Oligonucleotide for detection of SNP TSC0057200
ttgttatgtattt

SEQ ID NO: 234372 - DNA, 13 bp, Artificial Sequence
  Oligonucleotide for detection of SNP TSC0057200
aaatacataacaa

SEQ ID NO: 234373 - DNA, 13 bp, Artificial Sequence
  Oligonucleotide for detection of SNP TSC0057200
ttgttacgtattt

SEQ ID NO: 234374 - DNA, 13 bp, Artificial Sequence
  Oligonucleotide for detection of SNP TSC0057200
aaatacgtaacaa

SEQ ID NO: 234375 - DNA, 13 bp, Artificial Sequence
  Oligonucleotide for detection of SNP TSC0057200
aggtatgtgataa

SEQ ID NO: 234376 - DNA, 13 bp, Artificial Sequence
  Oligonucleotide for detection of SNP TSC0057200
ttatcacatacct

SEQ ID NO: 234377 - DNA, 13 bp, Artificial Sequence
  Oligonucleotide for detection of SNP TSC0057200
aggtatatgataa

SEQ ID NO: 234378 - DNA, 13 bp, Artificial Sequence
  Oligonucleotide for detection of SNP TSC0057200
ttatcatatacct

SEQ ID NO: 234379 - DNA, 13 bp, Artificial Sequence
  Oligonucleotide for detection of SNP TSC0057200
aggtacgtgataa

SEQ ID NO: 234380 - DNA, 13 bp, Artificial Sequence
  Oligonucleotide for detection of SNP TSC0057200
ttatcacgtacct

SEQ ID NO: 234381 - DNA, 13 bp, Artificial Sequence
  Oligonucleotide for detection of SNP TSC0057204
tatgttatgatty

SEQ ID NO: 234382 - DNA, 13 bp, Artificial Sequence
  Oligonucleotide for detection of SNP TSC0057204
raatcataacata

SEQ ID NO: 234383 - DNA, 13 bp, Artificial Sequence
  Oligonucleotide for detection of SNP TSC0057204
tatgttttgatty

SEQ ID NO: 234384 - DNA, 13 bp, Artificial Sequence
  Oligonucleotide for detection of SNP TSC0057204
raatcaaaacata

SEQ ID NO: 234385 - DNA, 13 bp, Artificial Sequence
  Oligonucleotide for detection of SNP TSC0057204
tacgttatgatty

SEQ ID NO: 234386 - DNA, 13 bp, Artificial Sequence
  Oligonucleotide for detection of SNP TSC0057204
raatcataacgta

SEQ ID NO: 234387 - DNA, 13 bp, Artificial Sequence
  Oligonucleotide for detection of SNP TSC0057204
tacgttttgatty

SEQ ID NO: 234388 - DNA, 13 bp, Artificial Sequence
  Oligonucleotide for detection of SNP TSC0057204
raatcaaaacgta

SEQ ID NO: 234389 - DNA, 13 bp, Artificial Sequence
  Oligonucleotide for detection of SNP TSC0057204
gggttatagtgtg

SEQ ID NO: 234390 - DNA, 13 bp, Artificial Sequence
  Oligonucleotide for detection of SNP TSC0057204
cacactataaccc

SEQ ID NO: 234391 - DNA, 13 bp, Artificial Sequence
  Oligonucleotide for detection of SNP TSC0057204
gggttagagtgtg

SEQ ID NO: 234392 - DNA, 13 bp, Artificial Sequence
  Oligonucleotide for detection of SNP TSC0057204
cacactctaaccc

SEQ ID NO: 234393 - DNA, 13 bp, Artificial Sequence
  Oligonucleotide for detection of SNP TSC0057204
gggttatagcgtg

SEQ ID NO: 234394 - DNA, 13 bp, Artificial Sequence
  Oligonucleotide for detection of SNP TSC0057204
cacgctataaccc

SEQ ID NO: 234395 - DNA, 13 bp, Artificial Sequence
  Oligonucleotide for detection of SNP TSC0057204
gggttagagcgtg

SEQ ID NO: 234396 - DNA, 13 bp, Artificial Sequence
  Oligonucleotide for detection of SNP TSC0057204
cacgctctaaccc

SEQ ID NO: 234397 - DNA, 13 bp, Artificial Sequence
  Oligonucleotide for detection of SNP TSC0057205
taaatggtaatat

SEQ ID NO: 234398 - DNA, 13 bp, Artificial Sequence
  Oligonucleotide for detection of SNP TSC0057205
atattaccattta

SEQ ID NO: 234399 - DNA, 13 bp, Artificial Sequence
  Oligonucleotide for detection of SNP TSC0057205
taaatgataatat

SEQ ID NO: 234400 - DNA, 13 bp, Artificial Sequence
  Oligonucleotide for detection of SNP TSC0057205
atattatcattta

SEQ ID NO: 234401 - DNA, 13 bp, Artificial Sequence
  Oligonucleotide for detection of SNP TSC0057206
ggttgatatgtta

SEQ ID NO: 234402 - DNA, 13 bp, Artificial Sequence
  Oligonucleotide for detection of SNP TSC0057206
taacatatcaacc

SEQ ID NO: 234403 - DNA, 13 bp, Artificial Sequence
  Oligonucleotide for detection of SNP TSC0057206
ggttgagatgtta

SEQ ID NO: 234404 - DNA, 13 bp, Artificial Sequence
  Oligonucleotide for detection of SNP TSC0057206
taacatctcaacc

SEQ ID NO: 234405 - DNA, 13 bp, Artificial Sequence
  Oligonucleotide for detection of SNP TSC0057206
tggtatgttaaty

SEQ ID NO: 234406 - DNA, 13 bp, Artificial Sequence
  Oligonucleotide for detection of SNP TSC0057206
rattaacatacca

SEQ ID NO: 234407 - DNA, 13 bp, Artificial Sequence
  Oligonucleotide for detection of SNP TSC0057206
tggtattttaaty

SEQ ID NO: 234408 - DNA, 13 bp, Artificial Sequence
  Oligonucleotide for detection of SNP TSC0057206
rattaaaatacca

SEQ ID NO: 234409 - DNA, 13 bp, Artificial Sequence
  Oligonucleotide for detection of SNP TSC0057207
tgaaaggtattgg

SEQ ID NO: 234410 - DNA, 13 bp, Artificial Sequence
  Oligonucleotide for detection of SNP TSC0057207
ccaatacctttca

SEQ ID NO: 234411 - DNA, 13 bp, Artificial Sequence
  Oligonucleotide for detection of SNP TSC0057207
tgaaagatattgg

SEQ ID NO: 234412 - DNA, 13 bp, Artificial Sequence
  Oligonucleotide for detection of SNP TSC0057207
ccaatatctttca

SEQ ID NO: 234413 - DNA, 13 bp, Artificial Sequence
  Oligonucleotide for detection of SNP TSC0057207
tgaaaggtatcgg

SEQ ID NO: 234414 - DNA, 13 bp, Artificial Sequence
  Oligonucleotide for detection of SNP TSC0057207
ccgatacctttca

SEQ ID NO: 234415 - DNA, 13 bp, Artificial Sequence
  Oligonucleotide for detection of SNP TSC0057207
tgaaagatatcgg

SEQ ID NO: 234416 - DNA, 13 bp, Artificial Sequence
  Oligonucleotide for detection of SNP TSC0057207
ccgatatctttca

SEQ ID NO: 234417 - DNA, 13 bp, Artificial Sequence
  Oligonucleotide for detection of SNP TSC0057208
aatagatgtattg

SEQ ID NO: 234418 - DNA, 13 bp, Artificial Sequence
  Oligonucleotide for detection of SNP TSC0057208
caatacatctatt

SEQ ID NO: 234419 - DNA, 13 bp, Artificial Sequence
  Oligonucleotide for detection of SNP TSC0057208
aatagaggtattg

SEQ ID NO: 234420 - DNA, 13 bp, Artificial Sequence
  Oligonucleotide for detection of SNP TSC0057208
caatacctctatt

SEQ ID NO: 234421 - DNA, 13 bp, Artificial Sequence
  Oligonucleotide for detection of SNP TSC0057208
tagtatatttgtt

SEQ ID NO: 234422 - DNA, 13 bp, Artificial Sequence
  Oligonucleotide for detection of SNP TSC0057208
aacaaatatacta

SEQ ID NO: 234423 - DNA, 13 bp, Artificial Sequence
  Oligonucleotide for detection of SNP TSC0057208
tagtatttttgtt

SEQ ID NO: 234424 - DNA, 13 bp, Artificial Sequence
  Oligonucleotide for detection of SNP TSC0057208
aacaaaaatacta

SEQ ID NO: 234425 - DNA, 13 bp, Artificial Sequence
  Oligonucleotide for detection of SNP TSC0057209
aaatatagttagg

SEQ ID NO: 234426 - DNA, 13 bp, Artificial Sequence
  Oligonucleotide for detection of SNP TSC0057209
cctaactatattt

SEQ ID NO: 234427 - DNA, 13 bp, Artificial Sequence
  Oligonucleotide for detection of SNP TSC0057209
aaatatggttagg

SEQ ID NO: 234428 - DNA, 13 bp, Artificial Sequence
  Oligonucleotide for detection of SNP TSC0057209
cctaaccatattt

SEQ ID NO: 234429 - DNA, 13 bp, Artificial Sequence
  Oligonucleotide for detection of SNP TSC0057210
aattttgttagtt

SEQ ID NO: 234430 - DNA, 13 bp, Artificial Sequence
  Oligonucleotide for detection of SNP TSC0057210
aactaacaaaatt

SEQ ID NO: 234431 - DNA, 13 bp, Artificial Sequence
  Oligonucleotide for detection of SNP TSC0057212
ttatggtatatag

SEQ ID NO: 234432 - DNA, 13 bp, Artificial Sequence
  Oligonucleotide for detection of SNP TSC0057212
ctatataccataa

SEQ ID NO: 234433 - DNA, 13 bp, Artificial Sequence
  Oligonucleotide for detection of SNP TSC0057212
ttatgggatatag

SEQ ID NO: 234434 - DNA, 13 bp, Artificial Sequence
  Oligonucleotide for detection of SNP TSC0057212
ctatatcccataa

SEQ ID NO: 234435 - DNA, 13 bp, Artificial Sequence
  Oligonucleotide for detection of SNP TSC0057212
ttatatgttatag

SEQ ID NO: 234436 - DNA, 13 bp, Artificial Sequence
  Oligonucleotide for detection of SNP TSC0057212
ctataacatataa

SEQ ID NO: 234437 - DNA, 13 bp, Artificial Sequence
  Oligonucleotide for detection of SNP TSC0057212
ttatattttatag

SEQ ID NO: 234438 - DNA, 13 bp, Artificial Sequence
  Oligonucleotide for detection of SNP TSC0057212
ctataaaatataa

SEQ ID NO: 234439 - DNA, 13 bp, Artificial Sequence
  Oligonucleotide for detection of SNP TSC0057214
tattttatgttgg

SEQ ID NO: 234440 - DNA, 13 bp, Artificial Sequence
  Oligonucleotide for detection of SNP TSC0057214
ccaacataaaata

SEQ ID NO: 234441 - DNA, 13 bp, Artificial Sequence
  Oligonucleotide for detection of SNP TSC0057216
tattaatatgatg

SEQ ID NO: 234442 - DNA, 13 bp, Artificial Sequence
  Oligonucleotide for detection of SNP TSC0057216
catcatattaata

SEQ ID NO: 234443 - DNA, 13 bp, Artificial Sequence
  Oligonucleotide for detection of SNP TSC0057216
tattaagatgatg

SEQ ID NO: 234444 - DNA, 13 bp, Artificial Sequence
  Oligonucleotide for detection of SNP TSC0057216
catcatcttaata

SEQ ID NO: 234445 - DNA, 13 bp, Artificial Sequence
  Oligonucleotide for detection of SNP TSC0057216
tattaatacgatg

SEQ ID NO: 234446 - DNA, 13 bp, Artificial Sequence
  Oligonucleotide for detection of SNP TSC0057216
catcgtattaata

SEQ ID NO: 234447 - DNA, 13 bp, Artificial Sequence
  Oligonucleotide for detection of SNP TSC0057216
tattaagacgatg

SEQ ID NO: 234448 - DNA, 13 bp, Artificial Sequence
  Oligonucleotide for detection of SNP TSC0057216
catcgtcttaata

SEQ ID NO: 234449 - DNA, 13 bp, Artificial Sequence
  Oligonucleotide for detection of SNP TSC0057216
tattgtattaatg

SEQ ID NO: 234450 - DNA, 13 bp, Artificial Sequence
  Oligonucleotide for detection of SNP TSC0057216
cattaatacaata

SEQ ID NO: 234451 - DNA, 13 bp, Artificial Sequence
  Oligonucleotide for detection of SNP TSC0057216
tattgttttaatg

SEQ ID NO: 234452 - DNA, 13 bp, Artificial Sequence
  Oligonucleotide for detection of SNP TSC0057216
cattaaaacaata

SEQ ID NO: 234453 - DNA, 13 bp, Artificial Sequence
  Oligonucleotide for detection of SNP TSC0057216
tatcgtattaatg

SEQ ID NO: 234454 - DNA, 13 bp, Artificial Sequence
  Oligonucleotide for detection of SNP TSC0057216
cattaatacgata

SEQ ID NO: 234455 - DNA, 13 bp, Artificial Sequence
  Oligonucleotide for detection of SNP TSC0057216
tatcgttttaatg

SEQ ID NO: 234456 - DNA, 13 bp, Artificial Sequence
  Oligonucleotide for detection of SNP TSC0057216
cattaaaacgata

SEQ ID NO: 234457 - DNA, 13 bp, Artificial Sequence
  Oligonucleotide for detection of SNP TSC0057217
gtaagtagggaty

SEQ ID NO: 234458 - DNA, 13 bp, Artificial Sequence
  Oligonucleotide for detection of SNP TSC0057217
ratccctacttac

SEQ ID NO: 234459 - DNA, 13 bp, Artificial Sequence
  Oligonucleotide for detection of SNP TSC0057217
gtaagtggggaty

SEQ ID NO: 234460 - DNA, 13 bp, Artificial Sequence
  Oligonucleotide for detection of SNP TSC0057217
ratccccacttac

SEQ ID NO: 234461 - DNA, 13 bp, Artificial Sequence
  Oligonucleotide for detection of SNP TSC0057218
ttataaggattta

SEQ ID NO: 234462 - DNA, 13 bp, Artificial Sequence
  Oligonucleotide for detection of SNP TSC0057218
taaatccttataa

SEQ ID NO: 234463 - DNA, 13 bp, Artificial Sequence
  Oligonucleotide for detection of SNP TSC0057218
ttataaagattta

SEQ ID NO: 234464 - DNA, 13 bp, Artificial Sequence
  Oligonucleotide for detection of SNP TSC0057218
taaatctttataa

SEQ ID NO: 234465 - DNA, 13 bp, Artificial Sequence
  Oligonucleotide for detection of SNP TSC0057219
tagaagggaaagt

SEQ ID NO: 234466 - DNA, 13 bp, Artificial Sequence
  Oligonucleotide for detection of SNP TSC0057219
actttcccttcta

SEQ ID NO: 234467 - DNA, 13 bp, Artificial Sequence
  Oligonucleotide for detection of SNP TSC0057219
tagaagagaaagt

SEQ ID NO: 234468 - DNA, 13 bp, Artificial Sequence
  Oligonucleotide for detection of SNP TSC0057219
actttctcttcta

SEQ ID NO: 234469 - DNA, 13 bp, Artificial Sequence
  Oligonucleotide for detection of SNP TSC0057221
ttaaatattgttt

SEQ ID NO: 234470 - DNA, 13 bp, Artificial Sequence
  Oligonucleotide for detection of SNP TSC0057221
aaacaatatttaa

SEQ ID NO: 234471 - DNA, 13 bp, Artificial Sequence
  Oligonucleotide for detection of SNP TSC0057221
ttaaatgttgttt

SEQ ID NO: 234472 - DNA, 13 bp, Artificial Sequence
  Oligonucleotide for detection of SNP TSC0057221
aaacaacatttaa

SEQ ID NO: 234473 - DNA, 13 bp, Artificial Sequence
  Oligonucleotide for detection of SNP TSC0057221
ttaaacgttgttt

SEQ ID NO: 234474 - DNA, 13 bp, Artificial Sequence
  Oligonucleotide for detection of SNP TSC0057221
aaacaacgtttaa

SEQ ID NO: 234475 - DNA, 13 bp, Artificial Sequence
  Oligonucleotide for detection of SNP TSC0057222
ggttgatggatgg

SEQ ID NO: 234476 - DNA, 13 bp, Artificial Sequence
  Oligonucleotide for detection of SNP TSC0057222
ccatccatcaacc

SEQ ID NO: 234477 - DNA, 13 bp, Artificial Sequence
  Oligonucleotide for detection of SNP TSC0057222
ggttgacggatgg

SEQ ID NO: 234478 - DNA, 13 bp, Artificial Sequence
  Oligonucleotide for detection of SNP TSC0057222
ccatccgtcaacc

SEQ ID NO: 234479 - DNA, 13 bp, Artificial Sequence
  Oligonucleotide for detection of SNP TSC0057226
gtttttattttag

SEQ ID NO: 234480 - DNA, 13 bp, Artificial Sequence
  Oligonucleotide for detection of SNP TSC0057226
ctaaaataaaaac

SEQ ID NO: 234481 - DNA, 13 bp, Artificial Sequence
  Oligonucleotide for detection of SNP TSC0057226
ttagaatgagagy

SEQ ID NO: 234482 - DNA, 13 bp, Artificial Sequence
  Oligonucleotide for detection of SNP TSC0057226
rctctcattctaa

SEQ ID NO: 234483 - DNA, 13 bp, Artificial Sequence
  Oligonucleotide for detection of SNP TSC0057226
ttagaaagagagy

SEQ ID NO: 234484 - DNA, 13 bp, Artificial Sequence
  Oligonucleotide for detection of SNP TSC0057226
rctctctttctaa

SEQ ID NO: 234485 - DNA, 13 bp, Artificial Sequence
  Oligonucleotide for detection of SNP TSC0057227
attataaagtttt

SEQ ID NO: 234486 - DNA, 13 bp, Artificial Sequence
  Oligonucleotide for detection of SNP TSC0057227
aaaactttataat

SEQ ID NO: 234487 - DNA, 13 bp, Artificial Sequence
  Oligonucleotide for detection of SNP TSC0057227
attatagagtttt

SEQ ID NO: 234488 - DNA, 13 bp, Artificial Sequence
  Oligonucleotide for detection of SNP TSC0057227
aaaactctataat

SEQ ID NO: 234489 - DNA, 13 bp, Artificial Sequence
  Oligonucleotide for detection of SNP TSC0057228
aagaagataatty

SEQ ID NO: 234490 - DNA, 13 bp, Artificial Sequence
  Oligonucleotide for detection of SNP TSC0057228
raattatcttctt

SEQ ID NO: 234491 - DNA, 13 bp, Artificial Sequence
  Oligonucleotide for detection of SNP TSC0057228
aagaaggtaatty

SEQ ID NO: 234492 - DNA, 13 bp, Artificial Sequence
  Oligonucleotide for detection of SNP TSC0057228
raattaccttctt

SEQ ID NO: 234493 - DNA, 13 bp, Artificial Sequence
  Oligonucleotide for detection of SNP TSC0057231
ttataagatagaa

SEQ ID NO: 234494 - DNA, 13 bp, Artificial Sequence
  Oligonucleotide for detection of SNP TSC0057231
ttctatcttataa

SEQ ID NO: 234495 - DNA, 13 bp, Artificial Sequence
  Oligonucleotide for detection of SNP TSC0057231
ttataaaatagaa

SEQ ID NO: 234496 - DNA, 13 bp, Artificial Sequence
  Oligonucleotide for detection of SNP TSC0057231
ttctattttataa

SEQ ID NO: 234497 - DNA, 13 bp, Artificial Sequence
  Oligonucleotide for detection of SNP TSC0057232
attttagttttag

SEQ ID NO: 234498 - DNA, 13 bp, Artificial Sequence
  Oligonucleotide for detection of SNP TSC0057232
ctaaaactaaaat

SEQ ID NO: 234499 - DNA, 13 bp, Artificial Sequence
  Oligonucleotide for detection of SNP TSC0057233
tttttttttgaaa

SEQ ID NO: 234500 - DNA, 13 bp, Artificial Sequence
  Oligonucleotide for detection of SNP TSC0057233
tttcaaaaaaaaa

SEQ ID NO: 234501 - DNA, 13 bp, Artificial Sequence
  Oligonucleotide for detection of SNP TSC0057233
ttttaatgggaga

SEQ ID NO: 234502 - DNA, 13 bp, Artificial Sequence
  Oligonucleotide for detection of SNP TSC0057233
tctcccattaaaa

SEQ ID NO: 234503 - DNA, 13 bp, Artificial Sequence
  Oligonucleotide for detection of SNP TSC0057233
ttttaaggggaga

SEQ ID NO: 234504 - DNA, 13 bp, Artificial Sequence
  Oligonucleotide for detection of SNP TSC0057233
tctccccttaaaa

SEQ ID NO: 234505 - DNA, 13 bp, Artificial Sequence
  Oligonucleotide for detection of SNP TSC0057234
ggaatggaaggty

SEQ ID NO: 234506 - DNA, 13 bp, Artificial Sequence
  Oligonucleotide for detection of SNP TSC0057234
raccttccattcc

SEQ ID NO: 234507 - DNA, 13 bp, Artificial Sequence
  Oligonucleotide for detection of SNP TSC0057234
ggaatgaaaggty

SEQ ID NO: 234508 - DNA, 13 bp, Artificial Sequence
  Oligonucleotide for detection of SNP TSC0057234
racctttcattcc

SEQ ID NO: 234509 - DNA, 13 bp, Artificial Sequence
  Oligonucleotide for detection of SNP TSC0057234
ggaacggaaggty

SEQ ID NO: 234510 - DNA, 13 bp, Artificial Sequence
  Oligonucleotide for detection of SNP TSC0057234
raccttccgttcc

SEQ ID NO: 234511 - DNA, 13 bp, Artificial Sequence
  Oligonucleotide for detection of SNP TSC0057234
ggaacgaaaggty

SEQ ID NO: 234512 - DNA, 13 bp, Artificial Sequence
  Oligonucleotide for detection of SNP TSC0057234
racctttcgttcc

SEQ ID NO: 234513 - DNA, 13 bp, Artificial Sequence
  Oligonucleotide for detection of SNP TSC0057236
taggtgagttttt

SEQ ID NO: 234514 - DNA, 13 bp, Artificial Sequence
  Oligonucleotide for detection of SNP TSC0057236
aaaaactcaccta

SEQ ID NO: 234515 - DNA, 13 bp, Artificial Sequence
  Oligonucleotide for detection of SNP TSC0057236
taggtgggttttt

SEQ ID NO: 234516 - DNA, 13 bp, Artificial Sequence
  Oligonucleotide for detection of SNP TSC0057236
aaaaacccaccta

SEQ ID NO: 234517 - DNA, 13 bp, Artificial Sequence
  Oligonucleotide for detection of SNP TSC0008093
ggaggtggttttt

SEQ ID NO: 234518 - DNA, 13 bp, Artificial Sequence
  Oligonucleotide for detection of SNP TSC0008093
aaaaaccacctcc

SEQ ID NO: 234519 - DNA, 13 bp, Artificial Sequence
  Oligonucleotide for detection of SNP TSC0008093
ggaggtagttttt

SEQ ID NO: 234520 - DNA, 13 bp, Artificial Sequence
  Oligonucleotide for detection of SNP TSC0008093
aaaaactacctcc

SEQ ID NO: 234521 - DNA, 13 bp, Artificial Sequence
  Oligonucleotide for detection of SNP TSC0009558
ttttttaaataty

SEQ ID NO: 234522 - DNA, 13 bp, Artificial Sequence
  Oligonucleotide for detection of SNP TSC0009558
ratatttaaaaaa

SEQ ID NO: 234523 - DNA, 13 bp, Artificial Sequence
  Oligonucleotide for detection of SNP TSC0009558
tttttttaataty

SEQ ID NO: 234524 - DNA, 13 bp, Artificial Sequence
  Oligonucleotide for detection of SNP TSC0009558
ratattaaaaaaa

SEQ ID NO: 234525 - DNA, 13 bp, Artificial Sequence
  Oligonucleotide for detection of SNP TSC0009558
ggtatttaaaaag

SEQ ID NO: 234526 - DNA, 13 bp, Artificial Sequence
  Oligonucleotide for detection of SNP TSC0009558
ctttttaaatacc

SEQ ID NO: 234527 - DNA, 13 bp, Artificial Sequence
  Oligonucleotide for detection of SNP TSC0009558
ggtattaaaaaag

SEQ ID NO: 234528 - DNA, 13 bp, Artificial Sequence
  Oligonucleotide for detection of SNP TSC0009558
cttttttaatacc

SEQ ID NO: 234529 - DNA, 13 bp, Artificial Sequence
  Oligonucleotide for detection of SNP TSC0057241
tatatatttaagy

SEQ ID NO: 234530 - DNA, 13 bp, Artificial Sequence
  Oligonucleotide for detection of SNP TSC0057241
rcttaaatatata

SEQ ID NO: 234531 - DNA, 13 bp, Artificial Sequence
  Oligonucleotide for detection of SNP TSC0057241
tatatagttaagy

SEQ ID NO: 234532 - DNA, 13 bp, Artificial Sequence
  Oligonucleotide for detection of SNP TSC0057241
rcttaactatata

SEQ ID NO: 234533 - DNA, 13 bp, Artificial Sequence
  Oligonucleotide for detection of SNP TSC0057241
gtttgaatatata

SEQ ID NO: 234534 - DNA, 13 bp, Artificial Sequence
  Oligonucleotide for detection of SNP TSC0057241
tatatattcaaac

SEQ ID NO: 234535 - DNA, 13 bp, Artificial Sequence
  Oligonucleotide for detection of SNP TSC0057241
gtttgattatata

SEQ ID NO: 234536 - DNA, 13 bp, Artificial Sequence
  Oligonucleotide for detection of SNP TSC0057241
tatataatcaaac

SEQ ID NO: 234537 - DNA, 13 bp, Artificial Sequence
  Oligonucleotide for detection of SNP TSC0057243
agttgaggtatta

SEQ ID NO: 234538 - DNA, 13 bp, Artificial Sequence
  Oligonucleotide for detection of SNP TSC0057243
taatacctcaact

SEQ ID NO: 234539 - DNA, 13 bp, Artificial Sequence
  Oligonucleotide for detection of SNP TSC0057243
agttgaagtatta

SEQ ID NO: 234540 - DNA, 13 bp, Artificial Sequence
  Oligonucleotide for detection of SNP TSC0057243
taatacttcaact

SEQ ID NO: 234541 - DNA, 13 bp, Artificial Sequence
  Oligonucleotide for detection of SNP TSC0057245
tttgaagtgtttt

SEQ ID NO: 234542 - DNA, 13 bp, Artificial Sequence
  Oligonucleotide for detection of SNP TSC0057245
aaaacacttcaaa

SEQ ID NO: 234543 - DNA, 13 bp, Artificial Sequence
  Oligonucleotide for detection of SNP TSC0057246
tgtgaaaaatgty

SEQ ID NO: 234544 - DNA, 13 bp, Artificial Sequence
  Oligonucleotide for detection of SNP TSC0057246
racatttttcaca

SEQ ID NO: 234545 - DNA, 13 bp, Artificial Sequence
  Oligonucleotide for detection of SNP TSC0057246
tgtgaataatgty

SEQ ID NO: 234546 - DNA, 13 bp, Artificial Sequence
  Oligonucleotide for detection of SNP TSC0057246
racattattcaca

SEQ ID NO: 234547 - DNA, 13 bp, Artificial Sequence
  Oligonucleotide for detection of SNP TSC0057246
gatattttttata

SEQ ID NO: 234548 - DNA, 13 bp, Artificial Sequence
  Oligonucleotide for detection of SNP TSC0057246
tataaaaaatatc

SEQ ID NO: 234549 - DNA, 13 bp, Artificial Sequence
  Oligonucleotide for detection of SNP TSC0057246
gatattgtttata

SEQ ID NO: 234550 - DNA, 13 bp, Artificial Sequence
  Oligonucleotide for detection of SNP TSC0057246
tataaacaatatc

SEQ ID NO: 234551 - DNA, 13 bp, Artificial Sequence
  Oligonucleotide for detection of SNP TSC0057247
tttattttatatt

SEQ ID NO: 234552 - DNA, 13 bp, Artificial Sequence
  Oligonucleotide for detection of SNP TSC0057247
aatataaaataaa

SEQ ID NO: 234553 - DNA, 13 bp, Artificial Sequence
  Oligonucleotide for detection of SNP TSC0057247
aatgtataataaa

SEQ ID NO: 234554 - DNA, 13 bp, Artificial Sequence
  Oligonucleotide for detection of SNP TSC0057247
tttattatacatt

SEQ ID NO: 234555 - DNA, 13 bp, Artificial Sequence
  Oligonucleotide for detection of SNP TSC0057247
aatgtaaaataaa

SEQ ID NO: 234556 - DNA, 13 bp, Artificial Sequence
  Oligonucleotide for detection of SNP TSC0057247
tttattttacatt

SEQ ID NO: 234557 - DNA, 13 bp, Artificial Sequence
  Oligonucleotide for detection of SNP TSC0057248
ttgattttaggtt

SEQ ID NO: 234558 - DNA, 13 bp, Artificial Sequence
  Oligonucleotide for detection of SNP TSC0057248
aacctaaaatcaa

SEQ ID NO: 234559 - DNA, 13 bp, Artificial Sequence
  Oligonucleotide for detection of SNP TSC0057248
ttgattgtaggtt

SEQ ID NO: 234560 - DNA, 13 bp, Artificial Sequence
  Oligonucleotide for detection of SNP TSC0057248
aacctacaatcaa

SEQ ID NO: 234561 - DNA, 13 bp, Artificial Sequence
  Oligonucleotide for detection of SNP TSC0057248
ttgatcgtaggtt

SEQ ID NO: 234562 - DNA, 13 bp, Artificial Sequence
  Oligonucleotide for detection of SNP TSC0057248
aacctacgatcaa

SEQ ID NO: 234563 - DNA, 13 bp, Artificial Sequence
  Oligonucleotide for detection of SNP TSC0057248
agtttgagattag

SEQ ID NO: 234564 - DNA, 13 bp, Artificial Sequence
  Oligonucleotide for detection of SNP TSC0057248
ctaatctcaaact

SEQ ID NO: 234565 - DNA, 13 bp, Artificial Sequence
  Oligonucleotide for detection of SNP TSC0057248
agtttgtgattag

SEQ ID NO: 234566 - DNA, 13 bp, Artificial Sequence
  Oligonucleotide for detection of SNP TSC0057248
ctaatcacaaact

SEQ ID NO: 234567 - DNA, 13 bp, Artificial Sequence
  Oligonucleotide for detection of SNP TSC0057248
agtttgcgattag

SEQ ID NO: 234568 - DNA, 13 bp, Artificial Sequence
  Oligonucleotide for detection of SNP TSC0057248
ctaatcgcaaact

SEQ ID NO: 234569 - DNA, 13 bp, Artificial Sequence
  Oligonucleotide for detection of SNP TSC0057250
ttaagtatgagat

SEQ ID NO: 234570 - DNA, 13 bp, Artificial Sequence
  Oligonucleotide for detection of SNP TSC0057250
atctcatacttaa

SEQ ID NO: 234571 - DNA, 13 bp, Artificial Sequence
  Oligonucleotide for detection of SNP TSC0057250
ttaagtgtgagat

SEQ ID NO: 234572 - DNA, 13 bp, Artificial Sequence
  Oligonucleotide for detection of SNP TSC0057250
atctcacacttaa

SEQ ID NO: 234573 - DNA, 13 bp, Artificial Sequence
  Oligonucleotide for detection of SNP TSC0057250
ttaagcgtgagat

SEQ ID NO: 234574 - DNA, 13 bp, Artificial Sequence
  Oligonucleotide for detection of SNP TSC0057250
atctcacgcttaa

SEQ ID NO: 234575 - DNA, 13 bp, Artificial Sequence
  Oligonucleotide for detection of SNP TSC0057251
tatgagtgttttt

SEQ ID NO: 234576 - DNA, 13 bp, Artificial Sequence
  Oligonucleotide for detection of SNP TSC0057251
aaaaacactcata

SEQ ID NO: 234577 - DNA, 13 bp, Artificial Sequence
  Oligonucleotide for detection of SNP TSC0057251
tacgagtgttttt

SEQ ID NO: 234578 - DNA, 13 bp, Artificial Sequence
  Oligonucleotide for detection of SNP TSC0057251
aaaaacactcgta

SEQ ID NO: 234579 - DNA, 13 bp, Artificial Sequence
  Oligonucleotide for detection of SNP TSC0057251
tatgagcgttttt

SEQ ID NO: 234580 - DNA, 13 bp, Artificial Sequence
  Oligonucleotide for detection of SNP TSC0057251
aaaaacgctcata

SEQ ID NO: 234581 - DNA, 13 bp, Artificial Sequence
  Oligonucleotide for detection of SNP TSC0057251
tacgagcgttttt

SEQ ID NO: 234582 - DNA, 13 bp, Artificial Sequence
  Oligonucleotide for detection of SNP TSC0057251
aaaaacgctcgta

SEQ ID NO: 234583 - DNA, 13 bp, Artificial Sequence
  Oligonucleotide for detection of SNP TSC0057251
aagagtgtttgta

SEQ ID NO: 234584 - DNA, 13 bp, Artificial Sequence
  Oligonucleotide for detection of SNP TSC0057251
tacaaacactctt

SEQ ID NO: 234585 - DNA, 13 bp, Artificial Sequence
  Oligonucleotide for detection of SNP TSC0057251
aagagtatttgta

SEQ ID NO: 234586 - DNA, 13 bp, Artificial Sequence
  Oligonucleotide for detection of SNP TSC0057251
tacaaatactctt

SEQ ID NO: 234587 - DNA, 13 bp, Artificial Sequence
  Oligonucleotide for detection of SNP TSC0057251
aagagcgtttgta

SEQ ID NO: 234588 - DNA, 13 bp, Artificial Sequence
  Oligonucleotide for detection of SNP TSC0057251
tacaaacgctctt

SEQ ID NO: 234589 - DNA, 13 bp, Artificial Sequence
  Oligonucleotide for detection of SNP TSC0057251
aagagtattcgta

SEQ ID NO: 234590 - DNA, 13 bp, Artificial Sequence
  Oligonucleotide for detection of SNP TSC0057251
tacgaatactctt

SEQ ID NO: 234591 - DNA, 13 bp, Artificial Sequence
  Oligonucleotide for detection of SNP TSC0057251
aagagtgttcgta

SEQ ID NO: 234592 - DNA, 13 bp, Artificial Sequence
  Oligonucleotide for detection of SNP TSC0057251
tacgaacactctt

SEQ ID NO: 234593 - DNA, 13 bp, Artificial Sequence
  Oligonucleotide for detection of SNP TSC0057251
aagagcgttcgta

SEQ ID NO: 234594 - DNA, 13 bp, Artificial Sequence
  Oligonucleotide for detection of SNP TSC0057251
tacgaacgctctt

SEQ ID NO: 234595 - DNA, 13 bp, Artificial Sequence
  Oligonucleotide for detection of SNP TSC0057252
gtttttaaatgga

SEQ ID NO: 234596 - DNA, 13 bp, Artificial Sequence
  Oligonucleotide for detection of SNP TSC0057252
tccatttaaaaac

SEQ ID NO: 234597 - DNA, 13 bp, Artificial Sequence
  Oligonucleotide for detection of SNP TSC0057252
gtttttgaatgga

SEQ ID NO: 234598 - DNA, 13 bp, Artificial Sequence
  Oligonucleotide for detection of SNP TSC0057252
tccattcaaaaac

SEQ ID NO: 234599 - DNA, 13 bp, Artificial Sequence
  Oligonucleotide for detection of SNP TSC0057252
gttttcgaatgga

SEQ ID NO: 234600 - DNA, 13 bp, Artificial Sequence
  Oligonucleotide for detection of SNP TSC0057252
tccattcgaaaac

SEQ ID NO: 234601 - DNA, 13 bp, Artificial Sequence
  Oligonucleotide for detection of SNP TSC0057252
tttatttgagaay

SEQ ID NO: 234602 - DNA, 13 bp, Artificial Sequence
  Oligonucleotide for detection of SNP TSC0057252
rttctcaaataaa

SEQ ID NO: 234603 - DNA, 13 bp, Artificial Sequence
  Oligonucleotide for detection of SNP TSC0057252
tttattcgagaay

SEQ ID NO: 234604 - DNA, 13 bp, Artificial Sequence
  Oligonucleotide for detection of SNP TSC0057252
rttctcgaataaa

SEQ ID NO: 234605 - DNA, 13 bp, Artificial Sequence
  Oligonucleotide for detection of SNP TSC0057253
gtatagatttgtt

SEQ ID NO: 234606 - DNA, 13 bp, Artificial Sequence
  Oligonucleotide for detection of SNP TSC0057253
aacaaatctatac

SEQ ID NO: 234607 - DNA, 13 bp, Artificial Sequence
  Oligonucleotide for detection of SNP TSC0057253
gtataggtttgtt

SEQ ID NO: 234608 - DNA, 13 bp, Artificial Sequence
  Oligonucleotide for detection of SNP TSC0057253
aacaaacctatac

SEQ ID NO: 234609 - DNA, 13 bp, Artificial Sequence
  Oligonucleotide for detection of SNP TSC0057254
attagaatttaag

SEQ ID NO: 234610 - DNA, 13 bp, Artificial Sequence
  Oligonucleotide for detection of SNP TSC0057254
cttaaattctaat

SEQ ID NO: 234611 - DNA, 13 bp, Artificial Sequence
  Oligonucleotide for detection of SNP TSC0057254
attagattttaag

SEQ ID NO: 234612 - DNA, 13 bp, Artificial Sequence
  Oligonucleotide for detection of SNP TSC0057254
cttaaaatctaat

SEQ ID NO: 234613 - DNA, 13 bp, Artificial Sequence
  Oligonucleotide for detection of SNP TSC0057254
tttaagttttaat

SEQ ID NO: 234614 - DNA, 13 bp, Artificial Sequence
  Oligonucleotide for detection of SNP TSC0057254
attaaaacttaaa

SEQ ID NO: 234615 - DNA, 13 bp, Artificial Sequence
  Oligonucleotide for detection of SNP TSC0057255
gattatgatttag

SEQ ID NO: 234616 - DNA, 13 bp, Artificial Sequence
  Oligonucleotide for detection of SNP TSC0057255
ctaaatcataatc

SEQ ID NO: 234617 - DNA, 13 bp, Artificial Sequence
  Oligonucleotide for detection of SNP TSC0057255
gattataatttag

SEQ ID NO: 234618 - DNA, 13 bp, Artificial Sequence
  Oligonucleotide for detection of SNP TSC0057255
ctaaattataatc

SEQ ID NO: 234619 - DNA, 13 bp, Artificial Sequence
  Oligonucleotide for detection of SNP TSC0057256
taaaaggaataga

SEQ ID NO: 234620 - DNA, 13 bp, Artificial Sequence
  Oligonucleotide for detection of SNP TSC0057256
tctattcctttta

SEQ ID NO: 234621 - DNA, 13 bp, Artificial Sequence
  Oligonucleotide for detection of SNP TSC0057256
taaaagaaataga

SEQ ID NO: 234622 - DNA, 13 bp, Artificial Sequence
  Oligonucleotide for detection of SNP TSC0057256
tctatttctttta

SEQ ID NO: 234623 - DNA, 13 bp, Artificial Sequence
  Oligonucleotide for detection of SNP TSC0057258
tatgatgattatg

SEQ ID NO: 234624 - DNA, 13 bp, Artificial Sequence
  Oligonucleotide for detection of SNP TSC0057258
cataatcatcata

SEQ ID NO: 234625 - DNA, 13 bp, Artificial Sequence
  Oligonucleotide for detection of SNP TSC0057258
tatgataattatg

SEQ ID NO: 234626 - DNA, 13 bp, Artificial Sequence
  Oligonucleotide for detection of SNP TSC0057258
cataattatcata

SEQ ID NO: 234627 - DNA, 13 bp, Artificial Sequence
  Oligonucleotide for detection of SNP TSC0057258
tatgatgattacg

SEQ ID NO: 234628 - DNA, 13 bp, Artificial Sequence
  Oligonucleotide for detection of SNP TSC0057258
cgtaatcatcata

SEQ ID NO: 234629 - DNA, 13 bp, Artificial Sequence
  Oligonucleotide for detection of SNP TSC0057258
tatgataattacg

SEQ ID NO: 234630 - DNA, 13 bp, Artificial Sequence
  Oligonucleotide for detection of SNP TSC0057258
cgtaattatcata

SEQ ID NO: 234631 - DNA, 13 bp, Artificial Sequence
  Oligonucleotide for detection of SNP TSC0057259
attattatagtat

SEQ ID NO: 234632 - DNA, 13 bp, Artificial Sequence
  Oligonucleotide for detection of SNP TSC0057259
atactataataat

SEQ ID NO: 234633 - DNA, 13 bp, Artificial Sequence
  Oligonucleotide for detection of SNP TSC0057259
attattgtagtat

SEQ ID NO: 234634 - DNA, 13 bp, Artificial Sequence
  Oligonucleotide for detection of SNP TSC0057259
atactacaataat

SEQ ID NO: 234635 - DNA, 13 bp, Artificial Sequence
  Oligonucleotide for detection of SNP TSC0057263
aaaatatgaaaay

SEQ ID NO: 234636 - DNA, 13 bp, Artificial Sequence
  Oligonucleotide for detection of SNP TSC0057263
rttttcatatttt

SEQ ID NO: 234637 - DNA, 13 bp, Artificial Sequence
  Oligonucleotide for detection of SNP TSC0057263
aaaatacgaaaay

SEQ ID NO: 234638 - DNA, 13 bp, Artificial Sequence
  Oligonucleotide for detection of SNP TSC0057263
rttttcgtatttt

SEQ ID NO: 234639 - DNA, 13 bp, Artificial Sequence
  Oligonucleotide for detection of SNP TSC0057264
attatattaattg

SEQ ID NO: 234640 - DNA, 13 bp, Artificial Sequence
  Oligonucleotide for detection of SNP TSC0057264
caattaatataat

SEQ ID NO: 234641 - DNA, 13 bp, Artificial Sequence
  Oligonucleotide for detection of SNP TSC0057264
taattagtataat

SEQ ID NO: 234642 - DNA, 13 bp, Artificial Sequence
  Oligonucleotide for detection of SNP TSC0057264
attatactaatta

SEQ ID NO: 234643 - DNA, 13 bp, Artificial Sequence
  Oligonucleotide for detection of SNP TSC0010264
tagatagttgagt

SEQ ID NO: 234644 - DNA, 13 bp, Artificial Sequence
  Oligonucleotide for detection of SNP TSC0010264
actcaactatcta

SEQ ID NO: 234645 - DNA, 13 bp, Artificial Sequence
  Oligonucleotide for detection of SNP TSC0010264
tagataattgagt

SEQ ID NO: 234646 - DNA, 13 bp, Artificial Sequence
  Oligonucleotide for detection of SNP TSC0010264
actcaattatcta

SEQ ID NO: 234647 - DNA, 13 bp, Artificial Sequence
  Oligonucleotide for detection of SNP TSC0057266
tttggagtatagt

SEQ ID NO: 234648 - DNA, 13 bp, Artificial Sequence
  Oligonucleotide for detection of SNP TSC0057266
actatactccaaa

SEQ ID NO: 234649 - DNA, 13 bp, Artificial Sequence
  Oligonucleotide for detection of SNP TSC0057267
tatattgatttat

SEQ ID NO: 234650 - DNA, 13 bp, Artificial Sequence
  Oligonucleotide for detection of SNP TSC0057267
ataaatcaatata

SEQ ID NO: 234651 - DNA, 13 bp, Artificial Sequence
  Oligonucleotide for detection of SNP TSC0057267
atgagtgaatgtg

SEQ ID NO: 234652 - DNA, 13 bp, Artificial Sequence
  Oligonucleotide for detection of SNP TSC0057267
cacattcactcat

SEQ ID NO: 234653 - DNA, 13 bp, Artificial Sequence
  Oligonucleotide for detection of SNP TSC0057267
atgagttaatgtg

SEQ ID NO: 234654 - DNA, 13 bp, Artificial Sequence
  Oligonucleotide for detection of SNP TSC0057267
cacattaactcat

SEQ ID NO: 234655 - DNA, 13 bp, Artificial Sequence
  Oligonucleotide for detection of SNP TSC0057270
aattatggtaatg

SEQ ID NO: 234656 - DNA, 13 bp, Artificial Sequence
  Oligonucleotide for detection of SNP TSC0057270
cattaccataatt

SEQ ID NO: 234657 - DNA, 13 bp, Artificial Sequence
  Oligonucleotide for detection of SNP TSC0057270
aattatagtaatg

SEQ ID NO: 234658 - DNA, 13 bp, Artificial Sequence
  Oligonucleotide for detection of SNP TSC0057270
cattactataatt

SEQ ID NO: 234659 - DNA, 13 bp, Artificial Sequence
  Oligonucleotide for detection of SNP TSC0057275
gatagtatttatt

SEQ ID NO: 234660 - DNA, 13 bp, Artificial Sequence
  Oligonucleotide for detection of SNP TSC0057275
aataaatactatc

SEQ ID NO: 234661 - DNA, 13 bp, Artificial Sequence
  Oligonucleotide for detection of SNP TSC0057275
gatagtgtttatt

SEQ ID NO: 234662 - DNA, 13 bp, Artificial Sequence
  Oligonucleotide for detection of SNP TSC0057275
aataaacactatc

SEQ ID NO: 234663 - DNA, 13 bp, Artificial Sequence
  Oligonucleotide for detection of SNP TSC0057278
tttgtaaagttta

SEQ ID NO: 234664 - DNA, 13 bp, Artificial Sequence
  Oligonucleotide for detection of SNP TSC0057278
taaactttacaaa

SEQ ID NO: 234665 - DNA, 13 bp, Artificial Sequence
  Oligonucleotide for detection of SNP TSC0057278
tttgtagagttta

SEQ ID NO: 234666 - DNA, 13 bp, Artificial Sequence
  Oligonucleotide for detection of SNP TSC0057278
taaactctacaaa

SEQ ID NO: 234667 - DNA, 13 bp, Artificial Sequence
  Oligonucleotide for detection of SNP TSC0057280
agtaaaaattttt

SEQ ID NO: 234668 - DNA, 13 bp, Artificial Sequence
  Oligonucleotide for detection of SNP TSC0057280
aaaaatttttact

SEQ ID NO: 234669 - DNA, 13 bp, Artificial Sequence
  Oligonucleotide for detection of SNP TSC0057283
aattttgttaagt

SEQ ID NO: 234670 - DNA, 13 bp, Artificial Sequence
  Oligonucleotide for detection of SNP TSC0057283
acttaacaaaatt

SEQ ID NO: 234671 - DNA, 13 bp, Artificial Sequence
  Oligonucleotide for detection of SNP TSC0057285
ggatatagggaay

SEQ ID NO: 234672 - DNA, 13 bp, Artificial Sequence
  Oligonucleotide for detection of SNP TSC0057285
rttccctatatcc

SEQ ID NO: 234673 - DNA, 13 bp, Artificial Sequence
  Oligonucleotide for detection of SNP TSC0057285
ggatatggggaay

SEQ ID NO: 234674 - DNA, 13 bp, Artificial Sequence
  Oligonucleotide for detection of SNP TSC0057285
rttccccatatcc

SEQ ID NO: 234675 - DNA, 13 bp, Artificial Sequence
  Oligonucleotide for detection of SNP TSC0057285
ggatacggggaay

SEQ ID NO: 234676 - DNA, 13 bp, Artificial Sequence
  Oligonucleotide for detection of SNP TSC0057285
rttccccgtatcc

SEQ ID NO: 234677 - DNA, 13 bp, Artificial Sequence
  Oligonucleotide for detection of SNP TSC0057286
tgtttagaaatag

SEQ ID NO: 234678 - DNA, 13 bp, Artificial Sequence
  Oligonucleotide for detection of SNP TSC0057286
ctatttctaaaca

SEQ ID NO: 234679 - DNA, 13 bp, Artificial Sequence
  Oligonucleotide for detection of SNP TSC0057286
tgtttaaaaatag

SEQ ID NO: 234680 - DNA, 13 bp, Artificial Sequence
  Oligonucleotide for detection of SNP TSC0057286
ctatttttaaaca

SEQ ID NO: 234681 - DNA, 13 bp, Artificial Sequence
  Oligonucleotide for detection of SNP TSC0057287
gtattatgaataa

SEQ ID NO: 234682 - DNA, 13 bp, Artificial Sequence
  Oligonucleotide for detection of SNP TSC0057287
ttattcataatac

SEQ ID NO: 234683 - DNA, 13 bp, Artificial Sequence
  Oligonucleotide for detection of SNP TSC0057287
gtattaggaataa

SEQ ID NO: 234684 - DNA, 13 bp, Artificial Sequence
  Oligonucleotide for detection of SNP TSC0057287
ttattcctaatac

SEQ ID NO: 234685 - DNA, 13 bp, Artificial Sequence
  Oligonucleotide for detection of SNP TSC0057287
gtattacgaataa

SEQ ID NO: 234686 - DNA, 13 bp, Artificial Sequence
  Oligonucleotide for detection of SNP TSC0057287
ttattcgtaatac

SEQ ID NO: 234687 - DNA, 13 bp, Artificial Sequence
  Oligonucleotide for detection of SNP TSC0057287
ttgtttgtggtgy

SEQ ID NO: 234688 - DNA, 13 bp, Artificial Sequence
  Oligonucleotide for detection of SNP TSC0057287
rcaccacaaacaa

SEQ ID NO: 234689 - DNA, 13 bp, Artificial Sequence
  Oligonucleotide for detection of SNP TSC0057287
ttgtttttggtgy

SEQ ID NO: 234690 - DNA, 13 bp, Artificial Sequence
  Oligonucleotide for detection of SNP TSC0057287
rcaccaaaaacaa

SEQ ID NO: 234691 - DNA, 13 bp, Artificial Sequence
  Oligonucleotide for detection of SNP TSC0057287
ttgttcgtggtgy

SEQ ID NO: 234692 - DNA, 13 bp, Artificial Sequence
  Oligonucleotide for detection of SNP TSC0057287
rcaccacgaacaa

SEQ ID NO: 234693 - DNA, 13 bp, Artificial Sequence
  Oligonucleotide for detection of SNP TSC0057288
tagggggtattty

SEQ ID NO: 234694 - DNA, 13 bp, Artificial Sequence
  Oligonucleotide for detection of SNP TSC0057288
raaatacccccta

SEQ ID NO: 234695 - DNA, 13 bp, Artificial Sequence
  Oligonucleotide for detection of SNP TSC0057288
taggggatattty

SEQ ID NO: 234696 - DNA, 13 bp, Artificial Sequence
  Oligonucleotide for detection of SNP TSC0057288
raaatatccccta

SEQ ID NO: 234697 - DNA, 13 bp, Artificial Sequence
  Oligonucleotide for detection of SNP TSC0057289
tggataaaataag

SEQ ID NO: 234698 - DNA, 13 bp, Artificial Sequence
  Oligonucleotide for detection of SNP TSC0057289
cttattttatcca

SEQ ID NO: 234699 - DNA, 13 bp, Artificial Sequence
  Oligonucleotide for detection of SNP TSC0057289
tggatataataag

SEQ ID NO: 234700 - DNA, 13 bp, Artificial Sequence
  Oligonucleotide for detection of SNP TSC0057289
cttattatatcca

SEQ ID NO: 234701 - DNA, 13 bp, Artificial Sequence
  Oligonucleotide for detection of SNP TSC0057290
tttaaggataaaa

SEQ ID NO: 234702 - DNA, 13 bp, Artificial Sequence
  Oligonucleotide for detection of SNP TSC0057290
ttttatccttaaa

SEQ ID NO: 234703 - DNA, 13 bp, Artificial Sequence
  Oligonucleotide for detection of SNP TSC0057290
tttaagaataaaa

SEQ ID NO: 234704 - DNA, 13 bp, Artificial Sequence
  Oligonucleotide for detection of SNP TSC0057290
ttttattcttaaa

SEQ ID NO: 234705 - DNA, 13 bp, Artificial Sequence
  Oligonucleotide for detection of SNP TSC0057291
agtgattgagtty

SEQ ID NO: 234706 - DNA, 13 bp, Artificial Sequence
  Oligonucleotide for detection of SNP TSC0057291
raactcaatcact

SEQ ID NO: 234707 - DNA, 13 bp, Artificial Sequence
  Oligonucleotide for detection of SNP TSC0057291
agtgatcgagtty

SEQ ID NO: 234708 - DNA, 13 bp, Artificial Sequence
  Oligonucleotide for detection of SNP TSC0057291
raactcgatcact

SEQ ID NO: 234709 - DNA, 13 bp, Artificial Sequence
  Oligonucleotide for detection of SNP TSC0057291
ggatttgattatt

SEQ ID NO: 234710 - DNA, 13 bp, Artificial Sequence
  Oligonucleotide for detection of SNP TSC0057291
aataatcaaatcc

SEQ ID NO: 234711 - DNA, 13 bp, Artificial Sequence
  Oligonucleotide for detection of SNP TSC0057291
ggatttaattatt

SEQ ID NO: 234712 - DNA, 13 bp, Artificial Sequence
  Oligonucleotide for detection of SNP TSC0057291
aataattaaatcc

SEQ ID NO: 234713 - DNA, 13 bp, Artificial Sequence
  Oligonucleotide for detection of SNP TSC0057291
ggattcgattatt

SEQ ID NO: 234714 - DNA, 13 bp, Artificial Sequence
  Oligonucleotide for detection of SNP TSC0057291
aataatcgaatcc

SEQ ID NO: 234715 - DNA, 13 bp, Artificial Sequence
  Oligonucleotide for detection of SNP TSC0057292
aataaagttggaa

SEQ ID NO: 234716 - DNA, 13 bp, Artificial Sequence
  Oligonucleotide for detection of SNP TSC0057292
ttccaactttatt

SEQ ID NO: 234717 - DNA, 13 bp, Artificial Sequence
  Oligonucleotide for detection of SNP TSC0057293
tatttgagattay

SEQ ID NO: 234718 - DNA, 13 bp, Artificial Sequence
  Oligonucleotide for detection of SNP TSC0057293
rtaatctcaaata

SEQ ID NO: 234719 - DNA, 13 bp, Artificial Sequence
  Oligonucleotide for detection of SNP TSC0057293
tatttgggattay

SEQ ID NO: 234720 - DNA, 13 bp, Artificial Sequence
  Oligonucleotide for detection of SNP TSC0057293
rtaatcccaaata

SEQ ID NO: 234721 - DNA, 13 bp, Artificial Sequence
  Oligonucleotide for detection of SNP TSC0057295
gtttaggtgtttg

SEQ ID NO: 234722 - DNA, 13 bp, Artificial Sequence
  Oligonucleotide for detection of SNP TSC0057295
caaacacctaaac

SEQ ID NO: 234723 - DNA, 13 bp, Artificial Sequence
  Oligonucleotide for detection of SNP TSC0057295
gtttagatgtttg

SEQ ID NO: 234724 - DNA, 13 bp, Artificial Sequence
  Oligonucleotide for detection of SNP TSC0057295
caaacatctaaac

SEQ ID NO: 234725 - DNA, 13 bp, Artificial Sequence
  Oligonucleotide for detection of SNP TSC0057295
gtttaggtgttcg

SEQ ID NO: 234726 - DNA, 13 bp, Artificial Sequence
  Oligonucleotide for detection of SNP TSC0057295
cgaacacctaaac

SEQ ID NO: 234727 - DNA, 13 bp, Artificial Sequence
  Oligonucleotide for detection of SNP TSC0057295
gtttagatgttcg

SEQ ID NO: 234728 - DNA, 13 bp, Artificial Sequence
  Oligonucleotide for detection of SNP TSC0057295
cgaacatctaaac

SEQ ID NO: 234729 - DNA, 13 bp, Artificial Sequence
  Oligonucleotide for detection of SNP TSC0057297
ataaatataataa

SEQ ID NO: 234730 - DNA, 13 bp, Artificial Sequence
  Oligonucleotide for detection of SNP TSC0057297
ttattatatttat

SEQ ID NO: 234731 - DNA, 13 bp, Artificial Sequence
  Oligonucleotide for detection of SNP TSC0057297
ataaatgtaataa

SEQ ID NO: 234732 - DNA, 13 bp, Artificial Sequence
  Oligonucleotide for detection of SNP TSC0057297
ttattacatttat

SEQ ID NO: 234733 - DNA, 13 bp, Artificial Sequence
  Oligonucleotide for detection of SNP TSC0057297
ttgttatgtttat

SEQ ID NO: 234734 - DNA, 13 bp, Artificial Sequence
  Oligonucleotide for detection of SNP TSC0057297
ataaacataacaa

SEQ ID NO: 234735 - DNA, 13 bp, Artificial Sequence
  Oligonucleotide for detection of SNP TSC0057297
ttgttacgtttat

SEQ ID NO: 234736 - DNA, 13 bp, Artificial Sequence
  Oligonucleotide for detection of SNP TSC0057297
ataaacgtaacaa

SEQ ID NO: 234737 - DNA, 13 bp, Artificial Sequence
  Oligonucleotide for detection of SNP TSC0057299
tatttaggtttay

SEQ ID NO: 234738 - DNA, 13 bp, Artificial Sequence
  Oligonucleotide for detection of SNP TSC0057299
rtaaacctaaata

SEQ ID NO: 234739 - DNA, 13 bp, Artificial Sequence
  Oligonucleotide for detection of SNP TSC0057299
tatttaagtttay

SEQ ID NO: 234740 - DNA, 13 bp, Artificial Sequence
  Oligonucleotide for detection of SNP TSC0057299
rtaaacttaaata

SEQ ID NO: 234741 - DNA, 13 bp, Artificial Sequence
  Oligonucleotide for detection of SNP TSC0057300
aataatattttaa

SEQ ID NO: 234742 - DNA, 13 bp, Artificial Sequence
  Oligonucleotide for detection of SNP TSC0057300
ttaaaatattatt

SEQ ID NO: 234743 - DNA, 13 bp, Artificial Sequence
  Oligonucleotide for detection of SNP TSC0057300
aataattttttaa

SEQ ID NO: 234744 - DNA, 13 bp, Artificial Sequence
  Oligonucleotide for detection of SNP TSC0057300
ttaaaaaattatt

SEQ ID NO: 234745 - DNA, 13 bp, Artificial Sequence
  Oligonucleotide for detection of SNP TSC0057300
ttaaaatgttatt

SEQ ID NO: 234746 - DNA, 13 bp, Artificial Sequence
  Oligonucleotide for detection of SNP TSC0057300
aataacattttaa

SEQ ID NO: 234747 - DNA, 13 bp, Artificial Sequence
  Oligonucleotide for detection of SNP TSC0057300
ttaaaaagttatt

SEQ ID NO: 234748 - DNA, 13 bp, Artificial Sequence
  Oligonucleotide for detection of SNP TSC0057300
aataactttttaa

SEQ ID NO: 234749 - DNA, 13 bp, Artificial Sequence
  Oligonucleotide for detection of SNP TSC0057303
ttatttagggtag

SEQ ID NO: 234750 - DNA, 13 bp, Artificial Sequence
  Oligonucleotide for detection of SNP TSC0057303
ctaccctaaataa

SEQ ID NO: 234751 - DNA, 13 bp, Artificial Sequence
  Oligonucleotide for detection of SNP TSC0057303
ttatttggggtag

SEQ ID NO: 234752 - DNA, 13 bp, Artificial Sequence
  Oligonucleotide for detection of SNP TSC0057303
ctaccccaaataa

SEQ ID NO: 234753 - DNA, 13 bp, Artificial Sequence
  Oligonucleotide for detection of SNP TSC0057304
tattttgtgaggy

SEQ ID NO: 234754 - DNA, 13 bp, Artificial Sequence
  Oligonucleotide for detection of SNP TSC0057304
rcctcacaaaata

SEQ ID NO: 234755 - DNA, 13 bp, Artificial Sequence
  Oligonucleotide for detection of SNP TSC0057304
tattttatgaggy

SEQ ID NO: 234756 - DNA, 13 bp, Artificial Sequence
  Oligonucleotide for detection of SNP TSC0057304
rcctcataaaata

SEQ ID NO: 234757 - DNA, 13 bp, Artificial Sequence
  Oligonucleotide for detection of SNP TSC0057306
ttatttagagaaa

SEQ ID NO: 234758 - DNA, 13 bp, Artificial Sequence
  Oligonucleotide for detection of SNP TSC0057306
tttctctaaataa

SEQ ID NO: 234759 - DNA, 13 bp, Artificial Sequence
  Oligonucleotide for detection of SNP TSC0057306
ttatttggagaaa

SEQ ID NO: 234760 - DNA, 13 bp, Artificial Sequence
  Oligonucleotide for detection of SNP TSC0057306
tttctccaaataa

SEQ ID NO: 234761 - DNA, 13 bp, Artificial Sequence
  Oligonucleotide for detection of SNP TSC0057306
ttattcggagaaa

SEQ ID NO: 234762 - DNA, 13 bp, Artificial Sequence
  Oligonucleotide for detection of SNP TSC0057306
tttctccgaataa

SEQ ID NO: 234763 - DNA, 13 bp, Artificial Sequence
  Oligonucleotide for detection of SNP TSC0057306
ttttttcgaatag

SEQ ID NO: 234764 - DNA, 13 bp, Artificial Sequence
  Oligonucleotide for detection of SNP TSC0057306
ctattcgaaaaaa

SEQ ID NO: 234765 - DNA, 13 bp, Artificial Sequence
  Oligonucleotide for detection of SNP TSC0057307
tgatatatattta

SEQ ID NO: 234766 - DNA, 13 bp, Artificial Sequence
  Oligonucleotide for detection of SNP TSC0057307
taaatatatatca

SEQ ID NO: 234767 - DNA, 13 bp, Artificial Sequence
  Oligonucleotide for detection of SNP TSC0057307
tgatatttattta

SEQ ID NO: 234768 - DNA, 13 bp, Artificial Sequence
  Oligonucleotide for detection of SNP TSC0057307
taaataaatatca

SEQ ID NO: 234769 - DNA, 13 bp, Artificial Sequence
  Oligonucleotide for detection of SNP TSC0057307
taaataaatatta

SEQ ID NO: 234770 - DNA, 13 bp, Artificial Sequence
  Oligonucleotide for detection of SNP TSC0057307
taatatttattta

SEQ ID NO: 234771 - DNA, 13 bp, Artificial Sequence
  Oligonucleotide for detection of SNP TSC0005031
tattttagttgga

SEQ ID NO: 234772 - DNA, 13 bp, Artificial Sequence
  Oligonucleotide for detection of SNP TSC0005031
tccaactaaaata

SEQ ID NO: 234773 - DNA, 13 bp, Artificial Sequence
  Oligonucleotide for detection of SNP TSC0005031
tattttggttgga

SEQ ID NO: 234774 - DNA, 13 bp, Artificial Sequence
  Oligonucleotide for detection of SNP TSC0005031
tccaaccaaaata

SEQ ID NO: 234775 - DNA, 13 bp, Artificial Sequence
  Oligonucleotide for detection of SNP TSC0005032
gttgttgtaagat

SEQ ID NO: 234776 - DNA, 13 bp, Artificial Sequence
  Oligonucleotide for detection of SNP TSC0005032
atcttacaacaac

SEQ ID NO: 234777 - DNA, 13 bp, Artificial Sequence
  Oligonucleotide for detection of SNP TSC0005032
gttgttataagat

SEQ ID NO: 234778 - DNA, 13 bp, Artificial Sequence
  Oligonucleotide for detection of SNP TSC0005032
atcttataacaac

SEQ ID NO: 234779 - DNA, 13 bp, Artificial Sequence
  Oligonucleotide for detection of SNP TSC0057317
tttaaggtaatag

SEQ ID NO: 234780 - DNA, 13 bp, Artificial Sequence
  Oligonucleotide for detection of SNP TSC0057317
ctattaccttaaa

SEQ ID NO: 234781 - DNA, 13 bp, Artificial Sequence
  Oligonucleotide for detection of SNP TSC0057317
tttaagataatag

SEQ ID NO: 234782 - DNA, 13 bp, Artificial Sequence
  Oligonucleotide for detection of SNP TSC0057317
ctattatcttaaa

SEQ ID NO: 234783 - DNA, 13 bp, Artificial Sequence
  Oligonucleotide for detection of SNP TSC0004832
tgattttgttttg

SEQ ID NO: 234784 - DNA, 13 bp, Artificial Sequence
  Oligonucleotide for detection of SNP TSC0004832
caaaacaaaatca

SEQ ID NO: 234785 - DNA, 13 bp, Artificial Sequence
  Oligonucleotide for detection of SNP TSC0004832
tgatttcgttttg

SEQ ID NO: 234786 - DNA, 13 bp, Artificial Sequence
  Oligonucleotide for detection of SNP TSC0004832
caaaacgaaatca

SEQ ID NO: 234787 - DNA, 13 bp, Artificial Sequence
  Oligonucleotide for detection of SNP TSC0004832
taaaatggagtta

SEQ ID NO: 234788 - DNA, 13 bp, Artificial Sequence
  Oligonucleotide for detection of SNP TSC0004832
taactccatttta

SEQ ID NO: 234789 - DNA, 13 bp, Artificial Sequence
  Oligonucleotide for detection of SNP TSC0004832
taaaatagagtta

SEQ ID NO: 234790 - DNA, 13 bp, Artificial Sequence
  Oligonucleotide for detection of SNP TSC0004832
taactctatttta

SEQ ID NO: 234791 - DNA, 13 bp, Artificial Sequence
  Oligonucleotide for detection of SNP TSC0004832
taaaacggagtta

SEQ ID NO: 234792 - DNA, 13 bp, Artificial Sequence
  Oligonucleotide for detection of SNP TSC0004832
taactccgtttta

SEQ ID NO: 234793 - DNA, 13 bp, Artificial Sequence
  Oligonucleotide for detection of SNP TSC0057318
gtttttattttat

SEQ ID NO: 234794 - DNA, 13 bp, Artificial Sequence
  Oligonucleotide for detection of SNP TSC0057318
ataaaataaaaac

SEQ ID NO: 234795 - DNA, 13 bp, Artificial Sequence
  Oligonucleotide for detection of SNP TSC0057318
atagaatggaaay

SEQ ID NO: 234796 - DNA, 13 bp, Artificial Sequence
  Oligonucleotide for detection of SNP TSC0057318
rtttccattctat

SEQ ID NO: 234797 - DNA, 13 bp, Artificial Sequence
  Oligonucleotide for detection of SNP TSC0057318
atagaacggaaay

SEQ ID NO: 234798 - DNA, 13 bp, Artificial Sequence
  Oligonucleotide for detection of SNP TSC0057318
rtttccgttctat

SEQ ID NO: 234799 - DNA, 13 bp, Artificial Sequence
  Oligonucleotide for detection of SNP TSC0004853
attggtagtatag

SEQ ID NO: 234800 - DNA, 13 bp, Artificial Sequence
  Oligonucleotide for detection of SNP TSC0004853
ctatactaccaat

SEQ ID NO: 234801 - DNA, 13 bp, Artificial Sequence
  Oligonucleotide for detection of SNP TSC0004853
attggtggtatag

SEQ ID NO: 234802 - DNA, 13 bp, Artificial Sequence
  Oligonucleotide for detection of SNP TSC0004853
ctataccaccaat

SEQ ID NO: 234803 - DNA, 13 bp, Artificial Sequence
  Oligonucleotide for detection of SNP TSC0007398
aatagtaggtagy

SEQ ID NO: 234804 - DNA, 13 bp, Artificial Sequence
  Oligonucleotide for detection of SNP TSC0007398
rctacctactatt

SEQ ID NO: 234805 - DNA, 13 bp, Artificial Sequence
  Oligonucleotide for detection of SNP TSC0007398
aatagtgggtagy

SEQ ID NO: 234806 - DNA, 13 bp, Artificial Sequence
  Oligonucleotide for detection of SNP TSC0007398
rctacccactatt

SEQ ID NO: 234807 - DNA, 13 bp, Artificial Sequence
  Oligonucleotide for detection of SNP TSC0007398
aatagcgggtagy

SEQ ID NO: 234808 - DNA, 13 bp, Artificial Sequence
  Oligonucleotide for detection of SNP TSC0007398
rctacccgctatt

SEQ ID NO: 234809 - DNA, 13 bp, Artificial Sequence
  Oligonucleotide for detection of SNP TSC0007398
gttgtttgttgtt

SEQ ID NO: 234810 - DNA, 13 bp, Artificial Sequence
  Oligonucleotide for detection of SNP TSC0007398
aacaacaaacaac

SEQ ID NO: 234811 - DNA, 13 bp, Artificial Sequence
  Oligonucleotide for detection of SNP TSC0007398
gttgttcgttgtt

SEQ ID NO: 234812 - DNA, 13 bp, Artificial Sequence
  Oligonucleotide for detection of SNP TSC0007398
aacaacgaacaac

SEQ ID NO: 234813 - DNA, 13 bp, Artificial Sequence
  Oligonucleotide for detection of SNP TSC0057319
gtttatgaggaay

SEQ ID NO: 234814 - DNA, 13 bp, Artificial Sequence
  Oligonucleotide for detection of SNP TSC0057319
rttcctcataaac

SEQ ID NO: 234815 - DNA, 13 bp, Artificial Sequence
  Oligonucleotide for detection of SNP TSC0057319
gtttataaggaay

SEQ ID NO: 234816 - DNA, 13 bp, Artificial Sequence
  Oligonucleotide for detection of SNP TSC0057319
rttccttataaac

SEQ ID NO: 234817 - DNA, 13 bp, Artificial Sequence
  Oligonucleotide for detection of SNP TSC0057319
gtttacgaggaay

SEQ ID NO: 234818 - DNA, 13 bp, Artificial Sequence
  Oligonucleotide for detection of SNP TSC0057319
rttcctcgtaaac

SEQ ID NO: 234819 - DNA, 13 bp, Artificial Sequence
  Oligonucleotide for detection of SNP TSC0057323
ttagtagtagtgt

SEQ ID NO: 234820 - DNA, 13 bp, Artificial Sequence
  Oligonucleotide for detection of SNP TSC0057323
acactactactaa

SEQ ID NO: 234821 - DNA, 13 bp, Artificial Sequence
  Oligonucleotide for detection of SNP TSC0057323
ttagtaatagtgt

SEQ ID NO: 234822 - DNA, 13 bp, Artificial Sequence
  Oligonucleotide for detection of SNP TSC0057323
acactattactaa

SEQ ID NO: 234823 - DNA, 13 bp, Artificial Sequence
  Oligonucleotide for detection of SNP TSC0057324
tatttattttttt

SEQ ID NO: 234824 - DNA, 13 bp, Artificial Sequence
  Oligonucleotide for detection of SNP TSC0057324
aaaaaaataaata

SEQ ID NO: 234825 - DNA, 13 bp, Artificial Sequence
  Oligonucleotide for detection of SNP TSC0057324
agagaggtgagtg

SEQ ID NO: 234826 - DNA, 13 bp, Artificial Sequence
  Oligonucleotide for detection of SNP TSC0057324
cactcacctctct

SEQ ID NO: 234827 - DNA, 13 bp, Artificial Sequence
  Oligonucleotide for detection of SNP TSC0057324
agagagttgagtg

SEQ ID NO: 234828 - DNA, 13 bp, Artificial Sequence
  Oligonucleotide for detection of SNP TSC0057324
cactcaactctct

SEQ ID NO: 234829 - DNA, 13 bp, Artificial Sequence
  Oligonucleotide for detection of SNP TSC0057326
agttaagtgtttt

SEQ ID NO: 234830 - DNA, 13 bp, Artificial Sequence
  Oligonucleotide for detection of SNP TSC0057326
aaaacacttaact

SEQ ID NO: 234831 - DNA, 13 bp, Artificial Sequence
  Oligonucleotide for detection of SNP TSC0057326
agttaaatgtttt

SEQ ID NO: 234832 - DNA, 13 bp, Artificial Sequence
  Oligonucleotide for detection of SNP TSC0057326
aaaacatttaact

SEQ ID NO: 234833 - DNA, 13 bp, Artificial Sequence
  Oligonucleotide for detection of SNP TSC0057327
attaatgttaaaa

SEQ ID NO: 234834 - DNA, 13 bp, Artificial Sequence
  Oligonucleotide for detection of SNP TSC0057327
ttttaacattaat

SEQ ID NO: 234835 - DNA, 13 bp, Artificial Sequence
  Oligonucleotide for detection of SNP TSC0057329
tattaaagttaay

SEQ ID NO: 234836 - DNA, 13 bp, Artificial Sequence
  Oligonucleotide for detection of SNP TSC0057329
rttaactttaata

SEQ ID NO: 234837 - DNA, 13 bp, Artificial Sequence
  Oligonucleotide for detection of SNP TSC0057329
tattaatgttaay

SEQ ID NO: 234838 - DNA, 13 bp, Artificial Sequence
  Oligonucleotide for detection of SNP TSC0057329
rttaacattaata

SEQ ID NO: 234839 - DNA, 13 bp, Artificial Sequence
  Oligonucleotide for detection of SNP TSC0057329
tattaacgttaay

SEQ ID NO: 234840 - DNA, 13 bp, Artificial Sequence
  Oligonucleotide for detection of SNP TSC0057329
rttaacgttaata

SEQ ID NO: 234841 - DNA, 13 bp, Artificial Sequence
  Oligonucleotide for detection of SNP TSC0057329
gttggttttgatg

SEQ ID NO: 234842 - DNA, 13 bp, Artificial Sequence
  Oligonucleotide for detection of SNP TSC0057329
catcaaaaccaac

SEQ ID NO: 234843 - DNA, 13 bp, Artificial Sequence
  Oligonucleotide for detection of SNP TSC0057329
gttggtgttgatg

SEQ ID NO: 234844 - DNA, 13 bp, Artificial Sequence
  Oligonucleotide for detection of SNP TSC0057329
catcaacaccaac

SEQ ID NO: 234845 - DNA, 13 bp, Artificial Sequence
  Oligonucleotide for detection of SNP TSC0057329
gttggcgttgatg

SEQ ID NO: 234846 - DNA, 13 bp, Artificial Sequence
  Oligonucleotide for detection of SNP TSC0057329
catcaacgccaac

SEQ ID NO: 234847 - DNA, 13 bp, Artificial Sequence
  Oligonucleotide for detection of SNP TSC0057330
agtaaaaatgtta

SEQ ID NO: 234848 - DNA, 13 bp, Artificial Sequence
  Oligonucleotide for detection of SNP TSC0057330
taacatttttact

SEQ ID NO: 234849 - DNA, 13 bp, Artificial Sequence
  Oligonucleotide for detection of SNP TSC0057330
agtaaagatgtta

SEQ ID NO: 234850 - DNA, 13 bp, Artificial Sequence
  Oligonucleotide for detection of SNP TSC0057330
taacatctttact

SEQ ID NO: 234851 - DNA, 13 bp, Artificial Sequence
  Oligonucleotide for detection of SNP TSC0057331
tagttgtttaagg

SEQ ID NO: 234852 - DNA, 13 bp, Artificial Sequence
  Oligonucleotide for detection of SNP TSC0057331
ccttaaacaacta

SEQ ID NO: 234853 - DNA, 13 bp, Artificial Sequence
  Oligonucleotide for detection of SNP TSC0057331
tagttggttaagg

SEQ ID NO: 234854 - DNA, 13 bp, Artificial Sequence
  Oligonucleotide for detection of SNP TSC0057331
ccttaaccaacta

SEQ ID NO: 234855 - DNA, 13 bp, Artificial Sequence
  Oligonucleotide for detection of SNP TSC0057331
ttttagatagttg

SEQ ID NO: 234856 - DNA, 13 bp, Artificial Sequence
  Oligonucleotide for detection of SNP TSC0057331
caactatctaaaa

SEQ ID NO: 234857 - DNA, 13 bp, Artificial Sequence
  Oligonucleotide for detection of SNP TSC0057331
ttttagttagttg

SEQ ID NO: 234858 - DNA, 13 bp, Artificial Sequence
  Oligonucleotide for detection of SNP TSC0057331
caactaactaaaa

SEQ ID NO: 234859 - DNA, 13 bp, Artificial Sequence
  Oligonucleotide for detection of SNP TSC0057332
aggaaaatttgtt

SEQ ID NO: 234860 - DNA, 13 bp, Artificial Sequence
  Oligonucleotide for detection of SNP TSC0057332
aacaaattttcct

SEQ ID NO: 234861 - DNA, 13 bp, Artificial Sequence
  Oligonucleotide for detection of SNP TSC0057332
aggaaagtttgtt

SEQ ID NO: 234862 - DNA, 13 bp, Artificial Sequence
  Oligonucleotide for detection of SNP TSC0057332
aacaaactttcct

SEQ ID NO: 234863 - DNA, 13 bp, Artificial Sequence
  Oligonucleotide for detection of SNP TSC0057333
gaatgtgatttay

SEQ ID NO: 234864 - DNA, 13 bp, Artificial Sequence
  Oligonucleotide for detection of SNP TSC0057333
rtaaatcacattc

SEQ ID NO: 234865 - DNA, 13 bp, Artificial Sequence
  Oligonucleotide for detection of SNP TSC0057333
gaatgtaatttay

SEQ ID NO: 234866 - DNA, 13 bp, Artificial Sequence
  Oligonucleotide for detection of SNP TSC0057333
rtaaattacattc

SEQ ID NO: 234867 - DNA, 13 bp, Artificial Sequence
  Oligonucleotide for detection of SNP TSC0057334
ttgttattgtaga

SEQ ID NO: 234868 - DNA, 13 bp, Artificial Sequence
  Oligonucleotide for detection of SNP TSC0057334
tctacaataacaa

SEQ ID NO: 234869 - DNA, 13 bp, Artificial Sequence
  Oligonucleotide for detection of SNP TSC0057334
tttatattgataa

SEQ ID NO: 234870 - DNA, 13 bp, Artificial Sequence
  Oligonucleotide for detection of SNP TSC0057334
ttatcaatataaa

SEQ ID NO: 234871 - DNA, 13 bp, Artificial Sequence
  Oligonucleotide for detection of SNP TSC0057334
tttatagtgataa

SEQ ID NO: 234872 - DNA, 13 bp, Artificial Sequence
  Oligonucleotide for detection of SNP TSC0057334
ttatcactataaa

SEQ ID NO: 234873 - DNA, 13 bp, Artificial Sequence
  Oligonucleotide for detection of SNP TSC0057335
tgataaagtggtt

SEQ ID NO: 234874 - DNA, 13 bp, Artificial Sequence
  Oligonucleotide for detection of SNP TSC0057335
aaccactttatca

SEQ ID NO: 234875 - DNA, 13 bp, Artificial Sequence
  Oligonucleotide for detection of SNP TSC0057335
tgataatgtggtt

SEQ ID NO: 234876 - DNA, 13 bp, Artificial Sequence
  Oligonucleotide for detection of SNP TSC0057335
aaccacattatca

SEQ ID NO: 234877 - DNA, 13 bp, Artificial Sequence
  Oligonucleotide for detection of SNP TSC0057335
agttattttgtta

SEQ ID NO: 234878 - DNA, 13 bp, Artificial Sequence
  Oligonucleotide for detection of SNP TSC0057335
taacaaaataact

SEQ ID NO: 234879 - DNA, 13 bp, Artificial Sequence
  Oligonucleotide for detection of SNP TSC0057336
attatatgaagag

SEQ ID NO: 234880 - DNA, 13 bp, Artificial Sequence
  Oligonucleotide for detection of SNP TSC0057336
ctcttcatataat

SEQ ID NO: 234881 - DNA, 13 bp, Artificial Sequence
  Oligonucleotide for detection of SNP TSC0057336
attatacgaagag

SEQ ID NO: 234882 - DNA, 13 bp, Artificial Sequence
  Oligonucleotide for detection of SNP TSC0057336
ctcttcgtataat

SEQ ID NO: 234883 - DNA, 13 bp, Artificial Sequence
  Oligonucleotide for detection of SNP TSC0057336
ttttttgtatagt

SEQ ID NO: 234884 - DNA, 13 bp, Artificial Sequence
  Oligonucleotide for detection of SNP TSC0057336
actatacaaaaaa

SEQ ID NO: 234885 - DNA, 13 bp, Artificial Sequence
  Oligonucleotide for detection of SNP TSC0057336
ttttttatatagt

SEQ ID NO: 234886 - DNA, 13 bp, Artificial Sequence
  Oligonucleotide for detection of SNP TSC0057336
actatataaaaaa

SEQ ID NO: 234887 - DNA, 13 bp, Artificial Sequence
  Oligonucleotide for detection of SNP TSC0057336
tttttcgtatagt

SEQ ID NO: 234888 - DNA, 13 bp, Artificial Sequence
  Oligonucleotide for detection of SNP TSC0057336
actatacgaaaaa

SEQ ID NO: 234889 - DNA, 13 bp, Artificial Sequence
  Oligonucleotide for detection of SNP TSC0057337
ggtaatatagtaa

SEQ ID NO: 234890 - DNA, 13 bp, Artificial Sequence
  Oligonucleotide for detection of SNP TSC0057337
ttactatattacc

SEQ ID NO: 234891 - DNA, 13 bp, Artificial Sequence
  Oligonucleotide for detection of SNP TSC0057337
ggtaatgtagtaa

SEQ ID NO: 234892 - DNA, 13 bp, Artificial Sequence
  Oligonucleotide for detection of SNP TSC0057337
ttactacattacc

SEQ ID NO: 234893 - DNA, 13 bp, Artificial Sequence
  Oligonucleotide for detection of SNP TSC0057337
ggtaacgtagtaa

SEQ ID NO: 234894 - DNA, 13 bp, Artificial Sequence
  Oligonucleotide for detection of SNP TSC0057337
ttactacgttacc

SEQ ID NO: 234895 - DNA, 13 bp, Artificial Sequence
  Oligonucleotide for detection of SNP TSC0057348
tatttgtgtgtta

SEQ ID NO: 234896 - DNA, 13 bp, Artificial Sequence
  Oligonucleotide for detection of SNP TSC0057348
taacacacaaata

SEQ ID NO: 234897 - DNA, 13 bp, Artificial Sequence
  Oligonucleotide for detection of SNP TSC0057348
tatttgcgtgtta

SEQ ID NO: 234898 - DNA, 13 bp, Artificial Sequence
  Oligonucleotide for detection of SNP TSC0057348
taacacgcaaata

SEQ ID NO: 234899 - DNA, 13 bp, Artificial Sequence
  Oligonucleotide for detection of SNP TSC0057348
taatatgtagatg

SEQ ID NO: 234900 - DNA, 13 bp, Artificial Sequence
  Oligonucleotide for detection of SNP TSC0057348
catctacatatta

SEQ ID NO: 234901 - DNA, 13 bp, Artificial Sequence
  Oligonucleotide for detection of SNP TSC0057348
taatatatagatg

SEQ ID NO: 234902 - DNA, 13 bp, Artificial Sequence
  Oligonucleotide for detection of SNP TSC0057348
catctatatatta

SEQ ID NO: 234903 - DNA, 13 bp, Artificial Sequence
  Oligonucleotide for detection of SNP TSC0057348
taatacgtagatg

SEQ ID NO: 234904 - DNA, 13 bp, Artificial Sequence
  Oligonucleotide for detection of SNP TSC0057348
catctacgtatta

SEQ ID NO: 234905 - DNA, 13 bp, Artificial Sequence
  Oligonucleotide for detection of SNP TSC0057349
gttgtaatatttg

SEQ ID NO: 234906 - DNA, 13 bp, Artificial Sequence
  Oligonucleotide for detection of SNP TSC0057349
caaatattacaac

SEQ ID NO: 234907 - DNA, 13 bp, Artificial Sequence
  Oligonucleotide for detection of SNP TSC0057349
gttgtagtatttg

SEQ ID NO: 234908 - DNA, 13 bp, Artificial Sequence
  Oligonucleotide for detection of SNP TSC0057349
caaatactacaac

SEQ ID NO: 234909 - DNA, 13 bp, Artificial Sequence
  Oligonucleotide for detection of SNP TSC0057352
gtttattgtaggt

SEQ ID NO: 234910 - DNA, 13 bp, Artificial Sequence
  Oligonucleotide for detection of SNP TSC0057352
acctacaataaac

SEQ ID NO: 234911 - DNA, 13 bp, Artificial Sequence
  Oligonucleotide for detection of SNP TSC0057352
gtttatcgtaggt

SEQ ID NO: 234912 - DNA, 13 bp, Artificial Sequence
  Oligonucleotide for detection of SNP TSC0057352
acctacgataaac

SEQ ID NO: 234913 - DNA, 13 bp, Artificial Sequence
  Oligonucleotide for detection of SNP TSC0057352
atttgtgatgaay

SEQ ID NO: 234914 - DNA, 13 bp, Artificial Sequence
  Oligonucleotide for detection of SNP TSC0057352
rttcatcacaaat

SEQ ID NO: 234915 - DNA, 13 bp, Artificial Sequence
  Oligonucleotide for detection of SNP TSC0057352
atttgtaatgaay

SEQ ID NO: 234916 - DNA, 13 bp, Artificial Sequence
  Oligonucleotide for detection of SNP TSC0057352
rttcattacaaat

SEQ ID NO: 234917 - DNA, 13 bp, Artificial Sequence
  Oligonucleotide for detection of SNP TSC0057352
atttgcgatgaay

SEQ ID NO: 234918 - DNA, 13 bp, Artificial Sequence
  Oligonucleotide for detection of SNP TSC0057352
rttcatcgcaaat

SEQ ID NO: 234919 - DNA, 13 bp, Artificial Sequence
  Oligonucleotide for detection of SNP TSC0057356
tagtttattatgg

SEQ ID NO: 234920 - DNA, 13 bp, Artificial Sequence
  Oligonucleotide for detection of SNP TSC0057356
ccataataaacta

SEQ ID NO: 234921 - DNA, 13 bp, Artificial Sequence
  Oligonucleotide for detection of SNP TSC0057356
tagtttgttatgg

SEQ ID NO: 234922 - DNA, 13 bp, Artificial Sequence
  Oligonucleotide for detection of SNP TSC0057356
ccataacaaacta

SEQ ID NO: 234923 - DNA, 13 bp, Artificial Sequence
  Oligonucleotide for detection of SNP TSC0057360
aaaaaaatatgga

SEQ ID NO: 234924 - DNA, 13 bp, Artificial Sequence
  Oligonucleotide for detection of SNP TSC0057360
tccatattttttt

SEQ ID NO: 234925 - DNA, 13 bp, Artificial Sequence
  Oligonucleotide for detection of SNP TSC0057360
aaaaaattatgga

SEQ ID NO: 234926 - DNA, 13 bp, Artificial Sequence
  Oligonucleotide for detection of SNP TSC0057360
tccataatttttt

SEQ ID NO: 234927 - DNA, 13 bp, Artificial Sequence
  Oligonucleotide for detection of SNP TSC0057360
aaaaaaatacgga

SEQ ID NO: 234928 - DNA, 13 bp, Artificial Sequence
  Oligonucleotide for detection of SNP TSC0057360
tccgtattttttt

SEQ ID NO: 234929 - DNA, 13 bp, Artificial Sequence
  Oligonucleotide for detection of SNP TSC0057360
aaaaaattacgga

SEQ ID NO: 234930 - DNA, 13 bp, Artificial Sequence
  Oligonucleotide for detection of SNP TSC0057360
tccgtaatttttt

SEQ ID NO: 234931 - DNA, 13 bp, Artificial Sequence
  Oligonucleotide for detection of SNP TSC0057360
ttcgtgttttttt

SEQ ID NO: 234932 - DNA, 13 bp, Artificial Sequence
  Oligonucleotide for detection of SNP TSC0057360
aaaaaaacacgaa

SEQ ID NO: 234933 - DNA, 13 bp, Artificial Sequence
  Oligonucleotide for detection of SNP TSC0057360
ttcgtggtttttt

SEQ ID NO: 234934 - DNA, 13 bp, Artificial Sequence
  Oligonucleotide for detection of SNP TSC0057360
aaaaaaccacgaa

SEQ ID NO: 234935 - DNA, 13 bp, Artificial Sequence
  Oligonucleotide for detection of SNP TSC0057361
ttggttattaaga

SEQ ID NO: 234936 - DNA, 13 bp, Artificial Sequence
  Oligonucleotide for detection of SNP TSC0057361
tcttaataaccaa

SEQ ID NO: 234937 - DNA, 13 bp, Artificial Sequence
  Oligonucleotide for detection of SNP TSC0057361
ttggtcgttaaga

SEQ ID NO: 234938 - DNA, 13 bp, Artificial Sequence
  Oligonucleotide for detection of SNP TSC0057361
tcttaacgaccaa

SEQ ID NO: 234939 - DNA, 13 bp, Artificial Sequence
  Oligonucleotide for detection of SNP TSC0057362
gtttatagatagg

SEQ ID NO: 234940 - DNA, 13 bp, Artificial Sequence
  Oligonucleotide for detection of SNP TSC0057362
cctatctataaac

SEQ ID NO: 234941 - DNA, 13 bp, Artificial Sequence
  Oligonucleotide for detection of SNP TSC0057362
gtttatggatagg

SEQ ID NO: 234942 - DNA, 13 bp, Artificial Sequence
  Oligonucleotide for detection of SNP TSC0057362
cctatccataaac

SEQ ID NO: 234943 - DNA, 13 bp, Artificial Sequence
  Oligonucleotide for detection of SNP TSC0057362
gtttacggatagg

SEQ ID NO: 234944 - DNA, 13 bp, Artificial Sequence
  Oligonucleotide for detection of SNP TSC0057362
cctatccgtaaac

SEQ ID NO: 234945 - DNA, 13 bp, Artificial Sequence
  Oligonucleotide for detection of SNP TSC0057362
tttatttgtgagy

SEQ ID NO: 234946 - DNA, 13 bp, Artificial Sequence
  Oligonucleotide for detection of SNP TSC0057362
rctcacaaataaa

SEQ ID NO: 234947 - DNA, 13 bp, Artificial Sequence
  Oligonucleotide for detection of SNP TSC0057362
tttattcgtgagy

SEQ ID NO: 234948 - DNA, 13 bp, Artificial Sequence
  Oligonucleotide for detection of SNP TSC0057362
rctcacgaataaa

SEQ ID NO: 234949 - DNA, 13 bp, Artificial Sequence
  Oligonucleotide for detection of SNP TSC0057363
gtgaggtttttty

SEQ ID NO: 234950 - DNA, 13 bp, Artificial Sequence
  Oligonucleotide for detection of SNP TSC0057363
raaaaaacctcac

SEQ ID NO: 234951 - DNA, 13 bp, Artificial Sequence
  Oligonucleotide for detection of SNP TSC0057363
gtgagggttttty

SEQ ID NO: 234952 - DNA, 13 bp, Artificial Sequence
  Oligonucleotide for detection of SNP TSC0057363
raaaaaccctcac

SEQ ID NO: 234953 - DNA, 13 bp, Artificial Sequence
  Oligonucleotide for detection of SNP TSC0057363
gaggaggttttay

SEQ ID NO: 234954 - DNA, 13 bp, Artificial Sequence
  Oligonucleotide for detection of SNP TSC0057363
rtaaaacctcctc

SEQ ID NO: 234955 - DNA, 13 bp, Artificial Sequence
  Oligonucleotide for detection of SNP TSC0057363
gaggagtttttay

SEQ ID NO: 234956 - DNA, 13 bp, Artificial Sequence
  Oligonucleotide for detection of SNP TSC0057363
rtaaaaactcctc

SEQ ID NO: 234957 - DNA, 13 bp, Artificial Sequence
  Oligonucleotide for detection of SNP TSC0057364
taagtgggaaatt

SEQ ID NO: 234958 - DNA, 13 bp, Artificial Sequence
  Oligonucleotide for detection of SNP TSC0057364
aatttcccactta

SEQ ID NO: 234959 - DNA, 13 bp, Artificial Sequence
  Oligonucleotide for detection of SNP TSC0057364
taagtgagaaatt

SEQ ID NO: 234960 - DNA, 13 bp, Artificial Sequence
  Oligonucleotide for detection of SNP TSC0057364
aatttctcactta

SEQ ID NO: 234961 - DNA, 13 bp, Artificial Sequence
  Oligonucleotide for detection of SNP TSC0057367
ttaggtaatatty

SEQ ID NO: 234962 - DNA, 13 bp, Artificial Sequence
  Oligonucleotide for detection of SNP TSC0057367
raatattacctaa

SEQ ID NO: 234963 - DNA, 13 bp, Artificial Sequence
  Oligonucleotide for detection of SNP TSC0057367
ttaggtgatatty

SEQ ID NO: 234964 - DNA, 13 bp, Artificial Sequence
  Oligonucleotide for detection of SNP TSC0057367
raatatcacctaa

SEQ ID NO: 234965 - DNA, 13 bp, Artificial Sequence
  Oligonucleotide for detection of SNP TSC0057367
ttaggcgatatty

SEQ ID NO: 234966 - DNA, 13 bp, Artificial Sequence
  Oligonucleotide for detection of SNP TSC0057367
raatatcgcctaa

SEQ ID NO: 234967 - DNA, 13 bp, Artificial Sequence
  Oligonucleotide for detection of SNP TSC0057367
gagtattgtttga

SEQ ID NO: 234968 - DNA, 13 bp, Artificial Sequence
  Oligonucleotide for detection of SNP TSC0057367
tcaaacaatactc

SEQ ID NO: 234969 - DNA, 13 bp, Artificial Sequence
  Oligonucleotide for detection of SNP TSC0057367
gagtatcgtttga

SEQ ID NO: 234970 - DNA, 13 bp, Artificial Sequence
  Oligonucleotide for detection of SNP TSC0057367
tcaaacgatactc

SEQ ID NO: 234971 - DNA, 13 bp, Artificial Sequence
  Oligonucleotide for detection of SNP TSC0006092
agtttaataaata

SEQ ID NO: 234972 - DNA, 13 bp, Artificial Sequence
  Oligonucleotide for detection of SNP TSC0006092
tatttattaaact

SEQ ID NO: 234973 - DNA, 13 bp, Artificial Sequence
  Oligonucleotide for detection of SNP TSC0006092
agtttagtaaata

SEQ ID NO: 234974 - DNA, 13 bp, Artificial Sequence
  Oligonucleotide for detection of SNP TSC0006092
tatttactaaact

SEQ ID NO: 234975 - DNA, 13 bp, Artificial Sequence
  Oligonucleotide for detection of SNP TSC0006876
atttaaaggtgta

SEQ ID NO: 234976 - DNA, 13 bp, Artificial Sequence
  Oligonucleotide for detection of SNP TSC0006876
tacacctttaaat

SEQ ID NO: 234977 - DNA, 13 bp, Artificial Sequence
  Oligonucleotide for detection of SNP TSC0006876
atttaagggtgta

SEQ ID NO: 234978 - DNA, 13 bp, Artificial Sequence
  Oligonucleotide for detection of SNP TSC0006876
tacacccttaaat

SEQ ID NO: 234979 - DNA, 13 bp, Artificial Sequence
  Oligonucleotide for detection of SNP TSC0057373
aggggtataaggy

SEQ ID NO: 234980 - DNA, 13 bp, Artificial Sequence
  Oligonucleotide for detection of SNP TSC0057373
rccttatacccct

SEQ ID NO: 234981 - DNA, 13 bp, Artificial Sequence
  Oligonucleotide for detection of SNP TSC0057373
aggggtgtaaggy

SEQ ID NO: 234982 - DNA, 13 bp, Artificial Sequence
  Oligonucleotide for detection of SNP TSC0057373
rccttacacccct

SEQ ID NO: 234983 - DNA, 13 bp, Artificial Sequence
  Oligonucleotide for detection of SNP TSC0057373
aggggcgtaaggy

SEQ ID NO: 234984 - DNA, 13 bp, Artificial Sequence
  Oligonucleotide for detection of SNP TSC0057373
rccttacgcccct

SEQ ID NO: 234985 - DNA, 13 bp, Artificial Sequence
  Oligonucleotide for detection of SNP TSC0006352
taatgatgtttty

SEQ ID NO: 234986 - DNA, 13 bp, Artificial Sequence
  Oligonucleotide for detection of SNP TSC0006352
raaaacatcatta

SEQ ID NO: 234987 - DNA, 13 bp, Artificial Sequence
  Oligonucleotide for detection of SNP TSC0006352
taatgacgtttty

SEQ ID NO: 234988 - DNA, 13 bp, Artificial Sequence
  Oligonucleotide for detection of SNP TSC0006352
raaaacgtcatta

SEQ ID NO: 234989 - DNA, 13 bp, Artificial Sequence
  Oligonucleotide for detection of SNP TSC0006352
gggagtgttattg

SEQ ID NO: 234990 - DNA, 13 bp, Artificial Sequence
  Oligonucleotide for detection of SNP TSC0006352
caataacactccc

SEQ ID NO: 234991 - DNA, 13 bp, Artificial Sequence
  Oligonucleotide for detection of SNP TSC0006352
gggagtattattg

SEQ ID NO: 234992 - DNA, 13 bp, Artificial Sequence
  Oligonucleotide for detection of SNP TSC0006352
caataatactccc

SEQ ID NO: 234993 - DNA, 13 bp, Artificial Sequence
  Oligonucleotide for detection of SNP TSC0006352
gggagcgttattg

SEQ ID NO: 234994 - DNA, 13 bp, Artificial Sequence
  Oligonucleotide for detection of SNP TSC0006352
caataacgctccc

SEQ ID NO: 234995 - DNA, 13 bp, Artificial Sequence
  Oligonucleotide for detection of SNP TSC0057388
attatgggggtgg

SEQ ID NO: 234996 - DNA, 13 bp, Artificial Sequence
  Oligonucleotide for detection of SNP TSC0057388
ccacccccataat

SEQ ID NO: 234997 - DNA, 13 bp, Artificial Sequence
  Oligonucleotide for detection of SNP TSC0057388
attatgagggtgg

SEQ ID NO: 234998 - DNA, 13 bp, Artificial Sequence
  Oligonucleotide for detection of SNP TSC0057388
ccaccctcataat

SEQ ID NO: 234999 - DNA, 13 bp, Artificial Sequence
  Oligonucleotide for detection of SNP TSC0057389
tagagatgaaaaa

SEQ ID NO: 235000 - DNA, 13 bp, Artificial Sequence
  Oligonucleotide for detection of SNP TSC0057389
tttttcatctcta

SEQ ID NO: 235001 - DNA, 13 bp, Artificial Sequence
  Oligonucleotide for detection of SNP TSC0057389
tagagacgaaaaa

SEQ ID NO: 235002 - DNA, 13 bp, Artificial Sequence
  Oligonucleotide for detection of SNP TSC0057389
tttttcgtctcta

SEQ ID NO: 235003 - DNA, 13 bp, Artificial Sequence
  Oligonucleotide for detection of SNP TSC0057390
tatgggagtgtta

SEQ ID NO: 235004 - DNA, 13 bp, Artificial Sequence
  Oligonucleotide for detection of SNP TSC0057390
taacactcccata

SEQ ID NO: 235005 - DNA, 13 bp, Artificial Sequence
  Oligonucleotide for detection of SNP TSC0057390
tatgggggtgtta

SEQ ID NO: 235006 - DNA, 13 bp, Artificial Sequence
  Oligonucleotide for detection of SNP TSC0057390
taacacccccata

SEQ ID NO: 235007 - DNA, 13 bp, Artificial Sequence
  Oligonucleotide for detection of SNP TSC0057391
tttgtatgtttay

SEQ ID NO: 235008 - DNA, 13 bp, Artificial Sequence
  Oligonucleotide for detection of SNP TSC0057391
rtaaacatacaaa

SEQ ID NO: 235009 - DNA, 13 bp, Artificial Sequence
  Oligonucleotide for detection of SNP TSC0057391
tttgtacgtttay

SEQ ID NO: 235010 - DNA, 13 bp, Artificial Sequence
  Oligonucleotide for detection of SNP TSC0057391
rtaaacgtacaaa

SEQ ID NO: 235011 - DNA, 13 bp, Artificial Sequence
  Oligonucleotide for detection of SNP TSC0057391
gtgggtgtgtagg

SEQ ID NO: 235012 - DNA, 13 bp, Artificial Sequence
  Oligonucleotide for detection of SNP TSC0057391
cctacacacccac

SEQ ID NO: 235013 - DNA, 13 bp, Artificial Sequence
  Oligonucleotide for detection of SNP TSC0057391
gtgggtatgtagg

SEQ ID NO: 235014 - DNA, 13 bp, Artificial Sequence
  Oligonucleotide for detection of SNP TSC0057391
cctacatacccac

SEQ ID NO: 235015 - DNA, 13 bp, Artificial Sequence
  Oligonucleotide for detection of SNP TSC0057391
gtgggcgtgtagg

SEQ ID NO: 235016 - DNA, 13 bp, Artificial Sequence
  Oligonucleotide for detection of SNP TSC0057391
cctacacgcccac

SEQ ID NO: 235017 - DNA, 13 bp, Artificial Sequence
  Oligonucleotide for detection of SNP TSC0006476
ggattaaaaaatt

SEQ ID NO: 235018 - DNA, 13 bp, Artificial Sequence
  Oligonucleotide for detection of SNP TSC0006476
aattttttaatcc

SEQ ID NO: 235019 - DNA, 13 bp, Artificial Sequence
  Oligonucleotide for detection of SNP TSC0006476
ggattagaaaatt

SEQ ID NO: 235020 - DNA, 13 bp, Artificial Sequence
  Oligonucleotide for detection of SNP TSC0006476
aattttctaatcc

SEQ ID NO: 235021 - DNA, 13 bp, Artificial Sequence
  Oligonucleotide for detection of SNP TSC0057392
tgttttattgagg

SEQ ID NO: 235022 - DNA, 13 bp, Artificial Sequence
  Oligonucleotide for detection of SNP TSC0057392
cctcaataaaaca

SEQ ID NO: 235023 - DNA, 13 bp, Artificial Sequence
  Oligonucleotide for detection of SNP TSC0057392
tgtttttttgagg

SEQ ID NO: 235024 - DNA, 13 bp, Artificial Sequence
  Oligonucleotide for detection of SNP TSC0057392
cctcaaaaaaaca

SEQ ID NO: 235025 - DNA, 13 bp, Artificial Sequence
  Oligonucleotide for detection of SNP TSC0057392
ttttagtaaaata

SEQ ID NO: 235026 - DNA, 13 bp, Artificial Sequence
  Oligonucleotide for detection of SNP TSC0057392
tattttactaaaa

SEQ ID NO: 235027 - DNA, 13 bp, Artificial Sequence
  Oligonucleotide for detection of SNP TSC0057392
ttttaggaaaata

SEQ ID NO: 235028 - DNA, 13 bp, Artificial Sequence
  Oligonucleotide for detection of SNP TSC0057392
tattttcctaaaa

SEQ ID NO: 235029 - DNA, 13 bp, Artificial Sequence
  Oligonucleotide for detection of SNP TSC0057393
ttgtagatttaat

SEQ ID NO: 235030 - DNA, 13 bp, Artificial Sequence
  Oligonucleotide for detection of SNP TSC0057393
attaaatctacaa

SEQ ID NO: 235031 - DNA, 13 bp, Artificial Sequence
  Oligonucleotide for detection of SNP TSC0057393
ttgtaggtttaat

SEQ ID NO: 235032 - DNA, 13 bp, Artificial Sequence
  Oligonucleotide for detection of SNP TSC0057393
attaaacctacaa

SEQ ID NO: 235033 - DNA, 13 bp, Artificial Sequence
  Oligonucleotide for detection of SNP TSC0057394
atttagtaagaaa

SEQ ID NO: 235034 - DNA, 13 bp, Artificial Sequence
  Oligonucleotide for detection of SNP TSC0057394
tttcttactaaat

SEQ ID NO: 235035 - DNA, 13 bp, Artificial Sequence
  Oligonucleotide for detection of SNP TSC0057394
atttaggaagaaa

SEQ ID NO: 235036 - DNA, 13 bp, Artificial Sequence
  Oligonucleotide for detection of SNP TSC0057394
tttcttcctaaat

SEQ ID NO: 235037 - DNA, 13 bp, Artificial Sequence
  Oligonucleotide for detection of SNP TSC0057396
gatttagtattat

SEQ ID NO: 235038 - DNA, 13 bp, Artificial Sequence
  Oligonucleotide for detection of SNP TSC0057396
ataatactaaatc

SEQ ID NO: 235039 - DNA, 13 bp, Artificial Sequence
  Oligonucleotide for detection of SNP TSC0057396
gatttaatattat

SEQ ID NO: 235040 - DNA, 13 bp, Artificial Sequence
  Oligonucleotide for detection of SNP TSC0057396
ataatattaaatc

SEQ ID NO: 235041 - DNA, 13 bp, Artificial Sequence
  Oligonucleotide for detection of SNP TSC0057397
tataggaattttt

SEQ ID NO: 235042 - DNA, 13 bp, Artificial Sequence
  Oligonucleotide for detection of SNP TSC0057397
aaaaattcctata

SEQ ID NO: 235043 - DNA, 13 bp, Artificial Sequence
  Oligonucleotide for detection of SNP TSC0057397
tatagggattttt

SEQ ID NO: 235044 - DNA, 13 bp, Artificial Sequence
  Oligonucleotide for detection of SNP TSC0057397
aaaaatccctata

SEQ ID NO: 235045 - DNA, 13 bp, Artificial Sequence
  Oligonucleotide for detection of SNP TSC0057398
tataggtgtttat

SEQ ID NO: 235046 - DNA, 13 bp, Artificial Sequence
  Oligonucleotide for detection of SNP TSC0057398
ataaacacctata

SEQ ID NO: 235047 - DNA, 13 bp, Artificial Sequence
  Oligonucleotide for detection of SNP TSC0057398
tataggggtttat

SEQ ID NO: 235048 - DNA, 13 bp, Artificial Sequence
  Oligonucleotide for detection of SNP TSC0057398
ataaacccctata

SEQ ID NO: 235049 - DNA, 13 bp, Artificial Sequence
  Oligonucleotide for detection of SNP TSC0057398
ataggtatttgta

SEQ ID NO: 235050 - DNA, 13 bp, Artificial Sequence
  Oligonucleotide for detection of SNP TSC0057398
tacaaatacctat

SEQ ID NO: 235051 - DNA, 13 bp, Artificial Sequence
  Oligonucleotide for detection of SNP TSC0057398
ataggtttttgta

SEQ ID NO: 235052 - DNA, 13 bp, Artificial Sequence
  Oligonucleotide for detection of SNP TSC0057398
tacaaaaacctat

SEQ ID NO: 235053 - DNA, 13 bp, Artificial Sequence
  Oligonucleotide for detection of SNP TSC0057399
aatgttttttttg

SEQ ID NO: 235054 - DNA, 13 bp, Artificial Sequence
  Oligonucleotide for detection of SNP TSC0057399
caaaaaaaacatt

SEQ ID NO: 235055 - DNA, 13 bp, Artificial Sequence
  Oligonucleotide for detection of SNP TSC0057399
aatgttgtttttg

SEQ ID NO: 235056 - DNA, 13 bp, Artificial Sequence
  Oligonucleotide for detection of SNP TSC0057399
caaaaacaacatt

SEQ ID NO: 235057 - DNA, 13 bp, Artificial Sequence
  Oligonucleotide for detection of SNP TSC0057399
tagagaaaatatt

SEQ ID NO: 235058 - DNA, 13 bp, Artificial Sequence
  Oligonucleotide for detection of SNP TSC0057399
aatattttctcta

SEQ ID NO: 235059 - DNA, 13 bp, Artificial Sequence
  Oligonucleotide for detection of SNP TSC0057399
tagagataatatt

SEQ ID NO: 235060 - DNA, 13 bp, Artificial Sequence
  Oligonucleotide for detection of SNP TSC0057399
aatattatctcta

SEQ ID NO: 235061 - DNA, 13 bp, Artificial Sequence
  Oligonucleotide for detection of SNP TSC0057402
gaggtaagttgat

SEQ ID NO: 235062 - DNA, 13 bp, Artificial Sequence
  Oligonucleotide for detection of SNP TSC0057402
atcaacttacctc

SEQ ID NO: 235063 - DNA, 13 bp, Artificial Sequence
  Oligonucleotide for detection of SNP TSC0057402
gaggtaggttgat

SEQ ID NO: 235064 - DNA, 13 bp, Artificial Sequence
  Oligonucleotide for detection of SNP TSC0057402
atcaacctacctc

SEQ ID NO: 235065 - DNA, 13 bp, Artificial Sequence
  Oligonucleotide for detection of SNP TSC0057403
taggggtggggtt

SEQ ID NO: 235066 - DNA, 13 bp, Artificial Sequence
  Oligonucleotide for detection of SNP TSC0057403
aaccccaccccta

SEQ ID NO: 235067 - DNA, 13 bp, Artificial Sequence
  Oligonucleotide for detection of SNP TSC0057403
taggggcggggtt

SEQ ID NO: 235068 - DNA, 13 bp, Artificial Sequence
  Oligonucleotide for detection of SNP TSC0057403
aaccccgccccta

SEQ ID NO: 235069 - DNA, 13 bp, Artificial Sequence
  Oligonucleotide for detection of SNP TSC0057404
aattttgtaattt

SEQ ID NO: 235070 - DNA, 13 bp, Artificial Sequence
  Oligonucleotide for detection of SNP TSC0057404
aaattacaaaatt

SEQ ID NO: 235071 - DNA, 13 bp, Artificial Sequence
  Oligonucleotide for detection of SNP TSC0057404
aatttcgtaattt

SEQ ID NO: 235072 - DNA, 13 bp, Artificial Sequence
  Oligonucleotide for detection of SNP TSC0057404
aaattacgaaatt

SEQ ID NO: 235073 - DNA, 13 bp, Artificial Sequence
  Oligonucleotide for detection of SNP TSC0057404
aaattgtgaagtt

SEQ ID NO: 235074 - DNA, 13 bp, Artificial Sequence
  Oligonucleotide for detection of SNP TSC0057404
aacttcacaattt

SEQ ID NO: 235075 - DNA, 13 bp, Artificial Sequence
  Oligonucleotide for detection of SNP TSC0057404
aaattgcgaagtt

SEQ ID NO: 235076 - DNA, 13 bp, Artificial Sequence
  Oligonucleotide for detection of SNP TSC0057404
aacttcgcaattt

SEQ ID NO: 235077 - DNA, 13 bp, Artificial Sequence
  Oligonucleotide for detection of SNP TSC0057405
tgaggtaggagga

SEQ ID NO: 235078 - DNA, 13 bp, Artificial Sequence
  Oligonucleotide for detection of SNP TSC0057405
tcctcctacctca

SEQ ID NO: 235079 - DNA, 13 bp, Artificial Sequence
  Oligonucleotide for detection of SNP TSC0057405
tgaggtgggagga

SEQ ID NO: 235080 - DNA, 13 bp, Artificial Sequence
  Oligonucleotide for detection of SNP TSC0057405
tcctcccacctca

SEQ ID NO: 235081 - DNA, 13 bp, Artificial Sequence
  Oligonucleotide for detection of SNP TSC0057405
tgaggcgggagga

SEQ ID NO: 235082 - DNA, 13 bp, Artificial Sequence
  Oligonucleotide for detection of SNP TSC0057405
tcctcccgcctca

SEQ ID NO: 235083 - DNA, 13 bp, Artificial Sequence
  Oligonucleotide for detection of SNP TSC0057406
aaaaaaagggaat

SEQ ID NO: 235084 - DNA, 13 bp, Artificial Sequence
  Oligonucleotide for detection of SNP TSC0057406
attcccttttttt

SEQ ID NO: 235085 - DNA, 13 bp, Artificial Sequence
  Oligonucleotide for detection of SNP TSC0057406
aaaaaaggggaat

SEQ ID NO: 235086 - DNA, 13 bp, Artificial Sequence
  Oligonucleotide for detection of SNP TSC0057406
attcccctttttt

SEQ ID NO: 235087 - DNA, 13 bp, Artificial Sequence
  Oligonucleotide for detection of SNP TSC0057407
gtgatattaaaaa

SEQ ID NO: 235088 - DNA, 13 bp, Artificial Sequence
  Oligonucleotide for detection of SNP TSC0057407
tttttaatatcac

SEQ ID NO: 235089 - DNA, 13 bp, Artificial Sequence
  Oligonucleotide for detection of SNP TSC0057407
gtgatagtaaaaa

SEQ ID NO: 235090 - DNA, 13 bp, Artificial Sequence
  Oligonucleotide for detection of SNP TSC0057407
tttttactatcac

SEQ ID NO: 235091 - DNA, 13 bp, Artificial Sequence
  Oligonucleotide for detection of SNP TSC0057409
atggtaataaggt

SEQ ID NO: 235092 - DNA, 13 bp, Artificial Sequence
  Oligonucleotide for detection of SNP TSC0057409
accttattaccat

SEQ ID NO: 235093 - DNA, 13 bp, Artificial Sequence
  Oligonucleotide for detection of SNP TSC0057409
atggtagtaaggt

SEQ ID NO: 235094 - DNA, 13 bp, Artificial Sequence
  Oligonucleotide for detection of SNP TSC0057409
accttactaccat

SEQ ID NO: 235095 - DNA, 13 bp, Artificial Sequence
  Oligonucleotide for detection of SNP TSC0057410
tttataaaaaagg

SEQ ID NO: 235096 - DNA, 13 bp, Artificial Sequence
  Oligonucleotide for detection of SNP TSC0057410
ccttttttataaa

SEQ ID NO: 235097 - DNA, 13 bp, Artificial Sequence
  Oligonucleotide for detection of SNP TSC0057410
tttatagaaaagg

SEQ ID NO: 235098 - DNA, 13 bp, Artificial Sequence
  Oligonucleotide for detection of SNP TSC0057410
ccttttctataaa

SEQ ID NO: 235099 - DNA, 13 bp, Artificial Sequence
  Oligonucleotide for detection of SNP TSC0007267
tttagagatatty

SEQ ID NO: 235100 - DNA, 13 bp, Artificial Sequence
  Oligonucleotide for detection of SNP TSC0007267
raatatctctaaa

SEQ ID NO: 235101 - DNA, 13 bp, Artificial Sequence
  Oligonucleotide for detection of SNP TSC0007267
tttagaaatatty

SEQ ID NO: 235102 - DNA, 13 bp, Artificial Sequence
  Oligonucleotide for detection of SNP TSC0007267
raatatttctaaa

SEQ ID NO: 235103 - DNA, 13 bp, Artificial Sequence
  Oligonucleotide for detection of SNP TSC0006454
agtttaaaaggaa

SEQ ID NO: 235104 - DNA, 13 bp, Artificial Sequence
  Oligonucleotide for detection of SNP TSC0006454
ttccttttaaact

SEQ ID NO: 235105 - DNA, 13 bp, Artificial Sequence
  Oligonucleotide for detection of SNP TSC0006454
agtttagaaggaa

SEQ ID NO: 235106 - DNA, 13 bp, Artificial Sequence
  Oligonucleotide for detection of SNP TSC0006454
ttccttctaaact

SEQ ID NO: 235107 - DNA, 13 bp, Artificial Sequence
  Oligonucleotide for detection of SNP TSC0057415
agttgttaagtty

SEQ ID NO: 235108 - DNA, 13 bp, Artificial Sequence
  Oligonucleotide for detection of SNP TSC0057415
raacttaacaact

SEQ ID NO: 235109 - DNA, 13 bp, Artificial Sequence
  Oligonucleotide for detection of SNP TSC0057415
agttgtgaagtty

SEQ ID NO: 235110 - DNA, 13 bp, Artificial Sequence
  Oligonucleotide for detection of SNP TSC0057415
raacttcacaact

SEQ ID NO: 235111 - DNA, 13 bp, Artificial Sequence
  Oligonucleotide for detection of SNP TSC0057415
gaatttgatagtt

SEQ ID NO: 235112 - DNA, 13 bp, Artificial Sequence
  Oligonucleotide for detection of SNP TSC0057415
aactatcaaattc

SEQ ID NO: 235113 - DNA, 13 bp, Artificial Sequence
  Oligonucleotide for detection of SNP TSC0057415
gaattttatagtt

SEQ ID NO: 235114 - DNA, 13 bp, Artificial Sequence
  Oligonucleotide for detection of SNP TSC0057415
aactataaaattc

SEQ ID NO: 235115 - DNA, 13 bp, Artificial Sequence
  Oligonucleotide for detection of SNP TSC0057416
tttaaaatgtata

SEQ ID NO: 235116 - DNA, 13 bp, Artificial Sequence
  Oligonucleotide for detection of SNP TSC0057416
tatacattttaaa

SEQ ID NO: 235117 - DNA, 13 bp, Artificial Sequence
  Oligonucleotide for detection of SNP TSC0057416
tttaaagtgtata

SEQ ID NO: 235118 - DNA, 13 bp, Artificial Sequence
  Oligonucleotide for detection of SNP TSC0057416
tatacactttaaa

SEQ ID NO: 235119 - DNA, 13 bp, Artificial Sequence
  Oligonucleotide for detection of SNP TSC0057421
tatgtgattgtta

SEQ ID NO: 235120 - DNA, 13 bp, Artificial Sequence
  Oligonucleotide for detection of SNP TSC0057421
taacaatcacata

SEQ ID NO: 235121 - DNA, 13 bp, Artificial Sequence
  Oligonucleotide for detection of SNP TSC0057421
tatgtggttgtta

SEQ ID NO: 235122 - DNA, 13 bp, Artificial Sequence
  Oligonucleotide for detection of SNP TSC0057421
taacaaccacata

SEQ ID NO: 235123 - DNA, 13 bp, Artificial Sequence
  Oligonucleotide for detection of SNP TSC0057421
tacgtgattgtta

SEQ ID NO: 235124 - DNA, 13 bp, Artificial Sequence
  Oligonucleotide for detection of SNP TSC0057421
taacaatcacgta

SEQ ID NO: 235125 - DNA, 13 bp, Artificial Sequence
  Oligonucleotide for detection of SNP TSC0057421
tacgtggttgtta

SEQ ID NO: 235126 - DNA, 13 bp, Artificial Sequence
  Oligonucleotide for detection of SNP TSC0057421
taacaaccacgta

SEQ ID NO: 235127 - DNA, 13 bp, Artificial Sequence
  Oligonucleotide for detection of SNP TSC0057422
atagtatgtggtt

SEQ ID NO: 235128 - DNA, 13 bp, Artificial Sequence
  Oligonucleotide for detection of SNP TSC0057422
aaccacatactat

SEQ ID NO: 235129 - DNA, 13 bp, Artificial Sequence
  Oligonucleotide for detection of SNP TSC0057422
atagtaggtggtt

SEQ ID NO: 235130 - DNA, 13 bp, Artificial Sequence
  Oligonucleotide for detection of SNP TSC0057422
aaccacctactat

SEQ ID NO: 235131 - DNA, 13 bp, Artificial Sequence
  Oligonucleotide for detection of SNP TSC0057422
atagtacgtggtt

SEQ ID NO: 235132 - DNA, 13 bp, Artificial Sequence
  Oligonucleotide for detection of SNP TSC0057422
aaccacgtactat

SEQ ID NO: 235133 - DNA, 13 bp, Artificial Sequence
  Oligonucleotide for detection of SNP TSC0057422
agttatgtgttgt

SEQ ID NO: 235134 - DNA, 13 bp, Artificial Sequence
  Oligonucleotide for detection of SNP TSC0057422
acaacacataact

SEQ ID NO: 235135 - DNA, 13 bp, Artificial Sequence
  Oligonucleotide for detection of SNP TSC0057422
agttatttgttgt

SEQ ID NO: 235136 - DNA, 13 bp, Artificial Sequence
  Oligonucleotide for detection of SNP TSC0057422
acaacaaataact

SEQ ID NO: 235137 - DNA, 13 bp, Artificial Sequence
  Oligonucleotide for detection of SNP TSC0057422
agttacgtgttgt

SEQ ID NO: 235138 - DNA, 13 bp, Artificial Sequence
  Oligonucleotide for detection of SNP TSC0057422
acaacacgtaact

SEQ ID NO: 235139 - DNA, 13 bp, Artificial Sequence
  Oligonucleotide for detection of SNP TSC0057423
attagtaaaatag

SEQ ID NO: 235140 - DNA, 13 bp, Artificial Sequence
  Oligonucleotide for detection of SNP TSC0057423
ctattttactaat

SEQ ID NO: 235141 - DNA, 13 bp, Artificial Sequence
  Oligonucleotide for detection of SNP TSC0057423
attagtgaaatag

SEQ ID NO: 235142 - DNA, 13 bp, Artificial Sequence
  Oligonucleotide for detection of SNP TSC0057423
ctatttcactaat

SEQ ID NO: 235143 - DNA, 13 bp, Artificial Sequence
  Oligonucleotide for detection of SNP TSC0057424
atatttgaaattt

SEQ ID NO: 235144 - DNA, 13 bp, Artificial Sequence
  Oligonucleotide for detection of SNP TSC0057424
aaatttcaaatat

SEQ ID NO: 235145 - DNA, 13 bp, Artificial Sequence
  Oligonucleotide for detection of SNP TSC0057425
ttaaaagtatttt

SEQ ID NO: 235146 - DNA, 13 bp, Artificial Sequence
  Oligonucleotide for detection of SNP TSC0057425
aaaatacttttaa

SEQ ID NO: 235147 - DNA, 13 bp, Artificial Sequence
  Oligonucleotide for detection of SNP TSC0057425
ttaaaaatatttt

SEQ ID NO: 235148 - DNA, 13 bp, Artificial Sequence
  Oligonucleotide for detection of SNP TSC0057425
aaaatatttttaa

SEQ ID NO: 235149 - DNA, 13 bp, Artificial Sequence
  Oligonucleotide for detection of SNP TSC0057426
attattattttay

SEQ ID NO: 235150 - DNA, 13 bp, Artificial Sequence
  Oligonucleotide for detection of SNP TSC0057426
rtaaaataataat

SEQ ID NO: 235151 - DNA, 13 bp, Artificial Sequence
  Oligonucleotide for detection of SNP TSC0057426
attattgttttay

SEQ ID NO: 235152 - DNA, 13 bp, Artificial Sequence
  Oligonucleotide for detection of SNP TSC0057426
rtaaaacaataat

SEQ ID NO: 235153 - DNA, 13 bp, Artificial Sequence
  Oligonucleotide for detection of SNP TSC0057426
attatcgttttay

SEQ ID NO: 235154 - DNA, 13 bp, Artificial Sequence
  Oligonucleotide for detection of SNP TSC0057426
rtaaaacgataat

SEQ ID NO: 235155 - DNA, 13 bp, Artificial Sequence
  Oligonucleotide for detection of SNP TSC0057426
gtgaagtgatgat

SEQ ID NO: 235156 - DNA, 13 bp, Artificial Sequence
  Oligonucleotide for detection of SNP TSC0057426
atcatcacttcac

SEQ ID NO: 235157 - DNA, 13 bp, Artificial Sequence
  Oligonucleotide for detection of SNP TSC0057426
gtgaagcgatgat

SEQ ID NO: 235158 - DNA, 13 bp, Artificial Sequence
  Oligonucleotide for detection of SNP TSC0057426
atcatcgcttcac

SEQ ID NO: 235159 - DNA, 13 bp, Artificial Sequence
  Oligonucleotide for detection of SNP TSC0057427
ggttatagtggta

SEQ ID NO: 235160 - DNA, 13 bp, Artificial Sequence
  Oligonucleotide for detection of SNP TSC0057427
taccactataacc

SEQ ID NO: 235161 - DNA, 13 bp, Artificial Sequence
  Oligonucleotide for detection of SNP TSC0057427
ggttatggtggta

SEQ ID NO: 235162 - DNA, 13 bp, Artificial Sequence
  Oligonucleotide for detection of SNP TSC0057427
taccaccataacc

SEQ ID NO: 235163 - DNA, 13 bp, Artificial Sequence
  Oligonucleotide for detection of SNP TSC0057427
ggttacggtggta

SEQ ID NO: 235164 - DNA, 13 bp, Artificial Sequence
  Oligonucleotide for detection of SNP TSC0057427
taccaccgtaacc

SEQ ID NO: 235165 - DNA, 13 bp, Artificial Sequence
  Oligonucleotide for detection of SNP TSC0057427
tgttattgtgaty

SEQ ID NO: 235166 - DNA, 13 bp, Artificial Sequence
  Oligonucleotide for detection of SNP TSC0057427
ratcacaataaca

SEQ ID NO: 235167 - DNA, 13 bp, Artificial Sequence
  Oligonucleotide for detection of SNP TSC0057427
tgttatcgtgaty

SEQ ID NO: 235168 - DNA, 13 bp, Artificial Sequence
  Oligonucleotide for detection of SNP TSC0057427
ratcacgataaca

SEQ ID NO: 235169 - DNA, 13 bp, Artificial Sequence
  Oligonucleotide for detection of SNP TSC0057429
aggagaaaaaaaa

SEQ ID NO: 235170 - DNA, 13 bp, Artificial Sequence
  Oligonucleotide for detection of SNP TSC0057429
ttttttttctcct

SEQ ID NO: 235171 - DNA, 13 bp, Artificial Sequence
  Oligonucleotide for detection of SNP TSC0057429
aggagagaaaaaa

SEQ ID NO: 235172 - DNA, 13 bp, Artificial Sequence
  Oligonucleotide for detection of SNP TSC0057429
ttttttctctcct

SEQ ID NO: 235173 - DNA, 13 bp, Artificial Sequence
  Oligonucleotide for detection of SNP TSC0057432
gtggttgttggtt

SEQ ID NO: 235174 - DNA, 13 bp, Artificial Sequence
  Oligonucleotide for detection of SNP TSC0057432
aaccaacaaccac

SEQ ID NO: 235175 - DNA, 13 bp, Artificial Sequence
  Oligonucleotide for detection of SNP TSC0057432
gtggttattggtt

SEQ ID NO: 235176 - DNA, 13 bp, Artificial Sequence
  Oligonucleotide for detection of SNP TSC0057432
aaccaataaccac

SEQ ID NO: 235177 - DNA, 13 bp, Artificial Sequence
  Oligonucleotide for detection of SNP TSC0057433
atatagggtatty

SEQ ID NO: 235178 - DNA, 13 bp, Artificial Sequence
  Oligonucleotide for detection of SNP TSC0057433
raataccctatat

SEQ ID NO: 235179 - DNA, 13 bp, Artificial Sequence
  Oligonucleotide for detection of SNP TSC0057433
atatagagtatty

SEQ ID NO: 235180 - DNA, 13 bp, Artificial Sequence
  Oligonucleotide for detection of SNP TSC0057433
raatactctatat

SEQ ID NO: 235181 - DNA, 13 bp, Artificial Sequence
  Oligonucleotide for detection of SNP TSC0057434
gggtgttggtagg

SEQ ID NO: 235182 - DNA, 13 bp, Artificial Sequence
  Oligonucleotide for detection of SNP TSC0057434
cctaccaacaccc

SEQ ID NO: 235183 - DNA, 13 bp, Artificial Sequence
  Oligonucleotide for detection of SNP TSC0057434
gggtgtcggtagg

SEQ ID NO: 235184 - DNA, 13 bp, Artificial Sequence
  Oligonucleotide for detection of SNP TSC0057434
cctaccgacaccc

SEQ ID NO: 235185 - DNA, 13 bp, Artificial Sequence
  Oligonucleotide for detection of SNP TSC0057434
tttgttgatatty

SEQ ID NO: 235186 - DNA, 13 bp, Artificial Sequence
  Oligonucleotide for detection of SNP TSC0057434
raatatcaacaaa

SEQ ID NO: 235187 - DNA, 13 bp, Artificial Sequence
  Oligonucleotide for detection of SNP TSC0057434
tttgttaatatty

SEQ ID NO: 235188 - DNA, 13 bp, Artificial Sequence
  Oligonucleotide for detection of SNP TSC0057434
raatattaacaaa

SEQ ID NO: 235189 - DNA, 13 bp, Artificial Sequence
  Oligonucleotide for detection of SNP TSC0057434
tttgtcgatatty

SEQ ID NO: 235190 - DNA, 13 bp, Artificial Sequence
  Oligonucleotide for detection of SNP TSC0057434
raatatcgacaaa

SEQ ID NO: 235191 - DNA, 13 bp, Artificial Sequence
  Oligonucleotide for detection of SNP TSC0057435
atttgttgtagay

SEQ ID NO: 235192 - DNA, 13 bp, Artificial Sequence
  Oligonucleotide for detection of SNP TSC0057435
rtctacaacaaat

SEQ ID NO: 235193 - DNA, 13 bp, Artificial Sequence
  Oligonucleotide for detection of SNP TSC0057435
atttgtcgtagay

SEQ ID NO: 235194 - DNA, 13 bp, Artificial Sequence
  Oligonucleotide for detection of SNP TSC0057435
rtctacgacaaat

SEQ ID NO: 235195 - DNA, 13 bp, Artificial Sequence
  Oligonucleotide for detection of SNP TSC0057435
gtttatggtagat

SEQ ID NO: 235196 - DNA, 13 bp, Artificial Sequence
  Oligonucleotide for detection of SNP TSC0057435
atctaccataaac

SEQ ID NO: 235197 - DNA, 13 bp, Artificial Sequence
  Oligonucleotide for detection of SNP TSC0057435
gtttatagtagat

SEQ ID NO: 235198 - DNA, 13 bp, Artificial Sequence
  Oligonucleotide for detection of SNP TSC0057435
atctactataaac

SEQ ID NO: 235199 - DNA, 13 bp, Artificial Sequence
  Oligonucleotide for detection of SNP TSC0057435
gtttacggtagat

SEQ ID NO: 235200 - DNA, 13 bp, Artificial Sequence
  Oligonucleotide for detection of SNP TSC0057435
atctaccgtaaac

SEQ ID NO: 235201 - DNA, 13 bp, Artificial Sequence
  Oligonucleotide for detection of SNP TSC0057436
gttgggttattgg

SEQ ID NO: 235202 - DNA, 13 bp, Artificial Sequence
  Oligonucleotide for detection of SNP TSC0057436
ccaataacccaac

SEQ ID NO: 235203 - DNA, 13 bp, Artificial Sequence
  Oligonucleotide for detection of SNP TSC0057436
gttggggtattgg

SEQ ID NO: 235204 - DNA, 13 bp, Artificial Sequence
  Oligonucleotide for detection of SNP TSC0057436
ccaataccccaac

SEQ ID NO: 235205 - DNA, 13 bp, Artificial Sequence
  Oligonucleotide for detection of SNP TSC0057436
gtcgggttattgg

SEQ ID NO: 235206 - DNA, 13 bp, Artificial Sequence
  Oligonucleotide for detection of SNP TSC0057436
ccaataacccgac

SEQ ID NO: 235207 - DNA, 13 bp, Artificial Sequence
  Oligonucleotide for detection of SNP TSC0057436
gtcggggtattgg

SEQ ID NO: 235208 - DNA, 13 bp, Artificial Sequence
  Oligonucleotide for detection of SNP TSC0057436
ccaataccccgac

SEQ ID NO: 235209 - DNA, 13 bp, Artificial Sequence
  Oligonucleotide for detection of SNP TSC0057436
ttagtggtttggy

SEQ ID NO: 235210 - DNA, 13 bp, Artificial Sequence
  Oligonucleotide for detection of SNP TSC0057436
rccaaaccactaa

SEQ ID NO: 235211 - DNA, 13 bp, Artificial Sequence
  Oligonucleotide for detection of SNP TSC0057436
ttagtgttttggy

SEQ ID NO: 235212 - DNA, 13 bp, Artificial Sequence
  Oligonucleotide for detection of SNP TSC0057436
rccaaaacactaa

SEQ ID NO: 235213 - DNA, 13 bp, Artificial Sequence
  Oligonucleotide for detection of SNP TSC0057436
ttagtggttcggy

SEQ ID NO: 235214 - DNA, 13 bp, Artificial Sequence
  Oligonucleotide for detection of SNP TSC0057436
rccgaaccactaa

SEQ ID NO: 235215 - DNA, 13 bp, Artificial Sequence
  Oligonucleotide for detection of SNP TSC0057436
ttagtgtttcggy

SEQ ID NO: 235216 - DNA, 13 bp, Artificial Sequence
  Oligonucleotide for detection of SNP TSC0057436
rccgaaacactaa

SEQ ID NO: 235217 - DNA, 13 bp, Artificial Sequence
  Oligonucleotide for detection of SNP TSC0057437
gaaaaatgtaaaa

SEQ ID NO: 235218 - DNA, 13 bp, Artificial Sequence
  Oligonucleotide for detection of SNP TSC0057437
ttttacatttttc

SEQ ID NO: 235219 - DNA, 13 bp, Artificial Sequence
  Oligonucleotide for detection of SNP TSC0057437
gaaaaacgtaaaa

SEQ ID NO: 235220 - DNA, 13 bp, Artificial Sequence
  Oligonucleotide for detection of SNP TSC0057437
ttttacgtttttc

SEQ ID NO: 235221 - DNA, 13 bp, Artificial Sequence
  Oligonucleotide for detection of SNP TSC0057438
taatttataattt

SEQ ID NO: 235222 - DNA, 13 bp, Artificial Sequence
  Oligonucleotide for detection of SNP TSC0057438
aaattataaatta

SEQ ID NO: 235223 - DNA, 13 bp, Artificial Sequence
  Oligonucleotide for detection of SNP TSC0057438
taattcgtaattt

SEQ ID NO: 235224 - DNA, 13 bp, Artificial Sequence
  Oligonucleotide for detection of SNP TSC0057438
aaattacgaatta

SEQ ID NO: 235225 - DNA, 13 bp, Artificial Sequence
  Oligonucleotide for detection of SNP TSC0057438
agattatggattg

SEQ ID NO: 235226 - DNA, 13 bp, Artificial Sequence
  Oligonucleotide for detection of SNP TSC0057438
caatccataatct

SEQ ID NO: 235227 - DNA, 13 bp, Artificial Sequence
  Oligonucleotide for detection of SNP TSC0057438
agattacggattg

SEQ ID NO: 235228 - DNA, 13 bp, Artificial Sequence
  Oligonucleotide for detection of SNP TSC0057438
caatccgtaatct

SEQ ID NO: 235229 - DNA, 13 bp, Artificial Sequence
  Oligonucleotide for detection of SNP TSC0057439
tttaattttttat

SEQ ID NO: 235230 - DNA, 13 bp, Artificial Sequence
  Oligonucleotide for detection of SNP TSC0057439
ataaaaaattaaa

SEQ ID NO: 235231 - DNA, 13 bp, Artificial Sequence
  Oligonucleotide for detection of SNP TSC0057439
ataaaagattaaa

SEQ ID NO: 235232 - DNA, 13 bp, Artificial Sequence
  Oligonucleotide for detection of SNP TSC0057439
tttaatcttttat

SEQ ID NO: 235233 - DNA, 13 bp, Artificial Sequence
  Oligonucleotide for detection of SNP TSC0010353
ggatgatgggaag

SEQ ID NO: 235234 - DNA, 13 bp, Artificial Sequence
  Oligonucleotide for detection of SNP TSC0010353
cttcccatcatcc

SEQ ID NO: 235235 - DNA, 13 bp, Artificial Sequence
  Oligonucleotide for detection of SNP TSC0010353
ggatgacgggaag

SEQ ID NO: 235236 - DNA, 13 bp, Artificial Sequence
  Oligonucleotide for detection of SNP TSC0010353
cttcccgtcatcc

SEQ ID NO: 235237 - DNA, 13 bp, Artificial Sequence
  Oligonucleotide for detection of SNP TSC0057441
gggaaatagtgga

SEQ ID NO: 235238 - DNA, 13 bp, Artificial Sequence
  Oligonucleotide for detection of SNP TSC0057441
tccactatttccc

SEQ ID NO: 235239 - DNA, 13 bp, Artificial Sequence
  Oligonucleotide for detection of SNP TSC0057441
gggaaagagtgga

SEQ ID NO: 235240 - DNA, 13 bp, Artificial Sequence
  Oligonucleotide for detection of SNP TSC0057441
tccactctttccc

SEQ ID NO: 235241 - DNA, 13 bp, Artificial Sequence
  Oligonucleotide for detection of SNP TSC0057442
tttaagataaaga

SEQ ID NO: 235242 - DNA, 13 bp, Artificial Sequence
  Oligonucleotide for detection of SNP TSC0057442
tctttatcttaaa

SEQ ID NO: 235243 - DNA, 13 bp, Artificial Sequence
  Oligonucleotide for detection of SNP TSC0057442
tttaagttaaaga

SEQ ID NO: 235244 - DNA, 13 bp, Artificial Sequence
  Oligonucleotide for detection of SNP TSC0057442
tctttaacttaaa

SEQ ID NO: 235245 - DNA, 13 bp, Artificial Sequence
  Oligonucleotide for detection of SNP TSC0057442
tttttgttttgaa

SEQ ID NO: 235246 - DNA, 13 bp, Artificial Sequence
  Oligonucleotide for detection of SNP TSC0057442
ttcaaaacaaaaa

SEQ ID NO: 235247 - DNA, 13 bp, Artificial Sequence
  Oligonucleotide for detection of SNP TSC0057442
tttttgatttgaa

SEQ ID NO: 235248 - DNA, 13 bp, Artificial Sequence
  Oligonucleotide for detection of SNP TSC0057442
ttcaaatcaaaaa

SEQ ID NO: 235249 - DNA, 13 bp, Artificial Sequence
  Oligonucleotide for detection of SNP TSC0057443
ggttatttttttt

SEQ ID NO: 235250 - DNA, 13 bp, Artificial Sequence
  Oligonucleotide for detection of SNP TSC0057443
aaaaaaaataacc

SEQ ID NO: 235251 - DNA, 13 bp, Artificial Sequence
  Oligonucleotide for detection of SNP TSC0057443
agaaggtgtggty

SEQ ID NO: 235252 - DNA, 13 bp, Artificial Sequence
  Oligonucleotide for detection of SNP TSC0057443
raccacaccttct

SEQ ID NO: 235253 - DNA, 13 bp, Artificial Sequence
  Oligonucleotide for detection of SNP TSC0057443
agaaggggtggty

SEQ ID NO: 235254 - DNA, 13 bp, Artificial Sequence
  Oligonucleotide for detection of SNP TSC0057443
raccaccccttct

SEQ ID NO: 235255 - DNA, 13 bp, Artificial Sequence
  Oligonucleotide for detection of SNP TSC0057444
attatatgtgtty

SEQ ID NO: 235256 - DNA, 13 bp, Artificial Sequence
  Oligonucleotide for detection of SNP TSC0057444
raacacatataat

SEQ ID NO: 235257 - DNA, 13 bp, Artificial Sequence
  Oligonucleotide for detection of SNP TSC0057444
attatacgtgtty

SEQ ID NO: 235258 - DNA, 13 bp, Artificial Sequence
  Oligonucleotide for detection of SNP TSC0057444
raacacgtataat

SEQ ID NO: 235259 - DNA, 13 bp, Artificial Sequence
  Oligonucleotide for detection of SNP TSC0057444
gggtatgtgtaat

SEQ ID NO: 235260 - DNA, 13 bp, Artificial Sequence
  Oligonucleotide for detection of SNP TSC0057444
attacacataccc

SEQ ID NO: 235261 - DNA, 13 bp, Artificial Sequence
  Oligonucleotide for detection of SNP TSC0057444
gggtatttgtaat

SEQ ID NO: 235262 - DNA, 13 bp, Artificial Sequence
  Oligonucleotide for detection of SNP TSC0057444
attacaaataccc

SEQ ID NO: 235263 - DNA, 13 bp, Artificial Sequence
  Oligonucleotide for detection of SNP TSC0057444
gggtacgtgtaat

SEQ ID NO: 235264 - DNA, 13 bp, Artificial Sequence
  Oligonucleotide for detection of SNP TSC0057444
attacacgtaccc

SEQ ID NO: 235265 - DNA, 13 bp, Artificial Sequence
  Oligonucleotide for detection of SNP TSC0057445
tttattgatttty

SEQ ID NO: 235266 - DNA, 13 bp, Artificial Sequence
  Oligonucleotide for detection of SNP TSC0057445
raaaatcaataaa

SEQ ID NO: 235267 - DNA, 13 bp, Artificial Sequence
  Oligonucleotide for detection of SNP TSC0057445
tttattaatttty

SEQ ID NO: 235268 - DNA, 13 bp, Artificial Sequence
  Oligonucleotide for detection of SNP TSC0057445
raaaattaataaa

SEQ ID NO: 235269 - DNA, 13 bp, Artificial Sequence
  Oligonucleotide for detection of SNP TSC0057446
ttattatggaatg

SEQ ID NO: 235270 - DNA, 13 bp, Artificial Sequence
  Oligonucleotide for detection of SNP TSC0057446
cattccataataa

SEQ ID NO: 235271 - DNA, 13 bp, Artificial Sequence
  Oligonucleotide for detection of SNP TSC0057446
ttattacggaatg

SEQ ID NO: 235272 - DNA, 13 bp, Artificial Sequence
  Oligonucleotide for detection of SNP TSC0057446
cattccgtaataa

SEQ ID NO: 235273 - DNA, 13 bp, Artificial Sequence
  Oligonucleotide for detection of SNP TSC0057446
tattttgtagtag

SEQ ID NO: 235274 - DNA, 13 bp, Artificial Sequence
  Oligonucleotide for detection of SNP TSC0057446
ctactacaaaata

SEQ ID NO: 235275 - DNA, 13 bp, Artificial Sequence
  Oligonucleotide for detection of SNP TSC0057446
tattttatagtag

SEQ ID NO: 235276 - DNA, 13 bp, Artificial Sequence
  Oligonucleotide for detection of SNP TSC0057446
ctactataaaata

SEQ ID NO: 235277 - DNA, 13 bp, Artificial Sequence
  Oligonucleotide for detection of SNP TSC0057446
tatttcgtagtag

SEQ ID NO: 235278 - DNA, 13 bp, Artificial Sequence
  Oligonucleotide for detection of SNP TSC0057446
ctactacgaaata

SEQ ID NO: 235279 - DNA, 13 bp, Artificial Sequence
  Oligonucleotide for detection of SNP TSC0057447
taggagattagta

SEQ ID NO: 235280 - DNA, 13 bp, Artificial Sequence
  Oligonucleotide for detection of SNP TSC0057447
tactaatctccta

SEQ ID NO: 235281 - DNA, 13 bp, Artificial Sequence
  Oligonucleotide for detection of SNP TSC0057447
taggaggttagta

SEQ ID NO: 235282 - DNA, 13 bp, Artificial Sequence
  Oligonucleotide for detection of SNP TSC0057447
tactaacctccta

SEQ ID NO: 235283 - DNA, 13 bp, Artificial Sequence
  Oligonucleotide for detection of SNP TSC0057448
gttgaagttagty

SEQ ID NO: 235284 - DNA, 13 bp, Artificial Sequence
  Oligonucleotide for detection of SNP TSC0057448
ractaacttcaac

SEQ ID NO: 235285 - DNA, 13 bp, Artificial Sequence
  Oligonucleotide for detection of SNP TSC0057448
gttgaaattagty

SEQ ID NO: 235286 - DNA, 13 bp, Artificial Sequence
  Oligonucleotide for detection of SNP TSC0057448
ractaatttcaac

SEQ ID NO: 235287 - DNA, 13 bp, Artificial Sequence
  Oligonucleotide for detection of SNP TSC0057449
taagtaataggty

SEQ ID NO: 235288 - DNA, 13 bp, Artificial Sequence
  Oligonucleotide for detection of SNP TSC0057449
racctattactta

SEQ ID NO: 235289 - DNA, 13 bp, Artificial Sequence
  Oligonucleotide for detection of SNP TSC0057449
taagtattaggty

SEQ ID NO: 235290 - DNA, 13 bp, Artificial Sequence
  Oligonucleotide for detection of SNP TSC0057449
racctaatactta

SEQ ID NO: 235291 - DNA, 13 bp, Artificial Sequence
  Oligonucleotide for detection of SNP TSC0057449
gatttattgttta

SEQ ID NO: 235292 - DNA, 13 bp, Artificial Sequence
  Oligonucleotide for detection of SNP TSC0057449
taaacaataaatc

SEQ ID NO: 235293 - DNA, 13 bp, Artificial Sequence
  Oligonucleotide for detection of SNP TSC0057450
ttaggtttattta

SEQ ID NO: 235294 - DNA, 13 bp, Artificial Sequence
  Oligonucleotide for detection of SNP TSC0057450
taaataaacctaa

SEQ ID NO: 235295 - DNA, 13 bp, Artificial Sequence
  Oligonucleotide for detection of SNP TSC0057450
taaatatatttag

SEQ ID NO: 235296 - DNA, 13 bp, Artificial Sequence
  Oligonucleotide for detection of SNP TSC0057450
ctaaatatattta

SEQ ID NO: 235297 - DNA, 13 bp, Artificial Sequence
  Oligonucleotide for detection of SNP TSC0057450
taaatagatttag

SEQ ID NO: 235298 - DNA, 13 bp, Artificial Sequence
  Oligonucleotide for detection of SNP TSC0057450
ctaaatctattta

SEQ ID NO: 235299 - DNA, 13 bp, Artificial Sequence
  Oligonucleotide for detection of SNP TSC0057454
ttatgtatagatg

SEQ ID NO: 235300 - DNA, 13 bp, Artificial Sequence
  Oligonucleotide for detection of SNP TSC0057454
catctatacataa

SEQ ID NO: 235301 - DNA, 13 bp, Artificial Sequence
  Oligonucleotide for detection of SNP TSC0057454
ttatgtgtagatg

SEQ ID NO: 235302 - DNA, 13 bp, Artificial Sequence
  Oligonucleotide for detection of SNP TSC0057454
catctacacataa

SEQ ID NO: 235303 - DNA, 13 bp, Artificial Sequence
  Oligonucleotide for detection of SNP TSC0057454
ttatgtatagacg

SEQ ID NO: 235304 - DNA, 13 bp, Artificial Sequence
  Oligonucleotide for detection of SNP TSC0057454
cgtctatacataa

SEQ ID NO: 235305 - DNA, 13 bp, Artificial Sequence
  Oligonucleotide for detection of SNP TSC0057454
ttatgcgtagatg

SEQ ID NO: 235306 - DNA, 13 bp, Artificial Sequence
  Oligonucleotide for detection of SNP TSC0057454
catctacgcataa

SEQ ID NO: 235307 - DNA, 13 bp, Artificial Sequence
  Oligonucleotide for detection of SNP TSC0057454
ttatgtgtagacg

SEQ ID NO: 235308 - DNA, 13 bp, Artificial Sequence
  Oligonucleotide for detection of SNP TSC0057454
cgtctacacataa

SEQ ID NO: 235309 - DNA, 13 bp, Artificial Sequence
  Oligonucleotide for detection of SNP TSC0057454
ttatgcgtagacg

SEQ ID NO: 235310 - DNA, 13 bp, Artificial Sequence
  Oligonucleotide for detection of SNP TSC0057454
cgtctacgcataa

SEQ ID NO: 235311 - DNA, 13 bp, Artificial Sequence
  Oligonucleotide for detection of SNP TSC0057454
tgtttgtgtatgg

SEQ ID NO: 235312 - DNA, 13 bp, Artificial Sequence
  Oligonucleotide for detection of SNP TSC0057454
ccatacacaaaca

SEQ ID NO: 235313 - DNA, 13 bp, Artificial Sequence
  Oligonucleotide for detection of SNP TSC0057454
cgtttgtgtatgg

SEQ ID NO: 235314 - DNA, 13 bp, Artificial Sequence
  Oligonucleotide for detection of SNP TSC0057454
ccatacacaaacg

SEQ ID NO: 235315 - DNA, 13 bp, Artificial Sequence
  Oligonucleotide for detection of SNP TSC0057454
tgtttgcgtatgg

SEQ ID NO: 235316 - DNA, 13 bp, Artificial Sequence
  Oligonucleotide for detection of SNP TSC0057454
ccatacgcaaaca

SEQ ID NO: 235317 - DNA, 13 bp, Artificial Sequence
  Oligonucleotide for detection of SNP TSC0057454
cgtttgcgtatgg

SEQ ID NO: 235318 - DNA, 13 bp, Artificial Sequence
  Oligonucleotide for detection of SNP TSC0057454
ccatacgcaaacg

SEQ ID NO: 235319 - DNA, 13 bp, Artificial Sequence
  Oligonucleotide for detection of SNP TSC0000235
ttataggtgagaa

SEQ ID NO: 235320 - DNA, 13 bp, Artificial Sequence
  Oligonucleotide for detection of SNP TSC0000235
ttctcacctataa

SEQ ID NO: 235321 - DNA, 13 bp, Artificial Sequence
  Oligonucleotide for detection of SNP TSC0000235
ttatagatgagaa

SEQ ID NO: 235322 - DNA, 13 bp, Artificial Sequence
  Oligonucleotide for detection of SNP TSC0000235
ttctcatctataa

SEQ ID NO: 235323 - DNA, 13 bp, Artificial Sequence
  Oligonucleotide for detection of SNP TSC0057458
ttgtgatatgata

SEQ ID NO: 235324 - DNA, 13 bp, Artificial Sequence
  Oligonucleotide for detection of SNP TSC0057458
tatcatatcacaa

SEQ ID NO: 235325 - DNA, 13 bp, Artificial Sequence
  Oligonucleotide for detection of SNP TSC0057458
ttgtgagatgata

SEQ ID NO: 235326 - DNA, 13 bp, Artificial Sequence
  Oligonucleotide for detection of SNP TSC0057458
tatcatctcacaa

SEQ ID NO: 235327 - DNA, 13 bp, Artificial Sequence
  Oligonucleotide for detection of SNP TSC0057458
tcgtgatatgata

SEQ ID NO: 235328 - DNA, 13 bp, Artificial Sequence
  Oligonucleotide for detection of SNP TSC0057458
tatcatatcacga

SEQ ID NO: 235329 - DNA, 13 bp, Artificial Sequence
  Oligonucleotide for detection of SNP TSC0057458
tcgtgagatgata

SEQ ID NO: 235330 - DNA, 13 bp, Artificial Sequence
  Oligonucleotide for detection of SNP TSC0057458
tatcatctcacga

SEQ ID NO: 235331 - DNA, 13 bp, Artificial Sequence
  Oligonucleotide for detection of SNP TSC0057458
ttgcgatatgata

SEQ ID NO: 235332 - DNA, 13 bp, Artificial Sequence
  Oligonucleotide for detection of SNP TSC0057458
tatcatatcgcaa

SEQ ID NO: 235333 - DNA, 13 bp, Artificial Sequence
  Oligonucleotide for detection of SNP TSC0057458
ttgcgagatgata

SEQ ID NO: 235334 - DNA, 13 bp, Artificial Sequence
  Oligonucleotide for detection of SNP TSC0057458
tatcatctcgcaa

SEQ ID NO: 235335 - DNA, 13 bp, Artificial Sequence
  Oligonucleotide for detection of SNP TSC0057458
tcgcgatatgata

SEQ ID NO: 235336 - DNA, 13 bp, Artificial Sequence
  Oligonucleotide for detection of SNP TSC0057458
tatcatatcgcga

SEQ ID NO: 235337 - DNA, 13 bp, Artificial Sequence
  Oligonucleotide for detection of SNP TSC0057458
tcgcgagatgata

SEQ ID NO: 235338 - DNA, 13 bp, Artificial Sequence
  Oligonucleotide for detection of SNP TSC0057458
tatcatctcgcga

SEQ ID NO: 235339 - DNA, 13 bp, Artificial Sequence
  Oligonucleotide for detection of SNP TSC0057458
tgttatgttgtga

SEQ ID NO: 235340 - DNA, 13 bp, Artificial Sequence
  Oligonucleotide for detection of SNP TSC0057458
tcacaacataaca

SEQ ID NO: 235341 - DNA, 13 bp, Artificial Sequence
  Oligonucleotide for detection of SNP TSC0057458
tgttatattgtga

SEQ ID NO: 235342 - DNA, 13 bp, Artificial Sequence
  Oligonucleotide for detection of SNP TSC0057458
tcacaatataaca

SEQ ID NO: 235343 - DNA, 13 bp, Artificial Sequence
  Oligonucleotide for detection of SNP TSC0057458
tgttattttgtga

SEQ ID NO: 235344 - DNA, 13 bp, Artificial Sequence
  Oligonucleotide for detection of SNP TSC0057458
tcacaaaataaca

SEQ ID NO: 235345 - DNA, 13 bp, Artificial Sequence
  Oligonucleotide for detection of SNP TSC0057458
tgttatgtcgtga

SEQ ID NO: 235346 - DNA, 13 bp, Artificial Sequence
  Oligonucleotide for detection of SNP TSC0057458
tcacgacataaca

SEQ ID NO: 235347 - DNA, 13 bp, Artificial Sequence
  Oligonucleotide for detection of SNP TSC0057458
tgttatatcgtga

SEQ ID NO: 235348 - DNA, 13 bp, Artificial Sequence
  Oligonucleotide for detection of SNP TSC0057458
tcacgatataaca

SEQ ID NO: 235349 - DNA, 13 bp, Artificial Sequence
  Oligonucleotide for detection of SNP TSC0057458
tgttatttcgtga

SEQ ID NO: 235350 - DNA, 13 bp, Artificial Sequence
  Oligonucleotide for detection of SNP TSC0057458
tcacgaaataaca

SEQ ID NO: 235351 - DNA, 13 bp, Artificial Sequence
  Oligonucleotide for detection of SNP TSC0057458
tgttatgttgcga

SEQ ID NO: 235352 - DNA, 13 bp, Artificial Sequence
  Oligonucleotide for detection of SNP TSC0057458
tcgcaacataaca

SEQ ID NO: 235353 - DNA, 13 bp, Artificial Sequence
  Oligonucleotide for detection of SNP TSC0057458
tgttatattgcga

SEQ ID NO: 235354 - DNA, 13 bp, Artificial Sequence
  Oligonucleotide for detection of SNP TSC0057458
tcgcaatataaca

SEQ ID NO: 235355 - DNA, 13 bp, Artificial Sequence
  Oligonucleotide for detection of SNP TSC0057458
tgttattttgcga

SEQ ID NO: 235356 - DNA, 13 bp, Artificial Sequence
  Oligonucleotide for detection of SNP TSC0057458
tcgcaaaataaca

SEQ ID NO: 235357 - DNA, 13 bp, Artificial Sequence
  Oligonucleotide for detection of SNP TSC0057458
tgttatgtcgcga

SEQ ID NO: 235358 - DNA, 13 bp, Artificial Sequence
  Oligonucleotide for detection of SNP TSC0057458
tcgcgacataaca

SEQ ID NO: 235359 - DNA, 13 bp, Artificial Sequence
  Oligonucleotide for detection of SNP TSC0057458
tgttatatcgcga

SEQ ID NO: 235360 - DNA, 13 bp, Artificial Sequence
  Oligonucleotide for detection of SNP TSC0057458
tcgcgatataaca

SEQ ID NO: 235361 - DNA, 13 bp, Artificial Sequence
  Oligonucleotide for detection of SNP TSC0057458
tgttatttcgcga

SEQ ID NO: 235362 - DNA, 13 bp, Artificial Sequence
  Oligonucleotide for detection of SNP TSC0057458
tcgcgaaataaca

SEQ ID NO: 235363 - DNA, 13 bp, Artificial Sequence
  Oligonucleotide for detection of SNP TSC0057459
atggtataggtta

SEQ ID NO: 235364 - DNA, 13 bp, Artificial Sequence
  Oligonucleotide for detection of SNP TSC0057459
taacctataccat

SEQ ID NO: 235365 - DNA, 13 bp, Artificial Sequence
  Oligonucleotide for detection of SNP TSC0057459
atggtagaggtta

SEQ ID NO: 235366 - DNA, 13 bp, Artificial Sequence
  Oligonucleotide for detection of SNP TSC0057459
taacctctaccat

SEQ ID NO: 235367 - DNA, 13 bp, Artificial Sequence
  Oligonucleotide for detection of SNP TSC0057459
tagtttgtattat

SEQ ID NO: 235368 - DNA, 13 bp, Artificial Sequence
  Oligonucleotide for detection of SNP TSC0057459
ataatacaaacta

SEQ ID NO: 235369 - DNA, 13 bp, Artificial Sequence
  Oligonucleotide for detection of SNP TSC0057459
tagtttatattat

SEQ ID NO: 235370 - DNA, 13 bp, Artificial Sequence
  Oligonucleotide for detection of SNP TSC0057459
ataatataaacta

SEQ ID NO: 235371 - DNA, 13 bp, Artificial Sequence
  Oligonucleotide for detection of SNP TSC0057459
tagtttttattat

SEQ ID NO: 235372 - DNA, 13 bp, Artificial Sequence
  Oligonucleotide for detection of SNP TSC0057459
ataataaaaacta

SEQ ID NO: 235373 - DNA, 13 bp, Artificial Sequence
  Oligonucleotide for detection of SNP TSC0057460
tttttgtgatatg

SEQ ID NO: 235374 - DNA, 13 bp, Artificial Sequence
  Oligonucleotide for detection of SNP TSC0057460
catatcacaaaaa

SEQ ID NO: 235375 - DNA, 13 bp, Artificial Sequence
  Oligonucleotide for detection of SNP TSC0057460
ttttcgtgatatg

SEQ ID NO: 235376 - DNA, 13 bp, Artificial Sequence
  Oligonucleotide for detection of SNP TSC0057460
catatcacgaaaa

SEQ ID NO: 235377 - DNA, 13 bp, Artificial Sequence
  Oligonucleotide for detection of SNP TSC0057460
tttttgcgatatg

SEQ ID NO: 235378 - DNA, 13 bp, Artificial Sequence
  Oligonucleotide for detection of SNP TSC0057460
catatcgcaaaaa

SEQ ID NO: 235379 - DNA, 13 bp, Artificial Sequence
  Oligonucleotide for detection of SNP TSC0057460
ttttcgcgatatg

SEQ ID NO: 235380 - DNA, 13 bp, Artificial Sequence
  Oligonucleotide for detection of SNP TSC0057460
catatcgcgaaaa

SEQ ID NO: 235381 - DNA, 13 bp, Artificial Sequence
  Oligonucleotide for detection of SNP TSC0057460
tatgttgtgaaaa

SEQ ID NO: 235382 - DNA, 13 bp, Artificial Sequence
  Oligonucleotide for detection of SNP TSC0057460
ttttcacaacata

SEQ ID NO: 235383 - DNA, 13 bp, Artificial Sequence
  Oligonucleotide for detection of SNP TSC0057460
tatgttatgaaaa

SEQ ID NO: 235384 - DNA, 13 bp, Artificial Sequence
  Oligonucleotide for detection of SNP TSC0057460
ttttcataacata

SEQ ID NO: 235385 - DNA, 13 bp, Artificial Sequence
  Oligonucleotide for detection of SNP TSC0057460
tatgtcgtgaaaa

SEQ ID NO: 235386 - DNA, 13 bp, Artificial Sequence
  Oligonucleotide for detection of SNP TSC0057460
ttttcacgacata

SEQ ID NO: 235387 - DNA, 13 bp, Artificial Sequence
  Oligonucleotide for detection of SNP TSC0057460
tatgttacgaaaa

SEQ ID NO: 235388 - DNA, 13 bp, Artificial Sequence
  Oligonucleotide for detection of SNP TSC0057460
ttttcgtaacata

SEQ ID NO: 235389 - DNA, 13 bp, Artificial Sequence
  Oligonucleotide for detection of SNP TSC0057460
tatgttgcgaaaa

SEQ ID NO: 235390 - DNA, 13 bp, Artificial Sequence
  Oligonucleotide for detection of SNP TSC0057460
ttttcgcaacata

SEQ ID NO: 235391 - DNA, 13 bp, Artificial Sequence
  Oligonucleotide for detection of SNP TSC0057460
tatgtcgcgaaaa

SEQ ID NO: 235392 - DNA, 13 bp, Artificial Sequence
  Oligonucleotide for detection of SNP TSC0057460
ttttcgcgacata

SEQ ID NO: 235393 - DNA, 13 bp, Artificial Sequence
  Oligonucleotide for detection of SNP TSC0057462
ggattaatgaaga

SEQ ID NO: 235394 - DNA, 13 bp, Artificial Sequence
  Oligonucleotide for detection of SNP TSC0057462
tcttcattaatcc

SEQ ID NO: 235395 - DNA, 13 bp, Artificial Sequence
  Oligonucleotide for detection of SNP TSC0057462
ggattagtgaaga

SEQ ID NO: 235396 - DNA, 13 bp, Artificial Sequence
  Oligonucleotide for detection of SNP TSC0057462
tcttcactaatcc

SEQ ID NO: 235397 - DNA, 13 bp, Artificial Sequence
  Oligonucleotide for detection of SNP TSC0057462
ggattaacgaaga

SEQ ID NO: 235398 - DNA, 13 bp, Artificial Sequence
  Oligonucleotide for detection of SNP TSC0057462
tcttcgttaatcc

SEQ ID NO: 235399 - DNA, 13 bp, Artificial Sequence
  Oligonucleotide for detection of SNP TSC0057462
ggattagcgaaga

SEQ ID NO: 235400 - DNA, 13 bp, Artificial Sequence
  Oligonucleotide for detection of SNP TSC0057462
tcttcgctaatcc

SEQ ID NO: 235401 - DNA, 13 bp, Artificial Sequence
  Oligonucleotide for detection of SNP TSC0057463
gattagtgaagag

SEQ ID NO: 235402 - DNA, 13 bp, Artificial Sequence
  Oligonucleotide for detection of SNP TSC0057463
ctcttcactaatc

SEQ ID NO: 235403 - DNA, 13 bp, Artificial Sequence
  Oligonucleotide for detection of SNP TSC0057463
gattagcgaagag

SEQ ID NO: 235404 - DNA, 13 bp, Artificial Sequence
  Oligonucleotide for detection of SNP TSC0057463
ctcttcgctaatc

SEQ ID NO: 235405 - DNA, 13 bp, Artificial Sequence
  Oligonucleotide for detection of SNP TSC0057464
tttaaagggagtg

SEQ ID NO: 235406 - DNA, 13 bp, Artificial Sequence
  Oligonucleotide for detection of SNP TSC0057464
cactccctttaaa

SEQ ID NO: 235407 - DNA, 13 bp, Artificial Sequence
  Oligonucleotide for detection of SNP TSC0057464
tttaaaaggagtg

SEQ ID NO: 235408 - DNA, 13 bp, Artificial Sequence
  Oligonucleotide for detection of SNP TSC0057464
cactccttttaaa

SEQ ID NO: 235409 - DNA, 13 bp, Artificial Sequence
  Oligonucleotide for detection of SNP TSC0010188
attagtatgattg

SEQ ID NO: 235410 - DNA, 13 bp, Artificial Sequence
  Oligonucleotide for detection of SNP TSC0010188
caatcatactaat

SEQ ID NO: 235411 - DNA, 13 bp, Artificial Sequence
  Oligonucleotide for detection of SNP TSC0010188
attagtgtgattg

SEQ ID NO: 235412 - DNA, 13 bp, Artificial Sequence
  Oligonucleotide for detection of SNP TSC0010188
caatcacactaat

SEQ ID NO: 235413 - DNA, 13 bp, Artificial Sequence
  Oligonucleotide for detection of SNP TSC0010188
attagcgtgattg

SEQ ID NO: 235414 - DNA, 13 bp, Artificial Sequence
  Oligonucleotide for detection of SNP TSC0010188
caatcacgctaat

SEQ ID NO: 235415 - DNA, 13 bp, Artificial Sequence
  Oligonucleotide for detection of SNP TSC0010188
tagttatgttaat

SEQ ID NO: 235416 - DNA, 13 bp, Artificial Sequence
  Oligonucleotide for detection of SNP TSC0010188
attaacataacta

SEQ ID NO: 235417 - DNA, 13 bp, Artificial Sequence
  Oligonucleotide for detection of SNP TSC0010188
tagttacgttaat

SEQ ID NO: 235418 - DNA, 13 bp, Artificial Sequence
  Oligonucleotide for detection of SNP TSC0010188
attaacgtaacta

SEQ ID NO: 235419 - DNA, 13 bp, Artificial Sequence
  Oligonucleotide for detection of SNP TSC0057467
tagattgttagaa

SEQ ID NO: 235420 - DNA, 13 bp, Artificial Sequence
  Oligonucleotide for detection of SNP TSC0057467
ttctaacaatcta

SEQ ID NO: 235421 - DNA, 13 bp, Artificial Sequence
  Oligonucleotide for detection of SNP TSC0057467
tagattattagaa

SEQ ID NO: 235422 - DNA, 13 bp, Artificial Sequence
  Oligonucleotide for detection of SNP TSC0057467
ttctaataatcta

SEQ ID NO: 235423 - DNA, 13 bp, Artificial Sequence
  Oligonucleotide for detection of SNP TSC0057468
ttggttatgaaay

SEQ ID NO: 235424 - DNA, 13 bp, Artificial Sequence
  Oligonucleotide for detection of SNP TSC0057468
rtttcataaccaa

SEQ ID NO: 235425 - DNA, 13 bp, Artificial Sequence
  Oligonucleotide for detection of SNP TSC0057468
ttggttttgaaay

SEQ ID NO: 235426 - DNA, 13 bp, Artificial Sequence
  Oligonucleotide for detection of SNP TSC0057468
rtttcaaaaccaa

SEQ ID NO: 235427 - DNA, 13 bp, Artificial Sequence
  Oligonucleotide for detection of SNP TSC0057468
gttttataattaa

SEQ ID NO: 235428 - DNA, 13 bp, Artificial Sequence
  Oligonucleotide for detection of SNP TSC0057468
ttaattataaaac

SEQ ID NO: 235429 - DNA, 13 bp, Artificial Sequence
  Oligonucleotide for detection of SNP TSC0057468
gttttaaaattaa

SEQ ID NO: 235430 - DNA, 13 bp, Artificial Sequence
  Oligonucleotide for detection of SNP TSC0057468
ttaattttaaaac

SEQ ID NO: 235431 - DNA, 13 bp, Artificial Sequence
  Oligonucleotide for detection of SNP TSC0057470
gaaaaatgaagta

SEQ ID NO: 235432 - DNA, 13 bp, Artificial Sequence
  Oligonucleotide for detection of SNP TSC0057470
tacttcatttttc

SEQ ID NO: 235433 - DNA, 13 bp, Artificial Sequence
  Oligonucleotide for detection of SNP TSC0057470
gaaaaacgaagta

SEQ ID NO: 235434 - DNA, 13 bp, Artificial Sequence
  Oligonucleotide for detection of SNP TSC0057470
tacttcgtttttc

SEQ ID NO: 235435 - DNA, 13 bp, Artificial Sequence
  Oligonucleotide for detection of SNP TSC0057472
ttaggggtttttt

SEQ ID NO: 235436 - DNA, 13 bp, Artificial Sequence
  Oligonucleotide for detection of SNP TSC0057472
aaaaaacccctaa

SEQ ID NO: 235437 - DNA, 13 bp, Artificial Sequence
  Oligonucleotide for detection of SNP TSC0057473
gggagatggaagt

SEQ ID NO: 235438 - DNA, 13 bp, Artificial Sequence
  Oligonucleotide for detection of SNP TSC0057473
acttccatctccc

SEQ ID NO: 235439 - DNA, 13 bp, Artificial Sequence
  Oligonucleotide for detection of SNP TSC0057473
gggagagggaagt

SEQ ID NO: 235440 - DNA, 13 bp, Artificial Sequence
  Oligonucleotide for detection of SNP TSC0057473
acttccctctccc

SEQ ID NO: 235441 - DNA, 13 bp, Artificial Sequence
  Oligonucleotide for detection of SNP TSC0057474
tatatggaaaatg

SEQ ID NO: 235442 - DNA, 13 bp, Artificial Sequence
  Oligonucleotide for detection of SNP TSC0057474
cattttccatata

SEQ ID NO: 235443 - DNA, 13 bp, Artificial Sequence
  Oligonucleotide for detection of SNP TSC0057474
tatatgaaaaatg

SEQ ID NO: 235444 - DNA, 13 bp, Artificial Sequence
  Oligonucleotide for detection of SNP TSC0057474
catttttcatata

SEQ ID NO: 235445 - DNA, 13 bp, Artificial Sequence
  Oligonucleotide for detection of SNP TSC0057475
tatggatgtttta

SEQ ID NO: 235446 - DNA, 13 bp, Artificial Sequence
  Oligonucleotide for detection of SNP TSC0057475
taaaacatccata

SEQ ID NO: 235447 - DNA, 13 bp, Artificial Sequence
  Oligonucleotide for detection of SNP TSC0057475
tatggacgtttta

SEQ ID NO: 235448 - DNA, 13 bp, Artificial Sequence
  Oligonucleotide for detection of SNP TSC0057475
taaaacgtccata

SEQ ID NO: 235449 - DNA, 13 bp, Artificial Sequence
  Oligonucleotide for detection of SNP TSC0057475
tggagtgtttatg

SEQ ID NO: 235450 - DNA, 13 bp, Artificial Sequence
  Oligonucleotide for detection of SNP TSC0057475
cataaacactcca

SEQ ID NO: 235451 - DNA, 13 bp, Artificial Sequence
  Oligonucleotide for detection of SNP TSC0057475
tggagtatttatg

SEQ ID NO: 235452 - DNA, 13 bp, Artificial Sequence
  Oligonucleotide for detection of SNP TSC0057475
cataaatactcca

SEQ ID NO: 235453 - DNA, 13 bp, Artificial Sequence
  Oligonucleotide for detection of SNP TSC0057475
tggagcgtttatg

SEQ ID NO: 235454 - DNA, 13 bp, Artificial Sequence
  Oligonucleotide for detection of SNP TSC0057475
cataaacgctcca

SEQ ID NO: 235455 - DNA, 13 bp, Artificial Sequence
  Oligonucleotide for detection of SNP TSC0057477
tgaattgtttttg

SEQ ID NO: 235456 - DNA, 13 bp, Artificial Sequence
  Oligonucleotide for detection of SNP TSC0057477
caaaaacaattca

SEQ ID NO: 235457 - DNA, 13 bp, Artificial Sequence
  Oligonucleotide for detection of SNP TSC0057483
gtgataaattaat

SEQ ID NO: 235458 - DNA, 13 bp, Artificial Sequence
  Oligonucleotide for detection of SNP TSC0057483
attaatttatcac

SEQ ID NO: 235459 - DNA, 13 bp, Artificial Sequence
  Oligonucleotide for detection of SNP TSC0057483
gtgatatattaat

SEQ ID NO: 235460 - DNA, 13 bp, Artificial Sequence
  Oligonucleotide for detection of SNP TSC0057483
attaatatatcac

SEQ ID NO: 235461 - DNA, 13 bp, Artificial Sequence
  Oligonucleotide for detection of SNP TSC0057483
attggtttattay

SEQ ID NO: 235462 - DNA, 13 bp, Artificial Sequence
  Oligonucleotide for detection of SNP TSC0057483
rtaataaaccaat

SEQ ID NO: 235463 - DNA, 13 bp, Artificial Sequence
  Oligonucleotide for detection of SNP TSC0057483
attggtgtattay

SEQ ID NO: 235464 - DNA, 13 bp, Artificial Sequence
  Oligonucleotide for detection of SNP TSC0057483
rtaatacaccaat

SEQ ID NO: 235465 - DNA, 13 bp, Artificial Sequence
  Oligonucleotide for detection of SNP TSC0057485
aataggaggtttg

SEQ ID NO: 235466 - DNA, 13 bp, Artificial Sequence
  Oligonucleotide for detection of SNP TSC0057485
caaacctcctatt

SEQ ID NO: 235467 - DNA, 13 bp, Artificial Sequence
  Oligonucleotide for detection of SNP TSC0057485
aataggtggtttg

SEQ ID NO: 235468 - DNA, 13 bp, Artificial Sequence
  Oligonucleotide for detection of SNP TSC0057485
caaaccacctatt

SEQ ID NO: 235469 - DNA, 13 bp, Artificial Sequence
  Oligonucleotide for detection of SNP TSC0057485
aataggcggtttg

SEQ ID NO: 235470 - DNA, 13 bp, Artificial Sequence
  Oligonucleotide for detection of SNP TSC0057485
caaaccgcctatt

SEQ ID NO: 235471 - DNA, 13 bp, Artificial Sequence
  Oligonucleotide for detection of SNP TSC0057490
ttttattgtaaat

SEQ ID NO: 235472 - DNA, 13 bp, Artificial Sequence
  Oligonucleotide for detection of SNP TSC0057490
atttacaataaaa

SEQ ID NO: 235473 - DNA, 13 bp, Artificial Sequence
  Oligonucleotide for detection of SNP TSC0057490
ttttatcgtaaat

SEQ ID NO: 235474 - DNA, 13 bp, Artificial Sequence
  Oligonucleotide for detection of SNP TSC0057490
atttacgataaaa

SEQ ID NO: 235475 - DNA, 13 bp, Artificial Sequence
  Oligonucleotide for detection of SNP TSC0057490
atttgtggtggag

SEQ ID NO: 235476 - DNA, 13 bp, Artificial Sequence
  Oligonucleotide for detection of SNP TSC0057490
ctccaccacaaat

SEQ ID NO: 235477 - DNA, 13 bp, Artificial Sequence
  Oligonucleotide for detection of SNP TSC0057490
atttgtagtggag

SEQ ID NO: 235478 - DNA, 13 bp, Artificial Sequence
  Oligonucleotide for detection of SNP TSC0057490
ctccactacaaat

SEQ ID NO: 235479 - DNA, 13 bp, Artificial Sequence
  Oligonucleotide for detection of SNP TSC0057490
atttgcggtggag

SEQ ID NO: 235480 - DNA, 13 bp, Artificial Sequence
  Oligonucleotide for detection of SNP TSC0057490
ctccaccgcaaat

SEQ ID NO: 235481 - DNA, 13 bp, Artificial Sequence
  Oligonucleotide for detection of SNP TSC0057493
aaaattattgaga

SEQ ID NO: 235482 - DNA, 13 bp, Artificial Sequence
  Oligonucleotide for detection of SNP TSC0057493
tctcaataatttt

SEQ ID NO: 235483 - DNA, 13 bp, Artificial Sequence
  Oligonucleotide for detection of SNP TSC0057493
aaaatttttgaga

SEQ ID NO: 235484 - DNA, 13 bp, Artificial Sequence
  Oligonucleotide for detection of SNP TSC0057493
tctcaaaaatttt

SEQ ID NO: 235485 - DNA, 13 bp, Artificial Sequence
  Oligonucleotide for detection of SNP TSC0057493
ttttagtgatttt

SEQ ID NO: 235486 - DNA, 13 bp, Artificial Sequence
  Oligonucleotide for detection of SNP TSC0057493
aaaatcactaaaa

SEQ ID NO: 235487 - DNA, 13 bp, Artificial Sequence
  Oligonucleotide for detection of SNP TSC0057493
ttttagagatttt

SEQ ID NO: 235488 - DNA, 13 bp, Artificial Sequence
  Oligonucleotide for detection of SNP TSC0057493
aaaatctctaaaa

SEQ ID NO: 235489 - DNA, 13 bp, Artificial Sequence
  Oligonucleotide for detection of SNP TSC0057494
ttataaattaata

SEQ ID NO: 235490 - DNA, 13 bp, Artificial Sequence
  Oligonucleotide for detection of SNP TSC0057494
tattaatttataa

SEQ ID NO: 235491 - DNA, 13 bp, Artificial Sequence
  Oligonucleotide for detection of SNP TSC0057494
ttataagttaata

SEQ ID NO: 235492 - DNA, 13 bp, Artificial Sequence
  Oligonucleotide for detection of SNP TSC0057494
tattaacttataa

SEQ ID NO: 235493 - DNA, 13 bp, Artificial Sequence
  Oligonucleotide for detection of SNP TSC0057495
agtgattggaaga

SEQ ID NO: 235494 - DNA, 13 bp, Artificial Sequence
  Oligonucleotide for detection of SNP TSC0057495
tcttccaatcact

SEQ ID NO: 235495 - DNA, 13 bp, Artificial Sequence
  Oligonucleotide for detection of SNP TSC0057495
agtgatcggaaga

SEQ ID NO: 235496 - DNA, 13 bp, Artificial Sequence
  Oligonucleotide for detection of SNP TSC0057495
tcttccgatcact

SEQ ID NO: 235497 - DNA, 13 bp, Artificial Sequence
  Oligonucleotide for detection of SNP TSC0057498
tcgttagtaatty

SEQ ID NO: 235498 - DNA, 13 bp, Artificial Sequence
  Oligonucleotide for detection of SNP TSC0057498
raattactaacga

SEQ ID NO: 235499 - DNA, 13 bp, Artificial Sequence
  Oligonucleotide for detection of SNP TSC0057498
tcgttaataatty

SEQ ID NO: 235500 - DNA, 13 bp, Artificial Sequence
  Oligonucleotide for detection of SNP TSC0057498
raattattaacga

SEQ ID NO: 235501 - DNA, 13 bp, Artificial Sequence
  Oligonucleotide for detection of SNP TSC0057499
ttagattagtttt

SEQ ID NO: 235502 - DNA, 13 bp, Artificial Sequence
  Oligonucleotide for detection of SNP TSC0057499
aaaactaatctaa

SEQ ID NO: 235503 - DNA, 13 bp, Artificial Sequence
  Oligonucleotide for detection of SNP TSC0057499
ttagatgagtttt

SEQ ID NO: 235504 - DNA, 13 bp, Artificial Sequence
  Oligonucleotide for detection of SNP TSC0057499
aaaactcatctaa

SEQ ID NO: 235505 - DNA, 13 bp, Artificial Sequence
  Oligonucleotide for detection of SNP TSC0057499
aaagttaatttga

SEQ ID NO: 235506 - DNA, 13 bp, Artificial Sequence
  Oligonucleotide for detection of SNP TSC0057499
tcaaattaacttt

SEQ ID NO: 235507 - DNA, 13 bp, Artificial Sequence
  Oligonucleotide for detection of SNP TSC0057499
aaagtttatttga

SEQ ID NO: 235508 - DNA, 13 bp, Artificial Sequence
  Oligonucleotide for detection of SNP TSC0057499
tcaaataaacttt

SEQ ID NO: 235509 - DNA, 13 bp, Artificial Sequence
  Oligonucleotide for detection of SNP TSC0004713
gaaaggtgggagt

SEQ ID NO: 235510 - DNA, 13 bp, Artificial Sequence
  Oligonucleotide for detection of SNP TSC0004713
actcccacctttc

SEQ ID NO: 235511 - DNA, 13 bp, Artificial Sequence
  Oligonucleotide for detection of SNP TSC0004713
gaaaggcgggagt

SEQ ID NO: 235512 - DNA, 13 bp, Artificial Sequence
  Oligonucleotide for detection of SNP TSC0004713
actcccgcctttc

SEQ ID NO: 235513 - DNA, 13 bp, Artificial Sequence
  Oligonucleotide for detection of SNP TSC0004714
atttgggtagtga

SEQ ID NO: 235514 - DNA, 13 bp, Artificial Sequence
  Oligonucleotide for detection of SNP TSC0004714
tcactacccaaat

SEQ ID NO: 235515 - DNA, 13 bp, Artificial Sequence
  Oligonucleotide for detection of SNP TSC0004714
atttggatagtga

SEQ ID NO: 235516 - DNA, 13 bp, Artificial Sequence
  Oligonucleotide for detection of SNP TSC0004714
tcactatccaaat

SEQ ID NO: 235517 - DNA, 13 bp, Artificial Sequence
  Oligonucleotide for detection of SNP TSC0057502
atattaatttaaa

SEQ ID NO: 235518 - DNA, 13 bp, Artificial Sequence
  Oligonucleotide for detection of SNP TSC0057502
tttaaattaatat

SEQ ID NO: 235519 - DNA, 13 bp, Artificial Sequence
  Oligonucleotide for detection of SNP TSC0057502
atattattttaaa

SEQ ID NO: 235520 - DNA, 13 bp, Artificial Sequence
  Oligonucleotide for detection of SNP TSC0057502
tttaaaataatat

SEQ ID NO: 235521 - DNA, 13 bp, Artificial Sequence
  Oligonucleotide for detection of SNP TSC0057502
tttgggttaatgt

SEQ ID NO: 235522 - DNA, 13 bp, Artificial Sequence
  Oligonucleotide for detection of SNP TSC0057502
acattaacccaaa

SEQ ID NO: 235523 - DNA, 13 bp, Artificial Sequence
  Oligonucleotide for detection of SNP TSC0057502
tttgggataatgt

SEQ ID NO: 235524 - DNA, 13 bp, Artificial Sequence
  Oligonucleotide for detection of SNP TSC0057502
acattatcccaaa

SEQ ID NO: 235525 - DNA, 13 bp, Artificial Sequence
  Oligonucleotide for detection of SNP TSC0057503
tataataatatat

SEQ ID NO: 235526 - DNA, 13 bp, Artificial Sequence
  Oligonucleotide for detection of SNP TSC0057503
atatattattata

SEQ ID NO: 235527 - DNA, 13 bp, Artificial Sequence
  Oligonucleotide for detection of SNP TSC0057503
tataattatatat

SEQ ID NO: 235528 - DNA, 13 bp, Artificial Sequence
  Oligonucleotide for detection of SNP TSC0057503
atatataattata

SEQ ID NO: 235529 - DNA, 13 bp, Artificial Sequence
  Oligonucleotide for detection of SNP TSC0057503
atgtgtaattgta

SEQ ID NO: 235530 - DNA, 13 bp, Artificial Sequence
  Oligonucleotide for detection of SNP TSC0057503
tacaattacacat

SEQ ID NO: 235531 - DNA, 13 bp, Artificial Sequence
  Oligonucleotide for detection of SNP TSC0057504
aaagaatagagtt

SEQ ID NO: 235532 - DNA, 13 bp, Artificial Sequence
  Oligonucleotide for detection of SNP TSC0057504
aactctattcttt

SEQ ID NO: 235533 - DNA, 13 bp, Artificial Sequence
  Oligonucleotide for detection of SNP TSC0057504
aaagaagagagtt

SEQ ID NO: 235534 - DNA, 13 bp, Artificial Sequence
  Oligonucleotide for detection of SNP TSC0057504
aactctcttcttt

SEQ ID NO: 235535 - DNA, 13 bp, Artificial Sequence
  Oligonucleotide for detection of SNP TSC0057504
agttttgtttttt

SEQ ID NO: 235536 - DNA, 13 bp, Artificial Sequence
  Oligonucleotide for detection of SNP TSC0057504
aaaaaacaaaact

SEQ ID NO: 235537 - DNA, 13 bp, Artificial Sequence
  Oligonucleotide for detection of SNP TSC0057504
agttttttttttt

SEQ ID NO: 235538 - DNA, 13 bp, Artificial Sequence
  Oligonucleotide for detection of SNP TSC0057504
aaaaaaaaaaact

SEQ ID NO: 235539 - DNA, 13 bp, Artificial Sequence
  Oligonucleotide for detection of SNP TSC0057505
tatggtgtagata

SEQ ID NO: 235540 - DNA, 13 bp, Artificial Sequence
  Oligonucleotide for detection of SNP TSC0057505
tatctacaccata

SEQ ID NO: 235541 - DNA, 13 bp, Artificial Sequence
  Oligonucleotide for detection of SNP TSC0057505
tatggtatagata

SEQ ID NO: 235542 - DNA, 13 bp, Artificial Sequence
  Oligonucleotide for detection of SNP TSC0057505
tatctataccata

SEQ ID NO: 235543 - DNA, 13 bp, Artificial Sequence
  Oligonucleotide for detection of SNP TSC0057505
tacggtgtagata

SEQ ID NO: 235544 - DNA, 13 bp, Artificial Sequence
  Oligonucleotide for detection of SNP TSC0057505
tatctacaccgta

SEQ ID NO: 235545 - DNA, 13 bp, Artificial Sequence
  Oligonucleotide for detection of SNP TSC0057505
tacggtatagata

SEQ ID NO: 235546 - DNA, 13 bp, Artificial Sequence
  Oligonucleotide for detection of SNP TSC0057505
tatctataccgta

SEQ ID NO: 235547 - DNA, 13 bp, Artificial Sequence
  Oligonucleotide for detection of SNP TSC0057507
atagtaaattggy

SEQ ID NO: 235548 - DNA, 13 bp, Artificial Sequence
  Oligonucleotide for detection of SNP TSC0057507
rccaatttactat

SEQ ID NO: 235549 - DNA, 13 bp, Artificial Sequence
  Oligonucleotide for detection of SNP TSC0057507
atagtatattggy

SEQ ID NO: 235550 - DNA, 13 bp, Artificial Sequence
  Oligonucleotide for detection of SNP TSC0057507
rccaatatactat

SEQ ID NO: 235551 - DNA, 13 bp, Artificial Sequence
  Oligonucleotide for detection of SNP TSC0057507
gttagtttgttat

SEQ ID NO: 235552 - DNA, 13 bp, Artificial Sequence
  Oligonucleotide for detection of SNP TSC0057507
ataacaaactaac

SEQ ID NO: 235553 - DNA, 13 bp, Artificial Sequence
  Oligonucleotide for detection of SNP TSC0057507
gttagtgtgttat

SEQ ID NO: 235554 - DNA, 13 bp, Artificial Sequence
  Oligonucleotide for detection of SNP TSC0057507
ataacacactaac

SEQ ID NO: 235555 - DNA, 13 bp, Artificial Sequence
  Oligonucleotide for detection of SNP TSC0057508
ataggagggtata

SEQ ID NO: 235556 - DNA, 13 bp, Artificial Sequence
  Oligonucleotide for detection of SNP TSC0057508
tataccctcctat

SEQ ID NO: 235557 - DNA, 13 bp, Artificial Sequence
  Oligonucleotide for detection of SNP TSC0057508
ataggaaggtata

SEQ ID NO: 235558 - DNA, 13 bp, Artificial Sequence
  Oligonucleotide for detection of SNP TSC0057508
tataccttcctat

SEQ ID NO: 235559 - DNA, 13 bp, Artificial Sequence
  Oligonucleotide for detection of SNP TSC0057509
tgaaaagataaaa

SEQ ID NO: 235560 - DNA, 13 bp, Artificial Sequence
  Oligonucleotide for detection of SNP TSC0057509
ttttatcttttca

SEQ ID NO: 235561 - DNA, 13 bp, Artificial Sequence
  Oligonucleotide for detection of SNP TSC0057509
tgaaaaaataaaa

SEQ ID NO: 235562 - DNA, 13 bp, Artificial Sequence
  Oligonucleotide for detection of SNP TSC0057509
ttttattttttca

SEQ ID NO: 235563 - DNA, 13 bp, Artificial Sequence
  Oligonucleotide for detection of SNP TSC0004800
tgtgatattatat

SEQ ID NO: 235564 - DNA, 13 bp, Artificial Sequence
  Oligonucleotide for detection of SNP TSC0004800
atataatatcaca

SEQ ID NO: 235565 - DNA, 13 bp, Artificial Sequence
  Oligonucleotide for detection of SNP TSC0004800
tgtgattttatat

SEQ ID NO: 235566 - DNA, 13 bp, Artificial Sequence
  Oligonucleotide for detection of SNP TSC0004800
atataaaatcaca

SEQ ID NO: 235567 - DNA, 13 bp, Artificial Sequence
  Oligonucleotide for detection of SNP TSC0004800
atatgatattata

SEQ ID NO: 235568 - DNA, 13 bp, Artificial Sequence
  Oligonucleotide for detection of SNP TSC0004800
tataatatcatat

SEQ ID NO: 235569 - DNA, 13 bp, Artificial Sequence
  Oligonucleotide for detection of SNP TSC0004800
atatgaaattata

SEQ ID NO: 235570 - DNA, 13 bp, Artificial Sequence
  Oligonucleotide for detection of SNP TSC0004800
tataatttcatat

SEQ ID NO: 235571 - DNA, 13 bp, Artificial Sequence
  Oligonucleotide for detection of SNP TSC0006429
aattgatggttta

SEQ ID NO: 235572 - DNA, 13 bp, Artificial Sequence
  Oligonucleotide for detection of SNP TSC0006429
taaaccatcaatt

SEQ ID NO: 235573 - DNA, 13 bp, Artificial Sequence
  Oligonucleotide for detection of SNP TSC0006429
aattgagggttta

SEQ ID NO: 235574 - DNA, 13 bp, Artificial Sequence
  Oligonucleotide for detection of SNP TSC0006429
taaaccctcaatt

SEQ ID NO: 235575 - DNA, 13 bp, Artificial Sequence
  Oligonucleotide for detection of SNP TSC0006429
tagatttttagtt

SEQ ID NO: 235576 - DNA, 13 bp, Artificial Sequence
  Oligonucleotide for detection of SNP TSC0006429
aactaaaaatcta

SEQ ID NO: 235577 - DNA, 13 bp, Artificial Sequence
  Oligonucleotide for detection of SNP TSC0057511
gtaaatatattgt

SEQ ID NO: 235578 - DNA, 13 bp, Artificial Sequence
  Oligonucleotide for detection of SNP TSC0057511
acaatatatttac

SEQ ID NO: 235579 - DNA, 13 bp, Artificial Sequence
  Oligonucleotide for detection of SNP TSC0057511
gtaaatgtattgt

SEQ ID NO: 235580 - DNA, 13 bp, Artificial Sequence
  Oligonucleotide for detection of SNP TSC0057511
acaatacatttac

SEQ ID NO: 235581 - DNA, 13 bp, Artificial Sequence
  Oligonucleotide for detection of SNP TSC0057515
ggaagataaggga

SEQ ID NO: 235582 - DNA, 13 bp, Artificial Sequence
  Oligonucleotide for detection of SNP TSC0057515
tcccttatcttcc

SEQ ID NO: 235583 - DNA, 13 bp, Artificial Sequence
  Oligonucleotide for detection of SNP TSC0057515
ggaagagaaggga

SEQ ID NO: 235584 - DNA, 13 bp, Artificial Sequence
  Oligonucleotide for detection of SNP TSC0057515
tcccttctcttcc

SEQ ID NO: 235585 - DNA, 13 bp, Artificial Sequence
  Oligonucleotide for detection of SNP TSC0057516
tttgtagagttgt

SEQ ID NO: 235586 - DNA, 13 bp, Artificial Sequence
  Oligonucleotide for detection of SNP TSC0057516
acaactctacaaa

SEQ ID NO: 235587 - DNA, 13 bp, Artificial Sequence
  Oligonucleotide for detection of SNP TSC0057516
tttgtaaagttgt

SEQ ID NO: 235588 - DNA, 13 bp, Artificial Sequence
  Oligonucleotide for detection of SNP TSC0057516
acaactttacaaa

SEQ ID NO: 235589 - DNA, 13 bp, Artificial Sequence
  Oligonucleotide for detection of SNP TSC0057519
taggaagttatta

SEQ ID NO: 235590 - DNA, 13 bp, Artificial Sequence
  Oligonucleotide for detection of SNP TSC0057519
taataacttccta

SEQ ID NO: 235591 - DNA, 13 bp, Artificial Sequence
  Oligonucleotide for detection of SNP TSC0057519
taggaaattatta

SEQ ID NO: 235592 - DNA, 13 bp, Artificial Sequence
  Oligonucleotide for detection of SNP TSC0057519
taataatttccta

SEQ ID NO: 235593 - DNA, 13 bp, Artificial Sequence
  Oligonucleotide for detection of SNP TSC0057520
ttatgaagtgggt

SEQ ID NO: 235594 - DNA, 13 bp, Artificial Sequence
  Oligonucleotide for detection of SNP TSC0057520
acccacttcataa

SEQ ID NO: 235595 - DNA, 13 bp, Artificial Sequence
  Oligonucleotide for detection of SNP TSC0057520
ttatgaggtgggt

SEQ ID NO: 235596 - DNA, 13 bp, Artificial Sequence
  Oligonucleotide for detection of SNP TSC0057520
acccacctcataa

SEQ ID NO: 235597 - DNA, 13 bp, Artificial Sequence
  Oligonucleotide for detection of SNP TSC0057521
tgaagtgtaagtt

SEQ ID NO: 235598 - DNA, 13 bp, Artificial Sequence
  Oligonucleotide for detection of SNP TSC0057521
aacttacacttca

SEQ ID NO: 235599 - DNA, 13 bp, Artificial Sequence
  Oligonucleotide for detection of SNP TSC0057521
tgaagtataagtt

SEQ ID NO: 235600 - DNA, 13 bp, Artificial Sequence
  Oligonucleotide for detection of SNP TSC0057521
aacttatacttca

SEQ ID NO: 235601 - DNA, 13 bp, Artificial Sequence
  Oligonucleotide for detection of SNP TSC0057521
tgaagcgtaagtt

SEQ ID NO: 235602 - DNA, 13 bp, Artificial Sequence
  Oligonucleotide for detection of SNP TSC0057521
aacttacgcttca

SEQ ID NO: 235603 - DNA, 13 bp, Artificial Sequence
  Oligonucleotide for detection of SNP TSC0057524
attaatatgtagg

SEQ ID NO: 235604 - DNA, 13 bp, Artificial Sequence
  Oligonucleotide for detection of SNP TSC0057524
cctacatattaat

SEQ ID NO: 235605 - DNA, 13 bp, Artificial Sequence
  Oligonucleotide for detection of SNP TSC0057524
attaatgtgtagg

SEQ ID NO: 235606 - DNA, 13 bp, Artificial Sequence
  Oligonucleotide for detection of SNP TSC0057524
cctacacattaat

SEQ ID NO: 235607 - DNA, 13 bp, Artificial Sequence
  Oligonucleotide for detection of SNP TSC0057524
attaacgtgtagg

SEQ ID NO: 235608 - DNA, 13 bp, Artificial Sequence
  Oligonucleotide for detection of SNP TSC0057524
cctacacgttaat

SEQ ID NO: 235609 - DNA, 13 bp, Artificial Sequence
  Oligonucleotide for detection of SNP TSC0057524
tttgtatgttggt

SEQ ID NO: 235610 - DNA, 13 bp, Artificial Sequence
  Oligonucleotide for detection of SNP TSC0057524
accaacatacaaa

SEQ ID NO: 235611 - DNA, 13 bp, Artificial Sequence
  Oligonucleotide for detection of SNP TSC0057524
tttgtacgttggt

SEQ ID NO: 235612 - DNA, 13 bp, Artificial Sequence
  Oligonucleotide for detection of SNP TSC0057524
accaacgtacaaa

SEQ ID NO: 235613 - DNA, 13 bp, Artificial Sequence
  Oligonucleotide for detection of SNP TSC0057525
tgggttgggagay

SEQ ID NO: 235614 - DNA, 13 bp, Artificial Sequence
  Oligonucleotide for detection of SNP TSC0057525
rtctcccaaccca

SEQ ID NO: 235615 - DNA, 13 bp, Artificial Sequence
  Oligonucleotide for detection of SNP TSC0057525
tgggttaggagay

SEQ ID NO: 235616 - DNA, 13 bp, Artificial Sequence
  Oligonucleotide for detection of SNP TSC0057525
rtctcctaaccca

SEQ ID NO: 235617 - DNA, 13 bp, Artificial Sequence
  Oligonucleotide for detection of SNP TSC0057525
tgggtcgggagay

SEQ ID NO: 235618 - DNA, 13 bp, Artificial Sequence
  Oligonucleotide for detection of SNP TSC0057525
rtctcccgaccca

SEQ ID NO: 235619 - DNA, 13 bp, Artificial Sequence
  Oligonucleotide for detection of SNP TSC0057526
tagatgatgagtt

SEQ ID NO: 235620 - DNA, 13 bp, Artificial Sequence
  Oligonucleotide for detection of SNP TSC0057526
aactcatcatcta

SEQ ID NO: 235621 - DNA, 13 bp, Artificial Sequence
  Oligonucleotide for detection of SNP TSC0057526
tagatgttgagtt

SEQ ID NO: 235622 - DNA, 13 bp, Artificial Sequence
  Oligonucleotide for detection of SNP TSC0057526
aactcaacatcta

SEQ ID NO: 235623 - DNA, 13 bp, Artificial Sequence
  Oligonucleotide for detection of SNP TSC0057526
tagacgatgagtt

SEQ ID NO: 235624 - DNA, 13 bp, Artificial Sequence
  Oligonucleotide for detection of SNP TSC0057526
aactcatcgtcta

SEQ ID NO: 235625 - DNA, 13 bp, Artificial Sequence
  Oligonucleotide for detection of SNP TSC0057526
tagacgttgagtt

SEQ ID NO: 235626 - DNA, 13 bp, Artificial Sequence
  Oligonucleotide for detection of SNP TSC0057526
aactcaacgtcta

SEQ ID NO: 235627 - DNA, 13 bp, Artificial Sequence
  Oligonucleotide for detection of SNP TSC0057526
aatttatcgttta

SEQ ID NO: 235628 - DNA, 13 bp, Artificial Sequence
  Oligonucleotide for detection of SNP TSC0057526
taaacgataaatt

SEQ ID NO: 235629 - DNA, 13 bp, Artificial Sequence
  Oligonucleotide for detection of SNP TSC0057526
aatttagcgttta

SEQ ID NO: 235630 - DNA, 13 bp, Artificial Sequence
  Oligonucleotide for detection of SNP TSC0057526
taaacgctaaatt

SEQ ID NO: 235631 - DNA, 13 bp, Artificial Sequence
  Oligonucleotide for detection of SNP TSC0057527
aggtattggttag

SEQ ID NO: 235632 - DNA, 13 bp, Artificial Sequence
  Oligonucleotide for detection of SNP TSC0057527
ctaaccaatacct

SEQ ID NO: 235633 - DNA, 13 bp, Artificial Sequence
  Oligonucleotide for detection of SNP TSC0057527
aggtatcggttag

SEQ ID NO: 235634 - DNA, 13 bp, Artificial Sequence
  Oligonucleotide for detection of SNP TSC0057527
ctaaccgatacct

SEQ ID NO: 235635 - DNA, 13 bp, Artificial Sequence
  Oligonucleotide for detection of SNP TSC0057527
ttgattgatgttt

SEQ ID NO: 235636 - DNA, 13 bp, Artificial Sequence
  Oligonucleotide for detection of SNP TSC0057527
aaacatcaatcaa

SEQ ID NO: 235637 - DNA, 13 bp, Artificial Sequence
  Oligonucleotide for detection of SNP TSC0057527
ttgattaatgttt

SEQ ID NO: 235638 - DNA, 13 bp, Artificial Sequence
  Oligonucleotide for detection of SNP TSC0057527
aaacattaatcaa

SEQ ID NO: 235639 - DNA, 13 bp, Artificial Sequence
  Oligonucleotide for detection of SNP TSC0057527
ttgatcgatgttt

SEQ ID NO: 235640 - DNA, 13 bp, Artificial Sequence
  Oligonucleotide for detection of SNP TSC0057527
aaacatcgatcaa

SEQ ID NO: 235641 - DNA, 13 bp, Artificial Sequence
  Oligonucleotide for detection of SNP TSC0057529
gtaatagtttaty

SEQ ID NO: 235642 - DNA, 13 bp, Artificial Sequence
  Oligonucleotide for detection of SNP TSC0057529
rataaactattac

SEQ ID NO: 235643 - DNA, 13 bp, Artificial Sequence
  Oligonucleotide for detection of SNP TSC0057529
gtaataatttaty

SEQ ID NO: 235644 - DNA, 13 bp, Artificial Sequence
  Oligonucleotide for detection of SNP TSC0057529
rataaattattac

SEQ ID NO: 235645 - DNA, 13 bp, Artificial Sequence
  Oligonucleotide for detection of SNP TSC0057533
ttaggtaaagaat

SEQ ID NO: 235646 - DNA, 13 bp, Artificial Sequence
  Oligonucleotide for detection of SNP TSC0057533
attctttacctaa

SEQ ID NO: 235647 - DNA, 13 bp, Artificial Sequence
  Oligonucleotide for detection of SNP TSC0057533
ttaggtgaagaat

SEQ ID NO: 235648 - DNA, 13 bp, Artificial Sequence
  Oligonucleotide for detection of SNP TSC0057533
attcttcacctaa

SEQ ID NO: 235649 - DNA, 13 bp, Artificial Sequence
  Oligonucleotide for detection of SNP TSC0057535
tttattattgata

SEQ ID NO: 235650 - DNA, 13 bp, Artificial Sequence
  Oligonucleotide for detection of SNP TSC0057535
tatcaataataaa

SEQ ID NO: 235651 - DNA, 13 bp, Artificial Sequence
  Oligonucleotide for detection of SNP TSC0057535
tattaataatagg

SEQ ID NO: 235652 - DNA, 13 bp, Artificial Sequence
  Oligonucleotide for detection of SNP TSC0057535
cctattattaata

SEQ ID NO: 235653 - DNA, 13 bp, Artificial Sequence
  Oligonucleotide for detection of SNP TSC0057535
tattaaaaatagg

SEQ ID NO: 235654 - DNA, 13 bp, Artificial Sequence
  Oligonucleotide for detection of SNP TSC0057535
cctatttttaata

SEQ ID NO: 235655 - DNA, 13 bp, Artificial Sequence
  Oligonucleotide for detection of SNP TSC0057537
gtagttatagaaa

SEQ ID NO: 235656 - DNA, 13 bp, Artificial Sequence
  Oligonucleotide for detection of SNP TSC0057537
tttctataactac

SEQ ID NO: 235657 - DNA, 13 bp, Artificial Sequence
  Oligonucleotide for detection of SNP TSC0057537
gtagttgtagaaa

SEQ ID NO: 235658 - DNA, 13 bp, Artificial Sequence
  Oligonucleotide for detection of SNP TSC0057537
tttctacaactac

SEQ ID NO: 235659 - DNA, 13 bp, Artificial Sequence
  Oligonucleotide for detection of SNP TSC0057538
taggtaggggagy

SEQ ID NO: 235660 - DNA, 13 bp, Artificial Sequence
  Oligonucleotide for detection of SNP TSC0057538
rctcccctaccta

SEQ ID NO: 235661 - DNA, 13 bp, Artificial Sequence
  Oligonucleotide for detection of SNP TSC0057538
taggtaagggagy

SEQ ID NO: 235662 - DNA, 13 bp, Artificial Sequence
  Oligonucleotide for detection of SNP TSC0057538
rctcccttaccta

SEQ ID NO: 235663 - DNA, 13 bp, Artificial Sequence
  Oligonucleotide for detection of SNP TSC0057539
ttgtttagagtat

SEQ ID NO: 235664 - DNA, 13 bp, Artificial Sequence
  Oligonucleotide for detection of SNP TSC0057539
atactctaaacaa

SEQ ID NO: 235665 - DNA, 13 bp, Artificial Sequence
  Oligonucleotide for detection of SNP TSC0057539
ttgtttggagtat

SEQ ID NO: 235666 - DNA, 13 bp, Artificial Sequence
  Oligonucleotide for detection of SNP TSC0057539
atactccaaacaa

SEQ ID NO: 235667 - DNA, 13 bp, Artificial Sequence
  Oligonucleotide for detection of SNP TSC0057541
ggtttagggatag

SEQ ID NO: 235668 - DNA, 13 bp, Artificial Sequence
  Oligonucleotide for detection of SNP TSC0057541
ctatccctaaacc

SEQ ID NO: 235669 - DNA, 13 bp, Artificial Sequence
  Oligonucleotide for detection of SNP TSC0057541
ggtttaaggatag

SEQ ID NO: 235670 - DNA, 13 bp, Artificial Sequence
  Oligonucleotide for detection of SNP TSC0057541
ctatccttaaacc

SEQ ID NO: 235671 - DNA, 13 bp, Artificial Sequence
  Oligonucleotide for detection of SNP TSC0057542
ttattatttatta

SEQ ID NO: 235672 - DNA, 13 bp, Artificial Sequence
  Oligonucleotide for detection of SNP TSC0057542
taataaataataa

SEQ ID NO: 235673 - DNA, 13 bp, Artificial Sequence
  Oligonucleotide for detection of SNP TSC0057542
tagtaaatagtaa

SEQ ID NO: 235674 - DNA, 13 bp, Artificial Sequence
  Oligonucleotide for detection of SNP TSC0057542
ttactatttacta

SEQ ID NO: 235675 - DNA, 13 bp, Artificial Sequence
  Oligonucleotide for detection of SNP TSC0057542
tagtaattagtaa

SEQ ID NO: 235676 - DNA, 13 bp, Artificial Sequence
  Oligonucleotide for detection of SNP TSC0057542
ttactaattacta

SEQ ID NO: 235677 - DNA, 13 bp, Artificial Sequence
  Oligonucleotide for detection of SNP TSC0004763
agaaagtgagaga

SEQ ID NO: 235678 - DNA, 13 bp, Artificial Sequence
  Oligonucleotide for detection of SNP TSC0004763
tctctcactttct

SEQ ID NO: 235679 - DNA, 13 bp, Artificial Sequence
  Oligonucleotide for detection of SNP TSC0004763
agaaagcgagaga

SEQ ID NO: 235680 - DNA, 13 bp, Artificial Sequence
  Oligonucleotide for detection of SNP TSC0004763
tctctcgctttct

SEQ ID NO: 235681 - DNA, 13 bp, Artificial Sequence
  Oligonucleotide for detection of SNP TSC0057550
ttttaggaagtaa

SEQ ID NO: 235682 - DNA, 13 bp, Artificial Sequence
  Oligonucleotide for detection of SNP TSC0057550
ttacttcctaaaa

SEQ ID NO: 235683 - DNA, 13 bp, Artificial Sequence
  Oligonucleotide for detection of SNP TSC0057550
ttttagaaagtaa

SEQ ID NO: 235684 - DNA, 13 bp, Artificial Sequence
  Oligonucleotide for detection of SNP TSC0057550
ttactttctaaaa

SEQ ID NO: 235685 - DNA, 13 bp, Artificial Sequence
  Oligonucleotide for detection of SNP TSC0057552
tttttagagttay

SEQ ID NO: 235686 - DNA, 13 bp, Artificial Sequence
  Oligonucleotide for detection of SNP TSC0057552
rtaactctaaaaa

SEQ ID NO: 235687 - DNA, 13 bp, Artificial Sequence
  Oligonucleotide for detection of SNP TSC0057552
tttttaaagttay

SEQ ID NO: 235688 - DNA, 13 bp, Artificial Sequence
  Oligonucleotide for detection of SNP TSC0057552
rtaactttaaaaa

SEQ ID NO: 235689 - DNA, 13 bp, Artificial Sequence
  Oligonucleotide for detection of SNP TSC0057553
ttaaaaaatgtgy

SEQ ID NO: 235690 - DNA, 13 bp, Artificial Sequence
  Oligonucleotide for detection of SNP TSC0057553
rcacattttttaa

SEQ ID NO: 235691 - DNA, 13 bp, Artificial Sequence
  Oligonucleotide for detection of SNP TSC0057553
ttaaaagatgcgy

SEQ ID NO: 235692 - DNA, 13 bp, Artificial Sequence
  Oligonucleotide for detection of SNP TSC0057553
rcgcatcttttaa

SEQ ID NO: 235693 - DNA, 13 bp, Artificial Sequence
  Oligonucleotide for detection of SNP TSC0057553
ttaaaaaatgcgy

SEQ ID NO: 235694 - DNA, 13 bp, Artificial Sequence
  Oligonucleotide for detection of SNP TSC0057553
rcgcattttttaa

SEQ ID NO: 235695 - DNA, 13 bp, Artificial Sequence
  Oligonucleotide for detection of SNP TSC0057554
gtgggtgtaattt

SEQ ID NO: 235696 - DNA, 13 bp, Artificial Sequence
  Oligonucleotide for detection of SNP TSC0057554
aaattacacccac

SEQ ID NO: 235697 - DNA, 13 bp, Artificial Sequence
  Oligonucleotide for detection of SNP TSC0057554
gtgggtataattt

SEQ ID NO: 235698 - DNA, 13 bp, Artificial Sequence
  Oligonucleotide for detection of SNP TSC0057554
aaattatacccac

SEQ ID NO: 235699 - DNA, 13 bp, Artificial Sequence
  Oligonucleotide for detection of SNP TSC0057554
gtgggcgtaattt

SEQ ID NO: 235700 - DNA, 13 bp, Artificial Sequence
  Oligonucleotide for detection of SNP TSC0057554
aaattacgcccac

SEQ ID NO: 235701 - DNA, 13 bp, Artificial Sequence
  Oligonucleotide for detection of SNP TSC0057557
ttgataagtgttg

SEQ ID NO: 235702 - DNA, 13 bp, Artificial Sequence
  Oligonucleotide for detection of SNP TSC0057557
caacacttatcaa

SEQ ID NO: 235703 - DNA, 13 bp, Artificial Sequence
  Oligonucleotide for detection of SNP TSC0057557
ttgatatgtgttg

SEQ ID NO: 235704 - DNA, 13 bp, Artificial Sequence
  Oligonucleotide for detection of SNP TSC0057557
caacacatatcaa

SEQ ID NO: 235705 - DNA, 13 bp, Artificial Sequence
  Oligonucleotide for detection of SNP TSC0057557
ttgataagcgttg

SEQ ID NO: 235706 - DNA, 13 bp, Artificial Sequence
  Oligonucleotide for detection of SNP TSC0057557
caacgcttatcaa

SEQ ID NO: 235707 - DNA, 13 bp, Artificial Sequence
  Oligonucleotide for detection of SNP TSC0057557
ttgatacgtgttg

SEQ ID NO: 235708 - DNA, 13 bp, Artificial Sequence
  Oligonucleotide for detection of SNP TSC0057557
caacacgtatcaa

SEQ ID NO: 235709 - DNA, 13 bp, Artificial Sequence
  Oligonucleotide for detection of SNP TSC0057557
ttgatatgcgttg

SEQ ID NO: 235710 - DNA, 13 bp, Artificial Sequence
  Oligonucleotide for detection of SNP TSC0057557
caacgcatatcaa

SEQ ID NO: 235711 - DNA, 13 bp, Artificial Sequence
  Oligonucleotide for detection of SNP TSC0057557
ttgatacgcgttg

SEQ ID NO: 235712 - DNA, 13 bp, Artificial Sequence
  Oligonucleotide for detection of SNP TSC0057557
caacgcgtatcaa

SEQ ID NO: 235713 - DNA, 13 bp, Artificial Sequence
  Oligonucleotide for detection of SNP TSC0057557
tagtgtttattag

SEQ ID NO: 235714 - DNA, 13 bp, Artificial Sequence
  Oligonucleotide for detection of SNP TSC0057557
ctaataaacacta

SEQ ID NO: 235715 - DNA, 13 bp, Artificial Sequence
  Oligonucleotide for detection of SNP TSC0057557
tagtgtgtattag

SEQ ID NO: 235716 - DNA, 13 bp, Artificial Sequence
  Oligonucleotide for detection of SNP TSC0057557
ctaatacacacta

SEQ ID NO: 235717 - DNA, 13 bp, Artificial Sequence
  Oligonucleotide for detection of SNP TSC0057557
tagcgtttattag

SEQ ID NO: 235718 - DNA, 13 bp, Artificial Sequence
  Oligonucleotide for detection of SNP TSC0057557
ctaataaacgcta

SEQ ID NO: 235719 - DNA, 13 bp, Artificial Sequence
  Oligonucleotide for detection of SNP TSC0057557
tagcgtgtattag

SEQ ID NO: 235720 - DNA, 13 bp, Artificial Sequence
  Oligonucleotide for detection of SNP TSC0057557
ctaatacacgcta

SEQ ID NO: 235721 - DNA, 13 bp, Artificial Sequence
  Oligonucleotide for detection of SNP TSC0057557
tagtgcgtattag

SEQ ID NO: 235722 - DNA, 13 bp, Artificial Sequence
  Oligonucleotide for detection of SNP TSC0057557
ctaatacgcacta

SEQ ID NO: 235723 - DNA, 13 bp, Artificial Sequence
  Oligonucleotide for detection of SNP TSC0057557
tagcgcgtattag

SEQ ID NO: 235724 - DNA, 13 bp, Artificial Sequence
  Oligonucleotide for detection of SNP TSC0057557
ctaatacgcgcta

SEQ ID NO: 235725 - DNA, 13 bp, Artificial Sequence
  Oligonucleotide for detection of SNP TSC0057558
taagtggaattat

SEQ ID NO: 235726 - DNA, 13 bp, Artificial Sequence
  Oligonucleotide for detection of SNP TSC0057558
ataattccactta

SEQ ID NO: 235727 - DNA, 13 bp, Artificial Sequence
  Oligonucleotide for detection of SNP TSC0057558
taagtgtaattat

SEQ ID NO: 235728 - DNA, 13 bp, Artificial Sequence
  Oligonucleotide for detection of SNP TSC0057558
ataattacactta

SEQ ID NO: 235729 - DNA, 13 bp, Artificial Sequence
  Oligonucleotide for detection of SNP TSC0057560
atacgtattgtag

SEQ ID NO: 235730 - DNA, 13 bp, Artificial Sequence
  Oligonucleotide for detection of SNP TSC0057560
ctacaatacgtat

SEQ ID NO: 235731 - DNA, 13 bp, Artificial Sequence
  Oligonucleotide for detection of SNP TSC0057560
atacgtgttgtag

SEQ ID NO: 235732 - DNA, 13 bp, Artificial Sequence
  Oligonucleotide for detection of SNP TSC0057560
ctacaacacgtat

SEQ ID NO: 235733 - DNA, 13 bp, Artificial Sequence
  Oligonucleotide for detection of SNP TSC0057560
atatgcgttgtag

SEQ ID NO: 235734 - DNA, 13 bp, Artificial Sequence
  Oligonucleotide for detection of SNP TSC0057560
ctacaacgcatat

SEQ ID NO: 235735 - DNA, 13 bp, Artificial Sequence
  Oligonucleotide for detection of SNP TSC0057560
atacgcgttgtag

SEQ ID NO: 235736 - DNA, 13 bp, Artificial Sequence
  Oligonucleotide for detection of SNP TSC0057560
ctacaacgcgtat

SEQ ID NO: 235737 - DNA, 13 bp, Artificial Sequence
  Oligonucleotide for detection of SNP TSC0057560
ttgtagtgtgtat

SEQ ID NO: 235738 - DNA, 13 bp, Artificial Sequence
  Oligonucleotide for detection of SNP TSC0057560
atacacactacaa

SEQ ID NO: 235739 - DNA, 13 bp, Artificial Sequence
  Oligonucleotide for detection of SNP TSC0057560
ttgtagtgcgtat

SEQ ID NO: 235740 - DNA, 13 bp, Artificial Sequence
  Oligonucleotide for detection of SNP TSC0057560
atacgcactacaa

SEQ ID NO: 235741 - DNA, 13 bp, Artificial Sequence
  Oligonucleotide for detection of SNP TSC0057560
ttgtagcgtgtat

SEQ ID NO: 235742 - DNA, 13 bp, Artificial Sequence
  Oligonucleotide for detection of SNP TSC0057560
atacacgctacaa

SEQ ID NO: 235743 - DNA, 13 bp, Artificial Sequence
  Oligonucleotide for detection of SNP TSC0057560
ttgtagcgcgtat

SEQ ID NO: 235744 - DNA, 13 bp, Artificial Sequence
  Oligonucleotide for detection of SNP TSC0057560
atacgcgctacaa

SEQ ID NO: 235745 - DNA, 13 bp, Artificial Sequence
  Oligonucleotide for detection of SNP TSC0057561
tttatatagatag

SEQ ID NO: 235746 - DNA, 13 bp, Artificial Sequence
  Oligonucleotide for detection of SNP TSC0057561
ctatctatataaa

SEQ ID NO: 235747 - DNA, 13 bp, Artificial Sequence
  Oligonucleotide for detection of SNP TSC0057561
tttatagagatag

SEQ ID NO: 235748 - DNA, 13 bp, Artificial Sequence
  Oligonucleotide for detection of SNP TSC0057561
ctatctctataaa

SEQ ID NO: 235749 - DNA, 13 bp, Artificial Sequence
  Oligonucleotide for detection of SNP TSC0057561
ttatttatatgga

SEQ ID NO: 235750 - DNA, 13 bp, Artificial Sequence
  Oligonucleotide for detection of SNP TSC0057561
tccatataaataa

SEQ ID NO: 235751 - DNA, 13 bp, Artificial Sequence
  Oligonucleotide for detection of SNP TSC0057561
ttatttttatgga

SEQ ID NO: 235752 - DNA, 13 bp, Artificial Sequence
  Oligonucleotide for detection of SNP TSC0057561
tccataaaaataa

SEQ ID NO: 235753 - DNA, 13 bp, Artificial Sequence
  Oligonucleotide for detection of SNP TSC0057565
agaaagaaagaga

SEQ ID NO: 235754 - DNA, 13 bp, Artificial Sequence
  Oligonucleotide for detection of SNP TSC0057565
tctctttctttct

SEQ ID NO: 235755 - DNA, 13 bp, Artificial Sequence
  Oligonucleotide for detection of SNP TSC0057565
agaaaggaagaga

SEQ ID NO: 235756 - DNA, 13 bp, Artificial Sequence
  Oligonucleotide for detection of SNP TSC0057565
tctcttcctttct

SEQ ID NO: 235757 - DNA, 13 bp, Artificial Sequence
  Oligonucleotide for detection of SNP TSC0057566
atttaaaaagaat

SEQ ID NO: 235758 - DNA, 13 bp, Artificial Sequence
  Oligonucleotide for detection of SNP TSC0057566
attctttttaaat

SEQ ID NO: 235759 - DNA, 13 bp, Artificial Sequence
  Oligonucleotide for detection of SNP TSC0057566
atttaagaagaat

SEQ ID NO: 235760 - DNA, 13 bp, Artificial Sequence
  Oligonucleotide for detection of SNP TSC0057566
attcttcttaaat

SEQ ID NO: 235761 - DNA, 13 bp, Artificial Sequence
  Oligonucleotide for detection of SNP TSC0006260
gataatgtgatat

SEQ ID NO: 235762 - DNA, 13 bp, Artificial Sequence
  Oligonucleotide for detection of SNP TSC0006260
atatcacattatc

SEQ ID NO: 235763 - DNA, 13 bp, Artificial Sequence
  Oligonucleotide for detection of SNP TSC0006260
gataatatgatat

SEQ ID NO: 235764 - DNA, 13 bp, Artificial Sequence
  Oligonucleotide for detection of SNP TSC0006260
atatcatattatc

SEQ ID NO: 235765 - DNA, 13 bp, Artificial Sequence
  Oligonucleotide for detection of SNP TSC0006260
gataacgtgatat

SEQ ID NO: 235766 - DNA, 13 bp, Artificial Sequence
  Oligonucleotide for detection of SNP TSC0006260
atatcacgttatc

SEQ ID NO: 235767 - DNA, 13 bp, Artificial Sequence
  Oligonucleotide for detection of SNP TSC0009202
tgtaatatttgtt

SEQ ID NO: 235768 - DNA, 13 bp, Artificial Sequence
  Oligonucleotide for detection of SNP TSC0009202
aacaaatattaca

SEQ ID NO: 235769 - DNA, 13 bp, Artificial Sequence
  Oligonucleotide for detection of SNP TSC0009202
tgtaatttttgtt

SEQ ID NO: 235770 - DNA, 13 bp, Artificial Sequence
  Oligonucleotide for detection of SNP TSC0009202
aacaaaaattaca

SEQ ID NO: 235771 - DNA, 13 bp, Artificial Sequence
  Oligonucleotide for detection of SNP TSC0009202
tgtaatgtttgtt

SEQ ID NO: 235772 - DNA, 13 bp, Artificial Sequence
  Oligonucleotide for detection of SNP TSC0009202
aacaaacattaca

SEQ ID NO: 235773 - DNA, 13 bp, Artificial Sequence
  Oligonucleotide for detection of SNP TSC0009202
tgtaatattcgtt

SEQ ID NO: 235774 - DNA, 13 bp, Artificial Sequence
  Oligonucleotide for detection of SNP TSC0009202
aacgaatattaca

SEQ ID NO: 235775 - DNA, 13 bp, Artificial Sequence
  Oligonucleotide for detection of SNP TSC0009202
tgtaattttcgtt

SEQ ID NO: 235776 - DNA, 13 bp, Artificial Sequence
  Oligonucleotide for detection of SNP TSC0009202
aacgaaaattaca

SEQ ID NO: 235777 - DNA, 13 bp, Artificial Sequence
  Oligonucleotide for detection of SNP TSC0009202
tgtaacgtttgtt

SEQ ID NO: 235778 - DNA, 13 bp, Artificial Sequence
  Oligonucleotide for detection of SNP TSC0009202
aacaaacgttaca

SEQ ID NO: 235779 - DNA, 13 bp, Artificial Sequence
  Oligonucleotide for detection of SNP TSC0009202
tgtaatgttcgtt

SEQ ID NO: 235780 - DNA, 13 bp, Artificial Sequence
  Oligonucleotide for detection of SNP TSC0009202
aacgaacattaca

SEQ ID NO: 235781 - DNA, 13 bp, Artificial Sequence
  Oligonucleotide for detection of SNP TSC0009202
tgtaacgttcgtt

SEQ ID NO: 235782 - DNA, 13 bp, Artificial Sequence
  Oligonucleotide for detection of SNP TSC0009202
aacgaacgttaca

SEQ ID NO: 235783 - DNA, 13 bp, Artificial Sequence
  Oligonucleotide for detection of SNP TSC0009202
agtggatgttgta

SEQ ID NO: 235784 - DNA, 13 bp, Artificial Sequence
  Oligonucleotide for detection of SNP TSC0009202
tacaacatccact

SEQ ID NO: 235785 - DNA, 13 bp, Artificial Sequence
  Oligonucleotide for detection of SNP TSC0009202
agtggaggttgta

SEQ ID NO: 235786 - DNA, 13 bp, Artificial Sequence
  Oligonucleotide for detection of SNP TSC0009202
tacaacctccact

SEQ ID NO: 235787 - DNA, 13 bp, Artificial Sequence
  Oligonucleotide for detection of SNP TSC0009202
agtggaagttgta

SEQ ID NO: 235788 - DNA, 13 bp, Artificial Sequence
  Oligonucleotide for detection of SNP TSC0009202
tacaacttccact

SEQ ID NO: 235789 - DNA, 13 bp, Artificial Sequence
  Oligonucleotide for detection of SNP TSC0009202
agcggatgttgta

SEQ ID NO: 235790 - DNA, 13 bp, Artificial Sequence
  Oligonucleotide for detection of SNP TSC0009202
tacaacatccgct

SEQ ID NO: 235791 - DNA, 13 bp, Artificial Sequence
  Oligonucleotide for detection of SNP TSC0009202
agcggaggttgta

SEQ ID NO: 235792 - DNA, 13 bp, Artificial Sequence
  Oligonucleotide for detection of SNP TSC0009202
tacaacctccgct

SEQ ID NO: 235793 - DNA, 13 bp, Artificial Sequence
  Oligonucleotide for detection of SNP TSC0009202
agcggaagttgta

SEQ ID NO: 235794 - DNA, 13 bp, Artificial Sequence
  Oligonucleotide for detection of SNP TSC0009202
tacaacttccgct

SEQ ID NO: 235795 - DNA, 13 bp, Artificial Sequence
  Oligonucleotide for detection of SNP TSC0009202
agtggacgttgta

SEQ ID NO: 235796 - DNA, 13 bp, Artificial Sequence
  Oligonucleotide for detection of SNP TSC0009202
tacaacgtccact

SEQ ID NO: 235797 - DNA, 13 bp, Artificial Sequence
  Oligonucleotide for detection of SNP TSC0009202
agcggacgttgta

SEQ ID NO: 235798 - DNA, 13 bp, Artificial Sequence
  Oligonucleotide for detection of SNP TSC0009202
tacaacgtccgct

SEQ ID NO: 235799 - DNA, 13 bp, Artificial Sequence
  Oligonucleotide for detection of SNP TSC0009203
tttaaggagttgg

SEQ ID NO: 235800 - DNA, 13 bp, Artificial Sequence
  Oligonucleotide for detection of SNP TSC0009203
ccaactccttaaa

SEQ ID NO: 235801 - DNA, 13 bp, Artificial Sequence
  Oligonucleotide for detection of SNP TSC0057569
agattttgaatta

SEQ ID NO: 235802 - DNA, 13 bp, Artificial Sequence
  Oligonucleotide for detection of SNP TSC0057569
taattcaaaatct

SEQ ID NO: 235803 - DNA, 13 bp, Artificial Sequence
  Oligonucleotide for detection of SNP TSC0057570
gggtttattggat

SEQ ID NO: 235804 - DNA, 13 bp, Artificial Sequence
  Oligonucleotide for detection of SNP TSC0057570
atccaataaaccc

SEQ ID NO: 235805 - DNA, 13 bp, Artificial Sequence
  Oligonucleotide for detection of SNP TSC0057570
gggttttttggat

SEQ ID NO: 235806 - DNA, 13 bp, Artificial Sequence
  Oligonucleotide for detection of SNP TSC0057570
atccaaaaaaccc

SEQ ID NO: 235807 - DNA, 13 bp, Artificial Sequence
  Oligonucleotide for detection of SNP TSC0057570
atttaatgagtty

SEQ ID NO: 235808 - DNA, 13 bp, Artificial Sequence
  Oligonucleotide for detection of SNP TSC0057570
raactcattaaat

SEQ ID NO: 235809 - DNA, 13 bp, Artificial Sequence
  Oligonucleotide for detection of SNP TSC0057570
atttaaggagtty

SEQ ID NO: 235810 - DNA, 13 bp, Artificial Sequence
  Oligonucleotide for detection of SNP TSC0057570
raactccttaaat

SEQ ID NO: 235811 - DNA, 13 bp, Artificial Sequence
  Oligonucleotide for detection of SNP TSC0057571
agtttaagaagtg

SEQ ID NO: 235812 - DNA, 13 bp, Artificial Sequence
  Oligonucleotide for detection of SNP TSC0057571
cacttcttaaact

SEQ ID NO: 235813 - DNA, 13 bp, Artificial Sequence
  Oligonucleotide for detection of SNP TSC0057571
agtttaggaagtg

SEQ ID NO: 235814 - DNA, 13 bp, Artificial Sequence
  Oligonucleotide for detection of SNP TSC0057571
cacttcctaaact

SEQ ID NO: 235815 - DNA, 13 bp, Artificial Sequence
  Oligonucleotide for detection of SNP TSC0057572
tatgtaaaagaat

SEQ ID NO: 235816 - DNA, 13 bp, Artificial Sequence
  Oligonucleotide for detection of SNP TSC0057572
attcttttacata

SEQ ID NO: 235817 - DNA, 13 bp, Artificial Sequence
  Oligonucleotide for detection of SNP TSC0057572
tatgtataagaat

SEQ ID NO: 235818 - DNA, 13 bp, Artificial Sequence
  Oligonucleotide for detection of SNP TSC0057572
attcttatacata

SEQ ID NO: 235819 - DNA, 13 bp, Artificial Sequence
  Oligonucleotide for detection of SNP TSC0057573
ttgtgagataatt

SEQ ID NO: 235820 - DNA, 13 bp, Artificial Sequence
  Oligonucleotide for detection of SNP TSC0057573
aattatctcacaa

SEQ ID NO: 235821 - DNA, 13 bp, Artificial Sequence
  Oligonucleotide for detection of SNP TSC0057573
ttgtgaaataatt

SEQ ID NO: 235822 - DNA, 13 bp, Artificial Sequence
  Oligonucleotide for detection of SNP TSC0057573
aattatttcacaa

SEQ ID NO: 235823 - DNA, 13 bp, Artificial Sequence
  Oligonucleotide for detection of SNP TSC0057574
ttttttataaatg

SEQ ID NO: 235824 - DNA, 13 bp, Artificial Sequence
  Oligonucleotide for detection of SNP TSC0057574
catttataaaaaa

SEQ ID NO: 235825 - DNA, 13 bp, Artificial Sequence
  Oligonucleotide for detection of SNP TSC0057574
ttttttataaacg

SEQ ID NO: 235826 - DNA, 13 bp, Artificial Sequence
  Oligonucleotide for detection of SNP TSC0057574
cgtttataaaaaa

SEQ ID NO: 235827 - DNA, 13 bp, Artificial Sequence
  Oligonucleotide for detection of SNP TSC0057574
ttttttgtaaacg

SEQ ID NO: 235828 - DNA, 13 bp, Artificial Sequence
  Oligonucleotide for detection of SNP TSC0057574
cgtttacaaaaaa

SEQ ID NO: 235829 - DNA, 13 bp, Artificial Sequence
  Oligonucleotide for detection of SNP TSC0057575
taaatatttagty

SEQ ID NO: 235830 - DNA, 13 bp, Artificial Sequence
  Oligonucleotide for detection of SNP TSC0057575
ractaaatattta

SEQ ID NO: 235831 - DNA, 13 bp, Artificial Sequence
  Oligonucleotide for detection of SNP TSC0057575
taaatagttagty

SEQ ID NO: 235832 - DNA, 13 bp, Artificial Sequence
  Oligonucleotide for detection of SNP TSC0057575
ractaactattta

SEQ ID NO: 235833 - DNA, 13 bp, Artificial Sequence
  Oligonucleotide for detection of SNP TSC0057575
ggttaggtgttta

SEQ ID NO: 235834 - DNA, 13 bp, Artificial Sequence
  Oligonucleotide for detection of SNP TSC0057575
taaacacctaacc

SEQ ID NO: 235835 - DNA, 13 bp, Artificial Sequence
  Oligonucleotide for detection of SNP TSC0057575
ggttagttgttta

SEQ ID NO: 235836 - DNA, 13 bp, Artificial Sequence
  Oligonucleotide for detection of SNP TSC0057575
taaacaactaacc

SEQ ID NO: 235837 - DNA, 13 bp, Artificial Sequence
  Oligonucleotide for detection of SNP TSC0057576
agaaatataagty

SEQ ID NO: 235838 - DNA, 13 bp, Artificial Sequence
  Oligonucleotide for detection of SNP TSC0057576
racttatatttct

SEQ ID NO: 235839 - DNA, 13 bp, Artificial Sequence
  Oligonucleotide for detection of SNP TSC0057576
agaaatgtaagty

SEQ ID NO: 235840 - DNA, 13 bp, Artificial Sequence
  Oligonucleotide for detection of SNP TSC0057576
racttacatttct

SEQ ID NO: 235841 - DNA, 13 bp, Artificial Sequence
  Oligonucleotide for detection of SNP TSC0057576
agaaacgtaagty

SEQ ID NO: 235842 - DNA, 13 bp, Artificial Sequence
  Oligonucleotide for detection of SNP TSC0057576
racttacgtttct

SEQ ID NO: 235843 - DNA, 13 bp, Artificial Sequence
  Oligonucleotide for detection of SNP TSC0057576
gatttatgttttt

SEQ ID NO: 235844 - DNA, 13 bp, Artificial Sequence
  Oligonucleotide for detection of SNP TSC0057576
aaaaacataaatc

SEQ ID NO: 235845 - DNA, 13 bp, Artificial Sequence
  Oligonucleotide for detection of SNP TSC0057576
gatttacgttttt

SEQ ID NO: 235846 - DNA, 13 bp, Artificial Sequence
  Oligonucleotide for detection of SNP TSC0057576
aaaaacgtaaatc

SEQ ID NO: 235847 - DNA, 13 bp, Artificial Sequence
  Oligonucleotide for detection of SNP TSC0057577
atattattttaty

SEQ ID NO: 235848 - DNA, 13 bp, Artificial Sequence
  Oligonucleotide for detection of SNP TSC0057577
rataaaataatat

SEQ ID NO: 235849 - DNA, 13 bp, Artificial Sequence
  Oligonucleotide for detection of SNP TSC0057577
atattagtttaty

SEQ ID NO: 235850 - DNA, 13 bp, Artificial Sequence
  Oligonucleotide for detection of SNP TSC0057577
rataaactaatat

SEQ ID NO: 235851 - DNA, 13 bp, Artificial Sequence
  Oligonucleotide for detection of SNP TSC0057577
ggtaagatagtgt

SEQ ID NO: 235852 - DNA, 13 bp, Artificial Sequence
  Oligonucleotide for detection of SNP TSC0057577
acactatcttacc

SEQ ID NO: 235853 - DNA, 13 bp, Artificial Sequence
  Oligonucleotide for detection of SNP TSC0057577
ggtaagttagtgt

SEQ ID NO: 235854 - DNA, 13 bp, Artificial Sequence
  Oligonucleotide for detection of SNP TSC0057577
acactaacttacc

SEQ ID NO: 235855 - DNA, 13 bp, Artificial Sequence
  Oligonucleotide for detection of SNP TSC0057580
tttagagtgttat

SEQ ID NO: 235856 - DNA, 13 bp, Artificial Sequence
  Oligonucleotide for detection of SNP TSC0057580
ataacactctaaa

SEQ ID NO: 235857 - DNA, 13 bp, Artificial Sequence
  Oligonucleotide for detection of SNP TSC0057580
tttagaatgttat

SEQ ID NO: 235858 - DNA, 13 bp, Artificial Sequence
  Oligonucleotide for detection of SNP TSC0057580
ataacattctaaa

SEQ ID NO: 235859 - DNA, 13 bp, Artificial Sequence
  Oligonucleotide for detection of SNP TSC0057581
tatgtaaatttta

SEQ ID NO: 235860 - DNA, 13 bp, Artificial Sequence
  Oligonucleotide for detection of SNP TSC0057581
taaaatttacata

SEQ ID NO: 235861 - DNA, 13 bp, Artificial Sequence
  Oligonucleotide for detection of SNP TSC0057581
tatgtagatttta

SEQ ID NO: 235862 - DNA, 13 bp, Artificial Sequence
  Oligonucleotide for detection of SNP TSC0057581
taaaatctacata

SEQ ID NO: 235863 - DNA, 13 bp, Artificial Sequence
  Oligonucleotide for detection of SNP TSC0057582
ttgattatagttt

SEQ ID NO: 235864 - DNA, 13 bp, Artificial Sequence
  Oligonucleotide for detection of SNP TSC0057582
aaactataatcaa

SEQ ID NO: 235865 - DNA, 13 bp, Artificial Sequence
  Oligonucleotide for detection of SNP TSC0057582
aaattgtaattaa
